United States Patent Application Publication US 2011/0183924 A1 - sequence listing, part 294

SEQ ID NO: 972604 - protein, 191 aa, Homo sapiens
  misc_feature (7)..(7): Xaa can be any naturally occurring amino acid
GVEKPSXARALFCGGEPFKARGPGVIPPRAPRLFPPPLVVAKALPEWCDFSERLRQLRLCPQAPGCSPRPAEFLAVVAPRAPLGAVYPTPDEFLVCASNKGGESFKGPLHGEIKPSLPRPRLSTGQTSACFPIHNEPPWTWLSPELCGERVIFFENSGENLTGWYDKQFCWVLGRLLGSSRLESTRNMSKG

SEQ ID NO: 972605 - protein, 148 aa, Homo sapiens
MPDAPKHVNINNGVFQIKLLWSYNTSFSILPKISRSPPPFHCWRLPNGSPFSPGIFCHAPPPFCRPPIAPLKSTGDSPPPCLFFRRRIILGAHKMLSRGLHSHRSPSQHSVAPPQRLPRFLLVQRFNKALTPFHFEPRARRVSPNYHT

SEQ ID NO: 972606 - protein, 76 aa, Homo sapiens
MSFLQRLDTLFNNVLSTYQRKYSFHDKQVVSLNPLLVLVNEDTLISSLALSPSDDGRPTFPHLSKKKFLSKLPNID

SEQ ID NO: 972607 - protein, 133 aa, Homo sapiens
  misc_feature (103)..(103): Xaa can be any naturally occurring amino acid
MALPALDVRVISLRTNPRAMAAYVCTTHAGEVSLLERAGGVYSLSTAGVCFPPDCGGVHTTECRSLPLGGGTFLTRVPPSTRRVSRRVLVFGYWRWYLRLVDXFLCCVAEESDERAGLSCVFVPHKELTTEET

SEQ ID NO: 972608 - protein, 296 aa, Homo sapiens
MVHSPFDPVGDGLPRAVDVSGLKEPTRRVALWLGDLFPQDVMVPAGVVPVKYLGRGFPHALRSCFLPLIDHRGFPRALVSPRYIHSRAHIAQLFIGSRTSIYRSHARWPPGPGLLLRALTLCFMWPTMQSAVVTPLSVGRPRAPPPRVVHSLSCPPQSPACIKIHAVAPLSRSLAVRCARPVSSRSGSCARTYVLLDRPSWCLGPPRYYEGESMRTLRASSSVGRSSFATGFLFGSPLPAPVRPFGGQPKLAERSLSRGILSVAGVGRDVDRPSRKWAVLPITIHALGLTISNQQN

SEQ ID NO: 972609 - protein, 74 aa, Homo sapiens
MWPDCRNHKGLCSPSGSHPGGHYPDVSPMYAHHSIAAMWWRRTDSAPSLALYVDPCGPPTMIIGRAPPVLPHMT

SEQ ID NO: 972610 - protein, 162 aa, Homo sapiens
MLLCISSYTYTYRVSFVHARVPCRGRTHTRAHHFRVPTLVRKLSRRLGGAGTPPRGSSSSRLYTVQLRSSWPTHTRGGRTLRVSCIPHTPLPLCRAPFVQGSSPTSSHASSRQARRGTERSQRCTPVGAPSPPRTPGIQSCIDTFDSGVSKMFPPLCPINDT

SEQ ID NO: 972611 - protein, 116 aa, Homo sapiens
  misc_feature (101)..(101): Xaa can be any naturally occurring amino acid
GLSSPFGVVADPHPLAIPPHRRFAHGTQAAEDDSPCGAPHGVSEGPPTRWWGTPTLGRHFFAFYLFSLIYGQTVRRVLLCRRLFFFAINTLGLCVEVGFKXVNTASPIFSLPTCRT

SEQ ID NO: 972612 - protein, 254 aa, Homo sapiens
NILVVSLLHPSWRHCPECGSPSHTSRWEVVPLCPAPSCCPRQRILSLGATHRQCVLALWCLAQNITPRCVVFGDDQHVLSEMALVHNGVRPLSSSMGALTSLPSRVVPSPTSGLPPLRERFDNLPPVCDPPLLVYYKSNSHISPKKHLRSPICNPTSSTTTPSPPFAHMFFPAVYLPLILCIIRSPQPVSAVVTLVRPCRILLEHRTSLMRGSLTLRLAAQPPSRRRKSVCLVRRRLRSALNSTTSITLYEATI

SEQ ID NO: 972613 - protein, 139 aa, Homo sapiens
ARVCVPLRREGFFSGPHRVGPQSRAYPRFSCAPPAAVPLYKTLVGDVCSISVSPPAVQVSVFSAPHGVLAWLAGADFCPRVSPKWALWAAVWVQKYPSGGLGSHSGAPTGVKYVLLVDLLLPPYGPSPCGPPPSGPTRL

SEQ ID NO: 972614 - protein, 139 aa, Homo sapiens
MTTWGVHYAKWAVPSVGTPRPLVRGGAHESVPATIPASFVPAPLLARFCPHNLLQASPRSSFCSACPFPPYLWGALFAARRLFQQSPLSSLLPPPNAFSPATPCVSPRPYFRLPWLSRKLSCPPFRVSLRTSRTPFPRS

SEQ ID NO: 972615 - protein, 309 aa, Homo sapiens
ARLVLKPPSPLCVARGDYLSVGRLSGDVLLPPGVALFGVIYGDFGEFSLGPVFQIVCAPPDTCIASSVWGPTARRCSSNDIGLCDDPTMGRAKRFFSPPPAAGDRGDPTFRHRPPCSGCPQKALRCPTKGALSGPSPAAVLGIKRVLFSRPLSGGRSHCDTRSCRGNAISGKNLVSVIGRRSCTSCCHGRFSSCERAVSCCPLSAVNKGTMFVSHNTGKGTRVNLLFSGADYKMFFYSHVCALSAPYEWFPLDHPVLLDNTQTRSPLIYNSSSAKILRISTRGCIVLLIIRRLRMLPLCPKTTTAAHKT

SEQ ID NO: 972616 - protein, 81 aa, Homo sapiens
IYDDDRISSPRRLVRDIDTIYYIVLYTRDSTRAHTILCSLYIARSLYDKRRDEDNILIPHVVVYQSAAAHYYNFLCVFVST

SEQ ID NO: 972617 - protein, 254 aa, Homo sapiens
FAPFSSGLRPLLGQCGRLSPGGIVLGLLFGPRASSFLWGPGPLLVQKGGAPDCVEFRVALPYCTRVCGRILYISWPLGEFPLRPPVRGAHLEVPPEFVLANVQVLSSAPPWGGTLMRECGAPPDGVSTAGRPTDGLVFHVLPHPACFMWHASPPVLSSSGRRHTQASLRGTFEMPPSRDVFVFSPAARCAVATKSSPSRVCEGSTHIPHLMTTSEWTSFWNNMHAHLTNGHIAAPPDTLVASNPAASFVDPIGN

SEQ ID NO: 972618 - protein, 176 aa, Homo sapiens
GSITNVSRESCGTLVGAHVGPPGTRGVPVPGCSRSRPSPTCARLSRRYGGCPRRFTFASTDCVVYVFQEKSLFPLFWFKTRVDAGAQLFKSLLRAAVATWSGNRSPDEDPRSVCETFSTQAAPTSMEAATVRSLRYNTTNTMPRGEVPSNRHPWATNGWIGAQAKWPLLRPPSAFV

SEQ ID NO: 972619 - protein, 187 aa, Homo sapiens
QFPYGPRGPFESQCWDCNLAPDNSVSIPEGNSPLVTPAFHNYGFLFTGRPLDGGPLGQTLGVACPKTFTRRQCYATFYTARVMCDALNVGASRPNEVLGPLADVEHRYTHCRYHHREVLPGPLPVQEIPGAPPCRLYSSGINLASCARTYFSSSSHVISPPYFHRNPGATEELPYRDAIRCEIISSI

SEQ ID NO: 972620 - protein, 224 aa, Homo sapiens
ASALFALLLPGAIFAPFSSPCGEAQSSRPVLVPPKVHGGPSNGPGLLFSRRLAVVARSRAGISTEVPSVHHSGASCELWIMGPASFRGLCTPILRPRSSGSCVCVPLVYPHPTMCWMHTARPGSFCGYGMNAFAPHATLMADGPSLFSGEKKDFPSHRHFICSGGPLPIRGGATVVLAGTLHSGRIPLPLGDLNKYTCLTHRPPRALKNVRIHIIGVTPHGSLR

SEQ ID NO: 972621 - protein, 83 aa, Homo sapiens
HIVFIKPTNVVVVTPIIVAPPKIFWARQIRVCPPPNYGQNSQRYLRNCMLSLALPRFFPATIYDAPPLVGPPINRRPNINFVT

SEQ ID NO: 972622 - protein, 102 aa, Homo sapiens
MCVPVDVLDPVGSLVLWTPRSRGRPDEWLRPAQNFLCFAPRCCPYEVYVLEMSEYVYGDPSSLIIRLQKDPLDNYLPLIGIVPRVCAYALLYPCCAWRPPHC

SEQ ID NO: 972623 - protein, 104 aa, Homo sapiens
MGTNCSILEVYACSTALGGPSHPLWVPLMTTEFYLERELYANMEFLCTSMENPNAAISFFKGSPPQKFRVSIWVSDIYIQRCPFSIRSSWAPPREKNFPLGPPI

SEQ ID NO: 972624 - protein, 82 aa, Homo sapiens
MALWHRRKNDNCIEEVYLPGDGKESSQVRIRSREGPIFYCTHMDGDIVCDRRRRDLVHPPLGLCHNNIHPVRLSPKTIFQQP

SEQ ID NO: 972625 - protein, 130 aa, Homo sapiens
MVPKRPQGVSCCPQWSKVLFSRGTVLLGWAWLLTIVNAAHMVTDSRGVRIVAPTCSCAIHIKGRIVPPRDVLESLLATVKKVEIKNLFAKHSIRHFSPTFPSNNYFLSPNYDTNNYPIPFHITTGDSLNF

SEQ ID NO: 972626 - protein, 123 aa, Homo sapiens
LEPFSVHQTRMGREPPLKSNGKPFVKAFCPTLKGLPLCPKDRIFSNDHQRALYAPRETQPCPPRFSAHTRLLRNFFPTTPPDQYTLTEHCPPQIVPKITRLCFRTPHSRMWVNHTDPALRLNL

SEQ ID NO: 972627 - protein, 182 aa, Homo sapiens
FWGVGVPRTAPVYAKVGAYEHCLFCVPLQLWGRTPGPNDAAPLLRGYVPPALGGPPLPRRLVRGVKLRSVLILQGTSQSPTSWGVPLAVVTSPEGATSMGEGVWAFEAVFISGATYFPEGVGRAISWLSSALVDQRVLFCAVLTPQLPQPTADRTGQQHPLVARSQCSPRATSGLLAHSRPN

SEQ ID NO: 972628 - protein, 178 aa, Homo sapiens
FAPPWVSRVWFPLARVVGSLPPARCLFARAGSAPVFGVRPRRSRCQLEGSVVVLATKAFGPPLSWSKQLCEDAASCLLEAPRLVRHRCVAITVPGGTPPLFVRAFPGALAPLGLALLRLWQSYSRHPEYRAGVHPQPPRGHQRACCAAVSTGHAPYRWVRPPKLHKRRAYTSVIYCSA

SEQ ID NO: 972629 - protein, 217 aa, Homo sapiens
WGRGLRAVVSDVGAPPVFFVGPQTSVAGLWALCASGVGVPAAGMRRSMRAGYPVIVFPPVGSFVGECTRSGCVVRGRGSHQSSAVAHGLSYSDCLRPRPACRLVLWSTHCRSSWWGINSKELEWCSGVMRICPRGSRFNDAVIVFVGTEQRRFPPGVCETTPHLVDGCVIVSSLEPRSSLRACVLLRPATRSGIKRARSALALLVASRVISHRTVFV

SEQ ID NO: 972630 - protein, 217 aa, Homo sapiens
  misc_feature (151)..(151): Xaa can be any naturally occurring amino acid
KGRPCHHTKEAEGARSALLLVRIVYVFCMRTPLVTLLGAVDKRRHVAYSAPPSRVTRAPHSFLFLWGELCLKSPLLTSRAVPPHIIRAQSYTTPLPRSVWNALALAALSPAGLSGGARSLFVCMPARVWSPLACVVMCLQLSLRVVRMPSXRVLTRTSVVAFLSSLVVCLAGYLYMHSCDTITIMQTRALKQRESDIYLVSGLSTQVCGNLHYRGVE

SEQ ID NO: 972631 - protein, 151 aa, Homo sapiens
TLNKMFRSFKAPSFQPPRPPKGNHLSLFYDPTYMLVSLPPMIILLSGAPPRFITPLLISAVASLNHLSTLLTKFLSFVRLSIHREYCLSATYASKSSLRECSYYLFLFSPNISMILHPPPWLKDPLPPTRIKRFYICSACLHHTHTCAGSS

SEQ ID NO: 972632 - protein, 119 aa, Homo sapiens
MVLLADPNIVLGAITFLMAQRPRLPPLSLGGPHFSCEEGHNNFRARARPAPIRGELHSQSCSTRPQFPRDHYAVFSSPGPLFARTPCSCLDGTPAGDHLLPTMLLWVPIYRMHRIFLNR

SEQ ID NO: 972633 - protein, 69 aa, Homo sapiens
SPVLSFGAPVFNDVYHSRGTLKMGRAPSSPPKELWAHHRLPTVGKGACPPRVQQFLEFSRFSRCINSRH

SEQ ID NO: 972634 - protein, 146 aa, Homo sapiens
RGTRSTAIDHPPPESFQTPPQVNFSVRLLNQVGNNNINVETRNIPLASLEWVSPPPLPPARSGHVAHLTRVSRLVTALVGSGPRCSPPFKGRCGTDAYDKACVPLGIVCSEPCFVGGQQPLCLLATGMSTLSDPHHSILQPRTKHN

SEQ ID NO: 972635 - protein, 329 aa, Homo sapiens
AATQKHERDREIRKERGDVSERGRIKAAIQSGSTRQEVRKAALSRDNDPGRRPVEGRGTVSGAPAVNAKGRRHTEEGGGGQQIAAGQATAVFPDRNAAQKQVWPGRPMITRVHGECRYSQPLSWGVDSWTKRPPSGARRLVPKRPREGTTTNLGPGTKTRVPTQYSSPTRKGVARPALLGTIAQERALCSSREQHTHQIGWAEPGRDNHREMPTTLLEGEQWVDGAPPKAKGRRKRRPPIGPKKAALPLPMGEENAAAYVPHASAKCVQLCLESTPENGGTLFLYNMRHAAHYSEHSQTSYVVHHEMCAWRNTGYDTWRKHTWGFSDGQ

SEQ ID NO: 972636 - protein, 137 aa, Homo sapiens
DHPGKSSPRHNSVRASAKSPTGGHHQPGAGQQATPRNAPGVTPHRMEQQQGAWRHPKKPTIVPRKESSKRAHNGKNIPPVDARTPHRLKSSGGNKRSRTTVFWTHRAHLQSDVLKQQVSKKSRGFDDPGPERVKIYL

SEQ ID NO: 972637 - protein, 264 aa, Homo sapiens
WHMFVTNVGTNASVGTLGLVCSRTEAVFVTARPLCNKRGGVCHNLLGVWLSPAAEALSCNPRRDVVVRQRSTVFQKGGRRGSPRGKMAPTGWSRRVTGCRQCYRCCRLGPPPNSPAPLFTRAKIILPRGEHIVLYRAANTPASLKLPRCGHGLRRRIPYKKRTGCISHRVAMAGRQEQGRGAPPGEEPPPAEVWRHRGRHKNRGTPQIREDTHPLGDAKRPHSDPVEYHIAHHWRPSRAEHIINGSPRAIFSDSYNSYSAHVRW

SEQ ID NO: 972638 - protein, 187 aa, Homo sapiens
MRMSLLSLLRVYSVCRPGSHSLGRKDPSAAFKTSDRVVSAPSSGTHFCGGLLQRRTVTNKNHSFEGALSLRPRRMWTPVFGPRLGSNHSRPHAPATLPFVLGCTHRAIVIGVLRMRTGALGRQQHHQRVQCRYNAPRGLDCRQESPRGAPSRREEQTTLIVSNKQAKTPVADDRPPDVKMIWATRQE

SEQ ID NO: 972639 - protein, 34 aa, Homo sapiens
MSLTAKFSPEAKRVLTKCMRGQKSKKGRTPLKHD

SEQ ID NO: 972640 - protein, 275 aa, Homo sapiens
  misc_feature (111)..(111): Xaa can be any naturally occurring amino acid
RSANPASGVVWAATANRLLRQAARGGAHQVRSPRREGSKSLPPRGDVLPPLDEPTSATEPLGVYNTPRFGELVRKTCWKDKEKSWSLVTKEPTPTAGTQNQQSSVRIASVXVTVTLSVVSEQQGKRVTRPARTKCGPCTENLSAGQNREAGSPTRIETCPRKNTWREQTMQKSARARMEFNIGGPRGIENARRSKQTAGHTTNNRRTRLQEPAHNTPILRKRVDEDESTTQRDCADIPNSSYRGLCSESRPHARLRMFMEKHGTFFLTCQGTVFK

SEQ ID NO: 972641 - protein, 123 aa, Homo sapiens
MHVRHGAPNKIVFPATPPPVGGPHNHREGGERGKKTNVVLASNPAKTSWRPQKERAPPVSNTHEDTHVAMPQKRETDTDTAGSPPPGRNPHFGDDEERAGTSCRPPRFETPGAKNKSGDTTNI

SEQ ID NO: 972642 - protein, 348 aa, Homo sapiens
  misc_feature (11)..(11): Xaa can be any naturally occurring amino acid
PVQIDKRHVSXKTYQIILARRPAACAACTPRVVCGKVSPLAHKLPARVEVVARAGEVFTNRRFRKQKPFSEGDTPFFGQGAPRRGNIPMAPRPPIGVKRGARVKNSEGQNRLCVRHVVSLGWHDNLYITRRVFSEHKDLPEGTTVWCSMGTHRLCGGGAPPVTGPNPRVWCFYEAWVRQSSAENPRWCQRVHRWSKNLLLFTGAFMALTSLLLLRHAPDKLFRPSYRHPGDAHEGSRVMYAPDVYCPRPPEHVLDNSIITRGKLRVFPEDKFQENFREAGRESHSVRPPKMSRVTKIFKTKKVTTALYFTVAHNSLISPYVAGWDNWPGVGRLPRLKNSPHPFCGNKN

SEQ ID NO: 972643 - protein, 103 aa, Homo sapiens
MGAPHPGYNNATKRPGGRDTTRRTIRVGEKNTGGRPLGSTAKTNMLGRPPCDPSAPAFAAVCWDPPQGGPPPPVEGAKETSPGPPPTANQQVVKARVFDLKTS

SEQ ID NO: 972644 - protein, 225 aa, Homo sapiens
MAHARLGTKRGPPLSLITGSAANSLLRHPPGTPFCAGQETNSAGDTTPQDRGVAPRRKWKRPYDPQEDFRKDVAPEPMRQHVPSRHRESNPGPTLRDHHRAVLVKRRNPGLIIISPRPAPPLPTYWKATCSNRYGGNTPERKAKNGFKQGHSKLAGTLRPLLPPDCQPRMVIRTITLRGNYCPFKELCHVLLSILTGLPRPVPKTNATAYNLSGSPPKTIGLLRD

SEQ ID NO: 972645 - protein, 146 aa, Homo sapiens
EATYHTRRRLAVTSTYFSGRGHHIGVTSTMRGLSSSTRSNTNQRGGKPPGGTHDREKIHFLLDKPVCSPEEPPSAPPGEAQQPPQLITQSKRGGTHQRPAPVTASAPTEESPKGWVRPVREDTPEPGVRTHTKNGCGGRYTVTTVY

SEQ ID NO: 972646 - protein, 239 aa, Homo sapiens
  misc_feature (75)..(75): Xaa can be any naturally occurring amino acid
MWLPTAVSARPLLMSFTRQWPLGAPLCTPGRCFSPALLWGAFPLCGPPPVRGYRCSPPLHSVENHRLARPHHWGXPNLGTLEGHYNPPTCCKNGSHPPQATHRKCSSVGGKPLQSGGVQTRCEPPSRYGEQNTPWYRGAKNNQRTFLWGVTVAPPTVRDPGQDVPRFAFTDVICLDRCFHSAVFIFIVEYNVHKKFQALKARSKPFMHNSGVRRHDWGPQRSSLQPLFEKNMFGPPETT

SEQ ID NO: 972647 - protein, 206 aa, Homo sapiens
MGLGISCGRSTFGRRCCHRPLCLMGKYYFNRKKFLNLEKRKYFLGKHSINPGGNISAGAQRSPPPEELTLRNLEARGTLSEIRRPRKTHRKNRGCETPPQVRGAKKRPASVLAQSHAAKGRRWATNIRARMHPGPENFWNSSTNIGPPPFRKDILHPRLFQKCFGSSPSRSANTATPWGHTKVYQNKYHVDRTTCYSFLGNWQKIS

SEQ ID NO: 972648 - protein, 147 aa, Homo sapiens
MGAALCLTDSGVLGRPPACLLSKGRPTTPLLRNHGGFNKDCYWRPAGGSTHGRRGTPAAQFGERRHPGPHKGETPPPVATEVVEKITAGVPLRKMARKGRYVSPRQGCKHAPPPKHREVGRKHPGASTCCLDRPKVKPSPQGPTPDR

SEQ ID NO: 972649 - protein, 79 aa, Homo sapiens
MVLSLPPPTHFYPPSHSHAWHKNIVFEEKSKAANSHSELFPSSTYLKEIDSKTDLSGHFTHLALSTPKCTIRKTPAHKN

SEQ ID NO: 972650 - protein, 154 aa, Homo sapiens
MICFDRVEFRVPTGLCRALWSTLLITGASAPYGLTRRAASAYGWTKTRYTAVVCTTCMKPCDMAMQTDGDDRGKGGSGNLPVGAAENLAGLQRSVRHLMGNPRPHLSDELVTPGAQAHMCGMRQNPARTNFLDRRAGANIRRVDNIGRAVSAEK

SEQ ID NO: 972651 - protein, 283 aa, Homo sapiens
LAEESRGAGREEAGARHVKAGRRSKGAGRGKREGGVPREGEGGAGRAGGGQRRPGGAGEKADGTTPGGGNNDCWWRGRRENGVGQVGARRRSVAAFVPKGPHERQEERLPHGHEVGGSRITREDEAATGVAGEQEGGGPPQGSNSVGIIWGNKRGALRPPFHTVWENAKGTQSVVVHPRGNTGAPRVGGAVLFTTWVVYAPVGLFFCERKVVGANVVHVHREALCDDREEILGRGEKKCRGKTLCERCQTGNEACALMSQRSIILETRRIILVFFPKHPHKRH

SEQ ID NO: 972652 - protein, 285 aa, Homo sapiens
RTPSHKGGIHGGERQGPPAFKNNTGGMAGENNPAAGIGKGPDTTATAGDYYAGAPLVWRELTRRENLPPRVYYRGLKELLNPPAEIVPRRRAPKTEEDNSLAPFSRQVKGKMWGPRADHAGHGDRRNYGRELRLSPISAQRPGVEGEQKQPRVALPAQGEWKTHTQRRHRATLQYAPAHASNNTRRGTHRYAVSSATGVAHDNEVLPRPPKGCKNPNFHAHALVCKARLLVRRDHKYNGGQLGEFFNESSFQTAVQDPLNGGLRLHVIATRPAFNISKRPPSPQT

SEQ ID NO: 972653 - protein, 201 aa, Homo sapiens
CGAGSVLVYFGGRGGVCGVVRGGVVCFCQGVTMSWWCVASGVVEWPAGGLSVVFFCVRSHSGRGAFVFAVWGGARLRWLQKQWCQCPLGPQGWAPVPRCVEDVLGGAVGLSAVERRISWEGSCERDRGVPVRVLVRAAGPEVTTLRGDHTLIDGVCVLCMCRMTWSHDVAAPLGSGAAFGQSSRPPLDGGFVRDAAWAARL

SEQ ID NO: 972654 - protein, 191 aa, Homo sapiens
MDDTHATCLCLSRYKDIESWRRSLNFSGLHVAHTFANLNELAATCRPSHPGTLGTPPRGGRIDSTPPGWRESEPGTTQRGYTTSQETDTRQLAGTPLGCKDKAHLGRESETQTHLYSKTACTIRYPLTLARKGKKSARYPCARKYWITYESSTDFDEIGTIYVGPYLNAAHGYNQAVEPIFFRKKYHTNER

SEQ ID NO: 972655 - protein, 148 aa, Homo sapiens
MCLRARLLEGPQQFLASQRLFSTGRRVDLPSQWTYAGSTVVIPQRSPNTHQEGGIRAPLPQMVREKEEPTRAAHRCKTDPKQGGPTTHGGGVTTRSRARALTCRQQQSLCPHVIVCLITRTIFRRVAHPLWGGPRAKILVPREASPPT

SEQ ID NO: 972656 - protein, 293 aa, Homo sapiens
  misc_feature (58)..(58): Xaa can be any naturally occurring amino acid
PSSWVCPPRKHPSGAKLPFGAVIPLGRRQRGRVQHSLPGSPPPRGSCATRLLSRAAQXRNAPHAMGCALTLTLVGLDNAHAVLFSRRKGHALGRYSHPVVSPIYKPGGPHSSRGCAPRRGIQTPGGGIQKRGSAQLETPPLYALQWTASLELTRTNLEPAPLLEDNTLRVRQGAGVSHPTGSTGTARDTPRGGLPESTSWDQSTSRAHDLREPCTHVCTLAAQGRGYRMIGGPHLGGSRPVGAIERGVVVVSAAANWASGGEPPDKGGGTTQGSVRPAAKTEVNNKFRRPNKD

SEQ ID NO: 972657 - protein, 139 aa, Homo sapiens
MWERNQGSKRGGRPPCEHTDDGRVTYVEGAHAAGQKVAFVRNAGGAGWGRRFNSRPKRTDRGASTGQHDCPGVVQPPGRQPPRGGLDGLPSRRRAPLVSRPPSGPSGGHNTGARPISSPPREGQSQYKKNEVLRRPIKD

SEQ ID NO: 972658 - protein, 153 aa, Homo sapiens
  misc_feature (31)..(31): Xaa can be any naturally occurring amino acid
MHAALHTTRRGEKFAHNEKDTRVLHTRQCTXASVDHSARDQVDERKHPWRSLPNRRVGRPRGVKYRVVGTTKTETEKTQEKKTRYKNIQNKKGITRHGHQRGSMSEADSEDAPRGSSSGALRVCTSASARRLLPQINDNAREGDVPTPKQMTA

SEQ ID NO: 972659 - protein, 32 aa, Homo sapiens
MRARISRGDACPMMTPDIRTPPQYPLRPVRHA

SEQ ID NO: 972660 - protein, 262 aa, Homo sapiens
SGDCLYPKKNTVGGSNVDTNERKWPLLKDKKKVWSTKINEKTIARYERIYIRIVGYITDTRVSIIVGMRPPPCTVTQGARHPPHRDIIGARPLYTGLYYKLHLADLGVAHHKICFISTRYIHLEVTNMYARVIVVITDTCHTHTHINEESGQTIFIRRPHIGLRGVKTYTPLGAHTFFLRREQNNTFWASVHNCGGLHQMKSRGPRRREMGCELKSGAHDVARKSGCAMPSRCCLYGNLVQHQRGEKGVRDKQNEKAAAHIS

SEQ ID NO: 972661 - protein, 173 aa, Homo sapiens
MVKVASYTHTPMPAAWRCSARGSHSPRSGAPAHSCAKPPLGSASHQAAAPREAAAEKRSRTSDTRREAEGERRDWNGYAQHEDSQTPPYRALPRRTAGDTHTKDNVCGLSHRNTHTGPLYVTHREQPRESFTGTKWVRHHRQVPPPPARGESPVHVRHTPEEEQKGGGTTSPR

SEQ ID NO: 972662 - protein, 129 aa, Homo sapiens
GGARDSPRYEVLKGGLYETATTPGGQKIGWWKTPPAVACSVGNNSAHKKMYAPGRLSDRAGAATREGPRTAHTLCGSGGGRAQGRETTFSPHRGGRAEVFAHRPAKSPHPREEPPPLPGRTSSRPPRPL

SEQ ID NO: 972663 - protein, 224 aa, Homo sapiens
GKNVEAPPPLSCIHVRSRTTVAPGDCEGNRDSVSQGECPNTCIKALCFFPLGIVETTIGLSRARQYTVCYDSSDTGGEATSGCCGAAKERCLFPPATLSGQRRTLFVRKKEVPNGVKSVHIASLSRRETKPAAVWSPRERKLIYRMKCTFGGRNASSFCSYSRITGCSLGQGSKGLCALCALAKRNRQSLLEYRLSRGLQPGEHMDVMQNIRHIRSPAEHDKCQ

SEQ ID NO: 972664 - protein, 164 aa, Homo sapiens
MTTPRDGDQMSRRARSLPLGGDDSTPGVEREATRARAGRSARGCAVGGTQRGDHQPGVPARVGHTKWVTACAERGRVACRAARVGPRATATALLPSTRGDRTSEGSHKGRSMLTTTEILHREAGDDPHPGAHSEEDCLTAGQWLLRDSEETIKRVVRRTTYIRR

SEQ ID NO: 972665 - protein, 289 aa, Homo sapiens
QKQNRGAPSPRRGARRIVTPPLGEPGLPPRITRQGQTHRSGPTLGGVIANDKTSLYGPPALACYSTATKKVMRSDIICEQSHPNPCWPKGKFPASYGTRPPPGSYEKVTDVHTKRQPGESLRERDPHRGGHTGKTRYANDAAEETRGVKKPSCGYTKKVVILPAKSLCKAPPKAHGCGKVRATQDVAQARASVITSGEGTLKRLFYNERYLTPSNDTICYEGYRRKAEDRWKTRQVDPNITGEQKTRVGSTEGPKTQSMNKSRKPNGGRVPNGPKCERANMEISPAGMT

SEQ ID NO: 972666 - protein, 262 aa, Homo sapiens
RDKDQRPPPRVNNRAGSKQSGGERTHPAKRGVLSARTSPQRCLTAETRTTRGTPTPTADIFSIAQGQTATNVVTKRHTRPNRRIVLSWGPPTLPSLNTSADEETERGTDGLERNKKEESMQRTHNIQGASHPERPPAGTRPLRGADCVRQSTHPFERIRLDRGRAGSPMAHPQRPHYTICRHRVPTARRNKSGTGRTTRMHAEEDGDRWAARLHAEGDLTSGTPLEGPPSTGDRQYPLTLPRAPTGGEPPSSPTISVDPNIT

SEQ ID NO: 972667 - protein, 109 aa, Homo sapiens
MRGNLCVGESLKSARCRPAGLVFTMWVCRGAAPRLLVYYACVVQSNKHWGESALLCKGKVVRGATLHCFRRHHSEMKGTVCLLYPRQVVCLVYSIEGGERLHRGVTDIE

SEQ ID NO: 972668 - protein, 76 aa, Homo sapiens
YIHIRKRRGSVNTKSFLETISQMEILDSHYCILSQHESKRGSIYKYRLPDTVIQQYKHFLTCQITLFAKKVVFNKL

SEQ ID NO: 972669 - protein, 85 aa, Homo sapiens
CETAGENIILAGLNDVIFDPKIGLLSPLGNAVYYKIFPLCSDELLVPYWRVLPLSLLGDFFLCSVSHTFAFLGYYGLVIPVVCCA

SEQ ID NO: 972670 - protein, 150 aa, Homo sapiens
RLRISLPCSNAIHEAPVGYPREALDLEVDTCHMFEPKRTIITSRIMCAFPSEISLWRPEIEALDIRLCNYHGLAGKASQKGRISAYGPEEVIYALYQEIDREGSLSEINTHTLVPYGMLEFFFSMHYGRYRTKGNGVMSFRSDRGTQGPR

SEQ ID NO: 972671 - protein, 138 aa, Homo sapiens
YRVPAAGPGDAGVQVRWSRAKSRVGLTGYRFGERGAQWLDFDLAKNLCLLTSSRLFLEDKWIIPTIMGMSYMDSNSTMQPSHRSPNHFSLTLRMVEEQQHDDDAYDLLLGFTECGTTVFRLGDQYSWRNGWSFVAVFN

SEQ ID NO: 972672 - protein, 133 aa, Homo sapiens
  misc_feature (83)..(83): Xaa can be any naturally occurring amino acid
PGHMLSVQQRHGDGAHGGNTSILSLGREDGGNKADATNTATTLGTGRDGGQPANGRTRRDRDGDRGHTERGGNGKQKRGPPRXSRREVNTKNHVCRACGPVHDPGLGVGHLFDPARGTDATKPPEGPQDRSSQ

SEQ ID NO: 972673 - protein, 232 aa, Homo sapiens
YLSRFPCLSSAFWNPFSKLISAAENPIFFCGTLVVRTTSLQRRCTAPAVLQEQSACVSPGNTKWPNGAILVLPYVPSPASLVGSLLFGRTQRGPPPTGSQGPRPMRSLPLLERHKWAAMTMSTPKSSETARGAPNERTLRVRLADPRPHPPPAKSRPQWQAKECLKKINRGAWQSAQLLAHNDSLSRTSVPPDSCPLPDEANVIEREETVVTGRGKMRNEILLKIHLWGAPQ

SEQ ID NO: 972674 - protein, 187 aa, Homo sapiens
APRFSWGPWTRQGDNKKRCPCVSNWAWLLAHPVRRGVSSTLWAPQLCLAVNTGPPPVGCAVYPIFVSNPPSDHNSCPQTLANHPGAPSLWALYGCCGFSVLSPLVHRYWDRLPLFGVCDRPVAEPPSGFYANSSPRRACSLRGHASPAHEVLGEHPCLHRVTGPPQVTCGRKSSTKSLGQKKNTTIK

SEQ ID NO: 972675 - protein, 107 aa, Homo sapiens
PWRGLGSRCKKCACGCCCLNSCAWRTDRRDGGGGCCLRCEVASIVRAPRRGASRAVRGPVSPKVKLQSPGNMRLYLVIETKDFHKTPGGGLSTGLRASVNTKNRSSP

SEQ ID NO: 972676 - protein, 83 aa, Homo sapiens
RGGLARREAGLCSPRRSLLFRLGAEGGSAARGRLVLGRESDGGAFSRYRFRSSSWARGCLRGHSRWPRGRTLDEQQQVKHGQQ

SEQ ID NO: 972677 - protein, 84 aa, Homo sapiens
  misc_feature (29)..(29): Xaa can be any naturally occurring amino acid
MGHSERTALGCERRRLAESRATLHVEAAXARNGNIVADTPGEITISGPRRVRRTTQTPGPHPTRSSGVQKKGEYVFSTPNKRPR

SEQ ID NO: 972678 - protein, 166 aa, Homo sapiens
MTARRKIRLPPGEKGHIQWAGKSVQLELSSPNLCSLQNKVEPARVNSLGAGSSPCGDEIHPTRPPPGTNLRGYICDTLPLVYLGFESCATRGTSGVRRTISTKNWQSGQTGALDESEKVVQKSRGEALAGATINECFSTLQEAYPCGNTAAPDNKHQLFKRPNNEQ

SEQ ID NO: 972679 - protein, 191 aa, Homo sapiens
PRSSARALRAFSAGIIERKTPAVRPGLASLPTGQEPRRHADSLLRTVCPLRHQLVGVFVAALAPGYSCAPPMSSRIVMGARLSRQRLLQRGPRLAALQLPRVLLPLSPVGAPMVPRRESGWVREQACWHAWYTGPCCQSKLLTRDGKTPQAGHETHSQRGLELQLSGDQVTTASDEGDLQSSSQRGQTPAG

SEQ ID NO: 972680 - protein, 98 aa, Homo sapiens
GAPDVIALKLCVKGGELINFQKIPVRDSPDYHQVDRTHSEKYQGFGYHGSGNEQRIIFFFFGNGVSLCRPGWSCSSVIPVHGNLHLPWFKLFSVPQPP

SEQ ID NO: 972681 - protein, 219 aa, Homo sapiens
GSHPKYGAPFVAALFPVLAVVGWVFLAYRFCPAVITTVTVCFCSFLLLLFGGDASAQLFSLSASPLLGRLFSARSLIVMRRSLSYRVGLHHLAIGGENLLSPHKGGSIKIMEHHCFFISWSVDVVHGNTPRLCQTTQRMDVICYVVVVCVWYVLFTRTHTHIHLCIHIRASTYYKCGAPHFHRAAHYVDTRRVVLCSLDNIVYAADLPYKDRLSSTRAT

SEQ ID NO: 972682 - protein, 121 aa, Homo sapiens
YPRFPAVWLFTVAQRTRVRITPGYVSRLVVSAVVSLLPCPWHLRIVRTPVDRYSSCPAMSVLPPDGPVSRDARALRIGGAPGPQGFPCRRVVAPRVLHRGLSGIGAVIFSGPPHVIHGGAY

SEQ ID NO: 972683 - protein, 108 aa, Homo sapiens
SRVYLFSMFIIEAKTKGPKEKKGVDGVKKKDAKKKLLENSSLKIRFNQEKRQGSCWYWPSLGVQWPTIMGLQQPQTTGAQVILPPPSSKELGTIGTCHHVQLIFQFFG

SEQ ID NO: 972684 - protein, 102 aa, Homo sapiens
MSPHSLGARFPQHHRGRTWSGATCARGSSWLPDLPSCVYPSSAGPSVSPAVVRPPGSPPSRPLVLCAGPAPLALPPRARCVKTHLWRPAVSRLRVIPYIVHI

SEQ ID NO: 972685 - protein, 46 aa, Homo sapiens
MNSLGKGFQRIPTDMGLSMSKPPLAGNSRPRTKAQEQGTKPFHSLN

SEQ ID NO: 972686 - protein, 172 aa, Homo sapiens
RPLPTRRSTTRTRPHAASPPAPAAGTAAAGRCGPATSEPLAGSNVLDFEEHPRSAEGQRPPTVGPPPTPPRQQRSGEQSITTCSPTAAHRPSPPSPLLGPHTPPNSNDRFLLTYTSHRHLTPLTHISYIDTHIYIYTDTHTHNRYTDTQHMHTLWDTRSHMTAHREVAPHEI

SEQ ID NO: 972687 - protein, 237 aa, Homo sapiens
MKETVRRSGGVWAKPFPLRVIGGLVIAIAYIEQLNLVIRFDPRRSKTIHIMARPNRNPRMSVNRWYPQWSLVVSFGSVPKQPSIMPQLTYTCLSHRVLNVTWLCKGEPGQLRVSAESLFRPRTDYERSTNVPVYHDLFVARLARGLHMTARVEHWGLRPARSLNALVRPKSQLQMPETTETVLGALGSWCWAMSANHRGHRTSVIEVSGFDRTPGPGGPVKYVKGDQLSDQKRLRRD

SEQ ID NO: 972688 - protein, 283 aa, Homo sapiens
AQVPLDPVPGLCRDEFAKGQQGSLLRDPIVRGGTKRCSQSFRDEIGSAFRAQESEVSSLYPGVRRRGHFPPWWNTMGSLCSAPLNMAGNSLGLGFSSRCARVWVQYGAPVCEVTRPDFSRSWRRIISPGIFPAPAGGCSLSNPPRYAAQDFSLFIGAPIRCGPGPFLELVAPLALRPRCGPPPVGPLGACTASPAGLSYTSPGRNGETPCPQGNDTNNVIHRVRGHPPRWAPRHWRRRRGTQRRFTTGTTTGEEKKVSPRARIEVRALSSLTPEQHWQYPRPH

SEQ ID NO: 972689 - protein, 259 aa, Homo sapiens
DPRVKRTGAKSRERVRKGTRARPGRRADGLGGSAGLRVRVSPLAMGSAALEILGLVVLAVCARGGREIAGVLLPCGGDRFLDHNIVTGRPPEKGLWMSCVVQSTGHMQCKVYDSGAGSEHRGAGGRALTVSARACWSRCALRDPGGRAVHHCVDPGPARRVWPSPGGVLYPVCAGAAGARATLLGSANMSSDELKRPVCAPGRKKVPSWAQRSTSGGRPHAAENGRREPLSWEAWSDRRRLKCPENQRGGATATGDRQR

SEQ ID NO: 972690 - protein, 314 aa, Homo sapiens
LHGVCQCVPPFSGATSLGGPPAAGVVPLLSPFPQVSLSRRPPPRASQRPLSGSLRCGASLPKSARLGGVYPLGAASDVLLCLFSAVMLLVARSHPWSNSMLVRHAERPADGFPVRFPGRPQAMPLLPRRWRLPPPCLATRGGVMVPFFWSRTPWLPYMGRPGVAYNTRGLVLSPPPPPDPRGGLSPSRSILRPRTAPSALPTGGSIRNPTGSPPRHNCIPRRVCFHALMDVCRGAPGGALAYVWGRVTPHRLLMSPATISSPAQCLCGPPGLVHMGAGVRAALNKASLAYQVRFGPSPRFNKQPIQKDKNKKHK

SEQ ID NO: 972691 - protein, 82 aa, Homo sapiens
MGRKYFFGLLVANHANVPTAWLDADAVSVSRLLSAGAAVERPPRQLTLGGSSRAAHDRSMVCGARRPSPPWRVGGRSPAPHD

SEQ ID NO: 972692 - protein, 65 aa, Homo sapiens
MLTHTRAKKHGHNTSHRAHNTPTTSTNHEHTTHTHHKQQHRTHNKSTTHHCKPTNQPTTQQQTNK

SEQ ID NO: 972693 - protein, 307 aa, Homo sapiens
MRPFQSLQKHHSCPLPSVPCPMDSHCSHFFLFLFSLEAASRSVASGGSAGGMIWVHLQPVRHQCRANFGIFGKDGVPFLFFFFYGGESPPVGPPGGGGAGGSATLRGATVRNTFVPPRAIRGIYPSLHVKDPQKKEGDIKRPAGPTGGPETSNIGGAYTRGRQTAGVLHQELRCTTGGSIETRRTPKRVSPRALTAPQRGRGTTGDVDTKATGPCYLVETQFFPPGVAPGRDNQGGRTMRAGQTYRPRVRKSVRDKPSNSENEGMRHPPEEYEYTREQRARKPRGRTADQEMARRPRRGRGSARDKS

SEQ ID NO: 972694 - protein, 161 aa, Homo sapiens
MAVSPGVTAAASFDGATALQPGRQTKTLFSKKKQNDNKKQHAEHTTHRARKRPGAIVRGAASTTTGAPAEREHVHAGLCTAPLNMGRPSWVDPTAGSQNRLDKHEYTRTDYKSKIRPRRQHKRCGAAQKKHTHVGASPETRRQQVTEDWATHGGLTQKPGQ

SEQ ID NO: 972695 - protein, 200 aa, Homo sapiens
MLARRIEISSVKFNPEHLPCVLLVSSWDTSCSVFTDRVGQLHCGSRYQHDRAAVLGLRLLRCKGMPGRGGLDHQLKMHDSEHVIENHLVGTHDAPVSRCVNTWSRSECDGRLEVGIRQLNCGDAELLCKAGTFSQPDQVYTLSVSWRPAECGNEQAAECRRGNLRNMGYVQQRQGVQLKYRVGATSVQNKPVCITSIEAG

SEQ ID NO: 972696 - protein, 225 aa, Homo sapiens
LNRATLRGISVLVELTSLRKRLCSVFPTPGVFSEDFSAPCFLRLCSPTTCAIMGLPRFPLSEQRRVSRGSPPLAPALCDATLGRSFGAYGQFNSPAVVAIHDAPCVCRGNMPLASTVGLVPPPVDWRRCHAHLLLGRLSWQGSTLRFQGTLSPPCRSTPGSSPLLFCASTPRNLRAHFWAAHPGLSLPFSPGLEQRVISFSPQQEAEGHLAASDAIPLPHPSVIT

SEQ ID NO: 972697 - protein, 220 aa, Homo sapiens
NRKVENDVDVDVLRTYWPCRCAKLSKKKLGEPFVLRQYLFIFNHIHIGSEMTYMTAMLYTICGEKAGTIFLELSNRLELGLAGIAANAHSVRQSNSVVVAWPGLAWLMKTNQMELVATRDRLACSGRLSRRQSDTLEGVLGHWIAGRSYSYFVPVRDLGLACSVDFKRKGLVQPFHEEKCKGIPKFRLCDAKVYTSLAQRGRSVTLLDIALVESRPRTSW

SEQ ID NO: 972698 - protein, 192 aa, Homo sapiens
  misc_feature (150)..(150): Xaa can be any naturally occurring amino acid
  misc_feature (163)..(163): Xaa can be any naturally occurring amino acid
SSLFLFLASYLLFFFLLLLLSRLVFYLFLVFFSSVLLAFLVCVSVLLLVFSSCCLFSAYLLFRLCILSVHSRFLLVYCVLLSFCFLLSLCFSCSRLLTLKTTTITDMTLYHSTLSVECMRRRERRGEGGAARSAFLSPAVSLCMRLSRRXVIDQHSGCLRPYXCIWHCAGVCLRLLVVWWDLDLPRRLVGGS

SEQ ID NO: 972699 - protein, 282 aa, Homo sapiens
MPREEKGAPGRARDVNGSARILEEVLLQIWSEYLRMTDRDGHSLGPFFIRWLRQEKEKGQPTQGVCADSSVDGLYEHRYYAYAFRSKEKALLSQLNITLSTRDEVCNWLPHKLRSKAPPLDMLRKDGNRSKSVSSLPGVGPKISETSSVESVMGIKNFMPDSGGDPISFLYMWAKCQARECQMASISRHRPGIKFGPRQIGGFWPETIVIWHLAKMLPDFSLPVRPGVGRNTGYTRIAGKDFQNFPMSRGLELGHVESTGGLNCSPNRATGSMAQMAPGAVI

SEQ ID NO: 972700 - protein, 238 aa, Homo sapiens
TWVSSHLCDSWHIDESEGPQTFPLPLPAQTAGTAVTSCPTTFPRSNHTPRDHTPHPSCLTSLSSSHPLSTQDPRVPRVELYRKECETQWKEYGFRSQAWGEIPALTSTSPVIPATVERLRQARSLESGRWRCSELRSRHCAPAWATERDSVSKKRDWEHRPLGRQRAEGALHWTLLPHFAYGGRTRGRTRLLIPPRGICTLGGDMPEVLVDRRVLEAWRATNGVRVLTISPNTELHET

SEQ ID NO: 972701 - protein, 594 aa, Homo sapiens
WPSSFVFAASSLLSLSSFCCLPRPPPGWGWVVVVCRLPAVHRLLGLLPSRAAGGQLVLPVVCVSSLRGGAASILVVSDSAVAVFMDVLVCCWCVMLRVWFVCPGAGRSASVLAVLRVGFTNSVCIGGSATRGFCSCRFSWRAPRPPRLFVYYLAGWTVSVDLWLCVVGGPPPPPPFGSAVGGGVDMLGGVVRLLLVGVLILTTFAPLCGGWGVVQKMLLLALPPFCCESTSRLCVFAPRQVVLRFRRGWSWSFAPLVVLVLLSLGVGGVVSSFYYVVRAARAAVSSSPLLRELFPSAAPTTWVSCRGCCPPHHVLSRRCGGVFSLHARSHSLVACSSCAPLCGAPPETLGVWVVKLLAFLVCAPHSRNTYTIIMIREIGEGCAPHEGRYNMTGIMCAHESLRAHRVDTRRPHTRVHTQHVAPHLIMVDGYDVVAHGVDVYVRAFLCGVPQHAPCDRNTLTATTLCVGDAPNTVLHREEGVLSALVMGPHSREAFVCGGEDAPFFVLLVVFVRHTINSAQQSCLTPAVVVPHNHTSRYTTDDTRTRVYMHRTAPLCSVRVYVHLVCGVPRATLCEHMGIEESSWSARLRAMRARL

SEQ ID NO: 972702 - protein, 120 aa, Homo sapiens
  misc_feature (51)..(51): Xaa can be any naturally occurring amino acid
KAVLAWFLIRLLARRQIALRARASSAGADSGSFIARVPELSLAFEFPLHRXSPVVAHTMSRRQPVRQPSVRKFSQAEELNTDERTRTLVGQKAGQMDRDAPAKTGNGLHARNNWRNAAQA

SEQ ID NO: 972703 - protein, 108 aa, Homo sapiens
MAMEMRVPVQVPGVWLLALGPTCVNRECRPIHVMNTKFCDFTTPDTWDTCREIVEMIFEPMELRRRGPLYSGHNRKACTARVNSEALTSSPNRGEKIKGIPPLKKSSP

SEQ ID NO: 972704 - protein, 67 aa, Homo sapiens
  misc_feature (17)..(17): Xaa can be any naturally occurring amino acid
  misc_feature (36)..(36): Xaa can be any naturally occurring amino acid
  misc_feature (58)..(58): Xaa can be any naturally occurring amino acid
VDRSGTAGVISESCLLXGITSTMQGRLESILSEDIXSPMGTSSTVIMPFRGVGFITRXVTNSYSSDE

SEQ ID NO: 972705 - protein, 173 aa, Homo sapiens
  misc_feature (26)..(26): Xaa can be any naturally occurring amino acid
MVVMNTMGINTIDHKCNTGIHRDIAXVSRRLTKCIPSAGFRSSAGSSRMRNCTRQATNRAPYMKPEQAHHIGGQRRVDSTRVYDKKTSCVSNVSWGPQSRRSWDTSMNGMHRENNVASQYYDLMVGMQKSSGEPRTMNCFSHLYKRDSTKRGYYHPEDETCREGLIAICHSAY

SEQ ID NO: 972706 - protein, 248 aa, Homo sapiens
MPNDSSGATIFMLPPGVNFVPLLGTPATFLRATFCAPTICFGNHPRCGENVFGGPSKLGEVFTWGASVWRPPPPAGELLGCSARSKIHCWATPPRGRTFVRHKTRRPYCLRGLGKVLSENYIARPAIFVRAHISGVEDVSPPVSRTHQQGAQTNVDNPPASFLVLHCSKMTLSDACVCEVCPPPELSRPPSSPRRVLITHVMCHSHSGCAKGLMSALKRTHVACCSHTVKSRNFYCRPKLLCLNTKHD

SEQ ID NO: 972707 - protein, 206 aa, Homo sapiens
LGVRDQSWDRSWLGPIAQKKKKKKKNGGEPKNVSHLPRGGIGVFTSVGTRLLLSSVPHVVVSILGAPPRASGVSTPVVTPPAGLLCTRLRVCVFFSAGGVPPPSSPPGCCSFHSPSCWPQRGVWVPPEQERERETWLGGTKPGGTQKVSLRTTPGAREEEPPEGGCGAPPPTKGWASTPAKNARPHKKWWCSRQGGGEKEYTPREY

SEQ ID NO: 972708 - protein, 70 aa, Homo sapiens
NRRAENKDTEVVVNTHTRTRGKHVIDHRNKSGRTTPLEWSPACSYERVGGKEAACVDARSTTPRRCPPAG

SEQ ID NO: 972709 - protein, 96 aa, Homo sapiens
KCHFRMIGRPCVTPAPPVPGVSHHQLFISFLLVPPRPALAAPHVVHIIFHPLRGDYKARGCFPPYYSHTAGREKSPGGNHPKSPPPFGGTTLANTS

SEQ ID NO: 972710 - protein, 315 aa, Homo sapiens
  misc_feature (195)..(195): Xaa can be any naturally occurring amino acid
CCSRVLLGSSSRTPFGLDTDGVSDYQKMVATVVFSTRTCSQQNSMVYMEHVVAGHELQSVFLGVITRWNTRVVVHPSYVGWGRGSSPTAGLVVEMFPPGGELLPTVPLGGQPRVLEPPISGGVRGHPSCRVAARASIAVAVGVCSLGSVSFLCGLGPLFSSLSKKELHSKDGALLATVKALLGTSICEHRRDGGXRLAVDLVRNPLAGVPSPTKVVPAAVRSVVSTVVPPRRRRSLLTRCRVNGPPRDVSLCVPPPKVARRGIIVFSRRRSPRTFSRSGLRATVSVLSFRCPHGVSFVILGSLTLVRKRGALKHH

SEQ ID NO: 972711 - protein, 154 aa, Homo sapiens
TASLDRRERDVACSATIGGTVALQCPRPEVCLAAMVQTRQRDCARPREKAIDPRKYLDRGCITLEREIRRGPPPLKSLAAEPKKWVPRRQNPTRAPETRWFRRNTRPRSWRGTTTSGPPERGLSVRPSPPPRVVDSPANGAPGVGDPQPARKCS

SEQ ID NO: 972712 - protein, 289 aa, Homo sapiens
PEIMCLRRLWYFSGPMRYNPELLVGDFLPRHWEAECAPGAPCRPPRCILSPPALCPRVPPLYGAPTGSRKQKMPVRLNTMDSSPLLRPTKLGEGPPPMCGEFWESNPHWVNASLSAEQPKACWRAFSGQQPNQGRGPAQVLAREEGPHANSAGGTKTTPAGAQRTVSDESAHKEPNRVVPQIRIKRRLLQADMISPRGIRRARPPLCKRQGRRGEDVVHEARLWEYKQAALKCSNVGYKSGALYVRNTPRASGLLRLTHREQWRKSCIFGGDTPRGCSLCAGECRILES

SEQ ID NO: 972713 - protein, 109 aa, Homo sapiens
VPLWDCPRTRVWLPYAISAAFVAGFCRCRLRFSGCGTIPLGRRPPAVPALSVSPVAHVWHRDARAIAFWGGPPGAHHFWGAFLPSLHRCQPLPPGVRLKGKPKVPAGFH

SEQ ID NO: 972714 - protein, 319 aa, Homo sapiens
MGIYRWALDQDIGEDTVVVKKSAVTRMPRGSARAPSHGGYTSPRPNSGPALGPPGEQLQQHPKGSPNATIVRLAPSKGKPQISPAQARPTHRAPRYLAKSGCETPQQCAATKGLKPPGFEKNGSNDKKAGRNNQRPPKELAGATTKGGGGAHPQAHRIFKRRLHQTNSWRRTKLRISEGCKQSPGGSSLMGPAPLGVKPPGNSPDNTMGIAEDGGVPTVIRRTGQATPPGTKRGATPPPALLNKPTKLNPAGQFGGRPADTAHSQYLLETADEPPDEIRAVKHPREAGRAPDHTAAREMTPAPGHTHTARGAREHPFPK

SEQ ID NO: 972715 - protein, 132 aa, Homo sapiens
MGRPVGRPENCAPQRTSEKWGARPEDTQIGGRIHPPRVGSHIVTNRECMFFKQRPKKLNYGRSPRRSDNRVLVGATRDDNVEKFAVGPFAEKKINGTESLKTVVEWTAIVDLLVYQTLVVAPEGALRVQIVG

SEQ ID NO: 972716 - protein, 335 aa, Homo sapiens
LVVVSSKRGFCVPLISRPRLCLCKSQDVVFVLSGCADPGELCPQFGRVLNNAQWWERCFCTAAPRPLWCLVGIPPVWAMYSGIERSEWGSQGSKRVLGDSMGPVLRAPFDGVSIPPGVGSILSSSIVWLVLLRYPPPIRGASLGYQEILVIGMPPLSFEGLNIANGWLHHWHSPPPSPPHCLPLKVGGASPPDARSLRPSAFAAGYADEYMRNAACFSARPPRANPILKWTSVRLTPASCPSTTPRCEADAQQGNHCPPANGCPLSGRLYAGRQTHARRATISATAKKTCVGDHTLGGARKREEEEGEGEGVTKTGAPGPLLGLKKNRSLLAPKK

SEQ ID NO: 972717 - protein, 74 aa, Homo sapiens
AEKEVSGGRGVTHDATQKLTRTAYACVRPSMLHTRQNSFPSIHPVVNKQRPVVLDKHHREGYTRIGHMRDEPKY

SEQ ID NO: 972718 - protein, 133 aa, Homo sapiens
MGRPRALTFNWVAHLFSTLPAPPGQKSDSRAKWGEGVPQFATPIRRGPINIGDHRYTVGAVSQHRRTVGPNHPPPVGNKTPTEMTGPPQRRGEGPLTPPAPIRRAQQNLRRRNKRTRTEKGRVRGSASPHTGR

SEQ ID NO: 972719 - protein, 148 aa, Homo sapiens
MVLRPMLNPSKFLETSSKHSVPDLYPSSLSERLLKRLVSCSPAKDKAALARTISTHNPLFYTLARWLPPPPSFGLPLGDPSSGKKPACVPGVKRHRVRAYGRPTKNGARPKIRGAKKCPPTTRFGAPPPPGRRRHTMTPAFSTRGNQP

SEQ ID NO: 972720 - protein, 221 aa, Homo sapiens
NDLALSQAVLGPLVDALSFKHLTCWPAGSIVSPGVFQCDSLSTNIITLGAVNNQAHEVCRTPTPVQWDDPFCECTLSLPRRPVTRQSTMSTQTRTQATSSTGQAAVAPKESGSTQPGTTERTCPVNATLDCVLTMGEDEELCCSLRLEHSTLNGQGRLRGTDSHARPRPASVDAPIEAPVPHMNMKEPEQTFLTGELFTLPEDISPATLSGARSTCLSIFV

SEQ ID NO: 972721 - protein, 155 aa, Homo sapiens
ENKGGDKQLGTPNQWPPPPKWGPCPENPKHWHETVVHTEKPHRQERHKKKRQQQETRESPPYLSRAIIAPFCSSTSKAAYEDPTTRRYLGSGKTDDYRPVPPEWGAKGPDEVTGLRVKRSRGRKNKRCCPRTSPKIGGRSGMAPRTAARKTVIGA

SEQ ID NO: 972722 - protein, 300 aa, Homo sapiens
  misc_feature (280)..(280): Xaa can be any naturally occurring amino acid
IAHSCWIRFYRVLRPFEGTFGAFWGYPVRHTIGVIRVGGGHLMSAVRLRALTTIGTFGNYNKVKTQHGDEVTTQLYRVCTLGYRQRAWPPLSLAHLSRPPIGQSRAGEIARTWGNTLVNGKEVLQEGAGRDDGEPTSGQPAFWRPLFHRLCLPSIRPNILGSLNCRRVPIIRGQTHMGGAPRYSPLAEEPLLERESSSPRARTSLLTYVSQMILMTVIHGLRLNTANIMVLRHNSLGPTLRRTGPALGPPKRANTLVEHIIEKDWQHRVCYLNCNKALQXKSGTFRLAVSPLAATLLRTS

SEQ ID NO: 972723 - protein, 68 aa, Homo sapiens
HVIHKLLRPALIQVSPPPWTRKSFGGGEKELPHCNSAHRMLQDRSSLHKSKNASSPLYWLQILPHARA

SEQ ID NO: 972724 - protein, 112 aa, Homo sapiens
  misc_feature (1)..(1): Xaa can be any naturally occurring amino acid
XHTETEEVGDGSLAQPSRVLQLSSVIFWFRCVLSEVFLSALNLPPPACVLSAFKEESAPLPHNWRVLAFSKEETSLPFETKDPLVSESHRLGQSKRNSAGNTPVFRAFPSTC

SEQ ID NO: 972725 - protein, 102 aa, Homo sapiens
  misc_feature (1)..(1): Xaa can be any naturally occurring amino acid
XTRKSKKRHRSRKPTTQVAIWFISPYFSFTLSAFPAEIVKKLHPEESSLFGQWVLKFLPVLCPNFAGNIQERAHFVKKLVPLSVPVFPHGELGPACHTSPRV

SEQ ID NO: 972726 - protein, 239 aa, Homo sapiens
LLGGVPCQLCVFVVSICFGRHLFMGGAPVVPSLCVSRPVSLWVFSAREGFRGIPAPYRLWVTRPHFRMVYPRCPYTWALPRALMLVMFPHATCGNPHAFGPPLNQGAPNVRSSYKNECPPTLLVRGRFTTEYGKFTVGPLKNVVMGGGMDPAPPVDNSGVMVLRTRPVLQRSHLSFAPSTHAGAPPFLPSGKGAMLPRECCTTASGAPFARAPTLCEPLDTPSEVLSHAGHYGLAAAVL

SEQ ID NO: 972727 - protein, 302 aa, Homo sapiens
  misc_feature (138)..(138): Xaa can be any naturally occurring amino acid
RVGSPHLFSLSPTTGTPVGPGSLSLCSERYPFSGVPPSYVRFPPPTWNCGRFRTRVGLCSLDWGKTSVAKEGQPLMLCVPPYRGSSSPHACEAVTTPLPFGWLPEVSPPPFWSRESSRGVSPPRPPVVFLCGILGFSXFPGRSLDLGLVCPPVGTQAGWWVKAPPTPTRGLPSAAVSPDLALGRMYPASCFVAIIKETRATRWPVGSFLVSRTPLWLPQRRRHLIHVPRYAPTLSGSTRRRNPLASSYLRIFVHCSAPGRWQRAASFAAASGTAEPWNPSTPWEPGVILCHGQAPTTDPGQR

SEQ ID NO: 972728 - protein, 83 aa, Homo sapiens
PLERERASDVTGEGEPTCCTFTIFPRWFPRNHSLNTLSANFWCLKPFVLKGFSKISRCLRSWRNYTWLLKLNPPWGITYAHCE

SEQ ID NO: 972729 - protein, 165 aa, Homo sapiens
RWVGGGGRRDEKEQRQEGQKGGGVGRCGKRGKPGKGHSPQSDLRARVSPPRDGPYIGGNVSHHSTGTWSKRRFALAPRATKEPWGHRREPRGQRLLRPGPPKSGVTLCVPPHPDKVGFPIKYKWGIPPFISDLELLALRCPPPLPVSPQKLDYSGVYSTRTPARL

SEQ ID NO: 972730 - protein, 66 aa, Homo sapiens
ERHPCLVQDDMMSCDSHLRLPRPARVSPLLAAPTYGNAPTEKRCSKCGRYSFGGEVPDERVGFIRL

SEQ ID NO: 972731 - protein, 118 aa, Homo sapiens
MALCPMGARWSRYSGWCPSADTEAEDLSQRPSVHTPQGGASVYSERWAPVLLGTGCHILLTLRAHAAQLQLGTPAATRLLTSHLHRRPSHGSPGGSHPSRGRRPPPKFPPKKQQPQTK

SEQ ID NO: 972732 - protein, 146 aa, Homo sapiens
MFRNIGGFHTGIWSRPLAPKIWLRARGPPSCKTRSPPGKIKMDVLTKHTDFLFHCAWHTPFIHANTNRRFPLCSGTFRAHNPLVAPCHKELTRVVLTPPQKGSNYFFAKPKNTRASTLLCGRPTKKMFTLVQLPASDISVPARRCQ

SEQ ID NO: 972733 - protein, 323 aa, Homo sapiens
CLWLTVLVRGFGRILFVAHMVPLRHVWVFHCGGNAFFPPSVFANTLAFPHLRWAPRPSGAPLRTHRGPLARFSAAWGPRSPRSLVMGAFYHAPCLAFTFGAIMLCSEGPCHSFSRILAPGQHSWVTGGSFCDAKHARPAPPCFFSACLENPPSAHRGGGLAPPSRQECLLALVDNTVIAASFVGMSQTPEEYGLTRTGARPRFWVTRAGIHPLPLQGGDGMINNRNVGSPRQNSPTKVGWSPRGRSLARIIYFARESSLSAELRLREPLSCRDEEILKGRLPTRIVNRGPSCDHRIPLSLTNPNERGSVFTLATTPGPQTNKT

SEQ ID NO: 972734 - protein, 128 aa, Homo sapiens
YRGTKKVDSRFDITCIIAHTDWVSPTSALTILGFRFSRYLALTRLLPLYSDTPATLLYIVRPYLPLSGELKHGFVDHVNFSLVPNPVSACDERLNDDPLFHIGNEPNLLLPLNTETPFFYNTHAPLLV

SEQ ID NO: 972735 - protein, 225 aa, Homo sapiens
EVYVPLRLWLMIAVTVGGFFRMVTGICHVTVPWWPRCIIHGLLPELSVLFLGGTRNFCCSLKVSESGPPTCRLFPSPAVWSSRPPCAIALVVCTGCQGRQFHRRGHAESVIGAATRPRAFLPVGVPHKPRRLFCATPPSGALKRSPATLLVHGNSNTQVMFPQGFLPAVSAHSLFQATYALLHMCQPGRWPLDNSAVSLLGRMAPLQRPWVPGGFPAYARCPTTG

SEQ ID NO: 972736 - protein, 118 aa, Homo sapiens
  misc_feature (20)..(20): Xaa can be any naturally occurring amino acid
MRSEWTPLDEKLKLLKWQTXVNTHHVIAHISIRQNYRHYVEVNTTFSKNQKTILTPQIRNPKGDSPSMATHKIKGPNAPTLRANLGRYEPKLSKINNVFPQFPKRKTQLNQFWDKQQK

SEQ ID NO: 972737 - protein, 262 aa, Homo sapiens
  misc_feature (55)..(55): Xaa can be any naturally occurring amino acid
MSPPPPLSFGVVVSSCPASTTHFLVGLRCVLPPPGDTQTLVGGLCIYVSMLSAPXREAWWLSTKRRSPFVSIDVRQVVGSQLRFFSSACGLCSAVRLVTGVKNRLAVLLGLLLCPRKRCSCLTSRWVGPAPLFSQHAWSLVVFAAIEDEHVPSSRVCVVFAMVHVVLPRKYVQPPRAGSVSCRQDAENFVCVPPRSDMVSPALAFTLSGGYLISEIKLRPPPPIVGASHALEYKENTRRSSRVLCVEAHDDYGLRPCDVKCV

SEQ ID NO: 972738 - protein, 193 aa, Homo sapiens
  misc_feature (2)..(2): Xaa can be any naturally occurring amino acid
  misc_feature (117)..(117): Xaa can be any naturally occurring amino acid
VXINEISRTKKQELGESAHPPGVVLVTPLLGVSYFGVYSIRRHLFRGHLQVLTPNAVVGSVTRTCVPAARRFLAVSLKNVVYMEPNPVLKVARGTTGWYRHSQCATLLQAISLGPGXPKLWANREAPTKSVGPPGPCDIGIFVSYAEGYLLPQEQGDFSCRESSSFVGRAHGGAATHLLIMRHAVNKTPPPTG

SEQ ID NO: 972739 - protein, 243 aa, Homo sapiens
RVNGAVLLFVPGVVLALSCAVACSSLDGPGPRLCTQGLPAERRFWRTRICGTLFRWRRPEIGRVSLSARDLQIGCHISLWPGPVADGLRLPARVAPGWDPHVQGTAVRAVCPGCVSTVCPQGLRARCGTHCLATHPAGQNFVPGPHLGNAGLPSPPLCDALGQDFAYHDRWRVSVFDTPRGALRTLLFRVGQRSHKHGGLSGSLRGTHRGVCNGRGISGVSSRLRSRLILGHLLGTWEAWGVS

SEQ ID NO: 972740 - protein, 126 aa, Homo sapiens
MGVFFLERVRFWSPTSAGSCTQNSADRGLTPPPMALLGWFVDYRPACPSLNNIISPPFLDPVPPPLVSFFHRVGYPPSFLMTESTLDQRPRNQSFLTGSPGVYFSFCVYLFQWTPQKFSSFLYVYQ

SEQ ID NO: 972741 - protein, 72 aa, Homo sapiens
MSNRDARLPPPHKPQKVLIAFEDPAQTDDGQPASATYTSSTSFSLGAHVYPGYLLSPPLVCRTKNSNDLFTP

SEQ ID NO: 972742 - protein, 157 aa, Homo sapiens
MFPPPPLLGPWVGRPPGQVPTPCRLLRDDPPSLPGRKPALLSSAAHNSVGTPILWSSALPHSPVKAATPWVFKAHYPELFPKGHQGEQGLRKNPRKGPWAHYFLSRGVDLLPRDRRLRFLAWDLRSSVEILSVGGGAVTRKSFGSRPVYAPPRVGTA

SEQ ID NO: 972743 - protein, 281 aa, Homo sapiens
  misc_feature (233)..(233): Xaa can be any naturally occurring amino acid
CRPCPVIFRRKKNEIKKRTKEGTSMGRFFVRCYIWQILQVCVVRNTRPWLKIVSSAAFGARVLFYVLVAPFLPYVFVLGSPQFGVVFPPPAGPGGEPVGSGVVVEVSLVAASCQTSLAPMCFGLRLYWSLNVCSWRSGRSTRSSSGAWYRDLHNAGSTDFLNILGPLAVFGLTTKISNFPRSQFSCLSHKRCLLGIHSVRPTSGSFWRRVFKTPLSLPGNFFEERRSPHHSNXIKKGLFLFWVCQRRPLIYGSIDEGHLALAIVGDDDFLSKKILFRAPQW

SEQ ID NO: 972744 - protein, 378 aa, Homo sapiens
FALACCVFACMCSVSALVLREVKQTKRDALNKKKRESKRELNCMLSVVMILFVALIFPVALALVFAPHKRVFPVKVSCPSTPPSRCPVLRVMTVTTPLLGGGDPHTCGVAPAGLPHLEGVCAPTRGVPANVCMVFAVVPAREWGKTLGEHHKTGGSQRVSHPMEYVVILNVEASNCRRSTLNEVILRRKSSLFQDVGLYNQGSFHKPAIIDDSHRLCQVVVAPFNIKDLRALVATDFESENICGHMESSVALVGMPPLFGPRTTHLLCWVRRVRFAGMSSNEYYGCVLSFGPSPHGSRHTCILISPTPRYSLPHHHLSCEQRCLATQGRNPGRAIGGDVGGSPRRPKEFPPHYYSSLYEWGPKSSEVTPLSQQIVRKH

SEQ ID NO: 972745 - protein, 280 aa, Homo sapiens
RRRATRALDDIPGGVVGVMLQSLRGPPSRPGPTGSLGHVLAWTIRSAGGFPHPRCSLCDPVALCPLSILALIYRSTKLRVTFRYSILALVTWVVNCLSLRGPSGSPLCLWTPPRSQGGPGQPFRPLWSGRYGRCSPGTSKALVRAHSPSLLPCTLGIIFGTPLCGRPTLWTGPYGFHTGASRSTPTRLLELDPPQVLAPASRTVVVVTPRKVIAPLCVPSCVPSRQARHGTYMVVLGGKAPRMLGSTPTSRPTLGSGALAGATTQPQGDYHISQQELIGS

SEQ ID NO: 972746 - protein, 74 aa, Homo sapiens
FLTTESVPCLEPELSFYPLLKGGGYTPSGKGVETRDNKRSGGRHRAAKTPLCSRGDNRRVSRPRMAAPPLGDYW

SEQ ID NO: 972747 - protein, 180 aa, Homo sapiens
MTFLRRGLPPHSHRRAFLFPIWRGLFRLLRTEGSFWPLEPRGSVLPGNTCQITCRRHPRSYTGTIISPGCETSKPFTGPLMCSKSAAEEFPEHPRGSLPLLNKETRHGVARVHPRATRRLFVPPWRMKPPGVHPTNSGALVHAQMILQARFGSCKGVRGFTLDFRTFDDHALWCTEARLA

SEQ ID NO: 972748 - protein, 169 aa, Homo sapiens
TLSLPRGRTTREYEEGGRGRGEEKRRRQAVSADGVSRLVVSAPSDVIDLPRRVKNTPRLHVYRCVSQHFGLGVFFGHSGSDRKLCSSLLFVEVAKVVFSCPGALCCFFPLCAVRAETGCAPRVPVCFCPGGAPCPGGSSLLCGPPRRAPSVRVSRGAVLLVAFVRPPGG

SEQ ID NO: 972749 - protein, 164 aa, Homo sapiens
LYSIIYKYKYSLYLTSKTSTIRTPPVLTFQNYSARKMFSWVSAHVYWSPPPYASPVSPLLVLPLCPLNFFAQPTNQFAVSTTTFTALHALSKTSITCLPFCSASRGFFSPREFPAVVHLRAVALSPPIMGGSGPLNASSRVISPVCSPRRGYNTRVLSGAQGFF

SEQ ID NO: 972750 - protein, 190 aa, Homo sapiens
VGAVVYCDTRPRVGRKGGSAESERTAREERSLVVCFWYDFSLAVACVQSRQCLFVSLLCRQGCLLVRCVHAIISPAVVCVCTNCSRAARSRFLWVVSPLREVCVGSQGLVVSGRVFSPPRCFLAGPFLPGVAGRILSAPRGRALESTLVGGVFVPGKGRRCVLFSRLDALSFSWGPPAVVPIKAPAVLTT

SEQ ID NO: 972751 - protein, 217 aa, Homo sapiens
TSRKYLINHKTDAPVSLNKLSRALFSGLQTWLNKSPLPPLKPLSSSLPCKFPSFSTTRLLFHLPPASQVLFQVAANLFVDVPHPASSFLRTTNIRGVITQTESHVIGPPTVHKWIDKFLPLTTTRGTPHAYLLRPLLNHPEASKPKIHKGHPTLGRSRMNQLTPPSVPFDKSHPMTPLIPEDNPICPYSGRINAPTSSSQSSAIRNFTSGTSAYYTP

SEQ ID NO: 972752 - protein, 76 aa, Homo sapiens
RRVYVKAAVVLWSSAGFPSLWEVLWRGGVLVFAGGLFQGGALPCLAPSASLTVVREWGLSPPRPRYWLPAFWFFRV

SEQ ID NO: 972753 - protein, 187 aa, Homo sapiens
QERELEWFGDTVLPRAHGWLHIRVGGHLSSGLLVRLFARVPRSTDLCFFLAAPQSPQNVGAADSALLEGVSPPSPGWYFPQKRNAARPRNVVLSRPPNMADGDLHRGRCLTRANTFWVFMPSVSKTGPGLVVQSNQAAAPCWIWGREGPKRAVSESTTIGVGGGKRVAPETVFLFPHNSPTPNIGGY

SEQ ID NO: 972754 - protein, 66 aa, Homo sapiens
VDRVFCDFYCVERYRSARVAAELYGLEERVQFALGRSTTYRIRTLDKRVLTPGCDSGVVRLWAMVS

SEQ ID NO: 972755 - protein, 295 aa, Homo sapiens
  misc_feature (9)..(9): Xaa can be any naturally occurring amino acid
WRGAGKEGXERTEEDISSCLHCIIAGENGTGLENPLMCGQNLFPQEGVLQVVDPIRHTWVPGAQGYAPLPFRDCDRKLVCDRPLGETCHLTRSRAFFKEENGRHVSLVKECRKTRPPPPFFDEPSTQKLNFGFIPPKDPGFNPDVISPPPDQMSWGQSPFLIKRLSEILPRTKQYLLRPSMSMIGSNVSPSGEISGPPKERPSAKVKDARHYILATIIQYSVPEAPKCEVNMFLNPGFMPEPKLVSLATLQHKENLIKVTGELIKIRAPTSTRHLGDTLERYKRKKYNQVPRSVK

SEQ ID NO: 972756 - protein, 287 aa, Homo sapiens
ISFPSSRGGSLVPFLVGATPFPLRSRGGGGSSPDRRASAQLFSARSSCALLCQRFCSGPTLHIALRFAYPTTDFLVVLHCRLVPLSPAPVRELSSLGQRGSPGGDRSSLFAEPVIVLLGPVAPFCFLFAQLLSSTLSSFPISGWPTCCLFLAALTLHPRALLGHVSIQVVSPPAPRRDLLARVRGPSARARRVCARMYVDSRPARALLPIALCEQCGPPTPAVAPLASHEAHTWLRAAESRVLRGAQSGHDKETLPPLQEERPREPTEARKSNQDDPSGHNRITNTT

SEQ ID NO: 972757 - protein, 104 aa, Homo sapiens
MLLSAFLFPGPLLAEWAPPGRAPGSPHQVSRSLASHRGSSPEELFKAEDWPPPCPRVPRSPLSTAAALSTLVYHRGHTPFHDSSHLSFFYPPLYHPSLIASVSW

SEQ ID NO: 972758 - protein, 179 aa, Homo sapiens
MAVLACRRFYCAAAGFPAGVRAYGALPFGGPRPWAPLPAPRLHVPDFPGGAPSPCAIVSRAPQTNLFLASFSPPQFAVGSGNTFFPDHGLRYMACGFLPPPRISLPLWLGPAPFFSAPPTPLIQWRSPPRAIYPPRVPGEEWLTPRPCASDHSRSGFVPRARPLFVGSPGKLPLCIKAG

SEQ ID NO: 972759 - protein, 205 aa, Homo sapiens
AALQLGNTRRGLLNLSGAETPLLMWQAGGYLCPFAALDQFGCHKPATFCRDPTYWRVLRQKTYLTCTSARPPVFSKRSSTLLHSWESSHYHHDCLYSYPASSFSAAHNHRTTVAASLWTHHANGVNSQNSGTRRETFFPSTQQYCFCYPNHNNLLPAVCVTSHTQRCATSVSFSSLRLFNFVSLLRNTTIFFGANKNPPGFAQHN

SEQ ID NO: 972760 - protein, 107 aa, Homo sapiens
MKKTKSEDETKKKKTAARTVHVPYDVACVSATVVTMRLWISSRSVCRTMVLGTSSPMGGRARTCWWGIDNNWSPESRLLIDEHFWPTECVFPPGTRSGGGAAPFLLR

SEQ ID NO: 972761 - protein, 217 aa, Homo sapiens
TGPRPVGAPPANKVRADTLEGSPDPKHRCATARISTRIHGCVERQQQAPPPPSSPPPPRRAPPENWSPPPPGPQHPFAQTSPARVPSTPPLFPAEVADTVFGRKRKLSEERDSHFAPRCMGKTRAKNSLRVLCLKAELTDYGENQPFHELTQEHDFTHLLLRAHTRLLRNIRGASAERDIFICPPQAMGFQRCAPHETDSLEQHTLHHGQARHTDGL

SEQ ID NO: 972762 - protein, 416 aa, Homo sapiens
  misc_feature (175)..(175): Xaa can be any naturally occurring amino acid
RVAGVVRALRGCVPSCSRVVARSFVRLVCLSLCGAPRWCSVFSCRFSAIDCAIRCCCCAVSSGGVVPLVRVLASRVCGSVSGRPRRDVPPASVTAGGESRRASSVLACAGLLVWLAGAWLLACDVLLVMQRSEQDGEGGHDVVIIETRGQKYTCRVAVFAVVSCCGDCVSKRSGXLWLTALRWCPDYGLRRAVEAEPFTAGGGVCKTITTGGVAATQYCAPSFGAPPDGPARAWVYGCCVVHLGAEVTHSVLFFSPGDRGVVRSGCHAPPVVTRLCLFIVGRLAPFPGRGLLFICGAGSVSYPAVPVWWGTKRVLYACWQYVVGADRGKGVIFHEGELSLNGVSYVVFRGPIHRVRGGGISHKQLVSSNKEQLLVCARDKIRGPPRCEISSYTRITQLITRAWLLREEQRLRRKQI

SEQ ID NO: 972763 - protein, 149 aa, Homo sapiens
  misc_feature (60)..(60): Xaa can be any naturally occurring amino acid
MASLLTPRWGERQRNNLVRTALRRRVTPSGVFPPAVFPPGRVCRSRSPVGRLLFPTGVMXPLNVWSGDALGYTAPRAFMPRGRSVLRTVEERLCLREGHSSLCALVPAQPFGVSPRAPHLAGLWVTPRLCSCWQEATLPRSHLGHDTRV

SEQ ID NO: 972764 - protein, 167 aa, Homo sapiens
CFVVLFFCFLWFVVGEGKGGKKRRCRRTEKTTPPGGGVFCAYAISVSRSLCWVFLLSQCVSFVLRWGRELPRWITLSVHMGAHLPDNKGVKREVFLWATTFDSPGFVPPIYGPPYLLCLTLGPPCGGNQHWPKKLLGAPYAPTKSQSPPVAIPGTHLWRFWGGEHNK

SEQ ID NO: 972765 - protein, 164 aa, Homo sapiens
VALIIVASSVLLVPVSCPRPRFFSSAPPPVGGCTPPIYISSRHTRGGRLFGASFGPPVGDTPLVLCGPVGVSLPPLVSAPPLGGPPNRSGGSHQSALPPWGAHSPLMRGFVYLSARVHHPHKCVSLVPGIFPAALYSFLSDMSRLVVIPRAVVDTHAPPLFLWG

SEQ ID NO: 972766 - protein, 228 aa, Homo sapiens
FRRGGQLFATGSPSLYRALAVRLCTPCLRAAVARRVLVVLWCRPECPMWVRPALFFARCSPGVFSPPGMLGVVCRDRQRWHPGGVLFVACLFRCPLFGGKLRSHDLGGPTEWAPTMGEARCRGHSILSREVLHSPHLVRELSGYSSACGLTGPKPTVLPPLLDLGLFFRPLMPAPPPLRCSGWQSLVFNLPGGLRFARTLRFQEVVYAPPIPPGGTKTTQPCLRLAHK

SEQ ID NO: 972767 - protein, 131 aa, Homo sapiens
MDFARRTPMVETKGGGSRKKKALSKNVCAPAPRRHLKDTSARFYVCHAEAAQKIEGQRHMLARTEAARPTPRVSLVSLNNKGKSTGVHNCGELSLHPVPKPTPQWMCASRFENTAAAPIRERDPVGTEQKM

SEQ ID NO: 972768 - protein, 285 aa, Homo sapiens
  misc_feature (1)..(1): Xaa can be any naturally occurring amino acid
XVSFLWDVCVVVWFACRSRVWGSAVPLSRVYPPRVSFVSQPTYWPVISAPLVGPVAPPKFFFVRRTPRRQTSGLRHPVFREVRSWRASPGQNIAPRFSAPLQPPGILFWERRPGRIISRPPKKAGPLAPHSREDLRRVNAPPTLLLEVFHRIGRIPPHRAGPPAASSPLRVTILRRRNAHPVGRRSAPTPGISSSLTKRGTQPGRLSRPPPVAPEHVGETNRGQSNNPGETPSDRRLGQRKIIPPDEPALRQLSQPRAPHNRPPHKRREIPARRGGNAGNPPKDV

SEQ ID NO: 972769 - protein, 186 aa, Homo sapiens
QARGMATCQIRLVDSDLSWTLLRFYPLNSGRQSRVHVCLGCTSGGLIHHRWVPPCCQAWHDSSPSLIHAACQIMVVFGTYGQRRQFAFMGFLRAGFQRVFIPLESSKLIRARTVTPEPSGAAQLPPLKTFPSSGSGSPLILGITRAELPVPRRVVAAVTIRNYSCSFPHVLQLPAGLILEYPLPPS

SEQ ID NO: 972770 - protein, 213 aa, Homo sapiens
MIRSKPGAPHRKRKTSHGGPAQGNAFSTQPGDIKGFVGRHTTPKGQIRQERESAATPGAGHNTSGRVPQRKSCRRAPRQQRPPPTGGRTILLHTRPSCKRASSKVQFAHDVFVRNSRPFTREEPTPPGRGDKKNRDSTTTSRGNKNKGAPPRGGTIPQKVGQPPTKEVRPGSTLRNKRQQQEQLQPEATGGENRTLALPTPEQHPPCNSQNID

SEQ ID NO: 972771 - protein, 112 aa, Homo sapiens
SELCLLCTRTWRSLLQCVEFLDAVNSVRHIAHMGLGSYRCAPTKVWRAPEPFLRGANSLNSARAVPKHKGVGTSPPPGWEPPALPPWWKPADQRFRRKPRGFSCALFWCCQN

SEQ ID NO: 972772 - protein, 288 aa, Homo sapiens
MRGLLALSVPGHFPSKGPAGHRAPTRWVVFRGIFCSDVFRALFHLGCRHHVRWAKNSYHHRDFGIIILRRPAATRSLSELPGGVKDSSGDAPEGLVATNSCYDFVTSDGTPFSPPVVQQTNLGPTESYSTRVPSCAVFISEDAILRRLLQHTDKCNTCLRFLGGSVKSAAPSSAATIGAEKRSPQGTNTNHTGGQALLGPPNRCFHNIYQDGGSPMRGCKRPWRHHPPILPQISRILCPTYAEYGAIQTRKESPSEAFVVSGAKVRPHTILWEKLSGTLSPKKILLQT

SEQ ID NO: 972773 - protein, 123 aa, Homo sapiens
WFARVRSIETDKKKTDDKAKKDVKLVSRCNAAYRRLVNASPVTTMVLREHTTVVGANSALALFSLLGFHKGHKGSYKGLTIVTLVNPQIASVVIILAHWQETFCLLNSGKICFPLDSEVPSSF

SEQ ID NO: 972774 - protein, 32 aa, Homo sapiens
MLVARTICDHQYLHYSTSGRYAAVKSVTTKQQ

SEQ ID NO: 972775 - protein, 193 aa, Homo sapiens
TYSGVFLRRFPQGSCKYSYPCGYFSGENFPPPRGVNDTKLRSLHTGVPPVCTPTNFIDVDHSLSSTINVGSQSFHSSTPHAWYNKMCAYKGVKPCHQPLVAYLPLESPPGLSGITKAFREPVVLEGAPHHWGSTLFLEGTTTIDGVETIHPSTRVFREPSLESQQVDSLPWRLCVPSPQEYLRDLATRIDRKS

SEQ ID NO: 972776 - protein, 260 aa, Homo sapiens
MDVALVQLALCTRLSVSYPGSFSQGTVFRWYTTAGVPLRRVVPARLDFGTPARLQARKSADRSVHSATPPIFCYTPLISLYCPMDLRNKLLSIKSLLLPPSHRTHLNIYSLNSIIMSPPVPSFVFIYITRLPLWPDNPRPPCRYPRSEMLLYPATRWHTPKWCANKASGHKFNKTRPSVLTVLLGHNPLQVQLHSYLPHPLFSFRSNNWHRTTPLLRFLHVNPPAMLDSSSKIYKDQYSMWNPRRPARGRNQGKNRICAN

SEQ ID NO: 972777 - protein, 243 aa, Homo sapiens
FFVRYYNSRSVFGGSLPPSAGPSTCVPQLVLETIFPGDTWRRWVSPVRAALCKFSPPPGVFHPPAPGSRTLMPPGLIGIVGPHRPANSEAWPDESPSRSQYCRRLQPKSGASADKMHVQPWADQPPTLWGNQSASRSESSYEPHTIHGDKGSIVPSPTSLSIPGSLVAAPNPRRQQIVPRVFKNQEEGRYYHPGSRKRVRYVQTPRSTTGRTEDHPPTPRTTGPREITKGCHSPRAPRPPWSL

SEQ ID NO: 972778 - protein, 112 aa, Homo sapiens
MVDPPPKDSKRGCPQGTPNQGEESLLVTNATPQGPHHGERKKGPHDSPRSVTSAMPVRPRPPTKIFEPRGGLIKTTRPKVAHCNSSRNTGSWDSPPPASEQVFIVSRAVIRQ

SEQ ID NO: 972779 - protein, 222 aa, Homo sapiens
  misc_feature (111)..(111): Xaa can be any naturally occurring amino acid
  misc_feature (125)..(125): Xaa can be any naturally occurring amino acid
  misc_feature (174)..(174): Xaa can be any naturally occurring amino acid
LCHRVFWCDQPGAPPVVLLFAAGCSPCVAHKARPFLTHRGPGKMAANAGWRRVAHSLAAPTLVGCLGTPYIGSPAGPLLCDRPARDGLLPTHRVVPTNSAARCADQSVGWXGHRKRRGLDTFRRXRGGYPPRRVLRCSTLRARLSHKASLSSLAVVWETRVFHTHQGSIAAEPXSRLERPHCSALFWRTAVFRHCARTIVLHQQWLSRPPHMLSPPCITVAA

SEQ ID NO: 972780 - protein, 190 aa, Homo sapiens
MGFHHANRPLGTGCPPKGTTNSYGASPDLPRPESTGDLQEMLRKPALRENNRGGAIGFDPRSNIPRGCTPGAGFYPTQLGATETVVDDRMLEDPPRHKATDPNAVGLPGELAVLHTPDAASKSWIISSGLLGYTRQRDDSDIGTGALELGSHYSQRIRLGFHQVNRVFTGVLPPREGAKAEKQAVVNNQT

SEQ ID NO: 972781 - protein, 229 aa, Homo sapiens
  misc_feature (1)..(1): Xaa can be any naturally occurring amino acid
XYEKIHQSCCVSSETRRSPPVCPLGPPFSQGELLLRPYTSGRPFLPPPVYCVTLPLPGFWARIQPLSGNIVPRFQPPIVTRLISLSGHGTARVLKGNPGALVVCPHTTTVGTIAPFSCGNSPRPFLSPPPPPCKTSQPSSPRACFGRARLTPLIKFGARATPQCSSHFWGTASQTTWGDFRPRITEVRPSPPLREITLNSIADNHHWALVHTPPLKEPGENVNMLLSPR

SEQ ID NO: 972782 - protein, 84 aa, Homo sapiens
RGGLLSMAFSVDPRRLVVVDFQSACAHTYDGCSSLPPPVWGVHHGPPRGISSQQRASLRHHPQLGGLAVLRTKFNPRVAPITAE

SEQ ID NO: 972783 - protein, 110 aa, Homo sapiens
MLPHSPGEAVQRNHSWPAEHKTQWCAAQHAWWRTHTECPTFSLTEEKILHENKNFLHHTTCWDLHHPERLRHAQYCAGKNIAAIMQLDVPHEESPSMCDNIPFISTETPC

SEQ ID NO: 972784 - protein, 151 aa, Homo sapiens
  misc_feature (77)..(77): Xaa can be any naturally occurring amino acid
WFAVFNCPAGVSRRVCAKPGESPTLVGPPPFGNPSSRHHTGASVRSPPSVAPRSFPWEVVRGVIKTTVSFGLIFSPXDKFCSCNALSPLFSAHCPCCIASGLSNRLLLSMSEPPGIGAPPVFSPRALKTPPQQETAYTPPRLLVGPLPPWN

SEQ ID NO: 972785 - protein, 137 aa, Homo sapiens
TTGPRRVFAEENKWGEKAVRFATKISLSKKKARYPYVKSGQSQLKLHHVNPGPQRPLGVYPPHPGQERGFRILWKSKGVNRPGPPSALWFDPPRLRPGVSVEQTPKAYWRINKGLLAPGGTSAPQAKGEAEPRSSTC

SEQ ID NO: 972786 - protein, 120 aa, Homo sapiens
MLEPDLKRGTPCPGHCFDRGDLRAWSSGRHPCAAVRCAPHMGRDPSSGFRHRRGLLPSRGCASPPEQPRCGILLPQAFWVLQTGTPPPGSFLISGGLFRGRRTPRRCHQADAMVCAPEYL

SEQ ID NO: 972787 - protein, 122 aa, Homo sapiens
ERGPQPPWQGETYRAVSRKVPGLPPRLRGVSREDVDDNGGGGKIPGQKRATTGRKHRGPPLPSRTVSARCASRAKEGRLNYYRNPLGKPCFRARGETRPVGEQRRLPTNHGRGREAFVGRPV

SEQ ID NO: 972788 - protein, 335 aa, Homo sapiens
MGNDRARGSSLRDHRESAPREGALPPEGSHHTDDACERKVAARAKMFAQKGSPHRVPRHPPRASGGWPAVTQRAWPTPRKVITGRKSMNTNSRRPNKTPFVARGSIPPLGRYLAFQHYSNKSYKQADAWFSPGMDGGPNTAYCGPSFHGYALTMVCGAASCNQCRGTLTRHVLHSPHSTVMARACMLTLSIGGEHYKMFVSRRLAQDSGGDDCEIYVHSISPPQADVLVVQVTAGYTSGIPPDGIVMLAYDIVGGEYRKKLNTFWHTGGDLGVDLLDSKTEMRVHSLVYQHRKGHKHDPWLEDDVRVDETARLDGRRIRVTVLVRPNQKTRINRH

SEQ ID NO: 972789 - protein, 270 aa, Homo sapiens
  misc_feature (85)..(85): Xaa can be any naturally occurring amino acid
RAPPSLARPRLEKVLPVAGGPNFAPRCRVLPRFSSPPLMECAPPARRRVHSPELSSSCETYSALGSGLTRSLVVTPRSPSRRPVXTLSRSARKGLRPVASPTDPPLLLHHSQRTNPVSWSCPPHTACLPGGAFPIDPVFTCAHVYLLDIIFCPPDKAEAAVPCFSPAGTREIGSRFEDYGYGRLLSKVIIFSLLGVLPRTLMVYFGAQLNAPQSMLVSVVSALVLSRRYARRLARCLFMDTTHCLAPLSRIYGSQRAGSMLAPRHMVIIH

SEQ ID NO: 972790 - protein, 104 aa, Homo sapiens
MFGEVFNSGGTLTRVPEAPSWRPETPYLGCPLIFIAPALHFMYLGAFLHVGYYRGLAYGRELFGGFLPGFSGGFRIAGGNSPLGDHLIASPPSDFYKQERKGAV

SEQ ID NO: 972791 - protein, 144 aa, Homo sapiens
MRGSYPPRSVEQPTDMDTCSEPPPQCKHLIKKLSPGKNQEAPFVPSHKQQCAPLVRARVFEKIIIALPEKREFIGEKSTQPTVLVTPSVEKFVFPAEHFLPKSSIGGTQISTNSGHGASNIFGLRFKHLFFFPEKTNTFSSKIT

SEQ ID NO: 972792 - protein, 134 aa, Homo sapiens
  misc_feature (30)..(30): Xaa can be any naturally occurring amino acid
MRQYSRSALLWVISTALLVSHLISCVLIAXSSVCSLTQLSGGPLTHTSEGLCGRESETKHPAVIHTLRGMEDIIEPPADYTTCGKRIVCTYPGVRLVRPQVCITAVGTRSKYIHLCPLGSARIARKTDPDNRQE

SEQ ID NO: 972793 - protein, 102 aa, Homo sapiens
  misc_feature (42)..(42): Xaa can be any naturally occurring amino acid
ESIPCGESMERKHPPLLARNIFLSSLALWCDTRGTTSFFSRXDICVFSLAPQHRFFCLCGGRDTMSVRERKICDAQREREICVREWLWFTGERGAHSCVVTP

SEQ ID NO: 972794 - protein, 69 aa, Homo sapiens
PVVGGWRKTTTHFLASSSNVLTTSLLVAGWYLVYLCSTPSLLQQQPQQSSSSSPRTVVSTPLLSHALLV

SEQ ID NO: 972795 - protein, 181 aa, Homo sapiens
TSWGKVQPPSMRGEPPVPAQPPRRSRFLPQTSPLAAPPQLNLLRYPGEHTFSEPRPVAPTNPSGGTTTTPRCGRNPAVGKNHLRKDGQYPPGLRAPGVHIPHGAPPENSCDTTRGAPNILPPTYCVGHTHGTPHRVVRKTRTRAPHRGCAVLSPTPGKEKRPICFFSLGEKIKIGAHPPQN

SEQ ID NO: 972796 - protein, 125 aa, Homo sapiens
GPTSLNQRCFATHTPPPRGYNILFWETNPHHRFSVEKTLSDYFLDVADSVSCPYTPVFSLPRGTCARRDMRLFVAASPQRDISFHLLRGTPLLSKTRPLSSLIGRNIFFSGGRFYTSPGSDIVIV

SEQ ID NO: 972797 - protein, 115 aa, Homo sapiens
GFPAQVRLLWTPLFPLTLLTHPRSFAPTPPNISPWEDTQGAALLGGLSTPPRGTASRTYLRPPRGVIPPLSGVVRASCHFPSQGHTALQVPPQRLRLCVAGALIGGYIFSWRPPP

SEQ ID NO: 972798 - protein, 119 aa, Homo sapiens
EVNAHFVAAAMFHALFLGERAKYMGHINELGPPLTALIPPTGEHFSSLFETRAPPRVFSTRSPIYCVVGHVFVVSQHKGCTPQACSHRIIAVGFTHTLLLLGDSSPPPYCAYHTPPCMI

SEQ ID NO: 972799 - protein, 309 aa, Homo sapiens
RVCCGPHAVSCFNSVGAFLTLLRQWAPDAQQGLFSCVTELHKTGLFRCGVGTTCGSRWSPAIRRGGSPLPACLYGAPKPPPFGHSWAALPGQAATGAPCKKVSRQTLGSAFQSTAPLHFSDDVRLKSPSQAAQSGFLDQESLYYKKPMGVPPRRNAKHGKMMGRSSQGGNLPPRKSLGMFNPPPSTQYGPGSPHDLLRARLLGRRDIARRPPTTRPGPTPKWGRHHTGAALNEVSNPRSSGENNPFPWPTRCTGVPSPLPPPSLCSSPQTLPGRPPTVEERSAEIPKTKPHYTERQGAPPVESANPARP

SEQ ID NO: 972800 - protein, 171 aa, Homo sapiens
MPCIADRVFAASGFVLDPRAVLPAVDRYVSGSHPLFLGGCYDPRQVGPPPGVCLQKVIFPIPGSPLPGRRGRVRRTPPPSQAWAWPKAHPHTGLPPLECPASSYRRPQDVYVCRGQPRVRVWLPPQEVRVSRLSPVMGGHPCCRTLGRPLHVHVSCRVLSITPTPSPPGED

SEQ ID NO: 972801 - protein, 302 aa, Homo sapiens
MVPMLPFVGLVFCHYILRPAYPFSFAGFPSGTNHGPWRPPPFSVLLPPGPKSCFPVFVVPELPLFARGRKWTTGVGFPTSAHTWFRIICRPASLEPLLVRPPLGPTQPSLVQTWCAQRALSKFPAWVNKPPFQMSIRLTQKGCFPMPGVEHAVTTTPSHQEQPPLVEPPTGPDMGAGGPHHSRHYCEYRVLTAHPLCARTHNGTHVYLGRARPSAQPFQKYTVPPESKSPHHFIDTGLLNQMPPCCSEILRQQGGVLQKASITHENTWGRKQKPPRSGPLWEQYAGPPASDERAVPSRRPPP

SEQ ID NO: 972802 - protein, 255 aa, Homo sapiens
TREFFEEVGTPRVDPRMGNFVFHPDREKIIGGKLFKPPLSRAGNIKTGFPNHLCKALQKTGVKTHAPDQRHTSRATWSQIRELYFLAIQNYPSGVNFLKLYWSYFPGPGCIIHVTFLGPAFDYTAYDGNGAHMRTGVYDLDIQKLSRSTLLFSFTPMQSRYHRPTPHGTSIHMGTAHLTSRRFPRFPKGLYTSWNLHPREIFAPILMILIITKQSFPIIHMTDRQFGAKAAQHWPNTPVSSFKGTNQKVQATGFW

SEQ ID NO: 972803 - protein, 273 aa, Homo sapiens
CSTIGGQRNVTRVPFIAPFIVPQGHSRGLHKPQWGTTRGVFPRVRGEPQIGAPLASHVFWDPLFRHTSSVVLRHVPSHVPHLLRDCSSGPPPVQARNSLLDAGFYLFYGLLLFSLPVTHPSEDAHPCRRCERSNKSIFIRRGNQQNHGPLAECGSGKKTVGPPAAGPPRPYGRLTCVSAHPHVTGVLYIGAARGELPRRKQDDAGYRPPSVISPVATPPLRVVIHHAKRDQVQPPGRLEKPPSSRTHRIGQKPGKLTLYSLGQCFTEVISSSW

SEQ ID NO: 972804 - protein, 168 aa, Homo sapiens
TQRGNVAGTGPTPVVRQSPAMCSEVLEATRRVRQVLSFILRGSPPPGAPRGALPIGVVFPSAQNAGCQDHPEVQQGAIQPPWGQWFLPTATLPPVAAQPPDGGFSRRLKSGARWAKWGPRALIQVTGGTHGRVELEVRPLRSPQATTCPTQGDGSPREGPPQTAGARE

SEQ ID NO: 972805 - protein, 59 aa, Homo sapiens
MRAREFLSPPANLCEQKNPKTGNMEHHNCQKEVGANKKKYTPVVSRETNFQKTRTNPTK

SEQ ID NO: 972806 - protein, 211 aa, Homo sapiens
MSFGDDCRVRVFFLLPYPRGFGPAPVLRFDEAVSTVFLLALCLASPSTPGAVGPCPPPVKWGSPVSADSVRLSLVSAHPSGALFFCQPILPGWRCVPARLASLVTHVPQRASCDHRTTGLRWGKRQVGRHESSRQNPSVLATRNTPPLAKRGAPRQGTPRLEKMSNAPTRAHTVSAKSDPPPSPPTGGLLPSPKAEPLKDRRRILSVPPVP

SEQ ID NO: 972807 - protein, 107 aa, Homo sapiens
CTLVWGLTNIASLIRFMIPSLVLAPPVFPGGTLCFHTLVGSFSLCKSVALLAALVSSRVAYEGTTLGWFLKEVCSQRSFSKSNRSNSSILGAEMISSRSACPPECDK

SEQ ID NO: 972808 - protein, 214 aa, Homo sapiens
MDLAVSSWYAPPPGVCTVFSSFPAKCAFLWKGIHQTTRGPEAPRRQRVFQTTGKNAREPARDNPPLTRRASKTPPPRGDRRRRAPKLDNNRGVFCPKYPLRSPTAARVPRRGQHNVRECTTEEPPGPWAKNTSLIWHGRTRKTHMVRDSPEGPANARRPQQRIPPFKGPPAARAHTGRLRSKKVFFSHSAPRPDTKLPRRRQTWGQKNLGHKQN

SEQ ID NO: 972809 - protein, 271 aa, Homo sapiens
PPACSKGLVAPSGYSDRELARQYLVLNLLRPSGGPIVAPMRLVLIPVAPAWRCAAPPAPDCGAAGDPAGDDPPGCVYPAAPIEPHGLTLVLGASHPCQRNRVPLSPPSEAAGRSTDPTRRGVRLPVSAHRVRLSLIIQTHLGRHSEGVTVPSLDAPAVPPACLEGGPPASRGVDPSRSSAEHILGPACTPREGPAPHMVCGTGAAYFFSTATDCSHAGAMTRSRTRFCCGQHRWSRSTASGGSRSSGDDVALLARPLASRRKKLALAPPHR

SEQ ID NO: 972810 - protein, 130 aa, Homo sapiens
MRWPRADVWASKKAIGAPIFRIKGISCYGRPSIPEGLGMPLATETTPLGRPVYQSFASCRREWFPPVVRSYVPPSLNSCGITPRRCYANGCGNATGPAPNRSRTVQELGRFSRATGGYLQSCLTRVLVKL

SEQ ID NO: 972811 - protein, 217 aa, Homo sapiens
  misc_feature (87)..(87): Xaa can be any naturally occurring amino acid
FGRSRSRPAPCAGDSPESGLVFEATRGRTASGLPLYTPRVYKSLGPGTILYFLAPASQGPVCDTLALDNSPVVPTPMAWQARGPHPXPSPGGNDDAVRSVSRPRGSCTSCLLAAAPPRGLQRGWLWARSARGTHPSFDARVPHEPSLGRLFRGTCIVAPRTGSGPEKFLWTPSLGHALPGPVPLGTREIFCAPTSFPRHNCRRGRCCIDLACAPPAR

SEQ ID NO: 972812 - protein, 297 aa, Homo sapiens
MHRSPELIYHICACLSGLPVFLIATRFPPLFCLNRDCQLCGAPTLGCLLPHPVAGVRVFPPWGPPPPLDLVPGVPKPTLLWFNFAPIFCLSMLRPIFRAMPCISSGFYGFSHNLNHRMSCPAFSPGIQEPPSSRVSGLTPSSRLKVSSPVEVNISPGPSLDLSRFVGVPPAGDPPLFRRPLRGYPPFSQNSGRRQPFHNKDGGPPPASATASGGAPKNGGWPRNSLRERSLLSSTEIEAPLSALPEVFKGAPSYVYTVLGPRNEVAPSGPNARRFLSMGVPPTRGPKEEKKFSNTQK

SEQ ID NO: 972813 - protein, 110 aa, Homo sapiens
MLTAPPLSERCPRSPNVSHKGRHRAPPLVGERRACPPGVCQRTKVSQDRRSWFYTLKLFGRRFRPTSPQLGGPTPHNHSMLELPDIHKSTNVKPLGKLVVPPVKCKSNTS

SEQ ID NO: 972814 - protein, 146 aa, Homo sapiens
MYAQNRKPPRRDLLRAVEIERGDDELPCAVGNSRGPHSNIAPEYIGGCWLILFARPLCLIGENRRGPSPLGSQPSSYEYYRSPSQAELRGRAGRIDLPPFYAMSGYFFKADRAPDQFENPATSLVSPTLSRQSDRGAPNKVEFLAQ

SEQ ID NO: 972815 - protein, 167 aa, Homo sapiens
MLTLWAKNTRPAPPISLCPAPPLRCQKAQNQGSPDYGTSRAHAGPGPLVPRTRGPPSWAQGPNQPLGSSGLSPRQPGKQKHAASVGVLILSTGAPNSSFRREQRCARPPPCAVRRIVSSWRPNRLGEAVSACPAWSPQRRNIALLPAGAPVVFALRPQSCGPPITPQ

SEQ ID NO: 972816 - protein, 303 aa, Homo sapiens
KKKRRGDACPSARRPEDSVRPQGVKSLRKHRAGVSNDVKELVANHVGREPQQNKTHVVSHGRHSAVPAGRQGAPHSGRTSRPPSTRTPMGTTTAFLSGKTNAGAPPLNEFSRNRNAGEWPRPPPTGYPGHRGPQQSGYQQEKSGWPPTSGGRAGHPKTAMWTQARLATRTELETPQGRPREQTSRHASGHPDKTKGERLIVRATKTTGPHPQTGTPAAASTASENKGTTPSAPLRGTNSDRCGKQMVRDTRSTAHNYEGTFPIGKHKGALPRLSNTKGESLQAPGATPRGRFPGREHPPKKKD

SEQ ID NO: 972817 - protein, 80 aa, Homo sapiens
RVFRSTLTGPYIYGVFPLGKRSPSVSIKHSFSSCSASAVNFIVQGINGTIVPRLRGGKISAQIGRRPHGFPPKYCCPPCT

SEQ ID NO: 972818 - protein, 287 aa, Homo sapiens
MTEKNTLQYTHATHDVVAAPHPRGATVRTKRCRERRALDRVPRHEPIPAPPSHKANQDNNKAAFEQNLGWARGANYLPRASKLVKFQTRAQELQPPWTTTGNRASVKRPPPYFREGGTPWQTCTAGQEPKLIGNQGHLRMSLPGEPSLRSMGHPVMPRVFGSFTSTHPKCPVTTHKGSPHIPRVWPQGHPHTRQNPGLTHQHGGLTIAVYDKKGRGQNLGAGRALRKKTHTRLAEEHNKSRLFQNSIPKQACPKPEKRRINETISGGIIIEVRFTNATHSGSILTKA

SEQ ID NO: 972819 - protein, 127 aa, Homo sapiens
MWGTHPASSTRASHTPGRGGQKIRCYHPSAPQVIRKRCTHPGEQRPAEFGKKCETPHKRGDILRRGNPCCPTYTGESRMTRSRRGSGKTDPQASDTARWRLCGTPESTGTPPGGFFFSKKEPAANKN

SEQ ID NO: 972820 - protein, 196 aa, Homo sapiens
MVNLGRLSRGALFSSRRARRRFLLSAFSGPRKSPPLVWVLPPHRASPLSSAQPPRSPPPVNSEEHCSAPPAAAPVRSKHLSLPAVFCSMPPTRGRLSHRQHTVGHVRDVEVRNKVSRSLLGSPQRPHVLVGAASRPQVFGGARARYLSQSSERSPRMPRRHISSRLARTTLARPTRVPPTPPPPIKGFPKKRAHMS

SEQ ID NO: 972821 - protein, 117 aa, Homo sapiens
LTVGENRVPDSLPDAYDECGTNRCEGSDRRVCLSKYLIVVALEYVNIIAFAGGVVHRRSGDWRRRVILEDESLTLYWGFQVELKCIEFQSMFVYQIRIRMTRIMWLIVQVVDILAKY

SEQ ID NO: 972822 - protein, 266 aa, Homo sapiens
  misc_feature (102)..(102): Xaa can be any naturally occurring amino acid
FVYCASADPGKCVIREGFPGPRFEEQCFPAEETIFWRLLPPPSQSSPPLGAAAHHIRGIVGPSPSRLPPVMTGVLPAHTRPRGGHCSPPTVGLLRGSTPPHXSSYSMGGFPKVAMRFPALLSSESERRSPPQGFVSPRVVYPGYLSVTRPLLHHVLCKNVFGLVASLLRRIWPLFAAGFPQTKYVAHSRDHLLYGGMLVDPVLSEARCTTCPTTWMIFEMTTLCVPSQMVVRRPPSNSHVATTLGTLEISRSSKKISTNQKERTTM

SEQ ID NO: 972823 - protein, 195 aa, Homo sapiens
RVVLKYARQCVWGARLSHLPTGVFRPPVLLRTAQFPLRVGPPTFGGPFRHNTRCPGRRNPPCGGPRLPPAAKCPGVLLTTSLGLYTAPILPLLGRHPLFGHLCSSLPPGGSTPLSRQSGPSRCPAPVFLSATLIPPLQVRRGLTPPRSSVGPSPLGVHLGPPAPFGQSSGSACCLPPTRRPPFLGRPSLGPPPSL

SEQ ID NO: 972824 - protein, 257 aa, Homo sapiens
MCLWGPPRAPREGKKFFRTPVALGGGRGPPEGVRWHDGASRPVLPKRENPGAGDMAAWCFPPKIKKAPGGGHRRGGSGTNTSRSGGLPTRAPYGGFYLPSEGVPNGGAPNIPKILPRPPGGRNDKNSDTNDNRHSKIKDRNKEQTQSSRRSETTSGHRQQETGRREEEDDDRRRPHREGRGEVAREGRAGARQSTSENERRQRGQREVREMGDRRRQGRRREEGREDEKHKEKERRETETTREDERHDEEKSRGRRK

SEQ ID NO: 972825 - protein, 103 aa, Homo sapiens
MTFSSTSVRFMALPPRRGQFQHDSIYLWRLPACAKLFVIIQHNTHGVQHPALCFQEELFSSRHLFVNNSLRYTTLQYISEPSSPFLHIQHHRHKIKAFSPPTF

SEQ ID NO: 972826 - protein, 70 aa, Homo sapiens
LTAPDPFNDWPPANGSPTKLEDTSPHVWHLEIGRPRFNYISTETVRITKEGKKSSSRYNAHSKLSSQNKS

SEQ ID NO: 972827 - protein, 230 aa, Homo sapiens
  misc_feature (163)..(163): Xaa can be any naturally occurring amino acid
LLHWGFLAPSLGPRLNCSEPRPVLRLCAGPATQPLPQLLGPPHAAPGFSLRRPLACHPASRPCVSWQTQVGLYLSPPGVSPRSPAGLVYYVAPLFLVSLTPLMGGPLRGSSPLAQSASGVTLPLALPTRHDWGEHPPSPATPRRPWRVGCLRLRGDMASWRDXYLSADRALLLPERHGMMGPHVYDRSPGIVLQAAHATAILCCSAFLYALGSRMHVPQRIIMAQCAFYC

SEQ ID NO: 972828 - protein, 133 aa, Homo sapiens
MGGHKYVFGQMSVAQNAIAHMSVVGNALCSVNMFQMRGTCVFVKASDTLYQIEVFLISDSCPSTDNVLCAKWSRRQCVVKCGCKDGSYRCLRPLLWLVGPSHPRAAIVATTKGAPGVFAVVPRHKLITAEYIF

SEQ ID NO: 972829 - protein, 70 aa, Homo sapiens
SVLSTCREQYIHHPVGGSATLVVVYYTLWWCSNIRRRCDYDGRPPIYEYNSTIVLYRPNNYSGVSSTLAL

SEQ ID NO: 972830 - protein, 110 aa, Homo sapiens
MVTCNFRFPEAVAPTQFSPGGPPFALGKPTLLADVKCVILGVPPYDPSSMALLPPVGPRVQLVPCLSPGPVFNRPGGPRSREKPPRRDPFYSATPNGGGAPQTAPFKYGG

SEQ ID NO: 972831 - protein, 110 aa, Homo sapiens
MPSKHNIRGAPRAPRVKNTMDNRVPQDIAGQKTRAAVTPHKKPRGGSHRLVTTPHRQGVAKISGGYQHSGSPPTLHKKIPPPVGMTSLQNDTHTTTTTLHSQAITPHTNQ

SEQ ID NO: 972832 - protein, 183 aa, Homo sapiens
VFQCVHHPLARAPSRSSVGVPAHRCRACPTCAGAPPAFSLLARPALFLALVSPSRFAPPSLSVLVAPPSGGYVAVSSRIFVGSLSSPGLCILALRVEVRAPLSVSHRQWCARSLHLMSFVNTSQCRCRGPPLYGFYHLHLILLLSCTCLMSSTTFFLPHITRTAAIKYYSTHQGIPDNICVVS

SEQ ID NO: 972833 - protein, 94 aa, Homo sapiens
RFARAQKYCWNMLCNGAWRVMMMYAHAAQESTERLFKVTDDRLRIAAVVMTVVHVLFLAMMATRAVPSLASYLQPSARSHRFLEAEDVGYCMAI

SEQ ID NO: 972834 - protein, 253 aa, Homo sapiens
  misc_feature (171)..(171): Xaa can be any naturally occurring amino acid
LPSGSAPAHLGPVELFPYTSRRSFLRRAFLVLSAVWLFSYMGFCPPTRSSTCSLKGAFFSQPPLCVLYTVCPFVWPTSEVVSPPYFGFVPPTEMGVPPNPRRFTLPAGFPCLRHFSPVSTNPQLGPPHRAFPKGVSPYRGPPLLRLGPLAYLPGVTPPTLCVRHLSCLTAXTPQGFLDPPLATLLCRDAPDTKWCCPPGGIIGLPPRAFSARTLCISSEDTRYDGCSSRYVPVWRPARAVSRTPLRLQPPQHN

SEQ ID NO: 972835 - protein, 100 aa, Homo sapiens
  misc_feature (25)..(25): Xaa can be any naturally occurring amino acid
MSLLAPAGVLRMLVGDSRCGSQSYXSVATPMFAVHVLYAGVGHLANAGRPGRPRAWNEPLVSWHFVRGTPRVTTIDGHRGVFSRLRRPGVVLSAPGTRRC

SEQ ID NO: 972836 - protein, 77 aa, Homo sapiens
MTTIYCECVFSPPTVIFEGVVYFINKHYFNLVSCRQSVSYHTPSCPPFPKINPHYPILDSSQIKRSTNSYKLCPTIT

SEQ ID NO: 972837 - protein, 120 aa, Homo sapiens
LAYGLVFAPPPLRRNSVLCGRDTVVHLFTTNVSLLVARHGASQNVPPGLEDTAMRLRLWGSRESFVPPTAAGSLGDTSLLTSELCVWNTPPSSYWLCVVARNRAVIHGRPEPHTRRRPPE

SEQ ID NO: 972838 - protein, 181 aa, Homo sapiens
PLVWCVLFFVGLLFSSSSRRLLGPFFSRCGFVCATHTARRHGWRDRGGGGGRRRVGPGGTGCHGVDLRGFFGETRFFAPASVFSRCFPPPVWLPAPGLCNVSFSVFSRSRIFGRCSRLWGFYGALYVVFEPLWGATLRSSSFVWPANVPPLEVSCGRVWMQAVLPLLGFESPGSKQWHPPL

SEQ ID NO: 972839 - protein, 64 aa, Homo sapiens
MFVGTPPGEIRKGTAGCLGDRITFICWGRCPGARFCFQGEKTTTLSLCRPMAKKPGKPPNGNKT

SEQ ID NO: 972840 - protein, 119 aa, Homo sapiens
MGVDGCVHVVAPRVRRHRAGLQEVSVPWQGSGRPQKDGFRGHTCRQSLRRMMDCCVLPRHVDETDHRKTCMTVVRRNGEKYLQIHVLVGPQVTHRWGPRFPCGLAGMESRFSTMNHGRE

SEQ ID NO: 972841 - protein, 289 aa, Homo sapiens
LVSLFVVKTTTRQKAAGGRRWRRPHESGGSSYISSYIPSLVGGWSPIRVGLFLTALIFLKWPRNVIACPQGATTVSAAWERDVLSPLRVEKTRGCNRPGAFSAVVGGSTYRYESSIILGQQDISAGQVVSCVSPETTVMAGAGVFDPPALYQGRLSSLLVEKIAQGLTYAPPGGESRPALLEAAPPPAGGGARPPSVWWTLPPCGGIYMSGRQSVARPAPFLCPRDQECSSEGRLSPRDYSRCFPPGFVILPPRVIVFVAWTPLFSHRLQIAYKPRAPHCWERDIISGF

SEQ ID NO: 972842 - protein, 227 aa, Homo sapiens
LLFAVSCCVCVFFLSCCCCCLVCLGSLVCVVVLLFLCGFREAPDRLLDLRRAGGGGGHNVLAIRRVYLREVFFTELSLFFHRPTLFLVPPKIKVLRSRFVWPLPPLWGYNRGHKVISCRYFQRTGACFPSPGVVFLRVCRGNQLFPEWAASRCVLMVSFCVSGPPLGSPNLGPLPFRGFVPPTGGPNKGFSPPRVFPDALTRGAFPPPRAVLFWVCPGLLLNKGIGG

SEQ ID NO: 972843 - protein, 115 aa, Homo sapiens
  misc_feature (1)..(1): Xaa can be any naturally occurring amino acid
XCSFRFVSRVRCSVCFVRVCVVLDVTIWLLFVVCGGRGGEEQSDEGGGRVGAAKEEEEWFMLDCFSIKFFFPSRVFFLVGDSVLNGVRICFRSSPFSSHSGALSFYFNDGGLSPL

SEQ ID NO: 972844 - protein, 74 aa, Homo sapiens
KVSRSLFATSYNIETDSVPFKGDKVTKIWGALYNLYAKGLSHKGHVSSCDNKSYNNYDISVPIFPNIIETDSAE

SEQ ID NO: 972845 - protein, 228 aa, Homo sapiens
PARTVQTSGKSRRETSRPKAYFPAASKNPGATLPPVVGTSAVATPHKRWVAYTQSTCRTHSTAVHPPQGGEYSYHPTQGETRRTRLPREPRGGSTPSCWIPPHAPSGGAHQPGATNRPHTRGPMPCVFLTNTPSRGEQTTAGATPSLLLVQPVQYTPLKVKTPPGAVVWWRSYQAKITHPLPRGGVFATQARESYSRTPSSESRGVSPQLWSVKRLPPWPLFLLLAPR

SEQ ID NO: 972846 - protein, 83 aa, Homo sapiens
ERKSVRFIHCPHNPRPTRRSYCIISISPLIYDPPPSQISPSNNRHNHHPNHMHYLTTNLPTHQMHNPYHTPLHKDATWILLIT

SEQ ID NO: 972847 - protein, 115 aa, Homo sapiens
MSLPRPPPPHRPRFWHTTTRRCVLAESPLGATSPDGSIVSKRERVHRNMSLGVESLQQLSIHPWWRHHSPPTDPTGSPFFSIFHYKLVFPPYLLIRAIFSTNTPLYILPASPRAK

SEQ ID NO: 972848 - protein, 219 aa, Homo sapiens
  misc_feature (117)..(117): Xaa can be any naturally occurring amino acid
MAGVLLDFLFRRRGSVRTPLPWYIVSMALPPAPRLPTFLFSGPCRVFRLVRWYGPCLAVAVCALQEFHRGGRVCILVFARVFSGQPPTSLPHRLCYFCLLCAGRCCVPMDSTLCVGXEGVLPHSLLPTSHSRHLLGLATMPESAVSCVVQRAHTLSVWYLYVSPGGNPHSFYKKEGALPHEGMIKAFPRRSFYGSQSTYVVCVCTELIPHKTVFLLSHQ

SEQ ID NO: 972849 - protein, 111 aa, Homo sapiens
  misc_feature (100)..(100): Xaa can be any naturally occurring amino acid
WFGKKSGGTQEGLEKKSFSLQQFNVRKLLQSSGYLRVQNQVPREISQGMIFWGAIWSTWRFLNNDIPINGAVFSIKTTGLVTSFGILVSGECSSSHPVLXIYRNTLYPIKA

SEQ ID NO: 972850 - protein, 410 aa, Homo sapiens
  misc_feature (96)..(96): Xaa can be any naturally occurring amino acid
  misc_feature (183)..(183): Xaa can be any naturally occurring amino acid
  misc_feature (302)..(302): Xaa can be any naturally occurring amino acid
FVFLCVGLVFCFFWVCGVSSSLSVLVLSLAWFSTAGVCLLLLRCSVLLFALACSRRLLSCVFSARWLSSSSLCRSFSALVVLAVFCCVVFWCARFXRMEENSAGWTWGGRQPPEVVFCARRVDPPSVGLRVVLSRVSLSLHKWSVKPTLVPVGSPFLFCRPNVGSFFLLSGNPPGVSLSPPRXPVVCGAAASIGASSVVMSLSACGVGNIRLLCFVSLPEYTPRGAPPPPYWGGFLKHTSGRLCDRPRYIPFLAGVCAASCLAFPCNPWGVLFGLTWTPRHGSVCSGPAGLHRTRSSPFWGXRGDPHILCHGALPLSGAPYGSCLALFLDTWRPPPWLLHRIEHPRRRCGKRRGKEDRSVFLSRKRRERRYFHTGSLLSLTTLDAHRGGVFLCLHPPSREQSSRESVHDE

SEQ ID NO: 972851 - protein, 98 aa, Homo sapiens
LLACSLFGLRLCTFPSGPRLSLSSSLSAASLLRVLVLLFRVLPSCATALSPSLVLLLPPRAGACALLGPLLRSPPPHGRSVGLLWGAAPLPRLILVGH

SEQ ID NO: 972852 - protein, 267 aa, Homo sapiens
MRRHHLRVNRCAPDRRPSSYFGPRVKSSLVERWLLLVRKLGGCRRCARRPHMGFSGCGVSLCAVCLSRSPGLPPGALWCARRRGESPVGFLHKVVSQSDCWLGVARFEGVSMLNTRAIPLVEKLFGVTPDSLRQRRNHLGYKISGGHVVGGRHLLIEKSSGVGGYMEAGSFVQPHTGVHNVACVHFFLSKEAAHSRWCCLHRRGSLSFNGAGIYRWCSPPCWAHHHTRVFHTIVRRSNNQLGRGGIVTTAPLLMDMMRVAHSPGGSP

SEQ ID NO: 972853 - protein, 173 aa, Homo sapiens
SDFCVSVPLFFLLWLLLVSCAFRVSFFLAVFLASASLSLLPGLAVFVALCSFAFLALLVFACPLLPLRVLLLRPVSPRVLPRTLSLLLVCVVCAVCVLLYVLVVVFLVLLSRVLCSVLVLLVGFCGCVKVFSRGRTEAEKEEQWTFFIMFVGNCVPPGILVRELWAPLMSPEV

SEQ ID NO: 972854 - protein, 220 aa, Homo sapiens
  misc_feature (195)..(195): Xaa can be any naturally occurring amino acid
LPGGPPWPRGSRGPRVGGPCFDQIRGIASPLFPPVSGSLFGACASFARVVFEGGTFVGPLVRPHLAGRRAPGFHPPPPGVVHARPWKDVLLRSNTSIVQKESYHHKGRRSFMFLFGIELFLRDIEEVAPAFLFRQYGKGFHPLISSTILDDDSSYYCWGAAPGVIIPVSLDKVGATSFGPPTLTLWKCCRAFRPXAHHVAVFFPVDTHMALNFPYISEKV

SEQ ID NO: 972855 - protein, 232 aa, Homo sapiens
  misc_feature (49)..(49): Xaa can be any naturally occurring amino acid
HPPFCVALFFLLMFLFFGSCVLDCFVATHAYRVQLSSVGWSRTGPGERXGEGRGRCRCDLVVRICFFSIRRVDRLSCFLRRSSELFACLRVSLVCALQCRCSSLVVRNDCISAPRWGNYLSFFGGVASPPSSYFATGQFVFDHVGSAPALSSWEYRVFSVWVDKVRRRIPAPVWAASPTNVGGRLPPLWSVLCRSPFGVPPICYLHGVFSPPAGDICGRRECVASHRRLVLV

SEQ ID NO: 972856 - protein, 108 aa, Homo sapiens
  misc_feature (99)..(99): Xaa can be any naturally occurring amino acid
TTRLSSFLCLLRLLLCPVLLSPAPTHTLRLCSRRSGRRGEASACGGGGRAGCVWSWDAWPFIDDPRLNTPVGVGVLAVGVSVGLFFGCRHLTATIRTVXKKGSRWATG

SEQ ID NO: 972857 - protein, 233 aa, Homo sapiens
GLKKYHVYFSEMKVVNADKSSNQEFYDIISSRCSPYGLSEDSTFLDLTTGDYDSTHNILTGKWVVTENIFLILGTCLLASFRRYDVSIVQSKMGNDSFLPTALYYGWVGHLESPAIIQKVSLLCNLDLSLHVFYAGQVFYWQLHLKAICNQEVCLRLAGEGVLVNEEDKEGFALQGDPFLAYRGRTGSQCMIVLPRRAGWYANEDVHGLMDELGGANSFWRFMAQYLKWTLAL

SEQ ID NO: 972858 - protein, 199 aa, Homo sapiens
MSNNSPDRLTTPFRNPVLLSCSYLNWKTAIKSRSRKLHGHANTQNKNKDHTQHRTHTQTTHTHHPHTHPRNRHGTATKYKRVTREQSTDTREENNNNHIRVITLSGHTETAQQKRTYKQKNTRKENPPNVEQNYTNATNEKRPRAASGRRTRGAARRHPTSTTRGTGKTKIDTTSHASRDSTLDRQCSSSRVYREHKKT

SEQ ID NO: 972859 - protein, 298 aa, Homo sapiens
VYLLRSRVCTVSLIDEVRHPEVSSKRDPNSVDRYVAQGRRVKTNYTRDRLVVYNPDRSEIHVRMQRYMDMSCNEVITRPYTYGNTSCILTSQSVLMGHTYPGTHQVQIRLHVTVLFHDYMLQGSGVILDYDCSPRWTRGIALCTNDLRIIAIKALKECHRGILCIHSLNDYRCGRMIVILAMLDLIDIRRIGGIKNWCWVSTQAGVQARIARTTWVTRHGPGPLEVQLPLKPDGGPERGENGLDNRPENAYHPKGGRDTDREQQYIQRKCTDRHTPHIQKHTRGAKRTKQIRKEHSRL

SEQ ID NO: 972860 - protein, 106 aa, Homo sapiens
MDILCHHSQFAREASVAPGKKGRPEGTKVWMRPGPPSGISDPSGQTGWPVPEERSWHRQTTPRDTHPGMQSAPGAPRHGVFKDLEAGLTATRGHLTRAAPSTLRTS

SEQ ID NO: 972861 - protein, 231 aa, Homo sapiens
SEDLVGQVRGHHVTELEKALNSIIDVYHKYSLIKGNFHAVYRDDLKKLLETECPQYIRENGLRTSGPEIGYHQLIECSMNSSEELTSWRFDMDVAWQTTKNGHERKPQRVAELLGPEAGPLDMYLQNNKVINTTKKKNKKKLKNSGSGAPPAAPEEKVFENNVGWGAAGHPDEVKLEHCCPTASSPRRRHLGTVTYAPGGFSTPFKKSAGGDTDGLSDTNSQGRVRRHRSG

SEQ ID NO: 972862 - protein, 142 aa, Homo sapiens
MLSSKSRVFRLVLFQKGKLLWGYIEKGCFVLASILCSSDRLFLLGGLPPPRCMCFLRLPVVIAQQNTCVNFKGANNSPPVGVYKNMVVRGRSASPMYNYSRGGSIKRLSSAPACFFRQSLSLALAYTHINRACYVHRSGSFR

SEQ ID NO: 972863 - protein, 213 aa, Homo sapiens
MVYWANRDKRTSLIYVCVYIVCNVDIERERHGETDSPERDTERKTAPRRKAYVRETATGEPQRGPGNKQRARGPTYKKKIHTHGEKIYQREEPPRGAQKTLKGCTTWAKIGAHTQNNTSPPETSTSREELTATTPHWCTPQQASTEPPHILYTSTEISFVFFASHTLITRRLVIITTHTRTRHPPPTHTPATTHHPTTRHAHQRTLPHPPHRW

SEQ ID NO: 972864 - protein, 112 aa, Homo sapiens
  misc_feature (21)..(21): Xaa can be any naturally occurring amino acid
MGAGLRAAANTCVHAPTIIGXPPRPAGVQTARRDLVSCALTRDVYSVSSSYDGPYPVPPRLDAVYPAGPIPDALGRCRGTEALVDVVRPVVLLWDTDQGRIRLIGRYACPRR

SEQ ID NO: 972865 - protein, 82 aa, Homo sapiens
NHIDIFFETALIPTLAIITADEANQPERLKCRRILPMLRPEVGIRFRLLDRHLIYYCEQHPMLNYIIATTALSGAKKLCENS

SEQ ID NO: 972866 - protein, 189 aa, Homo sapiens
MPGKPICNLIFAYLAKASFRQLTLADVQPIKLPFRTKGLSKRCSLPWESAFEKVIFLTVVPCVIRRAAHLPPSSKSPWGTLCIGLGPPECAVAKNLYVLPYSGSDTDLFRRARNMAGRRILFSAQYHSGGAAPPPAPWTNHDSLSFTTAVNDPPLFVENTTSLPPIVRVSYPIVAPRRRSFRVFSPQQD

SEQ ID NO: 972867 - protein, 278 aa, Homo sapiens
LSSGDLHSRVLCSLWCTSRVWLPAFVRRHKHWGLSTGGFNPLPRPRGLGRPLRRLFGSRRTLFKLPGPYSFVSSPFLVGGSRHARGNISCSPRTWFLCRSSRVRYGLWSQRFFIGDGRSVIPLKCALLWSYRRGFPPRVLRLRVTLMLPRDESGYSIVVSTEWEFTYFLKAEGECSGLINAPCLRLHPGSKAGTRLMHALTWPPSIRRRVYFSVSLALIFRTRPCLQHLHLSPRVPKGAWCLTLFWELCPNRILNKRAKPPTTFWAPLFLFPPGKTPK

SEQ ID NO: 972868 - protein, 253 aa, Homo sapiens
  misc_feature (245)..(245): Xaa can be any naturally occurring amino acid
MEEILFAQGFLLPVRSLSDWRVPGWGGLKCIATDDLILCYVLFDRPRCRTDVTNDWRCSPVRSWFSGAQDATARSVPKERVCVYTYFIELVHVEAMAFAAGNECEAQNAVNTVYLHGVLCSVGISAATRWTSQGHGVHKALEMTGIAAKRPASEFVVPRSCAGRRQTHGERDWFMYSRTSRSSLRCNCERELGTDEAPGAATGHGGLTRPATSEGNGRNKRGEAPKKDKPREEEKRQNAGKDTQXEHVNRHET

SEQ ID NO: 972869 - protein, 248 aa, Homo sapiens
MARLFVATITALCEWFPQPRPYLDGFLPYLSPRGSAHLRRHAPGAHNIRWHVRPLTCFLQHIIPPFSLMLPLIPQCCGLHNQVLLTPEIHAALVGLMKYYNGVHHTQWGAFQDRVTHSLGYSFLRDIVHSIYSNLSEKWCPTPGLVVREIALDLFYADSEIHRPNPCDDKAACSGETTARLSGPHNDPVTTALAMGKIMSMPFNGPPLFLLPGRKPPPLQWLFHWGCKRAPFSFPLPINTLLTTPFMT

SEQ ID NO: 972870 - protein, 322 aa, Homo sapiens
AGAPFMCCGLFEATHVLLYPRWDTTTGFDPNPRAPGPYCSCAKTLRGFVLLHPNLALFVGVGSCPPAAICPESHLGEYPPVVLANQVVPRSPVVHRQPVAPTTCVPAEMGGKTHSRIGASSRQVKTVEAPRAPFWDFQQGQDGNIIGEPHKECQRGLERLCTHKRVATKKRRADPAGTVDDPLCVSTLSELKKLGKRSAEEEETPRRTVAPHNTKRGRRTREAQYGTKGAILQGASSYNKCHLGNREVKKASSNLVRSGSERSGTKVEANRLSGRRAQIPRVCKASNGRPQTEAGGPAPTTRRRKTTRGPPAFKKKNYKPHI

SEQ ID NO: 972871 - protein, 125 aa, Homo sapiens
LGVRPLAPGKICVLVPQTDLSSQNRALGPVAPLSRPFEGIPNRVVVGPLNIWAGGYNTMRGLLHHKHDVVVAPGYYSTPQEGPALTWFHRGWCCPHESYVLLPPPAFLFTTNGGFALPTHGVLRE

SEQ ID NO: 972872 - protein, 206 aa, Homo sapiens
YDDQCRIGLKKIRAIVPRGSLPTKRRTRRGNLGHGPKKRCKKLGKTGGPRHPPGHVAPPGGPRPPAYPPASPLWGAPAPKQKNNPRFGDEKGWPAAFQLQQAAYTSSICWRPPPSVKGLPPRPPAEEAVRRVIHHLGRHTSGSWNKETQATNGEGGNHKTRGTKRGLLGERPQNTQQRRHQKIPTKAANKQKYCMPLVEARPPTLL

SEQ ID NO: 972873 - protein, 119 aa, Homo sapiens
YLGVFSVPQSRGTLFWVFPNNHPGFSHHYWGLSPPRYNPLAPRDIGQASDVFPHECRICTAFYTHESTASSDSSTEEQVPPICTRGFWIKPRVLHPMAPTNGPEKNRASLILLSHQKKC

SEQ ID NO: 972874 - protein, 100 aa, Homo sapiens
DFPEVGNPGSGPSERERFTKANYIFLQEGVSSYFVYTRVVPPLATWGWPPRDHTGSGHTATEVNVAEKKITHNLQGPLTTRLCVCSNPPIWAYLHFGNIE

SEQ ID NO: 972875 - protein, 235 aa, Homo sapiens
RFKEVVKRPLCQFWGKMAASMWGEPLVHTRVGVRPRKDTFAVAPWYAATGVVYPRCCLFQRRDKEYALLSPNSPGGICWGVDKQDVVPTRAGSLLFLESTTGEKWTRVSTTPTSTRAKVSPHRETPRVCLGGREHTTEPELEIMTGHAAGHPARGTRDPPGRDRTSRPVSRATNPRVGTATLTWDTPPAVFKRNTPPRPAQRRNNTPDVFSEHLRTRPPGIAAESPRGAEEDLEG

SEQ ID NO: 972876 - protein, 167 aa, Homo sapiens
RSPKDEARVVTAKSHRQKVGLQTPDDSRHIVQLSVFVKSAPTRCGIAKKTSGPNKSGASHQPAGVPRQGRRAVGTTAVTKVVSRRAEIHAIARRMGSAASKRGGEPLQRLMGTHLVCAITQKLSWEIFLGLDEPKQGGAQAYYPRISLKRAVLTIVRPRNELRAARV

SEQ ID NO: 972877 - protein, 309 aa, Homo sapiens
MDAAQLSPIYIDVSGRKPVTSRLANLSTLGPGSPAHGRPLSHTYPFFVDTDMSGAGHALIAPYFGVQPRNFVTPGAGTPASVGPPVPPLHGGHTVQEIPLCEVVMLNTPHRGLLEQPPEIPNRRPSEYSYPRPRARVVKRRTKPPHLGDAMRPQKEITGSPQGIGDNTRAWQISGRGPSSLRKNYTKRQAVGPTVVSPHGEETPPPGGGPRGRHKPHRRSKGLQGPPPPPQQAVKTPLLWTNKRRRQPAPPLGWAQGTGGSTSTVGADKGTAGNHLRNPRSAHKVIHEYRGPYSHVTPPRGPRPQSRPP

SEQ ID NO: 972878 - protein, 162 aa, Homo sapiens
MACTPSALPSAVPCTIGAAPVRRRDEAHHILTVKGAYKALLWGPPCSSCMIPPSPPLWCHCTGDPRAGNLLLSVGHAGMITWSSREFLGAYPGLFCFSGGPPRGATASARSLPGPPGVMKFLLHLAPNHRCRRRLGAPYTKTDGGPPSPVFIGRARLSWPRF

SEQ ID NO: 972879 - protein, 175 aa, Homo sapiens
ESLQRERWQSRKMVDTYSRASAHLSRGAPPRGSPRESPCCTPHVERPRPWGKQKTGGPPGGYTTRAGDHTKRDTRHSPSGDKRRPSNQRTTVAKRGRNTRGGIPHLHRKERESLLQDSLPIPHDHHLVHRPRKAIRGYRSVVEPRTHLSSLAWEKKTIYAPRCRRHGGRTPAVCW

SEQ ID NO: 972880 - protein, 295 aa, Homo sapiens
ARRDALPDTQYGWGPPRGQTAGGGKGVPPARVAQGCILAPRSPKRGMCAKRVRQIEPNRAPPWVPTLATWNNTWFLPGDTFIRGGDVAPPRHEVRKVNNMVTQGGVRSAPRDDKKGLREMVVQTLFTTRASERGATQDRTTRGRHTPDERPVNTHRGGLGHPHAATLLTEERAQEYYPDRALETDTRCGRHIYNPLGEAGRGGAVRGTQPVERTYGRDELRKHHGGGATQHNAFTPGVVCKRILRKVPTFELGGQEEGDDGLMATAGGAERVPMPPRIRPYLPPHRGAQGGTPFP

SEQ ID NO: 972881 - protein, 105 aa, Homo sapiens
MCAPGISVLKDARRHQARLGDIVWENTPPIIYDDCIRSALTNTIRPDHPLRKHFISPCRSDCTHWGHTPHMPEKVLPSRGEIFNAKSSTQGWETELLSKQQLLKV

SEQ ID NO: 972882 - protein, 55 aa, Homo sapiens
MSIAIPCSFFFLVLSSPTRIEFHVQFGDSREHRHDVDCFSPVTKKPSLNSPPQQN

SEQ ID NO: 972883 - protein, 106 aa, Homo sapiens
MSYRRAHSVLILKEEESSAVIMYSSSSSLWAAQRVLRVVTTSCVREHDNSRPSRRREHRGSPPQRAPADSKLIMYKIKYARATSLIFVVYIFRLLRKHPLRAPHVY

SEQ ID NO: 972884 - protein, 142 aa, Homo sapiens
LVCCVTGSKVALGVSPPGSFLPAISLIADSFLRFISRPVNQPALSPSEMPVDQNENTPGLPGGGTTPTGGVSTCMRLYGMRYPSLCTIVLSSIGLRVLVAPPAAPPAAGRVCDRTLCPDAAAHVLARSGCPGALMANSSRLE

SEQ ID NO: 972885 - protein, 106 aa, Homo sapiens
MLNNLGALVQNSFNRPHIVERAQHPPLSWGSLPVRCIHTPNVWYKHSRADNTYEKLLRALTQAVGSIKTTRLRWSNTSCGSPPPEDAIVTTSLEGNLVGGEKICAV

SEQ ID NO: 972886 - protein, 65 aa, Homo sapiens
MVKKKAPLLKSLGADHCTEGGGANTLKLMLQKQPGSEEEHSCRAIAVGYGPPREKMETNRLGKKN

SEQ ID NO: 972887 - protein, 195 aa, Homo sapiens
  misc_feature (102)..(102): Xaa can be any naturally occurring amino acid
ENTPAGDREHRSGGAPPREQGVATENCVGTPQEAAPNRGLRQVGMKHRGANQWGGRRPPSEEHKHVVPPTTVGRAHRRPPLTLSIEEDVSRPRSLEDAGRRXATAGRPHVFEDVARAHEKIAAAPLREPVPHTEADDASLRKACTTARGFRTDKSPCYYRAATACVEKEKHTVQGGRDNHGLRMGIHPPLQNDGR

SEQ ID NO: 972888 - protein, 211 aa, Homo sapiens
MRPRRSFSRGVEANDTRGVFDTLAPTPTVFFRQFPRTEGPIDEFGPKKSPRLAGEPLLRARNSLEHFPLIPPGYRRKCFLSPPEYGKKVFLHHTGPPSASVQPVSRPEASRRCYAPPSPCPHKRVSPNWAAGIPVSLPRPGILPGNLQETPSSNNSLKVRKRGVEKSFIVNTPHDLVYGANPGYIKKDYQSKNKRCLEEESTPSQDDYYLP

SEQ ID NO: 972889 - protein, 154 aa, Homo sapiens
CLVDVPLEPAVFSPSGFSLRCCQILVGSRTVVHYKMSVAGRTIRGVLPLCRPRRDFHGLPPASGPGELPSFFPRAPEFRLGLHHTRYRLGRLSISLTGCLLWRASSTLRSHSIGVAFVPLPGSCLLSLGVARAFSEEPPEAQQMSPKCSILRLY

SEQ ID NO: 972890 - protein, 128 aa, Homo sapiens
PLCGGLNRLYRLRRLTGSEPLSDAPRAFVVGAFLPGTKFVPVGYEGVSLDVIEMCSFRGVYERPHIHVYTQQCVNRVQETHPTLAIVVAPQKYLREHKHKEIIYYVHQSVPVLAAIVRVSSSNAGACD

SEQ ID NO: 972891 - protein, 274 aa, Homo sapiens
PGGEVCPHGGPTATAGVTPLGAISCDPPGTKSCAKRHRGDKKGGSTFAARKAYRRYRPGRKRAFAVRSRKRRPRAWGKPSSPLRQAVAGNGTLQEEKTTLACAKVSQSTRICQVWKKNVHRKVGDKEACWTKRKGKENQVGTGSRHRRTWVLQTHARLDRLDDRSLRCMYSLPSPLGQKTPAQEGSMTPKATPGPGLLRRRFSGKMVWLYRPNNRSVSCTYTQDITTVHTRLRNTARQKEKTRYVNLVCIQTHNKVSEFCSNNNKIGYFLCNQI

SEQ ID NO: 972892 - protein, 149 aa, Homo sapiens
CEDIGKNVFSRRGSNPDPGFETTRCRTAGRRPFYGGFLARTTQVKNLSRSAFGDACSTANNWGFLEKGTVPHKQCVYVTNRESGVSPQNAVTMLAHTNRFVCQIGSNGDVFSPKNLLAVCPPPKHSPRSIDFRAEEKPPRVFANTTCLQ

SEQ ID NO: 972893 - protein, 313 aa, Homo sapiens
QDTRGAEQQTIILLPRDCPFTYCRAIRFSAGRITGATKMGRPLLYKVSRTASHASADLYGVHTGGLGKNPLWGHNHILLMLPVHGSVPSMDRGKTITESRFSASAYCRLLSLWWRGPYFRGAPPRGWIVPAPYPVVALRVTPCSQAFGTYAFPAPGETLLRAPRTIFSPLVKHTPPLAFVVFATQRDPCMGPLGNSIQGHFPALPLPLSLGRAPTPSTRGHHHASNPPFWQHPPKGAAPWNTPREGRGPHHAEQHEPVVCIHGRNTNARGLPRGRRHDGSTPLSRGQGKVVCPHKSKRSSGAASGRRFHHNKN

SEQ ID NO: 972894 - protein, 109 aa, Homo sapiens
MTLVDVLCALGHYALCYCCTRSPPVFVCLVGGAFGCLGWCPNTAGFTAVVPPGKSVFPPAEVQVYPLFVFGSKIRTEPVSGALLKGGCQQMSSLLGLFSQKHVVSFRCQ

SEQ ID NO: 972895 - protein, 246 aa, Homo sapiens
PCNVLRPASDKMSCRRTCPLLIRLFLLGVIPARGDRPTCVLVVLEYFAPQRSLVVPPPPLLRVLSVPHRSRVVSRGGLCNTAAPLKVGDTTVLKRPIVQSWAIVSVSCSPVIPNIRGVVSYDIRTGVPPLKRVVLSMLGAAPCAAPQCPPLRLGPIFAAKLGGGPLALTAPRLPWAWNEPALGRCPALGLVPSYCEEASCWLRHAMCSPASAQLLFALLAVFRPPTCCPFAVSRTYSPFQRPLFLD

SEQ ID NO: 972896 - protein, 286 aa, Homo sapiens
TRKGYRTRNCLKIERPLEPGSRRENTSGNCGLQDLHRPRCRCVPPQAEPGSGGGPSIPGPTIAVSPPAKWDGACESQRWLKKIRLHTAGDHQEERPTVAQECGTIRPRLYEDGSCSSRLQCEDPGALMKNLYEPGFENPPVRLCGPPGSLTWCRLRRAGPSPPDVASRRKNTGGERAQSPAHGLCSPVENDTAAQPVAREMICLLDAAPRRKREDEIKLAADSNTCGSPATPDRHAPPGSPPPPAQSAGTTIVVGEQDPKWWGPAPESRGPLGGRGPNKKPSVNNN

SEQ ID NO: 972897 - protein, 217 aa, Homo sapiens
ADSSQAVGAPTMDEKRRTRPGRFGRYHMGVYNTKGDRTIPAVRTISRRPAGVNSGMPPPLRKGRLPPPPRRDWSTKKSGVGVDNARETGVAQDAANVQRVLTNEHTYVAAPRQCRRLEVSTRGGGEGGGNPPRRGHSKGPTPADPELAAQDTQKSLVDVPQEKPTALLDQNSLSAQKKEVVRPHGPPTTMVDKVARQNAAVVGKRWQNHTKQSLIIL

SEQ ID NO: 972898 - protein, 169 aa, Homo sapiens
MLNPALGPKRGGAPRERIAVALSFFKSDLCLLDYTTLYRALSATENGAQTAQTMVISNTSGPPCGKSLRCTQYVLHLRLVHIRENFSAFFQAISKTNVLFPVTSIARHMYYCSTNMRRTPQRGGLEQHIEFRASAIEVKRGILETNDALVYYQWEEAVLKQSNKGDPND

SEQ ID NO: 972899 - protein, 319 aa, Homo sapiens
PCMAVCGVCFRFCSFATSVPVVHVGLATAVLVAVLVHYDCPVELRVSVSGGFLLFSGQPLLVALRPDPAPVCLVSWAALCVRPKSPGCLFASDDRGCVQGGSHSPLRIGAGVCPLVRAAAETPACFPARGPLYFLTWPLFFAAFPPPLRVLPTCRISRGPSLGLLPLLSPALRGLVKAMMHTAVHPYSGGFLYTVDPYPRAGTMPQLAGLSCLPHVFLKFSRQPSGRETGIFCGSGTLWAIPCTMGVRKVDVHCCVAGRQPCVWPDSRISFPYVMPWLSFLLRLLATPMLCLVPDCGVDPHGREFFPPHKTSLKPPAQQ

SEQ ID NO: 972900 - protein, 109 aa, Homo sapiens
EYAGLVYILSCPVVSSRALVVVDSRWAGWSVAVHRCGHGGAGATMCGRLLIAAVGSYWHYVGSVAAPEVLGPWGGTIHLRRILARQAGAATMCAGVMALVAVPALGLHL

SEQ ID NO: 972901 - protein, 100 aa, Homo sapiens
GGTQYSDTIDMGRLGLVVVPPHLPPQLGVMSLAGVMHLAFVGTRCRHGKKSTGSQQRPGCEEGVHVYGQKAPWGQLNSGQARSVCSAQNDDVQLRYKRGN

SEQ ID NO: 972902 - protein, 250 aa, Homo sapiens
RGSNPCPRVLCFAPSPGVLLVRPPRGEFPAGGSRYFTRNSPGGSPHSRYISLWGCTPGSGLTFLLGATPFVVPGAAYAAAPRPSSPPVIVLCPRNAQQQKWGHKVFVNPRRTQLVGAIGPPLVARMCVFRTNRGAHPRLTIRFASSVLWRAFRPPWVDTVQRGSYLGGRFFQPSPKGSISHVLLLWSFFNAGMGPTFFERCHHHRQRLEVKFHFFPRSPPVVTKTHVFRGAKFASLASPDQYRASSQSQK

SEQ ID NO: 972903 - protein, 117 aa, Homo sapiens
FLSYCRDDRVGRDRVRRTIILEGRSFCRCVPYRLLFFSIARISSLRSARIFFPAPLRHASSLFLSPPYTRRFPLFASWLARRVLSLPFVCDLVLVGDNSPLGYPPCPTHVGHNITLR

SEQ ID NO: 972904 - protein, 210 aa, Homo sapiens
GRYPNSSRWQGGGSQSPPWGNGAAHSRLRVCPPSLVGAWPQASGVLRPPWHDVARRLSPLCVKPLSPVHAPEVHCPPQGLIAPNTHSHRAGPYQRVPPRLMAPLLVASRHLLQPGGPEWCLVPPPPRRVEFCPCGVHAANQGGRSPSWGILTIAPLPARTRWESARLRSALRVTRTPPFVVRPLLLNTAPSHSSIFCVSKHCPCSAANSL

SEQ ID NO: 972905 - protein, 107 aa, Homo sapiens
MSVCCPHTLGTPPAWAPPRCFLPPLWGCSPPRQQCPADSFFVGGPPLVFVCWPPTYGVYSFCPAGQYIPRVFAPTPRGGGLFDHTRVGGCTHHIILWGAAPPPWLLV

SEQ ID NO: 972906 - protein, 154 aa, Homo sapiens
MLVREALPFVWRGGESRSLSGRCVICSRRCFHKEAQRGACLLGGCWGDIFKQKRWGGLCWEIRGLSALLFSSSESFVHFVVSSRWSLPYQPTLLLLLDHKDTDVSSPFSPARGLTEIVKLFRVVVFSHTKILYNKESPRVAKGKIILRLPPLYL

SEQ ID NO: 972907 - protein, 108 aa, Homo sapiens
MSRWLMSCVPSLVSLWSPSLEWVQSVKMCVHTKGNPFSPLWDSRPLPPWEQNCVYPVALPPCGVSARHFFGGHIFSTSFYFARNIWAGGAHAAMGPFLCVIFREQPGG

SEQ ID NO: 972908 - protein, 106 aa, Homo sapiens
PTRGGEEQSLREWRVGDSECDHRSWSCSLLLIANGTSIIYAYLCLIFWLLCVRLFCLVYSLFAVCSMYSVLLVGYLLLSSALFCDLLGLLVVTEPSFLFLRFVSYS

SEQ ID NO: 972909 - protein, 133 aa, Homo sapiens
RNTFTGNTFCAHLFISPPSFSKPFDSSPPYFNTFLREKIFRNTTRVCFERKHLSYLRSIFVYPQNSHPTFIPLVVYATSKPAQPSTSLVKLQGVFLKLSSLLSQMYSGPPKPPFSTGSTLVQIYPPPLSNYSP

SEQ ID NO: 972910 - protein, 300 aa, Homo sapiens
MLLSGTQIYSGSATIPGGVQAAYPGAPGGAGNGESGPKAPGVRNPPPRSLCTPWGPHPAAVRRSGRNDQTQGRAYPTRIGGHHQDGSKIPPGRNPDWRRWSTSTHGGVGAARLAPGSRPGIFLCCKQGGPNNADFCRVPPPFVFVTTAPRPATLRWGYTRTPGDSATLNGRVARSDLHSLRGMNQFLRVVVAPRGVSLRRERCRTTRGRWQPAMPLEATDAPLLGARTWAGDPRSRWRDLEAGIRPREASRHARSKGTPTKSQPGETPTHLAPLSHPQEAPPGPPRLGPKKRGLFPSKKK

SEQ ID NO: 972911 - protein, 204 aa, Homo sapiens
QTLWFPQHSGGQNKRVHTPPGPKTGLWVPKGNEGLTSKYARGRGCPRDVPVRALSWILYNNHVSNRRRCIHARVLATRPPVYVAVYFLNRQYRRWPPQGDVKPGTSNGGTFTNKDLCSYQVKCPSRDHPTLSTLSPAVKRPPYRVQAGLEFPLFRKGVATNTGSMFFGFEIAKQQGALLTGKEKQRRKGPKKKKQAKFRPATNQ

SEQ ID NO: 972912 - protein, 299 aa, Homo sapiens
KRTVEVGRQKKVTGPDGHCGTDRGTDPGTGNTPMEERAPDGPYDDSSGAMDGPFNGLRETVPGAQRADSHNTGVMPPHRAVPEIGSKKYAAMRGTTKKGGKPHSHKHAAFSGGHKKAAPLRNGPTSMINGVLHQEEHKRAPRLLLSRPDDYRSEALEGAALHKTRSGGARVPPAAQFLGELPPFEGAHLAPPNAWERRPHRTTHEDVSPPRGESPRPRPPEWITSRPKGRCEKQSTKPRGTTENGNSTSTMREKATHTETAEENPVGHRYNVALGASTTTIRGGYFPQNTKDNYPPNND

SEQ ID NO: 972913 - protein, 107 aa, Homo sapiens
DNVSPIYSCRTPPHSCPRWVGSQVFWATLNILAPPGEWKPEDFLVLGQQYVLVLQPVITGDNPDFWNQGPPRADCLKPPGSTNVPPASRTSAGVQIIIPHAHPRVYV

SEQ ID NO: 972914 - protein, 98 aa, Homo sapiens
RVRSNAGRGGEEKHKRASKRPSTGARARKTLCLVPAGPPDYPGCTVGYPTTGVFACKGQKPPVPREGAPHSFSHARASVGFKTPGARRSLAQRQIVLY

SEQ ID NO: 972915 - protein, 242 aa, Homo sapiens
AQWGGQTPVVENKRPRGVHTRIVTPVLTTTGLTPDVCGSRKTPTTRFAGGHPVGCKKGPPAAECPLGNPSDPGEPTCGDDLPKESHMSCGEPLAQQQVSSEVAPQPPQPVDNKNMYVGSCESTRSRQPKEGVNTSGKSLLRGSNTEGGRNWLKTPANRRIAVGNKHHAWPHENTSPPPTTDRDKSGEQKNNELFGGEKHAGFLSAHSQSPQPPGPTLEDYFLHCTPERALFKRARLFPLNTQ

SEQ ID NO: 972916 - protein, 224 aa, Homo sapiens
MACPPSHSGGGAHRTRVARNVLAGVPPPGMTPVSGEHPEVLGRSPRVMKKGEIGGPGGTITVEQAGSHPPRRWEGYWTEVPTNLAGGDRYKTPEGGFNHPRLEELRPPPPSVRSGKSERTGTLGEHQQTSREPMPRDIPAGGHAKKCVDLTAEARIATINMPLRECIKGYEPWNPPPGNIITQDPRLDITPPCGGPDGREGRAWDHDVKPPGPYGDPPTFAHKT

SEQ ID NO: 972917 - protein, 134 aa, Homo sapiens
CRNTFNYSKYPAGVDASPPPFDEDFQNRLSRKLLVMKKLLVTIFQHRVTSRIEEVMAHIRGHNSCNKPYRRATCLPAAPLNIAAQLEDAPTQLRHSVCGIFIGVAIKRGILCCVFLAQMSKEPPLFSRRKSIIV

SEQ ID NO: 972918 - protein, 75 aa, Homo sapiens
RAHHLGVLAHETLTLLGVPHISGGKHWYLYNKVPLQERGEPPPRIRIVYRCGRRVAISCPHMITHAAIIIAPSNR

SEQ ID NO: 972919 - protein, 163 aa, Homo sapiens
  misc_feature (150)..(150): Xaa can be any naturally occurring amino acid
GSFSSPEFIRHPRVSDDIFEGKPQVPPGSCPPVTTPLFVYCPARPAVLGCLSPGGKFGNTGGPPRGGHHYSRRFSTPEVLRRGINALLPPIAAPSLNYGRGPPFDDNWRAAAQHNDEALVTRMFSILSERVALCAVPLDLLSALLTLVSXSSAPDRTMLLCLE

SEQ ID NO: 972920 - protein, 152 aa, Homo sapiens
PHMKRAAGGHGRTYLRTLRFFVEEEESSAQFLITPPPLFMRYNTPPFPGVAHIKFVGRERCDDIAPTPHHLLVGGARYICGPPLLLHTFYISPIIFYRAYTCGVNTHASLFIHSHATRVQNRFFSPTRIVSPPPPLYIYMVSTLPSPRCVQW

SEQ ID NO: 972921 - protein, 114 aa, Homo sapiens
MGDRPLHRTSGLRSPAFSPVPPEGEPPVFPSRKGDVSSPRVTHRGFPKNCARLKALFLGNNTLRRHKNQSEVRTNAPRPTFDKEIQQVSSSTHPGNLFEPIPLWTHPTLVVRPR

SEQ ID NO: 972922 - protein, 147 aa, Homo sapiens
LLPLVWSGGPRPSPPPPRCRRLCLCCVLLLSLRPRPALPPRRRPFGLAASPRLARWLGLMPLSLREMGGDESGAPARPAPPAALAPAGRPPRSLPPRLWVAELGAGVVQCNSCYQFCSSFMTEVSAEPMEYLGLAHKKKKRNRKRDK

SEQ ID NO: 972923 - protein, 118 aa, Homo sapiens
RWGRNPPLLRGHPVEVFSPAHRMGRSSPAGGIYSALRKKGTPPRMRGFYLHTQVRGGSPQSVYSCFIGSRRCKPRRTPPPDSWFCSLRKWVRAKLWMVCSCGMSNPGPAPHPVVLTGR

SEQ ID NO: 972924 - protein, 168 aa, Homo sapiens
YLPPWPAATVPATSDTVFSRAVNHLPVFSQAHAFRKCSTSRKSTPELQEACGACRSSAAATSWLVALWAFVPNADRKLPISKTHGTEVSTSAPQHRSDTPLHCTTWARIPRMFAVHERGPRRSTAHRLPSSSTEPVRPSGRTCKGALLMAEGRTSQQTRRDTAGYQKQ

SEQ ID NO: 972925 - protein, 153 aa, Homo sapiens
MAPPPRDCIVRNTISLALSRSARLTPRSARTLSSIVACILYTRLRVPPAFFSGLPWRTTFTHFWCKPPPAVGTLTVPHSLCLYIRYGARSSLNAPRIFCLDITLKQRFAPSVVMDITRSHSIRKTTLCGVEPLSIISAVSATKNHGSRTPAGR

SEQ ID NO: 972926 - protein, 264 aa, Homo sapiens
  misc_feature (1)..(1): Xaa can be any naturally occurring amino acid
XAPLGSTPEFSCAGGFHTAPAPVGVMPLPSLECVQARVPPSAAVLSWSSSTVRLSCFGLPAEVFAPLVCVAATLITVSRGCARTVSSLPSCVCGRTPARLLYVLGRRPLSLRVVYVVCPPPKKHRSLRCRPLSSKCTAFLTICSSLFGYHEELHYEQAILLLLPLPCQHQLAERKNKHSPSSSAVKTYSCFNNSLPADYKYQINEWEVLVKVPARTEPCGHLRRTPATPPPRTVGRAPPPAVGSPPFQLAGDNNQPAGTHTSVV

SEQ ID NO: 972927 - protein, 203 aa, Homo sapiens
MLSRGRTVGCSEPRRGSLSVRHPPFSPHPSVGPPPGGASLDITPTTPCGLPPPDDGGGYIPTEMVLFFSRLNPRTGATFFVCRPADVFHTSHHVYSLCVVHTHVGLPSLPRPRVDTACLVCPTVPPQRGHTPHHAACVCEDHTHTGEATRCTRSCFVKLTFYNAVYPRRLFFFRGKLCDPRPFGGLVGTRPTHILIRLRGDHD

SEQ ID NO: 972928 - protein, 138 aa, Homo sapiens
MTCVGCYHQYLYSVSTTSGLAKAVTKEVRSEGMYPPPVLYEMLAWSVILGRLTYIVTLSGGCRRQPGAPAWVGGLIKNRPGLWRVGVATIDMIEPSPICILFPPSESQHTICVFFTPPAIYIDHYMYFLIIYNVHYIW

SEQ ID NO: 972929 - protein, 116 aa, Homo sapiens
ATIVGLDLLYRNLVTVAKGSYKGVHQVYSRLLFRALSTAVPNNVPNTTQRGPLQHPRVPPLTNSADERFLKHPPPLGAYSPLIILARLSSSGTIPPETQLVFNPQKPRASFSRIRP

SEQ ID NO: 972930 - protein, 223 aa, Homo sapiens
RSSDTVTTAGKLPPWTEAQKHGVIKSQRGPKISPAPVERRPPNWRARTAPNRCRTPPERHFPQGKNYHQGPQTRELLPPRVQPNDRRPSDSTHTTIAICETRTVPNNPPRGEPFGGQMTPSVSNPKSSFAEPNFRLLEISSRGNRVVRDLPAEGCDGISRAPRLLRGSQEIATLLDQGGHASLCSNYEILAAAVWLLPNTSVMSAGQIIANSTPPTSSHHLYQ

SEQ ID NO: 972931 - protein, 124 aa, Homo sapiens
MSPCAYKTPLRVWKEGAYATYGPYRDDQATKTRGWRPVVLGTAWVYHDGYTLGGRLFLMQFKKRARAMTWTVTVACRGRLSQEEGSKSLLISTPPEALCLRECISHGPSSPYAPGEPKPRFGVT

SEQ ID NO: 972932 - protein, 208 aa, Homo sapiens
MPWWKFYSGALCGEQYSYPGLLNNVCVQITLLGADEKGHQPLLSDYNYKSENTTVGRHNTKRGRPRTPCQSVRPGGLSTQLATGSPATAPIVLHPKCEKAPPGAPHEPGFTATGGGHTNGLSASRTVCVMNTNSPLQHRLFDTIAPLLRTPPHQGKTRVYNGLSLTRCGILRVYDVSNVVLYKQISKNKSFRRHHTIFIKGFLNINTL

SEQ ID NO: 972933 - protein, 229 aa, Homo sapiens
RGVKSETGLEGTEVFTKDFAGQGPTRLGVGKDARKRRAPGIGWSTGQSCHDTALGAPRPHGPHWGTTEVVRSRCNTNRATSSIPPRSWAQRDGGDTNTTPWPSQLDPSTELRPPGGVAKTGKCRPRLGHNHHRDKLAPVRAAIKNGRNTSRRQAGPRPGGPTKTHVAAASKSGAFNEGVPQKIVSPPPPLRTEEGAPLSMNNRDDMVEIMPIHNRQCKKIGGKEMRTLT

SEQ ID NO: 972934 - protein, 126 aa, Homo sapiens
  misc_feature (45)..(45): Xaa can be any naturally occurring amino acid
LFPPEGGPLVQGLTPSPGQFADLCLLWSKIPPLPASLVDSPSTKXLVMLATRTVFALPATVVATIAVAIVERSWTLFVDLVGLRTAYQRGVSSLVSSWRAQPSVCVAPPSTPVPFIGNPNTWKLGD

SEQ ID NO: 972935 - protein, 219 aa, Homo sapiens
ATPRGGPHQEEFPLPPGKYCRIDGCSWNRHVFLFLWRPPVVRVPRGPFVAAALVVTNTLSHKCGGFPINPPPAETHCWRRPIRSDLAPFVIGEGHLCGVPAQTPLSVLPWWAAPPFAPHTGVLTPDYAVSVATNITVAFFYSLVRRLSFQTGPLYIWRPTPRTSLFCVCPLHARPSVVNRGDTRYTRCGPPAVERVGTHHAGSFAVIVNTKHFPITTPL

SEQ ID NO: 972936 - protein, 106 aa, Homo sapiens
MSNPRRQHGGSVIRCVMSNTKVDTPRVSSCKKAHEQSGRQPSSAAVQLDTVRHSYYEGRARCHRSNCMCCLGGAAPVYHHEACADQPTPWMPTPWVVTENPESPVQ

SEQ ID NO: 972937 - protein, 64 aa, Homo sapiens
MLMGIYPEQVLENKLDTSLLIMGNQRMEEVLLQHPLNDPDGFPSALGGRRGAAPPRGPKTPPTY

SEQ ID NO: 972938 - protein, 183 aa, Homo sapiens
PLAVLAGLRGASFAGFGIRIVSFTDGLYRDVSKVVGTCGPKSPGETRFPLQVFCLSPPAPICPGGIAPYLGSQPGSRAMHMSRLRAERRFLPRSVLKTGGQRPHISSVCVSRTVACWVSANAPVVGRLLTAFHPQRPPSRFGVNRPPPSRGACPTTRGSRGSVGSLARGRPSCPPIAFGYGFK

SEQ ID NO: 972939 - protein, 229 aa, Homo sapiens
GAFCHCHLEVFATRSVVSNKRPYFHTPAARPGFPAAPRGGEKSFLPRFSKSSLGSPASSRPPVTTTCLGNTLAVGHSFGLPVTCTPPTGPYLGVARNNPPLSRCHAPRSPRSKCRARPPCFSLTSSRPPGVGPPPNAGVFHAFVRQGGHHIRSKPAKDAETMAGVSGTTLFLGGIFEKGTAFPGIGPSPVAWRATTSPTRPSPSLLSFQSYIPMFPKISGTPPLPITLV

SEQ ID NO: 972940 - protein, 266 aa, Homo sapiens
VFHAGPIWGLALVTALFPPEVFGPRQWAPPCACAKEGFTKHWAHEDVDHMGVNPQAVAADPAPPLVIRAFYGPIYVDTAPPSVFHGAPSLGVGCSPPPADINLAPPPTSRVTIPRPGLLQHRSPASLKGCFEQGAHARKNTLPIPKRPRNLEDSPLRLLLTDDKIFGERTDPLKDSPSRDTAERTPTTPLVKKNCHPSRARFSPTRYNFPQTQITYPSPPPLCTKTLLYNGTPYPLPPLNWEHTNMNSPTPRGLPTSLPPFIFGHY

SEQ ID NO: 972941 - protein, 179 aa, Homo sapiens
SCRSPCPRGPSFWVFRPLDGFFAPPPLLAVRGLPPRCRSVVSLSGDVLSLIYAPPRWRSSPLPIGVLRCFGALRLVLTNFSVLCPPGSVLFPGVSAPPVYSLSAGRVGLLAGHGATLQCHSPSMTTSDCVRRHLFRRGAHFFVAPLICPLSPSYVSVGRNTPPSGSQKSRYPPVPTIDR

SEQ ID NO: 972942 - protein, 111 aa, Homo sapiens
MLLWALRPSPRNSTDYTGISPVRNCLALDASPPLCDSPTHLHQLYDILRRAPRLVVPIMSPMASYETNRGYFPPASSYCSLLLSSIDIDFRCPDGWHSYCYVSSGNTQARP

SEQ ID NO: 972943 - protein, 197 aa, Homo sapiens
MSLLSLCLSGARVGGVLAVPGCSPVGVAPFLSVRSVALAQCDPTGGVLALPLCCDLLGLAFISPCPRVCASLRLFAGSVDRAALVRQFPGDHPYSSGGRPPILARLCDLAAFYTHKSHGALVPAPPVYQGAPSVVSRASIAPPSCRSRCSSRGGPGVFRVPPPVLYSGAKPRIVSLSRGLSDGVATPFASPPEADCS

SEQ ID NO: 972944 - protein, 110 aa, Homo sapiens
ASREFRWGRCPNAGLAWVAVSPHGLPEVVSETEKRCIFAGPSYIRSWLVRTRAFHDLGGIPPALPTHAPHGLSPLQHICGTLLFKKVTPGTQTPTNVRVSPNKPAARPYV

SEQ ID NO: 972945 - protein, 67 aa, Homo sapiens
GACRVAVGCEPHVSSAVWALFVPPPVLLTCAPVPWVVPASGVLCRGSTIWARLGHHDAPGVPSLSTG

SEQ ID NO: 972946 - protein, 248 aa, Homo sapiens
MQVPAPLWRAPPWWGPPSMLLSRASGPTCDQGQATHPCVQPPQGDHKHVLLLLPPAGAPQRPPHLRVAAKKAPAPRADFPQKGTSSVLPRDPLSAWRHTQAQAPHCPRVTQSSTRVAPHGEHRTTPYKGSGTTPDTNISAATLHHLDRHPVGLFRGPFWGTRVWSQRTAGHLRALAPPPPLTQGHPPFHRPPLLGAISCMMHPPSGVYWAPPPPPSPPSPSPPPAPPPGSPPRPCSPQNKNQIPPHKT

SEQ ID NO: 972947 - protein, 112 aa, Homo sapiens
GSHGCDARACDAERQTRDECGGDRAARERYMTERFAPEVVAAHLVFAHHGEAVPPAACERHGNRCNGDDECDEAPPRAEREAGERVGDEHGPCEQQQPDTRIGRDAGQHVVG

SEQ ID NO: 972948 - protein, 69 aa, Homo sapiens
MGTRMCPHLGLVGLTKRSPCYGLEHPSGGQGPYDIPRVIGSHLHARSKVRVYIPSKDQLKEHQCVQDTE

SEQ ID NO: 972949 - protein, 166 aa, Homo sapiens
GPTDGLRSPAVNRYACPVSRREVFLMRIISFNANGIRSAATKGFLDWFRAQDADVLCIQETKAQEDQLTDPMFRPDGHHCFYRDAITKKGYSGVAIYSKREPDQVITSLGWAPFDDEGRYIEARYGNLSVVSFYIPSGSSGDLRQGFKFEVMEWLGRSWRSGHAAA

SEQ ID NO: 972950 - protein, 306 aa, Homo sapiens
MCPGHNGAHAHDGSPMCFRTCLLIAITRNPVFPAALSRLSRLHNQKLGGAAEKEKYVSTQPYVARLSKEQMTRMSRMWSRAWTEIYHTADVLPRSMSMPDLGDKLRMIVHGTQKSPYQPDRWQVEPEEPEAETHSTKPRKERSQAGRNATDGARDDLERPGTPAELEMEPNPEIPAERATMVAGKQNREAPHGLPRHTRRTAEQALTGRRTEKHTNGDNNGPANHLYTAPSGMLAQPVSTTTDTTQKMTGNNYPPEIPLSQEHVPPRLHRAARDHTMNQSRTRQGKNPQLTNTREHQGPYLLQITN

SEQ ID NO: 972951 - protein, 65 aa, Homo sapiens
  misc_feature (42)..(42): Xaa can be any naturally occurring amino acid
SVDPTPPAEKRHVGRLRKALLNKYRPLFKRYRAMFALRNAGXEEVSLALAEGLHCGSASSATGRY

SEQ ID NO: 972952 - protein, 305 aa, Homo sapiens
  misc_feature (3)..(3): Xaa can be any naturally occurring amino acid
MDXIMVAFPCRSQGFTLITYQGRDVILRLLQPRSNSDVRIHVRTFRPRKDSACGMLAEAKARHGFCGIPITDTGRMGSRLVGIISSRDIDFLKEEEHDCFLERDNDKEGRLGGSPCRHHTDRRQMKFCSAAQHRRTVAHLYHERWLTLVAIIARHRPEQKNRDYPLASKDAKKPAAVMGQPFGTMSDDKYRLELLAQAGVAATGIAPLPTQIALFQTQYLTPVHFNAPNHPKSPKLTLEATGVNCCPGKNSIGAVGSLQIDIDSFHLAFTEMLRFIAGPRKRQEPISHIFTHINNHNKSSGTPHQ

SEQ ID NO: 972953 - protein, 239 aa, Homo sapiens
PKIKVVNVELPIEANLVWQLGKDLLNMYIETEGKMIMQDKLGTKNGMMLNNAVDGHTVYGRSETSCVEHMTTHLYVSRITQNSTETSSQKLKTGCMNEGEDQAKQAYVDHVWTDLMTQLALQLPFGSQEAEERSKMFEELGQSAADIYANDSSLTFQKLQDEDNTSHTMTDVCNIEPHQHKKKSSGHHNPDAAHQIIVALATWSHNDRRPQIQEKNREDYDDKHQKQTTKTKKKQENPE

SEQ ID NO: 972954 - protein, 98 aa, Homo sapiens
  misc_feature (66)..(66): Xaa can be any naturally occurring amino acid
APGKPETVALVSAERHLWTQVVGSSLLTWALCTMSLPKGGMRERSPPGLQTRPCHGLSARHSQAPXQEGRLCGEVDHSPESLAILKKQNPPNLKKKKG

SEQ ID NO: 972955 - protein, 426 aa, Homo sapiens
  misc_feature (308)..(308): Xaa can be any naturally occurring amino acid
RALSSPTVRRRPSYHHTPVDGCLQLPDAGPHVTITCKPLMLLRPDDPCNACLLTPPCDPDPSMTGTSTDSQDCALGNIIRRANAATHARTPRVGAPAVPADNQHNTEHEPALDTAHSGPKRHRVTSSNPHNSPIRAGQRHPHTSTGAIQTLLTPATKLRVTCACNTLQHTHGSHHLHITLTAAHAAHQLTQPDKHNHIRNSCTPAHNTGNTDNYTSPPNPKVATQPATTISHGTAAERFHHRQADIAYTDQTTIRNEQHQCQPDERIRQQQTAPRHQVAEQPCSAEPASTRHAQTNAHKQDTRAHKSXTHHASRSHRVPEIAPQQHTSPAATKQISETQGTADARTQQPTAAYCEPAREARNTQTINQPSPVSKSTKLRQEQRNSNTHNTRHTAITDSAQSTRKRSRDRHARRKHRQLRSITLYRP

SEQ ID NO: 972956 - protein, 202 aa, Homo sapiens
EVLAEMGGAMPEARHPAQAPLPCTWLLPRGYIEVMRLLLQAGYEPELRDRGRMESPVTQRHTGDVEDDWRLLARHGGVHGLTDPCGASVPVTWDEEVLTPVEELARKQEDLRNQTEASQSRGTEPQAPLQTNTEGALLCRPEQSRERFPLQELVQRSAGLVGLGGPPIQDADEGEKMVHRTHRKNRNPLEFLQTDQHYTSVA

SEQ ID NO: 972957 - protein, 442 aa, Homo sapiens
MATLRASIHRRRAHCKLRSQCVSASSSTTVVSGWVSRIGNACWELYCLEQGIQPDEPDGKVEQRVDSGGGRVISCTTTFSQIDNGVALAMACGPGPDVVETMEEPSVDLNDSFSHLGTYNRQDIIATPCSQASLEQSQRERLPANQLYWPGGAHTPVWWNGRISLTPQVSVPQEVPSNRLGIDASMQLGPSRRRIILRYFPTRIYGLGGEHGFVGYTALGWLQGETVISWYDILSEERSKARQFSQYNPGLPPEISTTLDDRCHLTKLRMRTSKPTNQAPGKHFLNRCPFNGKTNWTGPYYGEHDGTVNDKPRISRRLPQSLALNLKQAEYEHRQECTPHQRVTVRHWKGARELVRRTKIPDSLESRTRNHMPVAHRHRDQAGKSTKADVWDGHTSVMWQTNKGKGRHGEKDVEGQGESQKRKAPKHTRGDEETPQERDSKT

SEQ ID NO: 972958 - protein, 380 aa, Homo sapiens
LEDVLRGCSATGILYQYPGPAPDVIPLLSCEHGWCVSSAGGCLDEANTTDLAPRLPVSFSPDLCPACELMCLRADVAEMAELDARISASAVSKVVSSPRAVAPQPLHTLLPGSSRMTCLFTCHEDCQTSFFRIFGQQPNLARHQRLSPPSLGKEYCVLEFSQDSQQLLPAWVIYLSCTSELDRLLSALNSGWKSIYQVDSPTQAIQEASNKQTIRRMPCSLIHRPGSGAKVSAAAEPRDDPGAACRAGGVPGVLGIDRRHLAGTHGKAVVPCCQEAIRPTLSLVVGETPQDVGIKHRVPPSRSPSNMCQRPLDILATTETHDDCGQETQPICAMRAPTLMPQQRTTPRAARHSEGHTRRPTPYCGRCKHAIINRSRRDNM

SEQ ID NO: 972959 - protein, 99 aa, Homo sapiens
SAAGNCVRVVDAVRELAHALLPVSCAACMSVSLWVRALNVRSSVSSCSMLAEMCLMGSIVVGRVTLRCGAVPVTEPLMLCGVLYCTFVSEHGTIYHGIA

SEQ ID NO: 972960 - protein, 285 aa, Homo sapiens
MRVKSCHLQAGQCENQIGAKFVEVISDEHGIDPRGTYQVGQTICSWNCYHLCATMYGPPAGTVQCPRVACSLDLLDARPSMDVRAARWPFGQIFLAGQLRFRSEWVAGNNCARVRYTEGAGAGVLRVLGMFVEDKGSADAPLVDCLTGVSMVIAIPGVDRGAGVLGLGNHVTSSKQRSGKEVPKTGISEARLRCCIAFMTQKMSLKQLVEPLLSPPYSVHLARKKHQDESYCIARPKLLYTFCQNLKAEQPTYGDMNTWGLLHEWVTTCLAFQAIKCGLATRCND

SEQ ID NO: 972961 - protein, 200 aa, Homo sapiens
KAIGTMCRVDRLYLLTRQFYSQVSTLEKGCQRSENDKRAKVHGSLTPKKLETAQMSPVDGAGKLDMKPVKESPLGSAAWMKQRGGGLKKQDTGGCLIPRATLNLGRTLMAAQGAVLAGVGSCQQVGALGAFQGLEMCPVRPFPPGRAAPSSICPGDPHPLAAPTQGISRALTQGTAQKPRVHRAPQLCASPSHGQGDSGR

SEQ ID NO: 972962 - protein, 79 aa, Homo sapiens
  misc_feature (47)..(47): Xaa can be any naturally occurring amino acid
RVRSVSGACSMSVPAFHPTIQSKHEIAGCLSFRGFIWKSKASVQDLXEAELWQGGTSMLDFDLKLLKALWMMSLREMEG

SEQ ID NO: 972963 - protein, 417 aa, Homo sapiens
IKPREARVGLSVALGRFRGDVMAFTLTVTLGIMTSRADHHAQRPGPSTPKPRTFGRMPRRKQHPTNCAGSGPWVCCKIPGIILGGHPRIPFSLPTPLRPHTEETPTQASIARGWEGTGRMVGQGKHPSQRETPGPTGYHRPRQNRTGRRQKKQREERGNTTREEPREKKPKQKEVRQSGDKIKSKHGRRTTKTKGKHTRKEDKRKDAQGNDVEHKSKSPDANTEKESQAEDTKGPKDTTQKATQTPKPGDGQERNDNRNTSKDHCTNGNREQGKKKRKKRKHTEKQERKPQKKRHQPELKTETAEKEKNQKRPQKRKKEQQKKTKKEYKDQKREVQTEREEDPAQKQKWNDDNTEEKKGETKGRGQHCKGEQQTKERKQRNKGARREKKTREDRGKGSKREKTNNLDTQNEKAERRK

SEQ ID NO: 972964 - protein, 227 aa, Homo sapiens
MRCACCECGDKGKCSRLLAVGQETLRRLEPPPAVCMNVGWACVMLHDANDASGGLDMESGAAGGVMAAGCGRRWPAGVPVLRLPGWPLGDSLSWVASQEDTNLHPASLCIPVMCSVDKEQKLSKRENGPMVAVLETLLLRGVLTQSWLRCTDARPRILITRETCFGSDVKPFEESCLGSSEKQIVSEDKRAFYLESRVELEKSLTQMDDVLKALHMKLWEAESKLSF

SEQ ID NO: 972965 - protein, 465 aa, Homo sapiens
MHSTSPGRAHLPEFSHRWKPLVEQINDMNITTRDTVSDPWKITNGPPNSGPPHQVWRLSSSAYPPLKRLPKGDNQITQSCGRQLNTQKKLSCAPTLFQHPGPDLATNKRHNMRRCGANLTIPSLSSGESSYKHRAAGRTQNTHKPQRCFTQLCAPSVYTGLFVSHTNNKVDTVRSPMGGPNYHWITITLHLSIKLISLEGHKSTHGGTPSLTTITLGHPHLRLKYTTSPRATPLGPQHPYNMACGQYPHPRGSTTADAPDHHDLPTEEHGKRTIKTSTADREPQQWNRNKQRPRWAHTCRRQHKQQNPTAVHTADQLTQRPTAATQKPPKIEATIIKNKGSNERHTGEPHPKPIPLTAPNKTAHNNTTDTNPHIRTYMTPCAKALKIPRGRTTTMKGTIKRQHSQHRIIYKHTERQNTRNSRSTQQARHTRDSTARHNTRTNNTDIVENFLLCSRFLNQRAEIST

SEQ ID NO: 972966 - protein, 136 aa, Homo sapiens
MAQLCPTQGHQCVWSLRDLCGVRRILAEIQTGLGIGLNSHKRVPSRDRKRKEGIHLRSACAPKVLAKDNQVLHKLSDGGGGQRTSSRRRRATNTEEAKNEQARTQGRKTNKREDKNRVGPLNQTRGKREACESEPK

SEQ ID NO: 972967 - protein, 301 aa, Homo sapiens
MDDDIDTRLRSVDKRLLVMCKAGFAGDDAPRAVFPSIVAAPQAPGRRWWCMGQNGFLCRCDEAQSKRGILTREVPHLSTGIVTPTWDDIGDKSGTKPSTMSSVWLPEEHPVLLTECPLNPKATAEKMTQIMFETFNTPAMYVAIQAVLSLYDSGVPLGIADATPGDEGHPHCAHLQRGMPSTHAIHAIGLAGRDIDDLLMQILPERGTVHNRATGNRADIRRSVLRRLDCSRDARCFHSPGQSRLLTAGTTNERKNESVGLFTPLADQDQKTYPYVMNDMTTVCADGPYDRHQNNTNEHTQ

SEQ ID NO: 972968 - protein, 103 aa, Homo sapiens
MIIGGPYPACISAETYGHSQSSTGTLDVFPLLVMWEDVGVRIRRIRLDALRVWSFPRITAKFEMVSGGWEHPGFREGREGPDKKARSTGGYENGGLLSSSFFY

SEQ ID NO: 972969 - protein, 500 aa, Homo sapiens
EEDFVSNVNTLVLIVIWRFFISQTRHKHYGRSYRHPGYAEEELQERAALFTSMCTTHQRIPAPSDGVVVRHTVYLTPTERSDKHTHNVMPDVPVSPTSICGHNIYHLSSGGLSRITCSRAKLTSPYFKNVLYRGRAYTQCHTPQDAGVNVTKQSRTTKTPPPQLPVAQSVYHSSAWASPVCRLAPHRPTPLFLACNMIRSPINMWAPHIIPPTCQKTSYNQVEPTVLTKRPIGVAHNNHIVSGAPQLCVNTTDGHHRRVADTTHTLVNQDYSKKVQTLRDRTYTKTNLCWQTTINLGRPDPHNYLYHGHLLPTTDDTYVAPYNTERTPPRQHNKPAPTQYHQRIATSLPPLRPAYTNDAPPPARGETTKQTPAQHRPLSGDASINNDEPLAHATTHHPPRRGGATTKTDTGVTWGEHHSAPPPGLDQPITETHDCPTNRTIYEQATNTHEHDVTKNHKASRHPRTRSHTTAGWRQHPHRGADTPTQTTDTPLTYKLLHAH

SEQ ID NO: 972970 - protein, 104 aa, Homo sapiens
STEPRLCLILPAVHTQAPCSPLDDDISLRYVSDNCAPGHVQWPGVLLVRLMPPLCAVFPLHLLGAPQGTMWLLICVVCNGVMKEIPYVGLTDVPKKQEEASITH

SEQ ID NO: 972971 - protein, 286 aa, Homo sapiens
MRAWVSVPRYIAGRYRRGGTNVTCGCWSVAKNCHCSVPETCDVGGKLVNLGLSAGQHYGDVLDTTAAYRQRRNMKPSYPTTGVQGTCRPPLTYWDERFYPSRRRTQDNDSTTRGTGHLTWQPGCGADYHYDYYINVPTGTHGCLAEPMGAGRATHSRETPGRCRPTADTGTAEGALTSGDYLRVDTESKNLHTSTGIDTTTKAQNHGHATLNTTGATHGKGAQHTELNRHTTRHPNRNPWTKHPKSTDKPLTKTTPQPHGEGLDRTNRETNPSATGQRNQDTSIDR

SEQ ID NO: 972972 - protein, 322 aa, Homo sapiens
MSDRKQGATMRSIDAPQNPVRPEGQGSAMPYDSKCSSSHLYHGRHLDDDGGMAIQASYTCTVNFSNHLGKKISTVNWGANWTLLAQCEHQDWDNHLVTRGKLTREDNYRHRHYENRGSTSEWARRFTEAHLITCHTTHQQATEHHAPQQSTNRQKHHGDTKRRLSPCYARHVAQPHELRQRHPSPRDTQHNDATRLAERQTRHTRDNGTQTQTCPGLRRHHTPTMPPPGTNALRALTDKDNTQRTRPYTEYPPHTSHEPSKTNLNKNHPERHRSKTHTPHINRHRGDPSTGKPTLKPTTETAQTGAPQRSQTIHRQYNHNDR

SEQ ID NO: 972973 - protein, 356 aa, Homo sapiens
CWRCLGGTRLRKRRDSSIPSCILHTNLDWVGTRLDDDCAGGRGDDDNGSPVSLSSSHSCIPVCISDRYNRIFWHKSHTTHRPTKTIQHAMRSRQPAQGPRSAQHAGHTAKAQAKPRDVKHPHQATVRHDSSGTAEQAQTGKKARKPAKEPNRKNYASHRKSIQTLEGRTICTTTKQLNTNKSQQRKENQHDTAWQRTMGTLPIANNPCPPGRQHRGTNQYLQPEGTRSTPETTVKTTTAPQGTNYLTVRDSSSNNLGAQDRRHAYHTSLIGTDLADTTPHGGKCEGLTSRGTQGPGTKASQNEGDTTRTQAHSQERMKTTDNDGKRGTQTPYTYNNPEPPRHQTARQHRHSYIRVT

SEQ ID NO: 972974 - protein, 255 aa, Homo sapiens
QTSIGPLSLATLPRRIPSRGPEAHVSLRGRKGERLERSSTTNLPCPGGPRSYPRHLCTALAFLASPTPFGSLGTRHSTLPSGELQSPGSDELTWQLPAQHHWRTLRAAAQSILAAGAPEGAIAFRASSACCGLEVKLGGPWMLLLELTLLCSLVPICVLRRPRELTHEGSAFPSEKHLSLAHLPRRGAPSPATRLLDLLPDYLGDIHERPARLDVTPPRYHCTRSYRTCASYLDPVTDTESTAPKPSRHDGHIAP

SEQ ID NO: 972975 - protein, 212 aa, Homo sapiens
MTGLPVKLHGKCDEVMRVPCVLVMRAVTVGSRCAEAERMAPPGDRGAPLARTPSKGAGLAGADKTQQKWKKVTYITCSMKNSWHFADGSVTVKVVFAPTGLGRTELLGDDIFTCDILTHLSLRKPLLLGCTLIRLAIEDTAIGLCVMSGSDFWKRELGFQARLEVRAGLSRSTGSSGHVYYIRKGLRLCGAKGQPSTYSTWGTNNAWHERAT

SEQ ID NO: 972976 - protein, 102 aa, Homo sapiens
SGSIQDKRDPFRSSCPDLIAGIQHGCQDIGARSLSVLRSMMCSGELKLEKRTMSAQIVEVVSMAVLALTVKAAVREEQLVEAEVVEGMQPRVSDLWAQRIPP

SEQ ID NO: 972977 - protein, 276 aa, Homo sapiens
MEWAASELRERTGKRKCARGSVYTQYKWVLTRHRGPTDGDGCFQVGRITPVVRDKRFKRERRESTLENKMMGGSTHMILNILQGEFKREQCEFVNPGESLIMLKNVCVTNIYLVKGTKARIQAVAIRSRHPKTYLRKTTQLTIVVRFKTNLGGERAKNPFSLDFAKEGENGSCNNNKQHASNAATAVYAHRTIHADSGHSQANQHWHTRNGRKNMATRLTKYGSTTRWRWTEKTATWTMESVPNSETEKISIRIRSQTREYATSTQRREKQQHAEK

SEQ ID NO: 972978 - protein, 287 aa, Homo sapiens
  misc_feature (149)..(149): Xaa can be any naturally occurring amino acid
MDDDIARARRRRYELAACARGGFSGLMMALRAVCRSIVGRPKQQGDDGGQWGQKDSIWWADEARRAREASVMRMEVTPRSEAGDSVDATWERHGENRGTDTFYNELTVAPEEHPRDCLTEVAPEAQGPSREQDDSRSMFEDFKQPQSMXRCYPGLCYPVVSASGRTHWASLMGLRLTVVTTTCEAIYRGVCLSPNAILLLMGPGVGGNLTDYLNEDPSPKRGVTVFHPHGRAGQSCVNIRAKAGLRRAWVSSTRWHACFHLLPGESPSVAEASITLGNAVPSRGLPS

SEQ ID NO: 972979 - protein, 311 aa, Homo sapiens
MRTAEALRTEPAEQPMWCRAGENCGKEIVPRMISTDGSTELEDPVEMFADPFLGLNCVSSVSPVLQDARQKFQYLFWLKTTVKLDELVKKIGRSCGRLQALRGRHGGMAEVRRHAGSLTQSRIARNFQRGHRGAPSRHRRPISPGPSRRGCVEDDMDGIGVRLRLEGDACKSATQRVIDAEQTRTGSELVHQEDGGRYKCARGEWDGWRRRLREHHKVQAYLTRQDYVRVEHVAPTGRLGANDLERRHVAEPGCQRTDGAQAGPDGVEGAHPGRGTAGLAGATPASVVAHAAQNRDTGEPNRHTAGECCSR

SEQ ID NO: 972980 - protein, 135 aa, Homo sapiens
MKKNKVHRDRPRQRVDGDPGIGNISQRSTPVSVATITFLGSSLLLFCLLYSPLFLLLNTLVANPGSFIAVHILFSASCCRCPPIEDIRFKDGSANARPEQAWADQEEKEAGIKKAPYGEEIPVEVITPRHVLLKQ

SEQ ID NO: 972981 - protein, 133 aa, Homo sapiens
VHCRPRCLSEPTDRKRHPARYAAEEGGDRCAVYRVEHGSREELIRRDHRIRVLPRSIERVFAEQSVNFELRSESRVWVRNNRWVMKADCDLSIANVETPERLRQTGRPDEECQTRMTSARQRRQESEAIVDIV

SEQ ID NO: 972982 - protein, 311 aa, Homo sapiens
GAGVPGLAPRRTGAVRRAASDARGAAVPGADPTHPPLRVRKDELRRAPGTHVGIRHAVRCYSADEMNSRLRDNAKRVFWKGVSGGVAVVYQGILANATGAVSPMGVKNSGMPMDPETIFGTSLGFSTSRKTGTWAQVYGVPRGGSLVQKEVDLESDLVQDRHVDQVRMSDLKQSRSDPEEHDVISRVRLCEIPNINLPPWIGELPSNGQGPSDQCLVWVNTELVPDQACSKKTRERPLGPPAVGFHAIAQVRTGSLSLIAANHGRLTTGELNRPLGACPYFPDLQSKPEITDQVDQTFKAKIQDGKALTSV

SEQ ID NO: 972983 - protein, 279 aa, Homo sapiens
MAYVIVDRRVSVDAESALTRLSPTAIPSSLAELHRITQSKRSSDVRSLRPGSPLCLRHMFSCSCPRRPHVPARQCGVAFIALQSPHGRRESLPGHKWLSHVCVCVTELSVMDHDRAACLTRDGAMEEPAWLIEKDLALLLLQMPEVCGPSETRRHFPRSSSSAKSGAVWRGKTCLDGGRARSMQGGTSAARWSSDVGGWAGRTKLSTLWDILDHLRATKVVWHILRGQELCPHGMKLTWLDQFLKGEPEPSKWKEPSPRGRTDRGEVQPRRPRQTEEHP

SEQ ID NO: 972984 - protein, 295 aa, Homo sapiens
  misc_feature (172)..(172): Xaa can be any naturally occurring amino acid
GTAWTAGSIERHPSFDYQTAASGGARPGPSAAQRRRLRGKPRSAATVGPAGPDASAAVPAHHICPACLRVDGQGQMSESEHRTVASPAPLGASKAGIQVTGDCRKQGPGARPLRSETSGCVSLGLALWSGDDQVMESQTEMCQNNPNEEPSGARNQIRGKGYTYSYMGLAWXHRNPPVQHIHSTHIHEDRDNPYRGVYGTSQIQEVGMNGKVAIGRGQGGITSRQKGKGHIARSAEPKTPLCWRTPNERWALVLDFRFQAVRRWKDKEVIQYPGVKLANKRFCLPGLTTKPVNHE

SEQ ID NO: 972985 - protein, 323 aa, Homo sapiens
RPGAVMSHGPKQPGAGGVPGGREGSGPAWGLRGDCQARARRGSTRGREGVPSRRSRMKKRGMAHGQEAEEDSAELGPRGYRVTGYVQPSVNERREQSPHAPAGSVLSRDHQGCWAPEWSKRAGNVKEQRYLDEGEEREAVKYMRGAGSVPAVCKPSKMCTEKDPGRRRSRKKSRALVLMNTSPEWTPRVWTAMGSPLRCSIFTEEFLDPKKPRVRGDSAALGKNECAAFEGGRTGVLQRHTQSMSEAREREQELGLEELEEAELRRPGVPGSPRLPMRADGEPRGLGIWRSGLGRKGNGVDGRRHGGPLAWPPQGRGACLFSE

SEQ ID NO: 972986 - protein, 405 aa, Homo sapiens
LPGNILLDLNSLACGLVATQPWTLNTLDDVPSTCDGRRMAPDRYRRFVLTHLGQQSPATHTCACHFHTLRFYTVPTAALPNHASVVAPPDQGTVLSAHCGEHRQTRRGQAGPYPISPARVHSCYAMQSCGNFHPSQATHAPHTHCTSSTQTLPQPLGIHSKFSNRFIRPPTQAPIHNPWAQGTKSHNSTHWAQAMRTRCHPFATRHSHTVAWMGHQYSGTHRKNTSNGPQERNIGTPNTQNYTHVALAIVPHPWTYTPFRWTTQHHPPDEHNHTNHNHHRPEHTPQKAQPKEQTEHAELTNHDAAPNEPQPWDTPTWDNHKPSGTKPTVPPPESRRVIRLLSRKNTAGAQTPHTRHAGDSRHRKHNAQAATTRQLQTRKTRRQPDPPDAHYNQTRTTNQWTNSLR

SEQ ID NO: 972987 - protein, 110 aa, Homo sapiens
MRSLCTHNLEFDCGMSQRTDVHKNRSIPAFSRKRQTHRFASFARRKRSRESEYRGTQLSLRKSTDTRCVANYHSYTKTLDPIRFARPEDHPQLAIQPRDNGGGTRKIALT

SEQ ID NO: 972988 - protein, 204 aa, Homo sapiens
DGDLSGFQHLQQAELGRMRHFPVSVPDMSWRKPIIIRNAPTEQVMGRHMQHSVPGPFTVLFSMGALAAPRMRSRRKHCTVCPTPWQINCKTCRVSTMPLSDPRRMAMTQIQDSVTQALVLINDEHANSQHVTHKQYYYTSNMAAERSTTSDAHPRTSYGMLGETTPHLTQLHMLAQHWPGTHTLHTTRELDHHNLAPFWVAKES

SEQ ID NO: 972989 - protein, 178 aa, Homo sapiens
ELSATSGSDYGTQTRVSLDAPGQYELVHTLVAHQRQRGETIPEEDLEVQMSTTEDAAHVLAGTGGNRCTMLSYREVDVCGSHHAKASGPQWMFWVDLEENGSLGLLNKPMQAPTKMNSSERDDAKSFRKSDKYFSFHCILIQRCRQLGSEIHRLLKPGDMESERSRAFNRQRNRPGHI

SEQ ID NO: 972990 - protein, 98 aa, Homo sapiens
DPLISSSPPWISRIYQPCIPMSVCMIFQAPSLAVLTGLSRISPHGTDVLESFARLLLTYRLQIRSLIHSGPTHHFPCRSVTMHGWTHGLSVDAPGANG

SEQ ID NO: 972991 - protein, 191 aa, Homo sapiens
SVHSEVGSGTARSGSCAHADVSVHAVHMLMVLCMLAQLMVRQLACEVCAAVHSLRSAAGSEVGMLLRAVLFRGLCIMCDHGHDGELVARRCNAGAQTRKDMTKVEFETSEAVDVSPTFDTMGLREDLLAWASTLTVFEKPSAIQQRAIKQIIHRREHVIRSSLSPAQETNSQLQYLSPPVVWIFRFVKLKL

SEQ ID NO: 972992 - protein, 248 aa, Homo sapiens
GRRCWGCFPLGPTARLVRPGSSAVWPGGRGRGFGAAAREVDPLFPSWAGFAHVRGVSRSEMVYLGVSWRPLVHARSRGRLVAVLLVSAGVVPHAGILAACSRLRLVGPPLWRPSSLLATAGNLPAGRPPPRRARASPCVYHQVSLRASACTLFRRHLPAREISNLSCGLALRRAPHSLCSAPQFVWGGNSRGRCTALVFSPLGGSAAFSVAVMGCDTCCLMSSHSRRARSLASTAVTAKVVLLRRPQQ

SEQ ID NO: 972993 - protein, 154 aa, Homo sapiens
GADGLVDLGTRGIYGDLVSARASILLGNSFARRDEITVMRFETLAAVAKRIVGRYRTRYHEERACVYVDRQAIAKEIVSIRRYTAQCVRYAMVDIAYSIRVVLLFDAKGPHVRSSAKTWGASRQWSTTNSNDSMTHDFAGDATVTCRDQRKSGS

SEQ ID NO: 972994 - protein, 276 aa, Homo sapiens
PTNLLNYNIHSHRTKSYFISSSKAHLSPPGAYHHPDEAKPSQKAVNAKATIAFLFYTHSRLPSPDSSDYIYTHNTARLTVNILDILHSSAGPKNYRNSVSPTTYEYGAESYTIDLYSERYLLLTDCHFMSSARARCRSPGIAGSIVLAAVLLKLGGYGIIRLTLMLKPLTKHIADPLLVLSLMRHNYEQAPSAVREERPKNRSWHNSSNQPHEAWLVNRPFSFQNPPESLHRGQVILIIRQGLQSHYILLGDSNISIKSRSKTFLRIQSIQNRFGD

SEQ ID NO: 972995 - protein, 185 aa, Homo sapiens
MTGTNAGPRHQIDTRHTHDNPHHADTTQTARTTHAAHTTERPHQPTQSHRDNRREENTPTYRHTTDAHTRGTGNERRRRQAAQTTNDPQQPPPEPPHSTPLSHRAHSAATRQHTDRHNTPNSAEHPADTASHSRAPPTNPQNARDDNGDQRQTTDSHGTPHNSTTPADQAHPATSHRTMTRRDSE

SEQ ID NO: 972996 - protein, 123 aa, Homo sapiens
RREPGWWGAGRSWPCLCLAWRLQSAAGLLPCCLANCPELLAECRGRLSGALHLGRAALPWLSLCPPCMCNAVCCFGPSADSLSLLAFGKPLVGCWLWPCGCACSPGQVQGLWDFPPISPPPFW

SEQ ID NO: 972997 - protein, 283 aa, Homo sapiens
NRFVVAVCRRGGLCVADPGGRFSHVPWGACVHVRLGIFPGAVGPPAVLGVFRGPRPALRVVLQPRWGPIPRCGYPTPRVCVSSNTGCACRPVSPRTYLVARGLSSAAAYLSALGVHPPPRYSLPDSPCFSVWPLRIYLHHQHHYHAAPRFVSRPFLNAGQFWPGTTWRHIPRRVPPTPLKRVDAAGRIYRWSTGWFDDLRPDSTLVEPHFSYPRIPHNYCWAMFAQFPVNPTAIPMSADAHRMNLPLDHPEAPIFPPDPDDYVPLDTPPLGDHGPQTSPLQKN

SEQ ID NO: 972998 - protein, 131 aa, Homo sapiens
MTRNARAVYEIQLTVPCVCQSVENWTTVQISPLELISTDGRLTLACPCMVVLHDPFLKPQLVVCLGFPWLQDARQKFQLCSMLTWKGESGLNLVEEDLAHAVEESKNVLVLHRLVVRRLRWKLRKHEEFQR

SEQ ID NO: 972999 - protein, 284 aa, Homo sapiens
EVGFRRLIITNLSELKEHVLTHRKEAKNLEKILHEWLTRITSVEKSLNDLMELESTLQELREANTSFNSQIRSSRRKDINDEDQINEIKREDKIREKRVKRNEQNLQEIWDYVKRPNLHLTGVPESDRENGTKLENTLQDIMQENFPNLARQANISNSGNTENTTEILLKKSNPRHIIIRFTKVEMNGHNLVYGSERERWVTHKGKAIRLTVDLSEKPTTEKVGQYHILKQESQLEFYQHYVLGGTLLFTTPCGDWPQPLRLGGTRCTVPATLDSDTPGHHKGQ

SEQ ID NO: 973000 - protein, 261 aa, Homo sapiens
MLAPCPFLKCLMDRGLARCGAASYSLTPYTHFDGSWSGTCPYQLFDAIPQLVLPLDIWVCHVESQTHFGQVTPASGGPRVAWKARAFWHNTILSPVNRPRRPGVPRTPKTLDFQKVHAEWHPALDPRENVAHQIPSGELVPCEPTGGGDWRAPSKDGIETNARRDPPQGHEDAPGGKYCSKHHLQDRPFRQSPWEPPKLGSCDPRPKKGPRREHQALPHGSRYLAPPRASTQRARKPRRNGGDEGPTGSSTHGPTWTSDNH

SEQ ID NO: 973001 - protein, 259 aa, Homo sapiens
MATRSMVGVVVSDVVAYMAAPGPGAAPWSCERFLCGSPLRGPLSVTVPPESLRGPRPLFIPTGGEDKSLAPGERLAYPKEPTRTRVVVPRAASPGGVRASMSPPCRSPEVRRTLGVAVAARAWVLNLGGITQVCFAGPRRAEGDLVPHQGRALPRWSLRGRLLDPTGLGPAPGCPAPALDPGPWFTSPLIVLSKYSALIFTPGKETRCNLPMFGSYANTRLPFVTPLNINIVRSNAPLFKSTHSVTHNWGEESTKSTCD

SEQ ID NO: 973002 - protein, 168 aa, Homo sapiens
SLQVLARLWLLRCYPGAIGKSVEDGSCHYCSSGAELVVEVLNWLRRINHSSRIPVRADGFFLRQWGLRCCLPVAVSVYDGDGMTCWLPCVVSMSGRLSSTWAASLVSDIQTPRPGDVDIDVLGAEIAGSRPERRGVEVGASGGRRGVEGGYPGQRPGSGNYYLCRGLA

SEQ ID NO: 973003 - protein, 46 aa, Homo sapiens
MAPVEAPKEGGAQQAQERCRPGDKTGEHAKGGEEPQMWRHRTGGKQ

SEQ ID NO: 973004 - protein, 69 aa, Homo sapiens
RAEMSRSENLGCARALLSLTGLQAIQRTPKMQVCLNVILADRMATVGIVLDISVCVMGFNPIPTIDTLT

SEQ ID NO: 973005 - protein, 291 aa, Homo sapiens
YGRRLRFLLAPRQRCRRLRSLLTLWHRCLTPAGVGQPVSLWPCPVGPSSGQRSRPRVVAAEPSASGTMPPRALLTLRPRLTGRLASSQDSAAAPVRAFLAPCQYGQPRRSLLGSQPPRWSLLAPGSPAVSGSHRADRATSRLHSWARDGEASRSSRSWARSSLPTQAALMGPEQPASPCGAHGPQQALKPSVAPHSQIAFTPGAAGHPAALLVLLCSRGVLMDLVRPYSRSRYWAWASCGPAVRGPTCSRMQRHLYLSCAEPPLVRPGVAGARTGSSGSWNELRGLEGRGR

SEQ ID NO: 973006 - protein, 364 aa, Homo sapiens
VAWPQPAEEQERAEAGWAMPWSVPAVLPSFVDLVLVLLGHLLPSCSDLWHLTCVACLSSMLLCAACYLVWLAAWCLAAACVPGLRVLLACSSALLWLRADPALCLHGVAGPLRPLALAAAAISVLLGVTLYMVAVAVQACCACGACLVVVHAWEDAALEFGLVAYAGLPSPLDIRLCCVLFDDRSWETCSDRSLLVLAIIAAELAWAEVLPVGWHLHILPWASLWALLGYHGPCALAPLQAVLGAWAPPVIYFLVGLVCCGPSLVVACLGSSPYCGLASWACGGLVPGAGVRAELLRDPASGWFSGWRVPPPYIPGYRGWAGPRVAYICRPLVSIWARVEAAEEAPGLETGSGGVTRPYAHERR

SEQ ID NO: 973007 - protein, 338 aa, Homo sapiens
WRRAWDSADPAPPDPHVLNEPDVGLMAVAPDSTACALWPCNRHDLLACCAILAKQGLSKLPAMSHCAIIYLVPYGGMQSTFARHPTQTYVLTLTHECRDVMDVKCARPTLPQESGTRPGHDGLCLTSYADRRWERNRPGHEPPGHPALPRTTASTRAAQTTHPRHGNGDSTHQKTGANPGPDARTQPVQTPTMTTTEDAAKHGRAESPGKTTHKTKPDHTNKNDGPSKWNGNQTTERAGPPQEPWDKGDTRNSDRNGRPRGKKTEAHLPRKPRRPAARTDAHPVRTSNIKGPQTAPRGQERRPGERARGTNGAKRETTGNRQPPQQPRHNTRATEPTD

SEQ ID NO: 973008 - protein, 200 aa, Homo sapiens
MGLRPAVVTWYCKNKPYPKSRFCRGVPDAKIRIFDLGWKKAKVDEFRFVATWCHDEYVKQACPLKALDVLALNLCQEVHGKNVWLAKMAFHILGAAPPLPLSSCITQDVCPVLGVLDSAPNTRACRGAFVKAPVALVGHVFTIVCQVIMSILHHCCRHTEHVIDGPVHGHKFNVSLADRRSTLSTECGASPIVSICLIEF

SEQ ID NO: 973009 - protein, 112 aa, Homo sapiens
EVGFRRLIITNLSELKEHVLTHRKEAKNLEKILHEWLTRITSVEKSLNDLMELESTLQELREANTSFNSRFDQAEERISMIEDQINEIKREDKIREKRVKRKNKTSKKYGTT

SEQ ID NO: 973010 - protein, 165 aa, Homo sapiens
  misc_feature (148)..(148): Xaa can be any naturally occurring amino acid
MRQGWSWGDAFTFLPNTSLVMYTPRYRHHPHITYGYGEQSPPEFWCLNAQHITHPLCVLVSLCGTKCRQQYVWSQVCGTKCEGQKGSWGVTLSIRGGVQMGSHNNDEICFRKEKRTCGGEGLYVGARKGCEEHPGRSGDETAAKHQLXTKGVFNNTWRGTRPEER

SEQ ID NO: 973011 - protein, 328 aa, Homo sapiens
APVPACSCSNSYRSVDGRVKNMTWRRAPGPKLKTIQQGRLRACRERVDRERDLPDDSTQSYPACRRAASVDGSLHSLCLLYSEVSCLRHLRLLYRLDRVSRTGLTPAVTFEWGHAAILTRGGSDEHVLWMKADLNHSEEVRADVPSRLFSGEIAPQKKRGSWACTRLPRCGRELWRLVSLMLDGVESSLTLDVQAALVLDSLFSFVVFASTTLHSSPRKERMVQKRGPAFPTWEPAAHRGHGRDLVPVFGPALVWCCMSVCHSRPTRSLVMSKVWAPVGKAQDSRQFKSSGWSGVVVGLWWLSCFTGSGRGSPGRGLDSCWRTPKEQS

SEQ ID NO: 973012 - protein, 114 aa, Homo sapiens
LGSASISVALFSPSWYSPPNLGFLHARVASCSTSLSLILVSTSSPGKFPFSRLGLPTRASDFHPSFSLLASDYPPRIPTRHRRATNMLPSPGLGTSSHSPLRHRLGLQLGSVHQ

SEQ ID NO: 973013 - protein, 118 aa, Homo sapiens
MSLVSVGVVSLSPPFSWGLRFSSHRSYFRFLLAYRGTSLLLPITHSPLFRSHSTPILRTASRTLLLYTYQSGALYLDTPQTCPPITLNTPFYHTYIHYSPPYSEPPLQTKPPVFAPTT

SEQ ID NO: 973014 - protein, 57 aa, Homo sapiens
MTRTLTIPRKRQNTLGTEEETTSECRPTTQSRATASPTRQHKPPHGAATQTSTQRQA

SEQ ID NO: 973015 - protein, 178 aa, Homo sapiens
MPKASHARTDSESDLPEERWEILSGSHSFTGKCSWLWLYQKYLSNGSSVWVCLEEGWGHHCTRDIPGSVYSVIPLYKDTLKASSMSVNKSESIRSPHSQSRQQTSAPSNDHGQRDRPQLISQNQQHGITSVQARHPRIASPPSDKRRLTNPVEVIDYVETPEKKIRNYSEQAKPQTTI

SEQ ID NO: 973016 - protein, 263 aa, Homo sapiens
MGDTNDTRLSTRGLLEVEREEWQTNFGNKRSLCPRVLVGQSLCPSVFPVGGGAVIPGSLVCAPRGPRGEPPVAVAWVSVPPLLCSPTGRNRKEKCRQQKAGSESLPGKDSIPDVSINPGGAHVGAPFIRGSTTILAGASPPVPHSHTPLYNTTPVQQQKRQHHNTPRTTRSARERQHTQAHEERRDNTEREKKENTARPTGGKTNAKAHPIENRENIKASNTTSGSNNPELKKSTTPHKRRATQTKYTNVEKTRPAVSTLRNT

SEQ ID NO: 973017 - protein, 141 aa, Homo sapiens
MCSVLLSSEHSFFYWITDHSARFHFFPFFVRTFGPHRVFPGPLIPYIKYTTIYNYYYAVRIAPRVSYTHGAGSDGLVTTPALYWTYCPREDSSAVPNSFPDISVGTNGLRTARTWSPPHIESTAASHTTENLTSRRNPPEC

SEQ ID NO: 973018 - protein, 73 aa, Homo sapiens
MLATRTAKPRSDFVLHRAGRGSPRRRGVAVSLLLRGCVGSWWALSGGAGAAGVRTSGVGGLSFHCCGGCPPLL

SEQ ID NO: 973019 - protein, 195 aa, Homo sapiens
  misc_feature (46)..(46): Xaa can be any naturally occurring amino acid
MELHTFGVRKSFSPNTRSLEAIFVPGDAQLLFLIIHLILVVAADNXPCNTQNSQFTGFPHKPFVSLVNELDSVIFSHDLKPDICLVEAPHYMGGRIPRPNSSNIAERVADVILNKKEMWVSEHLLITGTLSTRVQYHYYCGIWRVNSVPEALPPLYVVREHKMCSLPVLYIRPATAGGGDARARLPSVVPAQVPC

SEQ ID NO: 973020 - protein, 400 aa, Homo sapiens
FTIQHHGWKTWRPKSMNYNDLTLFDSRFPKQNQTRNCWQNYLDFHLTAQNGNDRYSEAISLCANGYQRVYQIPTDPTYLGYTELVHAANCGLKRHANPAVHSILDTEAAISTYPSSYLRSRILTQRTSVASCERTLGYPWVIHPNATWDPLNIHCTYTKASSRATRYKKGTTHGMTNTHTTNHHNPTTAAHTSAPGKAAPTHTQPAQTRNHTRPHTHAPTDELRSRIHKSRNNPLRQRLTPDGNRPDTTSSSTHASCPFCLPSRQANNTDKYRTLTDLIDIYLGYSPLLATMTDHRPDSINLVARCDLRSSSPTDTIQSLSKSQLDRCPSAPVDPAALHTTEHTTTPRAPRYDVRSLSLVLRVRDTTSMAGARTYGRAPADHSISHFRSHDTHDISYETS

SEQ ID NO: 973021 - protein, 76 aa, Homo sapiens
QGAYLMLTERKILGYIPLRKGPTCRPLRANTTCADAIKLFTKEPLKTRTSTITLYISARLSSHHRSSTMNPPPHAQ

SEQ ID NO: 973022 - protein, 211 aa, Homo sapiens
MPTPPCSSAALLGRFGRPGPRWPPLSPSPAMDNYADLSGYRADTLLARYKSAHWACIRINSWLYEKKIFEVRDPEAAVIAPQLVRVSSYSFSDLNSTRGDADMYDLPKKEELLYQSKGYNDDYMTRATSPPGLMGRPSLPARPGPVPQSSDFNSHDADAFITRCMMTIYCLLLKRSAGKGHAHVKAGQCYQKITTVASCDSLQGAPWDLSY

SEQ ID NO: 973023 - protein, 69 aa, Homo sapiens
SPLAVSYSPQEPRTRLLLSLLWQDEACNAWVKEYHPGNYGNYGYASTWGIVPVNDQNHREVSLKAEKQQ

SEQ ID NO: 973024 - protein, 214 aa, Homo sapiens
MEGAGAKGVPGPRFLVKGEMAGPQIGEVGINCEKKARVTPGLKGTRGTRPREIKPGKKDAGPLGRNEQGPREDTIQDEITRWRKNNKNTGHTAGRKSSRTKKNNTIRSKGTATAEGRINQRGITEPEKATPHNQETATNRGQNSGQEWAKGKVVNGGSDDTEGKQEKGQHTTATNTRTTDERTGKETERQETQQTQDHQKREETKQHEKQENDA

SEQ ID NO: 973025 - protein, 201 aa, Homo sapiens
VRLGSGSLAALAWPRCDLLWHSACSYRRLVLLTSWVRARPLCGPRLVHPIQVAPSPVVQTPALSPGVGPLARLFRAHFPYPAMWATPRGDPQCSDIPPRWCVAPGDPSSLGGPKVHSATSVRNQGPTHCHCPKILVVIKYAFGPSGPWVINLFSLQGGVTNPPVFCPIRLRGLIYDARSGEQQWRLSSWVPAPAPWFALSP

SEQ ID NO: 973026 - protein, 126 aa, Homo sapiens
MILGRPDDAASNCRAKSTERLNFCAAIHAEIGDCRILSLVCMESFNETTRRDAQQGGSWVVKSYVVTRALVRPLTHPDGVVAHARKESAHYTRTIAYCVISAMPVASSDRAGEARQGTDDLLAGKS

SEQ ID NO: 973027 - protein, 596 aa, Homo sapiens
  misc_feature (223)..(223): Xaa can be any naturally occurring amino acid
SVYGYPITLFVAAQATCINSKSSACMQAAQHNRHSTHSTAQQHTATHSKQQQQSGTAANPATLHSMLVPRMQAQHTQHRHACTKHSTAQHSTASQVHTQITHPHRQAQQDSQTNKPTSTNTGHPSTHPAHRIIHVTCRSRSRQANLSITRQLLDTQTRTGEHSNPNLGDHDAHANHTHPDTSTRAPDTRHKPTQDHLTTNKRRTQRKRVASRNQTYADSMGSXTTQHPRTRQAHRATRNHHNSTYHTQLLAQLESQHQGQELQYHKITSEGNITTMQSQRARTIQSPPLAQVTSRCTPALPNYQRTGGAIEATEQTHRKQQQPPPTHLTHPYNNTTQIRTQIRTEHTPTKKPAQQSYRHRQLHLTQRRHKTPNRARTANNRAHRTHHTDDNTGNTHDTETTKKHNNDETKPNTTRPKYAHRHTNESSPTQHNTKTEKTHTNRHNPQTTRNQNEPNNRATQGTHKTKEPQRSQRQQGHSTTHRNHKETHKRNNTLSNMTTRNNKRNATEHTKKNKKTPEQHTEPPRKGPNKQPKNKTDTKRQQDRDKTTPQHQTHKQEKRRKKNTNGNTIDKTEHTEQQQKATIEQSTQSTHHTHRA

SEQ ID NO: 973028 - protein, 151 aa, Homo sapiens
STFSAGYPPSMRDPRHTPSRNVSRVLGCNNCRHLCHWCRDRYVVEYTFLLMPHAPASDARNPSVVPPLSCTTRSTNTTPRACAHAIAGHTQWVATIGESTPREEKSFLVSTNSIGSINPNPVPPKLDLRLPVQRDGDIASPKAESSFGKLY

SEQ ID NO: 973029 - protein, 226 aa, Homo sapiens
SLPLLLDLKMEKMLAGCFLLILDMIVLLPADANERSRGRSISRGRQLLGPNRRTALLEQFRVITMRRRAGFHHRQLSQGQGPMTYAKVKEFIGDIYAILGHLVLTVTRVGLSTYGATGHCMSSCLKTFKRKSDVERAVAEDAASVQRAAMTELAIQIMRLNDRILQKHKVSAGPMTRRMCHWPHKCIVRWHGRPPGLHDTGLCGKQQGTDTTQRDSRARKPSPSDI

SEQ ID NO: 973030 - protein, 219 aa, Homo sapiens
APIFCPTYNVCCPPRNSRVSPIPRVHLRLYNDVAAFKDATIPTRVSSGVSTTAVPAQVPPKLCSLWRMRAVFDPACWWAPGYVTLSPPWWDSHGSPETRLGGPVAQSWSRPQIGGSLIMRTALCAPPPLSERLPEQGLLPDASLCARRLVGCPHGLSTSRRFPECDLSSDGPLFLRVVARLHYVRHFSQLMRALSLIALLTREQAPLFLRHTRSFATAV

SEQ ID NO: 973031 - protein, 104 aa, Homo sapiens
  misc_feature (67)..(67): Xaa can be any naturally occurring amino acid
LAPFFPPGMVFGPTKCVPPPFPSACGGETHPTLLRGMNFLSTVSPHSPHRRAFASALLACKNVRPHXSSASPFIRSATPQNGAPPAAPNFRIPRGGPKFGGPPS

SEQ ID NO: 973032 - protein, 189 aa, Homo sapiens
LRRSGPCRCFSESGVVWQTEPMVRGVVTGAAPGGGGLSMLDALWLVEGTAVALLRLLLVLLAAGRFREIAWASAVDRSLGWSSRGVCRVHARDERSFLGLVNPSGWKERAMWIGDSGDPSYASEERAYGKVAGWVRGTSRLLAVNNCHKYLSGREPDGIARNPVIHRRGCGSRSCRENRIVPSERCAEY

SEQ ID NO: 973033 - protein, 109 aa, Homo sapiens
HTRDNKSCVSQNPPQRTGGKKMATPGSVLFSLQCPPHECLFSHLYPPFRRNQRAQPRVTLRPSPHELISWGISSPPSLSPRGNSSHGASRPTLHNCANYSLSPAPRHNK

SEQ ID NO: 973034 - protein, 135 aa, Homo sapiens
MRVAGAAKLVVAVAVFLLTFYVISQVFEIKMDASLGNLFARSAIGHSARSTKPPRYKCGISKACPEKHFVLKWQVEQPSGGTQNLLEDNVNELVLRIMSDRGINVALANWTKTGDVLDTKYLTLWGGDVAPFYEL

SEQ ID NO: 973035 - protein, 40 aa, Homo sapiens
MDEEHICGGNSFLDYWFSVVEQYVVFKKSASHASGAHIYK

SEQ ID NO: 973036 - protein, 132 aa, Homo sapiens
MWDVLMLTERKILGLYTTTPKGPNVVGPYGYYKPSVTRIKLFTKEPLKPATSTITLYITVPYLSSSPSLFYYEPPSRIAKPLVTLNLGLLFILGQLYGLGRVDVNPLDQGEHQSQNYAPDRSTGADSANNRI

SEQ ID NO: 973037 - protein, 174 aa, Homo sapiens
IARSSSQQQVQVRSGLVFVKSGEVQICQLTIGVELITDEVFADQIELPAQQRWWVVFGPGRRFRGKGLKQRFRLQYQWFTIIETLTLSLVSLSLVWSCSSEIVSSAPKPLERPDFSLLSPSDTGLPRVVFFTGVDVMSAHSPALLRLVFFGTVYGSLAGPTPALGYCPQSPHLE

SEQ ID NO: 973038 - protein, 222 aa, Homo sapiens
WVLVQNFIKVLKKRNIQDSQNTGGQGKTLVMAGGERSGSGALWAGRFWVFPPLSGSEQWGVGGDKIFIISWSVFTNKGLTGCVQAQRALLIGAPILITRFEVLHRGHENRYLTPVIRPQENTIVVLRHNPGGRAQRMRHRENDSPTQGHPRERETNTGANTKNLTGIKSPLGHREKDTHKNTKNLQKAWGAPNSSKEENTERKTQKEGPIRKREKPLHRNIG

SEQ ID NO: 973039 - protein, 180 aa, Homo sapiens
  misc_feature (43)..(43): Xaa can be any naturally occurring amino acid
PRIKVVNVELPIEAQLGLAVQGSKTFVNHVIIAAQQGQACIMXSINIGTTSNRQCMTKTCQLQESVYDVQTTTLCGPYENIYTVSRIINNFLTTPSQKTELTELYEATERTKHKQALMLTQLDRINAKLALQFKVRFQEAEERPKMFEELGQRLQHYAKMQLTSEIKDEKYNHIDESEMK

SEQ ID NO: 973040 - protein, 96 aa, Homo sapiens
KELNAETCTFHADIAQLSERGETNQETILHLLSCVKNNERAGKVTKEQVKAVMDRFTELCREVVRRLIDNGDGVPRRVKNLVVLSQAALGLYTITI

SEQ ID NO: 973041 - protein, 316 aa, Homo sapiens
RGGASRHDSEASPATWNCLLEFAGGPRHTLLPGNHQRRLQNSKDCCLFLPLEASSQMDTCQMPARALLYEVSVNPCQEVSPSQEAQGSGTPLGGAVCPLAELEHCAGRSAVSLGPEAGIFKSVKLHPQRFFPQVLCLREMGVYIYKPLLGLLPFFQRYPAREEESREDIWIQRFAGLWWVHQFRTFLVGFVYPVDGKTPYSSLSNGVIPPSPKLEWSGGLPTCWAGRRFRPGTLATAQGGDRDHNHAADESPPQGGKGWTRVSTSHWSDYTNVGAVSCRTTVNNRQYNEDIDNERLQQHVDTHKRPTDTTHEALRQ

SEQ ID NO: 973042 - protein, 191 aa, Homo sapiens
  misc_feature (28)..(28): Xaa can be any naturally occurring amino acid
GATPPGFLGRAPELRHKDYGGRPRDGKXNQERRARTHRAPNRRNKGEDIMGFPAPPPPRLRARWNLPRNALRAETSGHTYSGRLVKSFTNADPPPPRDTSDKTSTFARPPRERPHAAGKQKQGNAGQIILGRPPPLVEAHTHTAQIRRGLAAGDRATSFPPRRPHGVHQPDFVAQRTVRTHIATRGWRGKR

SEQ ID NO: 973043 - protein, 85 aa, Homo sapiens
  misc_feature (78)..(78): Xaa can be any naturally occurring amino acid
MADNKTHTASTNETCTNTGNVSELTGLAEHSTKKRDTTYDDEQHQPTVQQNIRETRIRVDTQTVRRAKRYKDSQTEGXESARARP

SEQ ID NO: 973044 - protein, 172 aa, Homo sapiens
MLCYLKQIGDNCCCLLSPYKCELHHSLLDEERQRVDVSELLITMTLGSLIFASCHCFEIARGRPFTIIGRISGPRYRCHRVPRNVGHVCVKSGCCWYAAEICKQDRTSGEVNRGILPMGRGANGGPREGSQEWKTRGRFTHEAGAPERAPPNETATKRGTHTGRTRNKCDTK

SEQ ID NO: 973045 - protein, 70 aa, Homo sapiens
LWVLTVSRSAFWTPHLRTLRALCACAAFPWGGPVTALLLAQGLCVERKDHRRGLRECSRTSVLKFGLRPV

SEQ ID NO: 973046 - protein, 95 aa, Homo sapiens
VTLGAQRGQRMVSKKPVVHEHVGGTPCSAGARGYKENTVRTLSGASSTRILGRHPKVNEQWRLVITWQHEEALASNAVVGPARGKKKMCGVHTHG

SEQ ID NO: 973047 - protein, 196 aa, Homo sapiens
CLLFERRRFCVRVVPRCSLLRKLFVAAIPVVCRASLEGVLPAPRGLRGPPWLSNRAPDLSPNTVAEAPGRVMAPHTLRATIWGRPLPLLAGISCPVHPVPCVPQQVLVLETPGSYSPARTIAGSWPRYGPHPPGELFFLGCPLPPGVEGAFIFPFRVAQQAPVYSIERRTTRSSFVTKVEPQVLPASCKGAESTHH

SEQ ID NO: 973048 - protein, 213 aa, Homo sapiens
MLTCTRTVDAYVKPIMRHVSSIGKTVKTIALIEGRNRSPKGDKAQHLRRNGRTEVGSPRGPSHFSQRLKPHGLNDSRVAVPPTRGPRSRLPKGSRAKRRLVAPRDFATSLGSIPSYGTSPVRTTGYPSWKSPQGEVNTPVVVSNQEPRGPSPQPSGPYAEEKQAVVLPPMQEHNLSSLTHSALFSEIHPRIDSIYTIVMSKSKAVYRYLNSTN

SEQ ID NO: 973049 - protein, 280 aa, Homo sapiens
  misc_feature (73)..(73): Xaa can be any naturally occurring amino acid
MCFIMVLGRSPAVSGHIGVLLSADLAGVSDPVCLVVLQIGRVHMLPRAPHLAHYAELVPVRAFRGTGYFVFSXRGPPPACPGRFIVSTPRPGAVGTPQAPLAQMGRSPPEPKNKGALPPMGYMAERVAPEKLLCQEGGQRSGGTTPRGSTPLDVVALPTEALVCVVSKNDPGRPSMRRGPGPQEGNFPGQQNLAPPAQCSQTYHNKRAATRASKRYTGPSSCHITTSSPPEEVCGGPTHATREREGGSSRSPAGEQPPESGTERTPGPGLANDSALQKSL

SEQ ID NO: 973050 - protein, 122 aa, Homo sapiens
TTLEKCCAAAESSMKCYAKVFDEFKASCGRASEDCVIKTKVVRHMFWRRALEEIQHFQECAIRFVTPRKVSPKVVKRPELVVESLKKSLGKSGQTNSDGRNYSLECMKENAPVQKTDRIRGP

SEQ ID NO: 973051 - protein, 145 aa, Homo sapiens
MRNTLQRRVFHTRKEGGPSGPKRPGAKEDPTDVASRIEASNTSHQMAKMTPTVCFSTSRGPPWPVVKTPAILRPPGEDIIGSLDVQTLAENNGQLETPKEGPRLARFRRQTQRLFLRTQELAVPPYGVGLFNLPPKTPFLGTQQD

SEQ ID NO: 973052 - protein, 147 aa, Homo sapiens
GVCFVRGTFAPLYKVRRVPVGRSLCHVCVVFHPGTRTIGGLYSSLPWFRISATVCLPASTDVGLNIPRGARRHPEEDAPSLVGTPTLRIVAALFFAPLFGRMTGTPCMFRRRLPLVVNVLAPRKADCARSFTPPLFRPPPPLLSLPW

SEQ ID NO: 973053 - protein, 290 aa, Homo sapiens
MGLPTWLFSYFMVLLFAGSAVIAINPSRCSSDWPRLKMLPSRHPLAAYIGPFQTSLVPLGPRSSGSSTGGTPPLPGDLWLTQPPGRWDTQFSRANGAVPPRANQGGPTPRALKFLAKTLPGECWPPEWEHHHARGKPPGGHSRIVRAFYQRGPERRWRKETPGGLKEKARRHTRALTRQQEASPRLAVERCYEDPEGIHNVALYKRITTGSHSWPRARPRPPPERARSRPHPPPPRDMRPSRAPRTHSPRQSGTGRHPARVRNERVITRAFTHRSEMRVREKKNPPSEQD

SEQ ID NO: 973054 - protein, 125 aa, Homo sapiens
RRSASRLACRAWQRPAVGGELRLRLRGGPVPLLPPWAPPAACEWRPPAVRCDALCACYCGPSCPPLCSPAAQARVAPARRVNNAASDRPLLARSRRALCLHACWLSSPRGGGGARLLPVSSHVIL

SEQ ID NO: 973055 - protein, 78 aa, Homo sapiens
RDQYFGRPSLAGPGPPVLPTPPGGFPPRRSCLNTQHRALSSLPEVHRGNTLAVAKRTVSPRVLTAPPGVFNMLSCPPT

SEQ ID NO: 973056 - protein, 122 aa, Homo sapiens
MRPRCNRISVRRPRTVVRNRARNWVLVVVQKRPAFKPPKIAFSPRRQLYYEPTLEWRGRDPHSVLGSPSTKDRSHEFASPGPICTTKVHSGLVDPSAPMLEEEQSCRVSGIVMRTRRPTILP

SEQ ID NO: 973057 - protein, 76 aa, Homo sapiens
  misc_feature (1)..(1): Xaa can be any naturally occurring amino acid
XKKKKSGRERPRGDIEPLGASRSDPGRLVADVLPELGASTCEECAISESSCRYSSKARSSKSQVRVDFKGQCTGRG

SEQ ID NO: 973058 - protein, 548 aa, Homo sapiens
  misc_feature (43)..(43): Xaa can be any naturally occurring amino acid
  misc_feature (287)..(287): Xaa can be any naturally occurring amino acid
  misc_feature (334)..(334): Xaa can be any naturally occurring amino acid
  misc_feature (492)..(492): Xaa can be any naturally occurring amino acid
  misc_feature (529)..(529): Xaa can be any naturally occurring amino acid
MCNSQHVYFPPVARGKLGAPEVCACERVEDNTSHHVWCLVVCXPSCVLRVEVIVPARQHAITCGACIHRGHKSRDVWNLLLYEKHEECDELVRFSCVVTCERPVALCGEPVPAVCDSGVTLCLAACACGRRRLCERVCVRKLWHRPPGAPCAHPAVYLKVRRGPKGDERHTVRRWVGDTPLQRDPHRERQAPQIREDNPSRVESDAPDAQTKPRRKEEPIQLTTHKLQQHEHRRPPKPKGEARAFNTGSTPPESKTLQETHTWCANCEARRTPLPLDTRRLHYPQHXMHRGGGTHTLSGYYPTQRRRRGAAPPPSTVGASNPRRPTDISTPPTXAALRRQTLDNHHHPRTSTHNYHPPHITDIPHTLIPHSSPPSIQENHTKITLRPIMQGQHHKGAAGAANHSSGDTPSQQHPPGGQRHPQSTRNHTATQTHPRNYMDQTPCGTETNNRTSAETHHRTPHIQTQQPTTPNVLHRGTPQRNTHLQRHNKSVXSRPTHNNGRQLIRIHIPKSPTLNQLPDADAIIHEEDXNSPTNMTHTPSSTPRSPPS

SEQ ID NO: 973059 - protein, 186 aa, Homo sapiens
VHYATMISGGDNSMGLVLGSSFVCLHASFCSNTLGAAPIGSRREDVSHTRVSLYLVMTPIFAVNSVGVRTIVVDRVITSRNPAACSPPCSVAPVAPLQVVGSLARDFCSPSRPPVAILVPVYIVSCAHICCRYPSSRGGCRRATLVFVLLEKRASFPISFRDHPSWRVPYRSHSGSGAGPPVPRFA

SEQ ID NO: 973060 - protein, 252 aa, Homo sapiens
  misc_feature (241)..(241): Xaa can be any naturally occurring amino acid
DLACLLPGVSVFRHRVPIPLVFAAPSSVLCWSQPAVGLLVARVAGLSNHWGRFAPHPGGSTPPMPPRFPGTPLCLPSLLPADSLALLRFLSRGLTSSVFFPKPPVRAYPAIPPRLISGYPSVVIHPHCDNISSYSSLVGPPPLCSHTPPEHLNNLSHTVVRTPLPLSNTPQIASHRVRKTPLLISHAEAPNLEVNPPTHYSHPIFVVNRRNQVIMLFANKRREVIRPPAPSSVCLEPAPAXAPLLDICFTID

SEQ ID NO: 973061 - protein, 323 aa, Homo sapiens
WAKGNRGGGPKKPGGFPGLAPRGAGGENPPRGGPPKTRVLAEKKRGRGCTNPERAHQTHAPERATEWRPPTTRYSPGRHSTREAAPTVSPLSVVVKPRGPGAPRGVLRKAPFTTPRKTPGGRGAEITTQRRLSPNLFPSNKLILYRREEDAASSMFPRRGNQSALSSEKEAAEVFPTAAPHAHGGPPRRSPTKAPLYQRGEQHEGRGGGGNASHNIEKPPGGGRRRPRGEPHGDHVCEQPPPGEAARRGEQRWEPTPRLSLVSPKETGRRKKPVLRATEPYTVVGLHTNRGQPGGTPRGPQENPRFCLEGPTAQEKVSWKQDS

SEQ ID NO: 973062 - protein, 295 aa, Homo sapiens
PPKGARAPEASRTAAWKAPRPTGGALCNNYEGGGDNRVKPGQWKKFITAGTTPHRWSGRRTKDAPPRCSETPSHNGLLHSHPGVMETYTGPAKYNKCRRPQLYWPTREVSHSWRRVITKRVLVSLLTFLERALHDGGGVHHVKIIYKRDCYRPPRVPRSSLQHSQYQGETHLTSRQVKNAPHALGMLPAFCVIVCYTPTVDPAPLYADSGRMLGDPAPCGRARGEHRAPVRRRQGSHLFTQHLKTGRCNFSARQHHTHYVTEYNEVGRPTQTETRDRRYTEDTPPPQLLKNKQTK

SEQ ID NO: 973063 - protein, 82 aa, Homo sapiens
LLYGVVVGPPLFCRTDSPSFFLGAVSSSWRSPSCSPACVSLLCRRHSSSGGRCPAQLFASLLFGAKKRGYFILPRPNNSKTS

SEQ ID NO: 973064 - protein, 418 aa, Homo sapiens
QRPLGYPRVQGRERPALHHLAVPDCLACGRGAACPLVLCCMCCLTCVPETLFASIWALLCFSDVLPAMPCTWCPCCDAHWNGVGTCDVNALCCFALCCYPRKSKPLTHSARKAQSHTITHDCQVRGSSLIGAKTREVDPLAHDTEFSFVTATAWRNRVYLNATATDIDKPVLLVKLPLYATAPHENTAPMWFWAMTTFQTGNRTLNLFLTNRGTSFQGTPFAGLACVPKPSPRVTLVIQRQETVPNCTPMDPPSSVPLQFPIGDRRAHGVRLSTPLFDALPICPWAPNSPVETPMDFLSLLERLWHAVPFATRDNFSKPFRPDNKFGWGHFHNRGGPYPNHGETLSAGHQRHILAICDNQPLCRIVPGASPLVNPRCCLRNNNVAQSKGNFPLNGTDFPVEGNTFTALPSVVPPQSGF

SEQ ID NO: 973065 - protein, 148 aa, Homo sapiens
MDARPSCSRQPQVEKPPTCRRRRCDSAWTRTTDPDMCYKSPLPPPFSQTNVEIHFQLNIQVVALVKLPGEFSPEHFFKGLSPPRISVKTGSSTVADEAKIPQECVQRTVRASDDIFCCDLQRSSDVVTVFRRCRSSESLYSMSARNKI

SEQ ID NO: 973066 - protein, 276 aa, Homo sapiens
LPAGRQSVLVFAGVCRGAESLSWGNPRGVFMPLIGPAPCCEVSPRWVESIVPRSRMVAHRRACFLFLRGRPRALPTARFCLEEASGPHPGGTGCPAMRRACVGVSRGGPPLALLTRGGLRYAVGGGAPACLGSPGPLIASCHGLLSKWSQIPRPEAVPLWDPPTGVLSSRRMCFCGQPPWLSPGCRHSVAPRARIFRRTQWDQSQMVCRYTRSCGEGGAFRRSIVTLVCARSEELAVAVSPGAPLLPPQLLGVVIQRVHINFSSRREIIRRPRLLL

SEQ ID NO: 973067 - protein, 160 aa, Homo sapiens
  misc_feature (34)..(34): Xaa can be any naturally occurring amino acid
MGLLSYRVCTPVKSVTLFVCAYCIPQLCTPKARXTTRNYVQKILHIDKPNLACITAYPLQCADWDGPQKDSPKSSNQIWYENHPRYPGDYTNRLISRKFYKGPSLSVMIIAHDKPATRWDKKAVKLVPHHSRCTRDSFKPTPNEGSISVRGPAHGHNTNR

SEQ ID NO: 973068 - protein, 155 aa, Homo sapiens
LHEGAACLLLITSEIDLAAEEAVMTQQDEKTLWSLNGIRCKQYLTNPQVLNVPRVRALKRSLRVWGEHRELECAVLRVSTLLKTSPSQRRTTILNGSNKLGVNGRSYPRDNSRESYSRVHINNRVLTELDVGSGHPDGAAAIKGSFGKRLKSYVI

SEQ ID NO: 973069 - protein, 74 aa, Homo sapiens
ASLDPLTVALLNSHLPKSFFGNRCPQAIVNCPVRENGESSPSRENVSCGARLIESSLLLLPVKGVPPGADISGI

SEQ ID NO: 973070 - protein, 142 aa, Homo sapiens
TGLVRRRSFSYRDTLCVPIFPPGSRLGPRITMGYNRALEFDVAWVPSQVAGDSLGFSPPGLLEICDYIGNIHISWKPRSWSPVLQDINPSGTSRFSPGFTFPEFGFRPLPSTAVIFKYGRQSQRSQGITPAPYYLNGTISLI

SEQ ID NO: 973071 - protein, 295 aa, Homo sapiens
  misc_feature (278)..(278): Xaa can be any naturally occurring amino acid
  misc_feature (293)..(293): Xaa can be any naturally occurring amino acid
ACVAPALSCLLGGSLKKSPGPLHCFCTCLISHGCPGDSREIDFMTSLVAQLRTRYFISDKVVDQGDHGTIFCPCALVLGPVRLCLASPDMVPVNCVAWLGDAFGFILRCVTHLRCVIVFRCFSLELDEIAVVCWRQRPGNASGAVKMPAAADADSSVSFPALVPTLGLFMRDKHVGHPWGSRDGSQRLRSRGDSSGNMSRILTLGWHSLVRQAVTLRLAPSRWVQVHQRLRCQGWTQECPWLICTRTLCDRTNPKEGLKHKDDEMEFWRKREESAIIXTNNKSSHGRVYKSCXVV

SEQ ID NO: 973072 - protein, 247 aa, Homo sapiens
MGYYGQKDGPVQVTVVPALIKPGVNLERPPVPVFPQVLSGSRRKFAAPCAVQGYTFSTSRRAPAQTPPPGEPCAITRERRAPKKRRLSRLGSLSKQAITGPNQSRFGDEHTSLETPAVLLAGEYKGNHPIYRRIPPKKPPDPAQGGFNNGKKCAQEPEWGQDNAHRYGWTNDAPKTEYGIARLGICHPDKRLNPLGISKQGGAPQETNQLHETELYAQTPVYRRKIDHEAALGKGKETPLKKSGPQN

SEQ ID NO: 973073 - protein, 103 aa, Homo sapiens
VGICARAGGFSHCPGAVWEGWLSVCARSQGFFGVGSPQFCGGGSPDGGPLFVPLLDFLKRRRPAVASMGRPTGTLVVSAGAETFSSGPARSPSSGLRDDPRLW

SEQ ID NO: 973074 - protein, 297 aa, Homo sapiens
PELRRNRSLSTPYPQTPRGGSPGHCPRRYPAEVTPLPELPFRLPNAPSDKGQEFRAPHTKSKCPACKTGNGAGTKQRRVHKNTCGDNGKACPLEQQPAPRFSRDAAKVAYQGEARVYHGLAAPQGGKAYIPRAPIMLLRAPPPTRWGGGDKISAPKKSAKGANGEETTLVSLSAHQRPPPLPPQGQAKGTPHFSKEGPPREASSNTGGQQHKQSAPRSGSPPGTVDRRRPLFRRTHTTQVLTHGPRETTRAGQQNPPLRLCRRPPETLRTLHFGDKPPFLPPIFYGEKKKPPNRGQK

SEQ ID NO: 973075 - protein, 79 aa, Homo sapiens
GSRLKPKACASGPQTEGPVQTPQGLLETLPCDLLSRRQHWWSGRPPLQALRETWAPHLKSGKKPFPTEGTPHIGKTPGE

SEQ ID NO: 973076 - protein, 164 aa, Homo sapiens
FKFFLGKSSSPKKKIKLKKSKNVATEGTSTQKEFEVKDPELEAQGDDMVGDDPEAGENDIEKIRGPEAGPNIDEEQSGVRNRGLGSRSHKLLLPRVPKKAKTWIPEVHDQKADVSAWKDLFVPRAVLRALSFLGFSGATPIQALTLGPAIRDKLDILGASETGS

SEQ ID NO: 973077 - protein, 217 aa, Homo sapiens
MNRVIYGLEHICGSSPSRVLNVLEVSFVGDTRALTFSVFVAPLRRLFAASFGSPSPVFNRVGIGFLPSLKDGWPRVPSRTEHNRENTGAHQRWVKKPGVNPNAGTTTSGGGPDSHGPPHCEHPPMYDVAHKNGQMQGTPSGGQTIYRCVTPPHSPPVNEAGNENQPRGGTFHRGVVVSQSTNPPIVSGGEQVEKILAQEYGATDNNPGGTTVSKKPR

SEQ ID NO: 973078 - protein, 152 aa, Homo sapiens
PPCSAVSCVRRACALSSLGGAPPGVGDHLFRAGFFPAVCWSAAPVCATMYALSLFGVFCFGVRTPVGHPLRRPPRWSCPRRIAASREVSINSAPRVHPSADDFSLRALTRLLSAACFKRSSHLSISQTTPVFLLQTYSLLNISPSPLFYYRY

SEQ ID NO: 973079 - protein, 110 aa, Homo sapiens
REQKALWINMQICLSTGTCCGGHDQAETSHCRGYSQEMALCKPCHKAQPSTTRLISANGAGGRERQRPASGFPSPGAHGGFPPFQGSGTVPRGEPGDGGREREDRGCLRP

SEQ ID NO: 973080 - protein, 135 aa, Homo sapiens
PRPAAGHVYEQLMQLYVLRQRVAAEPGPACVKQHSLLKCLRKAKNGGADHARSRNLVKYAFCWDSDHRYLDDVWRSYGRAIYNGKELTTTVEINARALTRPRTLVRASPSTYKRRKDGRPDNRGHPLPPAYIPLK

SEQ ID NO: 973081 - protein, 102 aa, Homo sapiens
MLFLAETYICGGPPLHLPAGLWERRKWLHFHYTKAYSVPRFRSQELASPIHSGLHYAHAQTAAIWDRSIPKSIYVNLLPRDFADILESPLPNLVAPPLGLYP

SEQ ID NO: 973082 - protein, 210 aa, Homo sapiens
  misc_feature (17)..(17): Xaa can be any naturally occurring amino acid
  misc_feature (156)..(156): Xaa can be any naturally occurring amino acid
MYRGFRRLTPCYMRNYXIIGNRSPLECGDPASTQHKRITESYSPMSPHINSREWCLSQCAPETGSNWCTARFPLALSNGKPGASHMGHINPLTRSAGNSLFPSSTTNWNIPLAPLDHYLFNPAQHKENVNPVPTTVGHHYYVRCAEHHQVFILACXPPLHSPATRIIIVARRARKNISNPVSHTCPPTFTESLFLKNFHTRTYNSLFEHS

SEQ ID NO: 973083 - protein, 317 aa, Homo sapiens
MPDLFLSTSWPLLAALFLLGMAGLGCAVTAGLTSTVDYLRRPADGEAAFIKPAALCLCPEATLPATACPCLPLNCGCHTHASLGVTGPDPVTDPGTGQTWDCPWLVAAASCCGLGLCAVLGGLGERPLCCGVHSVLTMCLGRVVLQDTDRLENMYRSSQAAACERPSRTEYIEQTARQTEHQYYAGSRNVKVDSDQNTDDHNHANQPLTMADTRGTADRPTARRPQPSPRERARTGPKGLMQANDWRNQRQDQHTNKTSANQRQAKHPQQNTSSTAPSQPPSARLLTIEDHYQTEETNQQEHTPDNTTPTQQTTHSN

SEQ ID NO: 973084 - protein, 311 aa, Homo sapiens
PSARLQSTDRTAQRKSHGRVSALTATSNCAPSTTCGPSTRARGVCVRQHTGRASFTRCPHVKSPPNGLGTAPFIDRGNPPNTRGGNRTTLVAGREAHPFTSISAFQGPYKAFLRALLILIRVFLLRTPGVYAPFVGPRSSLEHSVPPYVWRCRMSMGPKRGHASPPLARVSLLPPWTPSTARGVPTHKQATPNHFLSPTPRRCPLWFFLRTNCRGWSIPRGPTHSCLIVLLSPSRPPTYSRTPPATVQGEYTSTPLSSTPGAGEPPLFCPSGRIDPSRGCGQRPEASINDIKWTHPSTFASLRQTAAAHIT

SEQ ID NO: 973085 - protein, 258 aa, Homo sapiens
MNPAAFGKDVTFNLKTQRHLMQHTEAKHRLDRTTKKQTARRHTAHGRPGTFTWETHGYFSLTRLENCWRLLMNHFLQTSWLPATATQARERLHNDPTYLNDSRAHATAPNFTPHPYPVIFPLARRTTLLQLSNSFLTYQLRSLIIERDTLATYLWSAHTLDTNFYSGGNKHIPFISPSCCDSSPELSGHSSSPGTKNNPTTRPPRTKHHPTEMALPSIEPNNNPTTDSLNTPNPTNNFPTLLTYTAFLHPPKPYTAQN

SEQ ID NO: 973086 - protein, 79 aa, Homo sapiens
ILARTGNYEGAVSVWRPLFSKPVVPLMYPLGSLLQITVVLSPLRLCYFAPGGHNGFSKSTVVCMTRPPLGRQLISTGRL

SEQ ID NO: 973087 - protein, 216 aa, Homo sapiens
IEVDDVMELMILCRIRSQRRIGIWHGGTMPIIRDWAERTVLAMYEDDYILSGSSTVRYELYTHLPVSDEQLVQSSSQQLGCSEIVWSLLSGRIPHDALGGAHFTGMTCRGHSLREAPGGATESSLDNFPSQVKHSCTHRLGHPALRYKKTQQDTERSTTDTLSDVHRPLLHSLLTYDQYFFSDTVIVRGTRKTQCSRDNTWYLTWPYYLVGTRILD

SEQ ID NO: 973088 - protein, 130 aa, Homo sapiens
CSFPGPGQSLGPNRSLASDLGPMFPRAVSPLGTLRLHLVLDPPVGQCGHSTTAGLCFLALTRVPFLSPNPGHWSAGLTRPCPVRRLCTSGEPPFLPRTTHNLRILQHWVPPPRLIPSTHVAHKHFSSLQH

SEQ ID NO: 973089 - protein, 296 aa, Homo sapiens
  misc_feature (42)..(42): Xaa can be any naturally occurring amino acid
  misc_feature (163)..(163): Xaa can be any naturally occurring amino acid
  misc_feature (260)..(260): Xaa can be any naturally occurring amino acid
GKSRRAQHTVLLIAPCSLVVVCYPRLTFYPSDASDMYTLRCXLCLYTFIPCGEFIVRDYRHYWFCVTRRYRCYTPRLLRIRNPFSGLISHGRLNLRPILSGLRQSGSIIPPRAELLSIAFRKMTPPYGRSPAVARDPPLVFPGAERRFLVISPAVGLNSSLIXCVRLGTQVCQLSLCQLLAMGKYNCVPLYRVSSDPWFCTPTGTMRSLQRSVMARQASCVKRCAVLPPSTVLTQVAETSCWYSNPSLLATQNRMLSSIXECPANKDAPAALVTSRWDIHVRPGTPKGVHSPSPPR

SEQ ID NO: 973090 - protein, 111 aa, Homo sapiens
MTWVLISLRYMELTKCPVNAETNTCKNPSTIVINSSPTLKTMIPPSRTSIIKEKYYPPPHSPRPVFLCREVSSSLCVSTHFLIRLSFFRAPLCPLSKFLFHTHAVLDSHCT

SEQ ID NO: 973091 - protein, 104 aa, Homo sapiens
MHCGCRQKRLVKTIGDNQHEIFLNNNLVDSNIVKNPHRNLEIMQSLKAPNLSRPLLLQAEQDSELMTKFSRWGGPVAVKIGEEGARKELDKRNPLLFASNVGND

SEQ ID NO: 973092 - protein, 165 aa, Homo sapiens
RIGPPPCWGRPFGVLPRGQDFRAWALVRWTILSPACGATKLGSVSHERPVCSALCLREVFFLEGSLSPCRCATPGGPPAKEGHALGVHPLFVDVSSDECSFTQRRRRLPMFWFLRPLSLVKLRSSPLTARVILGGKGTARWRLISVRVKVRPHTVTHRKVWEKIE

SEQ ID NO: 973093 - protein, 74 aa, Homo sapiens
MMSHVASHRSPQFNLWVPSGRYFVEPPIVTQKKFSCRPEFPLPLSGAFWPPRGLLQGPVVFENRRKFFPLRKRG

SEQ ID NO: 973094 - protein, 245 aa, Homo sapiens
APHIRGTKGALPYRLGLRPSQGDRCPLLGPLSLGFPPTFISPPRRSPLPAVPHFGAAPPLGEVSAAQLARVFLSPSRECRSSPLRGVVASRHLRPAAPRVFGGLQRRKQFPWGNILFIAEFPCFNMSRARSPHRNTPPSGSRLRTRCPTAFPHAEVYRPSAERHLVGREGPTPLIESGAGRHTSASRFAHHDRYERQLSLTCEPLAGIPSLPSAGAPPRWVVRAPAFAGLFSICKPHQKTQRSYQ

SEQ ID NO: 973095 - protein, 267 aa, Homo sapiens
  misc_feature (4)..(4): Xaa can be any naturally occurring amino acid
GGGXAKEKKYEERGGHKQEEMIREPGPESDETSVCAREVNAVALTKEIGVPAQLEVRGCSGNGSAGDRPPAWGGAYRQDVKGGWQTAPGPAGGQENTVVGRPTGCLKALPALGVGHNPHKVNACANSANKEQVHAHEQNIDDWVSPSPGEHEHAEIPRGEGNTTPLGEGSMKPAAREVQYYEQVRTNGRKTPRGGPAGAPTDVQVSEKQPPGREFTRRPVCVVHKRGVPAYKERCHRGPPLAGHQGAQGRRSRHNVTSCRPCARGYA

SEQ ID NO: 973096 - protein, 190 aa, Homo sapiens
IQGQTARYPLNWSRPIEVQEEQRSTAGGTTSRGLDTGRRHAPQAMKSSRTPTNAVKKAEVPSHEIGWTNETIFVEAPPTLWSPNREAHHHLSLPHRHTYMSRAPRVDQRGRHLGPPNYWVVTVTQAAPQKVWCGCTQMNQTQQLKGTANSFNAATTVQSEYPRLGLTVRRLKYNSDAVMSGVGGRHTHIQ

SEQ ID NO: 973097 - protein, 57 aa, Homo sapiens
MVRESADNNARRGFRHTRYAWPLAPVSGRPRQTHPKLVVKKPPPFNPKKRIAPRNKN

SEQ ID NO: 973098 - protein, 103 aa, Homo sapiens
MSIVQYGPMPLGTMGSSHGAARKSRPQGLPDKPRLQAPRPRVSPPPRATKGSATYYRKEAAFKYKQKMEAPLLKLGKGRSSNTEDTPRSSSSAPKALRARQHH

SEQ ID NO: 973099 - protein, 110 aa, Homo sapiens
SNKSQTLTPLTLLCRVLHQHYLIPTSPWGKPPLLSPGTLTKLVITYVNYFSPSICYILLCYTRTIPAENIFFFTRPPLTLTQENRNAFSLSEGGEVFMFKKLLLVLYRQT

SEQ ID NO: 973100 - protein, 327 aa, Homo sapiens
  misc_feature (109)..(109): Xaa can be any naturally occurring amino acid
MTLCGVVPPLMCLGRTKLRLCGATTVLFPPAVKVVSSPPAPQGSWGSRPPPGVIASGFRDRGGGAPGMTSVLLHRKGPHSGPVGVRTTACVGAFVLRSEPVNYCLFGPXFRSSCLLPQSERVFHSPPQTRSLSYPRGCPPIFPRSHPVGPLTRTPHKTARRGLVYLPAAAISGSVVCAHANTICCARLIRRRGSPTFLVRAPPAMCRCTPSVVRSLLLHTRWRDHTLYCHYNPAYNLLRLFESHLDHLPVESRTELPHQVKNNAFSLTPSGSNTNHGQAPPPYAIHHRLQTPPNTEPFGDHKVEENTTPPPTRGSTPPPGPPKFSPT

SEQ ID NO: 973101 - protein, 202 aa, Homo sapiens
TEVLVAASFGAAVVWVGAWLVGLRAGVPAPHVVVGRRLVVVRALLCVRLRCHLMVALWLVPPSRVWVSSTVARVLYARVGRLFVVGVCAYRRRYVVVRPLIGPDFKSVYAPRADLLIQSFCWYHHKSPPLGNDVTSGEGAPTRRLAYTVARRYVFFCDTPAWVSPLTLDVCCPECSTYVPSPWGPRTFYYTLFPCPTTHPKK

SEQ ID NO: 973102 - protein, 72 aa, Homo sapiens
EFHLTRLDHDRYYVPIAVCAPLYNIISRRKSRSPRGLAPPAFQGTGVGPEMCSLQRVYSSLQSAHGLKMAER

SEQ ID NO: 973103 - protein, 176 aa, Homo sapiens
VLWCKSRTRGRQCRPGRCAMQCCVPVFIHRGFLFGMGTPCCPRGLSHACFLPCRVGIADGLYFLRSCLITGVLFCPPVGHSRVGFPAQYNPCVRSPSHMPLWGKALPNSHAGGSPLTHAGDNFIYSTFPIIEDNLLTEDIHLVQQEVSVCLLTWHLWSLRQLHPSSLSGAQQMPRC

SEQ ID NO: 973104 - protein, 125 aa, Homo sapiens
MENSYARWGSQPTEKSLRSLSRDVSLDLTPPLWVGTLFPPACYGALQGKHAAYSTARAGVRSSRRISVVPTPPSSAGAPPWIVFCHWLVRGLTASLFIKGKRSLAPPHGGEVIINRKGARHVKRA

SEQ ID NO: 973105 - protein, 320 aa, Homo sapiens
SLGVITRFPRIPPPWGGLPLFARGKLFSSRVVPNCCRAFLLSLWPWPRVLSPPSGYVAFLALFPRAAKFSLCRVSNPRGVVSRQSCLPQGEHDNQARPKGGTYLGGPPQEASPPLGSHYWPGAPHSSFPRGPSFSRRLSPPSRVFFRDAGPKLFRCFPHRIRTPGTPVLGALGRVHPFSGERMLAGETPPHRGGHPPLICLFDCCVFSVQMLHWSTPRCSARSSPPPQCRFSVCPVDSTPRWRLSLPPEERGSFLPSHRATTKSTAFNQVWRSPAGHAPWWYIQVRVLPGGRHAYCASYGVVRANPFKTNWAGNKKTNKT

SEQ ID NO: 973106 - protein, 46 aa, Homo sapiens
MSYKKETQSEKAGVQNSRSGIKHSPEHGPPGRPNEGPAPPTPPDPI

SEQ ID NO: 973107 - protein, 152 aa, Homo sapiens
CLRGGAYLWGRRSVVVWWWLEYLSGLGCPECVALAVVVPLCLDFLLFSARLVLCKHWCWGRAVSRGLVRALCVLFPQGERAGVHRLVSRVLSCCAGMGGGGISHYGVRRMCLRVSSARIISLTGNEGFADEFVDYVFCLISVGGAHSAAAGA

SEQ ID NO: 973108 - protein, 153 aa, Homo sapiens
  misc_feature (43)..(43): Xaa can be any naturally occurring amino acid
MCPSPPYFSGGTFRPKQFKGPLIQNPVIAHYYNPLLGRKFFNXRPFSLPHHYTGKMLSGETSLPELFDPNQDVLTTTSDYNLNNWPPIMGLSAQTFSCRPKWFPNTQIRTQLSPPNYASPNNCDSLMPPPHLLPSSGNENDITRPRIYKIFSG

SEQ ID NO: 973109 - protein, 310 aa, Homo sapiens
FLCCVFLVLGFVVSVSSSFFAGCVVFFCFCFLLVGCTLRVLGVPACLFFVVLIFSLVCCRVCFSSSWSFLACFVVLLLLCVVYYCCLCFFFCFFFCFSPSPLSWLSSNVFGRLPLVFFVSLRLCCARGCIFACLFFFFVFLSPLFSLLCGCTLVSSLLSSLRIFCARFVLLSLLFAVSPLLFLLRVFDVFLLVFGCSSTCFFPVFCCVLLCVFRFSSVGSRLVVFCLCVPVPLRVCVSSLWALAPVLRFFALSSSLVGSSGTLLFSSGLVLTLSWWGARSRPCVCFSCPPLWRSVYFGVGGLFCRRGFVR

SEQ ID NO: 973110 - protein, 203 aa, Homo sapiens
MGPPRCLSKVRVPGGTTGGSVKVGPLYYTEGVSRGPPSSPCGAMVVPPGGCRRKGVGFAPGECSCSGGVRPQNGSLLSWAPPYLGYPRRGSLDTLIFVAPTCALVHSYTAWAQLFYGGGPPPWRSPAVFARGAEVFFLTSSTRVSIPDVLLQNPGESKFWWSALVSFPLGSPGLSFPTSALLRRWCPDSVGLPSSPLWDPPLP

SEQ ID NO: 973111 - protein, 332 aa, Homo sapiens
AVVGVLIWFSHYLGAVLVGGWVGWRVCVVCRLLCRVALLVGGVGGRWWVVVLLLAGGGVVGGGVCCVWFVGLRLVLGGGRLGGVGGWGVCGLGFCVVLSLGVRSDGVSVVALWSGVVALWVGVLGLVRGCCVCLQVGRGGGWSVLVPWFVVLCGWGGGVVMWGVVLVALWLLLCALVGEGGGWAAPVWCGGVLGGVVVGWGGVWWRGGVVVVGRVVLVLVLDCVVCVDGAALVVASCCAGSRSVVWWLLCRGSVWCAERLLGSRFVVSAVWLVVVLRQLIVLGAGEVRFACRVVDFCSARGYCCLWWCGGVLWWCERVGVVVCGGGVRGLTR

SEQ ID NO: 973112 - protein, 242 aa, Homo sapiens
MVPHHLLENLSLVIPAVISPMPLYIIKGLKNTTVHYQTQPSLILYCPPAAIMFLKPPITLRCTTPPKSPSPLWGYPTVRLGFFLEDCFEFQAPLHCGGPPLQLARLWIWTYYHYWRLAGVTHVVTCAPSMLCYPLSVERPATFARAEGSPAQTTRVFLTPLPCAPATGRLLSLFVFRDTPTLFPRSFGWGAPSCVASQSSVAVRCATGVLLCHPLWARSSPRRPVDFVLPVGPVSWGYQQPT

SEQ ID NO: 973113 - protein, 145 aa, Homo sapiens
MCETDVRVAPSSATGPHPGSLPRVLPHGVYFMTFWCIWRSLPLGASDMGEHNRALLHYCVSFDAPFYVVDPLPRALLLAVLEPPMCEPVQPPSLLALRVVPDSVCNAPPFSPTAVLNMNSSTYNYLTETTLTALIYTGDIIYMLF

SEQ ID NO: 973114 - protein, 204 aa, Homo sapiens
  misc_feature (73)..(73): Xaa can be any naturally occurring amino acid
CRGARREPPTSRIGPVDPALCRCSPPPRWVAKHQLGGSFNGPSPPSRGVSALLTHLFVRGSNPQAWAIVVCCXRHLPRLPPLDLVARLALCPPPPLCSRLPGSRSRGKFSSFRVRPALPSVLLLSPLARLSFTHAPSLAWARPRRLPLCWRVVYSYKPRSHSRLAAYVASKTPRSARSLLCPCWDEDSHPPPPHPDDVYCSPVP

SEQ ID NO: 973115 - protein, 94 aa, Homo sapiens
LGGSRRSSPPVRVVSCSSRGGVCVDLFVEDSAFLLCEVIDWFSASMGAFPYGAVSLSPALFGTPPTGASSPPSRAWMSAPRYVLDPREGSLLSL

SEQ ID NO: 973116 - protein, 167 aa, Homo sapiens
  misc_feature (26)..(26): Xaa can be any naturally occurring amino acid
  misc_feature (107)..(107): Xaa can be any naturally occurring amino acid
RRVLRAQDYVVPRDRNEGRRVGAHAXVTWLPALLLGTLGVPRVPSAGLIPRQGHIRVYLLDSVSPGVTKHRDQTCEGQKKGGSKPLLKYPPGGLFTSCSTLNPVARXNYVFPPTEKMPLEFLHPLEARVQGVTPSSLVLPPTPDFSRRPLAPAVNGTLARFPSNSNM

SEQ ID NO: 973117 - protein, 67 aa, Homo sapiens
  misc_feature (43)..(43): Xaa can be any naturally occurring amino acid
CGSSAHLFSGGHYIMAPPAAYPIPLGENQRGVKQPPVRVSHKXFRGGPPILMLLNGALIASPTSPCA

SEQ ID NO: 973118 - protein, 110 aa, Homo sapiens
MDSCLSLPPWRMDVGPPLALEYNNDAGPPARPPARKAEATGGRGGHLDRASPPCAWLTEARGGVAPWATPLGTLGVPRTSLRTLLSVPPKYALFCLAGTPEQEDKMKTEQ

SEQ ID NO: 973119 - protein, 122 aa, Homo sapiens
SWPGHKALWAPRPPRGFHPPKSPLGVAHPSGLSSSSFTAEPLCWSRPRPHWEPGLFIAFPGRDRQGHPAVFWPTTPVGNSVATPARFYNDNFSCHRRPPFFPHGAPKNPPRDHVLYKTPRNV

SEQ ID NO: 973120 - protein, 126 aa, Homo sapiens
PSPSCQYGPGCPGVSPLSRCRCSPPGMGLVPFSRAVGRASLPDQGFIVALSLLRLAIWADMTPRHGVSEQRPPTWSSAPDLANKVFGRVKPGNARGPTTSLSVSREFPGRSSTHAVGPLVTGPPIV

SEQ ID NO: 973121 - protein, 122 aa, Homo sapiens
ARSFDFKTVLLATPDYSDPALNCLGVVGHGHTGTSHGSPPHGGDDIETSVVSKDVNPPSQWVCERFPLALRTSEALSFQRNSSVPPTLSSQTLYFHTRHCLSTIIKNKMLLSIGLSARRQFG

SEQ ID NO: 973122 - protein, 130 aa, Homo sapiens
MNVIASLRHLSEVRPTHTHKYLTHVGECRAMIRGALLKIASSLMAPTDYLSIMVIYLYSSILFIIGGCEDEQRQILTRGDVAHWPPSNIVSLATQFLSGELFAPVLGENMLADFPTVANAYLGYIYLFSV

SEQ ID NO: 973123 - protein, 178 aa, Homo sapiens
MNLRICRVHLLRSRFLGGYRPQSHIAYALREFRGPRMGSGSPELFRPPDTLGKPDTFAWGLGQKFPEDKGTLLLSPGFSPPSCGGSHLQVIKGQSQLCNTNPFGNTSPHFYPYRVFSPLFQKTARLRIFDFHTPFLPKMSGPKTLATPKPDPHWPSFRFPSLEPCIPPPPLENCCKLS

SEQ ID NO: 973124 - protein, 240 aa, Homo sapiens
SPRGCSAWLTLGPSPPTFSLASRASLGSPWLALSPGACPLLLGEFARGVLAPVTGSSPRGAITWDTLLLCRSLPRVLHAAQPLRRLFPHWGGTSPPGVHPRWRPPPPKVSTHGARPGLELALCATLLAISGGPVVFPGHALVCVEWAHMPRLVFCPPPCGGISVLSLTSCLCLIYSPLAPASFHAVCRRLVIGQHGGISPPDGCLPLCTTHHRPPSAYTVAPLPWWAPIKIGDGRPQNIT

SEQ ID NO: 973125 - protein, 231 aa, Homo sapiens
LVLIVPCARRSLRWGFISCGSAPDCRPSVGLHSVSYFGRCLASVRYIFANFWSATSLCIKCLLVWTTAFHRFELRCMDALLWVAAGRCVVDLNGGCVDFSYVVYACALLSPLVLFGGMLTCSRVDASLFCGAHTLLGLTYGSSRASHGVDSGPTPAPRRRARSPRSPPLLAAPLALAARRARTRIGIAWLCSVAALAASSPRPGFTTTDSTHSPRSSTSSTVHNTHAPHIH

SEQ ID NO: 973126 - protein, 106 aa, Homo sapiens
  misc_feature (77)..(77): Xaa can be any naturally occurring amino acid
GHPSGKPFLGTCSGYTRVRDLVYGKHRSASTVPPPLGYVLWGARSISQSIVLSQQSKLAPPGYLSPVVGATLTGYVXMARDALFIDRTMLCVREGDLYINGAHTHQ

SEQ ID NO: 973127 - protein, 258 aa, Homo sapiens
VRGGVVEHRGVYVLEAAFLRRGASPPPDSVIEWRVFLEKLVLAGAHIGPLVFRRGTDVGGRSPRVYDRTYRILGGCPLPQPPATPGCGANPTNPTPPDGVGCLPNRSPLGKDPRYARPRSGPPVFVKRYSSAALGMSARSSEALQFSRPPSLVLTRERAFVFPLGFIYSPVALSNAAEPTIYRRPKSTLFLLTERNTHQLPDYPHVLSTQSAVLSPMTHEEITHLVVIWHILIPPCHSILVINTSTVSPRMKTTKAPF

SEQ ID NO: 973128 - protein, 99 aa, Homo sapiens
  misc_feature (61)..(61): Xaa can be any naturally occurring amino acid
LGARNPLLCKCPPLFRPALLVVGAPSRSRSLMLPPPWGQPKFHYGARTQGMFVVEDLDLAXRPRGVIHTRVMCDGGGERNREREIGDVLTHIYRYIKYI

SEQ ID NO: 973129 - protein, 280 aa, Homo sapiens
MAVGVNTLLRGTLSYHWGPSFLAVERLSRQHVPRVAVHTKPVELFLFRPLGNSSCWLSAWKQPGTSAPPLFPALHGGPQASTAVACCPPGVFLPCVSWDVWARGVVAAFIVSPAGALISVPLVIPGRLGPTGGEPSSLLAPPRGAPLQGCHRVGTSAVEACTLSRSLRSGVVDLALYGRSRTQATLLFEAAYTPLCCSLGRVARGMSPHSFVVLYLPGADNPRLVGPLVYRGNNVSLPPHRKDAAHLYVIASTSPCRSHFTVPPPWWTLKKRWYGKQTMT

SEQ ID NO: 973130 - protein, 295 aa, Homo sapiens
PPGLTTVFVGVSTPHLWRFEVRPLVGVPRACCVSPPLGVASSSPPHVGTLFARHVVWSPPLWSQPLWAPPRGCSPPPELPVSLAFCLPQIVLVVRLHTRVASCSGAALLPPNALRRVELRRSPVPPVCHWGGAPRPLTPVFTPDCKTCCGALARSSPRRAGPPVGVTLHVCWSQWSWPGVPRPLFEGVTGGTRSRPLLTPVVPSDPSSRTGERSISLLSRGAPPSFVGVRSAAPPLSRGVTRSTLCFLVLASPSRLPVGPPYNSSALFVGRRVVRHGYLCAPGKKVTIPRRSPHD

SEQ ID NO: 973131 - protein, 295 aa, Homo sapiens
VLALVLLFAFSAPSGGFCVSPLWWSRPIIWGPVPGCSLLLGALLPGVCRYSVAAHSIVCVATSTASLYSRSGQNTHSSISARAAGYEASMVCPSVLVLDFARVLLTTLLQVRWTRCCSPIVWIRISKFCNLPPGSSAPIIFVLPDHPSDIHALPSQYPPSQEVLIPDCPHVFLTYLSIKSVNRGPRPDVVGISPDFSIYDPPLLCYSTPPRPSTVISLSRPSRTLTPRAVLTPKAEHSTPFLDDLVVVGVGHYVLLLDFATRFMARRAEAVRTGMFPLTRCDYCFVLEACSLCSD

SEQ ID NO: 973132 - protein, 267 aa, Homo sapiens
YSLPLRGTTRRRGVCWCSTLSSPESLARFVVNSHAPPFCPRIILVHTAPRGRLVVICCRPTDRASRGRFSFWRHPLGTPSPVVTKSGLFPHGVPLSCGQLPPLYGLPVVRGTPGTPHGGTNFYYGPPSLLLGQYSVGPLVSSARRLVLVLPSQFPRPPITRGPRLPAHISLVCGSAAWDSAVSRRRFLLSSRPPRVGGSRGGGDVPRMEAPRRYLEQPVLSIFRAHYRPGYMQVSPAPRSCCFLLNFPRGLCPPAFLKKKILYVQTK

SEQ ID NO: 973133 - protein, 132 aa, Homo sapiens
MYLQNDSRQSYGRYYRGRTPLLMGVKDCRFRSADPMYLRESPVILRSAQQYFSPSLCSAVTKCFPHPLDVSSAAKPFQRKEVRFIFLATPRKGGRLVMGYLRRSSYEVMTTTGPREDVAIKTAQIGTPKQRQ

SEQ ID NO: 973134 - protein, 58 aa, Homo sapiens
MIMLLSKVVPTPRYCIRTTAGGHQGLPRIPTIVPSVTYPNLGAGRKQKPDPFWFLINN

SEQ ID NO: 973135 - protein, 113 aa, Homo sapiens
MFGGRPCVAPGVPLWDLAGGPLFSLAYTSRPPGSFMPPPGPRGRSVRCWSAPRGVFVSTQWVLARPSRASTWATTFLARTSVPGRAALIFLSLARLRVRLYLHLNSAAECERE

SEQ ID NO: 973136 - protein, 125 aa, Homo sapiens
MLPRAAEPILSPADGWFSRRWTVWFYMVMYSRRFLVSPPPCSHKVAYVTSYSTPFGATSLPCGRMCVCGVALLASWGGASVPMWYCARNPRSAGEYYQAFVGDAPPRRFPILITVGGVVREAIIV

SEQ ID NO: 973137 - protein, 183 aa, Homo sapiens
GDLFFPGPLYWPPCVPRSGARPRCWGTKKSSAPVMVSYKRARCCWFIRRLCMRLVLHARVLIGDAVLPLSVEKSPFMERDLCSRASVCSVSRLRRSLVYTAPSQIFCSHTIHPRKPSVGRINPLSGGPSGPPANASSPAGDVHFARTVFRRADCNCRPVVSVGLSSDTPTYGRLRLIHRIALH

SEQ ID NO: 973138 - protein, 287 aa, Homo sapiens
FRWAPRVFELLLQFSAAHKRCFLSVDLDPALLPLRPWFTPAPLREHLPPLVHTYVRGISQPPPCRRSLHSGLSTPHPAPFRPGRPTLLAVRRTSSRPCVWISAPSYQEGAVLLRSGSTTRTYGPAFCHPLASNVHPGRNCVALSSKNHAGGPKDSFLVPLTEFSQNAPRPTTGWYHFRTRMRMLIEHRRVPLVLYWLPSLSQQYASHVGPLRWEIFSNNYVGCWDTPGTETYCSTPALEKEYCETHCDVPSRITDARGNPMVSGASSYYDTTASSGDESQKSLEDHT

SEQ ID NO: 973139 - protein, 142 aa, Homo sapiens
MAFPSPVLGYRAPFPQVSVPSGRVFPPHQWAPIPLGGLPPDVSPAADHFLRTKPGPPRYSLGVKQCLILLRRGIDIMHLVGHRDTQMVCLSALYSPREAAPPWWKLRGVPSSGYCTPPRSALAPTYHSSVVHYNFCTHPRNT

SEQ ID NO: 973140 - protein, 106 aa, Homo sapiens
MGVSSGTATPFYWPATVALPHKGLVLATPHTRCLPQVDTAAHIKCWVHERHFFHKATCIPSDACSVAPKIISSRGVSPPRGFFHHIYGWKKASATLISRPEPPFGA

SEQ ID NO: 973141 - protein, 179 aa, Homo sapiens
  misc_feature (74)..(74): Xaa can be any naturally occurring amino acid
  misc_feature (113)..(113): Xaa can be any naturally occurring amino acid
YFCAHMRSRFGVVRDDRPEQTRRTKSATVAEYTSVSHQSPLSVHGILSLASHGLGNSLRFYGALIFLGHCSSDXTLRRVPICASAEKKEGGFVLCLLVQEIVWGARLFYIRGXREPFCDQKYGKPTRAQRSILPTLLSYGDIWLKKHRRVPGTNKRRPVWERHTMGGSSPCRKTVSVGV

SEQ ID NO: 973142 - protein, 290 aa, Homo sapiens
  misc_feature (1)..(1): Xaa can be any naturally occurring amino acid
  misc_feature (3)..(3): Xaa can be any naturally occurring amino acid
XSXPRETETTNKRSSEKTDKPDRTRLFPVAPKVPPRSPLPVFNGVTPGLNPRNKLDCVIKNGRASESMSGAVASPHRYTLPGQYCEKRPQPNKGGRFLLISAFNLISCVQRFPAPLLGDVPQGFGVSKASPLWWSNMPRVGLFSSCYAAKGLKTPLLHNNELHGLSLEPTYVAELAPPARGAIEKVPKCCRHVADTHSNGGSPTGDRLNPLFVLNQTGKSGAEYGHDLPSGTKSLETPKVLPRRFANKRRITGARKGQTYHAHAEVHSLGIPRLNEQEHKRGGEIFWGIF

SEQ ID NO: 973143 - protein, 181 aa, Homo sapiens
FSPRVSCHDDYFSLVPFGSLYTISGRQSGPSRASPSLWRLSILDVLHARFGTVSPSFKGSGPALLRRLLVLSPGSVLRRPLGLSRPGSMFCGRRSSEEVLPYNTLGVLERHYGVNGTSPTPPAGSNLRKPPPAGSSPCARQNPGSHNVGAQRILFWICECPPVIVWTSKQRSWPPLPLGAK

SEQ ID NO: 973144 - protein, 153 aa, Homo sapiens
MSLRSSVSAPGILCAYLYYVYRRRRDHLSGVRSLRGRGCRDQRICRFACGIHSADPPAWLISSLWGSCLVRVVQCVCLCNIGGVVAASRRVLWHHAPMWAARVGPGPLVWCRVPPDVRYAVVPDDYFVVMVAPRCITSRFVLHVCASVRVGRV

SEQ ID NO: 973145 - protein, 212 aa, Homo sapiens
MGANQSLLVMPHGCRDPPRNGGAPAVGFTPVDLSGGPPSPHMVWPADPPGNLLESSTERRKTNPPRFPSSPHLVQRAVKRGAAPPATDLLFRPRRAPVPPTKGDTFCRKKPEVGATPPLAGPQPEPRPRRLNKTRKMIRVSPRRKKPRNYSNHCASGPRHGLGTRTAPALLRQLPGPNKTTTRTPGRTPRTSWQQENNTPPRGMDPLPHQKD

SEQ ID NO: 973146 - protein, 137 aa, Homo sapiens
MAGVSPHSVLSPILVVSVDIRVFPGGSISPRDAASLMLYGSTDCFLDRRGYFNDLIPRKCRNLSVHHGKDCEMSKRDALLSPRVATIMAAGPPLPHHCERPPIRLMMYFATNHSKEYGYPPKGGLARPLAPQSLSKK

SEQ ID NO: 973147 - protein, 166 aa, Homo sapiens
RGAQYLGRPPEYLVGAGVNIFERVAPGQISLGARPQKGSPTLAEKRACALVPEVSNCLIGAISAGSHNPSGLCFRGKIPLLTDVRWSAHRPTLAAPSFCLTTTSALPTTDPCPGSNPQDLRFCKATKTSLRLPELLKILPRQTLNTTEFDCTTSRIIQTFLVKNTP

SEQ ID NO: 973148 - protein, 255 aa, Homo sapiens
VVSCRRWASLWTLVQNGARVSLFHWVSRAAVWRGCEYSRAPDCVWREPIFPARVGAPPADWRRSSVSLLRRGFSTPVSSHRRVHRLQPAPGSSGRSLATISPANIGGGEGRNTQGEATKLVEPGTLAWRQGLKATTVPSTATDWGTPLEEGKITPPRLPHSNPVGQRAPTRPWRQDLPKANRQYVRGQAIIITISRGAPPVINGELPFLHSRFGRLPQNVLSLHLSPVESLTTQAVDYQKTLVFHPPAHSSSYHL

SEQ ID NO: 973149 - protein, 293 aa, Homo sapiens
  misc_feature (114)..(114): Xaa can be any naturally occurring amino acid
VCLLPPVGWSLRRAICAYPRSLFGPRFSTGGAPCCDTGCWFRRVAASPPCGPPFWVDANGLPWSPPELRGQSPPLWGAQPSGPPMRGISCVRSGALTRGYPRCLFRHSRLGSGXPSVLTLAAYYSNPARGITTSPLRVPLGATARAPMSFPGLGLRTPPDCQGTAPNVLSCISLCSAVSLFDVSPIVTSLKRLPPAAVPALEMQTCCGHSSMHSQRSSRARPVVVGSPPGEATESPPFPLTVSSYGPGPMRRSLACPAPVVRPRPAASSVAFPGPVCPIPAHPGEYSFASHNK

SEQ ID NO: 973150 - protein, 180 aa, Homo sapiens
RKLIPGNAQIRGSPAPCCRTESARPQRGKKQKKSSKQPHDVLPPPMGNVTPMGVPHPRRVSSKAQGHGWKTKQGVTNTRGEQKQPIVGSVRTWGVLSPGAQHTREAFTCRPSDSPPEVQEELVTRRGVVITSRPSCIPAALLIRAHLLQNAGCNLPPPWDQLRTIKDTVAWIQPQYGGQK

SEQ ID NO: 973151 - protein, 110 aa, Homo sapiens
NCSCCRIASPTPLVARFSTPPPCLVAPPLAPPGSSPTPPRYSPRAYFMYVHQGEAAVTHTGGLSGDQPGAHEVPLFLASTHIIISSPSPPRICPSTDILSFIWIRWGILF

SEQ ID NO: 973152 - protein, 199 aa, Homo sapiens
SRVSDGCLCSSGRSCRCCAAVCCHHCGSPLVYCCSLCGRVRNLVLARSIRVSRRGVPRKFPGIAPFAPDVCPVSSAPSWTRAFEWRSLRQRVWRYAHVWRGLSMYGLSYQARQDSWRDSSRQAAEGSPVLLPRGGMKRSAPLAPGWSFLLGGAARRFVLADGRVFPNEVGARPVGGGPRGLLTVCARMGPAYMLCRGSL

SEQ ID NO: 973153 - protein, 265 aa, Homo sapiens
MSPLGQHFPQGPPGLFAPEMALRVPLFTDGPSPPKFDIAGKSPSIEWCRAMCRKIASWHNLPVLAVIIPPPHFAREDWSNLVHDSRSSAYCPPLPMIRRAGFLLICTEHGLPPIMQPVGPQAKMISLAGHPFIVSCSTLCPRDGSLTPECCSRVCLCSPTVASAMATTKRYWEAPLPIEKRVSFEPTRPQHRLPCEIVELLTMVVSPEPLTPSYRETKPSRKFFPLPPPKFLGTSLLTHPFEIRRSNYPQKRHNYTSWVIHPQKT

SEQ ID NO: 973154 - protein, 198 aa, Homo sapiens
LSSKMRYTNGEAPSDDRTAEVGRRKRRRESEIIPTSSSSYSLSRKKILQELRTISACRGGDDFFSPPCYSFFFSLAFCMLPNVSFAGEAQSAQRTQRVCSLCPCIYIKRESRKIIRGHTEREKHSRQRIEKERYTSCVTKPPKRSEDREPEGAALRGAMEKKVRTPLFLMEESELAPPSQKVVVRSPLGRQPRNKQAN

SEQ ID NO: 973155 - protein, 314 aa, Homo sapiens
HTIPRTERYEVRSTRGVWCISGFWFTPAFGPVHSLFRARPEIALQDKTLPGGTSLSTWEPFPGPRVTVSTRPLAAPAGPIRRDEAFANFGPPVSAPPPGSSRRSNPCLLAGTYASAPWCGGLHQQPVAGAPPRVFSPPLPGGELSPIGGPPARNLAPAGPSPVDLSYSQGPGPLVSNRGAHSIRVGPPPEGIPLAGSQARPPVEIVHGGWEKLVCQAIWHKNGVGLYSGLEFFIRRSTPRLIPLVVGRCYPTPGSIINEWGSKHPGCRPSLQGNTWRVSRTDGLQRVCQSRPTPSTHSRGPPRVPKKRGYSPHD

SEQ ID NO: 973156 - protein, 127 aa, Homo sapiens
VRDVRVLSAALSLPLSFCTLRDAPLSYSLLLVVIFLPRAPAFPPAIGPLSPFVVVQRPGAPGRAVPPVCWPRLCNTPFFLEVLRILHGSGPHQHWATLSLRHHTEVPLAKHLLSREPATHVIAGAWA

SEQ ID NO: 973157 - protein, 266 aa, Homo sapiens
MASSTGCLGPLLVGLARQFCVDAFQVSRCGPVNFPGVGPFSPGAGSQGAPSGPLCASFCASHPLTVRHRAVFVSGEVRPPHFRRARVISMAPAPAFVVPPAAMWRSSLSSDTWGGPQGSFFRTPWCDLSGGPPQSEPHGLFVCLSPVHESGTIRLGALFVFICSFSRDSSTHEDHLRAQLLPINLYNVGPLATHTKFVVPTPSGKGMTDSDAPSVRHLLWRWLRKPLARVGAKSTPTRGRTPDGSCSLMPLGLPPLPPQLPHHLYP

SEQ ID NO: 973158 - protein, 116 aa, Homo sapiens
MASAYSTMYPLNPHWDTLYIGMARHQVPGNTDNCPTKNILVIDAPTKWIFVFTWPNERMIYKPHAYKAFFISKALCWIRPQFWKPCDNASQSYHRPPPPNSLNNEDNHPGMCHTPW

SEQ ID NO: 973159 - protein, 199 aa, Homo sapiens
GTRPQRASPYVFFTRALGMSAFSLITSGVNTPQSDVCVVTPRQAFLMVTPDNIWDSALLLSQSGSPHLSRVLAHSISHTCGGTLIFSPKGPLGVLLAINNPDNVDTPEQQSTPMNFVAPTSREVMTPEPNLGVLLIIIAHDSATTPKHFRTVLGPLTENDRRSSFFTSPFTEGFLLSKAPRDPEIPPGGGEPKGILIKL

SEQ ID NO: 973160 - protein, 96 aa, Homo sapiens
LGKPLTAFAEQVRPVFHPPVPSRSFTGLPMKNCSSAPAVPRRESCGGKRAQPGAISSDVFPDGAVCRHVIHTLLVGLFTPALFGHPVEHPAVISHV

SEQ ID NO: 973161 - protein, 207 aa, Homo sapiens
SALCGGPDTSRVWCVLDEKSCRLSPVLAVDRGSAGCVGRCEALRERGLPCRGGVRHAPPPPVAVSVCLAGPRLRGVWVWRLSPSVPVCALPYIGRSSGGDSIVGSQMPLWHEKVIASGAQRRVGRSVLAPLLRWEGALSPHLRLSLSLLVHPGLRWVLVQSTAPVLMVCSGFAPLPGIVCVRRNPPSRAGFVTRCLAVLVDKGSRTY

SEQ ID NO: 973162 - protein, 169 aa, Homo sapiens
NRGSWAPPTNSSPAAKLRGIITTPATVAPLFQTGGANPLPGRPLHTPWHHAPHGEPKGSAPCGTNPPYRRGALPPRRGFRISGTPPAACHYREPAPPPPAKGRTGQGPQLSAPPPALGSSGPLSFTTCRELLHNTPPASLSPLRCTTRVVHTTTTFQRDSSPPPPDLHQ

SEQ ID NO: 973163 - protein, 181 aa, Homo sapiens
SCHIGPLWVSPPWPVVVATTVPLAPTIVCGVLTTALSCAGSLGKRCVIHTAPFCQRGVHNCRSLGMPPPTFCVGSYASHSLLAPGRSSRGGAPLAPPCPRFLFESLPPSCMLPIARLFGPPLSQSSPGWAPQCPPFGPPNGISSPGGPPHNPPHGPCCMVTACSLCRQPTWALLPRSCAAD

SEQ ID NO: 973164 - protein, 317 aa, Homo sapiens
VVPLCTLLRPQLLSSSGGPYTTLRDPSPGLPIQRVEVSPKTEMLLAKQSLFCQPEALLFNSPSLLEIGPGCPTDRLHARGLNTFAALCYLRGKSSGITTVDFPPGGSFSQPQGPPFVASGHLPNKLTSHTLRVPPSAMSTFFYGTCPLKNEVPLRWRFKHAGSAVPPLLSGARFNPRLPLHLRAVNPTALRGSCCVQPPATGGLWILFSLLVLGVFTRIIGHNPTLFSQLDIRLAGLRSLVSPAISLFLKEDLVNNLPFWNINTGAPYSVPLCEMFLRSMQIVSSPDRHSSRFNSRYPLPAKNPIPPKKVGPRPNIT

SEQ ID NO: 973165 - protein, 134 aa, Homo sapiens
CEVFVPAPCVTGVFHPYAAAEGCSSRPCWTSSYTLCQSAESPLPCDELSPSPRGTPTRVLLCLYQGRPRVHKRDKTSVGPPLNKGLASHPVCHRSVSWEPIASLTTRRTLPHGREHGCPNPTVGANVGRGDPPR

SEQ ID NO: 973166 - protein, 93 aa, Homo sapiens
MNHSLLYSKRHLYIMHPREKYIDYAHHYAAHMPRHEEFILLDVIRHLKMTPPIFENTPHHTFFYACSRVYCTIRRSSLITTLASSSTNQTNKT

SEQ ID NO: 973167 - protein, 250 aa, Homo sapiens
LGPFPEGSLLMSPRCAPPLWARANDSEVPPLLLAWYAPLDPLTGPSRQSLPWRRVTLIFPFAGEVKIVAMICLFPNPSNCFFLRRVSFPRELRPTHRPARHPRSLPPRTVALIHTHLPWKHFSLLSLPPDTAHNPLSVFPGTRPPEFIFNRRVSTLPFGTNPLPRFYYSLPLNFTPNEVKEDTPSLHPAVTTKRLVAPRSVTTHFASTPLYTSVLFCALKRGQETLAPPTPGSSPHPHSLGSSHGDSVPT

SEQ ID NO: 973168 - protein, 42 aa, Homo sapiens
MIGRSLYSDYSPWIRFLWCPTILRTATENFEKNSFGVSSHKT

SEQ ID NO: 973169 - protein, 88 aa, Homo sapiens
WKAPSCVHVVRVWWVQLRVGHTRRCRTTKEPGAESDRWVPYTNLPACQLPAGPAPWLFFAGVFHHPGLYGVKRARTACKGGQKGFDPL

SEQ ID NO: 973170 - protein, 304 aa, Homo sapiens
VRGCPGRGGWIVGSGPCLGAEGGPASRRGWRVGRATRAWLLRVPPARCCGAGGRPFGSSGGVWSAPPAQAAQACYFGGSRRLPRAVVARGAGRMPAHCFPREIAGASAPTATLCAVRPGPAFPPRGRPLTSALGHMLGGTIWTLEAPGWWNEDSRGVASLLPGLWAPARWRPLAPVGPPLLAGRVCVSREVLSRERVPGASPHDPRSLCGTPCVCEKRVYSVSSPRAEKQHARVTGDREHTEWMGGHPVHVSTRPLLIRIPQDLRATHCYAPLHAPASWTTHQVFPSAPRPIIIFFLSGTRPHS

SEQ ID NO: 973171 - protein, 201 aa, Homo sapiens
MRSVREDEVLRERLVIGGAPISPCHGVRETRDVPTVFCRRKQVEAPLSSAMSRTLRRIGWDRPVVVALTQVLLPGSTQESATLEFSARSKCECKVLTSASVLTSRSLLPEARKWRQIEGNPLDLFTTDGVCIIRTSCFHDYHEPHVGVLHPPLLKASLLSSLLVEIEMNRHITSSQSSFLRSTSALVSVRPETPPPPMYEK

SEQ ID NO: 973172 - protein, 301 aa, Homo sapiens
PGGCGAAVSRSVGRVARCVFVSGRLSFVVGPVLLRARVVVRLRGLARASGGLCLGVRSCVRVLCVDLGPLGPSWRWAAHAVYSGPDVGSIEAVGRSVCVAARRLLGAFVSRLATRSPPRRGGCDIVLRSRPAPVWVSTHRGGGVPAARHGEARGVTRERNEICVVVGGVHATCRVFVLKHQSERRPRHRLVGALAARGRCVFPLSHAGVGLRAVSCRHQLSCVLTYLSRPQHVDLLVTQFSHHPCYTHTINLLAVPDRRSLNTPSRVYNLCRQHENYAECPLCRTSEHSTRFQNGLKRKHE

SEQ ID NO: 973173 - protein, 207 aa, Homo sapiens
MWPGACWYSRGSVRGVLLGRRSVLGAACAGGGGWSGRCLLLGASVLLRGVCPWGAECVVSWRGVGLGRSVCSWWRDVGLVVVVCEVTRGVEPRVVVGRGVHWAKDVGRGRAMVQGGACCEPTGGGSVADWVSQLVSLQDGGCIEGSVEFGGHHGGDTPRGGLSRWVTARDWMSVVGRGTAEMRPGGVERLGSPASWGGGPHSRLRRE

SEQ ID NO: 973174 - protein, 113 aa, Homo sapiens
MSLGWWFIVLVAAAAMESGSRMRICFPRPGGCGGEVRAAVVVCAAPVGNNPRGLNSPLVVMYAPSLCSGTFPPLFYEGSSHLERIELPALPTRWWEHPTHSVDLLLKSPLSSN

SEQ ID NO: 973175 - protein, 283 aa, Homo sapiens
RVGAHWCGQQRCLQVWRRLCPPPSGGTLVAAVGGELVLSLATRLYQHGRLCAGRVLVAAPPDESVLRLWWAGGWHTFVCSGDSWLRRYRLPRGAFDVGRLLPAMMVSKRPCGEGAPRLVVCAGAPCRHECPRGSVNARLGAFNPPGSARCDESAPGGPRGMKMGPGYRTSLFCCVVMHAPPRAVLLPALAREAPVLSGEGTLSVTAPPLSLIEQGREGNALLLHHSTVGGSDSRADRSSPRGCVGCAPAWGAAGGQLLFRGRCNLLRQAVVEDLSLEPRRQYV

SEQ ID NO: 973176 - protein, 142 aa, Homo sapiens
NYALDVTLLGDDLQRCGLLRQVVLRHRVGIYCYSACASYRVVKLVYDALHGPDRGGQSGVPVIKRFPGGIAGTPCGVVRRSRGTAVSTPLGDYHCSQRANPLPIKVLLKRPSREEQGWFRVQGGIETKWGVNGGHYPTWRDH

SEQ ID NO: 973177 - protein, 108 aa, Homo sapiens
GRATMIVVLVDDSVVIRCCCFCVAVLWLLLFLGCLCSLSCSLGLVWVVLLPLSSCGLCVGASMSLYVLCAPLSCVLVSPCCVAVLCFFGVPSSPSVVLSLYLLACASL

SEQ ID NO: 973178 - protein, 110 aa, Homo sapiens
MAFWFRHSLARAYDGACQSYRSGRATACDGAATMAPVWTLPRTVFSVWRHPSSVVSSNGLTLNSSICSPPAQVEQTGGDVSPPASGLRVRMVPINHHAPPCLVPPPRGPP

SEQ ID NO: 973179 - protein, 286 aa, Homo sapiens
GARCGGGVGVAASGKSWVGEGGMCVERWVSDARWDVVRGGAGVRRRVVALGVAVGPGGGGCWPQGCGEGVGQYAPDAGVWRRVRTGGRGAVSFVWVSPWVFLRACVCGWCPRVVVVEVGGVTRRRRGRVVLAGRDGVLSGARTGSVWRSRGDDGGGAAVCAVCVRGWLPRREEESLGSPGLQGPRGGSPPSEMVCGASHVPAPVGGGARLWAGGLRLCVGGEWRGVGVCVYEGCGRPRVRGGARGARFRVVCWPPASGACALGSLFVRGQRLESEGNPKEYCKKQD

SEQ ID NO: 973180 - protein, 269 aa, Homo sapiens
RVGGGGGGGRGGVAAGGCVVVVGASRVELVVWGPRGVCGGASWGRAGGRGCGRGSGVSGFGCGGGGCGGLPPLVVGSLRRLRVGPHPVCGDVAVNRCCGWSSPVGLRGGGAGVCGGAALRRGVAPPVVAARGVPLGGPRGRGSARVACVCRRAGVGMVRRGWGRPARSLGYVGRWCRSVHQPAVLVCTQLAGGAGCPTRLCGAGDHRGGACARGRGCAGGAAGDAGVAAPRGGVWPAERGFGAICWAARPPCWRPPVSEEGWIPPRIFG

SEQ ID NO: 973181 - protein, 134 aa, Homo sapiens
MIRLRHKADHPGGFPAGRHQVHATTSACSVIFQACFPAAHVRCEESSRAARIAGCPRQIGDHAMGHVLPPILLSRTPMRARPRAMNARFRLSRSCFTTRSNRARASAPTARERPQPGETRPPGVFKKIPKAAHK

SEQ ID NO: 973182 - protein, 270 aa, Homo sapiens
DDPVPRIVFMGASQLVLQNTVPPYAMFTVSTLIAMAPRYNPALSGREFRRHPSVSLDVVSAADIWRGDWLVPHPREFAASSHVSCPPVAPVDSTASRVVVGAAVVVFPTTGLLSLRVLAGVFNSFQSPSGQSLTIRDELVHSHSRSCILLNHSYYLRYMGFKKNLRTYFVPPVSSTPRGALFPLDVTPPFLRQNYHPFGPQHSPTLEKSTNHHPPWRNPTRYETHFTSPFHKDILGILNSPYSATKMKNNLLLLLHHYEPCAEHSQSHIK

SEQ ID NO: 973183 - protein, 55 aa, Homo sapiens
MTTYLPPCAIGEGAPPRRFYSTDHNIMVITSVYNRLCREAPNTPRKAALILDPHK

SEQ ID NO: 973184 - protein, 134 aa, Homo sapiens
TGGVRAPIICGGHVVGQFRPHEVSVCWRKQMIGPLWGEEQLVGSTRPRMLAGGDAPDQRGWLGPTPSTHTVVTKPPLEVCVATTHCVSTKHPRRRMTSCVTLRASRECRKVCVSWFSTQSTTGSERAHLRRRRR

SEQ ID NO: 973185 - protein, 546 aa, Homo sapiens
  misc_feature (97)..(97): Xaa can be any naturally occurring amino acid
  misc_feature (111)..(111): Xaa can be any naturally occurring amino acid
  misc_feature (121)..(121): Xaa can be any naturally occurring amino acid
  misc_feature (128)..(128): Xaa can be any naturally occurring amino acid
  misc_feature (131)..(131): Xaa can be any naturally occurring amino acid
  misc_feature (135)..(135): Xaa can be any naturally occurring amino acid
  misc_feature (142)..(142): Xaa can be any naturally occurring amino acid
MRHAAGLCKVERQSPVWAKWTQVPGSRGEAACYSAISLSHESNHAHLCGSFDVASQAVETPYHAKSVLVDQFASRSTLIMANHCVRCRASVESAIDXSHGQNSSVTRVSDXDREDASHSVXLCVVSRXNFXVTSXSKTYHTXINARRMPAKHNLWVLSIALCILSLVSHPWCFPAFPPVRTQRLSKFDLERHSGDNVMDRVSEPTGLPLGFHTRVITAYPYTLAPLLKVIDRRSIQLYVPGREEGLKIWNVHKANIHEARLGAKHSRPNDLGTCPEMLPKGNNLEESPEALSEPQQELGGSRISPLSTVGISTRSSLRIGVRELVRTWQRRHVVQHLYGHLSETFKPFGNHTLMGILGNGLESQGGAAGEFSARNKSGPKRTKSRGLGGTIPRSLRVVAVQMNVTKGHTPIPCAETRKKAPSMWNAFQRQQSFGSKDTRGKRYPTLKRARDRHGGYEGQRHVNRIELPEEENSNTYGNPSIRYTEKTATTTGDKQDLENKTQQNTVSQNIKDGTQQKNDTRTDSEDNTCKLLYNDQPLRTKRSQRL

SEQ ID NO: 973186 - protein, 178 aa, Homo sapiens
  misc_feature (18)..(18): Xaa can be any naturally occurring amino acid
MLVGPRYVLCRPDSSLDXRLGVCIRLQKFEGHVKLIRETQGPRKKGHTPALSSNGSSNETHPPKLADPLQRHGRGRPLSELGLSTQASRLETCPSTDWTHHHGLGRDNNGKGGNSLVVSPRSTPGCGTNPGSTIKFPKNPPRGTVTKSAHRQRELDNGNKSKAPMTANGLVRYKETTY

SEQ ID NO: 973187 - protein, 264 aa, Homo sapiens
AHGPTSMPGTHRHRQRLYQLVSTRRDPDRTFAIEFLDPVSMRTHSLSVEHGRPVIRAPSSTRIPKEQTMNPIPPRDAARDGGAAMLRRIGAIAAGPTVFGFQRIVNSAEPMRTVPAPTLDETPGASHDETAVFAGGCFWGVQGVFEHVKGVKQVTAGYAGGASETAHYALVGSGLTGHAESVRIVYDPTQVTYGRLLQVFFSVAHDPTELNRQGPDDGPQYRSAIFPPPRSNARRDRVHRAARGAHVFPAPVVIARRAYKGSIR

SEQ ID NO: 973188 - protein, 160 aa, Homo sapiens
MPLSCGFLLRNAPPPGRRPGYNGGPGACVSSPFVGGHPGLRRPLSVLWAPWGPPRFSPPVWRSLCPSFSPRVSAGFPECASSALCVGVAPPRESFVRELPPVGPVEEPPQHLGPLWGALGKLFTRATHNLAGDPPPLWRCVSAQKAPARERETHTLERDK

SEQ ID NO: 973189 - protein, 74 aa, Homo sapiens
GRRVNVNVGVLGHIDSGKTALARCAKHHMLHLPAFDNACLQMPAELLAITARSGASRASLVPAALLRLLVCLLP

SEQ ID NO: 973190 - protein, 74 aa, Homo sapiens
VKPDMNMDVGYLPSCCKQLQVHLPGPVTLSSAMYCLYVLEQIPQALVRASQRRTILVNAPGFLESCTPCIIGAH

SEQ ID NO: 973191 - protein, 258 aa, Homo sapiens
IAGAAAVRGSAGRVPEPAGRRLELGTVALFPRATGSCLVWPWEDEVRWSDWLLPVCLLTLPACFCLLPAAWLLPALPACPVWPGAACPECLMCPVDAEPSEDLAYQMWTDVLLGIAWTLLRWLTRPTVVSEGCAAASTAKCLPMMPAASTAWIDLCLDGLREDWWRGACVAQDGWRQVTQMVEGLSWGLPQGTVQGRSLHTMNCASPLLDKSAPLEGQKARPGLPKAPRFCYRTGRLHSLVAVKGSALRADHCGPEGP

SEQ ID NO: 973192 - protein, 64 aa, Homo sapiens
MRAGGTDPQPTRTEGNNRTAARHKRSNGPGGRPANTATRAKGRETRREKNERQREGKLERSHRK

SEQ ID NO: 973193 - protein, 356 aa, Homo sapiens
LNKREHGCCRLQWTLPPTSRGLRSGLSSTATMTCQRHSLRLVHDPCSGPHQLLATMYLTGLRRSGFKVNASCQQPERRSRSGRWMQPPDECGQLRPCACCSHLGLLPVRLDNGLATVTCELRGAQVPDLPVSSSVAQLTTGRWSLHVRGCTGCYFGGTEDRLSCFAQTVSPDEKWSVHIAMHPQVNIYSVNRKRYAHLSARPGDEIRRGPRQCLGRRLAHHLAFQDQSYSVQNREQRFLRHEGAGGGPKPALVPLSPIGRRPPGTWQGSTLSTRCQWNTKGSWPHSGARKRKAWDKKGESVVRAAPTKSTRRAVTSPAAGRPEPTGTADNSADNTNDNQQTRQTQRERAHTHNTER

SEQ ID NO: 973194 - protein, 108 aa, Homo sapiens
EVLLMYQRVTHGSQTVTKPPESSYKCLEMSKRDCRPRQTVHGSGSQGNKTKMKRARLVPNLNMSCITGVPSHTIMNMLVNDRDIMSGGHVVLRSVMRWHEESDQYAAV

SEQ ID NO: 973195 - protein, 56 aa, Homo sapiens
MFGPKLSEPVSCCWRDRGPVVHPWVMPAALGLPALLYSACLTFPGPGGGKREGRHV

SEQ ID NO: 973196 - protein, 497 aa, Homo sapiens
PQRALSSPTAACLCLVTITPLCDGCLHAACMPVPHVTITCNLMMHADVPDDPCMPALLNTINSEQTHTDPYHDNTQRPTQQPLSTYPSDKTSRHTDSKDENTEEDGHSNTPGQDRKCTPAARAPSHHAVHYPTTPDHPSHPGAHPASPPPASPTPGHPRTTAPPPPPTHPNDPAKPARPTGATHLSHNRPTHHTTNSAHPHHRHQHTPTTARGATRPHHPPPPHNDAPTGASNGTLDEPAPAATRHATHHAHEHTSDHPAKASTAPPTPLETADPQGPATTTPQTAQTRTAPQPPPNSDRSPTRPKPPHPNRHPARRDEHATHSGERRLDGQRLRRRRRHESLRLRQEVRRASAREPPQDAPCSARPGTRDTALQRRHRAARRRHPADEGATEERRRRTRAHAQTQGAERQDRRRSRKADSQDTTQDKSHKPTKLQYKTIPNQTSPHNTTNPPSLTHNTQVKKQPYTHHRYHNTNTRSTPRHPTNPHHYKTLPPTPT

SEQ ID NO: 973197 - protein, 342 aa, Homo sapiens
MDMSGLVHLFVSAVVCGCCCAALWVVRGARRFVLFACCWWAFSADVVSPRCVADCLRLGVLKFPLACVGVCLLRGPRALSRAVRLFFLVGVGLHPRVEMFAGELSIGGCVVSRGVVSAAACRCLHGGVVCDWERVCRAANASGVFLRGAYSNGVVLPPWVGALVMYVVLRRGLICRPPGMVLTIGGPLLCVAPVGSSLSLDRLVSGPFVVLVYIDVGGVLFILGREVVGGLSMGVHSVVSPLLKCVPGLPLPARCSAVVVPCAPTFRSPLGDRPLLVPHPHGLVPRYEGPSHRPPLAGFPLPRVVGDLLRVSPCPRRGLESTRGRGGSESGNVPRGLFPLLC

SEQ ID NO: 973198 - protein, 195 aa, Homo sapiens
MRGGRKQATTTVSTARPTLTKRAREHTRSTCAHPPTAGRSHPQAKAKNHHYERQTNTNDPHPHTKDSTAGAEETTNNPRSRQRRFDSTNNQTNAAWLAHKQRSVWSRHHNTEIGCKTTNLGKRNTHEPDVDVGAHTRLKWSGTHMTHKLIQYRNDHLQQDRDSRRGGLATYARPHPSPREDRHTSSHSIARAGRR

SEQ ID NO: 973199 - protein, 438 aa, Homo sapiens
MDGLTMVMTKMWWRLKRNQGMTFLNAEGRPWTKSARSATHVVRKGPPKTSEKVQDAADTLNTVNRNSSTETTKEDKEATNARAHYLQEIPRESRGKKKRTSPQETRAPQSRTPKKQRTNQRATPHPNTRGHHTDRSTGNPWPETNNANKRPTDSHKITTTAPTQTHRRKQTTERRHNSNTAAAPPKQKREHNNKRTPKTNNRSRGEEERKRQQQEQRETTHKNKTEQQTKNNTHTRPTKQRTTKTKKNKTKPQQQQKKTKKNRDKETQQQQQPKTKDKKKNRKQGSSWGLKQRVEGSESGRGEIGEEREEENKEEKEMKRVLSKYSRERMSRWKEGSRRRRESTETEQEEDGEKTEGRQPGGREKRGKRHKEAVRRGDRETGVRRSQHSAVEDNSQKGNCPGSSERLEGGARMRRINAKAEHDTSTGGTRTQQARKRV

SEQ ID NO: 973200 - protein, 108 aa, Homo sapiens
  misc_feature (20)..(20): Xaa can be any naturally occurring amino acid
MCVRCRTGCARGGVTSGVGXCRLFFLVVRSRWLSSHHRGGVFVVAPLRDICLASLWSSPARVVFVVVGVALPCVGVPRGVLFRRVLRWLVLRSMPFGGVRLPQQCVVV

SEQ ID NO: 973201 - protein, 189 aa, Homo sapiens
DGGEVDLDLEILKDFGFTLYKDNNITTGQIYQHVINKERRGDYLGKTSATVVPLHSLHAVPGSGFMQSKPKVPVAWSHKAKQPPNMRSLSWAGHPLEHHRKECRMWQAFRHIPSFKANNERISLISTLASVPQLRCYRENKNNKATQNSVQRTEGFRPVSRSALSAEVQPPIAMAVTGDAFLMFVHVNP

SEQ ID NO: 973202 - protein, 188 aa, Homo sapiens
RPQLKHIPAALALDSDRRKLPSGAMSAELELPWCMPGGRAMPVDSLCVSNLHFSNNGNGGSVPASVSIYNGDMENILLDAQHESGRSSSKSSHCDSPPRSQTPQDTNRASETDTHSTGEKNSSQSEDADLDRRTDVDRISKTPLPHGYGHRSRSAGHISPPRSSSHPPRPARPTLSMRTHDRPAPPGA

SEQ ID NO: 973203 - protein, 346 aa, Homo sapiens
SARTQTFPNSSGILRTSCRQIDDFQQLQDFPDCKGHNHASNLFKMANGCLRAAFPTGSSHTHHCSVLFSGLWAWHAGRLTQASSSWPPHTQHTHRQLRGPTHILVQMTPSFQLHLQYLLQGHVMHHRGPTNAHTWLPPDFIYPESQSQTGPYLARVLKHRPEAEGVHNRTEIAYGGAFIGKRSQRCTARPNCKTWAHSLCHPLITPHRTTPTGLHRFAHFPPKIHPNPLHAYSIHDTSTRGNGVRHTINPPNKAINSTTTGRKTSPPPTQTQPPYTPPTPAPTSSYQTADGTTNHDHTSSTNNTSSGTRRATRPMARTSQRAPPTLHGKAPNLGTSDIIGTAPAMA

SEQ ID NO: 973204 - protein, 322 aa, Homo sapiens
WVCRDAFALTSASGIPLKPDQSVAQSAGQPLSLRPGEAGQRGRGLGVARGGAQAFRCQAQQCGGICSKQAAAQADLLPSRQQRGAPCWASPGHGILSRRSPLTPCPSRHQSLASSGPQASQGQPLVPRWPLHHRSVRRRRSSGQARQLTHALQRPYTQVDPEPAARVSIPRAHSRARALAASARHLTRRSTLRLTIGAATYTIIHTHLPPYTHSRTTDTRTDLNQKHPHTSREQTTTLYSPRHYPPSPHSTTSELKSITYTSPPTYPTLPRTHSHNLTQHNLNAHNRKQAPVLRHTFTKTELHNAPSTHALTRPAHATITRQ

SEQ ID NO: 973205 - protein, 357 aa, Homo sapiens
MRLVVAMVVNHRGGVSSGSRSLEGGFVAIYVLWVATHSVPLVLLWARWVHTPCTGGKCALCAPRQVVAPTVLGGLTGVATSTECVFWRSLGSVSLMRPPPSLCTTYAYCGPLRVAPQGPLQTGPHVCPPGPGCVGAPWGQLPQGCFVRAADSHPRGFMSVGGDPLWVFRGCGRSGETPCVGVVWACHVWFETVFVGAPHTGGVLFGRVVEGAPPVRGPLVGENIRAVCGAVCGPSWPSVVRCTSAVCCVLMRHRVLFPSACLPQGRQGGCLRRGRSERPTLGGLPVCCHGVSYKGAHGCPRALGGPHCPAPTAGPDREPLGGLEDSCQHPMLWIGPTWVPSPDHAQLREPYVCSWNR

SEQ ID NO: 973206 - protein, 156 aa, Homo sapiens
KPEIRRSTNNRIPIRGDPHILVVGDPGLGKSQMLQAACNVAPRGVYVCGNTTTTSGLTVTLSKDSSSGDFALEAGALVLGDQGICGNRMQSCIKMAAINIKPCRQAMEPATAIQSCSQAGVVLSAFLQATSIHCLLHNPSWRHIHNTSQQPVSRAI

SEQ ID NO: 973207 - protein, 134 aa, Homo sapiens
MCTTHSHPNHHPLETIYTKPNRIRPVDPPTKPTLPDLTSTIDPLAHATSHIETLAFNIGDSNTTDEGRTPPTAKHNHGGHHTQPTYTTMSNSPITQTRSANYPYHTHTTSNELQRMTQSDVPTQQRKNNNATTQ

SEQ ID NO: 973208 - protein, 335 aa, Homo sapiens
CWSFVAAGLAGVSFVLFCRGLWLVWFVALVVCCVVVVVWFCFLCAVFVCLVVVSVVACGVGLIFVGLVSVLFVCQFSLVAGLAYVLRCLVCRFVVSVRCALRWRCVFLVGCPFSGVCALLFVLVVPSVFVLFSSFGPSGSSLRVLVAFSVCLLFVSLCLGCVTFYLVVSCVLPSELCGWCVSLLSLLCASWCLCGCSHRGGCVPPWWGVCLFVVLLLLRFFVVFAGVGVLWGVCSLMCWSCGCVPLSLWFASFSLGACVVAPLSVGGCAVVVLTILVLLFSISVCGGALCWVLVALAPGFDPLFVPLRVNHPHISPACSLVALSFVSARLTRWWL

SEQ ID NO: 973209 - protein, 358 aa, Homo sapiens
MYGCTGGRPPPPPSGGLTHPIYDEGNDPTLGGAIGGRDVLSPPPRWTDSTHQPPRSAGRRSGGRRNNYPPNDGGRKKYVRTYYLAGWWMDVVRSKDGWDHHPTHHPSDDPLAGWSWPPPPCLAAACHSLLALAAAWLAGWFVGWSPLVGAPPPPGGLNHCCSTNNTAAAARGPPPAVRTGAHTLVAAVAAGGTPQPPHTAPLLRSTTPAAASSCATQQQAENKTTTAATLTPRRGRTQVCTPSSSSRGGDDYVQRDRLHTVRDCPAVAWCGDECVSRSEDDPVMLHERRPPRGTTHSRTHSSCAAQGEISTPESTRARAGTHRESPCGSSQQKCARVALTQQTHTQEQSAHYSSHSGA

SEQ ID NO: 973210 - protein, 179 aa, Homo sapiens
MTRSHTHQKRRTTRRGQTRQQNEAHAQLQQTTGREEITTATELTHKNPNRADIRQSQSAPPTAAQSHPQDDTSTTHHPTTTTATSPRGCTKTKKSQGTNNNSKDVASNRGNQTHYVQTNGRRGKTEPNVTRLAGSPNKPWRNRVNQGDRNTDKDRGNRNKQAYTQRNDKQQQTTERVGV

SEQ ID NO: 973211 - protein, 211 aa, Homo sapiens
MRLGTTGGPTRRVYSQRTPRGKAEAGKQQMEGHTLENQPEPHLVNPRVLFTTNKNNTTHHATCTGMCPYDPTDNSEQANARRTTGATTGGDRKQMSKIQHIRHAAANRVTHPVSPNTHNATEETNEKDQHTHADYANRRPNTNHNERAPTHTHTQHQTLTSPHTPHKTATPTHGRCQPRTSAQHTDDSTPTTRRNMDQRTKNDTSKPDYDT

SEQ ID NO: 973212 - protein, 45 aa, Homo sapiens
MTHDRNGAATVREEGSNERQTSKKAQSTRASKGTSNRDDCSRARR

SEQ ID NO: 973213 - protein, 531 aa, Homo sapiens
  misc_feature (432)..(432): Xaa can be any naturally occurring amino acid
FSVRGALYSRVQHTHTHRGHGGLGAEERGRDTPHQDTHTGDSGGGAGPEENRASSARGCVPWGSLWVGPGGGSRGDRGRAGGVGATVRAHRGGTHEGARGPRGPRARGRGRERHKHISGSGHGEEALAERWRHTGVGCGVRGRCVHKSKRRSLRERGVCESTQEERNNGHRKEEKTQNNTRHTTSRETQNTTGLSARALRGTLRGGETLQGALSGATTLGGLYTPTERRRQRRDTQYLHTKGPRGSTRADHRGGSHKCLRGPRGPTGRSDVAWGAAAASDKKRGNKHLTTQDVLITPGGQTHTWGSNRASPTGRKKEEHRGEAKQPPPTMMPNPPCQPTNTTEGANDHDRTARPQQGKQRAPPPEKGEQPTPRQDCDPTSEPLTQDGRKTPQPQEKNPPAPTDETPQGGGRNSGAQQVGPTNTTERDKTERXHTTTTERPPHTKKGELKSNSHNTHHPQIHHPRQDKQHNEPHKVVTPEELSTHQKLSHFIETPMVDGIAGPPLANTHKRRQIMRPGHKQTHVAHHTEGTT

SEQ ID NO: 973214 - protein, 176 aa, Homo sapiens
LVVRRVEGDGLLQAQHGGQRVLQPLDAAMRDRDAMAEAGRAQALAREQVVGDQRPRHLVVVLEQQAGMFEDAFLAGRIHIHQHIVGGQDGGETVHGRRPVIGGAVGARPEPGDGSSQSSRLWNPGRFGVGGRPWAVENASPGPRMRVFAALQQQPTCHGLRIAKTKRPAGRRGAWP

SEQ ID NO: 973215 - protein, 271 aa, Homo sapiens
  misc_feature (5)..(5): Xaa can be any naturally occurring amino acid
MSDDXDYFQRLRELRVDALLLCGLLVGIYGRLVIVCIGGRPPRGVTRAVVPLLHVREGVVATNQGGHPPEILAVAGLLVGHPAEAMLPSCGGLPRPRLFRACVVCEAPSPPLGTFGCPVCLPIFVSPPFPGGLPTSPGAPRRVCPGPHRDVVGFWVAEAPLLEEDLLLWELCPCPGVWSLRSLSPRFRPRLSGPLSLGFRRARVCGEEPQATQPLPDRLGPVLAPVGPPSLGGSQGLRRPSVGPPDVRRLACVVLGVVLSSLLHPRLRMVF

SEQ ID NO: 973216 - protein, 337 aa, Homo sapiens
MDGREKARHPVLCASGRPYVWFLPPLRFLYGTVVSAQSPPVLEGPAVGPCTLLPGRDCLSLVLSIHVLPLLPVKVFPPVKGEPCAVSPDVPEQTCRPELPERPIDVWVPPHQPRKIAWRPTFWGTCLVILGASGELFRGNYPPTTLARWRQGLAWPDVGSPDIQSCDPPRDRRPSHPEGLPNIPMAHQGVSHLASYPWLHSGIRGAFGGPSGWLMVHKLHGAPRNGPELALLTLRPVDLPNSSTSVCTLPRGNVGLDVTTRVYLTTGYFSLPRSPWGPPSSTPGVTQHAHWATADTLEKPSHECLPLKKLKELKDEAIEHHEFNEVSREFTRGRAAL

SEQ ID NO: 973217 - protein, 321 aa, Homo sapiens
MAKEAGRSCPRSETRQEQEGQQEQKKGGVCDNMCGPKRSYSVRPWGYTECSTFCRRLSTNHGGPARREHTPLLGFFGGKTPCVKTPRVMCKVSRAPPVKGAPGRKRRRLRSETHEPQRCPDEEGIKGCRSLRSLRGKMGEWDPAPGFCPPVPRPLCFTCAQIPLCWKKLSPSTPMRTPSLVHCHNFGNTLIKDRGPRGTQSIASLENSTQTFMSCHCYPWESSHDWTQLEEEKPLPESYLFGTPPYHSPFLEFGSSEAQTCPFSAESQIGHGGLPSQTHHAGNWSLPARRPPTAWFREYIFPGRGPSRIVGQTFHQGQIFK

SEQ ID NO: 973218 - protein, 138 aa, Homo sapiens
GGRKRRREGATGRRELKTRATLSYQTWASLCSPVFAGSRPGFVCGGGVACSWVCAPFCGAWGPRPPHAEGVPPLRRSRAWPTMGQNQRAPCSCGRLPSGPPRSPAAGEKECCGTQKSNQGGTKVRQGYNSSCVKWLGL

SEQ ID NO: 973219 - protein, 203 aa, Homo sapiens
  misc_feature (148)..(148): Xaa can be any naturally occurring amino acid
LCFVFVFGDEEGGGGGEERGEEGLIKMSELRDSFVVFRDVYVCYDEWLALCVFVSAPPGSVRVRVLRWSAALVPVNEEGGQESPVRLLSLVFPPHVARQAAGGEEEGVHQGDLREPARGPPEARAPGPFAVSESSLQGKKVERCPFRXLPQEVFFRHDTRRRSREYVARGGPRKKLETIVVGTPRNGSRPTTGYSGTHHACGL

SEQ ID NO: 973220 - protein, 151 aa, Homo sapiens
MGGVRSFVGPPALTKTAGGREDTNTHRGAGVWVVVARTTDTPALVVEQKRCMQLCSVGILALSSHHRGTGSTPSFCGGQRRPLPHHALFVWMEDTTLSQETVVFRPTYRPQRALPRTTDALLSSRKEREREMSLLGDTRERRLHTPSVVSL

SEQ ID NO: 973221 - protein, 161 aa, Homo sapiens
RRNRRRKLSAPPKLEPIAKAFKAQKASVERGPPAPQKKKIPHVYPTFRRPKTTATPETAPISSEERSPEKPAGPTMRIIKFPLTPESAHEEDRRPTNTLVFIVDVEAPPAPRLNQAVKKLYDHVMWPRSTTLIRPDGEKKAYVRLAPDYDALDVAHQIGVI

SEQ ID NO: 973222 - protein, 437 aa, Homo sapiens
VCVVSLLRLCWCVGLRAVPVCCLLCGFGFFGVRCAGCVRLVCLCVCRVWCVFVRASRCCLRLLARCGGACRVLSPAVSLLLLSVCRGVGGCCACLVGLALGPCPSASVSFRASSSAGVVSFGPFRSSACVFCLVLLLLLASARVGLRVLPCSVCWVVLFASVCLSVLLFCVFVFCVGSVVSWLVLLVASVVLCLDGVCFVCLALRLGLFYLVSSIVVSSLCLFVCWLLCCVVVSVVVLCFFFFVVFVVLVLLVVLLLFVVSVVPVLCCAPDMIPSRVGVHTPLLVVRASMLARAWVASPGVGHIKSPACVVDVRPRGSMSPVALMGAACLLGLARYLPSFRWVSVPVLCYVPCHSVALAPCALTKWPLPALGLLLCAPLGALLSPPIVVGVFHEGTSAPPCEVVIGYPEFRVSQSFVVDASHGVFVPSFTCLGASGY

SEQ ID NO: 973223 - protein, 116 aa, Homo sapiens
MVPLSKHGTVKPKTALWRVIKKISYFKKLRMDVLTLWGSTYDNPDTWDDHEVANPGFPHAKGPYCVSIEDPGGDCLRLPQGGKAELERLVVLGAHVNFLKIFFFNSLLFPASQDSP

SEQ ID NO: 973224 - protein, 115 aa, Homo sapiens
  misc_feature (3)..(3): Xaa can be any naturally occurring amino acid
  misc_feature (50)..(50): Xaa can be any naturally occurring amino acid
MVXRPDPLPWGTPIVASCRLLAPLALPHANRRRGDSPPMGLILVDAGSGXFAACVAPVSPGTTPGRSMPDLYLFTEILKRLKIEDPGCLLRRPVTQEEFQGEWTAPAPEFTADSA

SEQ ID NO: 973225 - protein, 75 aa, Homo sapiens
LLFFLLLLFCVFSGLLSLDSLLVMLISLYFPNLVFFRLFRFHSAYSFMSSAYYLVSALPSLYSFVSFLRIWCTFF

SEQ ID NO: 973226 - protein, 343 aa, Homo sapiens
  misc_feature (310)..(310): Xaa can be any naturally occurring amino acid
QIVGFGSHKFARAPFRVSAVEQDVFGGPVLPGGLFLRVAPLGVFLGLPVAPHGGAPTPCFGGTNPLVSGPQDHWIPQVVYPGVPTLEGTRATLGEVYKVRASPRVARTPFCPGSLACQWQHASPAQMGLTRGDAATTQTHRAIVPPGAPNPTQDGPPCPGVHQSVNGAMLALATWAGPCRGQKSWPMSWRNLPITGHKVLPFWWPSREKEPIAAQAPQRVTLPSVRAQTGSATKIRDIFQTLASPSYLTEGPGECHILWNHNPGDLSDYLPSPRTEARQRRVALERVTGPTPGTCQGRPDVQAPVLGPEXEPLWGARPDLASGDPRANQLGPVTPDPRDLRSA

SEQ ID NO: 973227 - protein, 403 aa, Homo sapiens
  misc_feature (276)..(276): Xaa can be any naturally occurring amino acid
FVVSDRRGVCWWVGEGQGASRLGRGGGGGGGWDRWMLFLVRVRSVLGRVCCVSPRSVLEWGCCLCDADGVGAVVVWVVCGSGGVGCVVVARASCAGVGLVVALLAVCVVGLWCVSPLETRCAQLRVVALGSLPSRDSVGVASRGLLLVAEVGAVVYLCLLAYGCVARGAGWFSFRDSVCPHDVCGVALSLCCGVFCVVGSLLWGGVTCPPSRVFLDGGGPTALSPGLHGRSSVVGCFVSSLSLSWRGWYSIVVQAARACASTRASRRWRSRVFAAXVDTRLLLRLLHALYGVGPSPRARRCPRDVYSSSSFSTVRFPRSLVVSTPLAAPKMSFGGPVSLSHESAQPPRQWLFSTYPALVCVCCFLFGGAALGPHVFLCWLFYTFIFFIVVFVVVILEIKQGPN

SEQ ID NO: 973228 - protein, 256 aa, Homo sapiens
  misc_feature (109)..(109): Xaa can be any naturally occurring amino acid
TGWPSGRSVGAMVFLFVLSVRCFLFVFVLFVYVVFSSVSVGFVSCVRVSLPGYSFSLLACPARGISFGGSCRSFPVPVFPVVRLCFVLVCPFAHVMICSSVCPSPGKQXLIRTLAQWPPDYGDYDLRDATPGNNPRVAPVHRSPCDPEAPGGPCRRSLPPSALPSGPVLLAPRQSRPWCLGEWGLIPGAASPLSRPHALPILRGFSSPSIRARHIVFARIQHGDHDLVDCCCCVPPLTQPVHLLVLFLTLRCLFVK

SEQ ID NO: 973229 - protein, 168 aa, Homo sapiens
MCEGPTYGGCVSFESGALVVVSGNPWAPVRLAGTPFGKPRGWDFRMGVGKNSSRFHTGHATIVATMPAAVGERLWVLLIIWWSITEFGASNHRGALIHYGSLKGLEGSPQGALSPCGCAWPTPRVGTAWIPKLGFFWDRHTAHTCAQWPATPPCGGFVLDLLLCFFFV

SEQ ID NO: 973230 - protein, 330 aa, Homo sapiens
WVGCGCVFSVYSLCCVVVCGGAAARGDGTFTVAMTARSNACARVFRLSRAWWIARGSAALLHTVRGTRPPAWPEHHCKLGTESFPAPISCRAVDGLFSAGGLQSNPVSYIAHSSVLTHVTPIRRPPFLLSLRLQLLIPRPLADAVTYPAPGSPSLGLDEPPLGPPQPARLVYKEMCYRCTREDPDGRESHPSARRGTLQEGGPSVHPVPMGGMMVSASPFAHLEAPGSSLQSYGYVDATYREGHDPGRVSCQFYCPVLSALALERDGSPWRSDPPGQPLPEIRGRAGQILLGDPDTPIRPCPFTPPLNPGILVCHKRCPCTDAKFNKVCP

SEQ ID NO: 973231 - protein, 119 aa, Homo sapiens
MFYFPLVPPSCESPLAPPYRVGSSAPPRATLPVGIPRGTWRGDSREGTTAWACLGKILLGTLLIDRTTHTAEMSVWASFRELSCTHTSYCYTLKGVERVYVREVEAHLRVGSPLEKEKK

SEQ ID NO: 973232 - protein, 189 aa, Homo sapiens
MKVQSLGILMCVVRPHLRDQRSLEFCPGAFFQRMRVLKSYPRPEARPRCRPSSTQVQGICCYPGTYLWPPSGLGVKCSQRGGPPPSRGGPSITGASISHLSPCPRRLSWGTTDRPAPHLCPLAKVEQGPLRLLCWVTPHPCNPRGNWHLFCRTPWPKKAASLMAGIDDCYTSARGCTCHTWANFAQATL

SEQ ID NO: 973233 - protein, 209 aa, Homo sapiens
  misc_feature (51)..(51): Xaa can be any naturally occurring amino acid
  misc_feature (138)..(138): Xaa can be any naturally occurring amino acid
HCAHGGHVPLWRVTTVKEHTHEGGSCRPERCHLQLVRLPTVALLPPLFGTXLRRLCANMHTVQSCPTRGVKVIYVLPWLVEQKRGVLRRQSTQLDLGASIQMSNQPVCSLLIRTSMTLTWTHLSTHPATRKAPSGYSXSRIAVSSDSGGRSPWHDSVLVSPPPHVKLSPVRPRLAMLNTPLRREVGVPRGNRPPCRLRDTVQIRYPGGS

SEQ ID NO: 973234 - protein, 289 aa, Homo sapiens
APAVETEKAQRHPQESVRRTRFSPAPAVGVPDKPALLRQKRCRPVKQRASPISGAALGHQPQGDPPGSESFDGSQNEKDHHGKVVGQTDQVAAKLHQEGAICQSKTLKYPREWERKTTMGPRWETLEPISPERQEPKWKEKEPIKELERMVNAEHQDELQLTSNNPRGRTIRATQKKPFVRKTIDELLPPGHWNWEPGGPGLCDFNSPKCLAKPGPKIVLPAIAASNSVDTSLPARPPLVPLREPPLWENHMTISPIIFNPTPRQSVFTSPLGLIMCGVSFWTPTRFVV

SEQ ID NO: 973235 - protein, 125 aa, Homo sapiens
PSLFSVERRSCIDGGHEAEQEAYISVALSCTSSRQGPETRGACPQSVADPDGGPTLFVNPRPLGSDKMCVNSNVVNPYRRVLRSRLSPWGTLVNVRSHGLPPPGKSGPVGTKGQAAHQPHTLLGT

SEQ ID NO: 973236 - protein, 169 aa, Homo sapiens
KTLDAPLPGTVGVIAPGFPRHHPPLLALPKALGKVIPELTGSSLACLPVSPTAHVSMVDLTRRLEKTCAKFDDIPRKVVKPRPSVRAPSKGHSWANTLRHPRWSPLTFTHAIQPTSSTLLRAGDWHIAPRNEPPCVKRHFPGNEPSEIWLHANTGGGASLAHHWPSHRK

SEQ ID NO: 973237 - protein, 132 aa, Homo sapiens
  misc_feature (126)..(126): Xaa can be any naturally occurring amino acid
FFFFFSFGGEEEKRTQGRGTPSADPVGELCPPLWPGPRFSPPHCVAPARPLYLLSYAYSPSSPDCTFGGSKYRRLVAPRGSSPLSRPSRSDRADTCAPNFGRGSLASPRPPPFWLLFAFPVKLCPXEALPAG

SEQ ID NO: 973238 - protein, 235 aa, Homo sapiens
LGVKGIGHRGAHKGTHASMGPEAGAVAPKPPEEKMFNKGTKRGPSPVIEQRVWGKPLPGKRGDYKGGTPGEIACSPETTGVPRCLILKDQTAPWYVLLILGVGLLNPMYRAYKGYTCEILRVSWDRRRSHRSVSRQMTDGYTIVVKNIRCLEFPKKKNVPAKCPRWTVLIYTHAYELTLRAGLTPEKTALRVYTSVGVVWQDIASEAPDTHGSRGACHEKWWLTPQAFHSYNTVL

SEQ ID NO: 973239 - protein, 74 aa, Homo sapiens
  misc_feature (61)..(61): Xaa can be any naturally occurring amino acid
FFFCVAGEAQSDDEGRAVELYRSPSAPCFSRTSYEGSLLAPRARCRTEVVPPEEAFFINWXVGTLGPPPSTRML

SEQ ID NO: 973240 - protein, 108 aa, Homo sapiens
VDVVARPLFVVISYPSRLGCSSSSSLFSRVVSSIVSWLSSSRAWFCAHHCLLWSALIINRASRGPHGVAPPVSWRLLFSNSRSGCCGATPLFPVALFRAPWLSPLCGA

SEQ ID NO: 973241 - protein, 98 aa, Homo sapiens
GRGSATPRPVEERPAPGPSMRKKDVHAALGATDIPPPRNPARGCEGESPPLSPHALKDSRPPGYGQGTRLQPSDESRISRRGPRLRGIFSIQTARVGE

SEQ ID NO: 973242 - protein, 106 aa, Homo sapiens
MALSCNGVTRTGAHVPRGVHHPRFLPSCRFICGTIAPYPMPHPPRGSLPLADGFLNVGGISWLRGKFLPHSLRPHFSRGTPPSGEVHTLYLGDILHQKYPLEEDIV

SEQ ID NO: 973243 - protein, 174 aa, Homo sapiens
MVSVWCSSWCGYSVSALGCLIDTISLHKYDHAVVCRQQPRCVGVHPYFYCGVWVHPRCGVRILQYQRRVVFFSSLPSHVFLSAGSVFVFVVSRLSGGCVYFFGLLSLVVVWGCLVFFLLVAVFRVSVGGPAPVGCLVLLSVRASRSVVSLGLWGTHQSVVRTRLAGGAAPLLCF

SEQ ID NO: 973244 - protein, 483 aa, Homo sapiens
RVAFSCCGVVFSGPALCLYICVGVSLAHAPLVLSVVRGGSQPLGWVAVSSEPVVGGTPGYLLGVDAPLLSVALLVSARRFFWGEELFGRRVTPFLERGGVSGSVLVCTAARVLWGLWLGTTPGGAGLVLSHASCSTSLVWSLWLTPLNVWRPVCPRMCQLVGPTNSVMGVPPRRVDRGPMWGGTLCEGAEHAGGTPASGAGKDEGTPPQQERLRPSRVVYGRTESAPFGGRAPTKAHRRVKKEGGKDSPREEGLSVGLSRPLHGEVYYVRGCFVVVLSPQRIIGGHTTGEAPPAFGPHQDPLLVERTPWSSHRGVLVTPLVGRLCCGVCRPCVLSHNKRPLGGLREKVLRASCSLRRTSCVTCSHHYRGPHTSSPLRYREGHTLCGGTREERPSDFLIDDTSLEPAPLLWVSSQREICERGLSRSCARVAALFVVASCPHEARTRQRVWPSKRLSPFSLRAEMLRTPGDHSRHRGLGRRGGSD

SEQ ID NO: 973245 - protein, 531 aa, Homo sapiens
  misc_feature (222)..(222): Xaa can be any naturally occurring amino acid
  misc_feature (401)..(401): Xaa can be any naturally occurring amino acid
RVAVCCLKVVVLLTLVVMCSSASCGWLPSSYSWDPISLVVFFFCGVSPRLFHFGGRMIVCATEGGHLFETPCCLPTGCWCDINCLGGVMLIPIMRRASGRCSHTDLCDNRCAAIKLLFMVGGTKVLASRVFLYTSFFSGVLIPSLATALKFVCRFHRVILCVYILPCRGLLSPVVFDAPPSVCVCSTQLVADIILLCGANNLWLTAHSSSVSPPVFVGAARXMMFVRGPHQVYVLSSSLFLLLASQWGPPLFYDRHQVGVTLYGWPPVLWHTTRGASLRTTAMFLGSRGGDPRPGQLAVCCRRPVLSLYVVDPPVDTLFILRAPRWWPPVGLVGLCFPRLCSVCFLVSPSRDWFARTPRVCLSMGRTVAPHPHICIVVYDGGACCWGLLHMSRSPRYMFVXFIHVFVYSKREICARHTFVPHVCVCFSLCVAPRAHSENIVCVCLTRAVPHSSQKIYIHTQRGFHTHPYITPPHCLVVPTAGNTRHTILCHLRGMFFPVYTPTFVESVCYIPSGRTSHLYELFIREPPRGL

SEQ ID NO: 973246 - protein, 211 aa, Homo sapiens
  misc_feature (49)..(49): Xaa can be any naturally occurring amino acid
MLLLVSCRCVAVLVWEVGWLYAPGMLYNRTPLWGGWNKLPTPVVWGGPXPSYVYVSRERGSDPHQGGLPDKKIHNRSLVVVFIPPARPLLVCVVCSPRSSLLLCGLIKGSRRLEGGGILLCVLSTARWALAVGVCVYLYFVVGTRTQMCLFCVGGVEHHPPRLLCMLVRGVLARRVFVLSVPDLGGEGVTLVATSSVWVSRHMVCVCVRGR

SEQ ID NO: 973247 - protein, 111 aa, Homo sapiens
VVVIAEVVCVWRPVFLVFCGCLRMFVSAGDGWEMGGCLWVVDGDPLSAVFGVMGEGWLGARVSFGCWVAAFGVWGVLRGWFCSVGWCVAAACLHGEVCGVGVRVRPLGCRI

SEQ ID NO: 973248 - protein, 114 aa, Homo sapiens
MSEERRENMVERSYNHYVGMSPSDAALCLWSLFLFVEVRPPKVGCHHRGRRPPVLLWWCSRPPGGGAPLRGSCTPPCVWVVVVFCAGEFGVVFVCCLCASRTSRLVVGVPHTFG

SEQ ID NO: 973249 - protein, 270 aa, Homo sapiens
MIIAVDEGGVPWWVDKTVFVRLRTEVCGRTELWCPTFVINRCGVGWWPEGGSMSRVLHGVCILGAHHEGGRGLGLGERFVGTLLWVRTSVGGTRTRAAPGVGAGGPPPLCHDVAAGGSAAVRPFSPPRIFPWWSLARLVPRGWMLHLGGVCSWCGGLLFLGSALPLSGVRVEAPATAWPGGLFARGEGRRFLCIWGVATRVSPGEPPGCGARCGVVVHPTPRGLCLVPSGVARLLCGWGPSGAHCRPTLARFSPTRGGGRGDARHSGGVL

SEQ ID NO: 973250 - protein, 36 aa, Homo sapiens
MGANSLLHETRALFLHLKQPLLGEEVGIKLEINHQF

SEQ ID NO: 973251 - protein, 428 aa, Homo sapiens
  misc_feature (107)..(107): Xaa can be any naturally occurring amino acid
  misc_feature (119)..(119): Xaa can be any naturally occurring amino acid
  misc_feature (162)..(162): Xaa can be any naturally occurring amino acid
THRIRVTTQRFDKPADRSISGSIRSSGWVEPSDSGYHRSPGGWTDQPRLSDTRRNHTGVATDTTHVVDSTFLHDTRLGTDCDTRTLLLFHYYTTHYLDTRPLVTTDXTRTPTHTCTLTXSHRDSVCLTRDVLTDFDTTLTDRLTLRHTLHTLTYLTRLYHGXPHTWALTLHASHWDTGTTIPPVTHTLVITRIHHTHTGARRTLTLITLTRFDSSHDLHQSWVSLVTYRTGILVDSGLIPYTHTPSSQHLPSSRRPIAYYPCYRAHTTPSSDTTHSRGHRHGLDVGTPLIDTRTNGVERPTHLNTWTPRHGGVPPYTPCDFAPIHRDLGVPKRTTYEHKRDWGPPGLLVTCRSYNLNWFFTALTTNRVPSLVENETGPKVRDPGGTTAYLGRFTCGRPGQYVFWDTRPLWGTHDHGVDNRLGPSHMTG

SEQ ID NO: 973252 - protein, 296 aa, Homo sapiens
MWCRNTLGGRFSCCVDTPPLCPPRVVWYYVSPPGGSLSSHFVVPPVMCATTTVGGGGHLFFFGRSIVPRLAVGGSHCGAIQFGVVCRIFASLQRRGVALCGAHLGVPPWCATGGAPACFVTPHMGVATNVVLFPVCCACEIGPAGLISPHLCPRLPPMGPPPSRELCSCAHSRLIWVSSPLFVGCLLSLHSALSLSCGIPQQQMLLRAHACEKRISQVRAQSPLCHHAGPLSPHRERECDTQCLAVVPLSHRVAVSLPLVWRTRTRPSSPQCLSLITVWCVPHNPLALLFHRECVV

SEQ ID NO: 973253 - protein, 96 aa, Homo sapiens
RLPKGALCYVIELAPAGGGCYLLSESIMSTATAMGCRLLVSSFFRCLRPLCGIKMGGHATTVFCCSAVGMPLALVVCPSRATLVWVEAHPLKGGVL

SEQ ID NO: 973254 - protein, 50 aa, Homo sapiens
MTSPQHPFGPGQATLLDWAAPAWAELKVPRRTMGVEILSAQKLKFTSELP

SEQ ID NO: 973255 - protein, 358 aa, Homo sapiens
  misc_feature (141)..(141): Xaa can be any naturally occurring amino acid
LAATPVCLKKLACCSRGVCAVVEDHRGCTSRLRVCCDGGRCPDSLCAWLPLWMDTLSPQYCFCVVARGGSHHACVGAPLCLVVTPAYCVDVCHRRCPPPRVVATTWGGFSTLRLCEGVVKGAPPPPVGVVIRRGPARVGCXVVPTEGEEGGVIVGRTQCVEEDVLPNECGVLLVCCCAVCEDVCGVLVAVCVPPRAPTMLLGAHQYGPLRTLGAVPHPMRRRHYSRGTTSCCVTHIVRWGRLSCVGGWPVVCVSSVYARRRHCWGVCAHMGMDLYSWGALFSSANSRALSHTLAVARPAHVRCGGSPTIVRGIYSQRPLGVALSGALFVSHSAVCVVFARTRSVWSHSALLRTVVVPL

SEQ ID NO: 973256 - protein, 331 aa, Homo sapiens
MVIVFRLVRCVDTVRPLVSMLCVGGAPSWRLRWCLCLYRLASIWVSVWGPFVSFACRNPPAGGEKWGCALSLEFAALLVDANMMFGGCRGSCVCRLFVCPSVCPALACGPSFAVHSAVGLGAPPSLGVSWPPSYYNALLVDHDCVVWWGMLHLRLSSGLPRCCYSPLGFFPPLARWGRIMVSRLCWRTSMVLVGLCHRCSRCGGPAVVEPAFVRLRAACVVPPDVCVRSAVLGVLYCFAHLCAHQRWVEYVLFSVRVPLSVVVCVSKPFVWRCCPARRMCLFSPLGEARPPPSSVCGGLVGVVVSTTMRWCGGGVRYHQRWSSRPHTCWGC

SEQ ID NO: 973257 - protein, 531 aa, Homo sapiens
VCRYAVLVVRRCCGFVFVRVRARSSLCWFGRRAICGSVFLGSSGPHQWGGVSACSALVWVDLVRPLWSLTLSFCSSSCVVRVVGPFVLLCVCSLVCLYHLTRLCFSLSSVGRSGLFVSAWLCWVHRRVSMSVLCFYIALCSIQYLRVWGATYRPSVRLLCGVCVCGVGGCGCFVRRVCVSSVSRVWFVLVGGGNTPVCIRGGFSQLVFVVVAATDVVLRVAVDDGKHQLWLGLGVCQHLVSDSPAGNVPPLGGPLGVASSVPLVCLLFVPAGESPPFMCVNCRLACDSGVIARWVAALRCWPPSSLWSVRLSVACVGRCFYKEVSSCRGYVGVVVLRWSPLRRRFSSIGSTPARAHVGVLFVCSHLCVFVVCPPQYPHSVCGKKSIVCVSVWRYLWACAAHTLLWERDSVCARSLTLRTHTLFRTTVREEMCVPPLSHTGAHTHRVTLSSCCSRHRRPRCVRLFVCCIKSVTPRVSPHCHSHSSRALSHGAPLLTLPTRGPQATQTHSGCFSLSRHSEIWVLGTHTHKGEI

SEQ ID NO: 973258 - protein, 108 aa, Homo sapiens
MMRWMRIFILQQAAGLIIIPTTNIGRLGVPHQHDTLGRCVLSSGALVGATPHRSWVVVAPNSWWERACVFELCGTLSEETLLGLFFVSVFCVVVSHTRLGRAPPLSER

SEQ ID NO: 973259 - protein, 414 aa, Homo sapiens
  misc_feature (46)..(46): Xaa can be any naturally occurring amino acid
VSERAPPVWGAFNKLMWGPAAADSTNKQHDQARVCFVLRWLPPLRXYVIVPSTRGASLRRGVGLFFVGAAAPPPPGGGMMAALLFGGGQYISPPLGERPRGRTSTGRGVERARAGKEKTRTREGAPTRVGRGSVVGTHQPRCHTWGEAPHHAREPSWQPQPPRGVVPPATRAPTAAAVEEWSRRAPVFITPRGWLQHAPGGAPRGELTPRRSWWALLPACSPRIPAPPRLLASPARTHHGDICSPHADLQHTEKIIGERHTTHATRRSRESPPTSAREKMVAHSKRYYTRTWGGTTVGEEIDPRFPNNHTRESNTHEKRGATQGGHNRPRVSIENGSTETPQPRVCTSIGGARGRGHSLGTRSILKCNKRTRARLCRYTHTRQSSAPSLSRTTRETSPSSAAHAGFSRGFSHFL

SEQ ID NO: 973260 - protein, 164 aa, Homo sapiens
MRPLCAPLGGVLWSWAGPPPGGALGSAWSLSWLKIKLCRALLLRRGKRKRVAWELTLDVLNLETLFTRETWGDNKRLGRGRAARRLCGTPRDRVFLKESLVWSTCGGRLVTVALRVCPFSPRMLLKISQSGCPGQKSVESELEPPRTPAGPVVFLPHSLSCCLS

SEQ ID NO: 973261 - protein, 104 aa, Homo sapiens
  misc_feature (44)..(44): Xaa can be any naturally occurring amino acid
MAHIVITRVVEEDWALTHSYSARRSLVWSRSNMCLPGCTPLRVXEISARVVWAPRTLVSPTRVLASPAFLVRVCAVCEKRDVCDARVIRVCCVMIVVCVRYISG

SEQ ID NO: 973262 - protein, 376 aa, Homo sapiens
  misc_feature (77)..(77): Xaa can be any naturally occurring amino acid
ADVCAGTVEVIDPHSSIGLTLVALRKVGGCVLSLDCLPGSDYYWMGYSVVVPGLLVGCLSALRAVMHCMSDGCRACXVLSSPSLGCVVRALREYDGVLFCCWVEWTCFDGLVSVLSSSALYSYVLLFDEHWFSCGVRRFVLVWWWYIAHDPRCLCCLFPDRCVDVVCLIVLSLAAVWFVDLGASNLMGAASIYIYGKDVPPMILVGACVENMCVCVWLMWSLTPLVLSLSWVIPSVDPTELVVGVVVGFILLSRSRYLLLVCTSYGLVDDTTEFRIHPCLVVTHRGGGADSTFGLSASLPPPGGLVTPLYRSGLSRRRRGLFVLGNDDPPGVCSMSVAGIVWCILLLHPSSMWGAHPLCSVGCLLCGVVERRLLLV

SEQ ID NO: 973263 - protein, 209 aa, Homo sapiens
VVCLLRCVVFVLCVWWGCVGALVVAGWLVALWLLLVVVVVCLAACGWVCVHEGLVLVWFVWLVCAACVLVGVLVCAVWLVGVWSGGLGLFCAFLCLPSFFSFARGWVAQRTQLSLFWAARPCVVRLLREGVVHHDKGVFAAQSMPRAVVVIWAALLCLNDPRCCLKSYVVSTPFGGVTKYFSRPIFVVAPSLPALGMVINPPLCCSYGV

SEQ ID NO: 973264 - protein, 347 aa, Homo sapiens
MVFWSVGPLWCGVRPYFSVPLPLVGFVLLGGCAPPVVLIVFGCCSLLQVGGVSSTMSDSLFCWSTVWCSCSGEVFSLLRMVMCDSRRRDESRYARRWGLWHKCVVCCSAPPGRCFSPRGGLLLGVSPPFVFVRDVALVAAGCFVGGSFVYEILFVRATPRGHYSPLGGRPPQRWKSLRISPCGCSLWGALSHRACLEMIDEMCCFSLVRESESDDEMIFVCPPPPGALCALSPRAPWRRHTHLCAHPAVGVCGDPACDFGVAVFRLWWCGSPRRCGGVRCALMCTAPPPPRYVAAGGYCVVQRVVYICVGVWWMTGEVYVAVEYVWRSESSDDCVTMLCVVWLWVLR

SEQ ID NO: 973265 - protein, 109 aa, Homo sapiens
  misc_feature (18)..(18): Xaa can be any naturally occurring amino acid
  misc_feature (91)..(91): Xaa can be any naturally occurring amino acid
MRLPRSSLGGFVSRVVTXVTYSGSSIRLIYIISRRFVEICPRVSYTTQRLFWVPTPHWFVVPQSGEAKFWLRDVLEKGSRFVVREERNMFXEFALVGFVPPRLASATRF

SEQ ID NO: 973266 - protein, 148 aa, Homo sapiens
  misc_feature (56)..(56): Xaa can be any naturally occurring amino acid
GVLFIVFVVSSRWYSASSACLRVCLVVLLSLVLSLLLLLGYSTSLLLRHFAFAFAXVYCGLAIFFSYGWSCSVIFYQLSVSNDGHNRLVGVRSSMLLCVAASSVLISYVLPTGERLFYFCSGCFLVGVFDLPSSACVFWRGSVYHRLI

SEQ ID NO: 973267 - protein, 213 aa, Homo sapiens
MVALIVGVVWFRVLPCMVSSRLLRWGAYGGAALRGGWMCVDEVGALCGFAHGRRCATFASRVGAMGYRLLSRVGDLGACFIIGGGAWCWYGACLLCVRKLRCGVRFLRVSASPRRGGAPPMARVGGSPTVGGVGATVASGVSYTVATVFGGAPLLPRVGAACGAPANEVLLVVGTQRGSPVRALVRRLCAWCGGAATHGWDHRRGCGAPPVGC

SEQ ID NO: 973268 - protein, 149 aa, Homo sapiens
MTRCGGLEFPSRYVLSCVAPETGGGRRTTHVVPPGVLVVITPRGWFEVVAPPMVIPNVAPITSGCPKPRGYKCSTHGDEAANLGGPNREWVQGGGSYIPEGTRVGEEENGEGNNKGGVVVKPARPLSGGVSEEVTRGRLEINASHKVAL

SEQ ID NO: 973269 - protein, 233 aa, Homo sapiens
  misc_feature (61)..(61): Xaa can be any naturally occurring amino acid
  misc_feature (206)..(206): Xaa can be any naturally occurring amino acid
MICGLYPRWEEPGRRPPIVGCATKVHATECRNFFYSGGHTPPLVKGDTFSDMGGCAHPHKXCVGVAPRKRSPQGPCLVVIYPVHAPPIVIHVCCTRGSLYIGYYLEEGTTCGGVCTKNFPPWLNSRGESLVLGRNIERLSLKLWGVPPQWAAHEREPYTVGGINTEIFGRTERPYTHLVSHSGTEVKTQGRLFARALLLACVRALXTGPVRNTPEGPHGASGFLRAHLVAPLE

SEQ ID NO: 973270 - protein, 122 aa, Homo sapiens
MVRKTQYVVYTSEDVLKGLSLAHTTLGHEEKLCWWRTFFLRSHLVSLWEGGSHTSCVCESTPLFWAPPLWLTVMSTFLCTARTHTLVSPLCGGVSQAWARTCLCARDREGFFGGESPHHSGG

SEQ ID NO: 973271 - protein, 119 aa, Homo sapiens
LVLLFVLPLFRCFVFSLCLCVCVLSVSSRIRPVFVVVCSRFFAWVCPTGGPPWLFFCPPPSACSSCFGALSCTAGGPPVVALVLDVSHVFWTLGRWRFITGLTALFRGISDSGFKWLLC

SEQ ID NO: 973272 - protein, 126 aa, Homo sapiens
MYITCATSRTHIARTEHTQERHMVRFERPPAAQGAQVHTVSLARPRRIPPFLKERWGFSPKIPIADVICKNTWWLKSGVIPRWLLGSSTISPVPGPLDKWRALHSMRASHSAAPLLILHPINFTSR

SEQ ID NO: 973273 - protein, 109 aa, Homo sapiens
MLGYASVMDGASPHFVVWCPHIQEGCSSRGRKVCPPCGSVWFSPQYACLYGDCLSSGGSFFHCCRPLSGGAPLYCLPHPLFSGVSPCLYSFLFSRSPFLTLGPHIGLGV

SEQ ID NO: 973274 - protein, 315 aa, Homo sapiens
SSSVLSLLLSCLRLSFVFPLDRSCCFGGTSLVVASLYWLLVVCNFFVVFSLPSVGPAHVLLRSVVLTHRWFPPTVVGLLIGSSRLFPAVVVPSRLLVGPLEALSCSTVVTTMGADVSTVGGGCCILAGDPLLPPRCVLSHTAGGVCSSSLRPMCDSLFPSRGMRLCRWAPSWCPHPCCPTEPGSRCSSGSPSPERSPAAPHRLCGGRSPHTCGELFRGPAPMCPPWGVPTDAGFLCLLFNKAPTAECLLWRTAPRNTGDKSFSFVGVPPVVAPRSYLNPHAWRWGKKPRLGATPATCLLGVSPRWVCQRFVGAHL

SEQ ID NO: 973275 - protein, 474 aa, Homo sapiens
MLLYRVRCGFVRFVVGDEVTDRRHSFFYAASRADIALLSVRSWSVAARAFLLWEIMFYSPSVPTVGGSPPAAVGGVFCSINLGRGFLRFLCCVLYVVSCVASSFVVLLFSLPEMWVRPSGGCLLCWCSPSRSLGAVIVGVVSPALVFHTRRHFVRAVFYRVFSLCVLKSGVSMWGARTSSFYLVAGPVFVSVSQPPLCVVVASVVPSGRRRFQYCTPPLFVGTSAVVLLWHRVRICGCPSTRLGGVLPVGVYQNEFGGPPEYSSYLSALILCVFVCSSKCAKNCVPSFSVRSDDFGFYRSCLYCCHKTHGFVAPPTRRDTCIRGCSLTWSTSFLPQYSLSRHFCARPQTTRLLGLLSIDDDMCGDSSPPPRERGKFPRQQPLGRHHTRPLSWTHTEFPQKHSLGRCLLSKESPRAHLFHSRRDLTCALSPLLPRGASLGGVFSPHTKAGPRVKWWPRHTQFEILLTFVASWEPR

SEQ ID NO: 973276 - protein, 275 aa, Homo sapiens
MWVWPQTFVITHSAPWKLGTRGLHRDMWGSGFSTPDKALSKFVTIPFGNLYFGKKSLCPHLLLNLEEEALSIPGLFDPPHTPLPTIAFHRRPPYSLKKLGNATPQTPFPVLKPSPEIGFPSPFNVALGPTIVVVVVFKFLLSKLLYARNLAPHAPPPYPLSVEGELLWKLLGFGFPRDHERDNEWNNFVASGALSPPPTLTTNPCCNPSHQMGKEPMPTPHSPPKGPHTVNFPEPLKFSRTPGHPKTGGLLVSRTPPIRVAVPSLDNYLPRILDH

SEQ ID NO: 973277 - protein, 118 aa, Homo sapiens
MVVVSCSIFGGYSSTFFLGATKYVPPGGALGLSSVCFVGRIYTILCARTRRCVASGPVLRPPDSVKCATVVVILSPRRFIIDGLNRFDVERVPQPTRLCEENFLFRVPFKGKLYLPPG

SEQ ID NO: 973278 - protein, 106 aa, Homo sapiens
PSWASHGVGVRRSSAFCGSRAFLLSSLCCFIISCLLMGGVLWCRGVAGMLDFVLCCSLLCSWLSVVMFLFLSFFFFFDLFFSHGGPSAGVLSFSLLYICVLSSPVR

SEQ ID NO: 973279 - protein, 111 aa, Homo sapiens
LRKTRKLRGHVETPAPAAYGQHPEAPPAAPGIMSGVSAVTHPDSTFDPISTPGYTLGKMWYEALSHLIRGTTSFLPTTVTPLTQFWNLGHVNHEHRVNAAKNPDLGLLPTH

SEQ ID NO: 973280 - protein, 137 aa, Homo sapiens
MSRVFLISHMGRKVVGAHIELRREFVVGSCGYTISVEHTEEAFNTPCKIFVVMASVMDLHHPCKNPLFYTLLYRVYHMRVARHTDVLSLRHTEGVACGASQECIDISCRAPGDTHTWVKNLALKYSPCPVPTVGPFW

SEQ ID NO: 973281 - protein, 255 aa, Homo sapiens
LCCVSPEHKGAPFSFGVAPQSGLWLNNGARYGVIVGVPRVSAYVLRLALLVIGLSPPCGLVLDVFVPNPHVAPKCCGWSFLCSPPGGPPCVGAVGAARPRGLRPTVIFVRGVFYTAALLVYDIWGAPTLRACCAPHVSLFHGCRSPLASRMVPRAFLGAPLSLSGDTLHRGFLGTPLGGPSANRRPLAPHTLELSGPTNYCRGVLLALSTLSQLACVPSVTENVAPLGLTAGCPLCSACWDSPSCSLGPREVALR

SEQ ID NO: 973282 - protein, 118 aa, Homo sapiens
YGCVGTVYFELSVVVEDSFLLRCHLCFCTSLFFFLGELTRSLCVFFSLPSVVWFSLGVALACYVSSPISVAPAHFLGACSIILILSAPVCCFCMLLFIVGPFFFYHGPYVSQKLVVLP

SEQ ID NO: 973283 - protein, 537 aa, Homo sapiens
LCCELRALWLRSVACAELSGWCLRCVVVVACCWLAFCVDVVWWLVFALSLCAVVPAVRVLLLVLCVLVWLGVAGVSAARCEPGVSACSVRFVEWCVMSIGLACVRVWCCCVGCGVVRVLSVFAVLLRPSFCRASVSLFCSRLFVRCVSLFFVVCPSLFLSPLLLRVFSCFWLCCLCVVFVRGRFLLCRVGGCVRCCVVSWCSRVSFVLVRCVESVLPFPYVLIVWVLYCLSVERVLYCVTWRSTICCVSLVSAPSCCWVVCALLPLTVSCLFCFVVGSPRPFCWCFPSLLGGCVRLPHRVCVVEPTQIDGAAGGVGVVYTLSGGPPSGWFCECYRGGVVVNVVFFLVAAPCSVWGLPYSVCAPAARTVGMFCFVCVFSVGGVVLCCRGRRSHCLVLLCGGGGVKMLLPHRGVCGSPPCWSHHTLCGGARSSVLLSLARQSVLPRLVVSPRCLTWSVSFVCGNTQSSRRSYLPYPCGAPLPHVGFARRARRFAGVFCLVCGWSARSCCRWFTPPRGALSGPFVFLAPSVALYDDAVFL

SEQ ID NO: 973284 - protein, 220 aa, Homo sapiens
SLSTVVAAVWLSLVALFGCVVFVFLQLVSSYSYVGLLLFSPLLVVWWWSASCLLSILLELVCVSLWSFLSSICVVFLCSDLSLFFVSLVFALFRCCVRRVSLALLCCGLCSRLLCWWCVLYFCVCPLLLFVGGLIGLLCSVLLSFYFRAGGFFVVFGSSVNSITLLCVVVSVSLCICVYLVFVSSLGRFSSSWCGLCLSCFSLVSASCLFVVVTVIASLL

SEQ ID NO: 973285 - protein, 109 aa, Homo sapiens
MVTHIEPRGGLSTPTTRMFTTSGGDAWRPHRAAPRIGALTTPHTPKERLCFVKVPPLRENHIYVFGADSPQLSRDHLLPPLPQYGPSPRVSPRCTPAICCSRRDGLCFS

SEQ ID NO: 973286 - protein, 210 aa, Homo sapiens
MLLCFDSDRSWNEEYGELSIIEVFFAVHSFGLGFRVLFVCTWLVFFLCGAIVSLASLLVVDVSLMLLVDCCCGCVVLRSLALCCLGRLVMSRVVAHCIMSPGGSHCVGYVVVIDDSALRVWFLFVVFVVSVCAFSGVWSAASVWVDAAARCESGYVLFFSLDLGGNSLASVILLHSGCVMRLLAGLSQTTARVCCGDPPVVSRSAGCVVR

SEQ ID NO: 973287 - protein, 252 aa, Homo sapiens
  misc_feature (96)..(96): Xaa can be any naturally occurring amino acid
MLVCPFLPVQIVWPLVVLPGPPCVSCYVSVVRPLYELYVGRSPMSRPLWPPHRPLGGPSSRIEVVFPPARSCWWPTSCAPLVEAFFPAPRPLGCCXVFSEAAQRVVVSGGVPPQVDLSVGPPRCRPSLPRGPPRAARVVWGKTPQNGDHRSCWGAPRIELCIASFLSLVGTSCVGDVATLWFCPGAPPLLASTKVSTSGQDVPGQNIWVFASFWVGFLIRSPCIVAHTDSSLFVPVRDTLCNGLEEESLQVN

SEQ ID NO: 973288 - protein, 383 aa, Homo sapiens
  misc_feature (86)..(86): Xaa can be any naturally occurring amino acid
  misc_feature (350)..(350): Xaa can be any naturally occurring amino acid
MVLLLYPTRCVITTGWHNDMSVLVLKYLLPGAAHIVSLVLPVVGSWSAATSPTQLFPEKCVFCVVPPLAAAPRFCGAHDDTCRSTXGETLLLWGANHRWEAPPPQKPPVLQTARCWGNMFDSTMCGVFALATPTDDMFLPVLEEWVRPPRHDVLEECSLSAPSIMLFAPARGVSTSLPSQSPPRVVFCLYRDALSGQNRPCVCAPLLGPAIIFCVLPFVGISGGEKESFHEEVWGVLVCNTLVSHERGETPLFRESLSVLSRREYTRPSRLGSLCATVIPSVCKMAGKKGGAHLFLETHTPRPSLSPRLPPLSHTHTPAHTFAQTPSRPLWRPPHLNTPRECYTSEEEYXGYSVLPSAGPRGWNTQSGELGKEALLSSDPPSH

SEQ ID NO: 973289 - protein, 111 aa, Homo sapiens
WCAGSVFETDTGVLLVATRCVYVLFVACVSPDDEELGGVLLSGGPSIYVGRCRLVVGGVLFLRVSGNVGLGRVGKHVCFLSRWSRWCGGGSPIVMSPPLLVGCSLVGRPHQ

SEQ ID NO: 973290 - protein, 243 aa, Homo sapiens
MYQPRQVTSSLRCDVCRSDHFFVVCLPTGRGRPKQMMGVTLRFAQCVTHTARRSRRSSSRVLFDEHTTSSSSGVVLWGRCVMCFIVGAAPQHAADVCVECCVWRATRIALLFLSTVGAPPCGERRAHSGGRLSLWDTQGVFVCERRVSLCVCAPPPTPACVWCLVWARRLSAPRCVCECSVCVWCAHYSHGAWGSIHICVSLSPHHTLCGHTIVSVGDVGEECWCHHISPSLRIYHPHTQRPR

SEQ ID NO: 973291 - protein, 262 aa, Homo sapiens
TVWLIFWLFGSRSGALADDFCCSRGANGFLLCISCARGCCDSAGVSLLFSWGVFYYRREVELFVVIVSPLVGGRSPLCAAPFFRLGCFVSLGGITVLCVPMNVCVVLLPEGGCSSPHGPSGGPPPSKCTRGGPLCCIILFGAAMGASPPGGFSSLGSPLCCREELSADIRFSPVVTLLGGAPTGVLPPPPPLRGPFSALPPRVVVYGPRPVVAPPPRVSNELALSRGFSTNYDALLVHSRVLLWARCELRVSIVAPSENFVV

SEQ ID NO: 973292 - protein, 119 aa, Homo sapiens
GEVVLGVRWFLLRHSFLVLLIFWWALFPALFIVMCVSGGPGSILCVVPSARLSRGLFPHYSSSFSTGSLFCVRSRVGGSRMILSPHRGGSISCCRSHLNIVSPLGGSPGVFSWYEKERW

SEQ ID NO: 973293 - protein, 273 aa, Homo sapiens
  misc_feature (81)..(81): Xaa can be any naturally occurring amino acid
MPWAYPPRGGDHQRVCAKTTGSVLVMGCPWPRVGRNAVSRVLDPKGGPPSPRDGPATRRPPPRYPLWEAPRTGVALSRFSXLPCVYHEELCPEGEKGWKPTRPFGPLSGKAPCALSADFHASELSPLVCGVNFLSRRDSFPRKKRAALFKLFAAFLLKGYTPRGDHTPLGKAHHSVLGGLFVPLAVVPARGATEFSAPAPQGVLRPGAFGPWARPLGSPPLAPEGPMRSLVLRPRPARAPGIGSHSAAPHPCALRPRNPFSPHPACPPGPGPF

SEQ ID NO: 973294 - protein, 325 aa, Homo sapiens
MNFSSEKWAHTRADDKPLFQSDVPHSLSCGCPQYCVVPPRVGYYPLSVVDDSGSSGGDYLPSPPPVLMYSLGAPERGRRVCWCRKSWLFDSCGGATIIGEAPHRLPTILFVSVVCRACCRVNDFSSVGDASLVCALLLPSGCCFHGGMRPLCSRVLVRHLTGRLCLCFGVWCSLEVLLLPMWGVLVSPLPHSAFVFLAWWSGATSVVDGFIIPLCSHTPFGSASVVCYTPNGVFWRFSGAVYIVCGTHLCAALPPTVLLCHTPHSGELPLTLLTVGGCVRKVVVGDMSTGLSRENCFWAATCRWGTPLLPRCRHTPTRREVSHGL

SEQ ID NO: 973295 - protein, 666 aa, Homo sapiens
  misc_feature (1)..(1): Xaa can be any naturally occurring amino acid
  misc_feature (81)..(81): Xaa can be any naturally occurring amino acid
  misc_feature (601)..(601): Xaa can be any naturally occurring amino acid
XVGCVVFCSLGGVRCSVFRSWGVCWLRRVVAARWVVGDALDVGGAGGGVLCVVVVDGTGVRRLWVGYAVVVVGPAVWCWGXTRVGVWVVGVYMGASSGSRLGVVCSPGVGVLVVPTGVLCVRGVCGLALGGRGGPPCVCTRAEVGCGVWSLSTCGGGAGGGGCVAAVLMGGVLVRSHGWERLLAGLLGCVWNGDEREVCGGGGCCGGVLLVGGAVARHLVVSFVFGDVVVFGSADLWRRRSGWGLVRWCWCGVRRRWLWLVLVLGPSCCCMCGVWCCPSFGGLVCWWWWCVAGGGVGVLCWFDCCGSLVVPAAGGGLLGWWRCRVSSGCGWEETTPLFWWWGARGCVVFVFSTAVGEVRHFVLSRGGEEWLLYDGAVQVDACGASVSVVCVRRGSFVVRGVGVVCLVWFLLLFWLVGDGEWVAAARVDCSSHLRLVVPPRRVTSARRLVDDEWHHVVVVWVVCVRPRSLCVVGGGHHAVVVCGRDVRGVCVGGAPLTRDERGALCHSLNSGVTVGGGPHVCVVSLMMKRVCLRERVYVCVVFRVSHLSVSHSEREWWGHRGYIRVVGDVWESVWRYLRRCGCVERSHTGATLSAGCVHPAXRGTHTHTGDPSCTEDPLHSVHREPQVCGERTRRGAPFHPRVHLSIFSHISLVIKTPFVNTFLRTI

SEQ ID NO: 973296 - protein, 507 aa, Homo sapiens
  misc_feature (195)..(195): Xaa can be any naturally occurring amino acid
WYVRGDVHASVWGALCQHVVCLVQLLVAYRVYRWIVCSLCDLFLGRGVVCAACPACVAFVSQFVFASRWVFMSLFWWVVVVLFVLLGGALVLSPASASGVGECLVSPCLARRCRVAATRVLCGTLRSRGFCVLVVLPCVVCGISILELLIFSRVVALLGVVFSGPILHSLCVCVWLLCLLPCCGAEYLVFRLVGXATSVLWSPFSLGGVGFVSFSLRPYRSVLSGCTSASSCGVVFFSSMSGLVMRPCSPRMFLLGDSSGFLLIRLLSGVCGLLTVRGGILYGCGGISPDLFFVGLPLLWVYVLPVGCAALWSCMMLLLITGIVAPRALFLWGGDFLLSCLRESCVSTWDIDGCVVRFNRPYSLGGVLGERGLTRHWLGPQNLLCDSAPAHIMSLCGGCFSFAHFAGLSPDRALRDITARTASKRGVLPSVPVCGLLGPRALGVLSPPCAHLKAPYVMLCVSFLSHRSSSGSPLVSGRHRLGTPTHCACRPRNPLPHRPCAPDPGPF

SEQ ID NO: 973297 - protein, 172 aa, Homo sapiens
MLYECPPRSPRAPLVRFFSLAVLLFSLRGGYPRSRAPWCDRMVSYEPRSCIYCPPHLLVYTLAWCALLRKIDLSHPHRDIYKKTLGSQRECSCGTHKMKVIVEMRVCVWAPSQRVLPFEFNNAQSFLSSIYLLGHHRGVINIRPREIGVSLSPASTHTLHPRIHTCGVPHKL

SEQ ID NO: 973298 - protein, 110 aa, Homo sapiens
MSVRIPLKGFRLLGKFLGLPPNKSRPGSLEFHRITLFIEEDSPGTPVPGESLPGTNVVREPPMVSENLENVPAYRPFGPFPLNSWPPLNPSPSGIWGIGTHRFRPPPGAK

SEQ ID NO: 973299 - protein, 224 aa, Homo sapiens
LSIWCFCLCVLFARCVCLVFCRVCSSYVGPFARVSDHFSYIGFVSPSCRPLLRWGVLFFSTAVLIGQSSAGGGSGSSPLLRVPWFFPLWLPRFSQVWGAVVSCLVISSWRPVHRGDGFYTFVAPGGVFSWGPWVPYGGMFSHAGDPLWMGPHSLLVWPLLLCAPRVAFLVGSPKLSLCGPCVVVALDMVPPFGGCAPCPFDCPLRFWGPACMPALGGFPVGENV

SEQ ID NO: 973300 - protein, 108 aa, Homo sapiens
MSRWFRGWRWVRLVGECAGCVLWCAARGGVWVWLCSLRSLGAFVSVLASSPSLLRGGGGGVLFVGPLWGFLWGGVAGDDCCCVSIVGRGGWCSGVLKVCSVSACSWGV

SEQ ID NO: 973301 - protein, 179 aa, Homo sapiens
MRLHVCSRLGACRSCMTCSWSAQARYGSLSLTRSTIVVLPERALIYSRCDIVARCLCGVDTARDSRSGDSSSSMSGAGVLRAHDRGGRASTAPRPVVCWCENCVFCVVRCEQTVVVVDDSLQWRTPWESVQHSGWPAAIKTFVGEPQKLIRGELMGWLLVGVPDCAVPQRRDRYVLSDR

SEQ ID NO: 973302 - protein, 158 aa, Homo sapiens
MERFLLLPPPGAHHKNWGGFPHLGVTQQKNIGATQAHTWRSLRWASHTRLEERCPKRAIPADWVVNIWCVLRPLLSLLFWGCLSLYKTRATTISRVSARRHLFYMGSHAHPTMGSPRPESPREEKNEMGESHSDTAEREVAQTTTIVTLVKEKMGSHI

SEQ ID NO: 973303 - protein, 202 aa, Homo sapiens
MTRLRTVRAVVWGLRTRVVRSARWVRLLRCRLRRLHVLHSGTGSSSRRLVFVIFPSTSSSSTSVVCILFPFSAACSFVVCVFASVGSVWLCVVEENRAVTLARALLCLGCVCIDEIAVGVRSLSLLPRSSRGESFAALLLLRAAPLSLSQAPRPLLVSRLAECRSAPSSHSRLISKRGCEGCSPRAWWVFALLRSLMLCRRR

SEQ ID NO: 973304 - protein, 134 aa, Homo sapiens
MPSFRSLGGLVFVIAVSHILFTNTLRGAPTGGYSYTRPLPSIWGVFVGGASVVLVACFPHHEGCRRGRSFRVGVGHPPLYRRLFFGLCLVQPVSHFFVGLTWGVHSGRTEDGWSSRDEEHHFVVVIPFGVFSLC

SEQ ID NO: 973305 - protein, 115 aa, Homo sapiens
ISRADPITTMFGFFSSRLHVFYKCVVGCCALIVFRVLCCTPLVFIFSPGGSFSVSTFLLTAISLCPVTLSAGGDLLEHMGFRWLPFGRPCTQNLWNQDQPLLRMIPAGGEDGEHL

SEQ ID NO: 973306 - protein, 346 aa, Homo sapiens
  misc_feature (240)..(240): Xaa can be any naturally occurring amino acid
PGADLFVFCGVCAALCAEVIHCPAACGRPLWFRPLVFFPPLWALCPCSSLRGFRSSLLGHPLWAGSRPPLGLGGWLPGGTLWRPYPTPPPSVQLFVWGFMFGLYEVPSTPVYSSGVSPGVSGRLGGSSPGAWPPGATPFWRFSRWAAPPMGSPTARPLCPLGFVVLLLRVECGKGCLRARSRGDPHAQTHSLRGALISKRLLWHFAPLGFCLPHTRCEHTPRVFPPTMRPVGAPPVSLRXSPQSLLSARSVPFEYAPPSILSVRISLSLRSCGGVYAPSRILRYCASLGAPLFWRALLPGLSRYTPSALISLGALCRRASLLRRECSLMRGSRHASSNAPLCGASC

SEQ ID NO: 973307 - protein, 283 aa, Homo sapiens
  misc_feature (51)..(51): Xaa can be any naturally occurring amino acid
RFLCGGDLATRDLLLGPSPLILRLIVVVSSHTGGPNGPQSPCLGLLNGDTXLHAIVCASTAKFVAPPNPWVWVNIRPHISSNWGNLSSYTRLSDAFLATRAQWAPFQSVFYGDKFSPYRRCGDPPLGLFFGGAALTQSLRSQGPPSTPLGMALLVRVGDPSSLPQNGANGPPPAKEPLTKCPESFPPNRCQTPRCSIDGRPRTWVYALDTCRSHALEMPPPTVETHVAHIHQTPPTPLLAYTKQGATSSHIATPMTPTSTTAQHQGSHPSEAPTLRRPIFSSM

SEQ ID NO: 973308 - protein, 142 aa, Homo sapiens
WGETTWDRFSSPPSRLHAMGVYSGGLSLSLPAAVSGHPFFCPRRLPEFFRLCCRKLSRRLFRVLYPGGVQRHPRFTSAPLLCCGYSPGSSGVPPPPHGCLLREDIKKETFWWEKKAPLENWGIEIPPPLWLIPRGIFLWSEY

SEQ ID NO: 973309 - protein, 147 aa, Homo sapiens
LWVVCVCGVVLFVLSVVCTFIYSDRLVCACRGGAWLFCVIYLCGRLWLVIVLFGDSISRVGFRCLPGWFSLSAGGGPSPLAPGASRPYGRLAFLMPGGSLGGSPVVVMLCADGAGSSCALVCVTAASGLFFGGSPRAPPKSRCVAPL

SEQ ID NO: 973310 - protein, 103 aa, Homo sapiens
MSGCALWIHGWFARHVFARAIHLRVLVPLMLVRGVSHYKDSARVCAHDAGEEVVRSRVHPLRGLFCQQTEKCACVEGRGDVAPSCRGIGDLGERPSTTTRGEE

SEQ ID NO: 973311 - protein, 363 aa, Homo sapiens
MLCGGTPHKCGGGGGLPNEEEMLVVRRLFVCGFTSSRRPLRLLHFHGRRARVWRVVVLWDTPLVVTQRGGCRLIGGPRRCCVAASSSRCPDAVVWWWCRCVVVVHNPPILLSLVAASQRRRHLLTRVVSTTTRRGWWFISRRRGGVFTSHTLVCGAARALPPRDNTPPPALSSVARAGYTRGWSPRSTHTRLSRPPLVDARGGSPARHLVGAPRVCHTPRATRRVRRHTILCGARARAPHTPSFAHSTHSVCVCCARPRRVWPRRHPRATHTPPPTRGEHTTTHVFHTRLNPRHTSGGGEHNTPPVCTKKNTPRRPHPRCVAPRATPPGNTPPPGVCVCGPPPPPLCVCVGGKYIPVCVEKHI

SEQ ID NO: 973312 - protein, 107 aa, Homo sapiens
PYIQLPVWCAEQPTHVVVDPRSSGPCGWSSHTLCVATKTHGLCKLRRPPRFLLFSGLLLRVSEGPLVVSPQNFSLRRRGTIIVVLWPPPTGACFRRYCLGGGLVPPL

SEQ ID NO: 973313 - protein, 109 aa, Homo sapiens
MCENLVCFLPSSSRGDPRVLIYSHCGLTSLSVPPHNTPPLGLSAPVFSLEHLCHKNTDWALGVAHNPLCCVFWKRVHPRKAYRIFFGRQQFLKGPTGTLKGSGKAPKHE

SEQ ID NO: 973314 - protein, 171 aa, Homo sapiens
  misc_feature (142)..(142): Xaa can be any naturally occurring amino acid
MSLRRRFVVMSSRAVLFRRALLLSPRGRTPPTGCLRALCLHSHAVLFSRALSRASFGARAFLALSTVSHACVAYVCTRRIAIPSARVAPYHRVHAGYEYSPYVSRPQSPHRNRGVAHTTKDITYTHIHVYVQARPHREGATXVGLPHTHDLCVCVEEVGEVHTPNVVGPKV

SEQ ID NO: 973315 - protein, 144 aa, Homo sapiens
MSLCFVGPDMMVGLLPRRFTGVSLRGLFQDVLLVGLPRVGVCCALLPARCGLGVRFDSHGRVPTEEGVCVFLSVGDRSAMCLRGVAGVLLKILFGGESVGSSRVRLRTHCLGVVTNRFSCFVVRYRGRMCFGPRSLTSVVCDRW

SEQ ID NO: 973316 - protein, 88 aa, Homo sapiens
FLMCWCVPPPSRQRSCVWLSRLCGGDECCDSPAWCVPQEFVSPPLRVVDNNLFVRGCPKVWVDAPRQVCVSPKRSAIMLVFFSRCLDE

SEQ ID NO: 973317 - protein, 197 aa, Homo sapiens
MAANGWHKLGWVLGGAERGISQGVSRGVYKKEIIAQNRINASVEPPKCTFDRAPPKVSRVRGISRDWSSHRKSLVGHGDPANQTEPKSVLVGGSIKTENLGPNAKTVPHLSYMVRDTTHLTRMLCDHKRQQPSRHHDLTKNKFRPRHMRMANHLPWASAISAQPRSTVMVKKDNGPAPPRAPEAPCPQSQLNQLAFS

SEQ ID NO: 973318 - protein, 117 aa, Homo sapiens
MTPLSLFLSPQLSILIIYTLKSLHLHYTLFPLLPYSTLTHTLTFTLFTHSRRSHHTYSDHTQTRPPECKERTLHIVLLRLSPPTVDTPPGMCRIVVCLLLWAQRVDLEMFLGVAPTR

SEQ ID NO: 973319 - protein, 276 aa, Homo sapiens
  misc_feature (1)..(1): Xaa can be any naturally occurring amino acid
  misc_feature (3)..(3): Xaa can be any naturally occurring amino acid
XPXVCEYPRSSCIMFHALCYLISLPPRGYVFVGAHKRVGSWCACVKVCCVALRVCSPPMWEYSYHHRCSLRLYLCCVLLALVVSINRSSLGGNPGVSRCFMLSVESPTGLDMLLCSPAGCPPLGAFFSFVVVLSRGRSPRTGVLCVHFSRAPLCFPRRRAHLLFLGVFIHASYAYVPLFVRAVWCEETHHSRFFAPLFVRPYNCVGRPLCAHTFPTWSRHTSPSLVGESFHTSPQLGFLCNICGVSRYCTWELLWGDRCFSSPHAGRATRTLCLSR

SEQ ID NO: 973320 - protein, 130 aa, Homo sapiens
MLLLCVLVDCRVCRIVYFHAGVVVIVMWCGWGKHISSVVVCWVGFHRPPTSVLLYMVESCAGACGGPTQHSPRASCWVVAPRCRGVGVLEYLFCVRVRDDYFCVCVVETTHCWSRLIRYSLCSQEREIYR

SEQ ID NO: 973321 - protein, 142 aa, Homo sapiens
MDCGTRVYAGVSAEPEALAPLGQNPHGGHLAPTRVPAHGPREAPWLSTRHSLSRIPHPAWHNNFLQKRFSRVDPGRRKGEYEACNTGVRTSNVSLSLDLTGRQRRFLPDSSLTDKVCPLTLSGNEESPPLDPCLLSVFTCIF

SEQ ID NO: 973322 - protein, 220 aa, Homo sapiens
MCLVTNNDDIKQAALTYVVRIATSYFEVSSDLVLYLECEVYCFAVLLARARECVLMLVCALRWFATLVIWCCACPAGFLPLVVWWLLVLQLSFGTPLVFVSDALLFFTVVVIVRAWVWAGLSWRVAIYLGAIGWVTTVFVFSSLRLWLFSCVGVVVTLVIWWWGFIHQAALGCIPMLWCSHIIVVCVWSQGCFYVVRVLLVVRCFSPPLLWGWRRVGSKL

SEQ ID NO: 973323 - protein, 209 aa, Homo sapiens
  misc_feature (165)..(165): Xaa can be any naturally occurring amino acid
  misc_feature (172)..(172): Xaa can be any naturally occurring amino acid
MLCVPTPGSTLPRGCFLYAARLASRGGAHLRPCNVSLGALSSSGLCLIPACFTVCVYTSVLSGLSLCLSGLSVHLRCRLSLCVSYRARDIEKCVETHTLSLCHTYHPGENLSVCVTHRERASHLSRRHMSVSTTETCPLCVCERRGVSAVTPDTVGGHTCAELDXFEGTPRXRLLLYKITTRVSRERTLVWHTAHVITPTGMNCSSKCS

SEQ ID NO: 973324 - protein, 353 aa, Homo sapiens
  misc_feature (85)..(85): Xaa can be any naturally occurring amino acid
SSSRSLGSSCGGRPRGNGSGGDHHFELTHHHCGDSFCREKSVFLLAASPATHEGRSYREVFGAHFACHQHPTARSVWGEHANNKXPTFCEESTRLPLSVEVTTGGEMLWKKSCGGASQRVGGFFLSRNMTLLIRGPSPLCGDLPRSRVCIKKGDIVIGHQDHTHEGEVPELHVSSGSAHNIIISGEKMCSKKFVVPSRDNRCPPQQSHHMLLWVLCPRHCSSRGERIFLEHPTQWVVYNEAASGGVPPLGNHTGRCHNRSEKGVLLGEEELIYSSLGMRVFAQQLQGVHTRMVVSPLLIIERECRLWTISLYTGDMYAFLSGRHYRQQCLNTQCVCACVREICRGATPQRRTT

SEQ ID NO: 973325 - protein, 119 aa, Homo sapiens
MTSFFTTTTTPPHQHQVGCSSSYNHFISPTTTLPSRHRCYNKKRFLSSALFVGGLRSNSSSRRATQQIISSHHLLLFAAAHRVNNSIVLIREHPRITTHQRLHHTAAENTYSLYIRPHM

SEQ ID NO: 973326 - protein, 94 aa, Homo sapiens
DYSSGEEFSVRRVTATYLGRFPRSIPLLVALRWENALEGGDEALWGPHEVGREIIISIYKMGAPRSGYLAQCIYSKYQRSQHFSSCDGRKLYSL

SEQ ID NO: 973327 - protein, 88 aa, Homo sapiens
LQGNFPGPLFHRLEWDLAPPQLIPVMVKRCDFGESTVGASNTGYARPNVGGLTAPGHRVIVVHPQDCSGVSFPPPTTLVFYSDTLHTL

SEQ ID NO: 973328 - protein, 72 aa, Homo sapiens
SGVLLSDECGESCPGGVVLRSCGRPFSGVLFFVMPDDRMLLHVWCLSFGCGLWGTTKIRGVGVLSHVWTVPA

SEQ ID NO: 973329 - protein, 153 aa, Homo sapiens
MGRSAPLSLQRCRTVVVLSLGCPSVSPGSVCLFLQYIFAYISEPINSQEKLSSTIPRQKTPLVVALVGVLIYSIHTLLYFNPTPFPRHTRGERISGPPHTCLQIRHTPTPIVVVVMSKFCGEFWEHLNPCVWKRPPPAICGKPDRSPVNVNQW

SEQ ID NO: 973330 - protein, 96 aa, Homo sapiens
QWGVPHVAHPSGWCGVVVYCAPRCVVLSAPRRLVKPDAPLCHSPGGRSPGCPVVATRPLCWLGRIAVVSSFFRGVLNKTRVFLPPLLCLRGESPLL

SEQ ID NO: 973331 - protein, 114 aa, Homo sapiens
MFSPQRFSHARVLPTDISLTHIRRGIVLHSPQLFTALLLPGVCHENTLAGTRREAREFPRRNEPQAHSLGACWRKLSRGTPGPAHPGLFPLPSPGSLFTTTLCGFWTQLKASFG

SEQ ID NO: 973332 - protein, 186 aa, Homo sapiens
MCHVDVVFGFVVVWVGLSRLWLLAFVLEVLLVGLGGSCVACGTLLCLPRGGVGFSAPQLVVSMLSPCSGVCDGRPLCRVFFGGPPPRFGGDPFLKGGPPPHTGVVGSHHRETPTGAFVCENPRSAPPLVDRIFYPAGLPNKGCFPQRAPLVGVGARQISSRPPLQSGGVIINRYENIVLCLRPLAP

SEQ ID NO: 973333 - protein, 174 aa, Homo sapiens
MISLGYVLAVFGETTQEKIGGDYHERRPLIIDKIILYNVRAATPVSSTRRALDENLLWGPPRLSILTKMVAHHMWAAVFFFSLVPPHAPRALDSPLVVFSSQENWFYCVSTPLLVFTIWFYGGHHVIAPRVCFIRGVLVVVPQATFSHYTPPICVSTAVLLHREVIKSERSHSL

SEQ ID NO: 973334 - protein, 171 aa, Homo sapiens
MPTGVVARPPHVFPSCDIVAPPRRGVVVCAPRMVGSVLGGFPPRMNICWLWRPPLLGSLRICVFGEPLVARLTSAHRVSSQISSSPPQVCETFCGGGPPPLFIVLRVYNDCSINIVGDIFVLFVVEETLCLQAFNIGGDDLSVVCCGQHTVIQKIVVLSSHQRRPETTTSR

SEQ ID NO: 973335 - protein, 440 aa, Homo sapiens
LSSSYLLIRLYFLFVWWPIVVWLPPLLGGVAPDSWPPRCLCHYLLFVLDDPLSCRDSFVGRALRYTCLRHVSPCCFAPALCVFAPSEVVGVCLLRSNTHERCVCPPCVEGLCCCAVPRCGDGWLCGTTLVAPEEVFRPGHRTTTPLGGWPPLRVSAPAVSVPRCVARRCGPPQSMIVVAPPVADVTCVVAVGRRVSPLSPLCGAPGRCVLCVDRLTEGVPRPLVAALGRCFLKSPHASLIPKDFVVGKQIVFDPSPSRRHIGGVKNYPPWAAFSVRHPCVLCGVPPWCVCDTRWVFLPPSLGCCVLSNERCATPMCAPPPGLCIAPQLVGPQATSPHCFFLCGSMWGVSPRPTWGRLFTSRVLVGRLSTTLCAHTLSSPPPLVWVCPLCCCCEGPSLGPPHRVLTERETLCVCHTSCESTHTRTHSAHFVRESSCGFLPL

SEQ ID NO: 973336 - protein, 143 aa, Homo sapiens
MGISKRFTQPADAYSRPPGCKKVPHRYPGCSVFLPQRPRPQMGPNLVWGPQKSPPCSIWGIGNVFSRDYVCDKHFCLVPLLKAQLPWAPPGVLLRCNTPMGPHTFCCAPPHTHPRIWAFSHGVSCPLRHHYCGPQQTTEAWGL

SEQ ID NO: 973337 - protein, 290 aa, Homo sapiens
HGVGPPQGANHTAVNVVCHRTPHPVPYTGGAEEKMCVGLPPPTPGDVPPQHPHPPPHGGGNTAPPRNRVCPREGPRHPLTVVMNVCGRPHVERKAPQATHVCVCEKTPHVCVRGTPTARGEIYPPPCAPLANVVGSHTPTQHRGRKHGAAACVCVNKESGPPPPSLGDPCAACERKHMSHPCGCGPPKGTHPHVGTTNTPGPTKGRGLPEWPPTGLRRVRVSTKPPVGVLVRENPTPPAPTPYPGPQNTPRGASGTDPEMVKGPVRGKKKRRNKYVSSTAGERECSRWAG

SEQ ID NO: 973338 - protein, 197 aa, Homo sapiens
MCGVLVVIEHHVLCCINNTGEGGVGGPPPLRLVLGEVVEDPPGSWWPHLYATPRLVCLDMRCFLRRRSARLLWVHRVMHLSVVVVRAPPSGDDTSLGLVWVGVYPLLVAPPRRAAGEMIDVVLHHEPSPRSPRSLGCCVKTHDWCGVATTRGEHTIDASGRLFFLLWAGTLLVCCCHTPCALRVFSVGVVSRWLLRK

SEQ ID NO: 973339 - protein, 501 aa, Homo sapiens
CIVGRMVWVGCSPETQPRGCMGVGPPPGGAPRRRCKTVVSPSRGVVGVIYPVVPVLVGRPLLVGTLVFLVRVSSTLVFLLLGAGHHLYSGGPVFLTSGLPRGRYWVVCFCCPQPQGNVVVFLFRLGALEPVFVLAVGVVHHKRPVEVVGAPPRPPTVGGKRPTVLVALFSKHWGFLTRGWEIVMLLPWVHPHRVPSVGRPNYLLLAPLLGPFYYCRPPLWVDLFLGRIFRPPTPHQEPLPSTPKCGHIYDAQGCCLVVWCGPLCTMEGVIIRMKVWWSSPRPAVLLGGLSIIIGPSWYKDISGRSPHEKYSRVEIRFSGVDMRRRPHCGCEILCGCPLWATQAPHWVCVFEREPFFSQTPICPPAPLLGVLALCASLCSVEIILRDPHTHTVCARVGGVSLSHKPTLGRAHTERELLSRESLCATKVVTPQVFSAHSREGSTRERLYNENNYIPANIPRHTPHSLYNPRWVEKNRVLTRTRLWLSQCGPLLKFSMLKDSVI

SEQ ID NO: 973340 - protein, 109 aa, Homo sapiens
MIVTREMLVWANKERPCVVSNPPGGLALQGGYTPQEKVGSTIVRDRGVLPQEGCSAGVGFVEDRWVRGWPLLPSEKLLAPPAKSWYLGEDWWPTSVLWRQKDWCPTEPL

SEQ ID NO: 973341 - protein, 405 aa, Homo sapiens
PPRRVVGMLVGVGTNGWLLGWLPAATKEWFVLQKRDPRSGGWGQTMIIPAGRDDRHVLQPLGGETQKRGGPRRRGDECSVSVEVVEWGGLLSPEGWSTTVVVCLCVHHVGGCFPRNRMVGGGRCWWVATPPAQHTHNKVSGWSNSGWGAASPLPPPGGGRRVYTPQGEWFVYATTAVVLLVSPRRVVETTLVGGSPPPSTVRGRALSTVVCLPAFGQHDTLSSSSPPSSGLPAHTPQHRSVLWWWVMLWGVPPTAAVRLSIRAVVSRQHSTHTGYHYPRSSQHPAVLGRPIRCCEERRHTLPAHQQGLTHSRESTLCGRHTLLLRRRDTTHTTPPPPLLCCVENAAAAAVCLSPALLGHTTHSMVWSRCGAVCSSAHQRSAVWSSLLCVFSRCVRALLRGEERGR

SEQ ID NO: 973342 - protein, 199 aa, Homo sapiens
MACVGRIFSISVRQSSVLLVVVGGVVRSTTTDNSCGIVVEDGGRRGRTSGQGACASVSGCNTDTIIHILIMSRWGGDRDDVEVEEWHEHQPHRLNYWCIGLVVDGVVVVVGGLVWVVEEEAAASSIINSISSVVAVVLVGGRAVWGVRHVVLRSRHSLRGVLSVSLSWCGARGSRGGRLVACRVVFVVSSLQGREVSVL

SEQ ID NO: 973343 - protein, 339 aa, Homo sapiens
  misc_feature (201)..(201): Xaa can be any naturally occurring amino acid
MPLLRGGSARAWCLCVAVFERVCPGLCVWVKKGGRCTLVCPRAMVQPPGGGGALCLVPSVEAPGKGEPLVLHRTNWMVSVFPRRVVAFGLIPRLVVVARVSYSWCRCRVARAGVRGVYVPVLVFERKFARVLVRGILCIDTPGVVSENNIAQRVYMWVCHTLWGPQSTLTRREREAAVCSPRVFVEKGDTRDPAKLVTHMXVTRAQVDRALATRVSLSHGDVEIYMGGYCDTCLLWGIMGERDVSLGDLSGHRGVCLPHMSPVRQRGELVLCLLTAHLWAPAHTQASVRHCLHLLPLEPRASHLISLSVWRLNCDTHGPLLTTPTALWPCSKARTHRHP

SEQ ID NO: 973344 - protein, 215 aa, Homo sapiens
AWLRPPPLVGGGGVWWVRRGLCLLLGWLFFLVVVGLPTRCRWGLHSYVRVCWVVVPSPRSSWCVFWLVLSSVWGVPVLAPHRRGGERTSFWVGGLAVARLPLGLACRWCSIVMAAYRVSHLVLRPLRRGSVARLFTLLFSVWFTTSTSGVVVVIIITSSPPLCGGGVLLSIFLQLVLLSPLRCFIMRVVPLRLGEESRFVVLLFDLVVVSSRLVY

SEQ ID NO: 973345 - protein, 317 aa, Homo sapiens
RVSCPLLRRLPSGCRLMGVGWPHLACGVVVFVVFGHTTGGRAWLVAFVFGGAPALITGLVSRFLPCVPLEEVWLVSVGVYEEGGPPIFLGGSLSLFRGVCLHMLGAFLTRRCSLDQLGVLRVAPPTMCAVGRRGEGVVRIVSVWARRQLGTVVLGAAARVVRRWSCEMVCCGRKRLVCRRLGFSSSLEDACRVKRVARGGSRRLCLALMGVFVPPPPPPVLRGGEIALRRSARATMGLFMGEIVIGALLFYSSAPVCVLNKQAGGGVGVCPLCFSGGCWYKTVTAVSSPLSVAPPLSGVEKRCLSPPLVLSFGEDRR

SEQ ID NO: 973346 - protein, 211 aa, Homo sapiens
  misc_feature (84)..(84): Xaa can be any naturally occurring amino acid
MWRAGSCFCLVFVGALLSHTCVVLRLRLFCGVSFGSCLYLVSRPCWFSSVSPVGWPLSVGECCWVGPYLYIPRVGEPVTWGFFXGASRWVVYAYCLLVGRTLVSNVLGVLCCWVVTGSFCLLSCLVFLWAPSCLLRPALCVWAVFIPPVRFNQCGPCVPPSRMIVLWGGRTMRRARLLGEYNSSHTEVVKTPTRWKFPHVEFLGVVGERAL

SEQ ID NO: 973347 - protein, 342 aa, Homo sapiens
CVLLTCASMCLLGVSSVAALLVFVLGEALPYGCGCVVWVGELSCSRAESVRCGGQGYRMWFRAEMVGPPAVGSLPVGRSSVFVVRSAGCVIVSEGRPAASCVRLLGGGAEGVVVRWQVACCERPAHSVCQAVAQPAGVHKLLVGWSQWGALWPVGGLSRYSGDDLRAPVGMRRAVGGAQHKGEDYVSKGGVALRGEHQQERLLSHKSPMCCPLPRGRPLGRQCCRPTQATHRGPTGVAPTRGVSAAREHRSTMWVCTKRVPNDTAGEHAGVCVLSENVCRGRWPPLREIEPPTWGGPQKEVLNGGGVRLFAPADIGEIVGVCPHAQYIRAPQRLGDKMCERG

SEQ ID NO: 973348 - protein, 298 aa, Homo sapiens
RGFYTEMLYNSTHWTTPCFSGCYCGRNDTHYTGIFLGVGNTTVYSRDNSRVRRGMTPHRKDVLGAHQRKYYTAGGVVVKRNPATAPPTRRHLFTPGLLKELNRDALGVSPKYSRHTVEAPRRLSPQCSVDTRRATLHAIAKVCERRPPCATCGAHCCHPMCCAHRCHMCPSHMGAREISPPSPPISQPKNDSPASQPIGPTGGGVFSGGNPGGYIFANPVGATLDISHHLSQQSSWPLLGPDVGGLRWGIPPFFLSSSPAEPEAKERMRQEKMYPTGVTSQTPTQVRETSGIKVYKQI

SEQ ID NO: 973349 - protein, 221 aa, Homo sapiens
MLVPPLGGRHIRATHTHLFTGLKDVLTRHIILGDIKDAPLPQLYKKIYSGATPLEEMLFVVFSRDRCTAHTREIVYRELLVLARGCCGQPRYILERVYTTRCSPLSGKLERWVHADSNDVLAEFLLKRLAKRPTVVFVLFHGSCPRVWIIVSNPYGAPTLSPFFSLNVYLAQRPPLGWCDIAVVIWNRCCHMYTPGGIVICHCCNIIVKGFFCDTPYFGYL

SEQ ID NO: 973350 - protein, 225 aa, Homo sapiens
  misc_feature (198)..(198): Xaa can be any naturally occurring amino acid
MGGAKILGGVYTPVGTGFVAVAPGPIGGLVRVAPLCQCVDRGGPNAQEALAPVLEPPVWVRTGARGAHQGDVLVKEGSIYGGVLHPPRVPVFHASLHLVLEGGKSFLLEKEKIGETHPRCCTATLGEDTPGDGLSAASHWVYIVGNIKTTRAPAEEGFGTLKKCCEHTLGEKFSWEERIWLSPRLEKKLKYKKSLYSXNLPPGVFLCPPQEMCVTTLKASVCAKP

SEQ ID NO: 973351 - protein, 242 aa, Homo sapiens
  misc_feature (8)..(8): Xaa can be any naturally occurring amino acid
MLIGRRGXHHHSLAGILPSVGFHSCVVPTYASCALSLPRRDHTHSLALAHTLEIHTHVLAHIEITHHAVCTHLGSDLCSLAGRPGFTTLFCHTTTHDSREACVCERHTWVATDTLCWEPKTQGVSVVRRHPRPLGGPNTAGHPPRLTTHHNVSVHQNTHRYAAGHNCCAIHQGARSTVSDHTGGHTTHTTVCVGTNRRRGACLHRGVCRATPTTTRRTREHPRTTHNAARGETTAPLPPRGP

SEQ ID NO: 973352 - protein, 185 aa, Homo sapiens
MGVRVRSVCSAIRCARRLVRGLSLGVVCVRRSLSLPRLSLCVCQSSALLRGWGWCSFAVRASVFGGGCVSVCLSRLFVVLSFGAQSVGLCGCTLRVDQFYRPLCGGDWLLCVLVWTRLLFFVCSAAGVWVWCFLLFLRVLHSATRLSVFGVEVFVAFVVLCVGRSSCGLRCGEGSALRPTSVVLL

SEQ ID NO: 973353 - protein, 264 aa, Homo sapiens
MRIGEAAASPDPEGPQGLRRVHQGPCVLKRILSDCQNVESCHFRKVPPGFREIFHGVKTALDLTSMATDLTRDQNVFPMVPKTGQHHDVKLTLDVKTYPMVYLASVMILCVVLTYEITCRPIQITGRPLYASSEHQPGPAPNPGRRCMAQSLSPERSPVPMSIAIVYVVPYSHLDSNDSTWNKTLEQGLPTLFILSPDCASLENTYKTAEEAPRLILGRKLTGGFIGERHVVPGKATWGRMYPSAYKLYTRLMRYEPPRRRESV

SEQ ID NO: 973354 - protein, 214 aa, Homo sapiens
GGVVRSVCYSYVFVYIACVLSSSCCWCGVCTWCLLVLCVLSVSWVGGARSLYGVSFVACVWGVVVLWRVGCGSDYLRSGVVASQFVLCVVVAVTARMFVAFSSSQLVVLVGYFSFRPLSMLLVGGCGFDCVASLMVWVFARLSPSFLSTCCGGFVHTSLVCLLSVGWLWVLVAWAAAGLLLCIVLVFVVLCLGVCVCFASPAPCLGGCVCASAQ

SEQ ID NO: 973355 - protein, 309 aa, Homo sapiens
MAAQPEWTMVLNTPTFRQGHVADGGRGHVVFKPSPGTCKIRKTVKARECQGLRRIASVDPDVRVTDPGPHRYAASPQRLRVTDNSKGAADQDCCVSSTWYGALVVGQGNSDKAQCRAPVIASSRASLSMVEFADWECGCENYDRTHCDWSLFANRTHNCWLGRSHDTAESNRASQRHSFLSVYSLMCIWPLTVRPPYETWEDHVCLPLERKSWKSYGHNPNVLGPWDPVSICRWSREQRVLTNQNRGHEKGLRKVQYNLSATRRKWTLFPQNALSAKVLPGRFGPLLARERPWASFLGINWGRRKEAHM

SEQ ID NO: 973356 - protein, 198 aa, Homo sapiens
MWKQLPASWRPHTGVTVMMNNMDAAPPLYLSRRGPALLEEWCVKNVRSSGATDERPHGEVPPLDRHNMTPPRPQRGVFLLLVLRLCPRQRLPPEATMFISIFVFRAFCVGARASLRGVHTADYPHTRLLSQSHTLRQLVSDIETVVNTHSCHIYRRTSSDIYTLTRVNPHLYTLRPHRGHTRFIPSWEIYNTRATFSI

SEQ ID NO: 973357 - protein, 259 aa, Homo sapiens
AFRPPMGPHRVGLVSWAPACSPPGLATAPGHSGSTPPGPVECPPDVWARATQGACLICPGPLHRVPFRHHSVRCHHRFGTPPEKVRRPCPRLPPVRGGSRVARPYRTKKVAPDSIAPYFLLDTSRSAGHTRSQREVPCQTPTVSTPARKVCHTASPAHLISCSPQGMPSGAPRKGDHVLLNERENVAHTQLGPGPGSMRPSRNTFIKERMKASWVHPLREENEFPKAFLLVLRMARCAYAPAFRHTGHKEPREPPDRML

SEQ ID NO: 973358 - protein, 155 aa, Homo sapiens
MILTARRSPLTACVSLSRRGVCLSRWWLCAPRCVCVLSCDICLLESVFSRVGGSSRGRACLAPTVAPRGPAPPVSFPATHALCALSSSSSVMTILLREHLRLGVSNTESGTPALVGASLEEPAPTLSLLHHAPRVCVWRRRVCLVRLRCVVRGGA

SEQ ID NO: 973359 - protein, 35 aa, Homo sapiens
MNGGEDIKTAQKKNTVFVAPKTNSLGKTTIFTEKM

SEQ ID NO: 973360 - protein, 321 aa, Homo sapiens
CSSVVVGVVVVLFLVSFGRFSHCYLSALGWCGGVWAGWCCLLRLVVECAPVRDFAWDAVCELSRLGANVGVLSVNPLVSGDHVWGTLCLWPLSGLGPGAFSFVVPSLVVCWGAHRGCWGRVSSATIVSLCGEVSIGALLFLPVAVFMFALGPGRWGLGGAFVGAPPSLVVILLSRRVLCGPCACCGLLGGWVAGGGPTRLARLWVLSLCGIVCWPCSLASVEVALLPSGVGVVPPLSRWEGSPHKKGGIKLIFFGPPKRRPLGPHVCMWGVGRSHATTALPWCVLFLGVCVNRVGKEYSVSTHMGTTLWCLRDHLTGGSPS

SEQ ID NO: 973361 - protein, 153 aa, Homo sapiens
MYYQCVLGSKLRVLRCGAVVGALRGVVYHCVPSDCSPHTSLLALPCLVGRRYGVVSVAGDGCLSRRMAECVRCCSYSSLLLLSVVCACCTLSSPSSESSSASSATAVSEFSVCFAPSLLAARFSLRCVVCVSLLSLCALLCCAAAVCGVMCSV

SEQ ID NO: 973362 - protein, 172 aa, Homo sapiens
AFCSPVSLVVVRACAVVAFPVGCLGASLCYFLFAGLLCSLSLPLSFISVFFSLRVLRLAALCRLGCVISLFSSLSPSSVFSDLYSLLYCVCWVCVLSLNLFVVTVSVVLSVVVGAFVYLSVASGWVGGRSLRLHDRTYADFVGLLLDPRCMFVRVCDLYTLSNYHISAFLVC

SEQ ID NO: 973363 - protein, 108 aa, Homo sapiens
MPKGYVGAGLHQWSLEALARRPRGRIHHPWGVCYHSCGNGLLRGMWGGTFPQGGLSKPQSMGFCCGPREALPVCDLGQNDGGRSGHGDLGATRLLVGVPAQWGFLTPL

SEQ ID NO: 973364 - protein, 185 aa, Homo sapiens
CGVVEGMNEVVLMAVTCFDTWGGCHGVWMRLVGNHHTMMGPTPIHTHTSMDDWHQLLSGECGWCGAHTTEVGLSLYYLSVMFLLFLWCWSVVRYRCCLLFSGGSTIILFSSLARYIWLVLHSRCCASAPHTRTVSGGVCQRALTTYHDINRSYEVCVHQIVWWWGLLFWVGQNEYSYRGAAITIP

SEQ ID NO: 973365 - protein, 172 aa, Homo sapiens
MGLGPHCVVKKRGRGMEKLVNPLFETRIKSYGMAIYGQSYGSSIEDSSSNARVGRESGPGIVSRLRRGMRGASRRSKAGGIGSARLRIYSDVRPGALGTRTGRSPYIRGVPLTLGLLTRAYQHLRKNAHAREKKKQSQQVLCSECPWVRTSDSHRAVAVEPSMGGADTSFAP

SEQ ID NO: 973366 - protein, 537 aa, Homo sapiens
MLGLAVVVFVGVRLLLECLCSCGAGLCCRSARSVVPAAVIVVWLLSPPPVVLCVLGGDGLTLCGGLVSSCVRCNTLVSAAIRASRLMRVCLSVGEVGPHRCCACLWVWMTWWWPPGGLESPGVCLSVVVRAGVVRPSARVGLTPVAVLSALGCCLCLLRLMVVLLAVSRGCVVCAARGGRSTQYSWWASWCVTMCVDVFWLVFGWRLGVQWGGAPHGRCVMFPPGCRHPHVGVPRWWCRWSAPPAGYVVVRPTLWRVSSAGLSSVVWRLPQGWAPCGMVVEFRVVVPGRVVLAVTTRSPWLCGGCLVRPWVVGGCGYSMQSFVWVCVCGVWCQLGLPLLLRYWRRSRGCVPPVAPQRGAEYCGQLLGEGRDQLWSAGVTPPACRRVEVVLLRRLSSPRCVGDVGRKVVANSCWWCSDTSFDAPTECVEQRATPGWPAVVGSSRGSLAPAPARTWPPRVGEGLSCGGHIDGIPVGAGPCVSLLMSCSQSVRCVVTVSPSACTVLSCLLRACVVDVWCVPFVAHVTRNHTCEHTSHTVC

SEQ ID NO: 973367 - protein, 41 aa, Homo sapiens
MQHARGNERAALHISLSPAAGEASVNPPSLRLGIGMTGRCC

SEQ ID NO: 973368 - protein, 534 aa, Homo sapiens
VVFASAYILVVVFGCWLRMFVVFVDVGGRGGVWVVFFLVRFWLVVSRPRLWLRVLAVWVLSSPPPRGGCLALAGLVVCRCVVCVWLCARQAFVCCSSLVWFVVCFCWFVFLPSVCVDSASLVLFIFCVLGWLVVCGLSTSPFAWWVVCFSLRWLVAGLAVVLCWVGCCLGTFGSVWCGVGGVRSPLRRGPGFSSWCGSCWVSLGAAAPRGGLWLFVVYVGVWWVSGGLVVACCSLFVLCLCLLLSVCWVVFVFAVCLFVRMCVMLIVELSWLVVICRCWCCRRLGGVWWCVVLVVDLPRSWCSVFSCCRGWCCVLSRSSPPPLRLLFLVCGSSRAAPPRACLRWLPSRRACGAVCGVAPRFVVLSHFAPLFLHSLSPSSRRHPLDALPRARAGAALFARSSAVWRPPPLLSLLFRVACVAPTPTAASGGGSPTAACVVLFSLCCCCGVCCVEWCVFVDRPTALVLCCCLRCGGIRCGGVVVWWAAHLHRVCFVVVWCVVMWLGVVLVCVWELDGVVVWCGVMMRISSDSSSNEM

SEQ ID NO: 973369 - protein, 391 aa, Homo sapiens
MVEAPHAWLGSVASGVVVRVRWRKEKVVAAAVGGGGAASRVRWLPALLDEGGLSIDGGSWPRRCLQRGCRHKDALASSFVVWGKCVSKMPLVCAVWGEGRTRVVEIVVHIMGAPPVGNIGRLCVRKDMRVGTAELREVVEDAPTAGVEVVSLIVKLGSMVSRGVKGGEEELGAHRHSGVGTIGEQGRQGLIKFAENGAGIMATGGTGEESSGGVVEENADGGNSANLGIEEGGHGGALAAGGGTEEVVSVVRRDAALGHRGREGHRKGTTTPPTEERPATGSTGPPQRETWPTRGAHATEEAHRHTRGEPRGGPPQQCACVERYRSAVRPSCECHDTTWDTAERENPPRAPHALLGVCCLRKFLHLKPAGTRSRFLTFVLVLLGVCVIIVA

SEQ ID NO: 973370 - protein, 139 aa, Homo sapiens
ILVSRCRSFFVLSVSLLLVVRRRFVCGCGGATHAAVSTFVGGCGGAASGWVGVASCVCWVPLFCLSVPTIPAVRRSSGVCVFFQSLIGRVVVSFGLLDLLCLSVVVGHGSIGRRSGCAALGWCGVCVLAVCYENSVRGF

SEQ ID NO: 973371 - protein, 117 aa, Homo sapiens
MELSKHTKQSGDKQKPLAGPNEKQRGGKITASTPRGGANHHHRGPQLLETSRDHGHKKRQKQPKHRQTEPQSKATTKPHVLDRPHNSLLLNKAGSRKTLIWPAKNPSVATNKEGRQT

SEQ ID NO: 973372 - protein, 190 aa, Homo sapiens
MFVVGASCSCSRSVVDYQLLAPQKVCAFLCSVGYFFFVEVISCTLPFFPQRFLYVVMNIPPRRGVVLVCPRIYIPHLGVPPSADFVERLPPLLSEKIGGCFPFWLVAPPFFFLAPSQTRSSVSTRFMSMRCLSLCGPGGTHTSRGAQQSFMGNTLGAKNCSHDLVIETLYAPTLWGAHTHRADIFENHPR

SEQ ID NO: 973373 - protein, 78 aa, Homo sapiens
SACENVAHPRAVLLPRFYAPRGPWVSLSRCSGFAASLRFYNWCATHMCALSSQVSPTVLYVMNVYAQERASFGALQGL

SEQ ID NO: 973374 - protein, 265 aa, Homo sapiens
MSLGDRTAVARSSAAGAVGGGSQSVCALLTAQVQRGQKKIYQQRSLREDQAELVRGPGTYSLGRRRHGQDRLVGHGTTLRIGIEAVAILPQPGGSKHLPGTRTSAEEADTGRRKPTVDPIAHGMYYNGGGSRSPSEDDDANSYENVLIVEQKSHRDRCPGGGHRWPLQRGPQLSLGLKTGRHFWSLSLCLPGSKMRNLRIIRTQISHQWREFMEGHGANSEREGSPGRWEARRRGGEPDFVMGQGGAGSLGRPRKRARAEGRGWA

SEQ ID NO: 973375 - protein, 102 aa, Homo sapiens
SSSNNGGGGALRAPTIQVRVGRVVVHIRKWGGCLCCIYHVMMCVGFKLALVRSFHNKTKCRYTGARSGCVVVVVCRTVNRGGVGMTVETGNEIVEKCKIDGV

SEQ ID NO: 973376 - protein, 131 aa, Homo sapiens
MTCGAHEAPPGEVGRCTPPCFIIVMSAGIVVVVQEGTLWCLSPVRPLLVVGRREAHQQALFCLGRPTWDQPSFGGRHHKREGLSSPGACTPLWLILGLPVILVPPTGEIFYRELISAWLRTTHKGVSRPTL

SEQ ID NO: 973377 - protein, 139 aa, Homo sapiens
  misc_feature (100)..(100): Xaa can be any naturally occurring amino acid
MRVLLARLCRAQRRCVWCETLMLGRTNTLLECVFCIRVGSGVRMIVCHTHSSMVARKCGVRHSHSSARGVRHEEWVRTTHRVGVGCVFGVCVCSILEWVXMSVETTDTQNGGVIVLRWSTPQVTHIVVVRHTTMVLSYG

SEQ ID NO: 973378 - protein, 273 aa, Homo sapiens
IALLGFEKRFVPSQHYVAMFLVNMATDLSEKSGLPALHRDLLKFHKTLKEMCPMEAGGSIPENRIMLLEASSSVTKWFDEASVAAEESNQGMTLSRYCGNAHEPCPPEDLPLSPPSLDVLQGAPVIVTSKLTPTDITLRTTKEWLRMDEYVWMSHICMCNEIPEEDNAIAATQSNRMGRRYTQSNVAQTYRGKDARGLAMMALVHGGRGGRFRGGRSREPVGWGLFTIEMHKAEGWISEHTVPASPLVQDLTERKDPWSPIYGRVRHKFAITG

SEQ ID NO: 973379 - protein, 256 aa, Homo sapiens
  misc_feature (208)..(208): Xaa can be any naturally occurring amino acid
MTTRFLYATGVVRPPWFRGLGYTTMVWFPSIRFANINLCDGVSSTTHMTIVCCRLVCVGVLFRTTAVTVVGWCGCLYYPLLFEWVSGEMKTIGGECGRVVGKQAQQWLVSLLCWRRVRHVLWCGLRASFGSCWCPDRGGFALLWSVLIVLVLGAPPSLCVLVFQWWLVASRHAPWVGVFYLGVGCTASFLSLIVGDVDENRYCCCFEXYPLLSVLCLLMSLTPTLRLLFLWLVRATTNNRCSPSLVWWVVASTTGA

SEQ ID NO: 973380 - protein, 135 aa, Homo sapiens
MAKARFVLVSGVGSDMPLSFGWGRSCGVWSSLGRLFLPYLVQTYFFWVGDINVVAPTPHFVGPSSYLGVGWPSQSNGPSLLVVNVKFAYTPSSGDAPRTPTCVCGEENTCSLSVVQQKEGYRIGCCMYSHRKMYN

SEQ ID NO: 973381 - protein, 81 aa, Homo sapiens
MELRSLVARGSVGGIGCDRKFHTSGDPESDREEKLQAFEYERVSSTMALAFDSGVTVSDGIHGGGPMVLEEEKKFYHMEWT

SEQ ID NO: 973382 - protein, 107 aa, Homo sapiens
SWCGVCCGFCRLCVAWARECCAVVLRAVGVRPAGGVCLSLAVTRVGRVRRPRGRDGGLRRLVFGLWRAWGQFRPGCFHCWGSLPVLGPYGLWGAFPGFWASMDRWRV

SEQ ID NO: 973383 - protein, 515 aa, Homo sapiens
  misc_feature (325)..(325): Xaa can be any naturally occurring amino acid
  misc_feature (432)..(432): Xaa can be any naturally occurring amino acid
MTDYLLVLFVAGGRAWWVRHLGGVGIQLCGFRTDEIVLFGALVLFVVPGGYVVSTARPSVGGHTNGWAPPKEVLVEVPPKGIDEYVPLPGGISLCSPYGARVFFAVVFFGALDPKCLGLTRPLPAPSLVGTAVVISSFSGGPLPRWAPLLREGPPPGAQGVCFFAGAYVVIGGYTLTRPTPGWGTPAPVPMVALRAHGSLSRGRWSPIVVSFPPVAPALGRTPPPRFASSRVPRPEGFLAALFRTVVRPQAPHHLALRGPPLRAWHPSRRAVATQAGGVPPRRALSVRERESGPPISPVTTDSHFSLPRCTLSALLAGVPFSLHXACARYGWWPRRRTTCDHRRQQRARPLSPPRLSPPRCFRVGSTPPLVHAPTACHEKVTPPRTYRAARLAARSPAGCASQRAPRQRPLWMVPPPGCLNTAVPGSPPLDXGGLPSRATYLVSPLVPHRVLYASAHTFGYSPPPGGPRTLSGVASRRQRARRVAPITRSIPTPCVSPSLRVTRRDSVLVYRPAQ

SEQ ID NO: 973384 - protein, 596 aa, Homo sapiens
  misc_feature (423)..(423): Xaa can be any naturally occurring amino acid
SGLCVQGARRRAQRWCRRAALVVVAPTRVGLVGCACAPAGGRAVVRLRSGDRMAVCGGENTGGGGESVVVRWGVATICLWWAVRVVAVVGLPHQAARPSVVVCRGGEQSSVVLRGVWALAGVGWRLVHVSLVSRVRCVGVRSLVFVYVWLAVLRGGGFGFVDDSRVRGGALLGSASTAWVLRARLVGLLSVVVWVGALLRAGGRAHLVGGGWCSAVRCGWSAGARVGRTTSCVGSMSLRLLGGECWGRPSRPRRLLGGRQNPPSAVGRLVLCWLVSAGVSVHLRTVWVVLLTCIILLLRLSRRGVLRVWRAVIGRLACVLVRPITDGRGGGGVRFAAWSVVGCSDRSSSCAALLPEAGVELWLGRCGVRLCRCRALRLPRPPVQVVVGQQLFLAGGNVGLRPPPPSGGVMMIGWGTDYLEVVXVTDVRRTGRGRWSSSVFGSGRDASVCFAAATRARGGVDGVAATPLRCSLASRLPASSASCVTSRRRVDFAAAHHASPRGGARYIVASRAHVRRARWRLYMRVRASTRLVCALSARRVRPLLAVEGARDDACGCGAVVGCAPRAAAVVARAWWVCCLIEVVGVKRVCGVREDNL

SEQ ID NO: 973385 - protein, 373 aa, Homo sapiens
MCWSRGSICVAEDWSSVDDVAVCGRVGELWRCRLDALTARWCSFGGRGNLVCEEPHFLAEEDVLVSVWSPPWCEVVEQFVLVVCAVLAPVGGTSSWGVVNFPFGCSYTAPKGVGVFASRIHAWRREPTVCVVVAHTNGRKKTFLCWGSIEEDTQHMGVVTTTSFYKKIIPHHILLVLFIVNITLVVGYMSIGSDLSSGTERCCVSPSQKNIGWGEDKGPPPPLLWSCPTPPTCWLSPAGVLVEPSSAGVSLASVVGMTTTRRPYLAPRHIISTAPVLTSLWGTALLGGRLFLCTCCVVFPTAGIYIAAPQHKGDICVLRAAFCTIMIDIEMIYVVNTSCVFGKGRYSGGCVLHCAVLWEHRVLTAVLSQRSAL

SEQ ID NO: 973386 - protein, 87 aa, Homo sapiens
VRVASCEVFLTRVYMLSTIGAKADDCTSMDKPRPWRKRWPSYKLIELSLIPTPSYEGPSWYRCLNPVREIESSREAMECVSCERYVL

SEQ ID NO: 973387 - protein, 106 aa, Homo sapiens
MPPWSSAPHVVPSCLFVVRRAFLWFAPSGDWAAVASGHHFFCPPECAHRIRALSVPELCEEHTGYLPQVFVSHIKRVKVPPPSKMGILTRFVLVKRSMDMLVVLFL

SEQ ID NO: 973388 - protein, 233 aa, Homo sapiens
MASRQNPSGRRVPDWKSGVGLDAACLSICSSGSLGIKLIRDAGSTIGAQDCMVGQDVRASGTICEGICGGVVVIPVLPLRGDCYVDSSSPLCECNLRNWWLKGSVTIGMLVLSNADHNVQKGPCDAKDSVMPILSNLLVKARRVLYRMELLHAPFIGIRQSSRQKDRFSHRHGSDGVASEDLLIVVTATIGSATLPVILINMITLAKFGQEDGGIEEAQGIWRGVNSKAKPNE

SEQ ID NO: 973389 - protein, 156 aa, Homo sapiens
TVEAANELLSSFSVVMHSLVQEDRDQHDYKMKQGRDHGRVRRRSKKVGDLGKEGIGAKRNVEPPCESYRMPSDGLMAQVSASPRGEKDITEEKTSDCVWMPYVITVSHGTHHIGTCWICVLSYVARPLVYSCIQTGVVYPHLLLPILHHMCGNEGR

SEQ ID NO: 973390 - protein, 115 aa, Homo sapiens
RVVVVVLWVSVLCVCSVVCGCVVVVCVALSSAVLCVVFAVWLRISHRLGGSAFVVLSAAPVCCCLQPGCFARCCSLCFSARCVSLVVFACALGGMLFMCCARSVLCGVVRSFVVP

SEQ ID NO: 973391 - protein, 153 aa, Homo sapiens
MSRGFASILWLWWGLLRCVVRRRWVLCAGPRWCCVWRAPREWVVVSIWVVCFSFFVWVRAPPSSFFCVGLVVRPRASAFLVVSIVLVVLSPSSVVVCISRCRPSSASLVWFLVPLLLFLLGVVGSSLAASSTVCGCGCGCVYPQQQWGGGCGY

SEQ ID NO: 973392 - protein, 316 aa, Homo sapiens
RAAPPPPPPRTRGWGTDKPRCRGRRKSREPRSSRSRKGERRQRRLRRSPKNGPREGVAGGDLQGPLAGRGALRGGSGPEARAGAGDAGAVHVFRPEEGRCNPRRRDGASRQLSMASRAFRGQEPQGAKSPVSSSWATIGVRDLANAYEETRNMLITESRGTRQRKEDDFWTIPSEKFHNMLCLRHQTRGVAVDRSDYSVFVVHALIQRSARMVFGPTNRLHSPASVVHWQEAKIPTNLLLSSVGGRSMGLHAGLDRGRRRSVGVRAGVNQIKDPGQLVRHALPILDGVKHDIGVRLVAAEEPIEDGLPSGGTGSGA

SEQ ID NO: 973393 - protein, 121 aa, Homo sapiens
MCTPVPRPLCWGGVSVWTDATVPQIFFMSWHTPLLCWGPVSGIKGGCRRPDRGCLGRPQTLSRPPKGLCWLQKILLPAALSRFIRIYSPTGSAIKKGYFPGRGAPIVAVCARDKFFLAPTP

SEQ ID NO: 973394 - protein, 286 aa, Homo sapiens
  misc_feature (11)..(11): Xaa can be any naturally occurring amino acid
FFLLPLVWVLXCLSLSSVRVCLCYDDLVADCIDVSLCFWFVGSPTIRWFVCVSLCDRASYVLLMECMICCCAAAVSLHLSVGIFFCFFLLLLRVGVVVCGVIIDCLCWVGGLMLSCSLRQGGGGVSLPLLCVVFQCAVLVCVGSQYVLILPSVGWCSFFSSFFFVSSGCFLLVCYMFVLVVFFFGWCVFVVVVGSMFVCCSGGRLLVCFGSLFSMLCLLPFHCFVFVSLLVLWLWWMRSPRCWCRALWCFSGVLFCVGWGGFASFVFVSWVLVLVSHYCVVLGVFC

SEQ ID NO: 973395 - protein, 110 aa, Homo sapiens
  misc_feature (57)..(58): Xaa can be any naturally occurring amino acid
MLSYHTASDQTRLSRTPGNRIVYPYTQKVGKAPKICMWCVPRQTSKGFRAVRDPYKXXLDEELVPQDHKEKHMARTRASLGGVHMWCYKCGRDHGSSVRFLIEDHEKSVV

SEQ ID NO: 973396 - protein, 214 aa, Homo sapiens
MGSPALSPQTVTGNSPRNGHHSAHYSPGLYRRTLHQAHRQALRRAHKSLYDNPTRRKEPQTNAKLHGRRDPTYLMARTNHATDRTVANLRALHRLRRTSTTREPGERHTATMHLSLTSSLGQKHTTPRHKTRNTHAHRSPRLRTESHPPLPIGDPPRHPNPRALNPPRPCRAPRATGAAHQGPPLPPTGSRQATPYGEGMRATHATQDTDTPTA

SEQ ID NO: 973397 - protein, 559 aa, Homo sapiens
GDLGSGLLAPQQGSGDVKGLRLGAGPGSRQGVSKQVVCGTGAAVRPPSQENGGDCGKWSSKVSAPTERSCGPLDSGADWGPGKRARARGAGPRARGPSCGLRAPARNANSKSVLERGERERRGGQPARERGGFSPERGPCGARSAACASRDGPHKSGPQRHTCGTPVRGKDSGRESESLWVRRHPTQRTQHTERRDRKVSELQRHARDTLPRTTPVPTLPTRAHDGPATSGPLPSGRQHTFDEAAHPEDRPQSWSTTQNRPRHTREYASHHGLNNHHVFRNNNAPPKQAHNTHTAGYEYTAITSPTHSPHPAGSPHATPLPPTGPSKYPYYTPRLTAYERRTPLPRRRDQHRPPPQTNNRQHNPPYYSERAPLTQRQLRGRHHSCFCRHIISSTTVPPLVGDTTKGSPQQCEPVGTWTDAAAAAVEPLITIMSRGPSHTTGERSRTIMWSAPTKLHRVATTTSPHTPQLSHTEQPRARAPPGAKPRIVRPPMRTNHQHLRDTGHTGAPHTHRTATHHWRTTHRSTSKPHSLPDGTPAFPQHPPPPPPGGINDLIAPHTL

SEQ ID NO: 973398 - protein, 101 aa, Homo sapiens
MRDVMRGDFRMRSGLSGGTRAEDWWAGADGWARVGRAGLDLGGCCCRRFVGVGPADREAGFGPGPRSGCWGDLEGAAYCLQRARDKVPGGWVVPLAGGQEG

SEQ ID NO: 973399 - protein, 113 aa, Homo sapiens
MCDHQCVLGRKKTCFGAHTSIRCGRSSCRIGRHTTSKVIFVGCVVVDRHEHELGCVLINLEYEACFSRVEDCVTKPCSLSTAQGTPHRVGNITHLGAHAINTRREGGCTHTWM

SEQ ID NO: 973400 - protein, 474 aa, Homo sapiens
GQTAKEQRSGVGEEHLVAHTIRWGAVPTTRRGGPPPTRGGRIHQGRGSSRTLRVWWSMRGVAHKHKECRRGGDRRDDRWSRRIGGRSDRHMRGCGHPKRWGDKHHAVVVLKVRGGWAAPTPPPSPVSEYVVCKCGSGDTTHKGGAYSTPGVGNKTGVGRERAYTQRMKVGCVLNRRMTRGGKKGAWAGAEENTMAGLIVASAVLSAQQPPPPRCEWLLCGERRERVVEEYSHSTSRVRANRECARPKREREGAAREEQHKSSSCWGVCGAAPPRCGESVRDTTVVLGDNESSGGARRESTHRERRSRERPQQCCLPAGCSRVVREELYTLSSIYHRSSRGGRQRMYHTTAIRAPLLVMREQHALRVGGEIESAMRETRHHHARREGGGTHTHRGWRHSHTRVCAHASHTRVCVCDTPPLVGRNHTRCTTARAPSTNERGGTAGALYVTHHHTPLGVCVWCHTTHCARRAADCPV

SEQ ID NO: 973401 - protein, 366 aa, Homo sapiens
RELSQCLTRVQNEAPVPLLNLKWPRSGCELMAHALSVNCQPRASLALCGLHVVCVWLWLLPQPVQGAFPHVSLCADVCAILAAVTCASNGPDIWNPQCDQRSPTPDLRMLDHFTMWPISAMETYVPGAIGGLHQSGEPVTYVTDVAPCGDVTPIVYVHDEHPYIPQMMPRDQGTRPNGAHREFAHRLVRRTIGRKGELAHMHHTHPLLSGCAPILMWWPNGHGHKNRVGDLELRTMEHSSRSRFGRAWRSTITFADIHVNSQSGRSISLCSSGHHGLCEPTRTEMNIGPLGSKWYADSSPLDEPYTDSSSIIPPVTSSKRQSYGWLIRPLEGRATFENPQDTQFAAGTFGNQGIATRQTKEYVEGG

SEQ ID NO: 973402 - protein, 68 aa, Homo sapiens
SVSSCSLDVSLSLRSVGVVVGGVSSIRTRSAVDLSAASVCCGIDITSYELVHHIRGECTCCTAFRHTR

SEQ ID NO: 973403 - protein, 158 aa, Homo sapiens
  misc_feature (56)..(56): Xaa can be any naturally occurring amino acid
MCYDTLTRCCAHASHTAHSVDSHTGETPLICPNSSPLGPRASHTLLEKLWCCPREXPSESPQATQEFVPTNMFLWGAQPQMSQESRDPGACTHIPCPHLPRKDLFPVTGICFPSCLLAGDLLLEPQNTGSRLPEYFFPDPLSGPTQPRLPSIHKPLFC

SEQ ID NO: 973404 - protein, 180 aa, Homo sapiens
  misc_feature (1)..(1): Xaa can be any naturally occurring amino acid
XSLAFMYLVTESYEYVLYDDVGAMLLASCRLRFVCGASAVRVDPAGAVDAPSICSCGDGGLFSSVFLTGFCCRLAVVSFPALVGIAGGITSQSLCGSRSMCVDGATLYFPLGVSHITWSLLGMSPDVGISLAWWALVATLMSGCVFFDLLACSLLVCATLVSPSLYHCCCCVGHLQHRGD

SEQ ID NO: 973405 - protein, 352 aa, Homo sapiens
MFKYKKYGRRRSITRHPRNQNCDLMVCKESVLFCKCSLACICEQCMHEICHSQHNISKACHYCTAWFHGSHNSLPDITFQWTMDSYTDEQTVSFQWLNKHGQTDDLKAHCCMSKTTGWLLCFVLFWCLVLHTKDATDQIAERPLHAQTAHRSDKSGRTMMAHHDPRGADTDDLKEVVNHIDSRPALDARHITRLANLLKSYFQESNAGRSVNNCLKKAPTRDIGHSVTGRSQGEKPEILRNEHSRHKTGDNLHEPRNNTNSPTIAKRKTPPEPKTGDRRSHKQEKPPTTNGEQKALPTPQRNQRDQAKRKRQQQDVTAAPRKRTSSNNTNPANSGQTRATARKPSSENNKTA

SEQ ID NO: 973406 - protein, 73 aa, Homo sapiens
  misc_feature (17)..(17): Xaa can be any naturally occurring amino acid
VCSPRVVCCCVCWCWLXACGCEHVVRVIDLLAGGVVGSSAFGYHDGVSDSYGPACAFFSLLDFVLGVMSGVDS

SEQ ID NO: 973407 - protein, 273 aa, Homo sapiens
MSRWCVFFLLCGCLFRCSLLLCCFFRAFVGCVCVLVVVCVVVFVLLFGCCLLCRVFFGHYLPGLTRGWAVVIVRVGSPGVSKDVFVVLAVRLFCCCFYGWRPSGWALLASRGVLFAGGFFSQVLCGVPHRCVWEIYVEGGPPSLLRVFGRGSPPALLFGGFCRSRCVCVLKCGRFSPGGFYMGYYSGGVSSPPLWTSVSPPVGIIMCGFRLCSLAGVLCLTFFTGALFCCVLPLLVDTPRANDPPRRVGWWLNTQKGGGKFFPVVCVLLNRGK

SEQ ID NO: 973408 - protein, 359 aa, Homo sapiens
MLLVVAARLWWWGVLALTVFSFGQSLLVGGVPPPGWMRGGGAHHLWVCMWVLVCVGDFVCFVFRLRGSFCCWCPFAVDLHCGVFLCYVGGGISFCVLFIVSLYSLVGGGCLSCGGRYFVYAPPLTIFLFTPLWWWGLLVVGASYFIDYWRRYDINIFFVLGEGPPWMDVCLSSPPPGVTIIGRGEDEYELEMKEVLCGKFLCGVLPHSCVCHTEGAPLHITSVPLKKRARSAEKNKPVCCGVLLRPTGPPLLRVVLCFSAGGVVLFTPRGVCCSSVVRRNYCCGGGAAGPAAGAPTAGGWWAAPAISIWWCGYFGEYISCVLYTPHCLFFFISLWRWCIIRTPHSLLLRGYDAADTLCV

SEQ ID NO: 973409 - protein, 321 aa, Homo sapiens
  misc_feature (54)..(54): Xaa can be any naturally occurring amino acid
  misc_feature (196)..(196): Xaa can be any naturally occurring amino acid
GTTAPCLCIKTTKGCHHNGDMNNILLCCVFGDYGYDLMKGRHKNLSSPPTFLEXDQTFNMYVQRCVGSASCRSYSLLEWGAESNSSYYGVSKIGYSAASCVVATTVFAEEKSYYRCMRRLQLFLYIICYEGKHWLFCSYTAATTVMTTWEGPPKHNNKLLLQVRATMLRVNMCCGTTAACHHGAQTNTAEQRSRTXTRMVHPTSASRSRTCVFGATHTQIGAHHCRALCVELMCTVSICAHKPHERGISTFCAKLELRQYLGHTDGHVAEIYYHTHWAEKSVRPSGTRRRSSADLCLLNMSVLPGIARALPRIPGATTPSQ

SEQ ID NO: 973410 - protein, 341 aa, Homo sapiens
SRHVSRHVAARLALVLWMAAWLPCDPAWPVVAESVSSLTICRLLFICSLAESSAPDPCRCPAASQEVHLLLSLTAAPITANAWKLDAHLCKHTGGETICFVTMTGCGKAFIRDYHLSRHILTHTGEKPSVCAAKAVITKFNTKSNLQKHFERKHAPQQKQYICRFLTTVTKTFKKHQQLKIHQCQHTNEPPIHVYQDGCGKHFASPSKLKRHAKATRAMYVHTGLFLCWQNIGPEPLTPCDRTHNEAHPMGTRPETFDARFLSHPYTHAPHTAIIVVIRSSACEYQFPGRYLQPIPRHEKTALVVTRVCEAGSTSRVMLTQQHVHPTSRMAIGIPRRSLEQ

SEQ ID NO: 973411 - protein, 102 aa, Homo sapiens
MYQVASTTKSGKCQCFLASTPIPSALPSLFVHTGGTPEPEGGGREILRPLQHAVATATAENEGDEYDDLVVHNNRSHKPAAFTTQPPNLFLTTPPPCELVHW

SEQ ID NO: 973412 - protein, 130 aa, Homo sapiens
PVVWCCWFAVQQETRTRKTGLETYDSAVYRFAADLSIVGVLFVFVSNRVVVLMDHYRLLFHSAGVYKRGLMGSRTHCILITAPTRVSDAAGMCLYTPSGPHYFQRGNCREESPPEEKQLGVSTRKKSGKW

SEQ ID NO: 973413 - protein, 105 aa, Homo sapiens
MQPQETCYGLAWHRGVMPAVPTTGEAEVGGRVWAQEFREQSRKYNETLSSKNRKLEKYKNYKDKTQKSVMIAQVVREDAAVVWEKSEVTVRPDRGLKGDDEEAEL

SEQ ID NO: 973414 - protein, 156 aa, Homo sapiens
MCSFCAALAFLLPLLLLLRVLVLLVIWGPCVFAHLARSSVWGVSYLYAGITSFMAFLVYRVARCVGCLAPQSVVCDDDVKVVCERRRLREDNVCSGSMYNIEAETVVCLVVVFVIVGATPHLDPDYVIDGVSVSCCVLAIRIFTCGGVEQDENKDL

SEQ ID NO: 973415 - protein, 404 aa, Homo sapiens
  misc_feature (64)..(64): Xaa can be any naturally occurring amino acid
  misc_feature (97)..(97): Xaa can be any naturally occurring amino acid
MSVILLCLTMVRVRRWTARSQTLYREYLTTTLEDICLEFGSDEQWRRKTSYARCQNMGSQLSSXARVSSQDTGLLSVLRYSTYIASLIRGDRLGTCXSSIFIAFLCTMMLQARPTVAMSLLSMGRNPLMGGELSPQLSVIDQATVAYLSPEDLPGGPLTDISSIDTVFDHGESTFTTKVTCLASFTPIVKVDLLRALGRRKALGNKTVHVAGKLKGLPSLPSRDILQLLANGNHQNWLCHNLGRGGLDTRGPSSNLELASLSARPELPLTYSRKLANPHVETRTLGENIRLISPVPFSFHRIQWAESPVTLLEKLPPDLLYKENEFPPPLCTEKPQLSIYQGGFGHPNVKGRIWSTPLQLERLITTRYHLSRGRPTATCTTQGLLLGAPTVRHKHHSQGAPSYR

SEQ ID NO: 973416 - protein, 77 aa, Homo sapiens
MFSTNNISPRAGAPPANSYVVCGWPPPPPPPPAPPPPTTRGAAPPGRVGGPPPPPPPPPPTKTPPPLKISGGGGGPP

SEQ ID NO: 973417 - protein, 232 aa, Homo sapiens
MFPPTIVCRKRGSRCVHHPLCATGNHDCCGCVSNNGGVSPHPSYRGNDSCREENDHMFLRDLSLLIGGCRPSCCVRVGPSGQLCFAPPGGFNIFWGTPPRCFANYTSVPTAPPRGDLHIVEAGARWPPNMVLCFSLFIVLRALGGHTHRVTPSHTGAHLSARHPSLGHRYPCSVVPTHYTAQHFEPLLFSVSLPTMSPRINSLTHAAHAPLTRERVPPLLRALVWDTYLQRI

SEQ ID NO: 973418 - protein, 176 aa, Homo sapiens
PPTRVEGQEGGRQKRGRHKKEGRERRRGKQTAGPPGGRNRTPEREMCEPHEKPTRGGTTPPCRGSSGPSLALCVQRLSGENSRVRGHSHIRWCPTRGGVWFATPKRRWNEAPHHPLGRVTHREGGGEGHTPPHTHPPRAPPPGGNTTTVYAPPQHTPHTPARDEVWGPTHNPTQPP

SEQ ID NO: 973419 - protein, 358 aa, Homo sapiens
MYSDPFASQSFLTHTLLHINNYRSIYCCLSISTASLHFPGLIHSTVLNLHHHNILTLSHSTSGPVALPALTDHNLLSQAPYDSTNFTLTHIYYKAPSLSYMSSNIHHVYSLTACSMPPQPLNTNDNSVHIPYIRATQLVPFSTPWPFCQIHTYHLHPTNTLSHPTLTTLSAPLHTRLSSIRLDPHSLTTPLVLTLLSSGATQRRCAEPPTTSATPSNQTHPRPNVSRPPPHPHHTNDPPLSPPHSPHRTATHTQDHTTSLATPTTTPHPGATPPTTTRQPDPSTHPLNTSRRRNLQAPNHQATVKHRTAHTRPNTSDNSTDTAYRPSIKAACHKTRRPPFADKQPHLTPTDTTDRTPH

SEQ ID NO: 973420 - protein, 179 aa, Homo sapiens
  misc_feature (59)..(59): Xaa can be any naturally occurring amino acid
MYIALLALRTAHTSRCNLSLSLFIRRCFSRLCDSAYIHHSLGGSALHSRYLYREYIYRXCSHWAIYRDLIERETPSIRRRCSHARQDWCPQHIWRPRAPSFSPRLSHAERAHNATKGHSVNFLHIFHHLKIPTLHFSLGNWLRHTLGPRPREGPNHEATDRGPCLTLESPTHLHGNSLP

SEQ ID NO: 973421 - protein, 96 aa, Homo sapiens
QICSDVVLPLRSLCASWSVGCVVGARRAEQLRRLSRGLSLGCWIALGSASELCGLEVCLWALCLRVCVSCSGRAVLASPRFASFVLLRPRLLCSWR

SEQ ID NO: 973422 - protein, 173 aa, Homo sapiens
  misc_feature (71)..(71): Xaa can be any naturally occurring amino acid
PAWVLALSPLARAVPAPFLCGGCLPLGRPCWERPLGGVPRVSPKVWMLSERGPVFIDRWFVARLVASCANXAHSAARSRPRNPPVGCALCCPAAIRVPRRLAHHEIGGRGPPNPPELAHLGPRPRVVTLVVKRKDVARNIVNRPVYDVSHVRTPREPGSPIPPPGAHLGEPPE

SEQ ID NO: 973423 - protein, 63 aa, Homo sapiens
MWFDVVGVPASGQFWHIAVGTIDPVNNHGRFTALDSCTSTQKSCTDIATRHEQMLQKRRLPKV

SEQ ID NO: 973424 - protein, 151 aa, Homo sapiens
PSRKFRGISGRILACTRTVMPFAPRLPRLAETFGSSPETIHVRLEKMEQRGSVTGRVFDVSPNSSYGRSLLSRHYIKEPQDYPSALASWKALMKSLKPITQPPLQHLYKSDVLFDRRSPACTYHKIQTIDEIQSTETLIVLQTQIMRTIKP

SEQ ID NO: 973425 - protein, 481 aa, Homo sapiens
PTLPDLQQQSVFSTQNPGSSETHEIRILFVPHPSCEISFLIFTLRFFGALDEKPYQSNHRWARQTITRTRTDTIGYQWNIADVISLGEICKHSLLCQANSDCSDGKCVLATVLADTCCRRLTRVPLKGTFGRAHSAQCYNDVRTLPGSWLVAGSRTGRRDYAGPKRSCTTNLSLERDTKPQRWTPGRHTDSHELMKTRISQAESIGYGDRRNTKNRPFGSQDTSSLTSGVPSIFEAMRRYARFNTRQVNRYEYEDWIAKKTQGTVDTLHIPSLPNAASGAAKEGTSTHTKRTEDIHGEANPAHDTEGTRTSGPQLPKTADKRAESVPTTQANRTDNDENDTHQQGTRQQQGLHRPPVTRRQTQEGDYSTSPEKPGVASTVRHRSKRRTTNATLPTETTSQTLKREQSSHEPPTQKEERQADTSQQGGAKNLQRSAGTAPNTQTERSHKRDTHETKSVQQRPPNLNTATAGREPRTRQKSSA

SEQ ID NO: 973426 - protein, 228 aa, Homo sapiens
  misc_feature (104)..(104): Xaa can be any naturally occurring amino acid
QAARTPQPPRCGPTKGRMLEGCERPWHRYTSQDALGAMHQTKEEGQEPVPTVSPPRRANPVCTPEGAICKEACLPKLLPMAHCLSVQETLARCKDTTPGVSPEXDPSSDHARSHTRRVLALNMTVPRCQGWWSKEILSEVLCHHMLCRHPSDQVTTTNSPGLHSNRGKSPQRPVWNSPERPRLTLPKVLELDPNPGACGEPRTAGPGGTDPARRTKRTKTRFPGIFSP

SEQ ID NO: 973427 - protein, 410 aa, Homo sapiens
SQPHCPALGFSTYSCSPGAIAGSPSALRTTMTIPRMILVPCFNHLKHEPHPGATLFVILHHSGCYDWRYMNMNQQLLHACSARPFFCVTTAQYSVTTTRDQAIQVPHIFSTQPNRNLLPDEPLGSASTLVKTALVAVRCNQNLLSLVCTQRGSPVPSEQLATWQLEMGPDGGQNHQMRQHTLRGTATPNNQQPTQPADTPTRYSHTTTRQGNDLSNASLADGHAGALTRHPTVEHLHTKRGRPALHAHPTYPHHNPPGPDTLTQRKQANTSQEPATPTRRHNANAPEPAEHHGTTPRHPATEHTTGPRNTHNTTCRRHTDAPQQPAHGARAPSQHRRGAPRDRTTLHATRPLTRTRNGGADQEDAGSTESMAPRESTGAAPAAPDRPAQRPTRTHPGTPRAAHDEHTSEH

SEQ ID NO: 973428 - protein, 77 aa, Homo sapiens
VPGGPTVLLSTRVDYLFLWLVLVLTPLSVFHHRGACLYTLAPLCIATGGGLVELGAHLRLLLFWVAVGGAPTFFFVD

SEQ ID NO: 973429 - protein, 354 aa, Homo sapiens
  misc_feature (227)..(227): Xaa can be any naturally occurring amino acid
  misc_feature (269)..(269): Xaa can be any naturally occurring amino acid
MSVSFVCPTKGCPPVFFVNSPPPRSVNIPPECPPPVKMWGGIHPRVFPRRAAPLVGGFPAVGGPPPPPLGVFSRPWWTHHTVPPHVLGPHSPPRKTHPRAFSRAARATARGFPRAPPSQRVWCPRLPRALVAVAPAPITHLLSRGASSLARAHAHDVSHHARAVRTRGRPRRATLSRCTHRRRLTRAGRHTLVLAPRSNMVCCSLLAALCESHPHAFVLAIGREREXFRRERYIPREAPPPLYPLLRNSERVSTSFSPHRSPPHSHPPXATEETHRSLVAHTPQSLRSERTPSPQVSHTVDHTTHTPRPHHTPPHNSANHAWNPRHNTHRLETHWRNPHLSWPHGSHMERRWNG

SEQ ID NO: 973430 - protein, 113 aa, Homo sapiens
MVWRVDVCWVTVKNAPDGWRRVVVVTNVYPGVVQQFCWVLHCPPEKTWPEMVRALYIVQHTPWARPPPPILRHTFVEVKFCSIPGLKKKIKKTSSIVNSGREEYITVLGGLVV

SEQ ID NO: 973431 - protein, 163 aa, Homo sapiens
MLDVADCWLGCVGATLNGRNLMPAVSARDAVLTVHDETMMCYIYFIVVNASMYGSPIVSWARCLSQNGSATQLDIVLGDLGLLQVVKRSFHKHATHHHRPKVGLRSTRKGRPCVGFRNIRGGTRYSIEGNSFHRLTWPLKCNPRDTSSLCETLYRTPLRHGET

SEQ ID NO: 973432 - protein, 38 aa, Homo sapiens
MPAALTLNYKGNLPEGRNPLLGFLVHIKFYLLNDPWNI

SEQ ID NO: 973433 - protein, 273 aa, Homo sapiens
MEDFPPRFLVGPHTHGGVQRSWDIFGYTSWVLVVGGPPVRGPLSPRKCFVGAPEERDTTWRYYRKGVVGPQKEMGAVCQQKYSRGGTRGISTHHPCPNTGEWSSRKVSAHKDSGVCSPCCLGGRYTQGVFPQHRAHCLRGCPFCENGAPPEGTPGGPQRVSHTWGATDLSQSLHLRALLRVARAPRGAILDLRALARTGASRFSRFLLCAAQKISTISQRKMGLLTPRVLMLDEFEEHMVAVISGAIPRWPLGSKYHLPTPWPFGQMAGPCTP

SEQ ID NO: 973434 - protein, 376 aa, Homo sapiens
MESGNTLADCSSNLALMAPTTSHRFTHECAHKVCMGHLSSLQHLSVEPISSFRPGNTNVTTASASASYRFSKSSHSNALHVHILQTHAMETSRWRRYEFLPGRVLRPLSSLGHHDLPNILHHVLRTSTQWEHFTSWRPNSPGHTLRETPVWTATVTHIGLEEKALRSLLMNLVHALTQRLTLTYPKTHRRTFKSRAWAPQAFTQNAGESANSTPESAPREQATPERHGAPRTRHGRTGTNQRDRRDESTRANASRHAPAAIKPQGEQTQGTTRAAQGRAIRSLPRTVRTIATWTATNIRSRSTKRQRTEERHRLAKRSGAPAAHNQREDKKREEQERKGGTDGKAWPSTEQRARTTGQPSPLSDVTEPSKDSREDA

SEQ ID NO: 973435 - protein, 212 aa, Homo sapiens
  misc_feature (143)..(143): Xaa can be any naturally occurring amino acid
MMFNTLGGCPSPTREGEEGIGRQTRGCPHTTRRGVFWDSRLNTQRLSPLVGVKCVLVLTDRSLRCFLHIAKGDPLASLTRLDGGMPNVFLLVCASASWVASRLVVPRLPLKKGVFCSWVENGSPPLATRLSTIHRLHLWVILXYPTANLVCVFLPTGHIVCPGGGLLRRLPTRHAHRVAGLSPSPNRRSQHPFCGGIVRLYAHCVVVFSWVI

SEQ ID NO: 973436 - protein, 245 aa, Homo sapiens
MGNLQDFITSTCNRCSHSWSLKLGVPMNNIKVENWFNKMPIYTGQRYKAKKLTLHSLTCTRTKALHTQTHTRGKKGDPTTDSKDTAHTIQRTRQHTPQTNPVPGKNTLPRANGPNSHKRPTRTERHKATHTNEGKQPDKTEAKRQNTQRNERGHQRKSTHETRKQGRNATRQNREGQRPRQTWETKANPKEEAQNSEAKKRKKDKSSEREQREKKTSTNPKTSTRDERRAKQKRHRSHHRDPRIP

SEQ ID NO: 973437 - protein, 189 aa, Homo sapiens
WNHVLFILVTSAAERGVSPRCNRAGHMETRRSWCALPVRVRQAGGQHPCLERNIIASHCHPQTRCVNASGLARCLKLLVHRSTHHRFLFELVVAMNRSRAARVCIECEALEVVGCESIHTHTDRQHRGGLHRTQDIPTLHRPSTRRSREVWHKHIFCGLEETRPCGSYYDPMTAAMPSRVTLVTPIRRY

SEQ ID NO: 973438 - protein, 136 aa, Homo sapiens
MLALQLHGYRYYEPKTCGFDFTGAVDGYFQQYQSECSSLHAWGHHSTGVDPGSGRGALHRGVERDSCVFAASRFAGDGTDLGGPTAALLAAHCELGFLGEANVEEPADEVLRVFPMGVNPKQCGVKRLCPVSFSFS

SEQ ID NO: 973439 - protein, 102 aa, Homo sapiens
MCVYVPLRLCVIYTPRCRYRGKMAIYYWLCYAKVETVEIFPGPEGERCLDAQMRHQIGVIRQVIHQPLKKLIVVFAKRNFIMIYPSPRVLMFPTCIIKGIIV

SEQ ID NO: 973440 - protein, 153 aa, Homo sapiens
MCPIERSAYEETSDSPREERGGDQYTKESKLQQRSSGSHKVPHHLGARVCAPKENYKNHHCENTPTIHDAEKPINAARHIKSDKVEHEPTVDTQREQQETDREDGQTRIHTRATEREATQQNNWTDEKQTNHTDENKTNATYNHPHNDANHTT

SEQ ID NO: 973441 - protein, 256 aa, Homo sapiens
  misc_feature (75)..(75): Xaa can be any naturally occurring amino acid
  misc_feature (106)..(106): Xaa can be any naturally occurring amino acid
MQCTLDGGACSENAERVSGVCSLAIIMARRVDSFPLRGFRIMPGKRIIPRYKWWRDSTTTVHTVLGVRSTLHSDXLWYHVTRVFVLIANRKYMLYAGASIASTDTXLFRQREFCCCKIVAWPSSRHTTGCGTVHGRLNELPPMRNVMSGTAMGASDRIETVGAPHRAIVRRSASCANFERGALLSPSRAQTTLSYTTKIALARSPLSLARSAALGTIVLWRLRLSRLMGAWASSMRIFRTGRGLLACLLRITPCSL

SEQ ID NO: 973442 - protein, 350 aa, Homo sapiens
APPSPDVLQAATHRVVDAQAPFPVPLHIQLPQQEEGQEEEGVQGRTDWTRSGDALCIQWTVSSSVMRHHQCGEELPQGGMRVQWPRCRACPPCDRSSSRERANEEEKPMDKSREHMAGPLVATDRRTVPVAVRGALASSSYEHYESRKTNDPDDQGAEHTGKGDEHNKKTARATAQTEHKPITSEPPATSGPKQKRREQRMNPKTDRNETHTATKNTTPGTASTSEHSTPVTTGPTTRPHTPQRTGRENRRNKQTQTRAHKPENQPTSRDARRQSDRPGTGRQSQEKEAAPETRERTTEKREGEQRKADIHPGTNGEKEASNGRTADEGTRAGQRRKQGNDETARVGRWY

SEQ ID NO: 973443 - protein, 203 aa, Homo sapiens
MEDTKRGTRREGLYIEETHHTANRERNMRRPTPAQDKPTQGKNITRSEPRTPRGEKQTEGTEGQQRKKRNRQGTNRSWTHTGATKAITQARPNNEGRATNHNTERPEKEHTDNTTPDTNSRNSGPGTTGDEAANRETGATPHTVEETEAGETRRRKQREKKKNAQRTTTTKTAHQLSKEAKRTPRIHHTTTKNNIKQPSNERN

SEQ ID NO: 973444 - protein, 222 aa, Homo sapiens
HGFCAICEDGLWPKGCSARRALSCELQQKLLGSSRTAKSLWLQSCVCTDRFNQDRFVMVFERKGEIALWFFMSTLRYRRLMSVNSLLISLSGNEICTVIGIVHTSSPLATPRQGSSSNIKLLVSLSFCPKHNQAQTQNETQEERETRGRPCYPWGVSARHSERRSLKRTGRTSVHAKTSSSPGREPPYRLVSDATGLELYLRTGGLRTVLRGLRKYQPFVTI

SEQ ID NO: 973445 - protein, 88 aa, Homo sapiens
GAEPADWYCHVYELDKNLNPIKPSKFLGDEETVRKADVSCGCPGKAKKEGRRGGYCPQEHASLPVLSRLRPPDRAHVDTDHICRHLEL

SEQ ID NO: 973446 - protein, 241 aa, Homo sapiens
MSFPFSAYFFLAGPPPKTLLLSSRDWGAQRVSHIISPAPRCCWGDVVYTRAVRLFPPPLCCPSSRDPQGVRSGGAIKRVSPHGGAPLTRGERGTHGVSSLVVNSARAGEIGFTERLSSAPHPARDSLWRETQVCGVFAYLCVHSVFPHKCHQSVSKESPTHTGDHETLFSVYEREYSRSPVGPRPPPRVCPVETPGTHSLHLGSSKDHSWYTRCNPTGFNFDPCLDQQGQTPYINPDIIQY

SEQ ID NO: 973447 - protein, 68 aa, Homo sapiens
LAGDRTRRYRTRWRDNKSGMAWYTEDGLCSLQFIALDGRGYAIIVLLGDKTIPGVSRFQVIKDKLMLR

SEQ ID NO: 973448 - protein, 240 aa, Homo sapiens
ASSMLSHSVVYGVFSPSLVNRGCAHICGKVLFLVGESPPGLFLFVGLLGGVCERPLLAPRGMLIFGGPPRQVVAHQPWWVRGCPVCATVGARRLSFCRERIVGAWWLFRGPARWPHYGGLANEGFVLWGLVPPVYDGAPPPEGPPPVLPQLVCPPRPRGRPLSLSPTWGSPPRGDSRRFSFRVHTPSGDHQEPPEPPRFAGTHPPQMVTPQMRHAHSAPPCVAPQRCFPTVCGHTPQGAR

SEQ ID NO: 973449 - protein, 68 aa, Homo sapiens
MDGSATTPAPISCPQKSNAQDGGTRTQEETRAAQTSQKEQPLNNGEEVTRATTGPMSEHKRSGTTYER

SEQ ID NO: 973450 - protein, 149 aa, Homo sapiens
  misc_feature (44)..(44): Xaa can be any naturally occurring amino acid
MIGLPMWWILIGIGAIIINAEEGGYQLMIGATLKVVRHKIGGAXHQHLRGQQRALHMQHHLRRRTTQAAHRLSHTSVFCTNFTRGCCSSQRHTTPHSAERNHWGDLSTQRALYEETQHTLGALIDTRAYTQCGAHHTAALSPALSSSVE

SEQ ID NO: 973451 - protein, 154 aa, Homo sapiens
MRQVTRAIGQTYALRNSTPNVTPKWGIITEPILVPDGMDQLEPYVSLDPGHICQKSRARTHACHPVLLTTELSSGVYIHRALSGWRGNLGFMARFKASPKPSMEKAGTPSRFELIAPTERCPTAWGTVPAQFLHPRGNRPKGFIPNGLVRLEGP

SEQ ID NO: 973452 - protein, 246 aa, Homo sapiens
MAWDPTLGFSPPPNREGSQRYALATPRRPPPQICREPHHSALPATIHTRVLPAKFGLSPHLLALFTQVFWHLLTRCLTALFSAPAVLGCLFCVCERDSLVLTQRYTQTDSSGVCSHVFDGLTHSHHSRPLALESAPLRASLPWRHTHTECVTTPVHVTLSTERVPSLCITSVNTEVEAREWKGYEPRRSLSTEVHTFDKNNRPVPPRRMVIHSTRNALWFVGVFWYEKEEGLRGEDTATERRISRV

SEQ ID NO: 973453 - protein, 218 aa, Homo sapiens
  misc_feature (197)..(197): Xaa can be any naturally occurring amino acid
RLLAQKRTQRKESTSDHDEEGLQLNAVHTAPPPTRTQIAGRRSSDFSPTGGGPPAPTRAPRPWTRFPAPPRRRWYTGFSFHATGSRLPGVSPRRAPFVPLADARTKQDVPFPDFLAFLERLNTIVWRLDLAFPRQPSLVGQRGPQTAVPGACSTLWAPPPPGILELSGRAGWDTFSVRQSFCQRGLTGPAEAAFSRXLEPRKARAPKGGTRLAGPPGL

SEQ ID NO: 973454 - protein, 119 aa, Homo sapiens
FFFLVQATKTTRVRRHESREYEALTWWWVHSHTQLARDSQCRCMSPLPSLFLQSSFLVSVLPFSSFARQDVRHPGQILVISGEPTGLCPRPVAPRGMTLVFQARVSVSKRFPVYHVCRV

SEQ ID NO: 973455 - protein, 277 aa, Homo sapiens
  misc_feature (23)..(23): Xaa can be any naturally occurring amino acid
  misc_feature (137)..(137): Xaa can be any naturally occurring amino acid
MFFVVYVVFLFCLSVIVLFVFIXWRRPNRRRARAADADGGKQRGGDDSQTEEGDARSGLCSLVRRHSVSLDSLSVESSTSFLSLVALFTHMCEAAILAPSSSVWRRTRPVWGVVVPPTAPAGPPTPRYLRRHLTIAXVCSPATLGEDALFLVLWVCTTHPDSLGAHSRQLWRPHHEVGFFKIRPTPTQGTTFSWAPLQPPRPFSPIVPTRGPRSPMRPPGAWRLFVPPLGPRPNPVWDRQITKPARPLLPQSSHLVQQGPRGPQEVAHKRRPDPPFS

SEQ ID NO: 973456 - protein, 104 aa, Homo sapiens
GPPAPAPDSPLFALPEGPSVTEARAQQPLAFKDTGKTPRLEPRGGQFTRIRITPYQPPTLNPLEKVCADLIRGPKEKGISQVKGPVRMPTQTLRITYPEKTPLW

SEQ ID NO: 973457 - protein, 224 aa, Homo sapiens
MWLSVCADSPSEGLFCRSILCVHPGGNSLLRGWAHHSVWCSYIPPLCVRAVSLSLFTIPCCVTGPCVCAVCVWLVVTPLQCGRCVCPVWCVHPLSSRVVRTVVPLLSLLPPCGEHAVCFVAAHVRGGVACVSPTACGRWGGGRTHRKHQRWCVLWSATVLCALVCRRVLVVVCCLSLFFSPREREKRSPLTAPARHTVVRWEPPAALPVVCPPTQNYYPWAPPP

SEQ ID NO: 973458 - protein, 147 aa, Homo sapiens
MVHGRDPLYNVCESLLRLTSHPGPGPQTATQLLKLAPQYRPETKPEKNRDCWPGPRRRLLAKGTSPRRDPRVLRAGVNTVTPLVENPESSAGGDCTRRGSHSKLVVFLPALCRKMGVPYCIIRERPDWDVLVHHRRDLHPPVAFTPR

SEQ ID NO: 973459 - protein, 305 aa, Homo sapiens
MRGTEEEEAINYHRGYSRVSAEFSVSARWVCAPVRPESFQKVSWPDPSIARGLQNRFSTRDPISGPLLSRIVGSLFRNWSTHEMVNDVHSALARAVLRFSCPTIALPMLLQAPALSQEYRVPVLASETVLNLAFAPAHSWNPRTGLKSSPPGPEPLLADGAILDQGRAHVFSGPVPRWLQPASYDPAEDSQKLWRLPSRTSMKPRTILPRLTAKSASGTSFTSRPRLYPYPGEDPGEEPGVRLALPASCIRSCPLMGYPLINPSLERTSLLGCCAEYKILDLFMSPLSPINDVFVTPYLVHKPPS

SEQ ID NO: 973460 - protein, 230 aa, Homo sapiens
MSGNASRKPGREPSPRRNILGAHCPPQIAPPHPPRPFGEVPEIPCPEVDLGIFPWGSEFVLVNQDHSMLSTKHLINELVRTQSPGEELHSCSIDSTPVPTQWYRGPPNGCPLGPQEREPQAELLRERKKSFKPKTSLKKFTRENMSEKGKECPKQHVSWREPRSTARASFLRAHRFQGRDHVWPRAQMAIVLEGQEIGVLFFREIQAPQGQINTLFCLHPSNKGVYCFVP

SEQ ID NO: 973461 - protein, 246 aa, Homo sapiens
  misc_feature (66)..(66): Xaa can be any naturally occurring amino acid
VSCLFCSSFCAFFFFCFLFFSVNSLFSFFRSTSFLPSSFSFLLVLVLASLALLPFSPLSCCVVCVXGLVREEERGKKHEDPGRTPPAGLRPHTGFLPRHMATPAFRLPHVAPPGSRRGLENSSSTSLSGGTTTQTGPSPHPERYGSEAAPAGPWSGANISGDPRLTTILDKVICPRFRRLGPPGAVPDPRPENVRCPPRRATISARACAHRASRKWLHHHPSFHISGHFAWALAYHRELGFIDALE

SEQ ID NO: 973462 - protein, 192 aa, Homo sapiens
MKRQYSHEDTHLCGPALNFWEHFDKDGLVPWWYIKSISPSLEDSTLRPFHEPANLNPPGIVPNRLDQTEEDALLPSVYPFWDPTNSQRPIFGDLGLLEARELAFPAEIPDCARWTYEIYNTLAGNMDPGQRGDTQNAGSRVHFPWEGAFPDKMGQNLPSGPDFQVNNLLPSPSCLHLPFQGDGGPLKETEPL

SEQ ID NO: 973463 - protein, 229 aa, Homo sapiens
  misc_feature (224)..(224): Xaa can be any naturally occurring amino acid
PPPGDERSIVERRRAPLTGFVSHARRPIRACAHPPVCLVLYCRLLFSQEHHVGIPLIAETPRSNRGAFFLGETLVGKCSSVSPGFIAFGLSFLGNLRGRNVRHNEPPGPRLWGPALQAFRDPTRGTTGSEARLLSTGLRDQTPRNPDGSPRHPCETPLADTCCFGNVLSLPCLRILHSLPPRPTSGTLCSWGQGTALPWLSTPTRVLPAPFSYMPPHACSHPLXHMLWF

SEQ ID NO: 973464 - protein, 113 aa, Homo sapiens
SVLFFFSCVFVFRLSLMCLLLRVACLPPRVFVCSSVAACVDRSLCSRRCRCLVFLALSSYAPRFVLCCSALSVGGAVALLIGVSSFCSCGLSYCLVLSVSCRSGVESVLSRSF

SEQ ID NO: 973465 - protein, 77 aa, Homo sapiens
LLPLLSCSPSEGFYRPRRHVLKGVPSPQKKKIRTSAPLSGGRRQLRLRRQPQYPRRERSPEKQQLDPYAIIKFLADP

SEQ ID NO: 973466 - protein, 124 aa, Homo sapiens
MPLHFLPPARSCALPPLRPYARPRELARPRTYKGSGEGESETCEEPHTRKGRRLTTKNTYHDRRVLCHHPGPTPQRRPRLGLGPATEFPHLEADLVVDVVHPPSRYKLERIFLPLEYTFYHAPK

SEQ ID NO: 973467 - protein, 96 aa, Homo sapiens
MCRIEATIIATLIEPEIASPENTCEGEMIQRKENEAPRERGTLGSNIKRRPTPCVPPEKTYFVRTHGKEPETAGTSSLWIHGIIRCLKKKLRTFWA

SEQ ID NO: 973468 - protein, 359 aa, Homo sapiens
  misc_feature (253)..(253): Xaa can be any naturally occurring amino acid
MRTIRKCNIDEVQTSCTTCTLIFVRSGVINTGCNTLSRLFLSQRPLVVVAPVTPMGWRSPPRVFWCAPPAKLGGLFRSMFLQNRGLWGPPPPQGVSSRDSLSWCIYPAAVLFYFSPRGAYLSRRHQVVGCFRPLEAPTVAKIGQKGVSPLGAHPHTACGGTKIGGGVLVGEKTPSVGDPVATKCVSRVHIEGIIDPPVVYFPPPLGVPTISNPVVMILASLALPPQEVVLFFLPHPEDGGVCGVCGVCGRVGXPCVATPSVVVIERCGGRADTTHKRRSHKEENLLAHRGARVWGHKKDSSGENIILWGGGRRHTTTTLRHSSPPIPHRRRALLVAPPMGVFCVSPPTVDSFPGTPTCS

SEQ ID NO: 973469 - protein, 105 aa, Homo sapiens
MRLRRLLTCWLPWGPTPPPSAQDHPEDFGPRWVIEADDDRLHQVIQGAEWENTIEDSPLPRVLAKLAQCTLHGGAVSPSSCCPQALASPLLLVLAPCCQPEEKKR

SEQ ID NO: 973470 - protein, 217 aa, Homo sapiens
RALATHAPTPEWHGLERHFPPRTGTARGHVVQPAGPLDPQTLAPHPGARIAPRPARVPSGPSCAAPRFGTPRRCAPAPASRLEGSSGWPAITRRWPGPSAYSVDTEEAGPSPRSPCQTHVQRLKEYRSQTSILFPRKPSGPPEGRPVLAEELKLAQPQLTGPGHARPGRPIRRRKLESSTEEEKNFQAFASLRMARAHARLFGIRAKRAQESPQTGC

SEQ ID NO: 973471 - protein, 165 aa, Homo sapiens
MTRRSVSGHQGGPTAHQVQSSAGPGHLPEPQPRPTHLLQLFPRPPPLKVIDLRVSNIRPVFRAHGFQMWLLTGPKTVFSPDRKLCHWPAPVMGPLNIWECGHPGELETTTTTGPPLAAVNAAGLVLTPAEPPLVSAGHPGPRKGCALAPRATDLACLGSELLPEA

SEQ ID NO: 973472 - protein, 107 aa, Homo sapiens
LQPAKPREGDWRWRWPPETGWLATEGSRSPHGAEKELSGGERRGHETEAPAEALWRLSPRLSRNAHTVRPRSTYPPGLFPDLHHFLTGFPPSSHSTSQVKTWPLKGQ

SEQ ID NO: 973473 - protein, 247 aa, Homo sapiens
RCSVTRWSLTSSGAPGVFPDVASRLCCLCSPQHNPTSRVGHPVGFLRPLLLCCLEALCGLFGRLRQRLDPLRLLVHTCWVVPPPLLPPCLPTSLVVNITFSTNGVGFLWLLPLWLLSTVTHTVVCVSRHLLCTFVVKCPHPPPLCSYLPSLGHSLSPLVSHILPLGGARVPPLVSMAEMSSTGADPSSPLEKCGKSERYTEVFHQSPVFSKRSALTPYIPFSQFCALCLQGSIPSITTPSLWVLWGE

SEQ ID NO: 973474 - protein, 101 aa, Homo sapiens
RPTPREMHETNARARFGGARNVPRRMLRYHIASLGAQDHRIHSTMKRGRRLNKVTTGTVYMATFKNFNAILRGHIRKEMGESRLDSLLRLAQADGIVSKNF

SEQ ID NO: 973475 - protein, 244 aa, Homo sapiens
LFPARSSFFLLFVFFSSFVFLFFSYCRLAFLSLARFCWHLSLVLLSLFLSHFLCGLSGPSFLVVLLPLFISFLFCFFFFVLFFFFIVIFFFIFCFLFCFVLVCFAFFLFYEEERFRNKRREANTRSPVSLRLLLHKFCQRLPEPTTGGVLLPVSPGLFPQVRLSATHLLLLCMVFPRQLMNSGVSDGQIENWGGSTGLIQMGLDRPDLVKLETRVLWMEKFTPGPVGHPSVMSPLHQMEMESPV

SEQ ID NO: 973476 - protein, 98 aa, Homo sapiens
LCVGGGSCCLLGPGLIMHATVSVPPFLLAPGIRRTPLLYPPVSSGLFPLLLSSFHGVLPAVLFFILAFYPAVTDTRWPMYPGALPKAPHTPPVRKGLR

SEQ ID NO: 973477 - protein, 106 aa, Homo sapiens
MPRPPRASPRVMLSGKCEVHAATRGPPPTGKVYMSKWIPGHPERVPRGAPGSTEPDHPPRSPTKLWSHMARKQRPLGKALWQPRLPTHFEAATVGCTPRQATTARG

SEQ ID NO: 973478 - protein, 141 aa, Homo sapiens
PPPRRRYERNRKEKEKETRRDDQRGYVAYTAGSQPQNSQALSPHSGGAPPMAKPAGTPPGAQGVQWGFSPAARKIWGTTKWWRQHQKGAPPHGPNEERCVKGTARPPRCPWSAPVGAPHVVCGMGHPPDGSPQGPPFLQAS

SEQ ID NO: 973479 - protein, 113 aa, Homo sapiens
MTSWAFRGTLEAVSAGRMRRTKDDRVNPGRPDGRTDGRRRRQAQAKAWTNAGPNNTGEDAPPQESRLSRGGETSTTARASESPAQQRHNFENGLPTMHVNEGSLLHTWGDMGV

SEQ ID NO: 973480 - protein, 154 aa, Homo sapiens
MDYCVVGRRLYVIDDMHDVLKEKIIQMWLKGPCADGVSAYIPFMPLGNFRAHMVRFVLWGAIFVVFVLLFFACRPPFPEVGSAHPGFSCCSPLFAPPRNVFSAPFIMFLARHPPLWPKDIFWSRDHRDGGVLRLFFFWFLCVCCWVFFVVLFVA

SEQ ID NO: 973481 - protein, 177 aa, Homo sapiens
MRRVKQRVKEDLLKIPTAIISKEPVEDRVSVLPWRWWKDALDQLRGPVMIVYPLGLPPYDPLRLEFENKEDLSGTPGRAQRPLKRQRRQLWWATQELRRYEEAFQTTWGRMKKPKLSAQIPAKGTGSSQPESLLLASEEPEASCCCTITRRPEELQRLEENDDDAYLNSTLGRITLL

SEQ ID NO: 973482 - protein, 138 aa, Homo sapiens
WCSTPTPDQAWAVRNPLGAWHLAWRLPLPSPPPLCLGALSASAVALRTYSGTPFHGGSLKALFSECLFLLKEACRERGFGLCPPLLGTLGILMSSSQPRLDPSPRGPPRAPSPFPLLSPCHPAFHHPVLLPIVVPPHG

SEQ ID NO: 973483 - protein, 316 aa, Homo sapiens
MSSLVSNSYDRDENIVRYQHVHGSRDDGVPPFTSRSRTAWGHSPGYTPNGGRKHRPFDRRLKGPRRKGGTHFRKSGYEGTPGEGPIYEFGKNARPPDPGTPMASEVSKAVFGKESSGFAEWMNVPFRKFQLITEDVPGKNCLTNFPGMDLYPGPKGFPGPKNGQTMIEAHLDVQTTDGYFFVCFCVGFTKKRPPIQIRKTFFAQHPNTVRPNPEEDDGNHEPAEVQTNELEKKWSINVIPRPAIGKDIEKALPIYLSSSHEVFVRKVKMLKKPQFELGKLMELHGEGRSFGKAPGDETGAKVERADGYEPPGPESV

SEQ ID NO: 973484 - protein, 366 aa, Homo sapiens
  misc_feature (41)..(41): Xaa can be any naturally occurring amino acid
  misc_feature (185)..(185): Xaa can be any naturally occurring amino acid
  misc_feature (211)..(211): Xaa can be any naturally occurring amino acid
LSVSSRCVVFVCTARFFARAWCGCGMSVPSYSYLVGCPRLXRRCLLSLEWGGSSVGNLLLPRLGPLCVACSRSTVRLFFFGGPDAHTPPCCCCPGGPLWVVVTAGGSSRSQGGVVLSSRPPGGLLLSSVRPLVVGGFLRGCACFARSSLSLRVGWSHMIYFLPAALCVIIIIVGGAIINYMRVGXASSTSGGGPQLVCSDAPQSIGGGDFXPSHSHGGCLLLASVFLLGAPSSPHLVLVRLPSRHNIGVSFVLSSGAASSSREEMARCGPSVLSCRNTRGGIIFCREDIVEKYGGGGPLGGAIWAPSHALSLGRIASPSRAIFSREYIAPLSREVEKILCVSLSRESLLWICLEMIYPHTLVEIVV

SEQ ID NO: 973485 - protein, 216 aa, Homo sapiens
  misc_feature (133)..(133): Xaa can be any naturally occurring amino acid
  misc_feature (154)..(154): Xaa can be any naturally occurring amino acid
GFPVARVPSGDPGSLGGGPCRIFFAAPKGAVCAVVYKGADRATKFPRGNLIPIFRSQQRGNVKWGAKRGKVCGGKPNLKRNREPWRASSPLGDSSTGSIEIFGRNKIHPHRAVYPHVAQGAPSPAGRSPVVTXPEKNPPGVGPTKGDERESAHXLERAFGAKNVNSADPQRMGVGPAMWVLIEKNFSLEFSTLSLTRGPPLGTLTLARHHTRVVPH

SEQ ID NO: 973486 - protein, 536 aa, Homo sapiens
  misc_feature (283)..(283): Xaa can be any naturally occurring amino acid
  misc_feature (392)..(392): Xaa can be any naturally occurring amino acid
NGFCRDSFVYEYSIVRACICRRTRSLKVGGALSEPLQVGGLSTTYSPRHTPVCVAPTRLRGDNREYGGVPRRWERLRSSIKRGPIYISPPHTGDAPQERRGVVFVARPVFGPPTGHHQIQLGAVAKPWGPHHGAHGGDPTCNHPGVVKDDPREKCVNLKVVVPQHLPHEAAAQREPTTEKVCVNPPALGVLSSHPGRGPSRDAHGPFDMGSHTAAFLTGGHTASTTSVAPPTGNPLVWRWHSHTPWRATKHFRATDLPWERHTPFVKGSFPPSCAPSGAITIXPKGVCTHTNTKTLAPLWVLPGRPLRFRHTPASPQGRSPTMGPRRNTPTRSCVTTLSRASTLPTHTGLAGDSLAAPSPTEGESRLVRSASTSRLETVPHAVRTRPLSLGXRDHGPPLFVLSRFTLFSCLSVPFPFHSHHTPRGARLGDEGPASARGRATLSWLPREAWDHSCLFLVGVFYGPPLLRVLGWGKPAAPEAPGLCWEGCEDESPGWRPRRCCSPRALRFFLTCSASLSDGCPPVIDLKDCHKCRVEV

SEQ ID NO: 973487 - protein, 255 aa, Homo sapiens
  misc_feature (71)..(71): Xaa can be any naturally occurring amino acid
MVGLVVYVLCMCVDCLWLVVLWLLCALSCAVCCWFCRDACICVCVCWCCVRAPSLLSLLVCFVSPARVPQXCYVCPLHSSPRSFVWGVFGQRKPTPHQPRTFFLRGGQPPPPVCVGGILVSAQGGVLLPQHQEVVGRPQDKIRPLTAVFLGCYKPAVPGRSSPCCILDLFTPGGSALIKRGKFPSRRRAPSWGGFVPAEKEFFSGAPPRRAPPPPHYVWSPPGKCAARSRNGSRGPPPKGGYRKGMKRPPPRINK

SEQ ID NO: 973488 - protein, 181 aa, Homo sapiens
MSGVVFCQQPAGDNFGGVVPPPLFASRMVVIYCGAGAPAPPPLYGGGLLRRYYDLPLLLPPPRWMMSVGHTPTFVGGRPLPCSGPPHNGENAFLRGVLFSYKGAAPTQQPTRGGRLPTIGRGRLLTNDFFLPPRSWRKQILVVLEAATGRRPPPHVWPRHNYYNSFLRGESLFSTTGGESL

SEQ ID NO: 973489 - protein, 222 aa, Homo sapiens
PDTHIGYLCGQGDSSIRYFEITSEAPVRHYALPGPFPRSPQRGLGYKPQRGPEVNTVGDLPGSTNCTSGGVSPIAQDQCLESRTLFPEDPVTPPHRRALTLPSRLRNAGGPDLGPSSISLKDGYVPPKSPGAEGPTGAMDHRAPEGQHPRPNGTSPARMPVSRLEEEMPEAPGPGAGAPEALGPAGGDHPGPVEPPRASHRVSPSHPSPHLPFPAPWPRKKS

SEQ ID NO: 973490 - protein, 466 aa, Homo sapiens
  misc_feature (281)..(281): Xaa can be any naturally occurring amino acid
VGRKPLVWEGGRGAPPRVVFRISSCPAGAPLCRGGCGWVGQHPHTSAHHLLGLFLLSGGRPPPPGVSAPHTTVVLVEEGAPTCPRRKEGPPAVVFLLATSSNVGARRGPNVGSAQQPQHGVDDHQDVLLFLLGRRPPLLVRRPPPLHLAAAAWSPRPNIGVVARDPPPLWVEGRLRELVPPTWGEEAPPSWVAPLWAFSSCGGCVTAPLWGEEHKRRPYNASPTGFAEDTPSPREWRHASRGDEAQEGPPSAWGAATNSLAPTSLGWARHTGVRPCERLSXHTREKCGAAPQEAQDDTGVSPRCVSRDTLTHSTALSHTHTHSALTTEDLKGLSLGTQREMGRSAHTQRERKGENTPLTHTLTETPQAARDTHRLETRCALSTLPTATLGAPLALFCNALNLTLAQALRATSLLSLFRPRTHLPTHRKESPLCFATPTNPLSADTLVPSAPTQTWYPAFRALVPPH

SEQ ID NO: 973491 - protein, 130 aa, Homo sapiens
  misc_feature (31)..(31): Xaa can be any naturally occurring amino acid
  misc_feature (53)..(53): Xaa can be any naturally occurring amino acid
  misc_feature (130)..(130): Xaa can be any naturally occurring amino acid
MRRIEKWATHTRGDTHTCARHAFPRDERVPXLSSREGRNERELRFFATRRRKXEIIGYRRVSISWKNLWPSVIRVAPLGLPTSHSLSRVAPLSPLASPLLVVYVFFSLSLSLVLKAPVNYKGVQAPIPFX

SEQ ID NO: 973492 - protein, 204 aa, Homo sapiens
  misc_feature (91)..(91): Xaa can be any naturally occurring amino acid
PRGVHRGDPTLGAPTWHNGSRRPCGVLAPLLRHAVSPRVALTRTSGRAPQPPVAHTRARVDPLAWSRPTPSVHSQRDFARGPHTRCAQTSXGASGHTHQTPDGHRAPHRGILSDGPMSALSSAERPFPCPRPPHAHTAERRPELSLLAASSRPWPREGFFCGMGPGHAALSSSRAGPPTSRPPTPRQPGRGREETRPPPRRTQK

SEQ ID NO: 973493 - protein, 108 aa, Homo sapiens
  misc_feature (76)..(76): Xaa can be any naturally occurring amino acid
AHSVWCPLYGLWAPLALGSPPLGLGCYTSSGGIYFSWGGAPHGCDYHQSVSVLGQSCVNHPAICLVGPQELFSYNXCLFFAHRTLNIVHLSTTGVYIYFILHGSVIRE

SEQ ID NO: 973494 - protein, 269 aa, Homo sapiens
CGVSCVVGGEKYVVVWYVLFVPALLCRPPWVVCRAPARVWFVCGRVRVGGGPRRRLPPPVRCFLYNEVDHYSTVFRWICLSPALCVRWWGYGSALYAGALATVFEYGVFCFCVGGPQLFFLVITAFLLVVSVFCCQPLVFRPSTYWLLVLGRKRQGGVSPCEGSPADPSLGCLLSPPPPQSRRVGCFFVSFCVEGGGGTNKHRRGGWLVASYFWGEGRRIWLSTFPPPPAGGGVAPPPPSCFNLLLVLLMEKRGSSLSHHRLVVGDKHN

SEQ ID NO: 973495 - protein, 141 aa, Homo sapiens
  misc_feature (52)..(52): Xaa can be any naturally occurring amino acid
MLYLGKIKELTFRIPMKRQAIKKERRAEAFCPAEPWNSTLPLEKRSGYRHCXPNVEEALYVNTRPQGRQSVYGDKNTFLQEKARFLFDHLIYEGQCALKNWPSTALAATHIAHTTCTANPREGHTHGWGRACLCEVLFLPV

SEQ ID NO: 973496 - protein, 204 aa, Homo sapiens
RRLGLFPPFHAHVGPLSLAPGTFHGVLGGLEELSGEPHFRPHFTRYPRSPSTGVEDPPPLGYLRCLAPREGTSAVFAPLSPTPTGAPTLGESYIYSRVALSTESSRENVALFRLLLLSPKATPRHYPEVEGGVQASLPGMLCSGYSHTHTLGQTEDPSPYLAMRLIRLCPPFALEELNRSGRAPRRLFGLWTPPECVGQGIWAK

SEQ ID NO: 973497 - protein, 136 aa, Homo sapiens
FFLLTCPRFYFAPPPEPPSLIFPPLLFDNDPTTWVPTPSLLFSPPRRGILLRMFYPPPWWRLSVAPAAWPLAPKRVVYTPPKETLFVFFFSGEFSLSEDMAPLFSRPRFFLIPLTRVYIPPLSHMWHTTEFFLSRA

SEQ ID NO: 973498 - protein, 201 aa, Homo sapiens
  misc_feature (166)..(166): Xaa can be any naturally occurring amino acid
MIVCPPVGECVWAAPVCSFLPLRCEPTWPPGSTQEVVGVPSSPGEFSSPGREIVCDTPLRCPQRSFFFGGRFNPPLGGAGCLVWRPTQVEPQHVVCSPRGNLLEEAPPRRPPTRKVVCVVFLFLVCVAPPRLCFFGASPSRPQGYWSVQPPVSCASIRCSSPPCLXPSVGNPPKAWVPPKGLFGRTPLAGLIYVSTPRLGR

SEQ ID NO: 973499 - protein, 202 aa, Homo sapiens
MLLPPGPPMLVCFLAPHVLVLSPLGSPLSKSLGGGRPTRGGGFGGCRLLSADVVWVPAFWGPPTRCALVWTPAEVYNCPPKGSALRSLSVCFWWNPPLVGPPKYTAGRRFVVGAPQGPPPYWIVVLSVPPLAGLPAWRFPPGDPLCLGGPPTSALVSRVRCTACWPPPTLSGDPQRHHTPPQGERHLSVIDTLGGACYKNWV

SEQ ID NO: 973500 - protein, 100 aa, Homo sapiens
MLAHYTLRQQYHTRLFEESRPPKNTHRVCNTPRSPLLYGNVHDPVTIVTHTGRECRPLLSQTVRFNVLKVTKAAGPQNPVSRNFEAGHRPPPPHEIKLFS

SEQ ID NO: 973501 - protein, 141 aa, Homo sapiens
QAPNFSRPAYSPPVIWIAHPRRPPCAKAQFAEDCIGTRIVSPRSWYKKPGQYGPYNSLRSSLVDSSPLLEYWFPGQPPMCVEELSHDYSTLLGPLVWFRDIEDHDHACRVGVTPKPRGPKKAGWSSAKVTPVCPRKLHEAL

SEQ ID NO: 973502 - protein, 170 aa, Homo sapiens
  misc_feature (10)..(10): Xaa can be any naturally occurring amino acid
  misc_feature (16)..(16): Xaa can be any naturally occurring amino acid
  misc_feature (34)..(34): Xaa can be any naturally occurring amino acid
  misc_feature (77)..(77): Xaa can be any naturally occurring amino acid
  misc_feature (85)..(85): Xaa can be any naturally occurring amino acid
  misc_feature (102)..(102): Xaa can be any naturally occurring amino acid
  misc_feature (105)..(105): Xaa can be any naturally occurring amino acid
  misc_feature (129)..(129): Xaa can be any naturally occurring amino acid
  misc_feature (133)..(133): Xaa can be any naturally occurring amino acid
  misc_feature (143)..(143): Xaa can be any naturally occurring amino acid
  misc_feature (150)..(150): Xaa can be any naturally occurring amino acid
  misc_feature (166)..(166): Xaa can be any naturally occurring amino acid
MYIMTTDLAXAHQAAXLLEEMVLVSLMVEILCSXLIRRGGAACSQQRNPSPAVWLMLVGWSSLTARLSFRAQRRACXEITVSPTXHGLIGKTRTSLCCPPVXFDXTSEMSVALVGRTGDNHTRLRVAPXLYLXRCLEEVSGEXPGCVATXYTPPSVENCDRSTFFXKFNM

SEQ ID NO: 973503 - protein, 94 aa, Homo sapiens
  misc_feature (80)..(80): Xaa can be any naturally occurring amino acid
PGKSNFAQIRALPRIFPKTIRPTSHEFVFILTTLSHPLWLKPTTRVKSFNPAGKWTTPSTPKGVYRENEAPYVSTPTLEXLPHPSPLHQQRRDK

SEQ ID NO: 973504 - protein, 233 aa, Homo sapiens
PHHWMLDPWSDGKELPQVVWAEGLRARLRVLFQYRPLEAGLTPDILIPPEGIPRLGPNTVTQVDRDTILVSFERCVRIVNKQGEPTATLAPELTFDFPLETVVACTDRVLAFWSPGMPGRSLDTHEVTPEITDETRIFRVLGPTRDIILESIPPDNPRGAQQPLHPHGPPEHLLRARGPVTGLPAPPHALAAGPFGPRGPLLGHSLPFCSTIPFYSFCPEPAPAHLSWENPGI

SEQ ID NO: 973505 - protein, 167 aa, Homo sapiens
  misc_feature (109)..(109): Xaa can be any naturally occurring amino acid
CAPHGSMFTCLRKWETVTPGVSETSSCPGKTPLFRKCPLSSPSCPPAEDVYDSVVDPWGLDDLFSSPGSLMLPALSPRLRDVVCALGLTVGLVGIHYWDPSSINPGIAXSQCQPDPGGLCLGHLEVMVFLREKIPERNFCFNGFTKLAILPSLTSSEARHLQPFPAL

SEQ ID NO: 973506 - protein, 442 aa, Homo sapiens
  misc_feature (327)..(327): Xaa can be any naturally occurring amino acid
  misc_feature (333)..(333): Xaa can be any naturally occurring amino acid
  misc_feature (350)..(350): Xaa can be any naturally occurring amino acid
  misc_feature (357)..(357): Xaa can be any naturally occurring amino acid
LSFLWAFSSPPPPHQRCGRLLYNFVVSPHHGICELWIYIAPVVHNSCLFSATSVVSFFGAYALSLRPPKQVLWAVRIGGAPPPLGFWCLGAPRGGMEDRLRPPVCVSLEVSPFYKHPRAGAFEMCFRSPQQGASHHNQTGSPQLVRPLRVCAGVGVAPPSRQPPLVSLGPLLYHPFWGGVTTGGAPNATNGAAFVLLGGLFSFRPHEEKIWRVSMEVPPVPPPSFLVVKPPRPLRKSFVGYAPRLPPSSAHQSGTTCVGKHNKVGCVVICCWWVVRIFPSFPPHYWFFAEESLERRYCPPVSHPLSRGSLSPVVCASVHSPLAHPQXGGTHTXRGAQHTTVCSVCVSALXCGGPRCXVDTHVDPPRGGSETLSVFLTPLRSCLEKLFEVPRPSCCLVGSLLVARCSLALLLRKSSRAGSTKCTTWKLSTPTNCFFTKWRGLP

SEQ ID NO: 973507 - protein, 213 aa, Homo sapiens
  misc_feature (137)..(137): Xaa can be any naturally occurring amino acid
  misc_feature (147)..(147): Xaa can be any naturally occurring amino acid
  misc_feature (170)..(170): Xaa can be any naturally occurring amino acid
MGCVALSPGFLKSHLGKTILGAPNKKSSSLGEGFFLVCSLWGKPLSREGHTERPSINSPLVEFFLELCALGDGVPTTPRGAPPRLYYTITNTPVEHTLRALWAAPHTLGCVAPHRTHTAGFGVLGATYQGVKNHMLXPRGRPNTLSXIKRLGPPYKRGPLASRPHAEATXVENPTRMRILAHPPPTSSRDHERVWKPRAALPLPHSHSLHTTH

SEQ ID NO: 973508 - protein, 255 aa, Homo sapiens
PHLGGPPHLSFLLWGPHCRPIQYFSLGDPPFVIKGPRLGAPPVWVKPLPRELLPRFGPPCEGISPLSRPALSTMGPAAPICATAHSGEIGFPRGVLETHNFEREKEIMPPLVRAPPAVVFDQAPFLLLLWGGPPHPHLEHGAHLFLEFWVLSEAHRSLPLSPESTDMRHTWETNEFITHTGRRNLEFLGTAKEEPRTLGFEEYSFSSREGAPSPKWAKPSIRARFSNGHFLPSPSCLHLPFQGDGGPLRELHPLE

SEQ ID NO: 973509 - protein, 321 aa, Homo sapiens
  misc_feature (136)..(136): Xaa can be any naturally occurring amino acid
MEAGLSPPTKVRSFKRRIIISGVENYYCWAPTQRCQHDNSAPMVENTQMWDAPRVPHRSTHHGGPTTATSSSWGATCVTHSSQHRKYRQHTCCDTREEGSCARTKGDTSHNAEEFVGVYTHTHTLSDMLSHHIGGXTTSLVLSVRRFLAPQLSERLSGGVSLRRLLSENISMCVPREHTLETTRVFSHPRRLSVEYTAYEAHRALNPQDSPRPAHPRYHTGARVGAHFPLVRATVGKIFVFKPHALPSENPPALHTHSPRGDPTLGWVAPSLLSPSLPPGDLGAFVHTQFLSPHLSAYPPPPKELFFLPPHPPINPPRFWE

SEQ ID NO: 973510 - protein, 165 aa, Homo sapiens
MSRAPRPTDRGPPRVKMCVVVFHTTKRPNSRRGRPPPREERDVSLVVGRACFVDPQSFPPRLTLLSLALAHSRLSAPPLFLSPRRAHAATPSSHFYHSCRLSAREFGGARREKKERRALSHLLESYSALSLGEEPAETSPRWRHTARPLSSLYSTPLLSLAATLS

SEQ ID NO: 973511 - protein, 107 aa, Homo sapiens
MHGAFSPSWWLVSICPLCLVRAASPLSPLRAPLRVFSSALLLVGALFLPLWGPRGGHKVPPLEIRFSRGYSPLWGDKEVILKMESNRVRNKNHSGVLRVSILGDFPH

SEQ ID NO: 973512 - protein, 141 aa, Homo sapiens
MEITHPRGCVHTSATKKENGLNAETVHGEEIHKATLFINGEEPQARPAPHMLENTPRLKGKGLRWLELNTAPRGGPTLTGCHAFFTCTFIFPRRELTRSKEGHREKALPPELQVEGHPSTPAREEAEVAKKTWANLFKPKN

SEQ ID NO: 973513 - protein, 211 aa, Homo sapiens
MTHVEGAVVCVWGREGSARPLNRGVTRAPTTPVVGWLKPLRAPHSVCPSGGEPVLYHTGAHTQRGRHTSYPHALLSRALLKEGPPPVGRAPLCVVSFPTPRVLRLHALLILLWGENVERFFCVPNIRYTHMGPIYGTHIYVRLFDTHMRIPHTAHTCGRHTQKGTQLWWCPAGDTRWVCLREVWAPVGDSSRHTLRVCGRHTVGEGPRGHT

SEQ ID NO: 973514 - protein, 407 aa, Homo sapiens
MSSFACFIIYLPSRGENYMLVRPCFWVVFCHHTTKCGWSSLLLLLDVIFLYGGIHKRFGWWGRPQNKRGVPPRTSLLGHNTSDDVGATTQIGPALPPRSGGGVLHTCEGAAADTPTQGKNNSIGVVLTEGAPPAECSVTSLCLLFLQQSLFFKGDSPPPTFMMISSSPEGGAPTKMCGKYSLVRVWIVRPQLCVPEETLGRTHKKSGGTPPIRGSAHTRVCGTQWCSHTRFVSPLFFLASGGCVSNSHHTEVFCDQQHGDRRSVSHTPPEKCLLDNSHTEREIFSAICPRVPLERVVPAHSVCATVCVSVYSTECVAYTHTLCVRTSQERSTLLIHSQPGEHTTRFPWPLFSLENPGGKPSSQLLCRKGSKASFWGKNHTLASCGCCPSWLLPHHQAASCCLLQAPR

SEQ ID NO: 973515 - protein, 210 aa, Homo sapiens
  misc_feature (94)..(94): Xaa can be any naturally occurring amino acid
MRCALCVARDGRALHRGPRTAVDIHSGHGECRLSVDSPRGRTTAHTRVSVSVLHTHTRLRARCETAARTRARARGRCRAQRAAHSTALCGGRGXQRHARRVYSCAHTQHTHHTDARARRARAPVCALVSPPHTTRKPPHARGSHTTARGASARGSVTGVGGPTTNTHSHRSSRRPHHRRDKRWGGGGARTPPPGGPPPVCGGRCVCVSPH

SEQ ID NO: 973516 - protein, 102 aa, Homo sapiens
  misc_feature (6)..(6): Xaa can be any naturally occurring amino acid
MCAEIXVKRIAPLAHERYIYREMYITPKYPGPLLHPRPRGWRGKSPETTYGVQNKKHVPSTLSQEPTPDCQKHATGDRGSHPSPPDQDNLGWPNGAPERPGS

SEQ ID NO: 973517 - protein, 76 aa, Homo sapiens
VSARLCFHAVCCAGYLDAFFFGGCAICSCRLPLFVVRLSLRLVVKKVVFSPPGCLSLVGVLYDKAPRPPAWRLYRA

SEQ ID NO: 973518 - protein, 128 aa, Homo sapiens
CLGACYFVRVYVLARPVVSLIFAHWGSQHTHILSDFPSRVHRGGGPRAAPLLWPSGCWGNPAPRVFLLGRFFRATWIHSPGDPGGFSGAPVVIAGGHPRGPTEEPPPGGAVFPVKGQITPGEGLNGKL

SEQ ID NO: 973519 - protein, 131 aa, Homo sapiens
  misc_feature (88)..(88): Xaa can be any naturally occurring amino acid
MGTSNLCTPPSKSGFEYFPQRGNSSHFLRFLLEGVVPTMLPTVVLFSHRVGLTHTLVCNPRNPHLLITSNGYPNESWPLSVEDRITPXPTLAEKKVQGLFLAKSTLASCGCCPRGCCHTTTLLLLLLHAPR

SEQ ID NO: 973520 - protein, 125 aa, Homo sapiens
CGGRTTPHVLGCDRIRKEDSGLLIGRTDQCVLFTAQEGRVLLQQKVIEHRTSKVVGVVAATAQRVARLLVWPPPSRHHRCFTGRALSVYLWVRGKKSSGRKIPRGLVEEKKEMWAATHTGCSVEC

SEQ ID NO: 973521 - protein, 246 aa, Homo sapiens
CSQQTRRYVSSQTQSRSGRVRSASSSAQSTRCLRPRLLLSESACCGACMLPCRVFITRTLGDVFCPSSVWSWADIASVSCGGQHKGWGVAPSPPLGVCCCVWPPPPGDRYSILGGHILVRAPHMLLQPAPVLRRPLQCCPRSVGVDYNLCPVARCVTVVVLAVCCEEQVLFTRLCERRPTGYLMDCDHQEYWWAFFVAPFSRGPKCIYRFPPGGAHSTPRGGPKNPPFVRIVWAEPQKPPYKPGLG

SEQ ID NO: 973522 - protein, 128 aa, Homo sapiens
MSHPPVWGVPLLVWFPLELFERPTTHSFDRVGWVQSPQRHSGDPTEKGWPRESLWPKGCHTHKCLGPPRNKVPREGYKMEIILVPLILTLAHPPPCLNVTVWLERDRVSSKRTRVCCSQLAPHLNRFM

SEQ ID NO: 973523 - protein, 134 aa, Homo sapiens
MEGNTLWFCVSVFSVLFVVCYSINKPPPAHLLRYISREEPFFICALWRAPPQRSPPNISPEKRRDVCVKNYRSPEERCHRAQNELVKERWVSIKWRFHRRTHIVEKNTIGKGCSTLFLFLFFHMRGFLVETRLK

SEQ ID NO: 973524 - protein, 249 aa, Homo sapiens
AGYCVDRPPQVVLLTIFYCVSRGPPRLFLCGPVSTHGGWLRSPRRAPSLLVGPPIVAGVGARGYPPSQRALCSEGSFMVRPPPLSGRETNISGEPSLSVYTHNTNICFFKNILYPNARLWAPAPHTRGALTRALRVEILLMAHSLGERTTAACAAGSFTRSVSHSESVSRDPTLSRGSNTHARRNTHAVCLVVSDNSVTHKLVWAAAPLCVWTARPSPLACLRAISLAERVSRGHRENNRACVHLAERV

SEQ ID NO: 973525 - protein, 171 aa, Homo sapiens
MSSTVGWTVCCSPLLWGVFSGSSELFRGVLFLCPAPPQCLHRVVAEVACLLQHPTHPLGARAIVPFHWGAHLVLLFWDHLALPGPFDLCVFSLSLFAVALFARAVGPRVCVRRPFHTRFVFGRFFARGRPPTKGGGRSGHGGFPTSRDTLWVAPDTPADRYQRCPTVGRTP

SEQ ID NO: 973526 - protein, 241 aa, Homo sapiens
MSSVGRFSHMDATALCVEHHACAIPGPFPGVLGSFFSFHGAPGCAPPPGGLSAFGRPPLLGSPHIGGAPGSHLSRDSLPPRPLLSPPHGVFRVEHRNPREGPPQEMVNTSPRSFASHFAPLGGLAPPLGPHSRKTTVSCTARGDNREFWLNGVLQNRLGKYLSHPLIHEYHRTPWCTPVSTLAARVSFHQRGESRGGVFFHPSSFLPLFHHTTLPSATLFPKGGASGNTSATYILDPTPVL

SEQ ID NO: 973527 - protein, 333 aa, Homo sapiens
VVCFRGPHFGLYVRPPARFLLPAHTAFGVSLGEDIWDSTAPRSDLEPSRYSTGVTGHGALGGWLCRPPLFAVRPLEATLGPTLAAGPTGRDIPPLWGHEDFFLFTRWGPPELINPSWSLTRLCFSLQAGEVMWVLFNGARSCLVPPCVVPLSHTAPEVNCATGVRTHPHLLTLPRGEPLVGETPTPRVFTTLEGTGPLLEKPPGNPRVVSTTHGGYTPRATGKHTAPGPIALSPRPRYKHTPLPQSRASPRITPPCHKPCLAHTTHGFTRCTVHRKGPEKEALYSVALTDLTKPFWATWSTFPGTHVTEATAGEPCGMSPQKPLACPHVEKGI

SEQ ID NO: 973528 - protein, 113 aa, Homo sapiens
GECAAVSLASLRCCISPSESNQDRGVRDPLTLVGDSAGGWHQTAASFFEPRRAPLIFSPRFNWCSAAAFVGEQLFCGQPGAEGTAAPHQRPVRLARKRTTARFLFLANRAALQ

SEQ ID NO: 973529 - protein, 139 aa, Homo sapiens
EGSPAEAPQEFSLPRTHLRAHTRHTNRSAEKPQTHREGGMHFRRACVGRVNLVERRAHSLSLCVFSPLPLLVSSLALISTEKEILRTPPQRGEAQHPQRVASALRSTDHAHFGRNLALFLSQGSAWRAQLLCTAPQPGD

SEQ ID NO: 973530 - protein, 321 aa, Homo sapiens
MGGSTVGIIVVRLVGGKAPHIIWASPSLVRTARFSISRCMKRRGCITSGEDHRWVKRENPPGCWLCCWGACGELCGVPTHQRHHGDFFFLEGAPTHEGSLGPKQMVGRRMAPTRRQEDGPAGFVWMDDKRFSFGDYERRSYNRHDEGCNATGVFVLVGGGAASCATGGSLQEGAALSLRPTLLCAARPPVWSSLTVVATVERGPPAGCALRGRVFVWGHTALGETQRAHTRNRVSGRHTRNREDTHWGTDTKRPLGGAPTLCVRALSGCHTHRGALERCPHARSGGHTKGREPQMSPLCLSRHSHARHSLSTTHQRVSTRT

SEQ ID NO: 973531 - protein, 151 aa, Homo sapiens
RTPFGPMRPTLRVLALCFLPFRRSTLDLHRDGEGPKLRTLSFVGDPDLAGDRTFQKWATWWCLLEKSRDTHAMYSMRGCRSPFYPENGSRLFPVPPSPHRGPLFAWPGCLQPDCGLSETVVAAVIVLERKKLQVAPNRAEEAIYLQRCVSA

SEQ ID NO: 973532 - protein, 117 aa, Homo sapiens
GGRIICWCDINIIDVCSLTVVRRQLTRTQKYEPTSGGLYDDFVSHSTPVWLCDDLCLVHQRVGSSPKSIVGGPQSIIVRFRSRHPLRQWVGFCNNPNSMGGRRRISLCFILNSALQI

SEQ ID NO: 973533 - protein, 119 aa, Homo sapiens
  misc_feature (53)..(53): Xaa can be any naturally occurring amino acid
MNGEVLHTTYGCCCGHRTDKYNPTGGFCWSMKKTWNLGARHRGVLPLFYSPRXSSLLIRGLITWKSALIYVVIAPLKNFSGTPEWGEPPLGNDPLNERNVCELPPYIETTLPGSLSPHL

SEQ ID NO: 973534 - protein, 228 aa, Homo sapiens
  misc_feature (56)..(56): Xaa can be any naturally occurring amino acid
  misc_feature (93)..(93): Xaa can be any naturally occurring amino acid
  misc_feature (117)..(117): Xaa can be any naturally occurring amino acid
MGWRPTHEGFPYEPLSCIRGRRPGGGPHFWRVLGAHNRNFWGGRLNMCERPSPTPXGPPTFQRGLAPPLPPHVICAYRATPCSCPTSLSARCXAVFPSRESPIRGHHTVRHCSHLAXLIESLYCHDSVWVFSGESVVVDTAGPLRQRVTRASVWATNSALGGAPPQETHTPRESPPPSVDSPTHHRHSCLSGAPRERDLRGTQRFVVYYSAWATHSGSRELSRAVCWV

SEQ ID NO: 973535 - protein, 169 aa, Homo sapiens
MEKVSHEPTPRVYTLHEENHKMVHIEWSLHPRGEGRPRCSIDHEKFAEKNYGPQMYPEPPPRNVNFFGKFGIHENSHFGGGTRHNWALAHEFIEISLEINAQEKNENPNTYDSAKNTWPVMKKEKRASQEKHTKRKRTETENEENQQGELHKGHNVGAGQKTEGVKVLP

SEQ ID NO: 973536 - protein, 159 aa, Homo sapiens
WFPPRESCVCFPSTPGGCVEGRAFFSALQRVPPAVLAGYSTVACSCSVPVFVYNQARKAFCWVGSEFLRVLVRGRVCLWDKGLVTIHGGSSFFSYRGGDLSPGAIVLVVMWWVLPPLSGGALRGGAHSVLCVGLFGVVFFRAPGGYISSLGGSSLGRRE

SEQ ID NO: 973537 - protein, 163 aa, Homo sapiens
MVNTRDRLTPLPALVVNHTEFFSSCRFYVGTHLRPSPPKRTHTHTEGDSLTPQMGCLIVGCDNLWASGGGFLPHIAVRAPHCLPCNHTPWGESQVLWISVTFFTQREISWKREIEKERPRLLLGESASAPKGGIFQGEEDMLSRSWRFHMRTPHDLEVRQNMV

SEQ ID NO: 973538 - protein, 151 aa, Homo sapiens
  misc_feature (44)..(44): Xaa can be any naturally occurring amino acid
MEKVIHAHSTGPTRRVCHNTHFSPRLCLSRKSLYTHQRPHGLSXGTHKDSRLGALSLGRPFTTRHTRECFAGVSTGSFLVSFTEHTHRVEKRHPLVCGETTAGYSLTPPRNGVNFTFTPSTKVRNFSNTCEKGHTEFHHFAGDTQGSPTGA

SEQ ID NO: 973539 - protein, 186 aa, Homo sapiens
  misc_feature (32)..(32): Xaa can be any naturally occurring amino acid
MILPYWAPQEFACGCFSQPRRLNRMPLTPVAXWTDPPPRCVPPAAVPQKRWCVHAKKREGVAERLRVGVTPRGAPPHRRGIGGNAARVSETTTIISWGGGQHIWVGTEERVAHKCLLLTGAVSYPPEFFQWGSRFSSTGGHILGGPHNTPLVWGRLLNILCRHDTHSGWPHPFGGSLLTRAHVAVC

SEQ ID NO: 973540 - protein, 109 aa, Homo sapiens
MAVGCRPCRRVYEKKGLVKLIVRYARVELACSSHTREPTVWVGEDCCGKRLRLFGAERDIVPRRPDPLFHRLNLVYDSGVLREEFVFTLLVGCLSAGEFGTAFFRLKGF

SEQ ID NO: 973541 - protein, 121 aa, Homo sapiens
MFHMSLSLFPWALRDTPLSGDTHICQRAHFTEGHHRGSRGHRIGHRTPLHIGESPTGAPGTHRHTQGLFTQWRGHTRTGAPWGLESHRFFRVVFTGTADIAHLCCLVLLCVIVCVVFVGVF

SEQ ID NO: 973542 - protein, 98 aa, Homo sapiens
MPQWRHNYISGRKWEMLSPHKRIDRLETAREKREVATQEELYGAIVIDVNARGVSYARIKALIVLAISINKNFLDFIRLQALSGLEGTPLLKHMDFAT

SEQ ID NO: 973543 - protein, 148 aa, Homo sapiens
  misc_feature (83)..(83): Xaa can be any naturally occurring amino acid
  misc_feature (130)..(130): Xaa can be any naturally occurring amino acid
MLPLVGGKPYFHPGGKFPTGRFSPGASAHYGESLALPISTGGPPRDLVSHKRPLFSLGREICLWLWSPLIGERALWALSESSXRESGEVAASGEWGEVREDHLEISYKYPQLFPLLEKFACTELCSLYKXREEWKFLSRMRRSHNPHF

SEQ ID NO: 973544 - protein, 119 aa, Homo sapiens
  misc_feature (1)..(1): Xaa can be any naturally occurring amino acid
XQLRSGDEYTTSYGLLSIVARAAHTRRGWFREYAVALPQTTEGSPECCKKAVSAKGGAVASGLPPQMGSTWSPQGNKGAIRLVFVKEGEVTSPPPSIGDEVPLPRAPAGSTKQSEEGRS

SEQ ID NO: 973545 - protein, 103 aa, Homo sapiens
FKAFGKFETGCAQLFCLLGAPQWWSGCARQAFVSNWQHTPRKQHGVLVKMLNHSWCKPPFSLLSRHHCVPSFAVPTHFWVCCWGCLVFTTAQKLGGAKEVVWS

SEQ ID NO: 973546 - protein, 215 aa, Homo sapiens
SPMLGEKQVRSRTGGGHPPTQKGGGGQETSSKPDVLGVVQRTTRGAQGSPGVGKTCPPQSGGGDTPYSSDLLSLFIYAPPSSPPPGSKGEWFPTKHWPYTIGPRVVSTHNSWAGLNSTTTFGGGASPPRRGVGYRGDTPRCYPFIGDTEAGINKKEPLLKEGGPYNRVEYSTNICSSCGGFSAGYNRVGDVEQRREGFFTPLVRGFSHRESVPTL

SEQ ID NO: 973547 - protein, 233 aa, Homo sapiens
MNTPPACLYNISQRLSEPRQRSGETQSHADSLWRVPRLCTHLVACPSFLFPRATSLVREVLCTQRALIGRGCWRLRPSPPLGLSHRSLSLSHSVCVWLREVGRSCVSHCVPLACTLSTHPLTTLLPAPLGSPLLGATPSLKFERHRRNSLHTPHGFSTENFHRPRTPTESVELGEWVSPHSLLHAQPSSLLHRRGWKFPRVNALPLPQLLGFQEDKGTFPLGTAFNLAILIWF

SEQ ID NO: 973548 - protein, 449 aa, Homo sapiens
  misc_feature (137)..(137): Xaa can be any naturally occurring amino acid
  misc_feature (278)..(278): Xaa can be any naturally occurring amino acid
  misc_feature (321)..(321): Xaa can be any naturally occurring amino acid
MCDFCSRGEDPTHRLGGGPPTSSSDENTTLGGVFFFFWRGPPHLLQGGEFVHPPPGRVVVVKHHKAGGPPPTKGVVLLPSSSWGGGRLTGRVSTNVGSEEILWGACMMRMNDTDAALVGTLPPRIVGGERYTHFSQXEEYFSSSTSSSGRERLYIIYESSAREELNLERRVISSRPEKEMRGCSRGVIITAHTHYSSRATRWLFSTTTTPSVCAAAPRWRDTHSHQRESLTQESCLVSQHNRETLLRRHTLHDTLSLLLYSNNLEIISLTHSHCGTPXSMVKGGTHKRCSRTFTQRNTQNTHVLHSHIFCSLTHSGRTRAXSTLSREYCVSSLVVIRWERGPQQCFLNTLAQRFIREHRCRKSYVCISRPPGFVGDHTRDTRCVLRVERPPQRGHTQRAESINTSLGVTQTLSFTVKSILLWLKEETTQDPWGKTLDTQTRRFFGWEEK

SEQ ID NO: 973549 - protein, 210 aa, Homo sapiens
MRVGVFGGSPTPAHHPPEMGWVTNLVGDRPPRPPHWGGEKHTLGRSFPCSPLLCGAPPRVGETRGVSPTQQRVGHHSRRVAPTRVAPPPTLSRTPHTVGNRHTPHWFCVEYLWCAPHCGGLHKECVRRLSHTLYPTPPLPHTLWVCALCVWRDTLCAPHSVTHRERVSVCGHTGWRVTHTLHTLPSLVMRGPRAFLSSGDHTHSVGDPLR

SEQ ID NO: 973550 - protein, 207 aa, Homo sapiens
  misc_feature (95)..(95): Xaa can be any naturally occurring amino acid
MWWRRTTVLAHTQCCERNLVRTRRARVYMCGLLFLFVCVFCGVFVFVCVCCGLLRPPTAEIFIKNICGDPRCKKGGHTAHTSRLGEARQLLPSKXVSHTHGVPRERDLLRLHHSLGLVFCYNKGPQFSHNNERDAVCLPQEKFPLATSPIIATSHRSSFIREEMCATGLSLLHKFSHTHRGEVNKHTCVSGENIMDNAKIFLNLSRP

SEQ ID NO: 973551 - protein, 394 aa, Homo sapiens
  misc_feature (305)..(305): Xaa can be any naturally occurring amino acid
MSTECKEWRHLGKAGRKRAGSQRKRAKSRAPLEGPPAPLVFSFKHPGTRQTRGKNAPKETVEFLGRPRNTAPQGDTRRAHKWGIGAPPLPLGSIEPFFKEPLDKAQMFSGFFFSVGVKRLAPLPFLSGKNVRVFLEGPTVLIQSSRGTFGTQEEFPDVLGLFCLLLGPPKPAPGGKEVLSRLFTQLAWRSLKRDTRTPGGPPQSISHFPPRIPQRLGVFATFKKKKFAHIKMEIFVSPTEEHEPPLFQTVETPGGHVFSQKTPDVKELEEDKMGALFSGAEIASPLSLLRRGELLYPCVPCLLAXKGLLGEQKLGNLFSVVEIFATNFLNQERVDTETLSPEALGLCTFNLNTVPCSAPTHPPQSPTAQPSHTRPRERESVRRLGMTYKIGNVI

SEQ ID NO: 973552 - protein, 148 aa, Homo sapiens
  misc_feature (28)..(28): Xaa can be any naturally occurring amino acid
  misc_feature (108)..(108): Xaa can be any naturally occurring amino acid
MSRQSPPRCVGCGARDHTHTDGGGFFLXGRRHRLMLWRERCSWGRWCPPPPRGFGAPAEDLPPGAFGFGITAARPPLPLVPFYFARGALFKEVLSRERPLVGGGARKXLWRPGGREDIVRAGRYSSRRAVWDAGRSIPHERRETPDAL

SEQ ID NO: 973553 - protein, 130 aa, Homo sapiens
MFVADICECLLCVERQHNGARAYTTCLHCRCAFLHGVQMGAVSRRAATAVLTLMWRVQREPSAWATTLTGTPHFSTRSPADLFLTPADVREETRELPTPPLALVFLWCPSGRDCGMIKPPRGHALVGFGL

SEQ ID NO: 973554 - protein, 220 aa, Homo sapiens
  misc_feature (147)..(147): Xaa can be any naturally occurring amino acid
MCNVCGDRLLFQRGTPTVWRKEIALGTFPPWPCWVLWWSLGHTYESFYISPHSHKVSHPGLRAPDALETTAATHSSHSRASHATPRREWEIHRFYMNIPLEITPAANTVAPAGSSPKKMWHAHFHAPPRLSAQPILLRGDKARVGKXSTATATERSPRTTETCDPLKPTGILTLVGPPSVTPSAVSFSRSHFWNEVSRPPLSRNARAQEPPHGWSDSDVG

SEQ ID NO: 973555 - protein, 352 aa, Homo sapiens
  misc_feature (339)..(339): Xaa can be any naturally occurring amino acid
GCLPSAASLACCFVSLFPPARLLGFAACLSLPSPSLPLRGVLDVCFYQHMFAGGSPCRPLVWVFPPRGSSFSPPGVFPPAFCNPFVLAPLYFRGYLAPVLAFPGRHPSDRGDGLFRPASFWGQTQWPDVCTRNPRVPVWLVVITLLVHPRSSQSEPPVLRRGPRTPWRVEMEPLPAPGPGTTLPPPPVAAPPLPAGELLAEFIATSLLLLGGPIEPHRATLYMAPLLLSLFPKVHLRPSVGVTTASSASLPSAPPPPLVLHHIATAPLPTRPPSAHKCPTGVYAKPPPYTCLVVSRRWRISSPLCVPSATFLRPLRRSTLGKVLAFPPTLFVSTYLLLXLVVPHTTGKAGNF

SEQ ID NO: 973556 - protein, 110 aa, Homo sapiens
MYFCGVFLALLGYMTHRSPPPLLTARSLACYIFPPPQRRTSYSPQRHRGVFRDMAPLHSPYYTGDRYIWSSTQYIAPHIVGYETRHTLRTYIAHTISSRILCPRTVTPPW

SEQ ID NO: 973557 - protein, 108 aa, Homo sapiens
MRTFFVRWGEPQMMGRFPKMCQKRIVWSVSKRGKCFCFWLREKHISCGLVPPPLSKWCCPHPKLGEAKSWCFSILWLPQGLSLFSLGPNSPGRPNIMARPGVSCPPPG

SEQ ID NO: 973558 - protein, 184 aa, Homo sapiens
LLWMSFVSLVLVLFLVGGCLPLVGRRWFLILVGSVFYSGFALLCALGFLVWDVFRVLFFLGSPVVIFLCVILGDSLVMSLFSRVSPRGVFFWCLFLSPRVSSGGLLLRCVFPALFVVEFLRVFGGDCIFFILGWFFSLKGGVLLEAPLCFVECSSFDTALLVRLKCAPTPKIVVLLCSLVCFFY

SEQ ID NO: 973559 - protein, 110 aa, Homo sapiens
MSTLCFSLVDVVVFARSLVCGLPCMFVCCYVGLLESLLFFCCSSPPRMVVLFLGAIYVAPSLFCPHSGGVPILPVCLFAALYFGCVTTFAGGGIVISSTPLCYYNTFSVI

SEQ ID NO: 973560 - protein, 171 aa, Homo sapiens
ADVPAPFAGIIRFIVVRHRFPSPVSTGCCVTAQCVLWGPLSHEVLRIQSGVISPPGAECSGSYPGGHPPGRLGDPLSHTLGREAPSREASRCPGLVCYFYRELLWGAPLGCGDSLRQHVGTWAPHLGGNPGFSHGRWGKRPNLGVLFLGLVTRGDKISGTPVYNGETWEKL

SEQ ID NO: 973561 - protein, 100 aa, Homo sapiens
APNSVGFSVLCYGVGACSFWFVAAPLDIVCTCFYPGGYLETPGFMNYWVKIPSCACPDYLSSDGFYTGALCTTLCIKLGIYPPLWKMLCPHIYGPQIVLK

SEQ ID NO: 973562 - protein, 237 aa, Homo sapiens
SWCLMVEPISWAPWRHIVAKPVLLGPKVVVVRCEGHHTYFGQIFTRNQIEVTWLSSPKRYGHPTLSEGPYHTSGPPQPQLLLGVAVREVYAAPPNSTRRPQAAFWTASPKCFERHFPPGLFDPRDKAEMVVSSLPSKVRGVLKPTHKKVCLIWGALAHRGLAVRVPRHVTRHTLERRKRKRGKAQESTYPEKKETTLMRLRKPAEKNAGEENVTQLPPRSLQTPGLLVLSPIKTVNS

SEQ ID NO: 973563 - protein, 188 aa, Homo sapiens
LAFVVWCFVSLVDVVMLLPHAVLCVFVSLFRGVCVLLVVAAFAVLARCVVLVVARLLPSWVGLLPGFCGVLPPLLPPLIAGDHFWFGQGSDFFPKNVVSQQWFPHMLAQEVFPGGSSLMGLLVLLWEKLCAPLGHNICCVIWYARLFRLYSRHMLSHQGAMYTRVFAKGLVAQNCSPVVPFQALPLRF

SEQ ID NO: 973564 - protein, 145 aa, Homo sapiens
MFASCGDVHQCVADKGGIILPPLSRFVDRSPPRQCYGTLCKLPHCVESSLFCASRPPFFPGSSRYHIPMPWLFLCLSCLEGLGAGKPPGGRREAKHPGVKNPAVWSSNSWSQDPPFLWAPNEAPPVMSYMSAPPLFKVRRPPPPL

SEQ ID NO: 973565 - protein, 457 aa, Homo sapiens
WFVPTLAQLLFVPGVVYIFLFCVSCEWCLPSSPARWVLLSRLLLMCVAPALCSVARFVFARSVLLVCVDARSVVLRGPPGVWGPSVPYFCCVSRRCDFLSCARYLSTPPRVCFQGGGNPPTVRSPLPSCSCDPIAVVAQTPIRGAPGGNPTPRGPCALGGAPCDHPACPVHDNVCVGLLLKPVWSRHNRERAQRFLVVNRRLGNFSWCHSCPRPVGLSGEDFGGALNLVWAYLPNRVGAMGHACVVNPGGEASISPFEILPPICSRPLTPLRYVWIFSWRCKGPKVTPLVVVSASHGALHSPHPVSKEDVMCEHPLEHWFFPRTTWKGPGNLSGTPPFSWKEMLACLVGMGTTCYTGCDQREFCPTVSPTNFLWTTRAREHSCFEVHTPPIPSFLENHGKVVDGLGEGHFNKGPRHTKHGPCLPPRPPFSGSFNPRLVLKVPQNVLLLSLLRLRAVS

SEQ ID NO: 973566 - protein, 479 aa, Homo sapiens
  misc_feature (344)..(344): Xaa can be any naturally occurring amino acid
HLQLVNHSVCVCWGAYSPTTTSLFSLSWMIVLLSSSLSPARGFADTKVGWCSWWSAVSLVVSHRRWKTLRVCLLYTTPPAVVWGGSPLLGPRTQYRRVVTHRGGRLNNLPGARRMAPARREPFVRGGKPFSFPTRGGHTKYGGALYNKCFTKKMGGPLVYNGDVFFVPWGTKTAFALGCRRRPPRDVEAPPAIWERTTAWGLIQHSIQRCEVLVRVGNPMSQGARTILGPPRFIAPPVNLGVWAQHTRGRHTPHVALAQRFFFLETLYKAYIRQTLEFSARLFLRVYTRLSCKRMGPAERCVFEKFLGLEMSSPHIGLNIWGFPSGTRAPHRCVFEREPFSPRXLYAHPLWGSPCCRCGFLGEIYERTHRAHSVCRACGCVHMHRSHSCEHTQRRGLFCERLVPKVLPPRGLARPRERLHEKGYKWRYLFPLIYTSPHRHTLSIIHSWWEKNRVSPQRHSLCVHNWPHLKSLGSKKDWL

SEQ ID NO: 973567 - protein, 114 aa, Homo sapiens
TDVFSVLQPHAVCCFRCCGGAPPHSPRVVDKLRAARPVLPYMWMPSGVICYLSHWGWRVYYSLPTNRYGWGSNTFVLIPRGRPSSRGLLSLRLWVSPPILLLLVGRLFRVCVFC

SEQ ID NO: 973568 - protein, 118 aa, Homo sapiens
MATLWKFHQEDICRQMCKPLDKFVRPITFREPGDFPYNNGDSGHPNCLSCYPVPVGVRNLVYRGKGTPIFFQPRGVPQVHPPVGVLVDVPRVFRDPTLNVPPFKTAWCDPRNFAREMV

SEQ ID NO: 973569 - protein, 411 aa, Homo sapiens
MLPLACRGATVNSVGLPPPSITRAFSGRRPWVIIRARLISALWSGSCGLRSPPSLCSSLPPSAFCRFRHTCTVCAARVFVCAPRSPPCNGFYVVRCLHNHCARSSGTTTGGGWPTCRAIWCVGDHRGLFPVVGVILYWPPVSGTHLGGLVLLQSEVRDISSPALSPQFVGQKKFSGTESSTQHKWEEIDYKRHEGWCARPAAKCVSTARTTNFSGKEESLWEKEVHSRRLRLFVEGLPTPPIWVPKHHSDSYIVVGPLVLYIHRRGKYVVEGEIVVRPLLSLWRDGTHNMGEECTNTTVGAHRNFRTHMGIPGDKVGGDISLRHHMAPQSPTVIWFADTRVWPHRYIWVPPTSGRYTIRLWYGEPVWREKRGGPTPTSPSHRDLSHENWVGRKYTYTRTVVVHTHTVGPPV

SEQ ID NO: 973570 - protein, 270 aa, Homo sapiens
  misc_feature (41)..(41): Xaa can be any naturally occurring amino acid
MSLQEKKGFLRYNIENVGKNATTPGHNNDSRNNNLYTRNNXVEGKEPRFLVQRPRETPHKGAPRQKVVATIFGNEGFSLKRRVFLWFVFLEKMEKISLALEIFAPREIGIGKDVRTVLERKFSQKLGYYLVKEIDVPRGCKKTRPRDINMCTLGANRDICYTPGAHTKMMGVPTEGAPQKIRAQHPHRIWEDSPPVRKVPKKTLPRVGVYNFACLVSGFSSGLGFFTCIINPPTQFSDIPGEELSLMAFTHPNTRWSRPKISREKRRYEL

SEQ ID NO: 973571 - protein, 403 aa, Homo sapiens
SCPPPPVDLYFPRRSLIRGFYPQGPLWVGRKIFAAHRRCVRGKFRGCSYTKSAHYVVPPREPWRVFCWPTKIVYSWWSPPPPGGGPPLFGGKILSQLFVRPPRRRCINCVFFAPENIIGAFSGGPQYTLCKGSLLRGAHTKLVSPLGPPNDVSRYKGPSSPGGDLLLFDTRLLIVRGDGSSPRGRVLCFSRKRARAPASRGLCDVGAALLGATDHYCVGVCPLVRLERAAQQDMERVLWGEENNYLFWGPSLEKNIKESDILSSQGEDEIAALCHKRRTRRCALFTNWGSFVAHKMSHIPHPRCRAWLLGYPRHGAHYIHTRVSRTQTHDGGCKTIPLLSSLVFPPCVFPRKTHSTFLLLSLLPTTGWPPTAAAAVRREEIFPERGHTRVGHGASENARERRD

SEQ ID NO: 973572 - protein, 482 aa, Homo sapiens
WGCAVQTIVGFVVCVALEHAVVVGSWVSRVLCCVPHHSGGPPLRSAAGGVRPFEEVVSCWGLGAPFCCGLVGPLLPLSWWCSLPPPPAANIWGGGLSYLYGGGSTLTGGVPSLGGVPQPDFVGPRLVGGSVVLAVCVAHPASSSLPRVDTGGLLFFRGVAHWGCLFPPPGEWCASLGGCWWGLPTDGRLCHRRHFASGADHIWVGLYLPCFLLEGGRNVVHTWGGPRGVGPTRVVFSRRPLLAHTRGRPPARRHTGLFVRARAPSFSRAPRARAPQSDPLSGRHSSSLSVGDMLAPSTEGFFQTEAGARLSPLFQHTLCSLPLCVCPSLRGGDTHGCAPRVRSTAHTRACGLLLVCVSLRYPRPTHSTSCVCGCAAGRLLPADEPPPPPRVVLLRSSSSVEYYPSAHAVLYYSAGATLLRVSARGGQREGSSEETRRRECVPPTVLCPQRHRELRESTLSLEKRHDSRAQRAREALGSVSNW

SEQ ID NO: 973573 - protein, 215 aa, Homo sapiens
MWAACRCHQLIFVLVVLIGFFKYTPPMGERVGRLHFIPGGDTHYYGGTNQLLFSTHPIWCFDFPHTTWFVINSGCVTTPLEEVFGRTPAPVRQWVVIETIVAVVSMKRKKAECGVQQNQVGQKDETHNGPNLCGDFWVKGTSMAHPEAERPIRRATANERALLGNGPPLPEGYLLALIAPPGRIFPGNSSIRMALYNGCLPKGLFGQRVYLPGVL

SEQ ID NO: 973574 - protein, 224 aa, Homo sapiens
MFGGGRVSPHPPLLLPPRWGAPLRPLVILSAALVCGPPPPWGSACVVVCPLWPPPFSGGHPPVWPTRVFLFWPPLPGGTPEGHPRAPKEPRSWGPRLLSQTLSPPAIVCPSASPRGGGGTPPVYTLLCTPPVLCGESCESGWGALSMGAPGRPPCAPPGVVLLCVFAPTTCVFSLSLGSLPSASPPRRPGVAPSFGAPTQRPLPRRLGESLKMCAPPTPPPQCV

SEQ ID NO: 973575 - protein, 114 aa, Homo sapiens
MLAGGNQAPPGGETLSPWGPTKGSGPSPVVENNAYTCGKRHNKHYSGGFLGREVLFTHRGHSTRRKVLNSPMKGGEPSCVGDMLRAPYRRAPSTVPPCGDGATHTKNPIPLGGS

SEQ ID NO: 973576 - protein, 115 aa, Homo sapiens
MWRERTGRNKLPPCHRVHGHNAREIFFRCFEPQELFRVLSPMVVLNLTTPFGGLLRFHRERPHPLSRDHRMGKHTPHPRWNKWCVTLGHEIFWWLEILIRTWRICWVILSLFLFL

SEQ ID NO: 973577 - protein, 443 aa, Homo sapiens
DDTIVCGAPWCPVVGTCGSSAAPFCPAGVLLPPGCYLGATCPLAPYLGAPHYHRGCAGARPRWIAVCPPRRVLCERPPLCLCAPGEPEELGGKDIFSHCGRHTGRTGGPSSGEVFSLGGKHTKVLLSPPPLFRGTRRVLPPGMSPRMWARHTGVFEPRRDPSMGTPPRGRGGHPPGEPPGKPSCVGAHAADLSLVSPTRAPLHARGIAPPRPCGRPRDGDHVFVSRRAPNSGWAADPFALLLPLSLAERPSLYLCGHTPTEIFSRTPSDVTLCHRWDTHLTPTAPRGGEWCGVWRGHASVWVFTLCVWNFCDPPDGLGTWKYRPPEPLSGVSLFRLYIGLFSPERLSPSGICVLARFQKPNVDPGLMEEVLEYNTWLKTAQGGEPLPQHHIVGDTSPGRPREKRQERPATGQLTREGPRSLSPTPGRPTQNATPRHATPTRFV

SEQ ID NO: 973578 - protein, 69 aa, Homo sapiens
LVRSAVTVVVLSVRRLRKFCACRPLILAVVFAGDVSPPAPLLFCRVAVSSAPAVATFVLPPAALLPGCE

SEQ ID NO: 973579 - protein, 308 aa, Homo sapiens
LPVVRLCCCVSLVGEQDKQEKDYEQQTSCEILYVIARYVRHTLASPLDVEGRAVTYYASYCYVLLYAPDIYPLPIPLAGVVVERQHDAWVLLRFHVCVSACFALVLPREGRFSFLCEKLILLLCGWRPVLCELLVFCRPLVGVSPPPFAPPLCEICVLWRKRWWGQKYGGGYQQHDERCMLRTSRLSVLGPHNPSRGWVAPPVYLYWLLPLAICVASFELLFFAHIYINIAVRFFGREVVHLRGRTKGSRSIDGACVRWTDQNLVVLTTTTQGCCCLSSATFEPPWGGEPTTECCVHHKDIVRCCVAE

SEQ ID NO: 973580 - protein, 453 aa, Homo sapiens
  misc_feature (223)..(223): Xaa can be any naturally occurring amino acid
  misc_feature (360)..(360): Xaa can be any naturally occurring amino acid
MCACLCIGSLLRLCICSPPLVWLWHQDRLCVVFWGATAFVLRPFRQGGVPHTTGVCSAEQVLLVVLLLNTLLSGPLSLDSVYPAVSLLQGVYFCEAAPFGGCGPDICFPRTRKALPETNYYVDVCGICPPGLTPKKVFGGPARFGVSEKGNPTCGIGIPIGCPPSCERGRDVSEMLSCLCCSPLPRALYYGGSFSKRGVPILWRCLLLFSSRGGGPTPFLFLXREVVRGFCGQRSFICRNKRWPSGDVSGTTRGGPTWRIRRAHTQGGFSKSRNIVCCPMISGGSSHTQMVAHTHSRVSRCGVYREGPPTQREVWRAPSRDTILPVWAHTHYPLWRTQRSVSTSRVSLPGVATQRGFILXWRGDNTQKFPRHKTPLTHTCVSPSLTTAEVDTHGAVFVAVSLCGVWYTARSLSSPHTHTGGDTLRTLFLRAHLGVRYRDTLCVHMICGVCISQ

SEQ ID NO: 973581 - protein, 109 aa, Homo sapiens
HHCLSCGPIYFRRGVFCPAAPDHNVRPMSLVVVDPPPVLLWVRFLHRERLVLVRFYYRGFLVAPSVGAFFYFVRFYFESDSFYCLRPTCGPHPRCGPHHAQRPTFWGPS

SEQ ID NO: 973582 - protein, 127 aa, Homo sapiens
MNAFSIFLRAREPGANVYTTGSPRNPLMAPPLPPMFPSPAPVNVAPGHTSLLPVNTLFNPPFAWSPPPSHFPLGNPHVAACPCCCHPFPPGTWGFCPQSSCPHLSASPPPQDYFSPQPPNKSPAFLV

SEQ ID NO: 973583 - protein, 214 aa, Homo sapiens
  misc_feature (203)..(203): Xaa can be any naturally occurring amino acid
VWLFVGFVFPPFVLSLRLVFAYLFVFVVLSSFAVFVVVYLLLFLFCVLCVGSPVFGVRVCCVCWLAPLCVFGLSFVFPICCVFSFRVGCDYHLFGSLVLSAASEVLVGVLVCCVCFAYGASSCLFVLLCLVLPVLLLFSALSGKYVCLFVCVGCCLCVDSCFVFVLCWWWCVVCVVGVCCCVVCVLGAPPALCGGVVRRALPXKFVKGRSATPA

SEQ ID NO: 973584 - protein, 198 aa, Homo sapiens
GAGAARVGCVTSESMLVCLFGLGCGAVSSVVLYVLGVWLALLLFVVRSDRLSLLAVCLLGLSSVRRVCLYRPRVGPCCSGGPTVGCHTARFLLAAPLYVVGFLCLCRLPLWAADFCRTRGVLLVGAGWLGVVAAFCTDLAWFFSLRDIRRLRVSLLVSENSWGPTNNLVGVRLGVKYRLILGRRHDDKAKHCASGKRC

SEQ ID NO: 973585 - protein, 522 aa, Homo sapiens
PACVSVSVGAVVLLLSIGVMVAVWGFCVSPLSLLCEWVTSSSQLCRRPPCVCRPYLCEVEGVLSLISFSRRPSAGTSTLVGGDPPLCGLFPLRVGTTVVLLVFLRRGIMMCWWRRSAVAALRLLPHQGVAPLGGGRRRFCFVMLRAQVYECDAKFGVGRHAWEGARSCFSSRHQTACMLMPLPSTEVILLLGDPARGGRLVVFEKACWCLRRRPPLWGGAPPSPHNVGLGGPQLFSISDRPGRPPVSDASGPPRFPQRQPLSLGDAHQGDFSLCVVYLLNPHPRGWWSPTPRETLVSHSGMDYFLCMMVIADYPLSHDVAALVVYTHTEMFFRSGRSYMCGDTTCGHTVPHMAHTHTHGGGSHTPRVGGFKMFVCECLWPLRRNFFVHTCRWHTTCSRVRTHTTWEGYMSVNLVTFTTEEFPERRIVKKRRPRACLSLRKRQCTQGGISRVNGLLPAPWSSHMLTSTLEVPQNMVCKVYQVPSVPILANSLLKNWSAQPAHGRLVSPAPHCSRPTEWVRTNP

SEQ ID NO: 973586 - protein, 108 aa, Homo sapiens
MFVRCCFAKFFIVRTDELCVSFTTGGEFSLLDGSPLTSRGGFVDLTLSLLSEELFGVQSIEHRGAYVVGVPCGVDAILVLMIGFGGVAIQGGHSTMMWNPRGSMGIFR

SEQ ID NO: 973587 - protein, 123 aa, Homo sapiens
MNVGGHPLGREFLIRGEKTLSLHTGKIYLVGKRSTRPLWGRNASRTGIHRASLWKHHGPTFNSHGPRKPSLTLLGKKRAWISCLPHTAPPLVKNISPSWFTPLVRQNVFSRGRNSRAHIGALD

SEQ ID NO: 973588 - protein, 257 aa, Homo sapiens
MTFVPVTDGGPVSHPALYVVFLVGRGGGYSGLTILVAGGVAFRPGGPAVSLTRRKYANLGLFFFPYRRRAWSDRPIGGGCTSPIEEGRNYSEGGRPPPVEQQRGGDRGMEACLGGRRHAPTAPNDKEAARGGRGAQKSAHARGERALERALEHTIGRPPHARIELCGGSTAGFFITRCSPTRAHPFEHIFSGSSRCAHSLEALSRESASTQQISRRRLTRGRPPREELPAEGAHTSSSERDPGVSQEALPQRGEEII

SEQ ID NO: 973589 - protein, 116 aa, Homo sapiens
MSPRACPQCAPTEKRRYLSPQREISQEIIYLFVCERVVITSHYLPYNAPTQVSLVEIYPPWSQTVCHNIRRCLSRDLLRLLNHKAPNGRATRSKFERENTRTGQTPWFFPGTAVLE

SEQ ID NO: 973590 - protein, 231 aa, Homo sapiens
CRPSPGWSDLSQGNCATIYSEGTPQLIVKAPPEEPLREGSSDPPPMWGTPAFFGIDVLIIEVSRVAPNGGVTRKELAHPFGLVCSPCHQHHDPGCLPLGFPFTKMRSVYAPHSPIQPVVIPENGSLVEIRNFLGVKNTLPTGSDETPVVAWSNVILQPREDDINPSEGNDPWSLFPIPAALIQPAPNRLKPRISGNFWMVSMSLKKELFSPADEYRSKSYPGYRKKIPDDP

SEQ ID NO: 973591 - protein, 157 aa, Homo sapiens
MVSCFYHSDSILCMSLLRHSMVMVHHYKKEIFSRVFFVGVDRQIYIYLFVVLWSHPPTWWVFVSVHSIIVCVWCGVCLLPPGVGGSSAPCLRSFVSVGWLSASLHGTCCIRCLVVVLDRLSFFIIDVWRGGGSTHPHSCGGWCGAGPASLHLRLACF

SEQ ID NO: 973592 - protein, 116 aa, Homo sapiens
LVGHAFLLGGVCLAVVLPGFRVFCCARLRFACVLAAFAGCVAVYQFVVCGCSRGGGFACLGGSVVGQVVHCLCRPGFWAPGAQFLFAALVLTRVAVGACASVLSVVRDCRVLVWVF

SEQ ID NO: 973593 - protein, 179 aa, Homo sapiens
VAVGVCVVGSDALRRRLVVFVVLLTYDVLLCLGWCCLLLLSSRCLLWVRWWYEIFPVLSPVVVGVGVVWSVQCALPGSFLCALPCVAVCPSLGGCVVPRVGVSLLLFRPVWWVCAYSGLMCGAAFSPGFLRGRQGGPLLRLVCVSIYIAGVHIGDITSQGAPSSGRRACRVGSCTFWSF

SEQ ID NO: 973594 - protein, 316 aa, Homo sapiens
PLVSPGATGVGLALLSSLGVCIFSVSLPPACKAFFGALGLCPWCAPSGCGGHISICWFLRNRKYVYRAAPWGNLILTPTVPLPSRSPRGPTLRGLGISTLGEVGPDGRGTCLRTWEKLVPCPFRVAISGPWRVFPRLPGLLLGCPSDCKRRVKRPRYPLLMIRTPETPLIGPERCAFPLKVSCPFLLAFWARARPRPPSQGPWDPALLLGFQPAFSHRRITHGPGGAEAPASPPAARAQIPGHRLTGPPFCPLFPALTPRPCLPPLSLCPHVHDHRPEAQAVATHPSRSFCCCKRLPWRPPWEALAETHWFAYTLY

SEQ ID NO: 973595 - protein, 233 aa, Homo sapiens
MLGCPTSALMGVVSNRRFFLLDEVCVCLNSVVPRTLWGVYIFGGMIFGVVLVGPPPAPMGVRPPSRSCAMAPLARDESLGEYNAPLFRGRKRDCVPLCEAVDILEYFTPPREFCRGHSRVDLIFLGPLGVGEVCTSVSPLRVLYNACPRGLEVCFLGELSFLERARGQRTQLCVLCLGRGSCVRGVGKVPETSWGTPLCTLLCNWEVLLGPETPVGCDLAFEVENRFAIYSPV

SEQ ID NO: 973596 - protein, 134 aa, Homo sapiens
MCVSHICFCAAHISRVVIIVAVDACCIHTSARTHMCSNLSLFVRLSLCVCVTPRDLSLSLSHRDISLFLCVVRRERALWRTLCTEGVWRAAAYTPQLPTSARRVGPSPLIGELSRHREGEHQEGPRELRPQKEG

SEQ ID NO: 973597 - protein, 122 aa, Homo sapiens
  misc_feature (37)..(37): Xaa can be any naturally occurring amino acid
  misc_feature (89)..(89): Xaa can be any naturally occurring amino acid
  misc_feature (91)..(91): Xaa can be any naturally occurring amino acid
MKLGEYSLTTRPHCVNKRGLFEHLAAFSGKIFWDISXQHQKGALLCHIWCPPRGALCKKHPHTRVSPHSFWGPRVWQHSASVLSLLSLXVXGISLGVSHSLNDSWVLLCVVLSGCTTHTWVK

SEQ ID NO: 973598 - protein, 122 aa, Homo sapiens
MHDIFREKALYTGERALHPSRGVKPSRIRIEENVKATDPRIRKEFLPDPPRDSYSLLASTLEDGRYSCLTDHIPKEFTSSFSVLRLRGGVLEKDSKIVLTPLPQIVIKPQRKKVIAGCPEIL

SEQ ID NO: 973599 - protein, 271 aa, Homo sapiens
  misc_feature (266)..(266): Xaa can be any naturally occurring amino acid
MGCSVCREQLRLWWVPRGGAPSFPTSCGGTLGVSHTLSSVARVYCASLVGAWSVVEYISLCADRCDGFLPRFRPRQCAPWGGELRPPRGAPHCKHVGDQAPPWKSLFCPTTTKSCVTKDVGLFSGVLNLIWILFFGVPTGAFWAPRDNQFSLSHVPTGTMLGPTPRECCKELFPQCCHSGENTSGVPREGTPCVSAQAPHCGPPIWGWVFPHGWRVTSSVGHTLRFGYTVSPPREPLSTGPLAVVAPARHPPRECLTHFCPFHMCXWRSPP

SEQ ID NO: 973600 - protein, 113 aa, Homo sapiens
VVPRRCTSGCGWCSGGVAVVGAPAFWVVLGGLLSSVERCVCSGKSPPLFATVVGAPRQPAPGVTGVPACFRVLLSASRLLVDSPGCLLPVCCGRPPVKEYWRTFLHALGRSRR

SEQ ID NO: 973601 - protein, 218 aa, Homo sapiens
VRPSAKLCLVWVLVRVLLSPPRASSVVGVRSFHFGFYLVVVSVFGGRGLCLSCERGVVLLCGRYGVLCFSSRCWRVVSSPLLFFLFVDGFALSPSLLLLLLEVRARGVRGGGILPPLRGGGRARIGERAAWLSASWGWCAPLCGDTPTHALTRRLCFLTRDGSLACDTLSCSVSSLLLLLRALGSLSLSPRCVVSSHRRAWCGVASRRWAVVSLSRVR

SEQ ID NO: 973602 - protein, 57 aa, Homo sapiens
  misc_feature (8)..(8): Xaa can be any naturally occurring amino acid
MIGEKFFXGTKLLVYHLPLTSRGTLIMESFGAPFFFGKYPAPPPPNIEEMKPFKREK

SEQ ID NO: 973603 - protein, 242 aa, Homo sapiens
MSLVTCAPPTTALPRRCLLCCPVQGLSIARPCPHCCHRPCIRALSHCRTPRCLGLLVSCTPLWDHRSTIPKSGITSRVDPLSRSRGPSCPPILPHLCTTRGLRFPRRVRPKVYDTSPRFLTLLTHASNHTRVPRTYGLHWTENVDGTHGRMGLSLITPRAPRAGHTAELSSPLQPLALAFLCLFYLQAEATLFPFSQHHSPRREPMFSTHNPFCRPLVPSAPTQLVISFSGPWFTFELKVVI

SEQ ID NO: 973604 - protein, 424 aa, Homo sapiens
MGWCMFVFVAVCLRRWVDRSYFSLVVCVLPPVCILVPPRARMCCWVRDVSTGRSVKCPVVFYSHYFVEGRFVRVSLYECFFRPRRLSLLGGCPLHHGGFPPSRRSFLWWEPGGGSSRLVKGQLCDSQDGNFCCTGRMRPPAVLLLIVYTSAGPKKMFVMGSGVMSRVYVRRPPPGVVVSAGRTPRPTWNWVPLKRPFSRDDYSPPREEWESSFALDRTLPPFGVKGLMESANNTPLFVPKPPHTTRLGEGPPRRGDATTFVGKYIEARQYIIVFPWFRCGIMATPHYSRIFLARIPPDSLSQRSGPHSRFFLVHERPTFVKKALCGPTRGPPNTNKDVLANRVLSHTREFGPPPREDFAHQTFGRSRRILIQQERLVGAHHTGATHGLETRLPQRVRTWVKTHPQCETHCSPKDLGQNFLPVPN

SEQ ID NO: 973605 - protein, 142 aa, Homo sapiens
MCGGLSRPLLTAGLFSVPEVLLRGPPVRHYRAPPRPPRNALVFLTGEVSHCHRRCLRVCPILCAWPQWWRFIYCVGRNNREDYLWRPPTTGTKYIAHSTHPSSSHVATGPLSSGGHLLRVEINTAAPFRRRKYNKTMLASLL

SEQ ID NO: 973606 - protein, 146 aa, Homo sapiens
  misc_feature (49)..(49): Xaa can be any naturally occurring amino acid
MVTALSREGTTGPPRREGHPRGTHTWWPRCFYTHETTAWGVPRLFVGVXGVSAVFSHTTPHSVFLPGALSASSTPLCSFPLPLAGAPSKCVGGHPTRALSLASLTPTLPTPAAHAGSNPTTGWRERATLLEIFGCCKERLGGFHKW

SEQ ID NO: 973607 - protein, 148 aa, Homo sapiens
MSSFDCVSCGLGALWVAGMCVLMFRSYTSMWYYTRVWVTHVDAAVVPTSVGSANAAGRCDRCSRPPFGRRPVLQGVAEVTLGVWSYVFVVARGAHSTTSHVAGGGATVATKLLLLVSELGVGPYNRGRPLKVEKELGVDPPLFVRKEK

SEQ ID NO: 973608 - protein, 111 aa, Homo sapiens
MRAVSPALFVDNGSPLGYITGCCCRSCGCPAVLLYAGACRWGLLWRGVSTSVTPTGPLGPALLAGVYSTAGGVRMWAPPKVITSLRGPYTSMMRNTHGGLFFGPSGLAIIL

SEQ ID NO: 973609 - protein, 436 aa, Homo sapiens
  misc_feature (1)..(1): Xaa can be any naturally occurring amino acid
  misc_feature (229)..(229): Xaa can be any naturally occurring amino acid
XLLNVMLRFRVVFRSLFCVVFARRGVCCFVTYASAVFLVARIIDEVVVCSSLVCELFIRLGLIVWCVVRWGGGVLHEWSLIRLGVVSARVSLFPSLAFMLLVSTRGSYIRVMFRCTWSALNTCRLRVASLLSTLFFLGALWMGVSCVRPVCHDGLPRCRNGGSHLVCRSSWFLRWKWLRPLVCPTTVFRPLLLMGASNPARGFVVPKLVLTPVCAWGLFRGADYSPSFXRVFSGKLRESLLLKGWQHTNLWPRALVEIGNVPLLSRGCVHTPCLNQPWGTAAPSHKMGVYRERPSSVVFHKRGPTTLGGPRGKHSSSLGLLALYTGRWLSHAGCPSFRRGFLVPRLPLGGHSSWEKDPLCIRCVHPLSVAYFPPRVCPSRVSPPCLYRPISPLFPQYFSADTHTLFSRLPRGCPPTRCCVTPRPSFARGRVSAHPS

SEQ ID NO: 973610 - protein, 502 aa, Homo sapiens
  misc_feature (267)..(267): Xaa can be any naturally occurring amino acid
VVMSCPRCVRGCSFPSVGGWAGGVLSDVCSLPLLFSFGFNIHWAVVDVLAPRGRVVVLPLALLTVGPPSCLFPVLLVPCLTGAQCKYHRAALLCVSLPLSVCLWSLVGGVWGTCFVAVCIVLVLESVSSSRSFVFRSHPRRVSPHRCVYERSGDPLLQVRWSTISVHARVDRHHYFGAEVYIFLVVELIESLSVVRVVVVCDHNKTNYHYLNYTMALHPYHSGANNSPPRDPCGGCTHYYSQRRLLYHGVFDAAMWALNGATVSYEXFVPQLHFCWSTTGGSTGHYSPEGVPHGSTHIQATTPTIVAILVIKGTILGPTKNRWGPPTFYRGGRFSTSNDLYLYVTLCGSLYTVTLSLCAQHAVYSRGGGRMFWIRDCNIVIDLCFVWNMKPGTTLGRVPTRGCAHSHRVFFGANNTRRRHNRRLHHSPLVAAGFSALAYIRSKFQPRIETQRGAPQALNHLAALLRSAIYGANRDHEDGHPNSRTKHEDNRPFSNRKILCVS

SEQ ID NO: 973611 - protein, 127 aa, Homo sapiens
  misc_feature (23)..(23): Xaa can be any naturally occurring amino acid
  misc_feature (73)..(73): Xaa can be any naturally occurring amino acid
LRSTTATVDLVAYMCCRSSLYIXWYARSLRSVIERFAVVVIPPGRCFSGLVSLFMAELYLSSCRRVVWVLSLXWEGRRSSYLVLYCVRVTTYWGAHNLSVCFPLLVAPLTLLYIKTERSVWLRIIFL

SEQ ID NO: 973612 - protein, 398 aa, Homo sapiens
RGCRVVGCAVCRCLAGRWSVSQRGPYVELVSVTVLLRLFASGRLWLCAVVFAAPRVGVLVLMVCVILGAHGASPLRGFAGFTGVLVSYSFFLVPRLFSGEVEFSLPAGVSPPFVVTDYFGVMFSGLFCGALGRDLLRPELFGVLLSLRGPSPWRVWSGRQSSPSHVLLPTGIRLFGVLGFGAFLGAAVSAAGVCHALMVNACWPPRPRKGRPCEPRNEPWFVVGTTRWHECSVTPGRHVQVPQWCLWNGTHGRITKLLGFLCLHPDRVVSVIVKTWTPSPESLGGMPGEVDPAPTLNGEHVLQILPKNWGTHTQPWHTVSGPHLWEWKATRSWILAPGSIAPLTGGSGGLLLLGASIILVGMGHPSHATREEPRKEFSTRYLAHKTRVLLTISPGKEH

SEQ ID NO: 973613 - protein, 102 aa, Homo sapiens
MRDPPGVFGRRPYDPPQRLLETTHGGFSGRHHEKYLWPNVCGWGICSVFLPGTSCGRNQRGCFLHRPTGLFFIPSLIHMAPTTLVVRAQHPRPLGVYYSPLV

SEQ ID NO: 973614 - protein, 355 aa, Homo sapiens
CVAVCVGLFLWLFVLVGALLFVCVVCWFVLFGGGWGVWVGWGGGGVCGVGVVVWVVWGGVGGGGALNTPWVNHQPCWAPLEPRVSPVSKNQACDSPPRTCAGPYSYLALCGANFATEVCRLGESCCCFSCPRRSMPPIGSAPLRLWPPFQLKVRRVPTRDLNPGVWPELYLAKEVFEKTQRAPVPRGPRPTWATVWDYGFAVVHLPEVPQAWPYTGPDGLHPGHDADWNHDGRSDQEALGTGLLKLSPLWGMRPLPGSSMRANPGWEGGSSVTCEARPCAGTCVRTLAGACGFRGLYPVWPSWTAREHVRRKVLCTHSCANVRDLRLAQTGCLHTGRATPVHWQAFPGTSARCSP

SEQ ID NO: 973615 - protein, 129 aa, Homo sapiens
PVHAVVYVPFEPLPPCATLPRSGPDWKEEVVTLENLHRGLHSKPPAYYGQLPQVPRTAGPSPLYHGPSTTPCVHPGPPTHLGSLLGKDPRHGGHAPRVDHMGEMTAPCEGPSRAATNTLLPSVYHPHLL

SEQ ID NO: 973616 - protein, 247 aa, Homo sapiens
MRGLSAGSTVLEPRARVWPLGDALAAFRGARCGGSSDARCVAQLAGRSRSFQKALGGSHAAPDFLAVTDPWTSSRPDTVCFRIVRFWIPARVDVRGHWCPYWEDHQSALIFQRRPPQVDISPRTQLTSTHWADPGGPARRWSRLKPEPGFATLSTGVFRRPPLSSPLWNPMNGKEGFLEMFLRYSHPETGMYLLFQHPCCLGKRAFEKNLGTRPSFLFGGEDDSRMPLPELKASTQKGEEFRERALK

SEQ ID NO: 973617 - protein, 531 aa, Homo sapiens
  misc_feature (425)..(425): Xaa can be any naturally occurring amino acid
MKEECASFCAVVVLVYRVCSYQVRGVLLARGGGQYFSYHVVPRRGCLRVACVFNTCFVGQRVQGTNTPGVTPWGLVVNRVLRLVCLLSVCHKPNRWGSPSVHLYRPRRLPPVVVGPELMSSVATIVGASPFGGDEKTCCAPVVLPPLCLVGARFLSRVAIQGVLPPREGNPSVCAPLTLFGDCEKAWGGEIIGCDMVHLRCPSKWKGRFGSHELSVTPRPARLCCTVTPWAPPGAPPPLVVIASGPPTRVRTPLARSASRGVFSNAGPPVPLPTRGVLRASSSRGVFLCRTYVFSCRVRTNLRTQKGATRLGALPTRARNVLYTPSVSQCVLHGDSYPFARARTARPLAQHVEHMGREYSCEKMISHARSRERDLEGTPTERVMVSHSCAALSLWGTPVSYTPADHTLSGSVPCVVWRECLTGYXGVSSPPEHHDLAPLWDLSDLTTTLVCTPGPSWGTPRERSRHERLRSPRHVESCSIGHSGGHSPPQSAGKPPLQCTDKTPVFRGFSLSYLAHELALYSTPVKEIGAH

SEQ ID NO: 973618 - protein, 231 aa, Homo sapiens
MLVAVGVLFVTACFCFVCVMSVVPLSLLAFVGVECLVCSSVACIVHYLWQGAGFFCYRVRFFSTPFFCSWRMFLVLRASFLWPPSCFHASPFCVMVWRRASSLLGQGSVVYASNTRGCFSAGADRTHHPMVLFAGALCSPLSWLCPVESGCFPLPFLGSLPPLPPSWGCCSYGFPLSPRLPLLRGVPRNMVNSSAVWWEFSLWGLPTLPLWGPRPPRGPRTPRVPPAAKND

SEQ ID NO: 973619 - protein, 261 aa, Homo sapiens
MPCSEVRGRVDWQALCFVVSDRAGSVDGCPAEFEQLPACCVGNHTTTVLVGAAPFYEISAGGPPTTRGCARHKRKQQRRCGFDDRRPPPWLIVVSRAGRLIKGLAEGRPLGALAAGEFLAPTQHGGAPLALLLVCEMRPSEAPPPKGCFVLCGATPPRFVVSRPRCFSVGESLSLPPAGDPPPRLHYGGAPTRVFSSLRRGPPCGELMSATEVVYAASSCMKRHSIVGSSPLLPERGAPTTAASLVFVAGRDTDSLLRRRL

SEQ ID NO: 973620 - protein, 136 aa, Homo sapiens
  misc_feature (1)..(1): Xaa can be any naturally occurring amino acid
XVCQRPGFMLFKEYTCGLLFVNTGAHVFTAFFLLGFPQGWSPTPRVVCANHLFYDVVSPHSPTGGPTPIGGARKKDRPPGVCDPRIGFPPPGVVPLLLPIAAPSFVLFGVFPTVVAGTTPNWLLMWVGTQTGESAR

SEQ ID NO: 973621 - protein, 143 aa, Homo sapiens
  misc_feature (138)..(138): Xaa can be any naturally occurring amino acid
MSLLSAGALYSLLDDTLLCLSGTLVCLSPPERALLSLSHTLWRHTPRRRGHLGAAAREERVISARGARERPHTLGGTLSLSLSLERYSHPCSPRRETHPQHRERERERESILAGEGGPQREGALRGRGHHPLHPPRCXSECPL

SEQ ID NO: 973622 - protein, 104 aa, Homo sapiens
MIVSVVCSLLLLVCLCCLSSLHVGCLVVSPPASWCVSSSPLPLPLVVVGGSDSLTVGLLHTYGGCSPPPPLVLWLGSCPSPFLGRGVFLQQCSPESGASQSYGV

SEQ ID NO: 973623 - protein, 523 aa, Homo sapiens
  misc_feature (10)..(10): Xaa can be any naturally occurring amino acid
TALCVCDVCXCRSSGIYVFVCSCCFWCCRVLVGRSLWRRFVYLPHASGLLSLRGGVVSYSGGGFACPTTHPAHRVLFASVLPSLYRVIIKVVGSPPSWWFSLCDRLVSLRGYYTRGFPSSPPRGGDTPPLLEGFCGVVLSHRTHHVRVPDDMCCCPPPQLWWNGPPPPPLCCSLTRGPRCVMGSNPYFFWWGNFWCAPHTQKAAKMVHPTSRYWRAPSLFGRPAPLLFSVACLPRRHPKGGRFRSCLSHTGPLVVCVVCPHIGGAPQGPNGRGCAPPPLCVLHPRLAAPPGVFYDPLLFWGCFFLVLFSVLPHPDGGHTFWWWFSYKGEEIFSGSALGPTRGAPPLVCHLLRPFCGGRTHGVFFLARSTSEPHSSVTARPPSAASQRERVVWGDTLWAAHAPLVCSPLRESHFTPLSHPHLLCGVRHTFHLSTPQSVHTHHRGVTERSPLSTVCLLGTTCVAQRWRKSPHKKCFAGFPNTPTPSLLRAHTLPFNSKPFSPRDPPTLSLVSVESVPLSPTPDPL

SEQ ID NO: 973624 - protein, 331 aa, Homo sapiens
  misc_feature (322)..(322): Xaa can be any naturally occurring amino acid
MRSAACGRRPNSRAPRGGHHTRARVWPQRAHLARPYIPRKCAAPSYMGGDPQQRKKKVGCDSQPTCVLATEKEFSVYIKKLGVKTPPPVAENGLPQNIMRHNIFCGEKKAPALCCVTPNGAAPHGGTPNRVWPHSLEMGSSTTKVFLHGGVFRNRGGGFLLAPWKLSCPNRRKLVSGKRISPPHCLREKIVAPHRAALESLSRLVEEKNWVSSTGGVINKKASSPLLGSPNKHLSPHWGANWGDLFLIPPRRGAHTHKMWWGVPHMGVSPPEKNGAHQSPHMEDVRRASHTRVEMGLTEKSSSPAAWVLSHLGASYRLLSFXSRLVFWVCV

SEQ ID NO: 973625 - protein, 209 aa, Homo sapiens
MFRLSTRLESVASLVRVSSPVFVSLFHCFLCFCCCVLLVVRWILVLFGRFVLVSFVFSVSPLLLCVFVLFLVFVLSCVLCLLPFLLCVALCVVSVFRLFLFLFLVRVLVSWQILLVLAYLVHTLLCDHVPWSSLACRTSLRFGVERVPPPLWGCQIRTPRLLCSTPPLGGVIAPSPVFLGVGTVVARLVGPAVVRAPTRQQLVHTSSPS

SEQ ID NO: 973626 - protein, 338 aa, Homo sapiens
  misc_feature (41)..(41): Xaa can be any naturally occurring amino acid
  misc_feature (218)..(218): Xaa can be any naturally occurring amino acid
MDERPSAVFSTRGGHHHAWWGAAGTPLCSCWWRSCLNTRRXCCPRLGVSSPPRVFVFPQSPPWERPHSRRRHPLVTLWHSRVGSYTPGSVSPPSPPRRCYSPLSPSLCFTTNCLWGNTPLFSRPTRGVHTPRRLVPPLARLSRERESGAPLEKRRGSGGRRARTRGPSGPHTARLSQHHSQERRSAVVCRLGALPQRGFTHSESLSPRERESIPSRLXGTIPRHRRATHPTGAHHHTHFLLVRPRTTGALAHPKETGERRGNTLFFLAQVGPERALAPGLSHTHRRRATSSPLAGENPPHSPQCLLLLAEGGAAPRYLRAPPLFPTPWITPPWSPHAQ

SEQ ID NO: 973627 - protein, 271 aa, Homo sapiens
QPRVFPAALRTFSLVQNEPYGHPCPPFRVAPGVTLHLGPPLNGERLLFQETPSSVTFCGFVNSVFPISSPGCSAKPWDHSGSTLHMHCCLTPQFPDPPFRPPFPNIPVHLFRARRSPSAALPPFGRRLAPERRCVTLDVPGTRRFQPPGPCVGSAGCQGLTELPPREVHLTWPISAKSPTPRATHPPFCCDPRHTARGTPEDWKKGEPPFFPHRGAPQAPPRALNPQKTLDPLGGEPPPGQGSVSQAEVAPPATETPPPAPPPDYSPLPPK

SEQ ID NO: 973628 - protein, 601 aa, Homo sapiens
  misc_feature (166)..(166): Xaa can be any naturally occurring amino acid
  misc_feature (237)..(237): Xaa can be any naturally occurring amino acid
MCRARCFITVVWVHPLTIVAGSEVVCRHMRRLLLLPSSWEMNMLGDHRFGCVITTGLRFVVCFLRLTHCVWLVTHHHPPLLRWGGVFTPTLVVLAHHIHVMWGGVYQTKLSSSSVFSRWVDANVQKNDGSFCLRSQLWVATTEQNRGVVPPCFSPTTVCSTHYVVXVYYTARRRMVVVPLPMLLYYRPAPSGGGYVSPPSPRVVLDEGLVVSSTTAAAPSWGVIVLPSPHTTTRGGXVSVDEVRPLHRKTHRLVLGSVLPPRWGKTSPPRLHSLAPRSYLAPLHHTRWGVDKLVCAFIHTGGGGRGRGVAPPPLLRARRVGFSAAVERHPTRVWVRVYYHPRVRAMITTSEYHRTRAVYSFLCDEKVEECSPPPTTLLLFFYQQSYTRALLCGGGQHFHPPCFGGVVTHHSSSVSTRSSPLLSALAPTQVPHPLFPQRESLSLAGHSLSRETHCFLSLHTHILLPAPRETLSSLSHSVRHTHARARALSGPERVRECVSSARALRERPHTLGADLSLLSLELSTPRSPRREPPHHKEREGERCFRAGEGGSAREGPLRARTPPHPTPQVFSAVHPLTLLLYSPAPSSLSPPAEIVGFSPSL

SEQ ID NO: 973629 - protein, 194 aa, Homo sapiens
HGPVSPRTFFMPAFAPLTHRANPPVPGLTVPELTQQMFDAQTMMAACDPRPGRYLTVAPVFRGRMSLKEVDEPMLIPKPNRSYFLSGSPTNVKTAVCDIPPSGAIKCPPPSLATSTAIPELFKRISRASSRPMFRRKAFLHMVHGARAMDRDGVHRGREPTMNDPGVRVPTAVPGCPPTEEEGEFEEEAEEEVA

SEQ ID NO: 973630 - protein, 125 aa, Homo sapiens
MFLPRGVWFLLLVDVAPAGGSLCVCVCGPPSLIEEALCGDVLSLSVCVCVASLSLLSLSLCCVCLPLCRLYFFALCLPSRVVLISPRDFCVSLRLVSLSRAALPRPSWESTSSGREIFFGCASFT

SEQ ID NO: 973631 - protein, 149 aa, Homo sapiens
VLVVVVALFFLLVCGLLFVSLPLVVVLCFLLCFLFSSPAVFFSRFGLSLFFLGGSFPNFLSVLCALFFSFHSVACVYEMFVFVPFIMFLSVCVRSYSHRCSSVLVVARSAPCIYLVVSFTLFLFSILFSPCGALSVCRFFNCRLCLFPV

SEQ ID NO: 973632 - protein, 241 aa, Homo sapiens
  misc_feature (203)..(203): Xaa can be any naturally occurring amino acid
RLIGWGVVSRCPSWVLFCYHRRCVWKQVVFSRHWLMTCLCVASTCRPLPGGDNQRLVIPPGLFLEAMFFSSPLSGVGPSLLRVVPLLPAGLAPHFVGDSPPAVVSLRGDRPTQPRVCYNDMGGKFPPGGHTFPPVQGFSWEMGHSVPPFWVVFSPEREPPPPAEAGIFVGRHNTTENCCLEMLGLLCLVVDPHPAPKIGSLSXEFSLGEIITPPSPKLLWENNPPGGVVGHKETHTVSPRE

SEQ ID NO: 973633 - protein, 129 aa, Homo sapiens
MLCDVGMCYGVLLCKKTVLDQHRTLGVAHSIFLRRGAAQVVVTKSPACVFFTASASCFYLPVLLSGNRAPRGAQIFLAHEMVGDRRTHIGRGWHKEPNAASFLYNAPPHQKGGHHTKEKRGMGTTTFVC

SEQ ID NO: 973634 - protein, 160 aa, Homo sapiens
MGVVCCLLLVGAPACSLVLWCFTEVSSGGRASSPRWWASPHGVLISCPCWLVDYLVPGESTNNLRGGVLITRGGAHDPVVRRARKLCEVFIRRPSRGGDFDRGVLSCAPSLSILGLPPAARKCALFISARERYFYTYIELGAVYTHPPLCFVEHHTQERA

SEQ ID NO: 973635 - protein, 102 aa, Homo sapiens
FILCIKDTVTHHAHERVLVSQRLSLASTSLHKSSREKLEKCPPNMGCEIYTVPKLWRQRATKEALRPLHDVRTRFLTPPKLLSTTRRHPVTSRGWRLGVGSH

SEQ ID NO: 973636 - protein, 282 aa, Homo sapiens
PLPICVLFCTAARLLGRVVVAPLLCGILCGSIVGRGFCLAGGGATTRCSPSLGFFPRMGWCCLVGGEPTLGLAYCSPRGGTRAGSTTLLLPGVHVVGAPASALYLWLLRSRTPCCCRGHRRGSVLHLDRSVIPCSPWVAPNMGGVRPAPACGRGGVFLVCVPPQWCAARFFNPPSFGEWIILWGEVAPAWLVLCRRPIGVLLLLRRMCRLPTIFCLWGAHLVYLLVSSAHRFRGMLCFSSFGEKHPPVRDFQLLRRRSPSVVVFRRFVCSARRIVCVGEEEK

SEQ ID NO: 973637 - protein, 231 aa, Homo sapiens
  misc_feature (38)..(38): Xaa can be any naturally occurring amino acid
TYLCYPPWCVVVPQAGVFAVHPCFVTPSGRGGSSRTTXCGDPRSQRPGALVWFRPRSCALAVYLYFCPRGLSLIWGYSPRRGPPLWGGVGPADYSSGPHLEGGEWAYISSPLGLTLYVYAAHVGGRDAPPPPRAGVFLLLRAPQLCALVLCKPGPRSGRLLFGGARRPSLLSSLFGMTLFFCASRPTGGVPPQRLTAHREILFFSAGFSLRPTSRRRGEIIRGEFFWAVII

SEQ ID NO: 973638 - protein, 416 aa, Homo sapiens
TPAGGAPHTADDSLLFVGPDEGCLCLLPLTCWFTCALALMCVAHALLLLRQPGDISSRWRAPPLFWAVSIVDERVPPPLFPHTLSGPPLCVWVVGPPPLRCVLFFELSWCAPSEGEICPRDECLKRIPPAAVGEKMCAARRCGERYRPRARVSSLERGFFLPPALPREIFPRARFFSAQGASRMTHALSPARLPTRWWTSFLLRARDTPRCPARETLFSLVIPPRSLPPRASRLTHLLSSESAPTPPPGVSHKTHPCVSGETHTECFTTHTRGARALSLERGATSRARAPARPSLPALFSLRASRSPPSRAGSFHPHPPPRGITPRASRAGLFPATPSLFGPTPPVPPPPPPPGAGPLPSSLPPPPAPPRPPPPRAPPPRFPPRGPPPPLPPPPPPPPPDPWVWASPPPPGSSPPL

SEQ ID NO: 973639 - protein, 232 aa, Homo sapiens
CVSAGVSGCVCDVVWECVALFAGGADDSLLEYNPHPVGLPRQQAHPFFGADHPFGTPLEREFSTTQWVGAPHENDAHGASIVYTAASRASSRVTLCYPRGLLIKGVCPDGRTLWVWPEKIFFRRTMSGLLGGFPRPHWGAPCPAAAPRAPPGGGLPPRCCCGCKGEPHGPWCGRPPKRWCVAVFFVPARGGSPPRNWSPTTRICSPHHFVVGTHSWGCRVYIKRRHHNKMGG

SEQ ID NO: 973640 - protein, 107 aa, Homo sapiens
  misc_feature (65)..(65): Xaa can be any naturally occurring amino acid
MGEQLAAKVGGQMPSRNRGFSLSHNRVFSPSFCVFGKKHAKDFLLLPRKVCPPRQELANREQEFXPNYLMTQRKFSQQPLRNFTPAEHNKCFPQRRFKKYTLAPPEP

SEQ ID NO: 973641 - protein, 342 aa, Homo sapiens
  misc_feature (155)..(155): Xaa can be any naturally occurring amino acid
SLVWVSRVGVAGPLLIGAGFVLRRPPYSVFRVGMLTCPPEFLSALLSFVMSRCSTPRRFCGAPSFAPGLFPPVLPGGCSARHACWCGCAPGGDSPGGGSPPTNGFNAVWGSQEMPNVQGGFHPPGVSRHSRGGKSSHIGGGNSNGPLFLTPGGRXNKDGVCLLISTKPVIVGWFHEGAPTPWGREPSHTPFLWEGWELGPHPEFKENCGKSPKGPPETPRARPCGTPRVPPPRRYLVTVSFFGAPLVVEHCSGPLCPLALGAHSVSTHSCHPVSPRYTLATVALSLPQRIWRDPTEIERNPPHTLLGSLVTHLRTSTWRNTWYMRLETTPQRVSCPTGGEIY

SEQ ID NO: 973642 - protein, 468 aa, Homo sapiens
  misc_feature (263)..(263): Xaa can be any naturally occurring amino acid
MHPFGAPTSTSRGCASGGARHPNCPEGVVPPPRRTVVGCVPPPGGGYCLTMVFVFFFLRRAVLFFLVVDLWGPHPGGCVSLSTMGGYAPLVVTGGSYTHHLSRRPFVHQDGLCGNFVPERGVVPRSAGFPRSFFFSEAATPRARLYTTGVLHNGAPKAPQSCGKTVLAPHQLCWGNPTSILPLPLTYCGSSRTYLRATKWAPPLLRTQECGALVAVERPYSEESLDIVRTSQPFGESPTCVEGLWAPHTRTSCLYFLMSGAHXTTIVESLFGVSPPTALPLLISAALQVVSLLFSSSQHSSSHLSQHSSLAAPRHTLSLCVSVATHTLWGRPPQTLTLAPECSLRATRARPRVLWGPALFLVRHALASRENSVVARLGPRDLSRSRVHTHHPRPRWALSQPRFFGTFPFTTLSPDVSSHGTFLFGPTATLPLECPLGVALGSSGELHGGLPSISSWGTPGFRARASLE

SEQ ID NO: 973643 - protein, 352 aa, Homo sapiens
  misc_feature (283)..(283): Xaa can be any naturally occurring amino acid
MLVVWHRLCGSPHTGGGHPPPPPVYCDALLPPSYSVLGVCRVAPRLVLSFVCWPRCFSWWAHQRCMAPPLVPPVETPSSYPHPPGRLVSSHGLFSLFSESHSGEKFFGRDLVVTHTPSSQRVLSVSHMCPLCPPRETSRFAQRAHTPLSGPSVVCVSHSGPQGSSLSHPTGVPAHTTLCWGCLFLCVHSLSPLWHPHTVCLCVTLGRLLSLSVGETFPLCPRALTERPLSDTGVFCVCHTVCLLCLTVCVTHTLFPSAHSLCITPVALYYSVLRCREDTLCVXVGTPLCTHSLSLRGVATHRPGVCLFSPDPTRVVLPPTLGYATTRHQHHDESTRNLAPDAQRLPVPWDIS

SEQ ID NO: 973644 - protein, 119 aa, Homo sapiens
MCSHSRRLVTHTVVRERERMSPSLHRVCTPLSCGDHHTTIARLTTSFSESSREFSSAAATARASGLLFPPVESPTGRLCHGRLGDYHESHKHTLGAEKLGVLWHSREEETHETPRCSKK

SEQ ID NO: 973645 - protein, 469 aa, Homo sapiens
YQRLVVCSPLCCWCGASPQWLPQRTARVLFTPASPCFYFLLRSFIVVCRPPLGGAKFSRHTGGSCGPPLLGRSALRGMWGPHCNPVGAAPPQGKGALGCFLGSRPRVFFKAGPPPPALPVVVVFGSLWAGPYICGAIIFTACWAALWGPPACGCVHTNGRAQGLCVHPHFRRSSYSPLESCVHRARSRPSARGIGLWSFFLLGPLLRDPTGCHPLVWFCEGVSPRRPSFLPPRSVREMRSYCECWGTPPWDTPGCFFLEPPLGREEPRVFLCPARPRPFLSLGRKFVGPSSVREKREPRLAISGAVAHTLMFLAPVVGAHELFSWAPPLGAAESTPCLLEVGPTTWPPLSCSLGDTPRRGVVWPGPRKKGHFYTKGPRHRREHTGPLELAPPRAPTLSRVSLLHTPALGELEKVPRTWLPPDPLLRAPAAVVPINAKAPPSAPRASRPLDHCYTLSSENCTHTSELFLF

SEQ ID NO: 973646 - protein, 113 aa, Homo sapiens
MTYVLYPAGVFHLNRGLWAVRGAPLWGVGAPASSFFFVAHYPKRGRSLIRTSLGGQAFRGASGNSVPLLIFLSPSWGCKLAVYTASSSVLPPATSSGLAPTPCFAPHPLLLDA

SEQ ID NO: 973647 - protein, 127 aa, Homo sapiens
MAHVGAPHTAHTPQHSPKCAWPTNTPGPMAPAQVPARDIPLAPAPNPQGAGNAPIGHPPVQPAPHHQREATAPPEYDSTHAVPRSGSAGAPTHTPTIAQQLHSQIPTTSSDSLHPFLILSSPTPRYP

SEQ ID NO: 973648 - protein, 135 aa, Homo sapiens
  misc_feature (64)..(64): Xaa can be any naturally occurring amino acid
MFSRTTERLRPHTTSGRRPACCSHPHTSPRVEKERGARRAPRVIIISSYREKDIFLHTRRALSXDTTRSTFSPHTRRHTQGARCVCCAEREIFSPHTLYLSSRPHIYRPFSRTQHTEYYYSQRVYSVSHRAQSLR

SEQ ID NO: 973649 - protein, 325 aa, Homo sapiens
SLLGMLLIPCAECDYRCGVSGGGIPPRGFVLLPLVVWLFVRSQLCLLCQLMTVLFCHTVFLRWDADVSPLVVVGNNYCCFPPHVCFSRRVLSWLPLLFLITRGAAGSPCFVVVECLPQVVSCGPPEFPYALPLWVHRGRPLRLVVRSAPHRVVPEGRFFSVCGVYIRRVCAPTVVGVFHVVRARSTVCPPPAKLGGSRNVRLVCTPKPPGLSLLLSERIVLLLRATTLFVGLFFVIKPSACCSSLRPFLLEGYAAHTSCNTSAPRCDSVVGRRVRERLAPRAVWKNNFLGAFWGSYTTQVLHSVEYYVLSPTARRVRTQPFVSSH

SEQ ID NO: 973650 - protein, 431 aa, Homo sapiens
  misc_feature (15)..(15): Xaa can be any naturally occurring amino acid
  misc_feature (326)..(326): Xaa can be any naturally occurring amino acid
ILSCVEWVPTSSSVXFCWRPALCRIKKGGCVVCRPGVLRSLSPLAAPLCGCALPPGDIITLRRMFVGVGLFSHACGRPPLSEDGLSLWRVCLLISVRPLLSYGGTKVCCRRLNFLSWGGAPILWVLYQPQRGFLCLWWKRCVPPTRTRGGATDRPSPPPLGVAEDKDVGENEWVYVLPTGWSSTPYSPRGEYEIMDNPTGCFTTREGGYPGGITHHGPPLEMIGDPRGEKIVEKNIFEPTREVVPTTEEGVSLSPTEAPPPSGRLFSSVGFLESRPPIFIKEHPVVEDCSSFYMVLGCVSLVSTLSSLSHFVVLSPPCEEVCTRGXDPHSGPQHTSRSPQRVSHTHGRHPPPVRRHTTERSLCVRHTQRDKRGVCMCLPLSLSLRRRVCLCDIAHTLWEREFVCHAWFTRYILCEPTYRRRGTPRCFSYRE

SEQ ID NO: 973651 - protein, 336 aa, Homo sapiens
MVVCLVVSLGTLLGALLSFFCSRPAFVWPPSFCVWYLILLVSQGGGPPPFLGGSPLGLFLLDAPSVCHYVCPSAGTTFFHRVVLPVALLVFPPLFPVVFRVLLFHPGGVVALTDSPLGDLGFCSPQVSGVACSPHGGSPVLQLVCPPREVGPLVDFSLFWLCPPLAGEFTRALFLCPIPHLGAQVFWPPLFVFFGHQRAPPDAPLLGPTYVGPAVHTLGAAFDRAPHNSCVVVLPREVGARAAPLWCDTPLCAPPLSQREGCVPLALGRAPPTLWALSPHSGRTPPPQRCCLCALRAPPHTLSRVSCGPHSSLRETSVRARRCALFFSLTRGERNI

SEQ ID NO: 973652 - protein, 126 aa, Homo sapiens
MVFDNPTTVLAAHKRFVRSGDHNDGLHQLGCAAPSPTGARGPPALGVSRPTRGVKYAPSAPRSVCGGRSTECEASLCWAPHPWAAHTHTLGRTWRECDITSAVIYSAPSVWGASLSLEFRVPPRRG

SEQ ID NO: 973653 - protein, 190 aa, Homo sapiens
  misc_feature (178)..(178): Xaa can be any naturally occurring amino acid
MLRRLPGRGKSPPQRVLGTPRKNPTALLCYKTDLAPHVYHYLHPGLLKRYCLKAHSGCGRKYSRSHARGDRGKIFSLLSSLSLIETRRAPQHGAIEASLNRALTREKSPRFCEREWVPTHSLTPNKEKKEFPAHRFTPHTLFPRRAPQRDHLGEISPRETHAPHTIFSLSREERRALXTGRNTPQRWRPH

SEQ ID NO: 973654 - protein, 116 aa, Homo sapiens
  misc_feature (66)..(66): Xaa can be any naturally occurring amino acid
MVPPRPCVAAAHDTTRLWYNFALCSRSTAPCVRSAVYMPSSTTHGDVLARDWEYKQTRGAPPATIXGHIRCATQQPSAGVLLSAHTRGIQHARSCYILLRECFLPTVLPPQNIVLY

SEQ ID NO: 973655 - protein, 224 aa, Homo sapiens
MLLWAPLLSPLLGIIAALRPYYASPAPSLLYCSFLFGGFPKSYLAASPPLFGATWGTAPRGGTGTQYPSGFTWGYTLFDQIALFNPNFWPPPRGVRIAPPLSPADMFSHEYARAVGTHTPGAPSHRGSIGDTFPPPRWETAPSGSLGGPHTTHRAPRDHTTLGEMSSLSLSETSLSPTLGHMSPPPRGASHSSRVLSPRGSHPRVLYLCLSALVYRRGRPLLSL

SEQ ID NO: 973656 - protein, 112 aa, Homo sapiens
MAPPTSGVFFCAPLPRCRTTPHMGDVIIPVVNAPRTSGFSLFLRGRVFPLSRNPSVVGPSLFKKPSPFSSSPSLEENAHPKLEPSPLVRPGRDNSTPPPRLGKNNFGGVWGI

SEQ ID NO: 973657 - protein, 263 aa, Homo sapiens
ALCRLPLGPKKGPCVCAMAIVGVPFGPLLQMPRRSVVTPFVRSTPVCRAVCLCALSSRAGGRCGGGRTRGSPVILRCGGLPPLCLVISRGGLWAPVGHCRLSVGALSGGTRGVPLGSPLPRDSPRGASSPGCPPLCCLGLGDRLGWPSHRHESHGVGTRACGGALCGPPHFGDSRDWVCPFLSLAAPAEEGSPCCAHGFVWGGECALRTPPPLFQGESAPSKSASLHRRPPPPEPPELGLGLSFPRPRTPLPATSKIAHTPPS

SEQ ID NO: 973658 - protein, 152 aa, Homo sapiens
VPVFTARASGMSGLHTRFDSPPVCFTTYEVSPSFSLGVLFSPLAFFLLTVISVPLLIFYPPGPPRVCSYLARVPLRVSLISRPPPGGPQGTPPGPKTRIFFFSPRVAPLFSLPFVWGLFFIALPKNLVCRPPRTQVCYPRPRSRAPLRTQPF

SEQ ID NO: 973659 - protein, 104 aa, Homo sapiens
  misc_feature (89)..(89): Xaa can be any naturally occurring amino acid
MGQYLPTRSPHGAVPVGERGSSPEKGPPQEEGCSLLGGEPPTLGGLATNGGESPLFGEVSRYNGRGKGPFPARRPKYGGAPPPGGCSPXEEGESSPPLLWERVE

SEQ ID NO: 973660 - protein, 231 aa, Homo sapiens
MRAVLLLSLFAPATSRGSPSPPRGETAPRAPLYKYILRLLPLSLSLLRHTPLSHRAPHNVFGAPRGAPSARARARPPPPPFLPLSSPHRDTPPHTHTPHPGPLTLNTPPPHTPPLTTHATHTLPRGHPRAALFWEGQRALPPPPPPPPPPRHPPPSPPLSPPPAQPPPPPRHPPRGAPHPPPRAPPHTKTTPPGPPLESFSPPPFKPNSPLPPPPPLFPPPHPIKFFSPPH

SEQ ID NO: 973661 - protein, 445 aa, Homo sapiens
MRTSHHTVACRRSHAGSGYCPPPPTFWGRAPALRRCSPRPGGVVFSFGPAVPDVPFVLVAKEVVFYTPGGGPQLPSPKGFASVCFNFGVLSEGAPPSFHLPPLEGKRGSPRPSTTTLVPEEKSFPPREGPRPLGACCRKGVCAPPRAHFSRFSLLYTRPFLCTREHSSRAVRTPVVCTLTPHFHHACPRPTPPPLCERHTGNTHASTRRVLVVCPPRFDDTPPPQRVGERLESCGSTPPILKFLPRAHIHGHRRTHFERPLWGAVHAHCEPPRETPRHLSGDHTGDWGGDTPTHPLPPPQFCLTKAFFPREERVSAHRDLWRGHRPLVVATGKKAPRPTEMAPGPAHRSIYSCEKERTGRASPRGNTRALQLPGWKGSFRPCPTQGSNPSPRQCVPRSGEGPRPDTGARENPVLSAGPLDGCPVLHHDVPIVNSPRPLKRSLLPK

SEQ ID NO: 973662 - protein, 167 aa, Homo sapiens
MREETPPPAWSLSLVQHPQRECDTHTRVSPTPRCCGWERDTHSRESSTSSARCVWVCECGDTHSTHSWEISPSAERCGVCFCVCPRAPLLCVCVRKREEVSPLSLATVYTHRERKHTHTRVRTLCMSSTHAQNNSRHHTSLCALSHTHTRGDTLRAKHTQRRALCVL

SEQ ID NO: 973663 - protein, 144 aa, Homo sapiens
MWVCGAVWCVRSASVAGVGAVLSLPRCVWWCARYIGGGVLLSVVGGAARLVFGLWGRPPLVLMVGERGGAVVVLVGRCVFVGRRHVTARRSVGVRVCGGRGALSRRLGSGGGGVGFASPPARGRHLLWGCVSSLSLRMAPLPLR

SEQ ID NO: 973664 - protein, 244 aa, Homo sapiens
MRGGFGVVFCAPPSDNCKEGGLVVVKIVGAPPATPSVFCVKYCVKTGGCNTQQQGGFLSPPQTTGRHFGLSFAHHFVCAPQTQTLGSVVLRAPHRILLPSPPLCPFGGVFMRNEKEAAPAVCPPSPRRARQDFGGGLVPHDTAPVWTTHHSGESIFLVVCVLCVAFWWENSEPLYGSSLGTQRGEISPGLYSAGAHNTAHPLAVVRRPTPYTHIWGEWCVEKNDRVVNCRAPWCVRPLLLRVII

SEQ ID NO: 973665 - protein, 293 aa, Homo sapiens
RRLSRMGEYSTASPLVLCSAHSRAVGVEERELFGSSSHVSGGCSPPPAPPLLVVPPERGRHTRIMVRWAVAAAKSSAPRLSSWGGVWVVPNKRAAHHLVRIYLLVCVFDKEDSALVAFYEEVFVVIHPRNNKYLGGHLIFLVEVGVIDDSPVAAPITRGGRRLLDEEEVSGTIRGRRTTTTRAFLFWVVVDAHNKETVDDPSVEKEDVAPPARCCQHESCVWESVVVHSWVVLIRRRSLYMVGGGYCRNTAPPLVVDDDLVPLAGRLQEEAVVVGRPVGVRPPPTSLMRRRRV

SEQ ID NO: 973666 - protein, 123 aa, Homo sapiens
VIVLLCSLLTTVFCSRVGGCVTATGCLRRICTHLFVPKLLASVCSLLIDLRSSVSFHEVCVVWRKYLFFVFVSPPHFLLGGVDVIHPRGLFGFYTLARITNVGTHTLFLWPPPRVFSPPLGAL

SEQ ID NO: 973667 - protein, 395 aa, Homo sapiens
  misc_feature (296)..(296): Xaa can be any naturally occurring amino acid
GDTFCVAGTTAEAGDTQQFFPPTPRVSRGDVILTCGTHLVSLSRAPNSVCYSGRCLLEQAFPPGVLHSSSRVFSPPRRVWVLVVRPSTRAVPLVSLFTLFAPHCVRPIMVRDRGSPTRCCPRAKCVATHPPRRVGSKVWLTRDSSGPPFPWGGPAFAFFFEVFSSLKNRGNTFNGGHNTLVSPRPSLLRRGVSPSPEGGCQPPVVGDPGGGRAPLLPTIGGGKEGAPLLVFSTRGDHTPPWVAPLVEHLFFVGGRSRYYPRRQLVFHTQRECPLFSRGLFLSPRRRPTMGGHTPLXGERRPLSYTVWRHMAVVSVILSLEGSPHRSLLSSAVLSSRAPAGCLSTISSRGDHPRFLSRPQRVSHTLALSLPPLSLARGRVSGAPRDNAADSGWTPL

SEQ ID NO: 973668 - protein, 194 aa, Homo sapiens
PLPGGRFCLSPHFLWYIGGLVSPNSGNPWDHPVCILRARTPKLTALVPSGFSPAVLPTFSLCGIGLKTGAVCVRMLLANIPPEMLWGCAHGGPTTWSSGSQTPLCHPGPEGPVPVRHTAPNKWCSTLGPRPPARSRDRGPAQVAPVTQPAGSKVSPGCHKAFFGSNLSPRKEGVRASAGPARPFFRPSASFAHE

SEQ ID NO: 973669 - protein, 273 aa, Homo sapiens
MCGYEYLASSYFFFVVDLVVPYQFYFTPRHRLRRRLLLGGGFSSGFGLVPMLSSRVRHAWRRRGVGVLGSTSRGERACWMHAALRPLALSHPEGPLRGRRGITECTAYSLFAVLFVSCVLRGFLCSLVVTRAALALGRLCLLCLLFSSLLSPCCVRAEVSPLARHTPTSAIIPHSHTQRTHLARGRQCTAMWLSRRARASRARTRTHHHSPTGTEHQDCPAGDKHTPHHPRVFLPLVHTQRIALGPPPTPRHRRPRPPPGGTDTPPPVPYDNT

SEQ ID NO: 973670 - protein, 119 aa, Homo sapiens
PVLLSVGLQTTLVFWLLLLLPLLWWCVDRYTPTCLPFVLWCGAASPSCCGILFSCVWEWSPPPTHGGWGWVLTLNINIFLPAVSCLCLLINLRVVWLSPPRVCFFVTPGGVFLISGVFL

SEQ ID NO: 973671 - protein, 226 aa, Homo sapiens
LVPFPFPVLEHMWSLCSAKTSLIRCGSPRVAFGKWLHLHYRRNVLAFGGPQPPPVYQVSEYAPALLVFPVILMEESQMWVILRSLGPLGPPPVMMGSLHGCPPTEAPGEYFFSLMGSRLKKYPGMGSLDALDQHLSSPTRYFSEADQNPSGPEECLVLCRTKGPSHQFVPYLIAGIPHSCPDLGAQSLTPVRALMYSGELKFEKRRPPPRWKVASLASLRMRNGLF

SEQ ID NO: 973672 - protein, 298 aa, Homo sapiens
MISASGVAPGGLSPPFVVLSLLVVASLLGGAFLLPLPLYFARSAGVVHTQGGGVPRHSLAPLNRLPYPLVGVLYSEGCLFSSPPLAAVGGVSFLSPPAVLPSLPWVYVTIHLMSGGLPSRSMGGGAPPPSILVSWEGVFYLFSPSGVVSPSFCGGGGVEFSLLCALSPLLRPSGGGDSFFSLRGSRMSVVLPPRLGRQLGGAPPTYRCAEMLFGVVATLECALTERGGLCLHALFDTWGGNFARTHTFLFLWPPSLTEGPSVLVVSPLLFSPLWRGLCPLSLSLRGCARARLSLSFLL

SEQ ID NO: 973673 - protein, 326 aa, Homo sapiens
HLWSLSRVHIGLLCPHTWFLLPLLSLPRLVHPGVSYGHPAFNMPDFEDDGGPYGASVGSLRPSGPEQPAWPLFASPGTLLRVLFPRASEESLSVSVGRLILGCPRLEPFAEDSVSARRISGYSSDARANTQRHALRWRASPHRSSNVAAWLSTGYPPWNTEPAICASRLTLPPSVVDEGRKACLPPLVASQRRVCLPHTGLAPFPAALLPPPGILQPTAPSAHALCARNGHRALKPWQPAWPTHTRAPPHSGPLPAQSCKPALRRKCNGAAPPWNLEKGDLRNALETANALHLLPPPPTRLPLMSWSRAWPRGPFTSPLPFYKFPI

SEQ ID NO: 973674 - protein, 105 aa, Homo sapiens
VARLMIDDGRAGLIDELLFRRSIRLLRLDRPESSVWCLVSCSSGSPSSVVVIMPRYRLPFGGDDTHNGGELQNRVATDSFPPTVLPLFGWKAFLFFSMGRHSNPP

SEQ ID NO: 973675 - protein, 177 aa, Homo sapiens
  misc_feature (127)..(127): Xaa can be any naturally occurring amino acid
MGCPRRLLFEKWGPGWNPPNLCVNFVLWRKAFLVGATEESLPCRRHASLGWYKRIGEKRVYIHWGPSREIPKVGWGNPDPKTHNGVFPPPHVRHHKGGVCPVTPPHWGPRGPPPAAGRYAWRGNIGXRHIVLLWGYPESPTTGREILGRDIREREGIYFTLCPGVWTPLVGRDHKIS

SEQ ID NO: 973676 - protein, 122 aa, Homo sapiens
PPESKMISCSAVVTSDAAPPPAEICVESTRGPLLCPDRVVCCAPDNDTINNVVGPPSLVWCRPRSQQSWWRPQNCVSPQTPRRVCENHLGMCCLRETMSSLFGGVCRSPPMCCKTPHCIGLG

SEQ ID NO: 973677 - protein, 296 aa, Homo sapiens
HRRVTPRCCLGPLGHWLYSRWNPLPPIYPAGPQTAPPPKSRLNLCWGGATKCPPSGDNTGGALHQAPGPLGGSSQENPAPTGIPPPQDPPQVPGHNGFATPHPQEKHGGAPTPTEVLNLLDAPLDHPPGASGNPPHRSRPCWRPPTRSWVCPHRHPPASLPRAPRRPPGDNPLWRGGTPTDRDCLTPTARVPPRRARAPRQSVNPRAAGDTPRKEGVSRRLEGGPSTPRERCGPATPPARRKKYVCKRTVGVVITEGPPPPRVPPGAPPPPKKRGGGGPGAPRNPRGARAPPPGGL

SEQ ID NO: 973678 - protein, 362 aa, Homo sapiens
  misc_feature (1)..(1): Xaa can be any naturally occurring amino acid
XVLYSVVDWVASDRDQLLCVGVYFTQVLACSSVFRLFFTRGGVAYNVVLSASSPRRGVPHFCGWLPPWFDLPRGVTKFFPRHFVGGGILMRGPRTYILWWHYRGCFTPLGGYNFLPPRHRKVCVLLKGTSTSGRFFGSSLQCSMCVSDGCPTHPFVECVINVGNCVVALFLIWGPPFLMCPDTSVIWRPPRLTYVGCDRPSFFGPIISVGPSLLYLPSEFVGGMLVFIVRTPPDQEFVAGPHHQQQRWEWGPPLRTFSAGDFVFVRARRLCVETLPRLLVRRVGDNIIVRVGEYIWWEVDASSSCGEEKHNMGGAAPHKHNRVVLRLSVVQRLFNTVLSTIGRFLHNNGGGVSDSSIVFTLL

SEQ ID NO: 973679 - protein, 214 aa, Homo sapiens
PRAHPFRGSPIGFSDHTAPMLATVCPLLCRLCAPPVECALLSAWADVHLVGLGEKGVLPPDGTFLTEGSQTLICPPELGAVSEAWAKPPNLPRQPGSSRPTGLSGAPLSRQATVCSEPPVDRLNFQGNPRGSCSKRASHQHLSLQTLEGGRARACVCVARVYSARVFDGERREGSMVSPAPPPFGEPPQLPPFTLHWTACPKILSVGQQRAFCT

SEQ ID NO: 973680 - protein, 106 aa, Homo sapiens
MDCLREKSADGARRSALLYLIPIDSKLLSRTVGCRLGSMEQSIDYMRTVTTIPRGMSHSYTEEQNLEKRSVLIHWPIVVRTLRPRSRCNTKLIARGRGSASMQHAS

SEQ ID NO: 973681 - protein, 68 aa, Homo sapiens
  misc_feature (9)..(9): Xaa can be any naturally occurring amino acid
  misc_feature (45)..(45): Xaa can be any naturally occurring amino acid
  misc_feature (51)..(51): Xaa can be any naturally occurring amino acid
MTDRVSTPXLKPPFYNNYITRRLALMSCPHIRLKNRCNSRTSKPXPVFHRXHDRGYTTVNALKSVEQT

SEQ ID NO: 973682 - protein, 202 aa, Homo sapiens
MKPESADARKSRHHVCSAHLPANYTTLCTKCDGHTSARASDTHTVRYPAHFSATTSQRSNTKYSQTHTPVAGWQHKAFRNSPKERHTSWRHHGTLSAEHEQQRNISILSQYTNEMFHHHNPNTAPYDTVNERRGNAKHTFHRQVLPQGRVYISRCKPTLAYIRTAPWIPQNTVIIPFMGARHTHAFTTLYTFADIGALHGRT

SEQ ID NO: 973683 - protein, 79 aa, Homo sapiens
AYGGWADLLSRWWSLAIYRYTGSYQSTLIAYEEVRPIAGVQCVTCMWSDPDDRGGWRSVISSRSVVYTCWRKYIAVRHV

SEQ ID NO: 973684 - protein, 68 aa, Homo sapiens
GGGIRDHTVVWNPLTSYIVYPLLEGSQMKESHNVNKRMAYASCRNRTRSLILTLSAAVDLTCMADQTE

SEQ ID NO: 973685 - protein, 45 aa, Homo sapiens
MRLVEERAKTNNSKHVLVNKFELGRRILSRPYKPQSTSSLAFDIF

SEQ ID NO: 973686 - protein, 225 aa, Homo sapiens
AGRRPWTCGGLSWVGGRSASALPSSSRVRSCLLGSRGTARGPVRSRADMSAKQQRLDALTGTRAYSARIYLSSSSGVAKGPGPEPGAGGRAGGGPGQVPRLTSPWGRGAPQLFPRGGVASGAYRGAVLFQHPEQQQRPEESQDSVHSSPEDGGRRTGGGLSPGGVLVIGSLQSPLTAHVEVRTLSKRRARSYRGAVGVADGIYRLLKSSPDRRCYGKRRFNGKNG

SEQ ID NO: 973687 - protein, 149 aa, Homo sapiens
MCVAGARRGPPRKKLSQKPHSRWGRAGAHQGGKGGNRGPQARGSLAGNRGPREQEGGGEILSHPNIKKARGGETPESGSGRTQTPERGRVRERGAQYGGDSISKRGGAHKGRSAPENQKYYTAPVTGGDNENNKTQQRRNQTQTRTESN

SEQ ID NO: 973688 - protein, 321 aa, Homo sapiens
EATIDMMADVLRRDLKECGALVSDEDSRSRLMSHQDSLGWWLWYPEGKARWAATKTRGVLALRGERRWSSGKRSKQRHTRHHSKRRQTHREESAARIQRKGRRGEKRRGLSNQDTGESAQRDEPHDTDLMWDHTARESAKHADTCPSAVPHIRRASGTTDSSRGERGEPARVGGTHICDGVEMTRTDAKGQAARAGEQPTGEREENPPPTLQWVGEPEKQTRTANRHKTDSRGTTAHTRERRKRHNEEREATTRKAKQRGDTKAEPTIAAREGNNKKDKTRRNHETRHVADAQGETTTETRAQQREQRGRNKNTPQGEKNR

SEQ ID NO: 973689 - protein, 319 aa, Homo sapiens
SPASPIVGVIAELVSLRQLVIAGAVVAVVMWMRGRRASRSREQEGAQSSRPGKRQVTSEPKGLLIVVLLDTRGRSVDESLARCGATEHGTDFFRAPSSFCDFEPNPWTSLFAVHMGIRGMKSVLPCWSIEDARRTGEANEPTSRPLMIRSQCTPSSHELGLMPSRSTKLFLAMVPPEEPTEVSSIPWSQHSWVQPETCKMSFLPLVKSETACSYNLGLLYAHCWAMETLSDVTSPGKDLLTICDDHLHGPTVTTCGEHRGPWKTPKEPANCIPQNEKETLGARPTKANRGMPLPPTRGQTGGDPKKTPGHPERERTGKA

SEQ ID NO: 973690 - protein, 75 aa, Homo sapiens
ESLLFLAINRVCDWRQIARESSLLQTHRDTTPSDSSLHTRMVTIGRASNSVHVLRVHTRVHFLGDLVHSNARFCD

SEQ ID NO: 973691 - protein, 102 aa, Homo sapiens
APEDGSGVRWLLPSVCCPTCECHYLGRIPATADLRPAAMWKPTDDLMNTLLVVLGSKFKRRTIHVERIMFLDGHGTLLSNRSDATPIIYAVHAVVRWRVHQT

SEQ ID NO: 973692 - protein, 127 aa, Homo sapiens
LAFGGRIERCSREIVLIPKPVLGKYSPAEKANAASYERQRSMKAPKWRAQAGRISYSGRSPRALSENVEYGMCEELEGCETPGELELLTERLRRMEDWWVVRERLGHNLSSRVLHTDYLFRITSESG

SEQ ID NO: 973693 - protein, 182 aa, Homo sapiens
MTFLKTNCAGGGRGPQERGKRRTRGPKAGSPREEKPGPKRTRGAGNSLSHKIKKRPRGGHTPERVLWNTNSPERGRFSEEAPKRGGLSITQERRAHKRERRPRIYSNIRAPGPRGGGNNKTNRANKLRGAAHHTPRQPTTRKHNKEKQPTGRTTTPDPHNDTPTHNRHRGERHTHDERAKKP

SEQ ID NO: 973694 - protein, 212 aa, Homo sapiens
IAQVKDVYVVTDQIPVSVTMFQKKDRNSSDEDLPVKESRPVMFDVLIAMILAHCLNYSTSVSYKWSFGDNTGLLVCSNHTVNQRYGASNGTIQPLDLNVEKHACTRWTVWSDYRPARTARAFINPRPRSFRQLVVKSYGFNSRPKDLLVITPVELSGFLDEETAWHSTDMATFEPSSTICSRESQQVNIIQMTEVRDAGAMAEKLLIDLVVT

SEQ ID NO: 973695 - protein, 107 aa, Homo sapiens
MKKRPGGRDRTGAKIKAAIEGSAPEEGSANGETHIYIARERSKGGALRDISTKFSAPPVVVGKAGAHKQGKNDKNKGTEQRRGTQKKKHTGVNQETEQSAEKNPPRR

SEQ ID NO: 973696 - protein, 323 aa, Homo sapiens
ELEHSQDTDADDGALQKAVLTWSNGDQQVKGIVRQAIERGTQTLDASPRSGLPECKCMGENGSLISHNAFQPGASVLCRWSYCLLLPHEPSLSALPGQRESTGVSPYTPPPQEHSQAGFGANTVGGGPQGRGPLTTKRDESQKKNNNKNKREQNTVCRRSIRAPQKALKDNIKMGHTAGTNIAATQTRAQDRDQEKRGKTRERDTPPTITSGRGDTARWTPPQGRLERQQEAETHEDNNERNKNATRRNKQTEAEITEPSMKHAQTGTTQYLLTQTSWQQQTTSNAHENYPEIADQQTHSTKPRITTAYHKLGDEPTTVMIAD

SEQ ID NO: 973697 - protein, 193 aa, Homo sapiens
LTHAPMSNNMAFSAKKKKKKKKKTGGAGRGPGKVFKTHSGWGSGGPKYEVYGRTGAKRRCSQEENPGPMDKEGRRTFFHTNIKKSGRGGDHAREAFDGTTKSREGGRYEGKGQIAGELYYTRGESHKRARSARRIYTKSIKTPETGGGNMTYRKKGTNQQENIQQPQEQHNNNEEPTNTNKKQNTSSKNGESS

SEQ ID NO: 973698 - protein, 270 aa, Homo sapiens
MFDRHMRAHVNRCRPRQIAPIRAPVLKSRKVCIVSDNAGEKDEITWWNEWGIIYLKESGVMLGDFRVSVAWLVWLTGNCTLIRSDLSHNGDAVMCSDLRYCLAFEFNEEHVAVRRAIVVDGYSIRLRDCESHRADSTFENQGDERPASMLVPAWDAASVEGWEDMNRLIAVLDWLDTEVRVIAAIKVHAQYKMYYHKKKHSGERTRPSGKFWHPKSWEQRPMGPGDRWERPRETGGQRSVDLPGWKPPGKQGGEHRWTHRGGRERATRSA

SEQ ID NO: 973699 - protein, 46 aa, Homo sapiens
MSVTDESFTGFYRHGVQGDVRILTIYGPRVVIDYFWYVSILLDEGS

SEQ ID NO: 973700 - protein, 301 aa, Homo sapiens
SIEWKAAVRLPLMDVRVDDSGCAEGDGREEHFEECGSTPREERSRCDLNTYKRLAHLSWPDDQMPKTNCNVAVINVEGTQRVGGTQSYSPVVRVALLPDGHGMLLPSMMAFDGFANGPDHKNSAGPDVVCGLASGAMQCSDVLGTPGRNPRGKILRERDRPYMMRTHSINVRCDHRRIRRLPEELLELSSRPGRSTNAVLSPQVTGPAHVLKQRCRVRIAASAHTNGQMTIRTPCGRIRRVATEHKRRRKHLENPVRHLGTSTKQTEPQHDKNPYTHEHSQKDDRREGSQKSTPPPHSTET

SEQ ID NO: 973701 - protein, 255 aa, Homo sapiens
VCLLTSSVVWNRTHDPGDSLPCLLTCPPDFLSCCQSPGTIFSSISCFLATCQHRFLWFGSFLPNQLMSSQILSGIIPPDCVSAAVNMPVSNLYLQSASYNYLSLGFYFDRDDVRSGRRDATSSANCAELRTRERLRASPEDANPAVSAALVFPVTSKKPRLKDEVGVKPQTPGTACHVPLVINKADTRPFLDLHASGVCPQGPPISVTSWRDLTFLDKELDLLTKMGDRLPTSQGLMPGVGLREFLRKARPDDSR

SEQ ID NO: 973702 - protein, 134 aa, Homo sapiens
MVMFKRYQSLSLDYERSTMFVFIFYPLDFTFCVAPLEIICLHGDSGQNDILQETQPCPNVDLDASSGFSLLVIYSMGQYYLPNERAGLGPMNIPLVSDPKRTIAQDNGRLTRLDARASRSVRLSIICMISGILT

SEQ ID NO: 973703 - protein, 159 aa, Homo sapiens
YSVSLVVVGTQAPPMRQRCVGSPDVLQDAEDPPERPAADLCSLRFCGRSPVCRFLRAYRRGRLRAALQEEPGVPARPGTRCRCIWMLRAWRPIWLDAFVVDEEALFDVWNSYSHAMRRSRLRDEELALSLQDALQNILNVRSGGPAVSERAECRLRAPL

SEQ ID NO: 973704 - protein, 126 aa, Homo sapiens
LCFQRCNGGPAFPPRPGLALAPTLQLLVEMGSAMSVPVTPARSPPRQARHLASSGGTPVHLGAGILRYSHPGGRALHSQAYQQGEQLEGLKGCPGLRSPSPTLGIARTPMIDQQWRSLQGSLVKTC

SEQ ID NO: 973705 - protein, 137 aa, Homo sapiens
KIGSDRRLGRVGVYGAGVMGYGMLFGDLCFKRCLAFWGRVFIGGMQRVRLFSATCFCSSCDLLGTVQPAFQLDPDLQRMLVQAGSHNLRSRKNAGIAREASFLWHRPWWACTNFAGTLVPLSKFPKVLFRVGSQTPG

SEQ ID NO: 973706 - protein, 183 aa, Homo sapiens
MRKKPFTIIHLNPQYWNELNPRNAGSKLNRHGLYDSCHCRVIMYDKCIGDVGVPMSIPDVFDTRTFALHGTKDFENGPPEHIHTFYAAKVSYNCFIRCRILYPPSVGGFSFMPSTGVNKRKEYMVRWAPARFPAPVPPLNLKTPCTVSPRSRPPLAGASAGLGFPGERLNPFSHLWHRPRGEG

SEQ ID NO: 973707 - protein, 73 aa, Homo sapiens
AGVTGEAGDGVLYCSAVEAAVQVESVRVLGCNPGPHDPAKAPIIYTMCGSRPRGESSIDYWMNQSIPRLHSAV

SEQ ID NO: 973708 - protein, 105 aa, Homo sapiens
MRSKTRGPDLVVELVRTYNLLTRYTVTIPNVDTFRSAEASSDVRGHFRIFEKVVPRKTGHNGLSIRIPRYVILVSNGFLCTVCAFREYLRGTSSRVLFYLIPETL

SEQ ID NO: 973709 - protein, 298 aa, Homo sapiens
  misc_feature (108)..(108): Xaa can be any naturally occurring amino acid
MAPEKSFPETIRVGGGGGPEEDIEGKVGLIDVGSLEEKPGARNIVGVGIPHPNKKKGARGERHGTGSVNQTPKKGAVSRRGTNQGENSSPAATSHTRTRKLIKIIAPXAQGDTLRNTRTKDNTATRQTNKRKPQQTNDHHDNQRNQRDDHDRQTDTRQTRQTHEPPNNKTLTHNPPPTNAAHTTDKTPTNPHNKRSSLIVHSRSGEEVTAKQAKRPRGAGGTDVGESQRGKYVRELKEGSNSRQQAQEATRRRCKNRGPPSNQRRTHDKKTHDRDPDPVTPRHGCFGATGPGARTPST

SEQ ID NO: 973710 - protein, 138 aa, Homo sapiens
MRLIYSTVNSAIRPQYLNTRQPEQVTGRPYQNPPSPHQRSSALPSTPTYFTLVSTTSTTTDTTQQHIERHRTHTDLHPSASSPQAQNGPRATETRHIRAPNKNTAPTQHQARARTTRDPPPGTAHSATTRTPHHDNQP

SEQ ID NO: 973711 - protein, 269 aa, Homo sapiens
MAIVTDRDDLSWHPSDRRRGVRKAVYVKAYRSSVSAVQMENTREIPSGSKLDCSSPEAEDFHSGEVEGPIVADRHKSPNLGVHLRLEGVREQGWDSWLSRNLYTECRRVTECDHSVCGRSTPIRKYPVMHRRGLSTSQTENEGLRRFNVVGSKDMRRRRLINGAQRTLCNLEHTVRCLRSEFKKTLYDRTTSDSLEENWDASPPSGPDTCWCTDATQSPRRSDLESLRRALNRQLHYRPGDRPSPPPPSPAPPSPTPPHTWPSPHNSLN

SEQ ID NO: 973712 - protein, 147 aa, Homo sapiens
MLTSSDYWLFDECKMWSETPWLVDAERSYRKTRYRPWSCSDETIVHKAQHIAEMRQLLIRAVAGNMAVRNSVKEPWSSYLHKYLINYRVQELSALSLEEQTPSDLTKQAYGFRLARQMSYVSDGAASATSRLYTVCCGAPSMAVKSC

SEQ ID NO: 973713 - protein, 281 aa, Homo sapiens
MVNTCRPLAVSQRKNRGPGTKGGDSYTKITKRRGRHPERFRETKHPRRELRKAQTRGSHPTRESSTGGRINKIKPPAVGTQQKTQQSVNTRRKSQPTNTHRTPQRCSHTSAPPHPQPTAPATLLGASSATIPRSHTDTQTTKLSRHDHTSHHSTSCQATSSATGRSPDGAVRCGVTAWFRLREGGARGAWAGNASCARRVKHKDRLRLQLDREALDKTEGSVNRGRPREADANYTRRPEEAHHAMCGGVHAGYVRVSSRKHAHARHHDPTSRHPRCTSRSA

SEQ ID NO: 973714 - protein, 268 aa, Homo sapiens
FCSGAACGPLRGCKLLVCGWEERRERFGRFVGIPGKDEMLPESLTRHGVKRSASPDDDLGSSNLVEAATTCGKMKMSKQKVLETYGLHVTQKEPYWSSCYRTITNSTSHFRTGEEDNEQITEELESQYQQSMDSTIIRTIIADIVRLGFREVGRTMMDELVMWLEHDADVTLMIPPDPVKSNDESCQAFDAYDLPRHLAKKLPAAERPGLPVDGSHGAIKMAKAYPPLRRNPWFLVPPLTCVNRATVSTPGACTPALYSQQAHITRVP

SEQ ID NO: 973715 - protein, 82 aa, Homo sapiens
MRKEDLHYQGSQQTRGTTVLYLQAGTISPKPGISTRRGAPITVRNAETKGFAEREVSEAQGNRNIGAEKGGQKAQPGKKYTA

SEQ ID NO: 973716 - protein, 35 aa, Homo sapiens
MHINGHWDISQASQLIKRLTTHKVKPGDKRNVKKR

SEQ ID NO: 973717 - protein, 115 aa, Homo sapiens
MTDVTSKGISEPGLCKFDRLALEQRYEGKGTTAPMPTAQSPRIRPAIKHPGQRDSDPGTGHGGHGSAGTHKGVPTSHREPHPSPGRRRHPTATTHHPHATQRNHRPRTHNTHSGP

SEQ ID NO: 973718 - protein, 117 aa, Homo sapiens
SATGESAESSLHKYRRKVILSTPVPSPLDLKPGGHAVCSLIPYRGGWLIYTHYDGPVSESVDLPGMSGRPPSLCSSFRSTQTPDSYLKLVDHRFNEITRTEIMTLAFFRSYTDKTEG

SEQ ID NO: 973719 - protein, 275 aa, Homo sapiens
MHRSLMVSNAYAKQDTYKSFHVCYNAQMSNSHTPPTSCTPQTLLSCHPPTNPNRLSSETITYSRTASALLGVYFKRAVEPLLPAKKDPQGRSDEGIRIRSHMKNATRAGAERQRYITPEKMEYAQHYTQRGAAPNAQSPRRPPCPRHGPTVWTQHAPTRTPMTRVLPAPTGTPAPTADPHTYGTTIPWNRRLTNTHEERQTTRTHYHQSSTAGGSAPPRTHHTPHKPHSILYGPAPTAHTRTRPHNTTAQNIQTQKYPPHNAHRKNTTSTTPTKH

SEQ ID NO: 973720 - protein, 259 aa, Homo sapiens
SGERRQACAKPSPGSNKLAPMMPILGLGTWKIPSRAGDLRPVKVAIDVVVPATSDLCPMSSPSNAECSVAGVAHSGQQAQGSQCGCTACRQLSPLCRRKPVRARYPLRPGACVHKDDLSRKDTQTEPDKLGTYPVTLITLYFQLWPGPRHFIEPLETRGHLFSPIMRHAGSRATLGLGSHTRCTTPMHPSRTTMGAGPHGNSSHGRRLATRAWLRHRLLGPLVPHLHTPNLPVLRSLPRYKKHVGLAPYHDLPFHPELR

SEQ ID NO: 973721 - protein, 293 aa, Homo sapiens
IDAAAFNRPWSSAGSKKKQDLDKLYELTVQRLGEIMNQLGPIQAVINLFQVSHPKKRGRPVSTPPQGSMANSTAVEEIPGTPGAGGRLSPENNQVLTKKKLQDLVREVDPNEQWDEDVEDDAAARLLNDLYRECGDSRLSACAAIAVLAPWRCNDVQLHLELQWNMWIQDLALKKSDLEKRLPQRRTNREWHDPEDNPEVHTGQGPVMAGTDLEILSRDQPVIPDITKRIQKGNINNGHNIHMRRCKRRRPTAFRPKREDSAKRATQNARMRNNTNRGPQRNTNGKHKANETP

SEQ ID NO: 973722 - protein, 111 aa, Homo sapiens
MSPGGKDPPSFGARGTGGPRLAVLEDSARPSKAGSPDASPHTRGLLRLLRAPPRVPPPRSRLLRVGAPNSTVGINRRSADSPPCLLRERSFGSEASTTGSPHTLLCGPARP

SEQ ID NO: 973723 - protein, 211 aa, Homo sapiens
VWSLAVNSVGTEQIRWTLLPALTSRPRDFASSVLQCIRRPSSRAISCFLGPGQQRCVVVELPVLPNQTMERPRIRAELLHRTLRGRPIKQAWSNYVACEVAIHTAYRVVSWSFQLSDPATDVSSSEGVSLRSLREMDEEKRCWATSVLRDRCKDQSCDGRRSLPGHQEASGMMSGVKPRGHESCHGRGEKAEPGLMDLHALGSCRREPHIC

SEQ ID NO: 973724 - protein, 99 aa, Homo sapiens
ALDGIWLHDARYLPSCPTMSSQLVELRATLGILLKDIAMKMRQLCIRARLGLKCVPVTGAYLMNGEPCKRRSDYMADGIALLGAGRRSILIIPSTHVTR

SEQ ID NO: 973725 - protein, 119 aa, Homo sapiens
MYVYWLTSRSSILYTVSRIQMWAMSVLLIGLISTYSIREKISVYTGSMGIHYTVNNSLGSRIVVMGSSRPLIHIGDHKCPNEKPPVYARFSYNLFGGGLFYLPHTTVLSRTHNARCTFE

SEQ ID NO: 973726 - protein, 155 aa, Homo sapiens
MTSEDFFGSTIGMIIHGFCFKLEEKWLPYEVPLTPEFSSLFMCHVFILFYKRGLRLSPGLQSCILHVSHTPTNSAGINSAVRPTTPWFICSFFSGLRAISQSRCYDMFSVLSCRFLFHGSHEEYCVEHTSDVSKEYHVYCTQLSLRKANVLRARF

SEQ ID NO: 973727 - protein, 241 aa, Homo sapiens
QKRLKKLRGKEKPKKKKKKKKKNLGAARAPAKKTCSRTPIALWGARGPQGEVRGDTRGPKSGFPIRKHRGPEAMRVARDSPDPNKKRAPRGGKAREGLGKKSTKRGFARRAQQAGDTIITQGASSQEGDLRSITKYIPRPRHRGGANKQEETTKTKEERTKEKKNETRKKKTEESTKSTTKVEHRATRRPMRATQSATRADTSDTYRTPSRTHQAPQPQTTNKRRPTKQNIEKNRRQDTAR

SEQ ID NO: 973728 - protein, 272 aa, Homo sapiens
MHSERHSTQGLTGSITIPIQLIIHASSSSRTNRSVLRRGPRFPKRSRISQRTNRRVGGMTLRISRVVTCEREIRESSYENTDSWYSPKMKFTALDAQEMATDHRCQEAVRHARRQKLVQNIMNMLMRGPQSDLLARSMSVGSAVISQQENYERPFQIIGRRSASISQRRALKLAQDLNGEWVSQNCSKLQSEEHRSHTPADVTHCTTGTGKSRITKTLEQYAYTAQYCARIQTKNKWGITRNPIRTKDKWNTNKCGRNTTHQPQTVNTLKQT

SEQ ID NO: 973729 - protein, 76 aa, Homo sapiens
LEAEMPEMQVPWRPRLVSAIELQMAQTCIDSLSHLLQRPTHIPGMVCDVQPQYDCDRPEPRILDSRGLTIIIRAVT

SEQ ID NO: 973730 - protein, 148 aa, Homo sapiens
LTHAPMSNNMAFSAKKKKKKKKKIWGPPGPPEKASWKTIRVVGRAAGPQRGHSGTGAPNAVFPERRNRGAQRTRAWAISHNIRKAPRGETRGVSSENTNSQERRGSERAHKRGNPYSNEESPKRRSPKIFQIIRAPGPWGEKTKKRQR

SEQ ID NO: 973731 - protein, 188 aa, Homo sapiens
LQTINSTMSLVKLLHERGISAKVYHSQFRSKPRVQPRPLNSHGYRTSITNNVQLSQSAWPLLLHLFEPRVAFSLRIERPLDSSDIPPGDVWLETSPETILMVGQLKMNLGGQAVTRLCGYARVVKNPGAQENGRCQEAEIGPQKSDSAVYLNSGSSLLGGLRRTQSLPVIMGSFDDPVCTSHPNNGCP

SEQ ID NO: 973732 - protein, 144 aa, Homo sapiens
MRGADCWDPSVSTYVCDGCDIPHVVPAFSKHANHGCLGARCGPLVGWRGDRSIACAEPFGLQCNMLYDCARILSSRLSRSGFHSRHSYHCTGLLVMLLSTYYGKNQQRYLESNYPLNCPYKGSDLPVRWAPGCTSLSQKCRVRS

SEQ ID NO: 973733 - protein, 454 aa, Homo sapiens
MPKETEARLKFCTLKKEQHGLSYLSKCWWSTLRHIFKTSQKLSIHYHIVVIFTISIFGGQIPSSWCTAIASPEQSITLVLVHHSTVFNMDHHHTVTHISQYTHQPFQTQRHGFHTSATGRGRSKQGVTLVIYGTRFNYNMKPPTSVRAHLATCPSGGNRHHSQTWSHSHLGTNLPLKRRFWRLPPSWRHNTNSKNQLSTHPITLLVVGPRHNNTGPVLPHRVYTFTIANLRNTSVDIGHWAHILPRPLHVACPPSRTTQLGFQRSGAAHPSPTDTDAPRAATPQRTAPTTHTQNPHPHTLHSQHNTPHYSNEQAEEHRVPRSQHRRHHFRKTDHNTNKNAPVVSLNQTTALNSKLQPSKSAGTTQHKNRLESRPPLYATTPRTRDPHTDTKQPLTGDDADLEHTPPNRQRRITQRRTLHRRPNTTTDYVPHKYDTTISSTAPTTHTSKIHYSQN

SEQ ID NO: 973734 - protein, 145 aa, Homo sapiens
KQWLPGLGLDVPGVEVDKQFKWAIVDLEGALRIMEMALVAEAVPRGCKWPSWSCEVPLGIWVGHQLLGLARPGPAWPIHIGGPPGFASSSGKPGPTVIKVQNMPFTGVYDEILDSFMAIKYIPGSVCPQYTCQQVCPTGEAMVAF

SEQ ID NO: 973735 - protein, 122 aa, Homo sapiens
MPERKPQELRLLQAELLQADPYNNWLRGGGIKQHKDEVKTSAEIMGIPYLDAPSEGTSQCEPGKMAQLILRVPTKWDANIRSRAYGNDATKHSANTDTLSRLTTGRQETAGRDRKADRTNSE

SEQ ID NO: 973736 - protein, 162 aa, Homo sapiens
MLLRYREVAVRLGLNMTHLGEYLYWEVYEVEQVMIGPGLYDRTSHHECKEYSRHICQEIEEMVQDSAFDRSMHFVILTYMALIYGIGELLRSIDTRMNGFPVSVRANNATTMTGFLCTWGSCPRVACVHLIKLLKTMTPNFTCPPFTTERRRLICVQTQRSR

SEQ ID NO: 973737 - protein, 217 aa, Homo sapiens
DLWTRVHEHEPRPQYRYSRSVLVPRGQWRLPVFYMHTGQKMPLIWSGYLEECRLAHGKTQLLSMPLAEATANIDCAAIYGNEPEIGEALNDARGHQARPVPREELLVTSNACGTTKQHPEDVLSLPPEDSWLTSSWTYLDLYLDALALTCLLSGEKTPLAPRHADGALIMLRNTATTKENLEGPARHMPGITGAWCKEPGDLYKLPTDRQDRMTITQ

SEQ ID NO: 973738 - protein, 295 aa, Homo sapiens
MPHQKAYNTKSRKPPPLKHTHPSPSSKTERKRINLCTFTNPYITRMTMRQAQIDKRSFQQMTPHPNVPARTHNPTHPAHTIHTVSITCKTSLDADSQTSYQSENMKHNPLPREEASKATSNSHTTRNSMQPHSELHTAVNCRPPMRLKHPRPELERTTPEANPRPAKMRQRRTHTALRRSTPAKSEAHRTPDTPTEQDHTRDLTEQPPHKQPSTHKQLNLTYCRPRTTNHLTNHTKKNQDKTTKKTSHQPQEQTDHSTDTHLTSINTLHTPREGKDTSHRRKKKYSNTPYTTHTQ

SEQ ID NO: 973739 - protein, 78 aa, Homo sapiens
MNVVSTLPTVEFAEARVSRTKALNCRLSVSKEFDTRPESRTLRRVLLEVNGNASPGSRGSWAGEGALGLGPGCALVLR

SEQ ID NO: 973740 - protein, 174 aa, Homo sapiens
  misc_feature (120)..(120): Xaa can be any naturally occurring amino acid
  misc_feature (132)..(133): Xaa can be any naturally occurring amino acid
  misc_feature (159)..(159): Xaa can be any naturally occurring amino acid
MPCGGARAPKVGARGTHGCKTWVPYKEKPWAPIGNERDVGGSSLYPPSIINSAPPGRNKREERFRGNHTSHQKMKERIIAKTRPTTIRGRAIPYTTSGRRDFPPKGAGSYRPYNYPTNIXAAARRARCRGYXXRHIRREPTQPNRPKAMTNYRTERYNXEQNEATQRNRKRQHL

SEQ ID NO: 973741 - protein, 148 aa, Homo sapiens
MYLSILLLTPSLLLPTYALATELTTYSLGSTLVRILPHYTRPTPYIPTYSPNYSAALTAPTHLSSISAPAHSRNAQDLSMRDPTPPYRTRTININLKATSSLATLRSLAATHYNALHTAYHRTLAYQSLHIDYPNPTYHYSTYPTCTH

SEQ ID NO: 973742 - protein, 72 aa, Homo sapiens
MRKRGTKGVVSTEEKCGVQDIGGGDSPPIKKERAGGTEERVGNTSKREQCGGHGGSYKGGSRETEYHSPAGG

SEQ ID NO: 973743 - protein, 71 aa, Homo sapiens
VAACLGGTYVDSEADVSTPFPSGNEDNIYKPYNKARADELIGKQVYGSHMHRKIWTLDRHTATLISYSSKR

SEQ ID NO: 973744 - protein, 185 aa, Homo sapiens
MSLTCVAQAWKCTGAGDRESGEKSSCLTKDTSRHHEALGTHTARSRKHKRATRKHEMRKNTGREDKERTKKQRKKKPTRKTSHGHPAGTRQQRGHQQPDRQPPHQHNREIDRHPPPNTRLTQKPETQPQHQTPAQRTHTTLESGAQTRHSRHKPTHNTTRTNKTTGHNWPQRRRKHTGEQNRTKR

SEQ ID NO: 973745 - protein, 113 aa, Homo sapiens
MTIPDHDYVFVICTRSLKRPEASEQFRSYPDGVTDGHLQESDHTGSSHCEHRIIGITDIVLIAILFNNNSPDNETITNTKQSILIINNHNGYRIKLGIAPFILSPRGYPRHPV

SEQ ID NO: 973746 - protein, 102 aa, Homo sapiens
MAEIEKIRVRSKLKIGQRRKRKIHCLPTETSGGRRSRDRRSRNEACARQVVHCDMSTSSCLLYFTSVSCLTWEDAKRLDEDLNDLCCRLHDQENLLTNEGRA

SEQ ID NO: 973747 - protein, 182 aa, Homo sapiens
MEAVECSRDSYGASIASIKKSSAIREIAKRSRPEEAQYVKRLLGMVAFRNTVSTNAHGWKTPQLKMRVNSQQEEVRQTEVSWHLYTPGTKGLSVTGRAESNQPPVWRLTWIKSDQKYRGDCGRMNIVWEDLANGWSKGVNPAQRGQSPARKAQGKERKDKFGEEKREPETKGGKVKTNKRKR

SEQ ID NO: 973748 - protein, 200 aa, Homo sapiens
  misc_feature (85)..(85): Xaa can be any naturally occurring amino acid
MGRIFGLPPCIAESGGSHWVMAKVQKLVINNNAIDHGRRIYTRRYRLAIDSKFPTTGFWVNCVNSYQARTPAIDTGVSLRVEQPXSLLPVFVDFVFVEAALARLHALTLCVLALRFPRGRLFSEGPCVNWRPLECVVCPQWAIGPSMGRVVCLSLSITFLHCALGMGCILNIPRLGASRRRFRARILSCRSVPGGSTHNS

SEQ ID NO: 973749 - protein, 142 aa, Homo sapiens
MLGGGGGGPQEGERKKAGTKGVFPRGKTGGQETEEGGDFPPQYKKRAAGGKTERVCWETTTQREGGFREGLKGGDHQKRGDHKRGNEAKNTKIITPPGGGGLNKKQKKREERDTTKKQEHEKRKRRKTMTTEKKTTEEREEE

SEQ ID NO: 973750 - protein, 72 aa, Homo sapiens
SAGKSVTFSPLLSSCVNMVRTKADRVPGDLQKEWWLLEPPERCWVLPTSGTEFDISIIEEMSMFLCKLITTQ

SEQ ID NO: 973751 - protein, 43 aa, Homo sapiens
VVTAEKKRNTNAQEKKTGTIHRRHDNVNNKQTTAINNTKLTDT

SEQ ID NO: 973752 - protein, 104 aa, Homo sapiens
MGVYYNRTLTNSEVQQLHKYAHPRLARVAYTGGPENNFEKKQVTFVYSRLFTNYLMPDVFSPGIFPNVTSAFFVFSNKGQTFYTFDQIVISYVGHLVYCQSLRL

SEQ ID NO: 973753 - protein, 222 aa, Homo sapiens
MCVRARAPARPLAKEAFYKNTHRAVGRARAGHQEGKGETVGAKDACFSIRENTAGAERTRGRGGISPHPKYKKSAARGDNTQRGVSRRHTNTLPRERGESLERERSIYTRGGALYIHTQEGESPPRRRDAPSRKYHTTEYIITARPRVHSRGGGGPTQQTQNHKTKKQQKSTTQPTYYSTKTKNTNNRPNHHTHNSDPTTSQKHNQQNKPKKNHTPPAPPAP

SEQ ID NO: 973754 - protein, 107 aa, Homo sapiens
SGESPHVKVVLAAAVFDGSSSDSQLVTWSFTSETVCPRKKEDHHQYDCPKDICLGSSENLGSSEIMVRPVGDPAWWVSVRVPQQFPEESGDINSGLGPRGLPVRRNE

SEQ ID NO: 973755 - protein, 102 aa, Homo sapiens
MPLQNTPARGARRGPQWGKGKTVGQKAGVPIGDTRGAKRKGGGEISPPTKKNRPGEKPEGCFENKFHKGGDLREGSLRGIFIERRNPKGKLRNLNLTPGRVG

SEQ ID NO: 973756 - protein, 72 aa, Homo sapiens
MNPFAQRVLFSCEHLLCLAVLLGARDTEPDGQDVNKEESRFRVLTEEQCKDCGRHGLGNCRPSVGSVHLQLT

SEQ ID NO: 973757 - protein, 102 aa, Homo sapiens
QLVVVNRLTEELGCDEIIAVESSLDAVKREGENYLRRDPTFPYILWVRVRNSYGAMDRELDPIIGKFVVHEVESTIGECTAAAVQSMEEKCSSQGKRHIRDI

SEQ ID NO: 973758 - protein, 114 aa, Homo sapiens
VVPCSLARVSLGGRTWTLQADNVIQVRNMGTLKDITRRLRVHQEIHPGKCTKVYENGSGSEICLVAERELVNQTSESMMDLGIFSSVMRKAEYEGELKYEKEKTFIIWWCPQDR

SEQ ID NO: 973759 - protein, 264 aa, Homo sapiens
MRRRPQMGAPPSHVSVPCSVVPKPRFAPHNIRAAKMKDEGRQKLKTWGMKNSGPPLHATPVGSASPHLSVRNPSAMSKQVVAAVPPPPWVISSSPPDSGRNLSVTLPPEHIMGANVAKKGENQGGAPKETETMSPRINRGVTPKITHHRAPDERKKRSGPTQGHKSKHKRERDNFLAPPRRTMDTTQETLSQPPSDGTTTQQFSAPTQHTTTERDMSDPGETPSQTREPRSAQPPADSEPAAPSRCSFPGSTAKNLITITQQQS

SEQ ID NO: 973760 - protein, 127 aa, Homo sapiens
DEDEDEDEIEPAAMKAAAAAPASEDEDEEEEEEEEEEEEEEEEEEEEEEEEEEEEEEEKKKRRRRRRRRRRRRRRTKTKTNEDDEEERRRRRRKKKDGEDVNAEERHATRGGRETEGEPPYETEDTR

SEQ ID NO: 973761 - protein, 233 aa, Homo sapiens
GERHSRDGRVLMIRATRHISRTPGIHTVFELKRIDRRASSSGVLTSSGCTRVTNLLVDGKTTGRVWLHQGQTARHRPQPQWGCSSGQSDTLRPCASSRFPARQSCRCDEAPGLGKQANEQAVQGDPKRPISPNKRDLGHNNTCKFSDTPSSCTKKDNRVVRDPRSICEEAFPKPTRVEERAAHRCVGRPWTQGLARGKTAQKGAVSHKKRRGERRLRTNKGCETRVTQDPLLN

SEQ ID NO: 973762 - protein, 82 aa, Homo sapiens
EGPGGLGRLRLLIQSRVSLPQIVLRQYHRFKAKYSIRRLVSPSSYCYLYGNMGDYMVAMTWYPHGRSGHRFIIQDAMLGQEN

SEQ ID NO: 973763 - protein, 129 aa, Homo sapiens
WCSKCGKIKARDLRGKNKEELLKQLDDLKVELVPDLRVRQSDMADGASKARLGYRSAPEIALARVLTVINPDSEEKTSGNILSKGQEVGKAPGPAGLRRARAVRSRFNKHEEEAVKTKKQQRKGAAVPA

SEQ ID NO: 973764 - protein, 194 aa, Homo sapiens
RNCTLYVHRKDCTCGTSIHGAPEPQVSLRPDHESVASESQYPVCSLLQACYRPVIYPNSYRCSNLWDERLCLIGTRACSAGTEVYRNTVRMKKYRKCKVECRHESSKFMCVETSLWLPPEKKAVLVPCLKAGHVGVVSVEFIALSLGGRRILPIGGLISQRPAIWVSGLVQYHSRSFPLRREPDNIDKGMIMSA

SEQ ID NO: 973765 - protein, 296 aa, Homo sapiens
  misc_feature (52)..(52): Xaa can be any naturally occurring amino acid
VCLSLLVDLCATLYTCLPLRSSLLPLCICSDDVFFRCTTVLLPLAVPVPGGXPFRPCVFTPPRFGFAPPIAGFSPAPDDLGARVSFGEGLPAHILFVKPLLYCRILSLGLVPGKYPPVFAPLRPRGSAPKFPPRLCHHTPHTPRVRVYFPGDRTLQGRSFPTPAWAPPYKVCDPPPPGGVSPPIMHDGVCPPPNYVLAARGSFRGIPLSPWLTPRLVARSPRYYLSPRSLSTWPKTSNSLETPWLSIPPVPIAPRVLRRHHEWAPAYFPAGPLPGRRRPAYPPRSSPVHPPRGPLP

SEQ ID NO: 973766 - protein, 291 aa, Homo sapiens
MRAFLYSARRCAGPRYLSVAYAFLRSEEPSLFSWWRSVARAAFVFSGVSPLAGANAHSPGVRPRRSSLSRFWGARFSPQPGFVSLTPPWASCARGATLSPMLPPAFDARGVPFPQWRAPVPPSKLRASLSRYGLPHHGAYFHSPFSAPGAGRLPLTRHTSRYTPCPGHYVCHASDCPSRAFPGQSRPARPFYYFGKRKRLVARHSGVHESCHPAFVRQDDVVLPKYASFCLFNEGQLPPRLGTLYIPSWRGHTGTRYYYVVALQHWKFAGTPGTNPPLHRNPGFQTEPHVA

SEQ ID NO: 973767 - protein, 83 aa, Homo sapiens
MVGSYRAWCQTFFALIWAVSVWALYSSLLGGPEKVVCDHKAQGIDEQYALGVLLLEGPSLCVLTMVDAHGTGYHRNLMLKKIR

SEQ ID NO: 973768 - protein, 115 aa, Homo sapiens
MYIIPGSYGANVSGNSHLHQTYDRTGSKTTWGMCRTVFIKAIAGEPQYCPRRTKHTTEPGAKATNPKAQKASPSAADTAKTRAEQSDNTKRDHTYAQYKHATEQAKKQKQQTPQT

SEQ ID NO: 973769 - protein, 255 aa, Homo sapiens
AVGREDCLRGGAPNWSGRPAVVPPPLPAGVLVGPPPVANEVAPEGFHVVKGRGPQWLYGCRPFVQEAFAFSRPPLILWDRRACRGARTRRAVARVGKREGARKSKTQQLQEGGWQQTPGKIGAKRGAPPISGARARCPKRRFQEDTPEAYRLTRRATHRSHTLCTTEGNLDSPWRTLHSWAPFPPPVISVPSTGGDYVRGCWPHTLPPGSARRGPRCHYATSPGPNSKAPFDDSRPWVPFPFAPGAPPDPSPNIT

SEQ ID NO: 973770 - protein, 427 aa, Homo sapiens
RGFPASTVLWHGSPALVPHPRPGRTHSQPSDHLFTAPSDCPKDPRAPIQQHRRKNTAGRPTTHPLGRRHDERVHLAGAPELPPGHQTAAHQPPDQPGALRHPTIYPCSTVFHVLQTAMHVCFEATCAKYLDSPISGATQGHTAEKHDDDLENYRGVDAVFLQDITETSTAHHPGTAGADMHTERAYTIVTHKTVQYRHQRERQKQGNAQHRTHNWCDIPEQPTPTDQAQAQKMAASDKLRMRDHETEGRKLRRRAGESDRQQASNTGRGRTCQQGLSEQVIVQTKMGATAAYMSLCLLLASLVLAATPHDTLHLPHLRADDPHDTYENKKGEGRRERKKARRKTERMAQEEHEDAKRKSGQQREQTETGEQGEERKVKREGKDREKRDRQNRKATNRKRKRRKSKREEEAEENKSKKRKKEEEANIE

SEQ ID NO: 973771 - protein, 372 aa, Homo sapiens
HWQQGSGTVTRKAWANDQLGTDAALIASWTSQVPYRYPTSDAQLDQSLLQALTHSKELFNNYLGRGYGTLVPVVVARTAASTGDGALNTTPGLEWGWDPPMRGIPRIQAPLNTPGNGVKQNTATDKWQTKGESAIVLAGLNTSRSYFPLETPESTAGLARPFSKMASNENNLVGSCGSNSGNCAPGLRGGQQRVYGPWRFGNQGAYNGRHVNRPNPKNSGEPWPNVHGAIVHDLMGRSQGGFATLKFRARKKREFTHYGGPETQVEWLWPGGTFTEDTPPLVQTRRGIWGATQTGAHSNAISGPSWATSASYRPPGTCLRMHSVRTHRPDSRRTITGTRDWPIDGFTHNEGSCAAHSTVSGSLTSKTTFPRG

SEQ ID NO: 973772 - protein, 329 aa, Homo sapiens
WGGCLAAPSVIVLRVPDVVLSLCAVVYRCVVLRHAAIIEVRKCPGRLVAHICPPDRVVILLSVSAVSPPIVPPPKPRVVGSHPGRVLKASSVSGSASPFRLRVVFNLGAARPISCGLLRGAAPLYLAVLWRRAPLLVRKCLCKQGTPHGGWPLRGAARESWPTRPQHTGWASLRHNPLGPDRSVFGVWVTASLPAFLLSRQRLPQCLHGINFPPPDIPPPPLLSITCCKDSFFHNLFSHQLPYYYNFCALSEYPVLLIDTPTRVYNPSHKNKNVEYFIQGPPCRLVFKDITSKIYSIIVSSSNLAIVYPYSLTVPTLPPGILGTPFKPN

SEQ ID NO: 973773 - protein, 500 aa, Homo sapiens
MAGVKPRAYWRPWSDEALPEYDACRGDMLRKQRSLPEADYHWALPVTCSPKWPLHLDVGNCTAPDDSTHTAPCEDIIDINSPCLKVIVAHCNRIIAHHNLQLELQQDLNTRNIAMHCQPYLDPASMSIASSSVSQLLAPRPASQVGMPHSTTKLAAQSTPSCRQRCTNLFLMATRRLHIPPGWTDCLYKHLNPRRPMLSSHNSPHGHCAAPGPSSSLYGGLCHLAFLAQPRTPSNPDLTDAGYRRDPRRNPSDTLAHPRRKTTQRVISERRKDKLTVICVLFFSPFSIKTTISRQKPKQQRVGRNTRREGSQIEQKQPETAEHQKEKTPRTSQHPQDQKGDTSDERERRAQQREAADAARASNAQGESERGNEKRKKKRRGSEEAAKRGEQKERAEGEARRKAPEEEDETPQERTDEQGYKAQQEAPGARTAGGGRSGEGAGTHTEGRRREETRQKGETGGELASDQNEEREQSEGPTSEGPRGDGTRGAKPEGRTSEED

SEQ ID NO: 973774 - protein, 302 aa, Homo sapiens
MRYQSDNREPTERQHGTFEWRTSPLAQNAGPPWQRTTNTRSIVPRPTNNIEETPRKRAPQQRPGPDTEAPIHDNEPAARRREAPTTDTPQHTPNSRIEQPEHAHGATTSRPPGAQHDPSRQPRHTAKHKEREQQGETAHTKRHTENAQRHEHTDISTQKTTHQWRHDTSNRPEQNTKAAPPSNKGRHTSLQTAPTIERRTKGDTEPRGNTHSEKYNVREKHIALGNGATEALPEKDMRREEGKDETHNHNSKDNEKTNRTTEDTNKQYKRKGPEERENADTDARGKQDATKGHPTHEHKGGT

SEQ ID NO: 973775 - protein, 599 aa, Homo sapiens
MDGGGSPTGGTVAPFYYDYETVRNGGLIIRWTGLHRGAPHPSSDRRYRKMRGNKKRRQTQLKMSRNSSTQAGRHPMNLGPAGNDKLAHDYLEAHPNNPGPKHLCTTTLTEPGHDRKLQTQCDHQGGISTTNCLVQPHAHYIQPATQTADSLTDHNTHHAPPNPRPATTDLDNDSTTRKQPTQINTHEHSPQRQAPNDASNKNRGTKANTAKNDNQTHTKTHGKTTTRHTHNEPKQDHINGAQCRRNINDRKKTTTQHTTHQPKPATPTNTRTQTNKNDNKTTQTQHSPPTTRQTAHKRPARHEDKNQRRGGRAGRKGRAAESHSRRTHEKQKWREKSEVNRQEPCADARDGEERQSQNASDEERQREARREGTETTEGTEDSVMNPRRSRRSRTRHAPNPRATRTHRHPALTPRSEAAETRRQHHTRPYSGAATHRPRTPHQRSARRASITANTSSNATETARHQTEEGDDRAQATRRRRRRALERQRHNELQSRSNRRPGSQHRGRRLEAARVASGGKPKRKALTAERRVGSERDARGQNEEASNSTSSAPRTARAPDESRKTSGRKAQRDERATRRVESRQDSQRRHHASSQTEQKR

SEQ ID NO: 973776 - protein, 414 aa, Homo sapiens
MQLPVPWTCGCCPGELSLYLEHQVRVGFYRLGGGLIPYPAASAVAYALLIPEDSIAKKPQLVTGGESFSPTSFKTTCPVVPDTYYPTVLVLGRVGGQTLLSDLSSLPKAHGASTGLHLINTCSMDGQITLDCLDPDQQYRDNMRCQKPRANYQMVTGTNGHTRKEYKLSIMKQHNRKLGQRSAGYKQHKTGSTILPPHNVGITTTTNQPMTADQHTHVREDQQPRGIATGLCHYLKTPPSSTPATTHHTQSKTNHARRPRMREEKRQTQTDHTQEAMNQTRHEQGPHDYDMTSMHTHADHHTHHSQQATRPTTTKKARARHDNAETRRRATEEDRGMRRDRPIAREYTTPTTTEQRQDATGHKQGGRANMRWEEELRNEESGRQRGMEETKEERTGERREQNEARATYTMQPPE

SEQ ID NO: 973777 - protein, 106 aa, Homo sapiens
MYLRVVRSINLLELARWHSLGRMFLSTRVTSTMLCVQCRDIMRSYRTNLQLLVTEGRRFSSKIQFGWRNHDTAQSCWHVDQGVRAIYISEYSATVHIGSCTEDVND

SEQ ID NO: 973778 - protein, 70 aa, Homo sapiens
RAASGLVESPPSAAVVLTLSPSFPQRMSGLPDQLNPLKEPLGFIKVLEWIASIFAFPPVDGFKGQTDNST

SEQ ID NO: 973779 - protein, 79 aa, Homo sapiens
MSWWGRAAQEWDLRDERRYWGFTRGTPWQKKTGADPHTKKTPRGRHRAVVSKHPETEVQEAQRGLNTEGPKQRVKQNCA

SEQ ID NO: 973780 - protein, 663 aa, Homo sapiens
RRGFLLQQCLDWNPCCSVPHPGRTQHSQPSVTLHRTLGLPQGPRRRSSAAQTTTDDSRLSLVAASDDRVNLAGAPELPPGLRGRHINRQINPGATTPSYVLPVHVHTTYRPPMMRLRHTLRHHTSFTNPMTRRDHCPQTTDWSRSNPTPVADIIPPGTPPHAPALTPQSALTRNRQSALSILAHNTGTTLPTLDLHNQATLPTNDTQTVSTTPETAIPALPKLSSTKHLAPTSNKRNIERRTRGQQTLAKPTGNRDTPHSPTQPHRTYLTCRNDPPHSASTPNHIRVCYIPVVHSHIHQHNDTTQLTTNTYQRKLLYILLYTLRLHTPPSTTIHKQLTLKPTTTQLPPSALPPQPHSSNTTPPREDQDTGATDHTNAERRTTTTRHSMTCKARTHSGRTPHEQLERNEAGDFRTRQTNTHHATQTPQNRTHKDDRQPTNGAYEPRPIRESTPERHAQPSPEPARTRAESRRARHGARTAHVPHNRGTREHGSAETAAGLEKCRSGSTSGAVVAQSVASTVVASMSEGRAREGSRGAEQRAEGRERGGGRRGEGGASLECRETSMGKRTIDKAGASEQVIALRPLARPESHKSDAEGYRVSHVERHSWEPTHAQRAEKAPIRCTQHAQDRERPPNSTTPAHPQPRTTADAQLQNSGTGQSESIK

SEQ ID NO: 973781 - protein, 356 aa, Homo sapiens
MRTPAVIQSPSPGAKFKNVTRAAGWISETETKFGPWALLPGASRIPQRAEQPGTDPFSRQFTAGDWQATSGPCGSPEDLRRDPRESRPGTANGTAWQMQLETKRANGTPGKTTVYPMAFQELVNTRIGSARGMHNHGGYNVSSYTPGHTPPGPRETGHQSNLWFTTSWSHNKAACSRPSHRLFHARKDSQHLELILTFHYSSHPPGRDLPTIVGPNLALPTLQTEGTTQYAPISAETDGAGTQPLDHSRSRNNREPTRPLGGATTGTRKPHNHATEKRQPTQPPTIQTRKTQQRAPRGLQGRKSTGQQSGQKGQRANLRTPRPPARTTATEAHSTTQQHTHKTDDETHTVEYYRAP

SEQ ID NO: 973782 - protein, 122 aa, Homo sapiens
PEDLSAETSGKRRWLNVVEATVMGDLSSIQLDVWIGTVGMGWWLLDSPHEQSSQPGTQCLLEFCALIWMLIEGYELWRRLNSMQNFVDRGRHLRIFQVSWEECYGMECGRVGKSLRYWSPSC

SEQ ID NO: 973783 - protein, 113 aa, Homo sapiens
MAFTFSRTLLARCLTLVCHCRAIIIHCADGERYIAYDVLMTDLAGNPGKPGGKYTLNALVLPDELIHAFFCVMFLCAAEWLTLGLNMPLLAYHIGGYEETSDEVARIYDPTTS

SEQ ID NO: 973784 - protein, 131 aa, Homo sapiens
TAEKQKHDGRVKIGHYILGDTLVVGTFVKVKVGKLMKLTWRKVAVRILNRRKIREPVSVVGKIRGEYSEAQAFSGILDIINTVARSSVHHRDIFMVMEYVSGGELLDYICKNGRGKLFGFNVCMYFVNSTL

SEQ ID NO: 973785 - protein, 377 aa, Homo sapiens
TTDTQCRWVLLTRSPQELSTLPVLYLCEFCLKYGRSLKCSSASLTKCDLQTSIQAMRFTSQGQPIIHSFEIDGRKNKSHSQNLCLSGTSVSYNHKTLYYDTAPLYSYYVMTEYDWYTGFHIVGYYLQGDRINGQTTHSGLHPNPELPTRRRGYGTLTDRRNIIMKLSTRGQGTHQGTHEEAPLPAHIGTHYPIEQLTVTKTTPEILNGGMKYAQTDNRTTDPPNNSDQAQQQHRQTRHQTSNTTNTHQTNHNNKSRQATPGKEKHREEPKPRPPDTPRHTTAPHAVYTPTAGATTRRTDDTTTGPEQANQPTARQKKNPTHEHTQPPRHGGADRRQTKQPSRHTQTAAPPTTNNATNDKRTKNRRSAARLPQPSSSH

SEQ ID NO: 973786 - protein, 556 aa, Homo sapiens
MVLKAHSLCQSCAALVAPSHSPTASPSASNIRHTHNNVAFFIPALHEFMYRIHMLHQSIQHTAGHNVLHMSHHISADAWSSAQSVVHSIEHHPSASQHIATQSNTSHTRLSLGYRHGSNQPHCIATGSSTQHRSVSRSVIHLRPQRVTCSSTGTQHIQSSQHTADQGTWLGSSQSIVSAPHPQRFNPITTQSRNKHNTQGHLHSHILKGAIAHAFPKHTWAPRANSYAFDIPMVAGLSQYLPTFLAPHYPTNWRNPIWQFARQGHKAMAATLLNPRRKTISRRDAQFPTSSWVSTRNLSLHWQLTHTPYRPTGTPLGDTTFTTHIHAVPLSLHSTVGSAIRRRHSTPHSQESGQTRETRPQDPNGGPWSDLPHGQLLRKTHLRDQRTHSVQQHNNYQGSVTTTDNAQHTDINKTRETTGDRMRTEANITSANQHMNTTQKHMTTQVQTRETRGAKRCTNRESYIPPQETTRASKKSKQTYTRRETQDHTPVETGNRDNRGHSNTTKINRCTKQAEEYPQRNHTTSSTHNQHTNQQTHEKRQNQPESTTTDRNRTIH

SEQ ID NO: 973787 - protein, 138 aa, Homo sapiens
SEKPDYAAGLFKADAGSFATVFATMSRSYNDELQVLWRRSIKTVGGSREGFVPKIMQVTGVFYVNDALEKWMWEELGNALSEVVVWGVPAKPMETSLWQCGKPCWIVSSIYGGFLDGPFQGYGLGYGGTWQLGDMNDP

SEQ ID NO: 973788 - protein, 117 aa, Homo sapiens
MRPILSDIRTEPVIAEAVLDRSKQQSNRSTIRNSEESKSSAPSRKHSETPNCRGAKAPNKMDITLVDRRYRESTRNQDRRQSITDTTDDREPNDERHDNTAGAATEDNARSTTVKQL

SEQ ID NO: 973789 - protein, 70 aa, Homo sapiens
MTTVVHTRFTQRKTGGDEHIGGWGIPPTKKRERRGDHGVVLDNNPQRESRGNKEGLLKTGHDERTTKKQP

SEQ ID NO: 973790 - protein, 266 aa, Homo sapiens
  misc_feature (123)..(123): Xaa can be any naturally occurring amino acid
FYRSILLTPPGSPIGVFYNDRRSIAPLCSLLVDISSVTVGGVSPPRGRMFLGFAPSAPCLAPCALWGPHQGGKPPLLKSPSPVPRIARLLSYTFCRAAPLLFVNNSGGAPSSPNGPRNDPPLXSPLMTRAKRVSRHAVFSSAILLLAVAPQFSAGCSLRRHRNCLSPSSRRAPPAFGATVRARWFPPLLAMRRRRESVVCECVSPQSLDSHYTVDPATHASLSKRCIVKIILLLGRLHCAWIDEDQDVPSLRPQGVKNEYRYPPLP

SEQ ID NO: 973791 - protein, 81 aa, Homo sapiens
RCPKKPPPSSNYRTPTPHNHGKPTPLYPGEPLSRRKISSSLIRKSPVQISFKLIAFSRHRTNHINIFFENTTYAATGIITR

SEQ ID NO: 973792 - protein, 102 aa, Homo sapiens
RRGFLLQQVLWTEPGARSPPRSAAHSQPSVTSSPYPRTGPRAPLRSSAAQTPSRRRISLVAAMTDRVHLAGAPELPARTQRPPSTARSTCELYASYVYLSMS

SEQ ID NO: 973793 - protein, 195 aa, Homo sapiens
HWSGYLRCTLEALRTVSYCGAQTRVWHACAPFVLPVVCVQYLRIPMLVPVYPAVRGWLHPRPWGDDCDPHLGFSQHGIVFRQHTHCQDLVPLPELGVNGRPPPVFQKSAPAFSAPKQFCQGDPNPFTMGLEIPKHSYGTWGSPPTGVDYISRPPPIGRLQSRRTHYSGTTLLPFALAINGGGNSSTHSFLTMSIR

SEQ ID NO: 973794 - protein, 164 aa, Homo sapiens
MRVWGLRAARGPQMGVKGDNVWANSAVSHRKKTRGGIQAKRKKADGGILPHPTYINNRARAGGEAPPRKSVVFVRTHTNHAREGRDARERGPNYRGGGTLYNHTEGGVPPKKGERPAKYTPKYDRAPRDDEGGTIDDNDKSISSTQDNNTKSQQRPTEQQQNNS

SEQ ID NO: 973795 - protein, 104 aa, Homo sapiens
MDVAKFLSTIKKHVLLHSHLGATRLERKTGLLDLPHQGKNIWCARVRKNRCGVSPQDLTNICVQRRAPACQSLFFRVHSTLFFPHRYEHPLRLAPCYSFQAGFF

SEQ ID NO: 973796 - protein, 110 aa, Homo sapiens
EKPLPCARRMRRNCSVVVPTWLNCHGGFLRAWVGSCRHLFSVVGCRLCSLVVICSSPWRSPRVNCAASRRYDWDGHFLVRELGIPFSISGLTGQHVFHGWELPTTTSASV

SEQ ID NO: 973797 - protein, 251 aa, Homo sapiens
RGGVLWAGCVPRSCVRDRAEWTEAIEGAVVAGDIARGVGRLVVAGVGVRRPGGGGEREVVGRGWDAGVEASASCGVSRLPAQCLSGGGRGGPVMLPRSPPVWVRALAPITALQFLAIRWAACVRGPPPAVVYCCDVPASSRCHCGWGGQTARGLWRRVFFVPRAWVPICSWSPTRLTVRQACAPSLRDNSPPRSSLRRLSRPEEKPRGRPAPYFVVAYITNGLARPHNGVLAPRAIFAQPMKKRELLSIKN

SEQ ID NO: 973798 - protein, 323 aa, Homo sapiens
GSRRRAGWVGGERWGGERGGSGGPLGERRAGVDVWVGGRNSTVWREGAGGGAVEGWAERGGRERGAGKGGRRGWWGAREEGGGGLERGGREGGGSERGTGTDGRAGGDGRGGEVEGEESGSGVGGVWGAGVAGEHAAGVEGGGGGVFGGGGARGGVWEERRGGGVGAGWARVGGGWVGPLGGAGVWGVCVVGQVVWCGRRAAVWWCGWGVGCGLARGWGARVGWGGAEEEGGGWLRQQGEVRGCGGQAPLWVGERCVAVVGMVRMVEGGPRGMRWCLVVVSTLSRWLEGECITLPRLDEEVLTRTPFSHLCSPLLCGGGRAGV

SEQ ID NO: 973799 - protein, 98 aa, Homo sapiens
FYQTTEGVPGKPLRVASTEDYFSIGITRPPEGEREIKVNFSRLDDKANLTEKQRFKNKFSISASTAAASTAKLLLHSVFMVNGECESFCRVESNAFRN

SEQ ID NO: 973800 - protein, 195 aa, Homo sapiens
  misc_feature (14)..(14): Xaa can be any naturally occurring amino acid
GGAPPPRQSVSRTXSAGATHPPVVDAPWTLEQQHVWRPIPPGSRSGLLSPVTPPARYYYSVRNHPSEECPAIYLVLGLTKDSHNKSFDLSHFCSGCEKPFGGVAAPTTKDKKNTVVLPPSPARMIPPRSKQGYIAVFFLKNLSNGESRTAPTFLVAPFRDKEPSFAMRNLSSRGSFIVDTVPCCETIIVRPKVMC

SEQ ID NO: 973801 - protein, 188 aa, Homo sapiens
CYDVCVESGWQTFKCYYYVLQANKNKNKTKKQHIVLGPPAGPLERAPRKTFSNPSGWGAPRAPIGIGAHVVPMTVSQREHSGSTRNERLQAVPQRLSTTTSPRGEHTDAVSAKHISRKGTPRRRTTKKRDSSTNRRSFPPGDDCVYSTLKSAPRSEDQHHDTDRNDTKSTHTTDTTTTHDDVIHHLHI

SEQ ID NO: 973802 - protein, 88 aa, Homo sapiens
MFCDAASGARLCRCGPRVLTDECVPPHGGAILITRGPPQVCLPPVAEDRLGVCFLRRVLVARTRPTSLFSSQAPGRKRVKNGPPPPHE

SEQ ID NO: 973803 - protein, 206 aa, Homo sapiens
GRLGASMSGRRVHARCCLAEGGRAGGCVSAGPRVAQRWSVLPRVVRGVVTHPTLVRYDGRWPLFTAYSVLPRAYCGPLTCVRWGRASSARIGGPVHIAPVLQQGLNHGDCKEARLGARIDPVLTALSAYDPRAVLQSRRAFPSEEVQFTNGRDLPPSVRVISCWVLPACYATGDYLAFSVLVQFRKQSGTFSHNGGEFTTGEDPFL

SEQ ID NO: 973804 - protein, 316 aa, Homo sapiens
TLLILGLLTNTLTIYQKKKKKKKKKIGGGGPKKIKTCGARGPAERYTVDSVRHTDAPHKKNRGHQQQRCCGSLPPSVKQRRAETGRVCEKNSRGKSRKRSNAGHVNNRGLQSKPAIITNNRPRRGKDGSRKRAELTERRRKHEREGEKKGRTSRGGGKTREDKEKGRKGRRQDGEDRERGRQEEREGRRNLDRERADNVRHTRPRETSGDGNRRERRDAEERTRKQGNRHNTKRKQTRARGEREHETQGTRRGERRESEEGKDEKETEEEEGEDKEEKKKEEWTQTQRRTAEKKKEDRKKKEEKESKRGGQGRTEE

SEQ ID NO: 973805 - protein, 166 aa, Homo sapiens
RPLSSAGTPCVGNTSLKGAKCSCPPYWPLFYRGNFFWHAVRGYSTGVLLAIVSCPPHRRGTLCAPPQLTPGVIKGILPRRCAHKIICGPPRHLREYIEEAVKHAADRKRSGTVPLNKCFRGNMFLPEQLAPQPNPLGPHRVYAHLGLEIILERTLKASHKVPFVAN

SEQ ID NO: 973806 - protein, 221 aa, Homo sapiens
MCAGAGGGGGRVGGCVRGCGGVPRAVWAGGGGLLGSCGAGVVGVVWGVGGGVVFRRGGGGADALGGGWAWSGACGWCFGGVLGCAVGGACCFSLGLARLWAWCVWFAAVSCGVVCFWCGVVGVVACVAEGALGGGRRVRLPAGGEVVVGLGGAGGGLWQRLVGVCCCVGVSGGPVAAHLPLLFPRRGGAPLMGLFDLLHPRPRRRSGVRSHFLRVRVRSSA

SEQ ID NO: 973807 - protein, 169 aa, Homo sapiens
  misc_feature (161)..(161): Xaa can be any naturally occurring amino acid
MCRQSGCAHNIVGAVKLAVVGEQACCAVLSRNVVQERPVSFVVGQVSPAYVWAVLTTYQRGSKNTLWWFGGSFGLFELARCSLVIGVLPCPVCSFRLIIRPAQIGEKAFKGLIRGFTEEQNFWVATHEWAQMGLGPRLPDSYRVFLRGLQKFILVTPGHVXDQRVCLRT

SEQ ID NO: 973808 - protein, 235 aa, Homo sapiens
MNDDTCANLCEKQMAHLEEQRGASDNSGAGVTTHNNKKQPAGETTARMLWRKKNITRGDIAGEKKAVRHRSKAAASKRSSNTLIKIARAAAAGQKTTTRKQRKEHTDDKTTQEAMKQTNRAQKDEEPQQKHHNDNDKRATTRSETPTHDVAGHKKERRASRRRRERTRRKAQQQNKRRRNRSPQHIQPDEIATQGRKRKQHTNKKNTSATRDSTRESKREKKAQSDSTPAARGDQ

SEQ ID NO: 973809 - protein, 34 aa, Homo sapiens
AHGGSVSSWILMLRERFYIIKKKWEVTSKMAKWE

SEQ ID NO: 973810 - protein, 185 aa, Homo sapiens
SSFADTLLSASPVASLSRRGGLGSHLFPCPPLWAAPLQLVCGFCTPPSVRCLFSGSSSHVGGLLAGLHAIAAPLWGTPLPSAPVAISRAPLALCPPVLARSTWLIWRPSPNAVVGGGACPPSPPHPMAPPPSRLASSLRAGSLNSLPSHYLPICFLVANRFFLRVRQVIFPTRAFIPRENPTHIT

SEQ ID NO: 973811 - protein, 75 aa, Homo sapiens
QEKHKHNLTNNVIKSATCACRSASHTLFEPVISSLFRLRCDKYLVHLPIPSNLPLDSTLAVKPCVPYNWFPHTSR

SEQ ID NO: 973812 - protein, 305 aa, Homo sapiens
CAADFFCVDQPPWVRSPLSGYLDASPGARRRVVSCVVSRRLLRCGLRALRPPLSSASRWVAVRAPCGAVPGGRADAGRCVDLVACLARGRLRRPRWRGCAVGGAGSRRRECGVAVVLLSVCSVRSRLYDLRSSAGCVVTSSGPRLFFLCLVGGLGGGWWLRSAGSCSTGRWCVARAVVPPRCVVCEATWLRVARCWLGFDEASRPRGGSGVRVRCDMVGVICGPGARSVAWLVGVYSCDESRVPPRLFVSCHAIWLIVASAIRAGAPEDSIGARMSPFFRAGFYEPGATVAFCYFCSFEDPLPQN

SEQ ID NO: 973813 - protein, 230 aa, Homo sapiens
MPVVHVAGRAVSRWCGGRAVGSAPRCGGGVCGVVSGGAAGLWSGHAGGEWVGGVDTAAVCRVGVVCVLWGCSVRVRGCRGVCGSGRGGGVGVRYEGGAGGWRPPPWWWWGMRSRAEGLAVALRREARGCSPCGGGGGTVVGEKVWRGCGSVDVWSRAGGVPACPSRDGGRPVHHAGHPRGGPWGVACPLVARHVSRMLPPAGPPCCQCPDQRWSVPGCHKSFFVSLTKKT

SEQ ID NO: 973814 - protein, 282 aa, Homo sapiens
MLLALNPPALHVPPEVLYLALCEFNPNFCWLRMILNVEWSGRSWMAGLITCCLIQVPEMGRLRDIEENEEFHEDLHHLLLEVAVIAGHPDSARNLGRMYPISRGIPNMLADVNEDTLRVDYVPGASNLVNDCSITLTHYPEPEVCPSAIPQTTAPTRHPKHTVLTPETRHTHTGKDYSDTRERTQQTGQRRNKTNAHNSLTAAQNTADETATKQNTTRERGEARTHQRQQRDERAEKAREQQEQKTGENKKTREKSPQKQTEREARLHRKADRRAQRHNGNK

SEQ ID NO: 973815 - protein, 224 aa, Homo sapiens
LVGAAPWIARWLRAQGVTEAPGRCQFHIAASIFAAPGPLGGASLPRDVLTAGGWPPPPRRWFTPRPQCEVSSHEQFFGGRTRRSPWGGPRPAVPSVARGSRLVVVQTLPGSSPLPRRALPAGRPCCLSGGDMPDPPCSVIGLSPPVQTVRRSHWGSRRLCPLLSNGLLYMTPPVASLTPLPFFPQPALWRFPPTACPSGSPLPHGSSWAGELPRGPFCPECCIA

SEQ ID NO: 973816 - protein, 49 aa, Homo sapiens
LRQKHRAASRGPPSLLLHEARVRRGGYSRSAGPFPPRPIASAAGERPLE

SEQ ID NO: 973817 - protein, 72 aa, Homo sapiens
  misc_feature (4)..(4): Xaa can be any naturally occurring amino acid
RRGXLQLPSFNGILGALYYDLFVVSFPICPPGTRIWVSLVFPPSPVSLFMSRPDPPCCDFPWYRPRRSPECC

SEQ ID NO: 973818 - protein, 149 aa, Homo sapiens
MPPCLTTWLSQQKKKKKKKKTVWPGLKVLTTIPEWERPGTPPCPTRHAWRIKGSPTKTTAGRSPWERLGLLTPNQQTNARRRHPGPRCKAQTQTKQSKDDHHGTPSLRASQQYNRVNKTTAHSGSPQEVTQGNRLLTSGPRLPSHMNKN

SEQ ID NO: 973819 - protein, 118 aa, Homo sapiens
MGPKRVVPSEREPRGQRKRGGDISPPNKNSARGGHTREAFREQKPRRGVPEGPTKRGTYHHTGAPKGESRSEIFPKLKRPEPPGGGPQRQANKRQPPNTQTHTTHRDTEHNTPQNPRT

SEQ ID NO: 973820 - protein, 121 aa, Homo sapiens
MRVSLSPTCFHLPTNYPPRRLIPCIHQTFNISWCPHPQTQWFTNPPLITHNLLCTNPSSPLKYRRTTIPIEPSMILLPPNSAISRLLRFTPHSLLEHDEQVESMTAKQPTNIIFSYMITNY

SEQ ID NO: 973821 - protein, 121 aa, Homo sapiens
FGAGVFVVPASNKENSAMDDVENGEARSLDYECVPECRHRCKEGRSKAARLGARSPWSLGAEDRSGPVDNSYTERASNETEGIIWGEDTLMEYAENSPRSDIPGTKNESWSALRRRKTGRT

SEQ ID NO: 973822 - protein, 248 aa, Homo sapiens
QARRQVGRRDGALNKRGTTKLWCPNTAGGKYRLYRRRGRNITQGEKNCVNWPNQGNLGNLRPRCRAPKRGETPPLGRRAPRSPLWPPTNPGNQFRDRVRLFFSIIWTRCLVLLDHNNGCPPRGVSPLDPCPKVSHTPWGWFPPSHLESEPSSPNCLPRILPLWRAACNFLLRLLRGVLHPHLGHEGPRGSPPSGAHAPAQAAFLRTQWPQMSRGRIITLRYSSTTFHSPPRSLFDKLFFWSFLTTSLE

SEQ ID NO: 973823 - protein, 194 aa, Homo sapiens
KKKKKKKFVCGPRLRRPLEETFFENHIRLGARAGPQEGLQWRNVWAHIALVFSYRRESPGLIEPIRGAWEILSTTIYKTHAPRGETPPEARVSWEKISPKMGRSRERGSLYGGDSISKTGGALTSAESASRDISSNIYSAPPGLWVENQRRLNTYFKNNQKNITPKQLQANSTKHNKITTPQNHNNKITPEEDR

SEQ ID NO: 973824 - protein, 155 aa, Homo sapiens
MPLICFLVLYALYLNNVRYRNLTKYSIQLSARVRKSRNRSELVLPRPSVLSLIAPPIPYVILYYNRIEVNVVPSRFIDSDSQFGPSRWYMTRYEVAPIYGGTIILSKLLNISSPVMPRYQASWRLLDVDNRVDTRRWISRPIRDNNGHHKTSCNA

SEQ ID NO: 973825 - protein, 106 aa, Homo sapiens
MPLPVALWTHDLGLADVDAMILVTRLDEAVSVYLFTEAPPNLVTSLFRCLTGDRHRFKRKTPVSHCMPSSPETLQSGLEWLRWMSSLSVAALKIAALPLGAGCQIR

SEQ ID NO: 973826 - protein, 101 aa, Homo sapiens
CGCSLEQRAFISGPLLSYLSGVPDTHDGRFDGHGHEPPVGPGELSVLGVVELKAGRKDIDYIEGGSWIENEHQFIFINGLVLGAGATRTGDCHYSLEARVQ

SEQ ID NO: 973827 - protein, 75 aa, Homo sapiens
ARQEMSVIGGRLPRCCGPSPDVSGLLSEEACAVLCSHDPARQEPYEGGNYNAAPSHRAGPRLEGNQTMTSHSEER

SEQ ID NO: 973828 - protein, 48 aa, Homo sapiens
MRPLHNNNYPNIDPPHRTHASQDETTDQLNSNTIVKSNNDAKRTTTHG

SEQ ID NO: 973829 - protein, 129 aa, Homo sapiens
MSPHGGAWPRTPNDYYVCPDSTTGYYLSDNLYYLWSRDTAHTVCLEAYLWSRPPLTGVLELFIFVRALLSPKMHVKFRNRVDLWYDCIIAASPLLTEELLIRGLSKNSCATQREGGNKTTTGCLYLVKS

SEQ ID NO: 973830 - protein, 168 aa, Homo sapiens
MGLGLLQSMPVVCVDIEPGYSYDDVNRGITIDDLLDAENYETSDSYYCDYLDCIAPKDYEEDFIKNMITGTSQADCAVLMVLLDVVNYEAGISKEWADPRDMPCLAYTLGVKQLNVSVFDNNGFQLSHLRARRDMRKMYGSQGYLRNIGTTRTERVCQFWLEWGLMLD

SEQ ID NO: 973831 - protein, 45 aa, Homo sapiens
MNGATGVKEHSVHDTAGVPKRNRGTGASDHPRGRGARVSQGAQRH

SEQ ID NO: 973832 - protein, 191 aa, Homo sapiens
  misc_feature (125)..(125): Xaa can be any naturally occurring amino acid
TALSAPLCRELLWRGLVSAVDSPSCGPGCSHHVALALCPLKGPRGSEMLLLSRYFEGRLVCQRSQGAPSAVSGASPGGPPGVRRPKVWASRPRYTGALWSERCAKDAARKNLFGQGSPPRPFVGXLEYPALVLSRGTPSAAWLLMVAPGCRPYQPSREQPPRLGPPLLPKKQRLLRVEHRLSLWVCQHPRG

SEQ ID NO: 973833 - protein, 91 aa, Homo sapiens
MLMNGVRSAPSTVSIFSENIIVSGVPKRRTHVPLARCESIRNRGGGTQLKTTEEEDAHPDVFFYVTTNIHKKNNRQEQEIQQTRKTTPHVR

SEQ ID NO: 973834 - protein, 496 aa, Homo sapiens
GVRCGRGRGRAVVCCVLACAEVDGSCGVCAPRRVWRRAALVRRGVALGLSVSLLSEAGWLCFDWVGFVMGAGQPCGVALHPAVLLRAPVGGCAAAAACVRPHGGGGRPAAWSVAVRGGAAMNLCRAAVLGFVPPACRVGRVGPRALVVGCAGGGGWAGSVRLGGGSCGWWGDVGGGGRGCLWVRYDVVGGVEMAGRPLGGAGVGVAVCGGGGRACVGWDRRSGGACAPQCCCWGRVVFGSAAGCGGPPVGGGAAAGGRRVAAGWILARGAPAREGVARRRGLGALGPGPRVGGSQRQWLCGVEGVRAAPECFAPRGCCAPPTQGRVPPVWGFAYDPGCVCVPPHVICLSPPRRSLSCRLVLFGGQHPSVSSPVSLCAVPALGRALFMIVLSVSVDKDALRGIQCGPSLPRARVRRPSAPGVSCVPFFFVAPLCVGFVLCVSGGPLLVVVICMCCSYRHTARCLVCVCPPLLRPQLVSVPSTFARAPLVQKMYHRKQ

SEQ ID NO: 973835 - protein, 251 aa, Homo sapiens
  misc_feature (2)..(2): Xaa can be any naturally occurring amino acid
RXSTSLIVAISFAGQSRRIGSIHPLVTPLRGSPPLCVGSPPLCAPPPLGAFAPFNRRASPPLFRNRPPPGGPPASLAKGNLAACEGSPCLLTGAFVAYPEMLKRSPSLSASSIVCAPLLPFLLRVFSLPPYVPPRAHVPTAVERRRPLGAPPRLPQGQRESPSPPPPAYSLVTPPLRPPFARASPPLHRLSRPTYFATRRFASPHVRPPVSPHISKALSQSSLHPRELSYILALGRNTFLYKIFLWTHMVT

SEQ ID NO: 973836 - protein, 177 aa, Homo sapiens
RCLPCPVVITLSLFRPAVLRCAALFPRSSARIAFPRCQYIRSARVLPAISSVRLLVLAVLPRISGTWHGTWGPFFPEAPGRPFHWHLLAATSCALLVFHPFFRPPEGPAVMIYSGGPSGMHPLCFPSELPFCSVIPLSVAFPLRGGHSPPRIDYPYSLALVCPVVTPLFASVISEFP

SEQ ID NO: 973837 - protein, 159 aa, Homo sapiens
MVVFRRIPSCAGSCQGAVLAITAIATSLWCRRPDPVSQRSIMSLHGLMGKVDVPQSVGIVATVSLEHARHSWRPIMLSNHRLACAGGSAGPQYRYRCDIHLDIYSTFVPMGDLGQPLFLGNARRAQITRFYSGAQDCPITTRPLWSIRAFSGPDDLGIA

SEQ ID NO: 973838 - protein, 155 aa, Homo sapiens
WPPSSERFWHNTRCAAICVPTLLEDVPPTLGGGHSLSTGSCRPTSLGTTPWGHQELRHTSCKCVRPHSAVSYSGGPRTPRARPLLARCLSSRRRCPLNPQGVTTGGTTLCRCASKEVGTHLNSTQWVSCPPVNKAPRGGIDGDVKRAPEGVVRVY

SEQ ID NO: 973839 - protein, 245 aa, Homo sapiens
IAELSAVCERRLSSTRLAQRSHHRFSLPVSSRAAAQGPSSHAGGQKPPALRKVIPEFIEVAEFLKKVTQHENEQCRNQSSVRVTTLDAELEFAIQPNTTGKQLCDQVVNNQLVRVEVWVPLGCRYVDSTRLFYMAYPSIQTVTQQDVHAHENPLQFKFRANFFPAPMSLRTYLQGNNPETLLLQVTRSHSYTDDAIWPARNCSLSASYAVQGQYGDPNHRDPSRQANWAQDRLRTPGCLAPLTLT

SEQ ID NO: 973840 - protein, 58 aa, Homo sapiens
MIKHYLTLRHDNPRTSILLFCIYQQLSRLRDKKVFKGPLCPPPSFKSDQQIGKHKQHN

SEQ ID NO: 973841 - protein, 285 aa, Homo sapiens
MSDPRTPNKVVRYMPPTESNVTRPWTDRLPDYMRPAGARSLRMCGLMLKLTWCALGRCLRASFISLCQNLASSEDTEPNDRSSFMLSISASGDCPIVRESSAHDAPIGDPSHIRVAVWDPVLSSIGLGCWLLDLLSSPVILGPSLQGWSSRLPPRWYDGHLAVSLGDTYAQPSCPPSLPDACREHPRHSSYRVSSAPREPWRSLKVRHSCATPRPTLTNTPRPPATNTFVTTRDDPAHASGTDPHSQNAPTHARPPHAAHDRLTTFHGTPPPSRLTDTHPSHTSC

SEQ ID NO: 973842 - protein, 152 aa, Homo sapiens
CLYPVLWSPSFVPHISSTWAGKTSVPRCYKRRLSLPLFILRARHEICVGAPPRKFLWLRVLLLYSGIYWDAPHEGGCFCYHPASPGGLCSLVGPQLLCVGNVVLSARAGKHLAGVHGCHCSVAFKWLAHLSAQMPPPVPKVKPTSFLLSNII

SEQ ID NO: 973843 - protein, 143 aa, Homo sapiens
  misc_feature (20)..(20): Xaa can be any naturally occurring amino acid
MLPSQQSRDSTRHMEEMMDXNYTRREKTRHQAKTRHSIEATHSTNNKPDTVRYRDAKRGLTEKREEEHNKKRREMRQRQRERQQERDRNELQRAGTADTETVMKAKRQEKREAYRRRIGYEGRRGGDRRGKERKKQADGGWQR

SEQ ID NO: 973844 - protein, 226 aa, Homo sapiens
MAPGCLGFFSTRTAWVVVAPLVRYCFHASVAVDAVCPPRVAPIWNRASRALNHSMSLYNAGLTVYVGKFVLRFFSAQNGRVCLVVAVIKFTPPMGPPLIYRTTTRYAVIDYNTTTTPPLLVVPTNSPLLFAKRFLNIKGPCNIFLIFYEAPPKHLFRQYTPNVGTLDHSPHTVLILVNIPLDSPRISRHPLLNACPNERSSRYCHYYSLYCASSLSAELTERKQTP

SEQ ID NO: 973845 - protein, 179 aa, Homo sapiens
MDQPDPEEVTALPSQQVSRETYSRSGLRSPSVDLPSSEDMPLASQLTWQTIPRHNDRWTVVNLRMMTRGIRNSDSEQFTIYNTEIRLSKRNKTIHRGNDTPSTPCGTFIRYATITTIKSENQKHGCTHTYHTDRTDITIPEPESHTSHKNPYNYGHPTRTYFQFTVVRNRPLCAYPCSI

SEQ ID NO: 973846 - protein, 330 aa, Homo sapiens
MWSIICSEYPSVTDIFSLYTYSYFTTAKVIYSNVYVVHIDWLGVETHKRYDRGHSPVVNAVDACQRNISLLLIPVYVLHLLYMVRLSDRRVLPLAPVSGALAHTPRRSGGLGVGFLSRGVCVPAPSCRRLYGDLLSGGRRPAGGASRVGSCWWLRSLSVPRQSLSPVSLLALLAVSDVSLLSALSVVGVVFSWCLASVVCSGSRRERGVRARSSVLLVSGLAFVRRAGAPALRGPAVLVWVGGRCVGVGGCVGWGGSAGAVVGAGAFLGVVCSARACRVLGVRCPLVVGCARRSSVGSARGSGSCCLLSLRGRLVWSCVLVRRARVVGVA

SEQ ID NO: 973847 - protein, 208 aa, Homo sapiens
  misc_feature (17)..(17): Xaa can be any naturally occurring amino acid
  misc_feature (61)..(61): Xaa can be any naturally occurring amino acid
MKTITKTRKKRNRLNSXVTNCRSAHGGVPLSVAGHLARLCAVNAVEYGAFCLYKRPLVVVXNVCSLLKYQVVACCSLFSRVLFVMSGRHESLKCSLPHAKGIVGTHKWGHWYRYSALRAHPCGLHICAQILVVLDVVPTRIVLARKRVPPCDWINKTGEIPKRSEPTLDGSPCRRILSVQYCPLVWSTCAFMKTGTSTTLPRCREPLI

SEQ ID NO: 973848 - protein, 302 aa, Homo sapiens
RRGGDEKKTRERKKRTAARMVRGLTGAPRRGVHHGLREGITQVQSRGPVRQARGGPVRRRVRASAHCPRPPWGPTVNGTGRVARKVCALFVCKLPGALHSLLLLRPLLAMVPRPPPLVGAFSRFPRPGTLPVFDIEGPAAQRRGFCLRPTGHRTALLAGWCHQSVTHGLPHDRSRTGQPHLFSPLGPRPPPLVTLVVSETTRLSHNPCFTNGPIQMVDRISITRGLKNTPTAPFDPPANSKQIILLVAHHIVYNFSASAAFYSYNVFDKLNAIPFSRSTNSAPKTILPQTSGPPIKHLKRPT

SEQ ID NO: 973849 - protein, 150 aa, Homo sapiens
FAVGSPAGGFFRPPFPLGVPNFLICLLAIFQPPTLPLWLSAERYFPVKGRGSADLFLCRRGRPRGACVEALSQGTLGTHLPGPLPGAHQAPLLVCPRTPEQFLFSSLGNHIQEHKSSPEFLAPSRCSTKGNSFTTYCRLFSLWVAESPPI

SEQ ID NO: 973850 - protein, 233 aa, Homo sapiens
TPGCSCAALGATSAPPWAPAAPPSVFSPGPPRSSVPPGLPRLCVVPHRAHKAKSEAALGWDETRFVPAFLWYKFLVEVGRPLCLNPLLGHRPGLYQGSFGGHPPFGWGTLSPGAAHPFGDPFTSCPGYVRPTTPLRVGVLFLTLGAAQSSWLAVTVTQRSPVLLPWHSFVKRCYRYIFYPFISSAPPLFITRAVGMTPLCSPFSSQRPPYLTFSKKSVYPKPTRHLIDSSSTQ

SEQ ID NO: 973851 - protein, 248 aa, Homo sapiens
SSPQALVCVRGLPRGVARPVFTPSGIFRTGPSRGSRVVDALVPERPRSRGLRRGFPALPPFCPRSPPWGSTAPHQRQSCVAVSDKGVAPLLAIKAVEDPPQFFPSASPPPRCQNWVPGQAPLSGAFSDRYPVGGRFHVCSYEAPHPTGGRSLKPGVPKHAFLSGCHKAHHTVGPAQQFLERVATRNHLSPPGERASPPLYIHWLRTNQSSPKTLFVPNAPNIKLSPITLVFKTNPERLLAPPPKRVTR

SEQ ID NO: 973852 - protein, 108 aa, Homo sapiens
MCLVLSSVDRPLRSPAVFTHSYGVSPSLDPSPIFCVRASPSFCDTKYSFPVPSRNYPRALPPLPPRGVLVLFVRRLRNPFIFSRPPGSAFVPPGFLMRPHRFFQRARP

SEQ ID NO: 973853 - protein, 105 aa, Homo sapiens
MEAPGSKQGNGPVLDHRGRISAQGPCPLRPPAASQTRLPGVRSAHFQAAEIGRSHQSLQFLSISVDLPQLFSQTPCRLKWLRKFTRRALPRRASILYISPQISQF

SEQ ID NO: 973854 - protein, 185 aa, Homo sapiens
MGFRLLNSSLESRHWKPPNFQGYPCTCVATDPGNTQEVSSPRPPPRRVAICFSEILLSSIGISSPLLHTPPYANVLLIVRPSVPTTLFPHSPPPTLLRPEATPRSGLPQPALYPLLGDTPPSGGYPCHTCAGRITHLDGFYTLLSARTAPLFPIYPAVLDRPPSPRGDKFTPPLLWQKLHTHSLS

SEQ ID NO: 973855 - protein, 219 aa, Homo sapiens
  misc_feature (1)..(1): Xaa can be any naturally occurring amino acid
XGSSWTVSLCLTSLRKRVLFVLFSPKWSAAGAPPPVSCCLCFWGPPPHFGLGYYFPCEGILCYPPRVLPSPAKGWFSAFHSDALFSGPPRFTQYRVPRETRACPLPPLGGSPGHPKEAPAEPHQIPRATPVPHNEYRGNAQGDHSLLAVLFQINKDISVFDHPLGVILLILPRRVAARPFPPCFPGGHSACEIPPWRAPPSRRRHHHAAHDPRHVPTTI

SEQ ID NO: 973856 - protein, 117 aa, Homo sapiens
MSTPPPLCFYSHPGWRLQKSAVFHTRCPVSPHEAFTSLGKPSGASNIKSPLRLSPGCFRPPILLAKPIFAGLFGLLLVLSPPPKQLLVDTLLLPSKKDSCRNPHSKGLTYVIGPSSL

SEQ ID NO: 973857 - protein, 279 aa, Homo sapiens
TKDHTKRRQRTGQGASIGPPSRRVEITPRRACPGDPNAGPHKASGPHVMAFAAGDSPPPCPESTKQGPPSRQQPHPANNNGLRRHPRTEENTALWGTSPASFSAGWPQSPPSGPPGEATQRAHSGGGTTKRSRAPPNNWWTHHHRTLHEVITPPHALATAEQLQQTPRAPGGVKPHPAGAKLLLRGKHCTPRRQFRTTEEHMFWREPPRRDSLAGIDYTENRDPPRWSECAHPSPPPREREEHCSPPEVRHRYGQAGGENRTWNGRRPTRKAHGSKPFF

SEQ ID NO: 973858 - protein, 140 aa, Homo sapiens
MGSAQNPHGCGGQPPWVLSASPKPFISECGSVLTVLAYALVPPAGYPPPPRFETQRATHERFWGDISRSVGHALFYEGLPTRSHPFSIGGPHHRTRSPKDGGPKGAPVDHPGVQDKLCNGPRSWNVTTSRLLCRNTTRVC

SEQ ID NO: 973859 - protein, 144 aa, Homo sapiens
CRYHPPIQSRRRINAHPKSLGINGNNLFYRTCGSASPEANDHRPALNSPALRLQGRLFSGIPRGPLEDGGLVKDHPRPANIQYGGHPLAHRRRALAEHHKREGRDKSGETPPCSRRCTISARGVRPRPPPPRDDGCLKPQKMGG

SEQ ID NO: 973860 - protein, 176 aa, Homo sapiens
MAILDGAILIAVLPIIGQIPTDGRQTRHQNLALWTTPANVPPKKGCATHYLIVSPRCLAVCRSFSATPRAYTLNAFAGRISTPSCLFPIFQEASPVHMESYLAKESPSHLDDRDNLHFVWCYSIADSQRWCNPLPPPPCCYEEILAEAKICRRPPPPRSHSFRLGTNPNVVPKPPT

SEQ ID NO: 973861 - protein, 253 aa, Homo sapiens
MAPGRGPAECSRPPRLMPPAPPPGGAPTVSTMQAPGVKKEGPPPGYKRAAAASSMQLGKPPLYVEASLQSHTGAEPVPEIYAPRGAQDPVPEQRTQPAGKGFAQTRRTTKHVGHDETSPDRPPLRQRGPQKVYTPEPPPPAFIGAGGTERDFTLFAVPHGSQMVIQPYPRLGLQQVTHTSVSTRSPVSKKPNYLLGDHPLEDFISPRGPSCMDRELLVGPQLSCIHGRNHAVAPHIGVAKPCGPPFQKTDQHR

SEQ ID NO: 973862 - protein, 296 aa, Homo sapiens
DNGTGLIPFSLLRPSSPLVYNSASTIWRFIIAVVLYSSRVVYPPPLMGALSPPLKMVLLLHAPTSQRGAPCNLLHDASTLSLYNAVSALNVLISRDSSPASGPHQIVPPGWYCMSHFPSQSATVGRNNSRRTLLTAGAAPPRLPPRFCEVPRVIPSVVLGLLLEQRPSSRGNNICEISVLLVPHTLLLLSTRINEARQRLFEMSLPTVDSHPLCFLLPHSGGAHTMCSPYAGVVQAPLFEPLVCVKAFTHTLIENGSWLLPNMKKALQIRRVRDNTTTWLKTVDAPNESKKPPNKT

SEQ ID NO: 973863 - protein, 161 aa, Homo sapiens
MCRRQRPAAKGGLPPHPLGGTTSFQGATFFASPPPGFSSPPTNAPNVALAPASLTGRPPPRGVPPVARTRKRRFVGKKGPSPPRDAPARNFPALQASTPWFNIFPRTSNWGRQEALRLDGSHDATHGAICDSYYPRGVVRTQLRPWGRPPGSSQCERHHNR

SEQ ID NO: 973864 - protein, 217 aa, Homo sapiens
CARPIFKRGREENLRAGEDIFLRGGGERQDVFRCRRGIILPRDPPHLHVWSSPDGYHDGMVVVTVTGMLLPAARCNRHCGPVQANWSGCRYFDASARDAKNLFGRVRVRARPLFVACVVRPPPCRLFKQNARIGSCGGGVRTNCIRANVIVRRVSIVPHHHVPSSHWAVDHAVQVVGRPLALSGYVVLDKAVLPHARGYNNCVCRTPRSRLAPTRSS

SEQ ID NO: 973865 - protein, 161 aa, Homo sapiens
MCAARARVPRDTGVCHCFESWLGTPLLRAFFEWRCPLLQDWTTLLVGRDYPRFLGDLFPLVFRANIVHPVGSPNGGITTPWRRIRSPSGGLLPPRFPQAGAPFAPEGPPGCSSVVPPHNPPFVRQKEELFSHRQRTERVEILMRAMVSLCLLATRWVNQDH

SEQ ID NO: 973866 - protein, 294 aa, Homo sapiens
MKGVGVVPWLLSDTHVFHYRGILHSIAYKLVNLCAHLGAASAHVDAGSSLPVCLAVHPCIVGAVLPSWGPPRTNKGNFLLLKKIMCLPLWLNLDGRPNFLSGSCEPPTLCEAVCQHNGGRALPDLAHVCSKYPSRETGTPTAAARGRIKPGATQASGHGRRIPDRHTTSTIGSPRESSPRASPPAVNRAHVEQTVLHSCFVEHGRHMMDYVYPRSGYQTDHTQIGSTRPSANRPNQFFGRPLLWMMSMLRRARHIRIDYCCKTAVLLLTCEATRGPHIGIANFRAPFKNPANID

SEQ ID NO: 973867 - protein, 298 aa, Homo sapiens
MSVSSQVFSQLVSGGCVTLCDLVRSAMCGYTLRNNYQPYTWWVQPLCHRLERIGPPRGSGVVIFRGFSQSPEHFKLRESGHVDPRSSVVLFYPSGNLITIMVGTQCYRSGSNERTQHRGGSTQGSYVYALPNTLVAVAEVRTATPGRLAQELNPAAPDVGPKNPAGQKRGPQGGSGGAGTVTPPGSDPRYLRSKGLTRHNSVTDEDRYHNRFRNREIRTALRGKTLPQLIWQQTLTPTNGHLTGLFHVGGHVHQNKLYNKGEVFLYYLLVLGVGAIENPQPRVCFQDHKKRKNSRNKH

SEQ ID NO: 973868 - protein, 70 aa, Homo sapiens
MPPPTLFDEDIFCPTPHCPLRSPGRLICDVHGLSCPSAKIAISHLVYGARLPGNVLIDPFKKRTHNAKHD

SEQ ID NO: 973869 - protein, 183 aa, Homo sapiens
  misc_feature (7)..(7): Xaa can be any naturally occurring amino acid
MRVSTEXDHDEDIVYALCEIPVAYIFLEKVFLPQGGFFNAQAWGARQMVPPLGKSASWIPKECGNPLSSIVGPPGPSNGTPRGFNIHRKAKGKKHPPPRGSVKGKSHFRGPKTQIGRARADPRAPPWDSGATCGPWIYKRPVDRRPRRQRWPSRVALTPGPNNIGIGTPPRLVEPRQSDSMPM

SEQ ID NO: 973870 - protein, 297 aa, Homo sapiens
PPRREEYHERRRQTGDQNSPARTRSGPPFRVLDNGPFKGADSSGTKPWLPPAFVYRAKRVLHGHKGNLVVQAHAQQPSWRFQGPQNQELRLETVVSARGGIAVSCRPRAALGLPKRHPRRRTLAKEAALFLQNEENRLHAISDKHPAFYNTWRGTPAPTRGHCTPPSCQNRASRGKPTLGPTWAKREPKRGDQRTDQVKKTPHVREWVINLPSRSHGTLENARASEATLPYRAPNLRSDARKEPLPPIRVPEDDRTLRRDGRNNDFLTTRPQRKKTVAGKNRAKTIWAPISLYTNKN

SEQ ID NO: 973871 - protein, 149 aa, Homo sapiens
MGPPRLVPQGATGSPVPGCFPRSVLGPVSGTPRAPVTIFQRNSCCYASVPNHPIGVFEAEAPPLLAEHLKARRPKIPPLNAWLTNTSETLLCGRGPQLSPPDSPPSLGGERTCFTHWAESFRALWGYVPPGDTACSPPHRRFSIALTNH

SEQ ID NO: 973872 - protein, 315 aa, Homo sapiens
SLLKAAKTANKKERTTRRLVHCSPLPAPPVTPVQGAPVDPPIPGAGNVPPPILGRTQNGGTKHTAVPSEHTRMWRPQKKGVRRAAPGRVTQRVRTVFKGAKFSEIRVIGHKLCRHPTPEPVFAGVGTPHQHGTRGHSNTPPRGGGNKVAATASMGKPDRANPQGRYHRANVTSPIPRPSVSHEIHHSFHTGIISRGAFAPKKGSHEGQQSTPLDRQAAARFRLSTTGGPPDPTRGGGAVSKRGRTMRRRGAPSTTLLIRGKTRGEHPGADVFIVHSHGLSPGAVLTTRWAEMSAYLPLANPILSGPPPNLVKTQK

SEQ ID NO: 973873 - protein, 120 aa, Homo sapiens
  misc_feature (1)..(1): Xaa can be any naturally occurring amino acid
XEERETDRTRSFPKCAYLPSKSPAVESGGCSTTLAPLNYAAVVNNADRRASHGVRAPRQSRCGTQGVKPAKNGGRTHPHWVWNPSRKKGNKPHTATKGGEHAPPHSRGRSTPHNSPGGED

SEQ ID NO: 973874 - protein, 130 aa, Homo sapiens
MESERNSKAQATRYRRPDVCRVTELLRPRWQHDPDDQSGPPLTTVGKEARWVYLPPDGGRSRMKMFSRCCEGATVYNKGRALFNLREGGLKLQPYKLLVVVIILNRGKLAPFLAHDDIPRWCRSKSIGPF

SEQ ID NO: 973875 - protein, 104 aa, Homo sapiens
MPRWWHHHSEQGDLRKLRDEPQTPVNEPQHVRARPITRAPPVTLGKRTTLRQRVGKNNNSGARETNTLSPCVIREPPHRVAHQCGPPPDVWGFSPGKVTPFVEW

SEQ ID NO: 973876 - protein, 211 aa, Homo sapiens
  misc_feature (3)..(3): Xaa can be any naturally occurring amino acid
FKXQLRYKLYPHTYTSLPEQAEFYTQALSPKINDDPPGQSRHSQTLPETNPITPVVTQNLSSVPPTDVSVNLPQKSYKMNCNTGNQLPRVKQTTLHPGRQNTSGFGNLTTMATLAVPPGISSTGVFGSPPVPPCVGIPPAPRTKKPVGKTAVVVKSLGSIYTTLFGQEHTLQCGADYFKTQQCSRGMNTRIDVFQETFLGYPRAMFLHALV

SEQ ID NO: 973877 - protein, 188 aa, Homo sapiens
  misc_feature (1)..(1): Xaa can be any naturally occurring amino acid
XPHEVGTVGRGSSGEDRQFSLLCNKWVLGRLPCRFAAFAGPVAFARVWLTSGATRLCPQGGFLIPEAKTMLVARTICLGESKPPVPKACAHRVCPRGTPISDGEKYEGTPPRPQGPERSGTTSGPPPGEGPLVWEPREGGHVGGNDEERTTKWGRDEHAPNQNIERHLHGPKPNPGVTRCRAENIALS

SEQ ID NO: 973878 - protein, 212 aa, Homo sapiens
  misc_feature (7)..(7): Xaa can be any naturally occurring amino acid
  misc_feature (49)..(49): Xaa can be any naturally occurring amino acid
MELQEHXSTRQQDGRPGRMVLIHATKRRVVVCNLAEHISRERKRLLPAXPRWGPRVSPSLCHTKRAWVGVQYKQLETVTLSDVQRKAIRRKRRQAHRCARCAVPRTAYRVAAEHGLSGEPERQAAWVRADPQREFPKNQGPTKQGVGTPDNSRGRQNAVADETAAGRLKVGQCNNYGGRGPSINRAKQTRCSEDTPDSTAGWRTQRQERPSQ

SEQ ID NO: 973879 - protein, 216 aa, Homo sapiens
LAKKAKVRGGQRRKKPTTWYGTNSDGPSVVMQKSARHPLAHRRKLPSNKGGTPGGKNGWVAQTGIVRAFRVSAAVNRGESPPPGRSVPAVVAVRTNCRCPPSFRQGGAPPQTGQRPLCPRKSRGKQPNSITSRNRAEGAKNRPENPLARRNDRLPHRGPPRRATTRSTKGAPLGNSPQEKLRGAWQHAETCNSSNQVALGNLFPPNKRLGSEIYSG

SEQ ID NO: 973880 - protein, 77 aa, Homo sapiens
MGIVFPGEKFSLRCPAPTGTYPPFSACIFHDPVDSCYEDITYMLRRRINSHAPRPDATESLSEKRPQTSYTYTTQSK

SEQ ID NO: 973881 - protein, 141 aa, Homo sapiens
REEPRKLHKTEVGPPKRRVSRTPSMLERKDPAPRGSHTGYRPFQGPTAWVSKNSVEGAHNGLVHNGGPAPFIGTLWNFHIRGTSPGQTTRTLKPRHPSLLFKKMSPFKGESLKTWGVITPRAVQGRDKPLFSIFPLVRISL

SEQ ID NO: 973882 - protein, 138 aa, Homo sapiens
MARLGYAQPQPPGSSDSPVSASYSSWDYRCMSPCIANLCIFSLEISVFTMLPVGVELLTSSDPPPIPSLGITGGSHHVWPYHSCLTKLRDKEYAIKSFLFEVQWFIVYSRGCTIHQHHLIPELHQSPTQGRAFSPNKT

SEQ ID NO: 973883 - protein, 231 aa, Homo sapiens
AHCRSTANTNTYAPVVVGPSLLEEYMPRTGGSPPGIIPGIPARRSGVFISLGAAVVLFSPPWWCHNHSENSVFSTKGLSWFYMRLSPPPLGGAPMVLGVFYRKQRGVPLAHLAFCGAQGMTKFLTRHDWAGTRALGGCTPRGDFCPPEAHGDSSRHTLVAGGEAAIQKICLHVQERSSRPLTVGAPPVFAPRWCSATEANGTAGLVRKSPHNIWGGILCAVTDKKLYSNPC

SEQ ID NO: 973884 - protein, 155 aa, Homo sapiens
RSIPCFVLSRVYRHWVVFISPVAASCCALIVYRLLPVKFFPALINKIRGEYSGNLQMRAKTRVSFTYRVVVSKSVALISPRPPVCDYGPKSWVAGSKEPNGLSQKNSPLYDSKKGEPNQGTTTFVVGPRPKHFLLANSRPWAILDFKTEHNDPCC

SEQ ID NO: 973885 - protein, 88 aa, Homo sapiens
MAPHSHWETPRRVVSEQRRPTQEGVRWEEKDILAPRRMHTEESSDERGPREEGGTIKKKMIGVNPCAAREISRGVAPRPLKKKIPQHN

SEQ ID NO: 973886 - protein, 322 aa, Homo sapiens
  misc_feature (26)..(26): Xaa can be any naturally occurring amino acid
  misc_feature (66)..(66): Xaa can be any naturally occurring amino acid
  misc_feature (131)..(131): Xaa can be any naturally occurring amino acid
  misc_feature (187)..(187): Xaa can be any naturally occurring amino acid
  misc_feature (281)..(281): Xaa can be any naturally occurring amino acid
GLWKRTRLLENNRKINQESRPDNKRXDRRTPATDGTQRYCVARRSVAPAGLLPRCAHKFWCERAGXEVLSRDVPYMKLVVRKALSTPALLRTSMARHRWTPCALRARVFLASPLRGPMWPSPEVAPCLMGXPHRRLSITSQSVLVWVGEKHNHVASPPVVSRRTPCGAGAPKVCPKVRVGGRMPHLXIYGAALGPKAHSLGRVAALSCHKLEQHPMVEAPLVRAWPIIQETQHPGGWRVSTQSHCGQKAPAGQCGTRVPPTVAPPQIFRQGAQGESLFAAXKRAPAPHHNNTRRWKHRRSQKPGVCQQRPLIQCMQFTEQVC

SEQ ID NO: 973887 - protein, 265 aa, Homo sapiens
MTTRYVQEPDTNTNSDGNYAAIHPCDGSCSMQTFRELFGIIINSAGYVSELLTRRKVQHGTGCARPPDFFAYVAVSFNKEVSRNTGLASDCNNYGWKPRGIRRGSAVLGKTPVGGHAKGPPGGMPDAPPPPRVKSPPAKNSSQKPAGPHRGYPEPPAWKRRGDSPSLAATHGLRLNFVERVINPRPPKSKAAITCFVWALDRHPTHQDTVRVRRTYFAIGAQSAVTPASSRGNARQGDVSRPQTREYAEQFLGQNKHLERGSRVQ

SEQ ID NO: 973888 - protein, 133 aa, Homo sapiens
  misc_feature (15)..(15): Xaa can be any naturally occurring amino acid
DSLMISPSAVDECFXAGCVFPLIGGFVVLYPSGVWSIVCARSGWFAYHRFPVGAPVCSFRRHRVVCFVRSPPQQWVILLLLECALFVAVDRGATLCVGTRVGFLLFHHKSVETATMPSRLLMLWEKSSLSRRE

SEQ ID NO: 973889 - protein, 290 aa, Homo sapiens
  misc_feature (276)..(276): Xaa can be any naturally occurring amino acid
CVSVYKTDRRATEQGKLREKRERRKDSSRQRTYSAATWCVSILIDVHLYVVCGSVNRLLSFITTSRESVYAGLSLCFIYNRVLISCWLQEDNGLCASVNIVELHGSCLLWSRCFLFRSSPCVGAHLHLAHMAVQPQKVARLPANCVRVLGHSIIVCRRFNPVLSTTQEPMWGGVCPKDDAWVAFSRQAAILTTVQFAHSYSRVSPLGKSSTRSVQTRSAIDLGEICSPSHAKKAYLRSNCTVPPPVNPRCSHTVQYNTRTTGQVLVTANDEGVPVXLCHNSHKSSAATSW

SEQ ID NO: 973890 - protein, 118 aa, Homo sapiens
MFVALLMCEAVVPRAIKMEIVARPPLFVSWGKIVCRLRSCMWLTHWLCRAPSVGTRVYMISITAALSLLRDGWPHNLLLRSFFLSPRGVHLGVRRPLFIVAAKVLTHVVDMISPLFVR

SEQ ID NO: 973891 - protein, 99 aa, Homo sapiens
IWDRPRFIEPLTRDFAPSASNPPAAQCRFCLPEHGGIIRFFLAKSIPRKDIPEVCVPRVITTRALLANIWLSHSVVSKVDVSSIRDVGVAPSPPQADSM

SEQ ID NO: 973892 - protein, 86 aa, Homo sapiens
  misc_feature (77)..(77): Xaa can be any naturally occurring amino acid
RIHFKYTGFVCFCSTECPMVGATKNRSYVNSWLQFQVWNEMNRHCNGSWDNKKETCEEQCEKLSKSCRNRSACHFKXNTFSPIANT

SEQ ID NO: 973893 - protein, 201 aa, Homo sapiens
  misc_feature (2)..(2): Xaa can be any naturally occurring amino acid
DXPGRGDRVKRGWYETEAEHINGSRWRGRHLLHDVRGYMVSPRLCPPLCAMGLGLPEVNGPLGGSRRRMGPARWPMCAYAGEDPQTQGGRKNLAAVRRRIKQAVKKRSIHNMCVRQRPTNRGGVSANKFAWGNQNGRRGAVPPALALQLGFGTRLSPPHLGSCFEGVAHRLPASLEKQQGFIIQGSPKHLRAYVLVPRDNF

SEQ ID NO: 973894 - protein, 324 aa, Homo sapiens
FFRTITAEILVDIVDKTERKKDNLVGLDISDNISVSEIVGNTSGCICHFVVPIQAGSHIARKVPLQGTRISTHGLYRLQAKVPVPNFVPLRARASSWSKQKPRYTAPQGGLNYCSATLGRGEPAVAPGAWGIQPRGEVAPPPPGRRKQKYRTPPGRLKKSGCGPPHPEEKYCPPPDALNPVIYRETQNMNPCGADKYESKHDFVGTNQNTRRSDSVAPLIRHPHCGTHPLCFEFYKLVGVFKRTPRVRHLAAHHTITEHIGVLSEKPRDIVSRYRLTPNEIFPDVNTEQGENPCGTQRVMMIWDKPPPERISQILHPFPKREHN

SEQ ID NO: 973895 - protein, 164 aa, Homo sapiens
PDECEAGVEQRKKSNVERERRGHVFLRQHGLRTHKPWGDFSLGSPKIRLHGGKVAPPGLGHITVRWSPHKPASPQSSTRLRRLRSNPAVLCVGKKGSALPVIIQELLSLLSGGPRATRSTGSAPPLTGAYRVSPTRADTTKVSPKEESGRSLGDPTRKNSGHSC

SEQ ID NO: 973896 - protein, 70 aa, Homo sapiens
NNRVVVILIVKTFLHPRGILSFGDLDPAPSPKDDCSRNSRVGDTVSGLVVDCGVRPDSSADIRVSVRTVF

SEQ ID NO: 973897 - protein, 153 aa, Homo sapiens
MSRKTQKGASVPAKQVTTTKAQGPSFPDEEHEDMQSGSPAQGIKTMGAKNRLTRGMVKMQGEYIETFLKSSLNPSSPLLQKGSYTSQYLDVRRFLKKQNLPPRLVCEPARPLTKNICCFFFFIRRQVAGGHDRAEKAPVGPKEKQAFFSKKKK

SEQ ID NO: 973898 - protein, 242 aa, Homo sapiens
SHNYGGGVVDMKPPLRGAKRAHMRFRGEYTKGWETHTQVPVLPEKDSGKHPHALVSRGAKREFCPGDKSTPRKKGVISAKHSGSNETVTRSFKEFIFIVWYPAVCPVKDTAVPSPSCVSPAFWLLSRTLPFLLGVKRTVFSKKSTQNSFVSSDKIAKQRTAHFAQVRIRKNPPLKWCETSEGLEKSHGGSVPQHKQTTTRFLFCVKHGSEPLLLFEKNMSVPHVVRINKSGTFHRCSNQKEH

SEQ ID NO: 973899 - protein, 129 aa, Homo sapiens
FGRDETITNKVKKKYKKRRQDTTFNRPVLEECMALAVLSCDEYLSSDLVFKGPHGPGCDHAREQCVGRQNICGEYFRLPPCHLVRNINTSLQVRRTVLNIVFVINVVGAVRDIVFVSQSGFGLQKNGSP

SEQ ID NO: 973900 - protein, 127 aa, Homo sapiens
CFSPQTKPNTVPQNITINNTTLTTGDSISSVDDPHSSSTNPDASEVPPSSRDDSLPSDKLDKDEAGGDIVYARPHPLSLHSQSSNTTNTPLCGIAPVANNPLDQSTVSEANTTHNDTSSNNVYVPDT

SEQ ID NO: 973901 - protein, 284 aa, Homo sapiens
MRDILRVPVGPCFFPAAAICGMESPKKGFPKGTITRPILPPFGPPSIRGDTSLQAALSWCLPPGNRNSAAASKFLWAEGYQPVPGHAKAISSGRPKWGSCRFTKEPMQGRRPPANKRPQNSGVGKVNASPHRIVFLEQLRSGLDTSLHRVSIKSSTPPSPPVASNPTGGVVFSPGKPRCPLRQSALHTHQELFIARSSPPDVCDPQRVNKTNYRVLLASVDKTTFVFAPINGVLCQRYRLSKRDMWRMKKSWRAKAEEKEHNTGAGRDPHPLGGSPQNGLTPQQ

SEQ ID NO: 973902 - protein, 127 aa, Homo sapiens
RRYISEVTNTSQEDDNPEKRSFASEEFSTFNNYNDDNLFTYSDVYYPTKYTTYVAPSGSLQPRKAYPALSQHPSFNLNAATYTITLPKTASKPDPTSDSYPLQSLTSEDTTVYVEDNYPVSPSPDVA

SEQ ID NO: 973903 - protein, 156 aa, Homo sapiens
TGAQTQGTSSATEKQHGGEPDPGLGARHPKRPKSVGPAGPRPPRSEPHRTKGSHPPLGGIQRRCGRTNYLGPPAVCGAPAESREGAASPPLIRGTHPRCDPVLNTNRTLSEKFRPPPSGYLWGTHSLCQGPSRTIPHGTQEPGPRGTSAEDARTTR

SEQ ID NO: 973904 - protein, 289 aa, Homo sapiens
NPTSEQERLTGNNSGRETIQCRGAVVSRRKQGCAPYAVSAHRLKAQFASTGLSHAPLLRLMAGPANCWRCPTRECGPASPGPGNQTKQELLGGAPRVHKGCQVLSAGGKIFRATPSESRPRGPSSTSGVPKPHITQGGHPPSGRPADEHTITKGGVWRHTTKKTVLLLDDKPPVWRTSIVSIKRRPTSQGSLKSIRMFQTLCNSLSKGGEIIPRGPTNRASPPARGEKAAKSPPPLVQGAMIFGLTRRRRPPRPTGVQLKKRPHTKGASPKYFLPPGGLTNRNQFPNKK

SEQ ID NO: 973905 - protein, 61 aa, Homo sapiens
MGVLVPPVGEHTLCQTGNDVTRSVTAQPGLLEIREVNERSGVADGVPLTTETPVTVDAACL

SEQ ID NO: 973906 - protein, 535 aa, Homo sapiens
  misc_feature (225)..(225): Xaa can be any naturally occurring amino acid
  misc_feature (397)..(397): Xaa can be any naturally occurring amino acid
  misc_feature (449)..(449): Xaa can be any naturally occurring amino acid
VCFVVVRVCVVAVCLLFCCLLACLFLFFSLSLALFFCVFFFFVRLFLFCVSSSLLFSWSSLCLCFLSVFCLLCSLSLLSSCRCVFSVCLAFVVCVLLARSGSAALAASSFARRFIAGVSLSLAPALSSASVVSCLVLSLSRLVLFLSYSFGSCVVSVCRVAVSRLRQCLFVASVLSVSLLLPSRRRSAPLCVFGSGCRVWGVVSVCAFCVCVVFLVCGGGVVCSXRGERRGVGGADEAADGAGQRRAILSFCAVLAVVVDLLGVPLIDRGGGSSLVWSALVFYFPRLVAVGGSATKVCPRPLLLGSRALFWSLCVGRWGPPLRWRPDYFFLHPGGCPESARPLWFVLGRAPSPFILPCGGARLHHCWGKKDVVVRRPSAWGVAIQKVGPLSRRSVGXAPLWWGSTSRFEDATLFAWWVVRARGVNTASLKRIWVGAATRGAPDSVRGRXKCGGRPPLESLGALCDAKYISLCWTKTHHPPCGDTPGVDDEVYKTLYTPLARNIVSADYDACGGYIFSLGLARRRTGDDHFWGVSC

SEQ ID NO: 973907 - protein, 134 aa, Homo sapiens
MGWYHSRIVSLKEAFVVPGLVISALFFASNVQMLSAPRGGVERRFRSCCAKIILGPPGLKLKRLGLKKKATFEFIMVPPPRNGITRLTPCKKDVLTSVCQGPKLSPKWGGPILKTFRRMGLKLELYNPGNLEKI

SEQ ID NO: 973908 - protein, 50 aa, Homo sapiens
MTPVRLPKLYDVVLTIGMNGNVPTVFKKSYMIYAEIASSACLGHVDKRKP

SEQ ID NO: 973909 - protein, 111 aa, Homo sapiens
MSGGRYNTTGWFPQRRRLFLCVKTTVGVARLSLWMVFPLEKGEKYFCVMEIEMSLEMSYSPSFGDTEFGGKVGGTRPLFNPGGAIYISPTESTWLYKFFISWGVTYFCEKM

SEQ ID NO: 973910 - protein, 110 aa, Homo sapiens
  misc_feature (1)..(1): Xaa can be any naturally occurring amino acid
XVSFWFVFCFSVFLCGFCVVCSVVSLGRRIAVQSGDGVYGKSRGNELDRVEMGSWGRLRTDERGLSARFVYAHPMGPLPGVRPAAHSTNCWRMRIVFRRAWKTGGVVPQF

SEQ ID NO: 973911 - protein, 145 aa, Homo sapiens
MTTTMALMTSGKMRLSGTSLTRVSYSTRTSTHSREPNFTMNSGRLCVVSRFCRRFVRDRCKKEFTDLMIEMEDQTNDVQRGRHPRCLDYKTYTDRVYYLPSKGRRQRTLMITRQAVHPRCRRLARMLEQALYQFSNLLNRNSYLI

SEQ ID NO: 973912 - protein, 191 aa, Homo sapiens
LLFFRLFPLSCRSFFLLSLSSLSLCFCPRLGSAFCLLSRFSLPFSYPSPFLSVLSLLRPSVVFSFRALPSSVSLCSFSLSCLLCLLSLVSFPSSALLPPAAAAVLALFFLSVSFFGLALLFPPSRGRFLLLVFLFVCFALCGLVLVLLSPVSCLPWRSLARLLPRALLSVFSLPSPPGRPPVLACAQEEKY

SEQ ID NO: 973913 - protein, 104 aa, Homo sapiens
  misc_feature (104)..(104): Xaa can be any naturally occurring amino acid
MGGLITKHRWGNKKALPLVILCQGGSPHIVCAPQNASYKDPYNVNICIPPLMSRRPPPRFTPLCVDKHAFFQTLCLFAQCGPTFKDYYINNNLWFIDHTTAALX

SEQ ID NO: 973914 - protein, 143 aa, Homo sapiens
SPISGFPFGPPYCLVIALLIVVRWCNAARSRVILLVSGRPRVYAVLCVIIVVRRIAVCVLLRRHRTVCGRGEDNTEGRVKRSPSPGAVQKSIGAPPWVRETLPGGSPVFRRDNFCSHGSNILVPPPLCPRGPPAEHVESPLSA

SEQ ID NO: 973915 - protein, 148 aa, Homo sapiens
SVISLLSCAPLFLLFACAFFFSFRCFGFSLTCGLLALHFVLHACRLLRLLCFPFQSSSSAACLSGCCRSRCPRSTLSFVVLSPGVFLALRICLQCCARGSTPFLAVLDIPSVIFRIVSSMRCLTYCVSVWCHVSGRSSKQKYSHEYIG

SEQ ID NO: 973916 - protein, 60 aa, Homo sapiens
DLGSGLQRIGVGVVRCLVDELAITMASQATKGEKKDDSKGSEHGSRSFHMASVHINGGIP

SEQ ID NO: 973917 - protein, 81 aa, Homo sapiens
WIVFVCLSSRGSYIDRRAGQDDKAEADTTPLDTPPHRPLLTEMFWGCSERLAPTGALEGFDGQCWVPLPVCGAPKRVPTPG

SEQ ID NO: 973918 - protein, 45 aa, Homo sapiens
YNLGPHPLLEHKRIHTREKTYKGEEGGKAYSQAFKPYYPSRGYRG

SEQ ID NO: 973919 - protein, 61 aa, Homo sapiens
SLEDPYVTVNLTTIENSHGKETLQKVKKVAKLLSGSSNLTEHKNIHTEEKPYKCEEGGKAF

SEQ ID NO: 973920 - protein, 33 aa, Homo sapiens
MVALLTRKLYWNSSNGTYGMKLVLTTCQGYRSS

SEQ ID NO: 973921 - protein, 161 aa, Homo sapiens
GNTPAGIICCPQGPLGSYPWRTPLWGPDSAPRRCVGPPQQMLFYPAPFRTPLWGRAPGVVDPPRVNFSRGGSSRRVGGSPLGVLFSPAQLFCCAGGPSEGVLDNLIDKKERLAAPEGTAQCGPTVLPERRSPRRPPLERPRIKEAALSLRPWKKNPTNKGL

SEQ ID NO: 973922 - protein, 73 aa, Homo sapiens
VVEGRPYSYIQHSLLVSSVYSTTEDTQPLHGTTATTGLRPVTVDPTDTTDTREHPDIPPGIQTAAGTLNRSTE

SEQ ID NO: 973923 - protein, 121 aa, Homo sapiens
MSPSKASREGTLLLVLLFLVRRKTHVCSSFPAPAKAALLGAPHVSSRFNTHVSAPRRHNFSGKAIPAPGTLPLRGTERAHKEKNAGGKKIRGVTKGKTTITHTGRLKKGHKKCPGVGYPPR

SEQ ID NO: 973924 - protein, 148 aa, Homo sapiens
ELRAPAETVCVERSPRCFPSPGIRHQLGPLRHAKKECQRSARHLGHQGRPGHRGPPPVFSRPPAHCPRLAPIGAPTPGHSSKCAACKETLGAPALGITVGKWPLNFCKDVGGKTPPLIDKGSEANQTCGLETRSPSTPPVGAALARFQ

SEQ ID NO: 973925 - protein, 253 aa, Homo sapiens
MCLGGPHPEEERGAAAPGRNTGVGRRFNTRGNTGVPKKNGKMGAQLCPDSNSPKARHTPRCVEKCGPHPGLSKRVVAPTLQHTRAHTLVAPVEGGPGPHKVTKETRVRHKYWGAPTAPTAHLHCKAPGGSRWGQPTGGPPGEVNPPQGGARLWPNTEETHWGDSGESDRKNADQFFSTKAPPGKKKWRAALLREKGHLYTENGSSGRNFLKKKRVVGKNEEGDSQIIPSLWARHKVTEVPPNFPCSRYDEPSR

SEQ ID NO: 973926 - protein, 173 aa, Homo sapiens
MFSEKNFSKTFYMEPKCFQQGGKILLKGTSKPRGSSLLKEFYTPFMTAFTNKGPCGILGQTYSHSVCFQLKLPGCLLPLESREFISKGPKLGAWKPHIASLRAPYRRDFLKITCTKRPVLLWYNRRAHANDSPSDDGQLFSTGRSRRLSGRRRAPSYQTEETNTLPPAYNIRS

SEQ ID NO: 973927 - protein, 42 aa, Homo sapiens
SETGVTGRLNATLCITKACKAPELSCQTPPKCKDMFEILDIT

SEQ ID NO: 973928 - protein, 152 aa, Homo sapiens
ASTTAPPVAMDTNRLRQGYNLSEHTIATNQTGISYPTMLRPTPQKLHPQNCSPEHYEPQLKTQRTWRSFIYPLEEPVLYIAKTRSTYNTSSNRLYTDNLTTNPDEGYKVSASPHVKPYGHGVAHEVARNGLHILPPKIQIALMPIKGRRWIK

SEQ ID NO: 973929 - protein, 49 aa, Homo sapiens
LVMSSTHACLIHNIYDRDQFGGGMRSKGDIGNRTTSMKRLNTMLARKGQ

SEQ ID NO: 973930 - protein, 99 aa, Homo sapiens
TPSSHRKMNVLSEGAYRGYMGLYTVNTSQSFFMVNTRQSVEPTSGINLRINSMGSCTQRSWAAVPRMLLKLVLNYQMKGYATIDSEEERVHANTDKTSA

SEQ ID NO: 973931 - protein, 64 aa, Homo sapiens
MVSCTSAHSFPRRDMLALLHLLGAHIVCSHNETLRIIIQELDDLKEVVDFQVALSSLGITAARR

SEQ ID NO: 973932 - protein, 51 aa, Homo sapiens
CFEVLLVQAVISFCICRQCQGTWWCRQYMHCVGVRSLRMSTSHFMGTRSEV

SEQ ID NO: 973933 - protein, 34 aa, Homo sapiens
WMQCPLWMQVSEFQAQPQNYTIFISKVGDTLHPE

SEQ ID NO: 973934 - protein, 30 aa, Homo sapiens
MLILIALPSLRILYISEEVNDSLPYHQHQI

SEQ ID NO: 973935 - protein, 99 aa, Homo sapiens
DTVMTWASLTLSERANLRTNISDAQEIYTGCTILPAIILILIALPSLRILYITEEVNDPSLTIKSKRAPNGTELYEYTELRRSNLQFLHTPPIIPRTRR

SEQ ID NO: 973936 - protein, 58 aa, Homo sapiens
GRLCTPACSALPRVYESLILFLSSPFRGLLYFVCFKEVDLLMHEEWDAFDLKTKDRCQ

SEQ ID NO: 973937 - protein, 58 aa, Homo sapiens
RVYCGLAFARGAVGGRALHLAGLQGIIGNILDECLGCSGDEPNNAGGLRPRSQHGSGS

SEQ ID NO: 973938 - protein, 43 aa, Homo sapiens
YGLNLHAERAVACERATSSTTLLVALAVAAWRRLQYSPCSTCY

SEQ ID NO: 973939 - protein, 32 aa, Homo sapiens
MLDPEITGGPQNLLYTVETLPSWDQKGKNRRG

SEQ ID NO: 973940 - protein, 142 aa, Homo sapiens
NGKPQVVLQKLSSAKTIIRCRLLAYRSAYAIAIANLGFLQSMTIFHAFACPSFFLVFKTEEILHLDLCDGSLELKQRAFRQASRWRRGPSSSNSRPVKAFDVTSSSCPKMPMRRQMATAVPLLSPVVMMTRMPACRHSFTEE

SEQ ID NO: 973941 - protein, 89 aa, Homo sapiens
YKKKIDIYRMQKYHGVNTKNQSWTIYYINRIIDVELSDIKIGLSFELLVRNKSRLSTGRPAAGTQCPSHCGSIRTGVGSPFNSRRLGFW

SEQ ID NO: 973942 - protein, 43 aa, Homo sapiens
LEIHKARRAKATDPTKPDELPKQQLKQPPVYVATIVGKHLSGR

SEQ ID NO: 973943 - protein, 106 aa, Homo sapiens
VQSLSLLRVCIPIVRTRLILQEVSVIQRALLLLLTILSCYTPFPVAVDQCISIKANIIQQAVNPVLCNCSCTRLSCYKCYRCYYLIYPEFYFCPCRQNIKTPGLKA

SEQ ID NO: 973944 - protein, 50 aa, Homo sapiens
EERAKTLSTLCYSSTSEDLAPLARADDYEQVKNVVDYYPEYNAALRGCKV

SEQ ID NO: 973945 - protein, 98 aa, Homo sapiens
VTLQDPSGVASGLCDLLEAGGQDMDVGQEAVLTRCVSLASSLFNSSSLRMASCRWRGIILVFLLSRAALPASSRISAVRYSNTAARYTGAPAESEGSL

SEQ ID NO: 973946 - protein, 89 aa, Homo sapiens
QWRRQDLLLVQVQLAESSSTGAPTLARLMLPRLTLVRCFANQPGREGSAFTPGCFSEGIDLILRDCQLIVVPNEGRVYAGGLESLKAVW

SEQ ID NO: 973947 - protein, 90 aa, Homo sapiens
YYRLTVLGFKACILLESVSHTGHISVMRMTWKGGAAPDMEATLAQLFNHVLIGTNSGSSRASEDSCSYSSDTMWPQSGNHHFAFSAQVKN

SEQ ID NO: 973948 - protein, 63 aa, Homo sapiens
MPQLSYHADLFSYPSPVSSTRFHPSETRVLVDLKRRNGKDLREYMVATHLPNKYLDPPDKNPF

SEQ ID NO: 973949 - protein, 47 aa, Homo sapiens
CLLVSSSSFIVCSPVLSIHPAQHLILNVASWPHLGLPHAWPPGPERK

SEQ ID NO: 973950 - protein, 114 aa, Homo sapiens
MDPGVRGWFFGYECQFLFTISHHPHQSPTTACTYSREIVVCVLLACVGGTNARRLDKWGRNERVAWEWWSSGLWLPRHVLVLRGSGLVHGLLLLLHVLIILLFPEPRSTSGYTT

SEQ ID NO: 973951 - protein, 143 aa, Homo sapiens
ERKCVKSPGDGLSGSGLGRTRARALNLGAQCPGTPVYPTHHAVPRPPFLIPSMISSAEVAGIPNAVLLNPGLYTDVSVRQSLINTLAVALDDHGMMGGLVAIQALAFLQALHEVLFLFCRLTTWRLLRGACAAARVAHADGAA

SEQ ID NO: 973952 - protein, 52 aa, Homo sapiens
ELVTLVHNSSSTCVAAFIAASTSSTVAYVTNPKPLERLVFESLITTQSRIAP

SEQ ID NO: 973953 - protein, 68 aa, Homo sapiens
HDRCYYYINYTTIDALQSCPSSANDQGARCLSEIISNASQSMLNIAHPAPLKSHSPDGMLAQRGPPQC

SEQ ID NO: 973954 - protein, 42 aa, Homo sapiens
NGTLPAQLVPSVRFQKSASMITNLRASSSYFLSCLFCNCGLG

SEQ ID NO: 973955 - protein, 39 aa, Homo sapiens
SSSVPALQAENTSALGGWYLPLATSLVSPPIAHPAESAA

SEQ ID NO: 973956 - protein, 138 aa, Homo sapiens
MSCIKDVAIKEPLVDVVDPKQLVTNACLIKVRGWAWPGAPWVETKERPSPGPGMGLWGPECWPEVSEPDLPARGGARGPGKTLRPLNIFVSAAVGEPCLALGFWRRKHPKLAAKAHSPCTERQDPRSMSGCTCTRATA

SEQ ID NO: 973957 - protein, 40 aa, Homo sapiens
EHGKLAVMPAGSQQVSVRYQVHICTQALIVQYHMQVHWKT

SEQ ID NO: 973958 - protein, 66 aa, Homo sapiens
TDHLNPPKTDANPNPNTLVPPVAIQMLTLRMVSQVETEQEADDGGGSHMNMKGNILSPMYNPRDKL

SEQ ID NO: 973959 - protein, 79 aa, Homo sapiens
MLGVQGACKDNPGANARCLPKCVWNRNDWGIVFNGSIGNRTSSQKSHDTQQVDRSNKQDLQGACTKTDSLTQPDSSELE

SEQ ID NO: 973960 - protein, 48 aa, Homo sapiens
QTCVEETELQQRNSSIRPGSNSIAEKDNKPGPIGKPASEHYDDEAEAG

SEQ ID NO: 973961 - protein, 32 aa, Homo sapiens
MECTAKTIDGRERGFRNGYDELLVRTLASGKE

SEQ ID NO: 973962 - protein, 96 aa, Homo sapiens
AEDAKEISALVSSTMKIEIIAPPERKYSEWIGGSILASLSSFAADSGSAKLEYDESGPSIVQRKCFYADYDLVALQPFLRRPNLRRKQDEIGRSRK

SEQ ID NO: 973963 - protein, 103 aa, Homo sapiens
PDPNIEWPCDVTKSISDGVEQMQHVRTQTWGTRHDVHTEMQQRRTRARSTYTHNIMSHRRGDGIHTDGDDSTHTDTVTTHTMTTTPNKIIGTNIHIACIALFT

SEQ ID NO: 973964 - protein, 53 aa, Homo sapiens
TDLRQEDPCEAALRAQKVISSANRAVVGVCGVEVAEIDKPILKAGRAVPQSIM

SEQ ID NO: 973965 - protein, 60 aa, Homo sapiens
RFCTAPHRPASPWMIRVYRCFPCWYMMATGHQESSADDNGPLMELDDSDFETEDFDGRSR

SEQ ID NO: 973966 - protein, 33 aa, Homo sapiens
YSGIHRYLQINGRSRKQPSYLPEKQTSALAEAG

SEQ ID NO: 973967 - protein, 37 aa, Homo sapiens
DSDIADAGTRTGRDRRNRTAVIRTDHTKRGVRYWVMA

SEQ ID NO: 973968 - protein, 103 aa, Homo sapiens
PEPSADATDICCQWTCMDISSASRHKIEDVDKKTYPWKYQMEETLSRYIDRGASGTTIWRGQQSSNLMLVMGTRMMALSRDHPNKEDSSKQGGLITSLPSSPQ

SEQ ID NO: 973969 - protein, 52 aa, Homo sapiens
IKGIYDLIRHGDTQATIAVNSIKKKVNDKNPHIALKAHEGHLIMNCLATVLY

SEQ ID NO: 973970 - protein, 50 aa, Homo sapiens
MLSPKTQQLYQQKLLARTLRATADNSKDLAVLHIPLRGACSVIDKPQSII

SEQ ID NO: 973971 - protein, 119 aa, Homo sapiens
LQFVSLVLDVIAIISRECLSASEVIPLVFSASEFVVDPLKAHLLLSLMSLALILARFGCSEACAAGTGCPVYPPLAWTYSHPGSSVHLTISSLHLACVSSILGRHQFHHNNYQYKNPCH

SEQ ID NO: 973972 - protein, 164 aa, Homo sapiens
DRARSHYVDGTITPIIAFTHMTSYCIANPSKTLTNELKPLIPMPQDLLNSHRCSISVRQASCPLNNLKQAVKPIISRPIVQNSSMRSGGEGREPCTLQLVGVEHGWWVGPEHTRVHSEVEPLSHCQCQNVSPGMGMSRFLSLPAVQDLHAFETQDSSEEAGVLI

SEQ ID NO: 973973 - protein, 130 aa, Homo sapiens
ISSYPLCDGGMLNVTLQRMATGTVSSQCWFSRPVSWKHGEHRYLDAQAVSGCSSSSTTQVQHDAVWYSPLVVLLDIIVQGLASSLLLNSDLIFNMSTSLRETMILIRTLSRVPLPFMESYSRSAKYRGLF

SEQ ID NO: 973974 - protein, 98 aa, Homo sapiens
MNFLVQIVTVSFIVVILDKICSMAEKCSTMIDAHVDVKTTMVTSFILFSVGFTKKRNNQIRKTSYAQDQQSAKIQKKMMEIMTCEVQTNDLKEVVNKL

SEQ ID NO: 973975 - protein, 41 aa, Homo sapiens
STSIVDLELISPRFVHVELKMHLIVVRYYCSSDRNSTLGVS

SEQ ID NO: 973976 - protein, 35 aa, Homo sapiens
RKEAKSPTSRRTHHKPGVTIWMHPTLPHIRRQPYT

SEQ ID NO: 973977 - protein, 98 aa, Homo sapiens
CDTVAAETQSITSLLVSNTTRFFIGEDMNPDGMVALLDYREDGVYPIYYFLVRMVYKWNNVYTCGVYFGSITCHPDRVYCSVIHNQTRSSDVWRVMSS

SEQ ID NO: 973978 - protein, 51 aa, Homo sapiens
QRDGYSSEEARMRKMRIDTEEAEEDDDEEEEEMTGARDWNGNVFRSSTAER

SEQ ID NO: 973979 - protein, 57 aa, Homo sapiens
WSAEQEYGKEEYVYAKVLLPRLPSDSSRLHLCGQLAVAAGQAPHTREIHTRGTHENP

SEQ ID NO: 973980 - protein, 44 aa, Homo sapiens
GRSTLRELERYVHFLPTVRNPVKPYTIKEACGKDKGGTGRCVAW

SEQ ID NO: 973981 - protein, 115 aa, Homo sapiens
ESPGRLAREIPRGRERPVCTLRVHTQVTRRACAYRRVSRFTHYTSGRTSLTEFNGRECALVEREQRLRYIPRVVPRLSGPPHRPPRSMLCSVWERGEIPELKEGRERGYFFDRQS

SEQ ID NO: 973982 - protein, 44 aa, Homo sapiens
MRCIPIPVSRPFESPRSRGTSIKSRQQFSFRTVKPSHTPTGYSS

SEQ ID NO: 973983 - protein, 71 aa, Homo sapiens
RHEHIPPYYQHTLEHKPIIPNIRDIARIEFWKTLGAYRYRYPEERRDEKFITQCIFIGRGLTPYTLSDILI

SEQ ID NO: 973984 - protein, 109 aa, Homo sapiens
CSGRGELSLVFAVQAFASPAPQTVPTELPAEALLLRAVDWTRPPVPTELISVLILHTGSGQQGQESSLSKSLVSEGPKLRELGLPLRARRPRSNFRPPGRRKQGSNNFN

SEQ ID NO: 973985 - protein, 42 aa, Homo sapiens
CPLETLSTIFQLVIKGNPPHWFDRGFVQCVCNAACWEPWFLQ

SEQ ID NO: 973986 - protein, 39 aa, Homo sapiens
GGAPVPWPQPNPATADIWGDFTKSTGSTFSQTQPGTGWI

SEQ ID NO: 973987 - protein, 102 aa, Homo sapiens
LGEGCVGKTSLVLRYCENQVYRQAHHHFAGIILNKEVKYWWERGKPCHFGIRQVKGDSMHWGPLYYRDSHGAILVYDIHMKIFSEVKTGSQNYGKCWGNEIC

SEQ ID NO: 973988 - protein, 122 aa, Homo sapiens
HRGRRMRGVWALARGPLEARLFLGSYLNQVTFLGFNGRFLKILWEAPGEAGTGFFKFPISGFSHLWGIWDTFHTGFTFSTSPPPTYMGGYFASNCCKMRNNDPKFARRDHGGCLGRAAHPLT

SEQ ID NO: 973989 - protein, 102 aa, Homo sapiens
MRVTAPRTVLLLLWGAVALNQNWGRFHFNVVFLKPPCPRPARGEPFEWKWVRWSETQFVEFLTDSPRVTQKQTAGIWIDKGGAALFGTQTQFYSETQTIFVR

SEQ ID NO: 973990 - protein, 84 aa, Homo sapiens
MAVHGPKALGLCPNAQGGEPKHFFRVQKGLFYRNIQTFKELSKPLVTAYGPHGMNKMVINHFGEMFFDKDAATIFRELEVQHPP

SEQ ID NO: 973991 - protein, 35 aa, Homo sapiens
TAKRSGGDSLGFASRGVSAAAAAWAWYVQVAVGFS

SEQ ID NO: 973992 - protein, 53 aa, Homo sapiens
MARGPKKHLKRAAAPKHWMLDKLTRCVCSGHPPVPTSGESFFPSSIFRRTDLS

SEQ ID NO: 973993 - protein, 69 aa, Homo sapiens
KNSARGTIAGCKNKRLTEGGKKGAKKEGGGPIFKKGLDVVEATFIFNIWNNLESRLQPGPKGPKISPIG

SEQ ID NO: 973994 - protein, 71 aa, Homo sapiens
EKFVVYNVYMAGRQLCSKRYPEFAILHQNLKERFANFTFSGLPGEVGIFIIRQQFRLPTVGIWKDIQEKVC

SEQ ID NO: 973995 - protein, 46 aa, Homo sapiens
PDYGSWEDPGQQHSREMDSVAFEDVAVNFNHEEWALLGSITKRIST

SEQ ID NO: 973996 - protein, 84 aa, Homo sapiens
MSVKTWKSKASNGSHSEIVKDIIDPKTGDTASNDGKVPKIVNSCKVAFEIKMHADGDSHPTDREIYFQVSSLRGQERATIVLCT

SEQ ID NO: 973997 - protein, 36 aa, Homo sapiens
HRRLKPRPAGFVDNKLKQRVIQYLTSNKCWQICWTL

SEQ ID NO: 973998 - protein, 37 aa, Homo sapiens
HEIMIIYRDLISSDEMFSAITRIRGIGGRVLPGGGGE

SEQ ID NO: 973999 - protein, 34 aa, Homo sapiens
LQLLGFFVGFLRNVEPGYTPSQPCSKAPPVGFVF

SEQ ID NO: 974000 - protein, 40 aa, Homo sapiens
QNTGVVKLPQKPNWEREGFISPLFVIGHVDFGQSPPLLAI

SEQ ID NO: 974001 - protein, 54 aa, Homo sapiens
RNARVALIEGIPDDFIPDFPKMMMGAVPGASFSGQAPASSHPQKHLLEKPGPSL

SEQ ID NO: 974002 - protein, 50 aa, Homo sapiens
MRVTAPRTVLLLLWGAVACTENLGRLHSMGYFYTPMSRPGPWEPRLHRSG

SEQ ID NO: 974003 - protein, 71 aa, Homo sapiens
LAAWEERLDSRAAASAFTMALTLFDTDEYRPPCLEILLISATTGRPSSSENYLYLRGGKQTKVLWREFHGM

SEQ ID NO: 974004 - protein, 67 aa, Homo sapiens
GDTASHWVHMWSEQSAKDKPPYEQTAAKLKETYDRILLHIVPRAKVQQASRALAGQQAHSRSAHHKL

SEQ ID NO: 974005 - protein, 36 aa, Homo sapiens
GDQASQEMDLPEVAAVGGASGEEQEFNVPFSARGAC

SEQ ID NO: 974006 - protein, 39 aa, Homo sapiens
VLNHHLLRMSQPEPARKSRFSDPHKERLLQERGGNSQIS

SEQ ID NO: 974007 - protein, 57 aa, Homo sapiens
ETVKIGKVDCTQHYDLCLRKPGSWLSHSNNKNRDGKKVDQSKGKRDLKKLKGVPWSL

SEQ ID NO: 974008 - protein, 38 aa, Homo sapiens
ELPEGLICYCRQFWVEWVSRLSGFLGASFRFSSSDLGP

SEQ ID NO: 974009 - protein, 87 aa, Homo sapiens
MSSTRSFPSFGKITNDFYPEEDGRPKGNIFLEYASPAHVLDAVRNADVYKLHRQHTFRVTLFPDFDMYIASVTIGISQRNSLPKTWG

SEQ ID NO: 974010 - protein, 79 aa, Homo sapiens
GNKMAARKGSLSVRTNLGLRPLLLLTMALAGGFGDRSLEAFDSVLGDTAFCHRACQLTSLLDTPTLGKRSCTHVREVAV

SEQ ID NO: 974011 - protein, 41 aa, Homo sapiens
AAGTLYTYPENLRSSRLSSLLKYKRGSRSACLPNPPNFHFG

SEQ ID NO: 974012 - protein, 77 aa, Homo sapiens
MAETVADNRRLITKPQNLNDGYGTPSNFLEIDVSYPKRLGSAAGAFNTLRNQGQDKSFYFQAVRVYSYEEDTTDSEM

SEQ ID NO: 974013 - protein, 68 aa, Homo sapiens
SSEVELQDLRKELERVRKRAPGSRWETNQCISLLNRGQTERLREQEERLQEQQEKLWEPEKECFSRLP

SEQ ID NO: 974014 - protein, 70 aa, Homo sapiens
EEVRCPEHGTFCFLKTGVRMARIKEQSFYVCPADTCSFVRAPHFLFSIAYCIKVFVEISGLLLQGRRYRF

SEQ ID NO: 974015 - protein, 39 aa, Homo sapiens
  misc_feature (1)..(1): Xaa can be any naturally occurring amino acid
XFLYDIFFVFISPFLTKSGSSIMVEVATWPSDFKPPGEE

SEQ ID NO: 974016 - protein, 61 aa, Homo sapiens
GATTCTVPIITQYHLWRQLLLKRDIQIALLSGCYGGVAPRSGLAANHFIDVGAGVIDEDYR

SEQ ID NO: 974017 - protein, 66 aa, Homo sapiens
ATSVKPELRFLIVHNGVNHSKLVHFHHPPMPIYQGIIRDENIQEGLAPRPPPSIKRHSYMMFGIQF

SEQ ID NO: 974018 - protein, 99 aa, Homo sapiens
RSASATTAASSSLATPELGSSLKKKKRLFQSDEDVIRLIGQHLNCLGLNQTVGSSNGRSLGCLFENILLSIQISEISVMERDLGIWQKSVPVCNYGHLG

SEQ ID NO: 974019 - protein, 34 aa, Homo sapiens
GVKMAAFSEMGVMPRDFHKLVGRDRIGSFSTLIS

SEQ ID NO: 974020 - protein, 46 aa, Homo sapiens
VPPEASCDKAGYRTGRSEQSDLGTDNNGTVGEEDNFLLYIDVVFNI

SEQ ID NO: 974021 - protein, 40 aa, Homo sapiens
LRLRKYRLRVTAKMLSVRVAAAVVRPLSSAGRYWFSRKCF

SEQ ID NO: 974022 - protein, 106 aa, Homo sapiens
MRAAILHSKVRQNARIVLLCLTQRIWKGTHSFHSQDGQNCKKRRPKSLLGIGILKAIPEVLWIPPILGSWELKSFPSAQGGTFLLLEGIGNGLQILLGKTYFANQN

SEQ ID NO: 974023 - protein, 104 aa, Homo sapiens
RGGGGGGSAIEGDLRLTGRTHEGPVVPGLCCVLLTFGRYRADDEVDVDGTVEEDLGYSREGSRTDDEVVQREEDAIQLDGFKSITIRDLREKSEKFPFQAEDNR

SEQ ID NO: 974024 - protein, 34 aa, Homo sapiens
TERALAASPPLRHALRPQRFPRLRSAPHMAAQGG

SEQ ID NO: 974025 - protein, 36 aa, Homo sapiens
LDIRKDLYANTVFSGGSPPYTQGIATQIAEVRSPPW

SEQ ID NO: 974026 - protein, 74 aa, Homo sapiens
MKFNVDAFKRFNKYINTDCKVPGYFLKQIQQLPWVDFQHCLVLLVVHFCSLDRFENQVDIESCRGTFLIAACSP

SEQ ID NO: 974027 - protein, 36 aa, Homo sapiens
RVTSIEKAECDLPDEKDREANELTMSCGDVDGASCG

SEQ ID NO: 974028 - protein, 89 aa, Homo sapiens
SDIAYTCVHPDDRVMPGRQATGVHYSLGHPLWMISNVHVEQQCGSRVQQSDVLAEAVSDGRHMIEAIQALEPTSFGNCCLFGDWPWLQS

SEQ ID NO: 974029 - protein, 60 aa, Homo sapiens
MAPKGSSKQQSEEDLLLQIFSRNSLGQVPPRSLRERRSSFLPFPIWYYLAIYGYMDLFRS

SEQ ID NO: 974030 - protein, 103 aa, Homo sapiens
RSRSPPEAANGRGDRVELVVLDLPYLPKDKLAQSVQKLQDLTLRDLEKQEREKAPTAWKRSYFRPKSVGRRQQPPTWLTLALWSFLWLLGPIFSTPLPDKLYH

SEQ ID NO: 974031 - protein, 44 aa, Homo sapiens
ALQKGRPFNLTAGSLESTEPIIFSTNDKGQGVTVASNAFGQVGT

SEQ ID NO: 974032 - protein, 36 aa, Homo sapiens
NHSTLLPDTLANIYQIRLGVRIGTWRIVIVPQEKMK

SEQ ID NO: 974033 - protein, 34 aa, Homo sapiens
  misc_feature (31)..(31): Xaa can be any naturally occurring amino acid
MERPPCFCSCCLDLGPAAGRPSFPGTPLINXDVK

SEQ ID NO: 974034 - protein, 45 aa, Homo sapiens
TQEDEEDEGHSTPPHDTLKQRRHNVEDEMFIGGLSWALQRKSEGY

SEQ ID NO: 974035 - protein, 120 aa, Homo sapiens
  misc_feature (38)..(38): Xaa can be any naturally occurring amino acid
LQQQQRPEDAEDGAEGGGKRGEADWEGGYPEIVKENKXFEHYYQELKIVSQGELGRFMDALREPLPATLGYTWLRKPAKEILHFFKDTYFMGLEDLEVDGQKVEVHSHSVVSHELSCTQI

SEQ ID NO: 974036 - protein, 34 aa, Homo sapiens
NRLTFPARLLPGPHRPPSLRFLSFPDEVTVPSLP

SEQ ID NO: 974037 - protein, 70 aa, Homo sapiens
TKSPKVTKRTTFQDELIRAITARSARQRSSEYSDDFDRYEIVSLGDFSDTSADENSGLIKKWMTFIYPDG

SEQ ID NO: 974038 - protein, 34 aa, Homo sapiens
PGIGMFEAITTMRILKDDDLYGPVCRRMDYCIFA

SEQ ID NO: 974039 - protein, 36 aa, Homo sapiens
RPPVNFYAEGLQPPLQIPEYYLLYNRESRCLFEGGI

SEQ ID NO: 974040 - protein, 47 aa, Homo sapiens
AETFLGRTAAMAAQGEPKVQFKLKLVGNGGTGKTTFVKRNLDGEFEE

SEQ ID NO: 974041 - protein, 66 aa, Homo sapiens
HIPERLCESKEGGQGEETFSQIPDGILKQENSWSKTRLKAVCLEKLAWVLHHLIRHIKRITLAVTQ

SEQ ID NO: 974042 - protein, 37 aa, Homo sapiens
MADFDDRVSDEERVRIASKINHSCTPRGNLMRYSIDV

SEQ ID NO: 974043 - protein, 44 aa, Homo sapiens
MAVARPALTKAAKGAKEEVVDPFFKKDWYYVKAPPISIIEILEG

SEQ ID NO: 974044 - protein, 44 aa, Homo sapiens
VCRQNTGVRENYPLKAKIVERKRFIFNIFVIGTRRIRASSPILA

SEQ ID NO: 974045 - protein, 41 aa, Homo sapiens
FIYSTIFAGTLITALGSHLIFLPEVGPWKLNMLAFISVLTK

SEQ ID NO: 974046 - protein, 30 aa, Homo sapiens
MADLGGAVVLMKRRFGIAGKNSSFMPLLGE

SEQ ID NO: 974047 - protein, 82 aa, Homo sapiens
MRVTAPRTVLLLLLGASALNQNLGRFHFMREFYNRNVPPRPRESPSHMRSGSTCDDTQLRRGCDSNGRESRGRSPGAPLYRA

SEQ ID NO: 974048 - protein, 38 aa, Homo sapiens
VVQSNVGYVSEPLFQLLGHYSQHSVLLVASSTSGNHEP

SEQ ID NO: 974049 - protein, 36 aa, Homo sapiens
ITGGHYDVDCRLEDPDDGICLCFNSRKLLKVFNRII

SEQ ID NO: 974050 - protein, 43 aa, Homo sapiens
RDDCHLREELREGASVLEAAGGDQEKEEGLEQFLAQVHCYIGP

SEQ ID NO: 974051 - protein, 78 aa, Homo sapiens
LACCSSAPARNRLGRVMLDPPAGTVAGDARKVILTCQNGETEKKSLLRRYPTRTRTKETNPTQLYRQTSRRENQPGPP

SEQ ID NO: 974052 - protein, 33 aa, Homo sapiens
ISSGDVRGKYQTTLLPSPLLSSSLALGHMTFNG

SEQ ID NO: 974053 - protein, 45 aa, Homo sapiens
LGPEQTDLQDQHTDLPERACRNLRGYYNQSRGPGLKIIPEGCMCL

SEQ ID NO: 974054 - protein, 46 aa, Homo sapiens
GVEEKKKEVTAVPETLKKKAKEFPELKVKRLRKEVSHMVLRKARRE

SEQ ID NO: 974055 - protein, 38 aa, Homo sapiens
VLVSLAISAIWSLQAHGLAAHDLADDPRGPLRAQRLGN

SEQ ID NO: 974056 - protein, 35 aa, Homo sapiens
MSNGEKEKCPGGEILDGGVRGSPPEDYTVYARLAL

SEQ ID NO: 974057 - protein, 76 aa, Homo sapiens
CIAGGAWRGMALAPGLEADVLFYYHYLLVTALYILEPWEPTVFNSSRGFHFGIALLHKITTLIPNTNNAIYSLYFK

SEQ ID NO: 974058 - protein, 79 aa, Homo sapiens
PKRPPEHRGTTKAPPQGPRAGRSLPAEPTGAPQEGGGQRKARTKRTGTPRGKGPGPPPPTPNHRHSRGRRSTGAAERRT

SEQ ID NO: 974059 - protein, 34 aa, Homo sapiens
VGKKGVFLTQKVDESSGAEPKEDLRHINSDYHKK

SEQ ID NO: 974060 - protein, 78 aa, Homo sapiens
NETFGFEIQSYRPQNQNACSSEMFTLDMQNTRGQASFNCLGLKVGIVLPNYHWVESKEGLPSTQVVDLYQIVRKPANR

SEQ ID NO: 974061 - protein, 55 aa, Homo sapiens
MREISSGQGSQTFEEDDDGFCVFREQRNIAYYVSNEELRGSTPEAARKVVQLVSL

SEQ ID NO: 974062 - protein, 59 aa, Homo sapiens
PVRMFRRVACSRGCGSSGPGRVATGYSRQRVTDILASRRHASQYCFRVNLSVCYGAGFD

SEQ ID NO: 974063 - protein, 71 aa, Homo sapiens
VSPWLQMLGVQGACKVIPGENPASLPDFLFGPVLLGDFSILAALPPGNLSKGHMFHTRRRSIFTGLQGSFP

SEQ ID NO: 974064 - protein, 39 aa, Homo sapiens
IFGSSPVASLLNYQHSLLIYHLSLLASFACLRLLFDGIA

SEQ ID NO: 974065 - protein, 52 aa, Homo sapiens
GVISSGARPLSSRRARPVNKWARMPYEIKKVFASLPQLERVLLQDYSAANLR

SEQ ID NO: 974066 - protein, 43 aa, Homo sapiens
RRKFRKPRSLEFFEFQKGKPAGFKPGTGAFGVSNLGSGFPGGP

SEQ ID NO: 974067 - protein, 89 aa, Homo sapiens
MANSSFIENTKLPGVVHMPVVPATWEAEMGGFLKPKRSRLQLVEIAPLHYSPGDKDPFTKSCQMDIEVKSRSRLGAFAHTFYTSTFGRP

SEQ ID NO: 974068 - protein, 33 aa, Homo sapiens
KTENWHVAKGSGWKAQQGCPYTLGLEAAHVSTR

SEQ ID NO: 974069 - protein, 46 aa, Homo sapiens
VSFYIRLCAGCHPAVPSAAAGLCLLASKLLPAPLGLKRVFKIGTIL

SEQ ID NO: 974070 - protein, 36 aa, Homo sapiens
IKIPDCVDPEDVDVVDPDERSIMTYVDTVFCKNSKD

SEQ ID NO: 974071 - protein, 32 aa, Homo sapiens
HSTYYQTPLVTIYQISIADRDRNLAQLDIVPQ

SEQ ID NO: 974072 - protein, 36 aa, Homo sapiens
NYLPASSQHFQCYDYHLWLEARVGQPVNQLTLEKNP

SEQ ID NO: 974073 - protein, 47 aa, Homo sapiens
QSSGSPPRSLNRPNNQTEKFNKQRTEGPAGGGRGKAGVSAALPVPIN

SEQ ID NO: 974074 - protein, 33 aa, Homo sapiens
  misc_feature (16)..(16): Xaa can be any naturally occurring amino acid
  misc_feature (18)..(18): Xaa can be any naturally occurring amino acid
LLGQIGAALRPRWLCXSXRRQDSGTYERLKTRG

SEQ ID NO: 974075 - protein, 36 aa, Homo sapiens
CAEHRFVKLPYSKWKEDSYHIVVIGHVDSGSSPTTG

SEQ ID NO: 974076 - protein, 88 aa, Homo sapiens
SALAELIARSEVELRAGHYLLDYPAQDLRSPGSVCGFGHFSDEVNPLDSAVSVESPRSDSSLPQHADMVSPLIIRLVDISSAPFKWNH

SEQ ID NO: 974077 - protein, 84 aa, Homo sapiens
ARHRCRETTLKPNGRKDSYQPLSSLDHVDSGQVHHYWPSDSINAGGIAKRTIEKFWGRRLLRMGKGSSKDALGLGKLKADLHVG

SEQ ID NO: 974078 - protein, 34 aa, Homo sapiens
GTAGPASGSSSSSSSSSSSSSSSSSIFITSRRLP

SEQ ID NO: 974079 - protein, 103 aa, Homo sapiens
PGGRGASSKGAPWRTPGAPLTTEIVISFLNSQQHGAQSSNSARAAKRAGTSKKKEKEKAQLQQSLKQANWFFEAGAKPSGEPLSCRPELDWIQHPSSASETKH

SEQ ID NO: 974080 - protein, 32 aa, Homo sapiens
RRQCAYIIHNRVLFAEGTTLGSTVHNLLTGNQ

SEQ ID NO: 974081 - protein, 33 aa, Homo sapiens
RDVYKKVLRSRTWVPRLPASEAQDRNRRKVKAC

SEQ ID NO: 974082 - protein, 56 aa, Homo sapiens
MTFHLKRDISSSTDGYSTSSVIGHSLDRDLISIYAHNNTSSVSISLLLQRIIIRTI

SEQ ID NO: 974083 - protein, 33 aa, Homo sapiens
REVEECRLVYSTFERGFDGYPLLWSHTMISKPI

SEQ ID NO: 974084 - protein, 32 aa, Homo sapiens
HQSFTVARVPLQIEPVLSNQTYSDAFSHFRCY

SEQ ID NO: 974085 - protein, 31 aa, Homo sapiens
MRVDKTAREQGFPFTNPFRGSFPFANRILIC

SEQ ID NO: 974086 - protein, 34 aa, Homo sapiens
RQNKGVVKTTPKAKIGKGKDSYHIVVIGHEDSGE

SEQ ID NO: 974087 - protein, 77 aa, Homo sapiens
MPESASRGTWLPTFEANTNLSAASVSEPFLGDLWGILCSHLGLYPIVHHKGLQACKVAPEFAKGMLSWFPFNCKFRA

SEQ ID NO: 974088 - protein, 36 aa, Homo sapiens
QGGPRWSTPSDRDAQAVFLRMDRSGETARTSGGRET

SEQ ID NO: 974089 - protein, 34 aa, Homo sapiens
LDRLSNLVGSHLRPILSIHSGSVNARDPVTDTNF

SEQ ID NO: 974090 - protein, 37 aa, Homo sapiens
TSWKKTCINNFRVKGHIDSKTQTGRPPREPEDSGKAT

SEQ ID NO: 974091 - protein, 36 aa, Homo sapiens
FEQAELLRPGIAESDGCRPGVSLKDKDVGSICIFLQ

SEQ ID NO: 974092 - protein, 44 aa, Homo sapiens
DVHRKLSVLRHRSLGFLRCKAEQGISGKVEEVSLRIDQSKEGPH

SEQ ID NO: 974093 - protein, 37 aa, Homo sapiens
QVPARKKRPKRLRTSNMVRSGNKADCCADVWTWAFTM

SEQ ID NO: 974094 - protein, 46 aa, Homo sapiens
CLQKGLYVNWITESVQSAKRLLGPELLKKGDQLPGFPSWSMDPGNQ

SEQ ID NO: 974095 - protein, 36 aa, Homo sapiens
MHIYRGTLISPRMQHAFSAQSNKHPGRIAARVCCPG

SEQ ID NO: 974096 - protein, 42 aa, Homo sapiens
MLDVARTQVRVGPLSEKVDAWIIYTRDTVSVTQRDMGRHAQP

SEQ ID NO: 974097 - protein, 98 aa, Homo sapiens
KGGRENEDGRPSQAKNAISPVGGSLGDPCALDGTRVGGHEGLSTANHLAQFFPNSLTVFSPRYNSDPDCIPLSRVSLVSVFGKEYILGGNFTLPQTWR

SEQ ID NO: 974098 - protein, 44 aa, Homo sapiens
IQKKRKGREELIIMPRSHFEKEACPWVWMILLRKTTKLFDADIQ

SEQ ID NO: 974099 - protein, 58 aa, Homo sapiens
MATYLEFIQQNEERDGVRFSWNVWPSSQLEAKRMGFTPGLVFLSFKKTVPNLPPYNNE

SEQ ID NO: 974100 - protein, 78 aa, Homo sapiens
RDGEDQTQDTELVETRPAGDRTFQKLAAVGGASWRRSRSYTMPCPSMDGFPRPFNPRDGSPISQVHHPYRWHIFLACL

SEQ ID NO: 974101 - protein, 35 aa, Homo sapiens
GNYITERVLYYTGRLAKMHEVKVKMGLVLSWVPWD

SEQ ID NO: 974102 - protein, 35 aa, Homo sapiens
GGGTEDRPPDDAVVGDCRHATSPRPKLIFTDGLQR

SEQ ID NO: 974103 - protein, 49 aa, Homo sapiens
SSQLKGKWTQLCEPDQQGVGELPVRRDSIPILGTVGSGALGVYKDTFLG

SEQ ID NO: 974104 - protein, 34 aa, Homo sapiens
CSRQGVRGTHLKLLSRQEAVKYQGPGTFRHIENM

SEQ ID NO: 974105 - protein, 108 aa, Homo sapiens
MRIINEPTAAAIAYGLDKREGEKNILVFDLGCRTLIVAFLNIYNVVFGGVCHSIERLYLWCERDSLTSVSICTLLSHSTQRRTRTDVTGDTRAAAETLRAIEKSTRAS

SEQ ID NO: 974106 - protein, 37 aa, Homo sapiens
MKLMCDGTHIEEDLGKSREGSTEDDVSSTQRGRAIYF

SEQ ID NO: 974107 - protein, 37 aa, Homo sapiens
ITLYITGPDLSSHHRSSTMTPLPIPNPLANLNLGLQL

SEQ ID NO: 974108 - protein, 68 aa, Homo sapiens
VAQAAGRPAGPASSFLAQPGGPMLESRVAMAAGSRVVFSSRRRDPSKRQVSIFWPESLIPRLKVYIPH

SEQ ID NO: 974109 - protein, 59 aa, Homo sapiens
MSAPAPKSVKRSSTSTTDGADETSEKDSKKAFNNLMRTKLIWTDLNDQAIEEVFDSRTQ

SEQ ID NO: 974110 - protein, 53 aa, Homo sapiens
VLVTARRGAPGRELDNAGARDFALVTFLLLYVKTTFNNCFQLLPFLLDPKTAF

SEQ ID NO: 974111 - protein, 37 aa, Homo sapiens
MAPSVQFLGFSVCKNPWYRVRKAFLTSSEPGSETLKL

SEQ ID NO: 974112 - protein, 49 aa, Homo sapiens
NFELHVAQGDHFIKFFAPWCGHCKGLGFHLGADLALGLVNNSELFKVWH

SEQ ID NO: 974113 - protein, 38 aa, Homo sapiens
AVIRTCLGIGKQAYVAHYYGIIPLHIQMPEEVNHGRRG

SEQ ID NO: 974114 - protein, 46 aa, Homo sapiens
DSDAGKVWESGSVAGPAGLHPPRLRTGFATLFRLLSLSFPLPVGNS

SEQ ID NO: 974115 - protein, 71 aa, Homo sapiens
VCRQNTGVVKTTPKSQNWEGKGYFISTIVRSLDHVGFLGQVHHYWPSDSINRGGIAHRTHGKYLRGSLAEM

SEQ ID NO: 974116 - protein, 66 aa, Homo sapiens
EDEDDTEEAEEDDEEEEEEMMVPGMEGKEEPALTVVQQRVALIRGKQFILANAGDFCFLIFRLAKL

SEQ ID NO: 974117 - protein, 109 aa, Homo sapiens
LPGLKKSRAGRFAFLGWRLGGALGFMSSPGGLRVSWVQRGPGVWCRKTFGQPRLGYSRPAAFTRQTLTSSMRCTPSSGFRADQPPRKVLVRNVFEFPDQPVVWREISII

SEQ ID NO: 974118 - protein, 100 aa, Homo sapiens
MADKEAAFDGLESKNRVINGGIQNIGKGPPLSLMIWVMPMALELAHLNFPWASEEYPAQREEIRAYSVCSGDTHIVCTPLSSLEPVLQLHDDDACSMMRH

SEQ ID NO: 974119 - protein, 45 aa, Homo sapiens
SCKQYGITGENVRGELLALVKDPPSQLAEIGAAAQQSLGGKPFYV

SEQ ID NO: 974120 - protein, 36 aa, Homo sapiens
MKVSIPTKALELMDMQTFKAEPPEKLIYLRAFHLNA

SEQ ID NO: 974121 - protein, 100 aa, Homo sapiens
RDTLAVIRHFREPIRLKTVKPGKVINKDLRHYLRLQFQKGSIDPQLQAGDSRDILYFETQSMHYRAPKGMEMSQVLIIISFPLHSHTHWERVEALLESWT

SEQ ID NO: 974122 - protein, 72 aa, Homo sapiens
AALRALCGFPGVAAQGACGLGLGVRFPDSKPSKVFGQLPARIVEWATDSLGGACLCTQGKETPPLEGLPPWE

SEQ ID NO: 974123 - protein, 54 aa, Homo sapiens
EPGFSTRSASWRSRELFKKVKLEQERQNWGIQRATNVTYQAHHVNEDKRGQVVG

SEQ ID NO: 974124 - protein, 73 aa, Homo sapiens
RRLPPPPPCLLSRAAPARELQLVVSGKGYFTISNTSHSHGAWFPSPVHHSQESPSLAACPLQSLRLFQATGAP

SEQ ID NO: 974125 - protein, 85 aa, Homo sapiens
VLEPGYIDSEIGTSDQIVPEYQEDSDISSFFANPQNLRNLIILNNLHFQFYRWARPFALYPPDNDFIKMEALWTLPYVSLSSLFG

SEQ ID NO: 974126 - protein, 38 aa, Homo sapiens
MGPGPQNYGSGMRPPPNFLGPAMPGINMGPGACRTLGQ

SEQ ID NO: 974127 - protein, 37 aa, Homo sapiens
TCVRNSSEPWRPFPLHLLNIFKGKEADEREKQKTTRL

SEQ ID NO: 974128 - protein, 70 aa, Homo sapiens
RNGLGTLHTFIGGVNKHSTSHRAGVGITVIFIFRAHASSRLAAQGTRWRCTSQNALRSPHTLQPGYHKIL

SEQ ID NO: 974129 - protein, 57 aa, Homo sapiens
ISFSWFANYIRAGALIMGSAGLFRINLLGSAKDGLTYAGLEDHLPPPLSTRPRPNGF

SEQ ID NO: 974130 - protein, 51 aa, Homo sapiens
MGASGPPLLVGGGIAGALFVSASCGAGPGDTGQGRGIRPGAKAPLLGDLQF

SEQ ID NO: 974131 - protein, 44 aa, Homo sapiens
IVDCIVASQGAGRAFFWRGNLANVIRYFPLKPQFGFKVRTSSSS

SEQ ID NO: 974132 - protein, 39 aa, Homo sapiens
INPPGVVVVAVVAVIGNQDQSGGGRQPVGYWTSQGPLEP

SEQ ID NO: 974133 - protein, 40 aa, Homo sapiens
EKLIKRHAGILHKLCSNLAMQQVLCPGIRLTYIASYWQCS

SEQ ID NO: 974134 - protein, 107 aa, Homo sapiens
PRHERCHLRFRAFGTSAGWYRAFPGPLLSSTGLPFPRTIAPRFLSPLFSRPSAAAEQQQQQQQEEEPGAAVAGSPLVTVKEAAKKSLLLLHGYMELLLWTGHPMSLI

SEQ ID NO: 974135 - protein, 44 aa, Homo sapiens
TWEKADRVKGASATRCCGFRGVGSGGREPSLHFGHEFSSSTPAI

SEQ ID NO: 974136 - protein, 44 aa, Homo sapiens
SVSRLPERIRRLEEELLQLKSDSNGPEEERKLQETWKAFEGTQA

SEQ ID NO: 974137 - protein, 110 aa, Homo sapiens
NSARGEDGQDRTASTCTRADMFTHGIQSRRHFVMFFAPWCRHCQRLQPPLDDLGDKYTAGDAKVYVAKVDCTATPTCARQGSEIPTLRLFSQARAVKYRSRLPALETGCC

SEQ ID NO: 974138 - protein, 49 aa, Homo sapiens
MDSLVLSERGAAFVPKRSCLGTAKSWEGPAHSYAVLTTQPRVLTLTTPV

SEQ ID NO: 974139 - protein, 111 aa, Homo sapiens
PWRTALPGHRGATPVLFLLLLLGTLGPGAGQALPPEEPPLIIKDVEAHSGPESSHLAKVTPEVVLAHLAGGSTSQSYRFPAAFGAELKPGSRSLRVQIKAEMRNTTVWSVR

SEQ ID NO: 974140 - protein, 65 aa, Homo sapiens
LKSFHISTLQGEDEIAPISFESKWVPEEELSNIANALASATCERCKGGFAPHEKIVNSNGELYPC

SEQ ID NO: 974141 - protein, 34 aa, Homo sapiens
MLTKPLQGPPASPGTPTAAAEARIGKLRGRVSTW

SEQ ID NO: 974142 - protein, 33 aa, Homo sapiens
MRASPSPLQKFRQNARDVLLCYPKGIERDHSFT

SEQ ID NO: 974143 - protein, 34 aa, Homo sapiens
SFRHIRLGSYRKRETVLNTFANPWDPLLPGTYVV

SEQ ID NO: 974144 - protein, 33 aa, Homo sapiens
AGRDVRPSELVGPGVTATGSRPRHKTEKNGFVK

SEQ ID NO: 974145 - protein, 41 aa, Homo sapiens
EDGGGRSTAGVGPWEQLRSEQLPKEGHYQGFSRTRFKFVSC

SEQ ID NO: 974146 - protein, 32 aa, Homo sapiens
RPQFLKNSALLLSVLGAFGDAANLALHSGVGE

SEQ ID NO: 974147 - protein, 39 aa, Homo sapiens
AVKLILHSRCLLIWAPRGLQWRFSHLFQAPRFLATSLPL

SEQ ID NO: 974148 - protein, 71 aa, Homo sapiens
RENKKKKNKKKKSPVPRRNPLKMLKKSKRISNTDLMEIKEEEQVKCYCTDSQQWEAQNEVTQNPKTENCSR

SEQ ID NO: 974149 - protein, 34 aa, Homo sapiens
SSKSGDEFEDILEERRHVSNLKFPMKCYTPIIYK

SEQ ID NO: 974150 - protein, 35 aa, Homo sapiens
RQFRVGEEPGLGGAARGGYCSTGVSVFWSAQNRFS

SEQ ID NO: 974151 - protein, 71 aa, Homo sapiens
FAQVRTLAAGNTQSGLSLFKALSLSKHSVKMNANRMMASSCNEALSQFDRCVAIALLSDLEQIKVPSAGPH

SEQ ID NO: 974152 - protein, 64 aa, Homo sapiens
VYWAAVTLRFQIDNCLKKRLTSTSNKVLGRVFVGLEICSSSAPNPETHGGMGAHTFLGVFFMSP

SEQ ID NO: 974153 - protein, 67 aa, Homo sapiens
ASYDTSAPNAKRKYLDEGETDEDKMEEYKEMNKKCNRDEEIYHMKEEDYQRISSTFFLRDHRALNSP

SEQ ID NO: 974154 - protein, 66 aa, Homo sapiens
TRRYFPYHRRAYHLSMITAFIIIFPIFFLVPVLPFSNNHNNITNTNNSNGQRKWETLSNSYPPATH

SEQ ID NO: 974155 - protein, 34 aa, Homo sapiens
VKYQGPRDFQTLENWMLQTLNEEPVTPEPEVDPP

SEQ ID NO: 974156 - protein, 79 aa, Homo sapiens
ELDSTERACDTLLMCIVTVMNHGLRNGGRVGHILRKPFKDESLFPARVVYYLLFFFIGIIIVLNLIFWVIIDTFAYLRS

SEQ ID NO: 974157 - protein, 37 aa, Homo sapiens
HKKHKSDTHLYEEYVEKPLKLVLKVGGNEVTQLFRGN

SEQ ID NO: 974158 - protein, 34 aa, Homo sapiens
HKSGFLQAMQYREPKRYWEEISCYPENNGAKKLK

SEQ ID NO: 974159 - protein, 48 aa, Homo sapiens
LAAQRPAICRPAAELGRLGHSSSTLAAAARGRKSRNQLERHSLTWHPS

SEQ ID NO: 974160 - protein, 94 aa, Homo sapiens
GVYVKPGNKERGWNAPPQFLYGLQTQAGGPRRSLLTKRVAPPQGLDPPESPHQKLFLGPSPNGASTSFKEGLQGPHLWEVALPLGWSQQVSSES

SEQ ID NO: 974161 - protein, 40 aa, Homo sapiens
IRAEMSCSVALAVLALLSLSGLEAIQAYFQGLRLINVLTD

SEQ ID NO: 974162 - protein, 40 aa, Homo sapiens
PNDLRHFDPEFTEEPVPNFIWQVPLTAFLFTTSVKGSFPR

SEQ ID NO: 974163 - protein, 66 aa, Homo sapiens
EQLDRIQRYKAAALLRLGARNVPLGFGESWKKHLSGEVRETIFHQANGICLQKKESITLFYPPPHQ

SEQ ID NO: 974164 - protein, 72 aa, Homo sapiens
PRVTTSKAYSSAEEEEERGRRRRRVDYSKLELAGRIQRNIIERKPGDFWETRELFFSCWKKAITRGSTDVRK

SEQ ID NO: 974165 - protein, 38 aa, Homo sapiens
QSFASSSQGDTPYFNNFCLRFNLIVSQVRNWIHDIVYP

SEQ ID NO: 974166 - protein, 50 aa, Homo sapiens
EAMSSKDLSDTPVRRRCGKYLHGDTNRKRSQDYSRQIEIAESSFREPMIP

SEQ ID NO: 974167 - protein, 47 aa, Homo sapiens
TPYHLVVLVDILMGPGRFWPATVRRESRLDVAKSVTYGLGYMHCLPQ

SEQ ID NO: 974168 - protein, 56 aa, Homo sapiens
DLPASASQSAGITGVGHHAWPEHPFLIVAEISAAVGAAHILGLTPSSSYPYPLNPT

SEQ ID NO: 974169 - protein, 55 aa, Homo sapiens
GAGGDARSVLLSSSHDLLQEGFKRPSFFLCKNGNSLREKPICTSLREEGGNRFTQ

SEQ ID NO: 974170 - protein, 80 aa, Homo sapiens
MAALDLRAEWDSLVLQLLWDLEELEGKRTVLNARVEEGWLLVGKARITRMGAKSVGPFSILPHRAPGLLSRHTGPRGTPQ

SEQ ID NO: 974171 - protein, 59 aa, Homo sapiens
ELQVEVSGTSALEAFTTSFHTSIDDVFAFIITMPTSYRLACFPGRRGVSWSTCTTGGFI

SEQ ID NO: 974172 - protein, 47 aa, Homo sapiens
FLAFARLWSVVISTLDQVQRAFSLGVAAVVVPPPSPPSPPALRGHGV

SEQ ID NO: 974173 - protein, 41 aa, Homo sapiens
LERYAYALSVTRAGKQARRLGFTVKQSVVALVKYQHFREAG

SEQ ID NO: 974174 - protein, 35 aa, Homo sapiens
RGSALLDDDEFAYETLLADLWLRIFRLDARRFDSL

SEQ ID NO: 974175 - protein, 49 aa, Homo sapiens
NHETAFQGNASETGHQKRRRCEIVCLEVMDPWFFSRRRKQNWGQDCDSP

SEQ ID NO: 974176 - protein, 38 aa, Homo sapiens
AAGLRGAWLSPFSAMGVLATDIGVLRKGEEVILAKNVT

SEQ ID NO: 974177 - protein, 43 aa, Homo sapiens
HQPGQIWNFASTQKPSHVSSQYQSPHFSTQRVTPCPRIFIGIH

SEQ ID NO: 974178 - protein, 65 aa, Homo sapiens
GAFGSRGFIGADMAKSKNHTTHTQFRKIGTEIGIKETPIHTDTESLKGGGPKVPEGHAALPRKHT

SEQ ID NO: 974179 - protein, 80 aa, Homo sapiens
LSSPVPPMVNVTCSEVSEGNITVTCRASSFFPPDYHTDLASGLGVSLSHTTQQVGGYVLPIGVWTYHTWVANRICQGGGA

SEQ ID NO: 974180 - protein, 50 aa, Homo sapiens
TERDATSLSKGKFQELLVGIVVEIDVGRGEITELRQVEGRALVTTPTEKT

SEQ ID NO: 974181 - protein, 35 aa, Homo sapiens
ESRTAEEEFTDSQPQVAFVHNSLDPVLEVACTEGD

SEQ ID NO: 974182 - protein, 95 aa, Homo sapiens
MVAREKQLKPWCWYCNRDFDDEKILYFSTKKQSILNAIYVTRNCIQGPGLAIHCMQVHKNNRCRTKCIPGDSMSWNYCMEVFRKAWMKRALDRTK

SEQ ID NO: 974183 - protein, 42 aa, Homo sapiens
MSSKQALFPSRQQVPLETGTRPFLACIPSLSRGEVGPPWFFG

SEQ ID NO: 974184 - protein, 60 aa, Homo sapiens
ELRFGQERKCSETKTTGKISRAEASTGQDPQGQAQARSWAEQGKAASPEGDESKVSEHLS

SEQ ID NO: 974185 - protein, 54 aa, Homo sapiens
TLLEQQPLRCPGQCPSTCPQAWGHIFANLLQGPFFGKKEIGILMVALDAAGKTT

SEQ ID NO: 974186 - protein, 56 aa, Homo sapiens
EDETLVWEALVNRRSYASTYFDPSSPHSRTFHLSMPRSCCTFVDQYREQLIARVHR

SEQ ID NO: 974187 - protein, 38 aa, Homo sapiens
VLRVLRVGAVECWKPRDVSQFPDGLMLRTSARPIERSV

SEQ ID NO: 974188 - protein, 39 aa, Homo sapiens
HINIVVIGHVVSGKSTTTGHLSLEIAVASHTGPIQNFER

SEQ ID NO: 974189 - protein, 47 aa, Homo sapiens
MTYSYIIGRRCYGYYTCKGTRVHRPYRQFRAGCPVVLRRRLVSQAFP

SEQ ID NO: 974190 - protein, 83 aa, Homo sapiens
RFPLSLPTIQLGQVRPASRRASAKVSTDHNQIASSNWDTGIGNQEWLHISQISLWGYKGSINTRRELKSTHMRKEVSPEIFEN

SEQ ID NO: 974191 - protein, 86 aa, Homo sapiens
NEIPTVPTYYPARPARPASAALGQGLNGPHQIAILNGPGNGNHDVTIYKISLGYKGYYKWRDSEILSWKGEFPWFLRNHKETLVSV

SEQ ID NO: 974192 - protein, 57 aa, Homo sapiens
ARTQVFVKTTPKKAKIGKGKSIISTLFGHWDKEDSGKSHHYLANCILLNAGGIGQKD

SEQ ID NO: 974193 - protein, 64 aa, Homo sapiens
MGFRVFTYGGFTGLLGSAGGSAAVALVLIATWGPASWASSRFLEDQVDSPGKVRGAFGTFCSLV

SEQ ID NO: 974194 - protein, 35 aa, Homo sapiens
APNLYEELMLSGRGPSIVHQGGLPGSVTNLPYSLA

SEQ ID NO: 974195 - protein, 41 aa, Homo sapiens
QFGSWRLTFWMVNQIFKDFAMMIHDQGDLIDSIVANSGKSK

SEQ ID NO: 974196 - protein, 83 aa, Homo sapiens
MSHRKFSAPQDMGPSAFLPSEGASSQAIVGKVERAFPKDEPPTTPGFHPQRPSLGIKRPGNELKIVPGKSKGRESKGETQKEG

SEQ ID NO: 974197 - protein, 38 aa, Homo sapiens
PAPANKRAEPKRCFEFLKRNFFTQMEDWGLKGLRSFIY

SEQ ID NO: 974198 - protein, 35 aa, Homo sapiens
RTSAAQRAMLEIQYENKVGTGLGPTLEFYAVVSQE

SEQ ID NO: 974199 - protein, 79 aa, Homo sapiens
PDWVLSEREQFNEFRDLNKDGKLDKDEIRHLILPQDYYYSQAEAKHLVYESDKNKDERANYKRGIYGETLNKVCAGRQA

SEQ ID NO: 974200 - protein, 35 aa, Homo sapiens
MGAIAASEVLVDSAEEGSLACGGGVAPSRRRGQGG

SEQ ID NO: 974201 - protein, 55 aa, Homo sapiens
FQIFQPPQPHSFCAFAPFLPPAALEAGSGPETRNLKKAGHLLFSLEALRVARKRR

SEQ ID NO: 974202 - protein, 53 aa, Homo sapiens
VADRRQAGVRRHYLYPFNRRLTGGGAQGSSGETRRQVLQLRNKVQETNHRPSA

SEQ ID NO: 974203 - protein, 54 aa, Homo sapiens
MGAGPSLLLAALLLLLSGDGAVCVADTPANLHLIFDLAWEPGASKVGFQPVPRR

SEQ ID NO: 974204 - protein, 36 aa, Homo sapiens
GTSDTGKLDAADTERGASYNRARKVNRPGSPQLKQR

SEQ ID NO: 974205 - protein, 104 aa, Homo sapiens
GQGLLSSLPPLPAVGGPTEYVGRRATWTKAIKGNFPFWEELQLSIGASEGWEAWNGVVPVESLCKGNLLKDRFALKILLDRPKARYEVRLHMMCPNTKHGPDME

SEQ ID NO: 974206 - protein, 76 aa, Homo sapiens
LASTIADIQEHDLEKTRQYSQKLGPADLDNYSSLTLFLQTNLKGRPTQETLLSEYSLSSHPGHTLCLSDRPSLGRL

SEQ ID NO: 974207 - protein, 62 aa, Homo sapiens
KKEENYPVSLELHQNCILAKLCHQEPNQSPCMLEHGKGREGGFLVKVKGALPLVLVQAHEGN

SEQ ID NO: 974208 - protein, 34 aa, Homo sapiens
ESRSHYCTSARRERRKTLCQKQTQERKLFHFPFS

SEQ ID NO: 974209 - protein, 43 aa, Homo sapiens
MRVTAPRTVLLLLLGAVALTQTLAGFHFMRYFYNRMSRPRPRG

SEQ ID NO: 974210 - protein, 70 aa, Homo sapiens
GFVFTREDLTEIRDMLLAKVPAAARAGAIAPCEVTVPAQNHWAPGPRRPAFFQVLGSPLKFPGATIRILE

SEQ ID NO: 974211 - protein, 109 aa, Homo sapiens
RQVRSSSGRSNQTLTHLIQIPPQEENAPHRAFERTVIDAKTKFSTNGFYRIPLGSENRAPSPMWYRKPPQVRCSQSSLIFNTMSTAALDVSSNLEFDEGQISHLAWKDP

SEQ ID NO: 974212 - protein, 68 aa, Homo sapiens
QLEQPGQERNGGAPTVRGNPLRGCFFLSPSRSRRGQEWITIRKSSDTYAIIGKETCEFMYWPDIMKTA

SEQ ID NO: 974213 - protein, 59 aa, Homo sapiens
MLSRNPDNYVRETKVDLQRVPGTYVSSLQSFEGSKEIYIESFNAIHNSETRIFHKPHSL

SEQ ID NO: 974214 - protein, 37 aa, Homo sapiens
MAAFRYFCSCLRFRPLSDGPFLSATAGSGTYPLQVPS

SEQ ID NO: 974215 - protein, 33 aa, Homo sapiens
AHYVCARLHLFSVDVGFHFMAKAYSIALLLWLW

SEQ ID NO: 974216 - protein, 70 aa, Homo sapiens
ALPPGGGGSPHLPRVFCCALGPGGRLLRGCTPIAFERLRFHHPVRGSSLWCQRGLEALYTSASRRQPLGQ

SEQ ID NO: 974217 - protein, 38 aa, Homo sapiens
VSEDPELPYMRPPLSKELWVSDDPNVTKAMRFKQLDGK

SEQ ID NO: 974218 - protein, 59 aa, Homo sapiens
ARQGAEERSVDHEAFSLYDLCPAPAIRPTLYRVHEEPPDHRGPTAFVQPRPIPEAACGH

SEQ ID NO: 974219 - protein, 88 aa, Homo sapiens
MAAVAVAVREDSGSGMKAEFPPGPGAVGREMTKEEKLPASEGKEQAEEERKEERGQTRDLLSVSAANVKEANQRLPDRAFSWHSREKV

SEQ ID NO: 974220 - protein, 83 aa, Homo sapiens
GLQDATSPIIEELITFHDHGLIIIFPICFLLRIPSSYTYHRNLPYSYHLNRSGIGNRLNIPARHILGLIALQSVRILIHNRRG

SEQ ID NO: 974221 - protein, 81 aa, Homo sapiens
YLARRPKLQLSVYNNDRGPTWVLETTIDPGLNLEGFELWGPILKGKVIVSVPKETGNNWDGELLTSFLLTVGVLRDRRKEG

SEQ ID NO: 974222 - protein, 49 aa, Homo sapiens
MSPGTNTTREKPKTLNFSGHLFGLRGFPNRSSPSRSPTMASLTICGLAA

SEQ ID NO: 974223 - protein, 31 aa, Homo sapiens
MPQFRISSAAPFKYQVAYHDSIQRRQLGFWE

SEQ ID NO: 974224 - protein, 38 aa, Homo sapiens
MQGPLLNLTRPGELSIRRVIPHDWAYWGQAYNARRARR

SEQ ID NO: 974225 - protein, 149 aa, Homo sapiens
EGSSLVQQEEEKAEQRKELGLQKKALKKKKKIRGPEKRGQNEDDEKEEGDDEEEQPSKRRRVENSIPAAGETQNVEEQQAPLEMSCRRCGAPSSRRRRQPPKRTCQGLHAAAGSITVFVSTSPQHQDRTSSGHSSGPVSVSRHLSTWDS

SEQ ID NO: 974226 - protein, 110 aa, Homo sapiens
MRAQMSRCVCLSVCSALTSDTKKDREEKIQAVPPKNKKVYITAIPQEKWGKIKIFPKLRIVVLGGSIPPSPHTKGELSRECEREIKKGERSEILFCKEQGLGFLYSSSSP

SEQ ID NO: 974227 - protein, 78 aa, Homo sapiens
YVAIQAVLSLYGSGRTTGIVMDFGDGVTHTVPIYEGVFPSPIAILAVLNLLGRDLTYKPKKVLNERGLQSSTHTGRAG

SEQ ID NO: 974228 - protein, 68 aa, Homo sapiens
GRSVRNSRDKHPVDVDKQLLSSSRKRFWSKGAGVTAKDDIVDRAKWRYLREVFYDQLFYYGGVSGCMT

SEQ ID NO: 974229 - protein, 36 aa, Homo sapiens
TVFTELNDEKVLQELDMSNFEDQLRTKSKGPSLDLA

SEQ ID NO: 974230 - protein, 37 aa, Homo sapiens
QEGKVDSYLQRRRRKGESEGKGDKMASAKMPQPERGP

SEQ ID NO: 974231 - protein, 71 aa, Homo sapiens
ESGKRMDFPALPPGWKKEEVIPKSWLSSGKSHVYYFSPSCKKFKSKLNLQGNLEILFDLNTVLLSETLRDY

SEQ ID NO: 974232 - protein, 91 aa, Homo sapiens
ERQRGSSGCFRFPSSASSASSGFSAAREPENPVYDPPLTPLRDMSTPARRRLMRDFKRLQEDPPAASQRGSVREQHNGVERGHIRASRDPA

SEQ ID NO: 974233 - protein, 62 aa, Homo sapiens
DKMRDHLIAKNVAADIAVQLCESVANKLEGEVNGTVSKVTFTVKQALQESLVQISSDHSACV

SEQ ID NO: 974234 - protein, 62 aa, Homo sapiens
PVRVHLLVRRGKRVEESPVRFRTVAYYGSHRIFFFTTQFISYLTQAGQGSQPKEEFPFFRDQ

SEQ ID NO: 974235 - protein, 39 aa, Homo sapiens
IFTMSVEVDGNSFEAFGPSKKDGPSFTLAFKCLQGMAFP

SEQ ID NO: 974236 - protein, 64 aa, Homo sapiens
ALPITALSQSLPSGRLPIYSCFKSSHSFKFRRFKQLPLSARFVCTSGLPSGATLQFKTTAVPAF

SEQ ID NO: 974237 - protein, 36 aa, Homo sapiens
EFRHARAQEALKSFLHHRALNPLNTNGGICPSSIAS

SEQ ID NO: 974238 - protein, 50 aa, Homo sapiens
KHREPHDSALTYGVELPWFGLEAELESGIVPLAHMLVLFPVSSVVKRFTG

SEQ ID NO: 974239 - protein, 106 aa, Homo sapiens
GKETLQPREHPKTHGDPPSRLSDHEATLGCWGPGFYPAEITLTWQWDGEDQTQDTELVETRPAGDGTFQRWASCGGAFWERSRDTGPIFTRGAPEPSPEMEPLPSH

SEQ ID NO: 974240 - protein, 69 aa, Homo sapiens
SVALLCAFSLAWESPGAVHIHEESGHRWSRQEEQEAQDSTYPIRIEVAGGMILVMAFFLITYTFHSTWV

SEQ ID NO: 974241 - protein, 68 aa, Homo sapiens
GPKKHLKRVAAPKHWMLDKLTRVFAPRPSTGPTRLGECFPLIIFLRTRLRNALQGVREGGFHIRAVTL

SEQ ID NO: 974242 - protein, 77 aa, Homo sapiens
PAEGHLTCGTVPGLQLNLIRPEDCRLGLAPGPPELVLVVQVHTGPNTRFLLDLLRKAQGIDNGPRQFLANDFLVGPG

SEQ ID NO: 974243 - protein, 63 aa, Homo sapiens
LNITPELYEIFLSRAKERLKSFSETSSENYTRGVSFAYREASLGLIKVGISRTISSLYNSSEG

SEQ ID NO: 974244 - protein, 89 aa, Homo sapiens
ECIRGRSFENKLKSACPSMRLERYHRKNLDVMKEAIVQAEEAAPEITEEAVRNRRKKRFKEGKEDGSLHLPSRLSENSSSTPKGCEEMS

SEQ ID NO: 974245 - protein, 40 aa, Homo sapiens
LVDSLDPFSEGIMFSVRPTKKSWKKFFNLSGGEKTFSSMA

SEQ ID NO: 974246 - protein, 66 aa, Homo sapiens
LLTKHDVRDYASLIAFTNGICFYSIVDSAALVLRCQMQRKHVPTSDLTLIQQCGFLFYVPRPARPL

SEQ ID NO: 974247 - protein, 73 aa, Homo sapiens
MHYFTRRLNRLCINRPHHLRRKLLAVSSVPSRQLAFNILYLPLPQNRRGYITDHSLLDLNIGIIISATLAQLH

SEQ ID NO: 974248 - protein, 85 aa, Homo sapiens
  misc_feature (24)..(25): Xaa can be any naturally occurring amino acid
LNPKQGAKAQEHGCPRKFVDSFTXXRGVNVDGKSEKMSTTLSLNYIAVIIVFCAHYRSLLTLLLQFKNLLLFNNFIQNIFELPVG

SEQ ID NO: 974249 - protein, 86 aa, Homo sapiens
LSEGVQEADADGFTHPGHCSLRPAWSMQGAPGGWGGAHMVPLAFIYGHGRPIWAPGYSYPFIFGPSDAPLMHKEAGEGLFFGGSGS

SEQ ID NO: 974250 - protein, 36 aa, Homo sapiens
RGIKKEYIYDADAVSSPPVSQTHRTPPPGVGGSLHR

SEQ ID NO: 974251 - protein, 36 aa, Homo sapiens
GPTKECDTGSETLRVWNWDPHTNSHTPRTGPSETHI

SEQ ID NO: 974252 - protein, 80 aa, Homo sapiens
RRRTFRLSVPTKAADHLSKQGRGSRLGRNLARKKLPRYFKNHRVLGFKNPRGAIKGHLHCTGNAPYTGNVPIRGRISLAW

SEQ ID NO: 974253 - protein, 104 aa, Homo sapiens
AITSMNVFVGPLSVAIVIFCWITMYWGGRLSWGQGERGSTPGGTILVHIDTISLLLEDALEYSALISGTQIRLSTSDCRGADPWSTTCPSLTQADPFLLGGSEA

SEQ ID NO: 974254 - protein, 47 aa, Homo sapiens
RRRVKSSSDVRGTTTTIDRLTDPILGYFRPQKAPPFPEVYLARTIIK

SEQ ID NO: 974255 - protein, 35 aa, Homo sapiens
SRSVALAVLRYSLFLGLEATPRVPTKGFTVYLTVT

SEQ ID NO: 974256 - protein, 34 aa, Homo sapiens
MAEVEVLCFMVEEIFLGGLGKLVGKKVIIGGKVV

SEQ ID NO: 974257 - protein, 34 aa, Homo sapiens
MAVGKNTRLTKGGQKGSQEESSLIHFLRKIGIVW

SEQ ID NO: 974258 - protein, 84 aa, Homo sapiens
GILNVNKHRAQIEAFVRLQGASTKSESLRHGPDVVFSPLATGAPPLEQKLRPPQYAYKSEKSSGFWSAPSLSGAPSLEPPSGSQ

SEQ ID NO: 974259 - protein, 86 aa, Homo sapiens
LDFVKIITILVTATTFNLGAAGIPGCRCSYFLAVFLKQLTFPVEHIFPVYPALWLCSIGARSLTRALKLESSTLFGGRDLADKGRG

SEQ ID NO: 974260 - protein, 78 aa, Homo sapiens
DDANPQILAAFRRLDGLVEPPTGYIESLPRVVKRRVNASKTSKFKFAQIEAKFYEEYMILKGSMLFSISLYVIGDVKL

SEQ ID NO: 974261 - protein, 110 aa, Homo sapiens
AVRRTESPATAAETFKVRTFIIEVLEEILTSIPPPRPPAITNEAWTFSPYDTSYCNPDLKILFWGENSGTFPYALFLIIGPHGSGKSIVMDFYALGVGLWSTKLRSKHFE

SEQ ID NO: 974262 - protein, 94 aa, Homo sapiens
MARGPKKHLKRVAAPKHWMLDKLTRVFAPRPSTGSPQVGESCCPLIHFARGTDLKVALTGVEGKRLCMQGVIENLCGKGPPDSSPPLVGVTGCI

SEQ ID NO: 974263 - protein, 84 aa, Homo sapiens
AWQPGLPPTCDRLPGRAGGPGRSPEPLGKLGRPGLDLFGEEPTKGQKFGPCPSLTGSKFLFLSTRKKPGGPEGNGIGNLFLRKL

SEQ ID NO: 974264 - protein, 45 aa, Homo sapiens
GRGVPAPAAAAAARLVRGRLPKVLQYYLKDYSLNNSYSCGMREND

SEQ ID NO: 974265 - protein, 68 aa, Homo sapiens
KMAAVQAAEVKVDGSEPETEQGMKLKETALKFYKGKEGRKGGPNPERALVWETAKPKATSSFHQPTPL

SEQ ID NO: 974266 - protein, 117 aa, Homo sapiens
  misc_feature (116)..(116): Xaa can be any naturally occurring amino acid
LQARAQQLRREERTGEQRLEGDPQKGGGVSPGPWHTLRKRGFKEGHMGNFPPPREGTGGVLRGGWGAADTQALGGNMTRNRSSTVVSGSCGLWANKVEAPLFPPAPPTTSPISPTXH

SEQ ID NO: 974267 - protein, 83 aa, Homo sapiens
MAAPKGSLLVEDPTWGFLALLLLTMAFARGSGTPSAEAFDSVLGERRLGHPGLSVDLPLAHTTLKGEELYACQRELQTVFKLS

SEQ ID NO: 974268 - protein, 30 aa, Homo sapiens
MFCKATLDHAHGESVVLAGKELRGVVYTRT

SEQ ID NO: 974269 - protein, 45 aa, Homo sapiens
GDVPAGKGSQTQEGQSRAKLQPQSGLSSFESSSEVQSEPAVPKPE

SEQ ID NO: 974270 - protein, 56 aa, Homo sapiens
MAPLLLQLAVLGAALAARALVLIFIVAFTTSTKMPALHRHEGEKFFLNAKGRERLY

SEQ ID NO: 974271 - protein, 44 aa, Homo sapiens
MGKEMPVTTTWIGMAFPMDCDTLSLKSPTPTYRQTEDVGTRLWE

SEQ ID NO: 974272 - protein, 38 aa, Homo sapiens
MEDMNEYSNIEDSQRDPRSTRARINRVTVKMFNGGLSW

SEQ ID NO: 974273 - protein, 37 aa, Homo sapiens
ALRNFLRKEYGGLDVLVNNAGIAFKVADPHPFIFKAE

SEQ ID NO: 974274 - protein, 101 aa, Homo sapiens
TNALLVVKHRDMNEKELEAQEARKAQLENHGPEEEEEEEIETEEKEAWGSDEEQREGQQQLKEGSEDVHSGSASLREEGDKGEGTYKSRSSEDESSADDDP

SEQ ID NO: 974275 - protein, 54 aa, Homo sapiens
AGGPGVPRASGSWPFRTELLGERQQKTQLGLAKALQVLGLVSHTRKHLGPRGIA

SEQ ID NO: 974276 - protein, 49 aa, Homo sapiens
GPRIKSVIYHALSQKGGEGLRCPSPSGAQRAEAFVEGLSCRRSTAPYGP

SEQ ID NO: 974277 - protein, 33 aa, Homo sapiens
NAFPSSLIQANVTVGTCSGFCSQKEFPLAIFRA

SEQ ID NO: 974278 - protein, 31 aa, Homo sapiens
MHMLVKTPIPLFVSDSNILPFYYSQEPFYTN

SEQ ID NO: 974279 - protein, 77 aa, Homo sapiens
RVSKMPAFLRSALQILFSEDSTKLCNGIKSRGSAYGSSCQEEASGTCMLFRPRSGTVEAMVSLGGDPSGDWADLYRT

SEQ ID NO: 974280 - protein, 37 aa, Homo sapiens
CLRCTGLRSVELVLFTLCDSLSTVQKFLCRSLSSADQ

SEQ ID NO: 974281 - protein, 63 aa, Homo sapiens
MSEYIRVTKDETDEPIEIPSGRRWDRFLLSTVTAQFPGACGLRTGIQCLSVWECRLVEEFFIP

SEQ ID NO: 974282 - protein, 60 aa, Homo sapiens
EAVMRQFEASLVKARAGSVEKLANQKRSFSRKEAEAPFRSLVRTHEKYGWHTPPVPAGLN

SEQ ID NO: 974283 - protein, 61 aa, Homo sapiens
LPPSWSAFLHKCRRHKKPSLLQSRSCRSPRLRTGSGPDSDSDDSVPELKDQGSTQGPTKKA

SEQ ID NO: 974284 - protein, 51 aa, Homo sapiens
  misc_feature (5)..(6): Xaa can be any naturally occurring amino acid
MPKLXXGGFVLPWLQAAAGEQRSLGNMRRAWILLTLGLVASVSAGVESRLT

SEQ ID NO: 974285 - protein, 37 aa, Homo sapiens
LTAIRAENVSLPWPKAVLGAYSLFLASEAYPRVTPKG

SEQ ID NO: 974286 - protein, 82 aa, Homo sapiens
STVKALRVAARLGFSLSGHGYIKGIVKGHQFTTRGRGGPFAKVGLPGIPIRLRRRTEPVNSRQGHYTRPICVYARQEAPSQH

SEQ ID NO: 974287 - protein, 68 aa, Homo sapiens
SLEQRSFISVRLLSYLSAYRHPMEGSMDMDMSPLRAQNYLFGCELKGAQRYIHFKGEVMMKNEHPVYL

SEQ ID NO: 974288 - protein, 129 aa, Homo sapiens
MPKGKKAKGKKVARPQLFVKKQEGKKVVNPLFEKSPKNFGIGTGSIPPQKSPSPRFVKWPPYIMVVAGREPCFYMRLKAASCGFNQFTEAFDRQTVTQLLKVRPHVQTRDRAGEEAESFRPPEKKFACK

SEQ ID NO: 974289 - protein, 124 aa, Homo sapiens
TLYTYPENWRAFKALIAAQYSGAQVRVLSAPPHFPFLAKPTEPLNFLRKFPAGQVPSILGMMLDPVCLRARHFLLCEHGELRGSTLEQQPRWCSRVSSADSDIVPQPVPGCPHWVIMHTSKRPL

SEQ ID NO: 974290 - protein, 33 aa, Homo sapiens
MATGDLAHDGGLSFDEFIKISHGLKSTDVAKPF

SEQ ID NO: 974291 - protein, 44 aa, Homo sapiens
SIRAEMSRSVGPHAPPGATPPLFLGLGRVIQGELPKVQGLLTAS

SEQ ID NO: 974292 - protein, 42 aa, Homo sapiens
HGGLFRRQSTGAFPSPGGVSNPPPENPVNRGTKHTPPLEPRN

SEQ ID NO: 974293 - protein, 36 aa, Homo sapiens
RIHPLVPQVPGPVTSAMATGVSCLTGKVERIFDKKG

SEQ ID NO: 974294 - protein, 121 aa, Homo sapiens
MIDVIGVNTGQRLQRGSPGRWHTKKAAPAGPHRGPVARLALLFGAMAIPFFVLGPSLLGTRLGRKGYPSPPLWIQQGGFFKSWPRLSLSRTGKLYQKHSLHSTISSLTEHQTPWGAFFTMV

SEQ ID NO: 974295 - protein, 76 aa, Homo sapiens
EEILLDLKMQTPAEDVPLNPFKGGPSPLALSLLPYSLAWPGLAPNGKKRPFHGHLKDRWKFVDLVLKVITIIKVQF

SEQ ID NO: 974296 - protein, 44 aa, Homo sapiens
RNTQSLQDQHTDLTERALPEPCGGLTYTQRRGPGSKINSRGIVL

SEQ ID NO: 974297 - protein, 83 aa, Homo sapiens
ITLTWQWDGEDQTQDTELFGDQASRRWNLPEVGNFCGAFLEKSRGYTVPYFTHREGSPETPHTLDMKPCFQTHHTHSGHIFLC

SEQ ID NO: 974298 - protein, 38 aa, Homo sapiens
RPRCRKERKPKGKKVRSGPQSVVKKQEVKKSGESPVLE

SEQ ID NO: 974299 - protein, 52 aa, Homo sapiens
ARRMLGRVQTRVLRRQGTLKINRPVALPKPSFPRPAVRSFPPFGAPFRRRRY

SEQ ID NO: 974300 - protein, 57 aa, Homo sapiens
  misc_feature (27)..(27): Xaa can be any naturally occurring amino acid
VLAGKERRLFGLSARLVPCFRTAGFLXLAASLGRLLESRNGFHRLGKDPWPNAGDLD

SEQ ID NO: 974301 - protein, 65 aa, Homo sapiens
PESHFYMVLVLFLQVKKEPVSSGGVREFSAKCEVRILERLLQGYHGLMCRDKRQLESFCFLSGRE

SEQ ID NO: 974302 - protein, 120 aa, Homo sapiens
  misc_feature (115)..(115): Xaa can be any naturally occurring amino acid
NTGVVKTTPKRQNGEGKGLILTIFVIRHGGLGQFHPILAILSLNSGALLTQSSPCKNFWRGEPSLSGERGSPHSDFLGPLDITLKPVRVTRGLHQCNSSSGYQSRNEAHVSYQLXPPTTH

SEQ ID NO: 974303 - protein, 106 aa, Homo sapiens
DQGEKENPMRGTSQFAKLCLNIFFFVRVGGKDLRRGRPRVFGASLKRGQNPLVFFQRARIHLYRTPFWASRGKYKRISLSHSHKILRGPKDREKSLEKGSIRVRGV

SEQ ID NO: 974304 - protein, 33 aa, Homo sapiens
RATCQALQQHRSGLQAPSYKLSVVAWRCQVRVG

SEQ ID NO: 974305 - protein, 41 aa, Homo sapiens
QRSQDISTIGLGLLACFLHPSFNFKGDKGVYGAPVLPLTSN

SEQ ID NO: 974306 - protein, 58 aa, Homo sapiens
VTVSDRPLGVSITKAEVAPEEDERKRGDEKEIRVAAAKCRNKKKEKTEFPSERAEKLE

SEQ ID NO: 974307 - protein, 34 aa, Homo sapiens
MKGFIVLGLVLLLCLRSRARSLQGIELGPDLCKA

SEQ ID NO: 974308 - protein, 71 aa, Homo sapiens
GPREFATPRVGAVVGRRLSDIFLPSSDQFGDILEGEVDHSFFDNYLGRRKGILTLTLVFAKQNDAPREGFG

SEQ ID NO: 974309 - protein, 39 aa, Homo sapiens
DSPPLRAPSGGESDLTLSNNEACKVWRVCPHGPGICPTW

SEQ ID NO: 974310 - protein, 87 aa, Homo sapiens
MAVCGLGSRLWPGEPSLAARVLRRRQGSLYPRFQSRGPQGVEDGDKAKAFLEGNPGSPRFKPKREKKGFLVPSQEKGAPKVAQVFDA

SEQ ID NO: 974311 - protein, 36 aa, Homo sapiens
MGKKGGPVQGESRDFGVNLGSTLELQAPRDQGLDAR

SEQ ID NO: 974312 - protein, 52 aa, Homo sapiens
CVLSCDVGVDLTGALADSEHNLLFGELTEDEWLDISARLDCLIPGTICLGLE

SEQ ID NO: 974313 - protein, 68 aa, Homo sapiens
RTMPSDTMNFDVIKGKPVRINVVSASSITSKSRVGNIFNKNLDKSIDNKALYDTILLLGHIPSCKGRL

SEQ ID NO: 974314 - protein, 38 aa, Homo sapiens
IVSSQHQLNEYFYESVYGLMIFNLDPPPISSIQLYHNS

SEQ ID NO: 974315 - protein, 46 aa, Homo sapiens
RITRNVTFSGYKTWWASQRPGKASLVHLRALVITIFNFIFHGGLLP

SEQ ID NO: 974316 - protein, 75 aa, Homo sapiens
ACVGVELSDNEAVEQHRKLHSGMKTYGFELFGKRFPGEVFGLEFNYLLFNRVPKPFFFINAGHNFSEGFSLDTHR

SEQ ID NO: 974317 - protein, 79 aa, Homo sapiens
YKREHINLRAATWDFDICWGLPCRGALVLRLGGLAGRLPDEFLRLTKSRVTQSNFAVGYKTYEFPASHYCESRDRVSRL

SEQ ID NO: 974318 - protein, 40 aa, Homo sapiens
TGLPEVAKPRERQFRLGALLGGTRVCFPTTFRLRAYAGSD

SEQ ID NO: 974319 - protein, 43 aa, Homo sapiens
PDGGLLRGHDQSAYDGKDYIGLNEDTLAPGAAADNAAQITQRK

SEQ ID NO: 974320 - protein, 86 aa, Homo sapiens
QDCSPLSGDYVIEDVQGDDKRYFRRMISQQQEFGAVRSQVAEGWFLTKPRGAEKDRKSSASDAETSCSPGQSIDKSYLCGDTHAMI

SEQ ID NO: 974321 - protein, 68 aa, Homo sapiens
SLEELGGSERNVACSECIASGEWPTLDVPHVITLGLVGLQHRGQESPGILTSDGSPSQHSIHTGDWVL

SEQ ID NO: 974322 - protein, 58 aa, Homo sapiens
LLLKRSFHTRARSLGRPLLFLPFFFFWFLLTVPSGRIDDPFSIMQPPGEGRCKVYTRD

SEQ ID NO: 974323 - protein, 89 aa, Homo sapiens
ADGPRGRRRGRTGPRQQAPLRPILTHGIQSSPHFVMFFAPWCGHCQRLPADLGLTWGDIYTSMEDATVYVAKVELHAHSDVCSAQGVRG

SEQ ID NO: 974324 - protein, 102 aa, Homo sapiens
MAYQKLAAGVPPDPTGQPAAYNHCLRASPPPAVQLGIECKNLFEVVTVNAWNVNAVEDNCLQNDGEDVNATQPGCDVLLGGPVGELQCFCDVETRMLCLMMR

SEQ ID NO: 974325 - protein, 92 aa, Homo sapiens
RFPGPSPVLQQSASSFNMTECRCVLRQGPSWQVEWPQPISKTAVGPIARVKLAAAGAACQQADHFQISNYKGIIDCVVRISQEQGVLYFSRG

SEQ ID NO: 974326 - protein, 71 aa, Homo sapiens
LRLCTVNSVEEKILVAAKYKLNVVIKVIQAGMFFQKSLRPRAGGDFFGPLWACGGRMGARFRIPPVAGFAA

SEQ ID NO: 974327 - protein, 59 aa, Homo sapiens
MAYRSVVVQASAQDAVVSSAGTPQPEGGYDGIKAAVKIPYRLGKKEEARQDGEASLSRT

SEQ ID NO: 974328 - protein, 49 aa, Homo sapiens
MTSALTQGLEESQTSSATWVLSEGSGPWRQLGTWGMIDQAAKSHSLRLV

SEQ ID NO: 974329 - protein, 39 aa, Homo sapiens
LGSALLLLTCAWQNVGVQLAEDVTVSGVIRSVATGLSIE

SEQ ID NO: 974330 - protein, 41 aa, Homo sapiens
EEKKKEVPSCAKKPLKKKRRNFAELKIKRLRKKFSQKNASK

SEQ ID NO: 974331 - protein, 51 aa, Homo sapiens
MAPHRQPPHAHQVPPSHTALWPLGKSSFLNYLNGPTKVFDMGKQGFNLSLI

SEQ ID NO: 974332 - protein, 54 aa, Homo sapiens
GSNFGGGGSYMILDYTSVSNFGPEGGILKQSLALCRGAILATRPSAMRPRAACC

SEQ ID NO: 974333 - protein, 82 aa, Homo sapiens
KKDLVPLPGCSTRTLTEALAPRFQRAEIHVWTYTTYNPGQEDIRGAPTPDQYISGRHTRALGRTMAIYGFLYTAMINTLETS

SEQ ID NO: 974334 - protein, 81 aa, Homo sapiens
  misc_feature (16)..(17): Xaa can be any naturally occurring amino acid
PARSGAESGADSAHSXXGGVEELIGEHLSLTRDVLTESLRYQDRRASSAPEWRDLISTALLHRVSFTASLRLTALQRMQLT

SEQ ID NO: 974335 - protein, 61 aa, Homo sapiens
DYFARLYLTYDDFLYHSDIQVHSGNVSTQCLPALVYMERLEVHSNCSVAYFNASRSQGPAS

SEQ ID NO: 974336 - protein, 64 aa, Homo sapiens
VARAQAPWAVNISAGGVSGRTKDQPGAQGHMKMLVSALETSNLLKTAMSCFTKCKFTTHSFLIA

SEQ ID NO: 974337 - protein, 61 aa, Homo sapiens
KYFCGCWDFPSAAWRLQRKVVAYWSEEQPAHPLQVGAVYLGEEELYMTRWPGQASREATPS

SEQ ID NO: 974338 - protein, 39 aa, Homo sapiens
SGVLALPNGGFRLGSRGLFTRFGDAPGPKIKAEEIGSPR

SEQ ID NO: 974339 - protein, 61 aa, Homo sapiens
EATYAAFIEKFRSRGRKSLSQTNPSFHVNPSSQICEAKKPTDQTRLSVRSQQVWLLALERH

SEQ ID NO: 974340 - protein, 97 aa, Homo sapiens
RSIWDRETQKYKRQAQADRVNLRELRGYYNQSEDGSYTFQRMFGFDLGPDGRLLRGNTRFAYDGKDTSLNDDLRSGPRETRSDHQRSGGALSDSESY

SEQ ID NO: 974341 - protein, 102 aa, Homo sapiens
GSDIVFKPCVAILTHRRDAREDRATWKSTYFLKIIQLLDDYPKCFIVGADTVVSRRFSRSAFPFAEDFGAYGTRHIIAGHPRHLRTTQLVRTCCFISGGMWA

SEQ ID NO: 974342 - protein, 67 aa, Homo sapiens
MRCKTIERNEERTCIRGRCCTNICEFLQTSRGFERNTTIIYDLRGGYTNTHPFLKGVFETLSGAGTV

SEQ ID NO: 974343 - protein, 38 aa, Homo sapiens
DSAASCSSRFVGPAASRAYGRRTGKLDGSVMRLLDLFQ

SEQ ID NO: 974344 - protein, 49 aa, Homo sapiens
ATTTGASSRQDTGEPVEIPTYISSTNPDACKLRVQAQFVKPGFALDFHP

SEQ ID NO: 974345 - protein, 105 aa, Homo sapiens
SSPGRLETRPQDCPPVGLQRPKGNLLLKYFIKKKQSLNSDHQRFLKPRGGPQLLIKGFPWVFPGVFGFPSKRTPWPSQTPGRAQPWVLWAPFKNNFPKNLLKEFG

SEQ ID NO: 974346 - protein, 40 aa, Homo sapiens
AIPVPSVRSCLLALRITWALHMKRAHISRDGPRPPAARAL

SEQ ID NO: 974347 - protein, 50 aa, Homo sapiens
LSQHGAPQQKRRIRRGKTISLTDLSSPEGWGYLVEEAPMFPNQVSWLCEP

SEQ ID NO: 974348 - protein, 44 aa, Homo sapiens
MLDEDEDERVDEAVLRQFTGDGAFPEDQSPPGPFKLKPHGRLPQ

SEQ ID NO: 974349 - protein, 101 aa, Homo sapiens
ASLNDLPEERLRRNQNRVAVQMPRDRKKARMSQLEQQVVDLEEETQNFCWKIAFREQLMPYVETRSKTDGIDSLVLNGGALVGYVQQSVFVVNVISGTFER

SEQ ID NO: 974350 - protein, 40 aa, Homo sapiens
QTKGKVKLAAVDATVNQGSSSRYGFRGFPTIKIFQKGEFP

SEQ ID NO: 974351 - protein, 49 aa, Homo sapiens
YSGGREPGGYGYWRLVLLLGKTSWERGLRLCPYPSLQGFSKRIGSENSR

SEQ ID NO: 974352 - protein, 45 aa, Homo sapiens
LGLSAAGRRHSRGGMAHCVNLGFKLSNSLGTILIDKGNQLPGLTH

SEQ ID NO: 974353 - protein, 33 aa, Homo sapiens
AAGRFEFCHATALGTPGTHPISHLAMQIKDQMA

SEQ ID NO: 974354 - protein, 82 aa, Homo sapiens
EKDIPEETEETKTYGNLIFWFRNNLFFTIENVKAKIQDKEGILLDQQRLIFAGKQLEDGRTLSYYNITEKSTLTWSSVYEVD

SEQ ID NO: 974355 - protein, 50 aa, Homo sapiens
FGTAFFYARRAKPVVKPSDVGRVYKGGFYALNAKFHAKINGNLSSGKALG

SEQ ID NO: 974356 - protein, 74 aa, Homo sapiens
KCRIRRRSVPDCLSLTAIVFRASRQRLWGIGTRTEPAGPFCSCDFPPYGFQRGVLLLAICWERILQFVGFLILD

SEQ ID NO: 974357 - protein, 35 aa, Homo sapiens
FGYTAATSPFVHATKQFHGLSLQGLSQLGGAGSRG

SEQ ID NO: 974358 - protein, 34 aa, Homo sapiens
MGAKRVFSRVARSVFARSHVSLRSGATTLKRSPY

SEQ ID NO: 974359 - protein, 35 aa, Homo sapiens
MLIPHFKYQTYSIETQRRLYTLFYNQRDIRQRAEK

SEQ ID NO: 974360 - protein, 75 aa, Homo sapiens
  misc_feature (24)..(24): Xaa can be any naturally occurring amino acid
HIIQRMYGCDLGPTRLLRGHDQSXYDGKDYIALTEDLSSWTAAETGLKIPAKWKAARVATAESLPGGLSVSARDT

SEQ ID NO: 974361 - protein, 101 aa, Homo sapiens
MSCKLKEGGFLKFLAAGTQLKVAPILDFPDGPVPSIKRKSDGIYIIILKETWEKLLWQLVQFVAIETLLMSVVYPPGLLPQACLKFPAALEQSILALIWTS

SEQ ID NO: 974362 - protein, 98 aa, Homo sapiens
VLVEVTSSLNLRGILDAPPCCPGRTGRPGGPPTSLRIIHLLDDYPKCFIVGADIVGSRQMQQIRMSFRGRLWSLMGRTTMMRRPSGGNWRPPSSGELL

SEQ ID NO: 974363 - protein, 58 aa, Homo sapiens
GRTFRLSVPTKAADHLSKQGRGVLLGETGKEKLPRYYKKHRSGLQEHPRRLLRAPTYD

SEQ ID NO: 974364 - protein, 38 aa, Homo sapiens
LHKNMKTPVVLPPAGGQASKIAVLSQVASFMGVWAQGL

SEQ ID NO: 974365 - protein, 66 aa, Homo sapiens
VAQLPALTGVDRGRRWDNPFPLLGGGNLAGPFFGCGLASASWTWAWGYNERILHIQCPGERARWVI

SEQ ID NO: 974366 - protein, 101 aa, Homo sapiens
IQLAAVTEDKYEILQSVDDAAIVIKNTKEPSLFLNIQLTIPVVRGRNWGRFRSGKTLYRVQAPPRRVSGTAQDISSLLLRAPPDTTMWSQDRANGCWSLVI

SEQ ID NO: 974367 - protein, 58 aa, Homo sapiens
MTATLSWYIFLIPDAGAAQGRSHVELPGVVALQEASYYFFGGCNNWWGSNHQLIIHRE

SEQ ID NO: 974368 - protein, 69 aa, Homo sapiens
PKNFGTRQNTGVVKTTPKSQNGEREKNYINIVVIWTRRFGQVHHLLGLLSFNSGAPQKDPFKNLGRESF

SEQ ID NO: 974369 - protein, 41 aa, Homo sapiens
AFTSLSTSTPVYCPGRRPRYLWGTTIDEKGLTWNRSGQAKP

SEQ ID NO: 974370 - protein, 44 aa, Homo sapiens
MGGFSWRGLLLYIGAPPSFLMDSGLLSYMMFRQRFLAPGPHPGV

SEQ ID NO: 974371 - protein, 49 aa, Homo sapiens
MALGSPGVPPETCTLRGVSRVPQENLSPPNRGNIRHYWQGPSLFRSAAE

SEQ ID NO: 974372 - protein, 61 aa, Homo sapiens
HHYRMCPHFAGLKLIPRHTGWTTLIGKGARGLPLSPDYHRLHIWASFWGHGFFKRDMVDPF

SEQ ID NO: 974373 - protein, 49 aa, Homo sapiens
  misc_feature (40)..(40): Xaa can be any naturally occurring amino acid
MDYLPGPLIQTTLRMFSDIYKIREKIADGVRAWRLRRKMXQKDQKVTFM

SEQ ID NO: 974374 - protein, 44 aa, Homo sapiens
SKEFGTRVCRQNTGVVKTTPKRQNGKGKDYINNVGNWQGGFGKV

SEQ ID NO: 974375 - protein, 61 aa, Homo sapiens
  misc_feature (23)..(24): Xaa can be any naturally occurring amino acid
DTWVRKVLVRARAQRASLAMPRXXEEFKDFLFTARRKDAKSVKIKKIMANVKFKVRCSRYL

SEQ ID NO: 974376 - protein, 41 aa, Homo sapiens
RPSGVSCADRSEGSWPNRAFAVPAATVQRLRRFKKRIVGSE

SEQ ID NO: 974377 - protein, 38 aa, Homo sapiens
EYKLQGLQQRSSVLPFGKAIFLRPVRQPPRATGVTPLP

SEQ ID NO: 974378 - protein, 35 aa, Homo sapiens
  misc_feature (22)..(23): Xaa can be any naturally occurring amino acid
EYKFKVSTEASVLIEETIFKGXXQAPGPQVYNLAP

SEQ ID NO: 974379 - protein, 36 aa, Homo sapiens
GYKTYNQCATHNWLQCVTPSQTTFTGITQSHPMRYL

SEQ ID NO: 974380 - protein, 36 aa, Homo sapiens
MLISGNDLNSIPALMYPHGNIREQAEMQLIPIMHLF

SEQ ID NO: 974381 - protein, 42 aa, Homo sapiens
GQRGGRTMPGVTVKDVNQQEFSDFLAACRKEYRELKGPRMGG

SEQ ID NO: 974382 - protein, 41 aa, Homo sapiens
MGEKRHEFESGISQLFWELGDELWPTKASPPGILNNSGHLK

SEQ ID NO: 974383 - protein, 40 aa, Homo sapiens
ESEVDIHLGPLSLSLQGFHLQLTQNFKSTCAHYYSINNGA

SEQ ID NO: 974384 - protein, 44 aa, Homo sapiens
ASFAFFLIRLLPCRRLAHAGVPSFPFFRRNFPPAFIRPEVPETF

SEQ ID NO: 974385 - protein, 35 aa, Homo sapiens
ARIPDPETIGPDGHGARRQSIAEVTSAISDMFDRL

SEQ ID NO: 974386 - protein, 65 aa, Homo sapiens
AEDPGVAMGRRPPVVTGIVRTSPYPKSRFFAEVSLMPRLAFLTWGRKRAKVDEFPILGPWVSMNM

SEQ ID NO: 974387 - protein, 31 aa, Homo sapiens
MVVTIAPRATGNNGSKMYFRHSTTMKAFDVK

SEQ ID NO: 974388 - protein, 88 aa, Homo sapiens
PKLPCKKRRTTVTESLQHKGNQEENNVDLESAVKPEFLTKVKGFEFRFNYSWVPGIGRLSWLRGHSLSRIQEISLVWEDTSLRSGVLT

SEQ ID NO: 974389 - protein, 70 aa, Homo sapiens
SPLPPSAAAAGTALRLPECCKSAWLKVRRPCVRCCPVQVRPCMDVMLTPGAPPMQPTDGRWCVAAHVNKN

SEQ ID NO: 974390 - protein, 96 aa, Homo sapiens
SKEFGTRVTRSPRSVLTRPRFFLFLDSIFGGSLDRPFNGNMQLFVPGPGALNTSQGNRHRERVCARVYKVKCEPYFVGANIPAQRYMCRFSRDAGP

SEQ ID NO: 974391 - protein, 68 aa, Homo sapiens
IQRIRHEAAEPHQKSEFCENPYGEDQLPPEGLTPWKRNEKVKGQEPRKRKEISPDTAETVLFSCQAGP

SEQ ID NO: 974392 - protein, 45 aa, Homo sapiens
SKEFGTRLPLSQYCAYCHTSLCRLRRRVGLALLVSISNKNWLGYG

SEQ ID NO: 974393 - protein, 44 aa, Homo sapiens
RWGFSLKGGTDSPETPPPACVEIFPIFEQGLPFKRAHLYGPYLK

SEQ ID NO: 974394 - protein, 40 aa, Homo sapiens
KFRKFNIPQNVVVNLKFGKNKEFVSLPMRVSCLNAGLFSQ

SEQ ID NO: 974395 - protein, 109 aa, Homo sapiens
MERIKEDRPITIRTTRATFNPFIRERGFRFSYTVQGQACAFEIPPPEDEIQARPRENWMGDHAPHGATSQPDFEGRQTVKTIVQTLYRHVGLQNELDGSKSVKILCGAR

SEQ ID NO: 974396 - protein, 39 aa, Homo sapiens
EDSLAAVPAAVHWVKNDTNISHLKSKLQQYLPKHHQLRC

SEQ ID NO: 974397 - protein, 44 aa, Homo sapiens
  misc_feature (24)..(24): Xaa can be any naturally occurring amino acid
RRGTVDAVVSALSSQLKELEDPRXEGVAASRVPAIKLLQDPGGQ

SEQ ID NO: 974398 - protein, 38 aa, Homo sapiens
PRVGKALANFQVHIRMRVPFLKTKKGFKKFCPNPPGAP

SEQ ID NO: 974399 - protein, 81 aa, Homo sapiens
FLCRVCVLPPPPPSGSTATMAYSGQQSLRQQLAFCSGGRAPRLCSGNPQRLRHGASHGIQQPAFLLTHKDTFELSTFLDSQ

SEQ ID NO: 974400 - protein, 39 aa, Homo sapiens
MTEYNEEKKYGGRGYWPGTKPNDQEPGKGKKQRGGTTEG

SEQ ID NO: 974401 - protein, 110 aa, Homo sapiens
TVDCSVRLRGQSPSAPALNELVSFEDLLFEKKFQSEKAAGSVSKSTQFEYASCLVRKRDNDDIRKGIVLLEELLPKGSKEGQRDYVFYLGRGDYRLKEYEKALKYVLGLK

SEQ ID NO: 974402 - protein, 44 aa, Homo sapiens
MVEAISWAAWPLVAKQVLLAPKVVVVRFEGINIFPEFLQEQVEG

SEQ ID NO: 974403 - protein, 40 aa, Homo sapiens
RGRYCGEHMEVKCAWSAAPARPLSGRLYEGPALRSLRYSV

SEQ ID NO: 974404 - protein, 48 aa, Homo sapiens
KGGRKDISLGAAKLSQQTKGFGPRAEIHHKCRVPGEGNKGNTVPWGLT

SEQ ID NO: 974405 - protein, 67 aa, Homo sapiens
  misc_feature (23)..(24): Xaa can be any naturally occurring amino acid
DSQSGALYISKVQTEDNSTYIMXXLVKRTRQCRHEIERFKAVKSSLPRYPQGLSIKNGEGVDRVYMR

SEQ ID NO: 974406 - protein, 39 aa, Homo sapiens
GFPSPLPIRRGGTYQPVLDPARPGKGGSTEPTVFSGPQK

SEQ ID NO: 974407 - protein, 40 aa, Homo sapiens
RIRHRFSKWLQLLKHPAAGVLSVKDKALLVFKDGGFGQPI

SEQ ID NO: 974408 - protein, 35 aa, Homo sapiens
  misc_feature (23)..(23): Xaa can be any naturally occurring amino acid
TDRDSHDEAAVEAEEEASYPKTXKVDNNCFGTWGP

SEQ ID NO: 974409 - protein, 52 aa, Homo sapiens
HFAYCEASRSPVGLIRWRCKEPFLLGSLDTPCQLGRQMHYGAVQLAHSGCWA

SEQ ID NO: 974410 - protein, 32 aa, Homo sapiens
KHKKHNTHKKDKRCRFSFFSFLFTPSSHFQLA

SEQ ID NO: 974411 - protein, 70 aa, Homo sapiens
MVTQAKAQRGAHCTAPVFQGLAVSRSAMYTEGMYRGGTQPLNPRLKGKEERFSHCYKPVVVTDGGTGVVI

SEQ ID NO: 974412 - protein, 68 aa, Homo sapiens
DREVTPDQNCCPGDSYQDTGCHGWAERLFPANVANSVYVLEDSICGPTDSDHDYLHLEHNPRPPDGGG

SEQ ID NO: 974413 - protein, 33 aa, Homo sapiens
RVKKLRSQILKEKKTEAKRVDAWVGKVEKGLTS

SEQ ID NO: 974414 - protein, 53 aa, Homo sapiens
VNGKEYKCKVFNKGLPVLHMRKPFLKRKGAAPQSPQSVTHLSPHFPGGGGEPR

SEQ ID NO: 974415 - protein, 40 aa, Homo sapiens
RKRAGFDTNSGATILGIGSPNERAHEKLVSDSALIYRECA

SEQ ID NO: 974416 - protein, 41 aa, Homo sapiens
  misc_feature (27)..(27): Xaa can be any naturally occurring amino acid
ELKLSYRSPGEFSTSQILYWQMKEPNXPEEYLKKDHGPLGV

SEQ ID NO: 974417 - protein, 47 aa, Homo sapiens
  misc_feature (27)..(27): Xaa can be any naturally occurring amino acid
MIEQQKRKGPELPLVTDKRTTELLFGXGSSPMRPGQQQAHGREAFLQ

SEQ ID NO: 974418 - protein, 42 aa, Homo sapiens
  misc_feature (24)..(24): Xaa can be any naturally occurring amino acid
AVTVLRKKGPSAAQANPGKANLSXTRAEGEVVEPPKNMALLA

SEQ ID NO: 974419 - protein, 34 aa, Homo sapiens
  misc_feature (23)..(23): Xaa can be any naturally occurring amino acid
MSANFIKHSGLSLAILMQSTTLXCRSDPLRSQRS

SEQ ID NO: 974420 - protein, 65 aa, Homo sapiens
AESKMGHQQLYWSHRENSAKVLVSCRVCSNRHGLYTGKYSLNMCPPDVYAQIREGYRFHEVRLNA

SEQ ID NO: 974421 - protein, 75 aa, Homo sapiens
MPHMAVIKYSHSAYTCLLCLEKMLKVQELPPGSAETPDSFEKHIENILHVGLPIQHFETSEKDIALLLKNAFRSS

SEQ ID NO: 974422 - protein, 74 aa, Homo sapiens
AAQHEDIPGLILWSMYRRPMVHPSQNTNLPEEYKVPWRLGHEEDMMSLKTVLPLHLSRRRYILVVVYQEDDGDM

SEQ ID NO: 974423 - protein, 48 aa, Homo sapiens
MYLPVQDAREQRFEYKQKNIQFAHANKPKGRKAKMAFVNSVGKQLVTS

SEQ ID NO: 974424 - protein, 51 aa, Homo sapiens
PHRKFCVWDLQTRSTVTGYVRSIPHMHIEGLKNLTRIKIVKKLAKKYDAFL

SEQ ID NO: 974425 - protein, 51 aa, Homo sapiens
TEQPIWRHREKFKVTYLRKTYELRPRCWTCYQAECDDYVPETNEVPKTAKR

SEQ ID NO: 974426 - protein, 34 aa, Homo sapiens
MANETNLKANDNNTQDKRANLISYTSALVIFIAE

SEQ ID NO: 974427 - protein, 63 aa, Homo sapiens
MFQYDSTHGKSMAPYRLTTGKLVINGNSITMFQERDPFKIKWSDVALSTVVEATGRFTTMMKA

SEQ ID NO: 974428 - protein, 68 aa, Homo sapiens
RVRFPSSPALIFTATMAYEGQQCLRKNWPLQRRQQHQALERETPSGLKHGAFYGIQEAGVAVTDKDTF

SEQ ID NO: 974429 - protein, 69 aa, Homo sapiens
NLNYKGGTEEGTQEKGTNCGAESWPSVQPLGGAGAEAHQKLLVAVVGWDDLARANEDTGAKVKLETAGT

SEQ ID NO: 974430 - protein, 44 aa, Homo sapiens
MKTLELLSLKTYSSRALEHSALQGQDEEDRRPIPRRTTWFASGG

SEQ ID NO: 974431 - protein, 74 aa, Homo sapiens
APTPHCTHSNRNGILMLPTENSRAIYNYAKGPNVLGPLRANTTLRLKAENFFTKGALKTGKITFNPYITARLWV

SEQ ID NO: 974432 - protein, 48 aa, Homo sapiens
GAPLVFSVLGLVLALPRLGLPRVKGLNLDFPAPWDGPQRIWTNFSRDT

SEQ ID NO: 974433 - protein, 50 aa, Homo sapiens
RRGVQVLRLYQLLSRASESTSSSTTLSGSKPPNLGERLSFPGPTGNFRVS

SEQ ID NO: 974434 - protein, 38 aa, Homo sapiens
PVGTWVVIGLMGFELMASDWGTRLSEAPVKHPQNAKTT

SEQ ID NO: 974435 - protein, 44 aa, Homo sapiens
MKDIWFRARYPALSGCARGSSLGGPGDKPAAPPRKGKLYVQNKK

SEQ ID NO: 974436 - protein, 42 aa, Homo sapiens
ALVVLSHCLDRSPLVSLYSQSFVPPIVIPHPPRGFNCPKKGC

SEQ ID NO: 974437 - protein, 58 aa, Homo sapiens
SHTYVCHVYVSQAADSKSQVKAHKGSVSMREQVSAQGDREHTCHTPHLERDTTHIIII

SEQ ID NO: 974438 - protein, 34 aa, Homo sapiens
  misc_feature (3)..(3): Xaa can be any naturally occurring amino acid
  misc_feature (25)..(25): Xaa can be any naturally occurring amino acid
EDXEEEERSRRKEQRKRARQRSRAXPKEGGGDEP

SEQ ID NO: 974439 - protein, 71 aa, Homo sapiens
GGSKTNAWLGSSSLWRCPWPVVPSILFHKAWGTIFGQLFFGAFFGKKELRILMVALDAPGRTTILSKSLNL

SEQ ID NO: 974440 - protein, 75 aa, Homo sapiens
RKEGRFAGPNLATPSRGGPLGPFSFPFPLYKPLPSRPFLKPGRAPSPWRPPKEIKPPFSNLTNKFSLTALFNFST

SEQ ID NO: 974441 - protein, 72 aa, Homo sapiens
  misc_feature (31)..(31): Xaa can be any naturally occurring amino acid
QQLQRSKQSSRHSKEKIASHLFHWQPFLTIXVTPQGYLDQGSGSYCHLFKIIFRCPKIILFFAVCPRNCRRG

SEQ ID NO: 974442 - protein, 75 aa, Homo sapiens
WLLSGGRLFAGVRRAPGGRAPFGVRVSRVFPSPGLFWVAGFVWAFFLSWPSRFPPSLGFVGAFGVCLCLWLACPV

SEQ ID NO: 974443 - protein, 38 aa, Homo sapiens
QPMFDGFFFGPAAAINCDPIWEVLFGKNYNEEKKRGPP

SEQ ID NO: 974444 - protein, 63 aa, Homo sapiens
MRMGGLSLPRVCPLYTVALFCERIIPIIFVKKELLRDRGPNKEPASHTRTFSIFIALNTPNSS

SEQ ID NO: 974445 - protein, 78 aa, Homo sapiens
  misc_feature (23)..(23): Xaa can be any naturally occurring amino acid
LDQHYTVDMTETEHSIQHPVTKXCHGAAFGPLQGLPGPIPWLTPGSWEPLPLALLPLNLEPYRKPFLAFIGWQENQNG

SEQ ID NO: 974446 - protein, 47 aa, Homo sapiens
  misc_feature (23)..(23): Xaa can be any naturally occurring amino acid
  misc_feature (47)..(47): Xaa can be any naturally occurring amino acid
EGYALPHAILRLDLACRDLTDYXMEDPHRGGAKDLTTRADGGKSWSX

SEQ ID NO: 974447 - protein, 36 aa, Homo sapiens
  misc_feature (1)..(1): Xaa can be any naturally occurring amino acid
XLALATYVLEDRWYLLTPLMPPDVFSMKENNDLNLN

SEQ ID NO: 974448 - protein, 89 aa, Homo sapiens
DLLVSRHQPQMTQVTEQEFPSWKKGIDRRFEVFAAQAGDTSWSSRSGLKIEFSGSTMSIDLKYFGVQLPLAPATSFPFWNPTGPNPASS

SEQ ID NO: 974449 - protein, 35 aa, Homo sapiens
SEVEQKKEADLPQVHYAAWTRTSCWTSPYGAADAA

SEQ ID NO: 974450 - protein, 42 aa, Homo sapiens
MGFSQREKVKLYQCKKQGHNCLRFRAQEFSSYNGNMKRLRWV

SEQ ID NO: 974451 - protein, 42 aa, Homo sapiens
  misc_feature (22)..(22): Xaa can be any naturally occurring amino acid
LNEGTMGPKGVNTETCVRMGRXAEDLGGGSSDVPQIPMEPEN

SEQ ID NO: 974452 - protein, 43 aa, Homo sapiens
APFPGTGGRSYALAAQLCNPALPPRAAPPFNAAFPFAHPPLGP

SEQ ID NO: 974453 - protein, 51 aa, Homo sapiens
MSAVLLSDQSEKDISKFGVLSPEDFGRYQGLCVIPKGNNWDGMDVGNRGRG

SEQ ID NO: 974454 - protein, 44 aa, Homo sapiens
YGSQTGASELSIQGSIPREVPKGGIPRIGILGTYGAQEAQISSG

SEQ ID NO: 974455 - protein, 51 aa, Homo sapiens
LPVGGNNIGRKSVHSYLQRQARTLVFGASMIDKRPGPPGDSLKRTLLGGQT

SEQ ID NO: 974456 - protein, 42 aa, Homo sapiens
MPRFAFLDLGRKKAKVDKFPLCGHIVSDDISSCTLEALEAVR

SEQ ID NO: 974457 - protein, 59 aa, Homo sapiens
VRDNLTLWTSDMQGDGEEQNKEALQDVEDENQLDMKPTRETIFDQPLLPIPTFGNSPMF

SEQ ID NO: 974458 - protein, 69 aa, Homo sapiens
RASASCSHWREYLFYPALLAQLRICLRVSPAEKSSAGIPHAQVRLVRAKLRFEFAAENYLSRGWPRDGR

SEQ ID NO: 974459 - protein, 50 aa, Homo sapiens
ARVADSRSARQWRPRRPAHRPIKGILKDKTSTTSFMCGVGRHRPQGNVRT

SEQ ID NO: 974460 - protein, 77 aa, Homo sapiens
MVFRRFVEVGRVAMSSFELIAGKLVRDFKIVIDQNQRALVDGTLPLKVKETGPCLFKCIAAHSIFIPQSFPHTCPPR

SEQ ID NO: 974461 - protein, 51 aa, Homo sapiens
ARRALRPSKSLLVATDDGQSNWQFWNEEKAFAGLGRLRPPRAIRGNFQGRN

SEQ ID NO: 974462 - protein, 44 aa, Homo sapiens
FNGDYKASNTRCQRVSAICGPMSIMSSTLVLGGTISLSFSPKTQ

SEQ ID NO: 974463 - protein, 71 aa, Homo sapiens
APRFGTTRRCAPPRLQLEELRVAGIHKKVARTIGISVDPRRRNKSTESLQTNVQRLKEYRSNFILFPRKPS

SEQ ID NO: 974464 - protein, 73 aa, Homo sapiens
LYTAATVVSSVFCWWLTQGPPPRVDNLISYPWGPQGQGWVKLFGGTEVGLSYGNTLVLKSYHILTTRVERGTH

SEQ ID NO: 974465 - protein, 52 aa, Homo sapiens
MVVGTGTSLALFSLLFLLLFAGMQMYSRSWASTELVTIKGGFFGPGFSGLGQ

SEQ ID NO: 974466 - protein, 65 aa, Homo sapiens
FVLITVALALMHWVLIPNHWRLGVTKWPLDSWIPYSGSLIKWVLCLIELSLDVRGPSINPFRVPL

SEQ ID NO: 974467 - protein, 55 aa, Homo sapiens
GSSNVLIRGVAGGLGSLTSSKFRLHGVSRVQRGAPDPCTVTGNSNCGGKSGTLAA

SEQ ID NO: 974468 - protein, 63 aa, Homo sapiens
MPLARSWVCRKPSVTPRRPLGKSGFDQELRLIAENGLRTNRKLWRDKLTLAKDPKAAREPLDA

SEQ ID NO: 974469 - protein, 40 aa, Homo sapiens
ASSWKCIVLNPAWHLDARGIPGKTARPGGPPYSLRITHLW

SEQ ID NO: 974470 - protein, 85 aa, Homo sapiens
FEGWNLINLAFKVYNNRKKLQFLASTVRQTPATSSAHKKFQKPEPQQPGVSPETFFHRSFLHMSRISPLGHGIVPSPGISPKTRA

SEQ ID NO: 974471 - protein, 87 aa, Homo sapiens
LGGAKTHNTMSGVAHRAFENDVDALCNLPDFFNYLPLSRQGPASVPSGPRFPVYRLWFLSFYTHCAPVSHTQVSHQMWDIIHSLVYD

SEQ ID NO: 974472 - protein, 40 aa, Homo sapiens
FESRIFQALLELEMNSDPKAELKELNITAAKEIEGWVCVG

SEQ ID NO: 974473 - protein, 52 aa, Homo sapiens
  misc_feature (21)..(21): Xaa can be any naturally occurring amino acid
MTTDVGVVEVLALEQEQLSSXDLGGLSLSGREDSQERFFWEPLGLSPWGPQE

SEQ ID NO: 974474 - protein, 61 aa, Homo sapiens
MSRSVALAVLALLSLLAGAIQRTSKDFKVYFTANPGGDWKAKFPGIAHVSLGSTHPQMKVA

SEQ ID NO: 974475 - protein, 89 aa, Homo sapiens
  misc_feature (44)..(44): Xaa can be any naturally occurring amino acid
MSRSVVLAVLALLSLSALRLSAYSQRFRFTHVIQQRMGKSNFLXLPMCLGFIHPHIEVLTYCRVGERIEKVEQSDLSFSKDSSFYLLYY

SEQ ID NO: 974476 - protein, 34 aa, Homo sapiens
RQNHLKKTMKRKSNQKARILLSYIKPPYGPTHIF

SEQ ID NO: 974477 - protein, 53 aa, Homo sapiens
MCSCNGASQEQVKDTSHTATSADSRADTAAPPSGTFQVLSSALVLCGCLLDSM

SEQ ID NO: 974478 - protein, 37 aa, Homo sapiens
MDRCVYSRYLPAPGVVVPLTVELMATVAKQLVPSCVT

SEQ ID NO: 974479 - protein, 41 aa, Homo sapiens
RDSHLVVWALLVLLQCIYVKMQYAFCYNNKCSLSLIRSQQS

SEQ ID NO: 974480 - protein, 48 aa, Homo sapiens
  misc_feature (25)..(25): Xaa can be any naturally occurring amino acid
LWVLLPSSRMSILAIGINSTLAPIXEAKPHPNYTRRFSSALGKRGVYN

SEQ ID NO: 974481 - protein, 73 aa, Homo sapiens
EKKEVPAVPETLKKSEEFAELKDQGALEKKVCPKDAFKGKEEALSIKKQSTITGNMADVQPSNSYGEDRKKSS

SEQ ID NO: 974482 - protein, 40 aa, Homo sapiens
DIQTERAYQKQPTIFQNKKEGPSWRNLAREEGFPRVLKGT

SEQ ID NO: 974483 - protein, 65 aa, Homo sapiens
GFSSTVNGVTGIQNEDGILHNSAIAVYSCIHGLHNRNQHYTWEFRPFAWRFQGPDLDKGKITIFG

SEQ ID NO: 974484 - protein, 43 aa, Homo sapiens
  misc_feature (16)..(16): Xaa can be any naturally occurring amino acid
  misc_feature (18)..(18): Xaa can be any naturally occurring amino acid
  misc_feature (34)..(34): Xaa can be any naturally occurring amino acid
ISPNFSFMGQLLQFEXQXLAPTVRAEAGEPRMAXLDRAPPPPP

SEQ ID NO: 974485 - protein, 51 aa, Homo sapiens
PRGTTPHPCPARRGEPRCNAAGYVDDTQCVRFDSDAASQRMEPRAPRIEQE

SEQ ID NO: 974486 - protein, 60 aa, Homo sapiens
  misc_feature (24)..(24): Xaa can be any naturally occurring amino acid
  misc_feature (30)..(30): Xaa can be any naturally occurring amino acid
EPGPQERPRGTYKVDLDEEPKASXGGSEEXRGHFNHPASGYRQRGHRALGTGLGATEGLL

SEQ ID NO: 974487 - protein, 32 aa, Homo sapiens
MLPDPKNTHNGGSRMTAQTVDAVALGVLPLRT

SEQ ID NO: 974488 - protein, 46 aa, Homo sapiens
TKKARKAPKAARAVTQADFEGYGLQDRTAHESAKPKKHGSRAIWEA

SEQ ID NO: 974489 - protein, 52 aa, Homo sapiens
  misc_feature (7)..(7): Xaa can be any naturally occurring amino acid
  misc_feature (9)..(9): Xaa can be any naturally occurring amino acid
KRLKSDXPXVEISEPTEGQTEGGPSELSTGLSGGPKCERGGRALSGGKAQAF

SEQ ID NO: 974490 - protein, 40 aa, Homo sapiens
GKPRADTGGPDTQQEGAGQTRPGARKPCWGAPGDQRKPQA

SEQ ID NO: 974491 - protein, 32 aa, Homo sapiens
  misc_feature (16)..(16): Xaa can be any naturally occurring amino acid
  misc_feature (21)..(21): Xaa can be any naturally occurring amino acid
RRSEAKRKNHLLFWGXLAGFXKAVHVKAQEDE

SEQ ID NO: 974492 - protein, 89 aa, Homo sapiens
VFLCPSKETGSFLPLPERDLWNFELERDDLAYLVEEISKQQSIQEEAEHKSLENLQPDDVIKKKNQFSREIFKPAAEISISKEEPDINH

SEQ ID NO: 974493 - protein, 32 aa, Homo sapiens
MKVELLKFKRVKDLPRKGEALRKDPRERFFQF

SEQ ID NO: 974494 - protein, 32 aa, Homo sapiens
MRPANDVLSEDAISTREHHLEQRRIALEKEGK

SEQ ID NO: 974495 - protein, 36 aa, Homo sapiens
RDFPEAYKPTVYENTGGGRLMMHQISLGLWEKNRTM

SEQ ID NO: 974496 - protein, 44 aa, Homo sapiens
SGGVSVPALWSEVNRYGQNGDLKGALKTVNKILQINKDDVTPLH

SEQ ID NO: 974497 - protein, 71 aa, Homo sapiens
RGSLGGRTMLDFAIFVLTLLLALVGAVLYPYPGFQTSCRDFRDYSPLKKMDPFETMLKLLLRYQSGGGSLS

SEQ ID NO: 974498 - protein, 55 aa, Homo sapiens
AERSVAVSSLRHGVCSATEYLVYSRKGGVIFAKIVNSGSLYSRLLFDQIIVKLCS

SEQ ID NO: 974499 - protein, 36 aa, Homo sapiens
VNLNSSLGPLNTSIQEQYNEGENPLQSGTPIKFNKA

SEQ ID NO: 974500 - protein, 48 aa, Homo sapiens
QHLVVPKPLAWTVIFLGSFTHRFVTLLCSCLSDPSVSLGPRRDGPGFI

SEQ ID NO: 974501 - protein, 43 aa, Homo sapiens
CCSHVSSVSLKRFQHILRVLNTIIDRAAEYSLFSCAGINGLSG

SEQ ID NO: 974502 - protein, 37 aa, Homo sapiens
CGTLTYNQCIKYRFRACLFSGINPRWGGGKNAATGWP

SEQ ID NO: 974503 - protein, 66 aa, Homo sapiens
  misc_feature (4)..(4): Xaa can be any naturally occurring amino acid
  misc_feature (46)..(46): Xaa can be any naturally occurring amino acid
  misc_feature (60)..(60): Xaa can be any naturally occurring amino acid
YDKXIRLRERHRLQNPVSGAPLSTWWGHTICRARLEILQLLKATVXGMTCSTTSSTERDXAVRPEA

SEQ ID NO: 974504 - protein, 33 aa, Homo sapiens
  misc_feature (14)..(14): Xaa can be any naturally occurring amino acid
  misc_feature (19)..(19): Xaa can be any naturally occurring amino acid
  misc_feature (27)..(27): Xaa can be any naturally occurring amino acid
METIRLLIQPIALXGRVTXNITAGTYXCTYLER

SEQ ID NO: 974505 - protein, 34 aa, Homo sapiens
IPVIIGRTVIIHPPPTGNLPSDAETVIWLNWWVR

SEQ ID NO: 974506 - protein, 49 aa, Homo sapiens
  misc_feature (23)..(23): Xaa can be any naturally occurring amino acid
LSADHELLSPTNYHFLSSPKEAXGLCKAQITAIISQQGDIFVFDLETSA

SEQ ID NO: 974507 - protein, 36 aa, Homo sapiens
  misc_feature (13)..(13): Xaa can be any naturally occurring amino acid
  misc_feature (31)..(31): Xaa can be any naturally occurring amino acid
DQRGLKDPDGCTXLPAHHICHGRNIYKEGQXGPLKP

SEQ ID NO: 974508 - protein, 40 aa, Homo sapiens
  misc_feature (20)..(20): Xaa can be any naturally occurring amino acid
HGLVVLSERKLKRVKFRYRXYCKHRSVGFLFNRHRFCGSR

SEQ ID NO: 974509 - protein, 48 aa, Homo sapiens
  misc_feature (24)..(24): Xaa can be any naturally occurring amino acid
GSANIQGRGRFVADWHLQAELNEXFTRGGLAEDGLLLRLRVRGYNQPG

SEQ ID NO: 974510 - protein, 59 aa, Homo sapiens
  misc_feature (14)..(14): Xaa can be any naturally occurring amino acid
  misc_feature (16)..(16): Xaa can be any naturally occurring amino acid
  misc_feature (42)..(42): Xaa can be any naturally occurring amino acid
MAHQGERAALEMIXRXPTIQAAGASLLLAKSDLLVETSVSVXGGWHVARLCSNNAPNKA

SEQ ID NO: 974511 - protein, 77 aa, Homo sapiens
VKILVSPWAAAPPVVTGIVQNKAYPKSRFCRGVPYAKIRIFDPGRKKAKVDNFRSVCHIVSDEYRAAVLSSALRLSR

SEQ ID NO: 974512 - protein, 91 aa, Homo sapiens
  misc_feature (7)..(7): Xaa can be any naturally occurring amino acid
  misc_feature (11)..(11): Xaa can be any naturally occurring amino acid
  misc_feature (26)..(26): Xaa can be any naturally occurring amino acid
  misc_feature (83)..(83): Xaa can be any naturally occurring amino acid
DDAERRXYEQXNGPVEGASRRRTAPXGSSGTLREPRENIQKSLLEAQAPGPPSGPAETTGSSRPDCKLEGENQKLRGGGQELXEGHLKAGG

SEQ ID NO: 974513 - protein, 90 aa, Homo sapiens
  misc_feature (70)..(70): Xaa can be any naturally occurring amino acid
NSNPKGPRLAIGAETGPPAVKAVPLRVKANPKKSTAGNPEEIQLGEDEAEDEMAWSPTRSLEQQSVPAEXLGAEGRLTRPPPPTPPNTSY

SEQ ID NO: 974514 - protein, 42 aa, Homo sapiens
LAAGLLFGSLGASVLTNCIRIPGTVWVYYAATSVTCVEGYWD

SEQ ID NO: 974515 - protein, 38 aa, Homo sapiens
MAEVQVLVLNGRGHLLGRPWQNQMLNRYFFGRQVGGPY

SEQ ID NO: 974516 - protein, 45 aa, Homo sapiens
MWNPKDFGHRGGSFLPSTHSFCKGTTFNSPRRLKGFRNLVIFFYP

SEQ ID NO: 974517 - protein, 39 aa, Homo sapiens
GGKMAVQIFKKRKFFLIGIFKADLNEFLTLGSLLKMATF

SEQ ID NO: 974518 - protein, 61 aa, Homo sapiens
LFTDSTYDCLKPMSEGPIAGSIVFSAVLLKLGGYWIIRLTLILNPLTKHIAYPFLYIPIRD

SEQ ID NO: 974519 - protein, 66 aa, Homo sapiens
ARLPPKHEQDLTIFPTPGEDIFNLLWEDTAQHSLFFRPARCEPFTSYREEEGEMLLCGVFFYIKRT

SEQ ID NO: 974520 - protein, 75 aa, Homo sapiens
MHLRTHTGEKPFQCHLFWKAFRTQGSLDKHNRTHNRERPLSCEVCEQRFTLEGGPSLGTLPDRHIERGRAPLLSK

SEQ ID NO: 974521 - protein, 108 aa, Homo sapiens
MAAACRSVKGLVAVYPRALPGLATADELFGQGASSVLLDLSQLGVGEAQAKKLGHNFVFSPTNVTSQKGVQTALALAKGKFGPFGFSFQLYRNRGGQQDVQLKGGPTP

SEQ ID NO: 974522 - protein, 40 aa, Homo sapiens
  misc_feature (14)..(14): Xaa can be any naturally occurring amino acid
  misc_feature (26)..(26): Xaa can be any naturally occurring amino acid
  misc_feature (35)..(35): Xaa can be any naturally occurring amino acid
MGRANPYAFAIGEXLEITLARRNQKXKTPGTQDEXPKEQG

SEQ ID NO: 974523 - protein, 53 aa, Homo sapiens
  misc_feature (1)..(1): Xaa can be any naturally occurring amino acid
  misc_feature (14)..(14): Xaa can be any naturally occurring amino acid
  misc_feature (18)..(18): Xaa can be any naturally occurring amino acid
  misc_feature (47)..(47): Xaa can be any naturally occurring amino acid
  misc_feature (50)..(50): Xaa can be any naturally occurring amino acid
XIHTEDIQILHRWXFQRXLERHHRGGMESNLAPGRLGFQAQALALSXGTXASN

SEQ ID NO: 974524 - protein, 79 aa, Homo sapiens
AQFYLFENVDNAQQFKQLYGQDDSLDLNMKAKERIVEEANKAFEYNMQIFNELDQAGSTLARETFEDGVPCTRWEKRHA

SEQ ID NO: 974525 - protein, 45 aa, Homo sapiens
  misc_feature (13)..(13): Xaa can be any naturally occurring amino acid
  misc_feature (42)..(42): Xaa can be any naturally occurring amino acid
IRRLAPGPEAPAXHSPRMASAPSSLHLLGLILHDEEGQARRXRTM

SEQ ID NO: 974526 - protein, 36 aa, Homo sapiens
  misc_feature (4)..(4): Xaa can be any naturally occurring amino acid
  misc_feature (28)..(28): Xaa can be any naturally occurring amino acid
RVSXKLKLRLSAPGSREPKQSHMKHPSXILLSTLLI

SEQ ID NO: 974527 - protein, 38 aa, Homo sapiens
TKQNNSLEVAIQTTGLAGGTSRFWFNYRHGANTLSGYR

SEQ ID NO: 974528 - protein, 99 aa, Homo sapiens
  misc_feature (11)..(11): Xaa can be any naturally occurring amino acid
  misc_feature (22)..(22): Xaa can be any naturally occurring amino acid
  misc_feature (33)..(33): Xaa can be any naturally occurring amino acid
  misc_feature (36)..(36): Xaa can be any naturally occurring amino acid
  misc_feature (49)..(49): Xaa can be any naturally occurring amino acid
  misc_feature (53)..(53): Xaa can be any naturally occurring amino acid
FLLLRDLLRRXEEEGAQSHRKXYFDLRIGDEDXGRXIFGSSGKTVPKTXDNFXALATGEKGFGTKTANSIGNQGLHDPGGDFTRGDAQGGKSIYGERFP

SEQ ID NO: 974529 - protein, 95 aa, Homo sapiens
  misc_feature (16)..(16): Xaa can be any naturally occurring amino acid
  misc_feature (35)..(35): Xaa can be any naturally occurring amino acid
  misc_feature (38)..(38): Xaa can be any naturally occurring amino acid
  misc_feature (70)..(70): Xaa can be any naturally occurring amino acid
  misc_feature (79)..(79): Xaa can be any naturally occurring amino acid
  misc_feature (84)..(84): Xaa can be any naturally occurring amino acid
GPEGEGTESTGITGAXLHEPSPAGNKVHKRSLQEXIKXYMKSIKGELGGPEARRRKPLCRAADKSSTSLXFKTTRSLLXKMNPXGMGALLDYRED

SEQ ID NO: 974530 - protein, 32 aa, Homo sapiens
SVSLCNSVTSVQSSDGCNVSLLIRSVCISRVT

SEQ ID NO: 974531 - protein, 33 aa, Homo sapiens
MVRNLRPTQKQKPLCFLYSLQNCEPIKPHCCTN

SEQ ID NO: 974532 - protein, 39 aa, Homo sapiens
LQLVKRKLRSKMKAPFAFRGGVLGGFYLRLAQFNSPKTG

SEQ ID NO: 974533 - protein, 53 aa, Homo sapiens
HPRGNANYNPSLESEQHALARQDQIALKGTPLTAGDTAGNTGRENAQRGKPGR

SEQ ID NO: 974534 - protein, 46 aa, Homo sapiens
TIEERYVGGGDALPGLAIKGEARKQVQSNLSVPKDPLTHWENDSPQ

SEQ ID NO: 974535 - protein, 56 aa, Homo sapiens
LKILVSPWAAAPPVVTGIVRTSRTQRSRLLPRVFLDAKDSAILELGREKAKVDEVP

SEQ ID NO: 974536 - protein, 41 aa, Homo sapiens
FGTWRNAEDPAEAAESILARPAKGQAEEEHTANHQAEAVLV

SEQ ID NO: 974537 - protein, 41 aa, Homo sapiens
GSNFISTVTAISTSSDLQSLVAAPPSSSPVGPFENQRPLTL

SEQ ID NO: 974538 - protein, 56 aa, Homo sapiens
GIQGWMTHIEREDDRPGSKGNKKEVVEAGTIVRDTTHDGWGHCGYGETPRGGGLQD

SEQ ID NO: 974539 - protein, 42 aa, Homo sapiens
HPAPWRGAGETESTGYPLNLSLKEEEEEEEIQSRELEDGPAD

SEQ ID NO: 974540 - protein, 37 aa, Homo sapiens
MGDSGLPATSNAQGPAVTHLRNYYRGGEPPGGCPLRS

SEQ ID NO: 974541 - protein, 43 aa, Homo sapiens
MQMPLATKLTWRDQACWAPRQDLSGKAASCPPFEFSLPRKEAY

SEQ ID NO: 974542 - protein, 159 aa, Homo sapiens
  misc_feature (24)..(24): Xaa can be any naturally occurring amino acid
  misc_feature (118)..(118): Xaa can be any naturally occurring amino acid
AYDGKDYIGLNEDLRSWTAADKAXQITQRKWEAAREAEKRESLPGGHVRGVAPQIPGEREEDAAAAEHPKTHVTHHPVSDHEATLRCWALGFYPAEITLTWQAGWRGPNKDTELVETXPAGDGPSEVAAGGGAFWRREKYTCHVQHEGLPEPLTLRWGH

SEQ ID NO: 974543 - protein, 40 aa, Homo sapiens
AGLDQAPRGEDKAKEGGEEDKGQVLTEGAENGKFLRVRIT

SEQ ID NO: 974544 - protein, 35 aa, Homo sapiens
RRDGESNDPHEKTKGKTREGAEDKMTSGDRAVQPQ

SEQ ID NO: 974545 - protein, 36 aa, Homo sapiens
TIDYQHEPIKPWKSVCERAGGWEPKLRRTATRGRRN

SEQ ID NO: 974546 - protein, 37 aa, Homo sapiens
PIFSCCCGPDMATSGPKIPEVPFEPSKPPVIEGAEPN

SEQ ID NO: 974547 - protein, 36 aa, Homo sapiens
TETSYTYDRNKCYTPVVPLVYWKGGPNGGNRLNPRS

SEQ ID NO: 974548 - protein, 35 aa, Homo sapiens
AGLSLCNPVTTGGAPTGGAKGFNLKGNPRAGFGTS

SEQ ID NO: 974549 - protein, 35 aa, Homo sapiens
GKFQAHKPAKSKTAAAAFLKRIRGPKKRAVVFIGS

SEQ ID NO: 974550 - protein, 39 aa, Homo sapiens
IPGSDGAPKIAPVRHDQGKPYPFAYQGRPGEVLPRQAPQ

SEQ ID NO: 974551 - protein, 94 aa, Homo sapiens
  misc_feature (3)..(3): Xaa can be any naturally occurring amino acid
  misc_feature (28)..(28): Xaa can be any naturally occurring amino acid
GLXELTARTSPAVVLATPKNSSLSWKPXRITKQKLKAADEPAYLTVGTDVSARYRGAFCEAKIKTVKRLVKVKVLLTQDITTHLVHDDHVKGPL

SEQ ID NO: 974552 - protein, 41 aa, Homo sapiens
MTPRLILHSTHLRPPLPFREYIYTSSNYTEDLAQGTITPLR

SEQ ID NO: 974553 - protein, 37 aa, Homo sapiens
AKKREKKRGAKIDRASHRPSPPKARGANPPGPGSNER

SEQ ID NO: 974554 - protein, 42 aa, Homo sapiens
SNICYKRHLNLIPGWTEGLSCFFRFGSVITKKLEDVKTSPPF

SEQ ID NO: 974555 - protein, 44 aa, Homo sapiens
MVKLSQGGQAELQASSFKGSQFAIRLGLYPSCDLPRDLRGVQMP

SEQ ID NO: 974556 - protein, 33 aa, Homo sapiens
LPKECQTERREYRISDLQKRGPENNFRVWAEMG

SEQ ID NO: 974557 - protein, 36 aa, Homo sapiens
PPSPSYNLFPFTQGSRSAIQKIPLGKGWAVKCEINL

SEQ ID NO: 974558 - protein, 36 aa, Homo sapiens
MADASHVVHFPVAAFTPGRSSLPAILAVRSLAHKPW

SEQ ID NO: 974559 - protein, 49 aa, Homo sapiens
KVKQDMPPSGGYGPIGYKRDLSASRTFGLQHAGHRGWEPWIYGELEHNV

SEQ ID NO: 974560 - protein, 36 aa, Homo sapiens
LWFLIHGLDRYAARLHNLTVHGCVISLCLQLKPPYG

SEQ ID NO: 974561 - protein, 37 aa, Homo sapiens
VEVTSSLNPAWQSLTDRRDAQGRKGDPEGPLISLGHS

SEQ ID NO: 974562 - protein, 54 aa, Homo sapiens
MAVLAALLRRAARSRSPLLRRLVQEIRYVGRSYVSKPTLKEVVIVKGLQEQPLW

SEQ ID NO: 974563 - protein, 34 aa, Homo sapiens
KTFTSPNDRRALSPFHGSTALHNHFSLIWLPSPR

SEQ ID NO: 974564 - protein, 82 aa, Homo sapiens
KTGPKVTVKVYFDLRLGDEDVGRVIFGLFGKTFPKTVDNLLALVTGEKGFGYKNSQIPSCYQGLHGYRAETFTRGRLAQEGR

SEQ ID NO: 974565 - protein, 51 aa, Homo sapiens
  misc_feature (26)..(26): Xaa can be any naturally occurring amino acid
SAEPGSATPIGRRHGLLAKRRDPTTXHQGATTVLPGTRKFPRDTELGLESF

SEQ ID NO: 974566 - protein, 36 aa, Homo sapiens
AAQPRGGKLRRCPGGQLRTDVPSSNASCPLPINNRI

SEQ ID NO: 974567 - protein, 42 aa, Homo sapiens
VQFVQGIFVEKYDPTIEDSSQKEVEVRFPYSVISRNSGYCLG

SEQ ID NO: 974568 - protein, 36 aa, Homo sapiens
RKADNYPTKRAGEHTIGIRVTDVNNQHMKNSKPITK

SEQ ID NO: 974569 - protein, 37 aa, Homo sapiens
ETGSKREGGPDSEEQEGREETQKESEPERKWFLYLKG

SEQ ID NO: 974570 - protein, 38 aa, Homo sapiens
GENLVFPSFHWQPLSSIVGHRETIRYALVFPPIAFVPS

SEQ ID NO: 974571 - protein, 36 aa, Homo sapiens
ACYYPRVEYGFQVKVLPEGQQIFFLVSFETKITPSL

SEQ ID NO: 974572 - protein, 33 aa, Homo sapiens
SGPIRPIVRCPTVRYHKEVRAGRAFNLLEELKV

SEQ ID NO: 974573 - protein, 66 aa, Homo sapiens
  misc_feature (43)..(43): Xaa can be any naturally occurring amino acid
ELAELRGPRSRARLLGKDGECYLGAAAPLCLEAPIGLGRRLAXLSTFLYSAGFVRAGECTSATPLK

SEQ ID NO: 974574 - protein, 52 aa, Homo sapiens
SWPVAVKIDPPCLRASCGDATARGGCGRGLDWYPTSVFLEDYSFPCSTCCPC

SEQ ID NO: 974575 - protein, 60 aa, Homo sapiens
MQSFSKQAMTFMTRRQDELNMNQRIYNSYHGKMRHPQVGTSQEDDNTSVGFRRGMRSLKD

SEQ ID NO: 974576 - protein, 49 aa, Homo sapiens
ADIQTERAYQKQPTIFQNKKRVLLGETCKEKLPRYYKNIRFLGFKATQG

SEQ ID NO: 974577 - protein, 39 aa, Homo sapiens
FDFLDCVADLQGEGGEAGSPQNELVECVGSTPGVLNRSP

SEQ ID NO: 974578 - protein, 34 aa, Homo sapiens
MPRRNNTIADHYSYSHNPEHPLPLSQYGAYCHTR

SEQ ID NO: 974579 - protein, 81 aa, Homo sapiens
MDLVKNHLMYAVREEVEIPEGADSENLVGEGPPSLEREEHPCLRTLGKPRASLERFQSVSEPVRSQLPDSTHVPEAPGGLC

SEQ ID NO: 974580 - protein, 41 aa, Homo sapiens
  misc_feature (25)..(26): Xaa can be any naturally occurring amino acid
ARLSRSHVCQLLRWKLKGKSNSQGXXTKAAQGKKQVFIKIW

SEQ ID NO: 974581 - protein, 39 aa, Homo sapiens
WVGRIHSSGNANYNPSLESRVNMSLGKVRAQFFLKGTSF

SEQ ID NO: 974582 - protein, 76 aa, Homo sapiens
FGPPDWRYSSARVALGDSIFPTGQWALLRSRAASVSTGTFREGKGGPSFEPRKPRLLLRGDAGLRLTCESRESALL

SEQ ID NO: 974583 - protein, 36 aa, Homo sapiens
DSPRARVPRYLCALIGSEGQSFCGPPCAANSGGLKT

SEQ ID NO: 974584 - protein, 50 aa, Homo sapiens
LQESLPIWGASLTRVASQATRPANNPPLAGASRQSKKPKLPTTPSEQTTL

SEQ ID NO: 974585 - protein, 38 aa, Homo sapiens
  misc_feature (26)..(26): Xaa can be any naturally occurring amino acid
AQIEVTSEIDVHGILRVTAEDTGTGXIVQITFTIDQIR

SEQ ID NO: 974586 - protein, 34 aa, Homo sapiens
MSTRYLSVTLHVGRLALHALTQSLKLLDKQCTAP

SEQ ID NO: 974587 - protein, 44 aa, Homo sapiens
TGGDLNHGLDRSTPRTSSLNCHKATVEPPHDTELNDPRGSTGPR

SEQ ID NO: 974588 - protein, 38 aa, Homo sapiens
MSTEGGGRRCQAQVCRRMSFRRGATGFDKALSNAELKS

SEQ ID NO: 974589 - protein, 38 aa, Homo sapiens
GKVDCTQHYELCSDTGSWLSHSSSGFRDGKKVDQYKGK

SEQ ID NO: 974590 - protein, 38 aa, Homo sapiens
GKNKRLTTGGIKGAKKTVVDPFSKTDEYDVKAPAMFNI

SEQ ID NO: 974591 - protein, 63 aa, Homo sapiens
AGEVVVLVSLSHPVPYSSLQLQTVLTAALTEQMTLRGTLKGHRRLGNPDRYYPRSFPDMILLR

SEQ ID NO: 974592 - protein, 37 aa, Homo sapiens
KPTPPYHQTTLAKPLYPKKSIGDRNFTPCALYNSDRK

SEQ ID NO: 974593 - protein, 48 aa, Homo sapiens
LGAECAWPEPCRVMLQGSSEDLDPGCRSKARPSHSALVCLGVIMEGAS

SEQ ID NO: 974594 - protein, 40 aa, Homo sapiens
WWCLSHGLDRSSSRPPLLTGTGLWKPPIVLYSPTPGFTGP

SEQ ID NO: 974595 - protein, 32 aa, Homo sapiens
GRCAAQEKWRLQVGAQGRCPLFVLFYLLSVCL

SEQ ID NO: 974596 - protein, 47 aa, Homo sapiens
GRDHVRVPGRLALLRAPMHEFFARDIDGAHGVTWDKYRGSSCCIVHQ

SEQ ID NO: 974597 - protein, 49 aa, Homo sapiens
TEDIIRCRIQQRNITTVGGKLQVLPPAARECTEIGVERQSVDIHKGYLY

SEQ ID NO: 974598 - protein, 36 aa, Homo sapiens
FTHAQLRKASKPHTPTTSKTPKHNELNYYTTQIETN

SEQ ID NO: 974599 - protein, 39 aa, Homo sapiens
RDSGTPVLFSSSSDPEVMEFSSPSREVLQPLQEQKHVGL

SEQ ID NO: 974600 - protein, 68 aa, Homo sapiens
EKKKEVPAVPETLKEKAREFRRAEDQAPQKEGCPKDASEGKEGAYLIKRPRTYSQGILGRCTGPKFGL

SEQ ID NO: 974601 - protein, 48 aa, Homo sapiens
MWRVSKNKRLTEGGKKGAKGKGVIPIYLKKVCVYDVESISLCLIYKST

SEQ ID NO: 974602 - protein, 46 aa, Homo sapiens
GHRERDQMESTLNYEDHCFSGARTILAENLWPGRLFFVQQILQLSY

SEQ ID NO: 974603 - protein, 39 aa, Homo sapiens
MARGPKEGILRRVGNFQAFGFLDKIYPLFFLPGPFNRFP

SEQ ID NO: 974604 - protein, 84 aa, Homo sapiens
GNSSPSAKDIQEDFGTAWVSRRTTTRFNKVISELNWKKHLRRHFPGYFASFPSCTLLVGAVAVLCLPQGFSAPASLVLPLLAAE

SEQ ID NO: 974605 - protein, 90 aa, Homo sapiens
VENDGYKTIYFFGEKTIPGGNDHEIFTDPRTMGYSVTAPLGHGAGSLNCCSPNVGAGGAGSRLTSQHREFGGQKPRVLPHVLTHPQPRQG

SEQ ID NO: 974606 - protein, 67 aa, Homo sapiens
FATYATEEEVDAATNARATQGWIGGVVEAQESCLKERILKDQMPTLPMEREIWLVALRESTLRDISP

SEQ ID NO: 974607 - protein, 46 aa, Homo sapiens
GRVVYGRVTKTLRLCSQDDPVGDNSTHAVARETQSTHSSLWECEAP

SEQ ID NO: 974608 - protein, 50 aa, Homo sapiens
AAGGVRIRNPGVGGGGGSSDEEDFDYRPHANEGPLGPGPLLRPADLRVGQ

SEQ ID NO: 974609 - protein, 39 aa, Homo sapiens
LHYIRKYNPFEKRTRTCLYNCSPSSGTCQIGGHISHVGA

SEQ ID NO: 974610 - protein, 79 aa, Homo sapiens
LNFQTGLLVPAHIFALGPRQPFTGDTIGLEHHQGAIEEGLFWHGQGSIGYTGVGLTPAGRVGAPGLCPGREIEVVSRQS

SEQ ID NO: 974611 - protein, 76 aa, Homo sapiens
GGARAHRERARRRVELDRVFCQRREFRPPFYNSFNFVPYTGSSQPPFSRNPVTIGQDFSPLNPTGRVYGDIATHTR

SEQ ID NO: 974612 - protein, 36 aa, Homo sapiens
MSRMSQVCNAQVQTGYTMNAYQDMSPAQMTAPLPAS

SEQ ID NO: 974613 - protein, 73 aa, Homo sapiens
LVRRCCSEKEKEKGLTRIHSAPDVGKQGRLGFGPHIGPCARDGGVCGLIPGGKEAPLSGRTCVRRDNPSRRPR

SEQ ID NO: 974614 - protein, 35 aa, Homo sapiens
PIPPPWSPPSLAWRKNGYKLPEHIQKIWFEKFKYD

SEQ ID NO: 974615 - protein, 33 aa, Homo sapiens
ETSLGGNRSRKQEKQLGQAASLGPLRESPYGTI

SEQ ID NO: 974616 - protein, 37 aa, Homo sapiens
MNIFAQEELAVQNKDNCSARLPAVTEGQGPRKKKERE

SEQ ID NO: 974617 - protein, 84 aa, Homo sapiens
  misc_feature (74)..(74): Xaa can be any naturally occurring amino acid
YNPSLESRVSMSLDTFRTQFFLKVTSFDRGGQGHLFPFRENDYFVDAGRDFFKSLGQGTLCHPLFAFTKGPYDXSPRGVLHEQL

SEQ ID NO: 974618 - protein, 35 aa, Homo sapiens
GQGQRQGILIQNSWTSRSTTGMPLMLCLKEWNNAF

SEQ ID NO: 974619 - protein, 35 aa, Homo sapiens
GAAALEDGGQQEVEQRQSSGRLFFSRVPLNRQPPG

SEQ ID NO: 974620 - protein, 69 aa, Homo sapiens
GRASIQVTLQAARQRFRQFPFIRTCQVPGRPWYQLRELCSPVGYSLRHGLKEQILELLVLEQFLGALSC

SEQ ID NO: 974621 - protein, 66 aa, Homo sapiens
MNDTVTIRTRKFMTTDYFKRKQMGIDVSQPGKATIPKTGIREKLAKMYKATHRCHLCILSQRLIYC

SEQ ID NO: 974622 - protein, 32 aa, Homo sapiens
MALKVRGQNGIAPYGQVRERLKALEGSAAQTP

SEQ ID NO: 974623 - protein, 64 aa, Homo sapiens
PGSRRTLYYQMSGDDTQHIQQFYDLLTCFMEDHSGAWQRKIPCFAELPKADPRTSFWISFLGLC

SEQ ID NO: 974624 - protein, 42 aa, Homo sapiens
VCRQNTGVVKTTPKEPKWGRERLSYRPLSVIGQVDSGKVHTS

SEQ ID NO: 974625 - protein, 48 aa, Homo sapiens
KLVRYFTLTRENPQEIIANSRRVPILSVFQLLRNHFGENFLQGPFKGV

SEQ ID NO: 974626 - protein, 79 aa, Homo sapiens
INQVALEAWRSRRDPEEILLQELEPVIFRAVLDNPHHGFSNSGIMEERLLDAVVSLSSGSAAPQSRTVVLKRALANSGL

SEQ ID NO: 974627 - protein, 56 aa, Homo sapiens
KLPKANGKEAISHFVIDTEIRASHHYFHLIYKCGGIDKRTIEKFEKGAVLDMERAP

SEQ ID NO: 974628 - protein, 43 aa, Homo sapiens
  misc_feature (14)..(14): Xaa can be any naturally occurring amino acid
  misc_feature (40)..(40): Xaa can be any naturally occurring amino acid
MAAVRRAAVNWPLXRGASSPKGPEVASVGPVRGEGKKISXQRR

SEQ ID NO: 974629 - protein, 36 aa, Homo sapiens
  misc_feature (4)..(4): Xaa can be any naturally occurring amino acid
AWSXSGTIAVHCSLDSLGSGKFSNLSFRLEDHHVWL

SEQ ID NO: 974630 - protein, 66 aa, Homo sapiens
  misc_feature (8)..(8): Xaa can be any naturally occurring amino acid
SAKLYGSXDQEALQKGVLFASGQNFARSIDGRRQSNEMTPTRFVEIFEKNPKVLVSKTEVIFRPKV

SEQ ID NO: 974631 - protein, 105 aa, Homo sapiens
  misc_feature (25)..(25): Xaa can be any naturally occurring amino acid
DGEVDAGQDSTDRLTFGVFRECEKXAPRPVFQTLPFAWFVAPFDPRPLPPASRKLRSCGWTSFCCPTCLQDEALPCCRDASSSQRGAGRRRRTRRRTLARLVGIY

SEQ ID NO: 974632 - protein, 44 aa, Homo sapiens
PSFAFVPHSASFARRRPAFRRGAFLPAGRGTFRQALFGQESLKP

SEQ ID NO: 974633 - protein, 93 aa, Homo sapiens
  misc_feature (25)..(25): Xaa can be any naturally occurring amino acid
DLKVLFSSNGGVVKGFKSLPEDRKXTLIPDGLRRGGGPRPSLTSQPRPRGEPPPAGSPSPSPPSKGAGPNGRAPWAKHSINSKSKSPSKNQLE

SEQ ID NO: 974634 - protein, 106 aa, Homo sapiens
QLLEDYVEAIEGVRNAPTAALRSPVSSPLLGACQRPPSVPRWDAWLLGVYHGLSPQPHGAGPRAHGDFLPDEPRRWRRGLVPRIVHLNLYPQPGRRDVEVSQQTGT

SEQ ID NO: 974635 - protein, 73 aa, Homo sapiens
FRVMAPRTLIPSAFGGPWPYTQTLGPLPLHEATAAEVQEGSPGEPLGVEQEGPRDIGTRKNQKVQGPRHKFTR

SEQ ID NO: 974636 - protein, 42 aa, Homo sapiens
DGNEDLRADDLPRPAFESYEFHGGIVLPRLEAQGPTLAVSDG

SEQ ID NO: 974637 - protein, 38 aa, Homo sapiens
  misc_feature (7)..(7): Xaa can be any naturally occurring amino acid
  misc_feature (13)..(13): Xaa can be any naturally occurring amino acid
  misc_feature (23)..(23): Xaa can be any naturally occurring amino acid
KPATSTXTLYITXPTLALTIALXLLNPPSPYPNPPWST

SEQ ID NO: 974638 - protein, 76 aa, Homo sapiens
ELCSFSGYKIYPDTEALRRNHGKVFPVLNARCESAFPFQREFSRRYNSGSLSTERERTKRAHSERFTKRRARRAAD

SEQ ID NO: 974639 - protein, 35 aa, Homo sapiens
  misc_feature (3)..(3): Xaa can be any naturally occurring amino acid
  misc_feature (29)..(29): Xaa can be any naturally occurring amino acid
SRXGTRQEIIIIRGSRHGPLCAFGLTWAXYENIGG

SEQ ID NO: 974640 - protein, 33 aa, Homo sapiens
  misc_feature (9)..(9): Xaa can be any naturally occurring amino acid
MRDLGHQAXLSVPFITGLPYVYHHPWHCQERTG

SEQ ID NO: 974641 - protein, 82 aa, Homo sapiens
PKGFSVARRATRAKRRADFVAPGNLRGGRGQGFPPGILGAPFFFTKGFWGGLFFQNSFFSKFWFGGGVAQTLCKFFPFLVLF

SEQ ID NO: 974642 - protein, 38 aa, Homo sapiens
  misc_feature (27)..(27): Xaa can be any naturally occurring amino acid
IVVKIRRGGVEIAFRRFRTSRLVTNIXSSASSGGQLHF

SEQ ID NO: 974643 - protein, 38 aa, Homo sapiens
  misc_feature (26)..(26): Xaa can be any naturally occurring amino acid
APHNKGVMKTTPETAKIGKEIRLIIXHSYVNPTLIESL

SEQ ID NO: 974644 - protein, 71 aa, Homo sapiens
  misc_feature (24)..(24): Xaa can be any naturally occurring amino acid
RRQTLNLISLLALRVLAEQNIMPXATNVTFYYQPAPYVSDGNFSNYYVAHPPVTYSQRYPNLGWPVTNLET

SEQ ID NO: 974645 - protein, 58 aa, Homo sapiens
RTRGGKAEDKEWMPVTKLGRLVRDIKIKSLGGDLSFFPSPIKELEIIDFFPGGPFNDE

SEQ ID NO: 974646 - protein, 52 aa, Homo sapiens
MQGWRVSIEDAHNCYFSSWDKLDRPCFLSTHGHRRGREVDLVTVAIYLPDII

SEQ ID NO: 974647 - protein, 36 aa, Homo sapiens
  misc_feature (24)..(24): Xaa can be any naturally occurring amino acid
GGLLLRGQADFDGNRRSVFFSFTXRHSYNYFKDIVN

SEQ ID NO: 974648 - protein, 87 aa, Homo sapiens
  misc_feature (23)..(24): Xaa can be any naturally occurring amino acid
EPPTPHCTHSNRNGIPNAYLTKXXGYIQLRKGPNVVGPYGLLQPFADGIKLFTYRAPKTRHIYAMTLYITVPPLALTIALLLCSPPP

SEQ ID NO: 974649 - protein, 58 aa, Homo sapiens
  misc_feature (26)..(26): Xaa can be any naturally occurring amino acid
MHSSRQGREATCTIRPLFGEAFRGAXWHHFRRAFASQAPQAKPSLAFPGHFPLNLLYN

SEQ ID NO: 974650 - protein, 36 aa, Homo sapiens
  misc_feature (26)..(26): Xaa can be any naturally occurring amino acid
VKKRNECGRRALYPHAKIISGVNAEXVWPQKVSYPP

SEQ ID NO: 974651 - protein, 33 aa, Homo sapiens
  misc_feature (24)..(24): Xaa can be any naturally occurring amino acid
MAAGTCTRILKLEGLQDVYIAAQXQRGLRYRGS

SEQ ID NO: 974652 - protein, 36 aa, Homo sapiens
RAVRYQRRYHVKISLPEHLMTMNRAVIKGEQVTFYQ

SEQ ID NO: 974653 - protein, 104 aa, Homo sapiens
MHATRSYTHAGHGSSHTLYIPLYSHEKHTALGPQQGSEKRERPLFVKNLGHNVETLLSPQELVVAANGFYLRRVSREFSHFSTEDPLALHLGPTTSVVPLKKPR

SEQ ID NO: 974654 - protein, 37 aa, Homo sapiens
  misc_feature (28)..(28): Xaa can be any naturally occurring amino acid
EQQRGRRQDGSTNIQEEEVSRLMASLKXTDGVSDSGA

SEQ ID NO: 974655 - protein, 194 aa, Homo sapiens
  misc_feature (178)..(178): Xaa can be any naturally occurring amino acid
IWSPPQEVSLAVGGQLSLSVVSPPRSWWFFGGILHNLCDWGVLLAPPTTPSLYGLCGTYAFLCAAGGQTINQLVVCVVFLRQPVELMVLSPSLLVVEILCSQCSSAAGVLGPSCVGHPYFGGGDPYPTLCCSPPSPGGITVCVVVVTRTVWGATAANKEALLYYEGGARCQQPKRRLXFSPHTTFGRSISCCVR

SEQ ID NO: 974656 - protein, 232 aa, Homo sapiens
  misc_feature (1)..(1): Xaa can be any naturally occurring amino acid
XLEGVSPPGVGPAIYPRACVMTLCGAPCVLFCPGLLKGFIPEGALWGLSRKISGAHLWRRGLSSGLRPAWVRPPVGTPPPCGARHAFVAFAWVSTNDGPTALSPHLVRERGAPNERGVQRENVGHIYPRGGRLAARTHPLGVTPSKTVSRPLPGVSHTLSRSRAERAPSPRVSLREPHTVGLLSVGGPRLLWCHTHTPFSGSHGETHPARACPSRGSFPHMAHMFASYTLRV

SEQ ID NO: 974657 - protein, 97 aa, Homo sapiens
TPCQHQGAQTHFVAENVGELGAPPPPESGQTCSRDAVDRVLRPPPQPFQGTGMIMETVKKGANTHKGRDSPVSQSQLTDCRPHFLLNPSWPPLDSPL

SEQ ID NO: 974658 - protein, 32 aa, Homo sapiens
  misc_feature (1)..(1): Xaa can be any naturally occurring amino acid
XIFLICFLVLYALFLTLTTKTYLLPINLKTRQ

SEQ ID NO: 974659 - protein, 271 aa, Homo sapiens
TGPPGDFWPLPRDFLMWPFSSGPPARFSLDLGDSTLLAFGDYPRGVGPNIHRCPGVETPPRRSGVFFVSRVLLPPTQPASTPNLDLVFPVAWDHTWSKVLGTLALYCQAVMAPPPIWPTPQAYSCDPGEPVLLPTSWESPSLLRSLEAKDGPRPLLNEEFSRRKANTPYTAMSGGDTQLHAPSCFTPLSAYTGCVAATPAPRTPRLWEFNVKGEESLVDEPVSPRKLYPVPHPQAGPPPCPFLAWFADGPTLFAGYPDHLVRVWPGTLGTR

SEQ ID NO: 974660 - protein, 427 aa, Homo sapiens
GCCVHAARPSWVRVSVVYAEFAEGGGVFAAGDGFLFLGGQYKGREVPPRTVGLSTTQVVPEGGAPPTAPPSCGVFVGGGHLLLVVAVPPSLGENSPPTFGKYVLRTFVLCWWPTQQRHLGEKCSCRRSSQPASVCGPSLGARDPRGLGVFLRRRQVFRAPLLCGPTCLRAVLVPPSAGGRDEDLLSSRSARWWCCVRKNIFSAAFYSSRGGRSAPDEEHPTWCVFWEQHLLNEWLKFVGGPPHAHCWGPHIGPSRLGSRIAFLLRPPPVCVRHRGSRETPGLIGHNIKGLNTLIGCTRALLRKVVFLSTVYTLSIHMGLFRTIYLARSKCERALSPRGSPGLTEGCSPPTCPCEKRGTLVGLPRRPRGHSRHTRPLGPSSPLFPLTHPRGFLPLLVRWGSLWDPRGPLLTSPGPVVPWFKRQTPPAP

SEQ ID NO: 974661 - protein, 36 aa, Homo sapiens
  misc_feature (17)..(17): Xaa can be any naturally occurring amino acid
  misc_feature (29)..(29): Xaa can be any naturally occurring amino acid
SCTRTLKHLLVLPPGLXAASQSVVPRTQXASFQEFG

SEQ ID NO: 974662 - protein, 100 aa, Homo sapiens
HWRGAPPLLSPLGVWVGPGPARGAHRGPLLPDLTSASAHGLPCPGGTLAKGSRIGLTHRALTASTTEHGDATFSLLGPKPGCRVASLCDPLGASLPGGAV

SEQ ID NO: 974663 - protein, 170 aa, Homo sapiens
RAWLRRDSRRSFAGMLQGPELFSQKEDVVIVLHRMPPWFRDSYHTPCCGCSLVPLMAPQGASPANPLVTRHHCSPDPSLFEPRPQALLELTLDCYVATGRLGPPRARKISTPLLKHDMCLPPCFYMGPAPSLGVPHPWEPPRPIIGIDRRTSGLEAPGAQMAKGCTSFLS

SEQ ID NO: 974664 - protein, 31 aa, Homo sapiens
  misc_feature (26)..(26): Xaa can be any naturally occurring amino acid
ERTDPVPEDGEDVSCHDQCTETLSEXEQEEL

SEQ ID NO: 974665 - protein, 131 aa, Homo sapiens
MGVRRPVVGAVVHRGTLWATTGGLMPPHVRPPLEIGRGVSYWRFGWGDYKGAFKGTFVPPGGPLLLRHPGALVVVSLEGAHSPPQGDPPFWAPEFCAHGVFPRALANFEGVLGAPWCAHKAPTVRLSTTVS

SEQ ID NO: 974666 - protein, 167 aa, Homo sapiens
MLCLPAAPLVSLTSVRCINAPGTLPEYEDRGRCACEPRVPAADPISYSRRGEYIGLDMSVPKAQLSLRSTPDTAYSTERLRRKTHHSVHQRVLSSVHTWGTSLADLLYASTGYEYQLHPSLVTRCMPLAHASLVNEARTSFVTMLAEYDRHWYINHIHVEERLSRLS

SEQ ID NO: 974667 - protein, 157 aa, Homo sapiens
RGAFPFTICLSGVSRGQNTRVFVGARRAICTCPGLWGISPEEWFVAPPGGPPPMYTWRRWTRCVDARGRPSVFLRGGPGTFHGTQTTTAGCPNHSAPNSRVELDTQAGPAPRFATGARPFVFLAVGFALPRGFTACALRYAPPGPTAYALEIGWCHP

SEQ ID NO: 974668 - protein, 34 aa, Homo sapiens
MPAVRGYRPVSYRHQKEFYCSPPRHTVRDEQAAQ

SEQ ID NO: 974669 - protein, 102 aa, Homo sapiens
SIGDISQDPPLEVSKPGREVLQRASCSKSQQMASVTESLQASSWPRPMLGALIGVSSLRGRLGDTFIADLVVGGSTTGPDPDWCPLARSERLAQYQPSSLQN

SEQ ID NO: 974670 - protein, 110 aa, Homo sapiens
MGQKGVPRGLINQICYEMASPPSAFSQILTSSVPFPFYPLPHQHLHPLSLPNTPPPTLLFFGPLPPTPYCCPNPLGWGPGLDGPDPSPLPLSLPCVVGKPFVFWGFFFPE

SEQ ID NO: 974671 - protein, 450 aa, Homo sapiens
GLARAGVACVVRARLVGTRWVCRVGWRPGVVWGVACGCVVAVRSVVGPRLGVCAVWGAWGLSERVFWCSAGEQGGGVWCVWWGGAWGNVRGGVWGRGCCGDGVGGVCGGAPALCLPVGVCVPAYPEFWGGPPELGARVGIRAQGWSPSEARAWVYKRGEAPVVVSLPGPFRGYSEGPSGVVAESFWAYRWGHPFPQGNIPPGRPFCGAPEFPGRFPPGREALSREACVAEDGELGAPWGPPASRFFSGEICGAYPPTNVSREVVVLGAPPTPGGLAQRLDLFCGEVICGACHVCRCLLVFLSVHPRVSVTRSLPPLTEGPPFGSPGMPSVRHPGGVRLAFRGAWGTCRAPPPPLLYPFFFLVTPLHNSGDLAHGSFCESTQYTPLFIPMEGPQKNLKGSLPQDAHAEMKGYEAHFWGPRLPAATPVASLVEWEEGGICSEALEAHPSVPP

SEQ ID NO: 974672 - protein, 344 aa, Homo sapiens
VLLWVAYLLRVSTLVLWGSLPSCSSCWVGLLSLSAGVPPRCGCLPGGSFRCLSLSGGRSLLSRALFCCPVLLPVCPRRPLLFHGWVSDCSWGAPFWCRLCDSRQHVRGGTPRGGAPHVCCIVLAPLVFVAAVCVSPYARPVVITVLVGPGMSPGFSEAPHPGFAPRFLMKRSSWGETGFPPPLLCPPPRGGFAKHGLWLHPIGGFFFRPEGVSSLLVCSPLSGASFLGGEKGHLPTWRLYAPCVVPPTCLKGERKRLSSPGMPTLFCWVSPPMWDAAARVSSWFALCWRLLFLFAHSSSGGAHMGPCSRGPLERGVLYVPICPTRVGSRYPAALVCSTPPRVWV

SEQ ID NO: 974673 - protein, 150 aa, Homo sapiens
  misc_feature (39)..(39): Xaa can be any naturally occurring amino acid
  misc_feature (63)..(63): Xaa can be any naturally occurring amino acid
  misc_feature (70)..(70): Xaa can be any naturally occurring amino acid
MGRGRGGGINSKLSYKGEVPLLLKYPPLWERHQSFGGGXPPISPPRGGRLIVVSQPSSVCPIXAAAASSXMGGDKTPLVGAVSPPPPCCVMLAAVSDGQIMVVEALLASWADYLLVGEADSVGARHKKEPFVARREKGRLCFLPRRGGAT

SEQ ID NO: 974674 - protein, 147 aa, Homo sapiens
MRDVAHTERRQTVSALRETCFPLSQYTPTSWCTLQRVYSACVCVACALRARVLCVCVVLCVCSKNVPTPQKESTPRGVKRLLQPQKGSPSPEKPPGPEKPAPVSPKDFQKGSQKLSQPRKPLLPRHLAQKAISGHPLKVIKVFFDPV

SEQ ID NO: 974675 - protein, 223 aa, Homo sapiens
MACRGSCTRELLFPRFFNQMKTQRGTRCNTTQRSEKFPMPGRIGLQEHHRGPTGRGTGSHRLGGTSPKAPLEFNPLSSFGIGEASQGQVFPNLSFGACEFGTQPRPRVNHPGFPPGGLPLLPRGPFWARGWGSPQGAPLESFPQGVLSWGTTPHSGSCGVKGPKPKTVVAFRGTQGVPLNLPIGDPLWRSLETNQPLFGASIGGEPLHLVVNDEARERPHTHF

SEQ ID NO: 974676 - protein, 547 aa, Homo sapiens
  misc_feature (1)..(1): Xaa can be any naturally occurring amino acid
XCLRRGRGGGRPRLLDEGGCPVPVWGVSFLLRRWSVAVPSVCCRWCVCCRPTVVGGALSVWLGQCRGPVGAGCCGGARRSDRAPGVAVWWRVCGGGDVVAPGVWCGGWPVGTPCWWRAFRRSGCRGVASRPRRGVVRAVAGVALRGLFEVRLAAVRAGGVPLLCVPSLGVVAWCVFGGPQCAIVCCSAGVPSAVAPRGLASVSVAVGQVRVGCVVARGGGWLGRVVVLVVRSLPLGGGCAGAPRAELSFARGVQLCVVLIAGRGCGAPVWRCGPGLRLLRQACWESDVLSVVSRCGCMSLPLVFVVRLAIGSVPVVAALMWCLLVSVLRVCPLALCFSDCVVLVFSLFWRFSRCDLKCWCGAVFVCGGRPVSGGEVTAGRDLSLWWGMSLSWRFICLLCCCGRLYSSVMGFLLLRFLSRSGAASLCPRVVVRRPPTPRGKFTWHICGASPPPLHGSLSKVLPFGPLGLNGPPRLPRTSLALVATVPGPSLSHSRPYHPFWCHHLFTGWPPLVGAPRRALGFHWCKGPWNCDYPGPIRNLPGKPVFFW

SEQ ID NO: 974677 - protein, 149 aa, Homo sapiens
  misc_feature (96)..(96): Xaa can be any naturally occurring amino acid
LRCGNLAGDMVMWIVVRELGSSVPKRMRVKKTGPEKSAILPAGATPPRCCHDNGISMCGYCPLRRSRCGQSAHEIPARAEVQWSRRPKVPSSLGCXMLHSALPGVELLGSGVQACASHRFQRCVVPWRIHHRIVWHPDLLVRHPGIVNR

SEQ ID NO: 974678 - protein, 215 aa, Homo sapiens
LSSRAPCSCRSVCGPGVCLVVSCVRLSCGGCPAAGCVEFYSRDFLLWGGAPTQSGGHHPHARWRPLMIPSVFSFPRDVPCWGVLGLGRTCRPPPLVVCVIGAHFARGGPPRLGDAKSPPACLCGSMTSAAVRPSNLSPPGGGIIGWALLFVGVSTATTGEVLLLLLLVVIRRGDQHVVGLAPPKIEGGRPKAIVRWAAPEVPIVVRTPAFVRPHD

SEQ ID NO: 974679 - protein, 275 aa, Homo sapiens
GCAPGVRLPSVSSPWTRTTPGPQGLLAEVPGDTSPGPARPSGADQRGDAQGMNAAVRAVLRMGIYSGGQGVLHLRGLPGHGGQEAQTSQRPTGRGVSSILQVRGDDHWQCAVARTSARWGLAARNGLALPNRARHALAHSTQPLCCRIELGNRRRHSNEQANTSFTGNRMWAMGAYMRATHSEHMDNGDHAHPTHTGQARMTTHNTGPYPAQTRWRRPTAWRASPSPDTNRNELLAGPTRNNGNHIRHTDDTSRTADHQGIHISQRSAPKQPTTT

SEQ ID NO: 974680 - protein, 440 aa, Homo sapiens
WRHRVVFLWCARGEVLLVFARGVDGCRAFCILGGLSRVVASAVVVSVGCYVGWGPPAVFVSVALCAGCLVVWFACGVFRGYFVRGTLSGVACFCECVGIAPAWGFAEGGGAVLVRRVRRVGAGECPLGRAGCWGGRWGVVVVQAVRGGVGSICGLEEGASRPLGGVAPVFSRDSGWVCSPAYNFPLCSGRRPRRGSASSRTGVPPWSLGRRLCVGAPIGRGSLFGEAGGDGALRRAIFVGLALRSLYGVGAAGVCLAAARRRGRVDAPRVPLLSSFPPERGGFSHASLIPRARGGCCIECGVSQACCVSHAALADIFSLLGVGRLSGALRGVWGSPPRALSLGAPTPLFLSWELIGHLAYIHPLSCPRVGVYFGEGFVWLFFQKKKGPSKSRKEYHLHRDTMFLCGGEVILTPPAGPHAGTLPLFPRPALVPRFSVPPVD

SEQ ID NO: 974681 - protein, 118 aa, Homo sapiens
  misc_feature (59)..(59): Xaa can be any naturally occurring amino acid
  misc_feature (69)..(69): Xaa can be any naturally occurring amino acid
  misc_feature (78)..(79): Xaa can be any naturally occurring amino acid
  misc_feature (82)..(82): Xaa can be any naturally occurring amino acid
  misc_feature (103)..(103): Xaa can be any naturally occurring amino acid
MGSVGETVPATEAFTPTGATSSHRGPCTASVLRRRSVENLGTQRPGGHPKLTIARGGTXLVSSPCAHRXPFYLPILCXXAVXLCPMRGVSPIGIAWCTLDNEXYSLQVVPEVPTTTNQ

SEQ ID NO: 974682 - protein, 95 aa, Homo sapiens
  misc_feature (1)..(1): Xaa can be any naturally occurring amino acid
XSGVVPNSGAYSFVDKTQVFLRELNVCFDIYPLEHELFSKPRSRSSRLTPRVHYRSGVVTNDFFGGVLRLPLPRGAAHQKNYYGVAPPSGGFVQQ

SEQ ID NO: 974683 - protein, 310 aa, Homo sapiens
GSCILLSAGASWLLLPFGAVWVWCCCRTRLRRSLVCGLSVSVLSCVWADRVVACSGGCVPGCWISLPAFCLLLLSSHSTSSGGGVTPPRVCFVVRSWGGSSPSFLVCCMLERVVWLFPCSRLSVSRTQSLLFRARGVCLPRLPTEGAVSVCLVVSIGDVPVVCLPRPFVMGGVVFVAPVFFFTSMVGVGLRRGWWCVFVVSSPLDGVFFLAVRGGRCSVVPLWGSCCDCRLLMCARVLCYRVRSVVGLDDPTGVCLSSSVAPMVVVPPPARCDLPPPLLLVWGLLLHMAGERRVLPHLRECWAVSSLRGN

SEQ ID NO: 974684 - protein, 270 aa, Homo sapiens
EKQADFLDKQMSRDEHRARAMKIPFTNDKIIKPCLWTEFNDTACPKYQLSEAQSEPHPEDIRAPGLGELKMAALVTAVKRKLDLPILNLERDVEDLQLLTKPGCCGQKVEFLRSSGQMKQKVREPVPGGVWAGAEMRTDGPSFARVSMRLQYCLGTGEVSVRHPPHDGRDSRPGQERKPRDRRKVSLGKKGVLKAQIKELNRCEKGWMCDLELDLQGGLDAFLSNISSQDWDDWAVSVQEEEGWWLSHSGGVEVHGHLKGKVYLTFCEKV

SEQ ID NO: 974685 - protein, 45 aa, Homo sapiens
MLVLRQKVKLERLDPPRKEYKVLAMMLAVAPVDFSPEPFINLKPS

SEQ ID NO: 974686 - protein, 107 aa, Homo sapiens
MYDETHVYSTYAMLVVLYHMVETPLGLRRFPNYTVGSRAILDQWDLAAQLISRRYNYIDNGGRSNNALSEEVLIQWKLKILTKDDGIYGPQHRSSKKRRVGRVRTKE

SEQ ID NO: 974687 - protein, 268 aa, Homo sapiens
RLVVGGMRCVRAGCSTGIGGSRFPGRVSRRSFPGLVFFRLLRGTPSALPYGGFTWAYLPWRLVRPHPEAFSGGQPPPMWFRAIGCPTDASKGVSSPPGRPCALCVGPRFLSLPSRGVPSFLRCGISVASHPWARFPGPPRSPGQDGGIFAPLPVSFPPEFRGPLPESGPPRPENAVLLSPGTFSPSIAVTPIVRAQMGVIFEENLGEILPPWAPRCRNPPPYAVGLSSAEHWSNYALSREIGKIVPLKASVISENIRHLEIGMKTLLA

SEQ ID NO: 974688 - protein, 107 aa, Homo sapiens
MGITGQGFQPAGAHFPMVWSVNWEGPELVSKSHPQSGPTGEGHSQVDLAERIPLSSMIKRAPEQRCLHQPLRPHNPEQGWRLGSGYQGTGPWGPSPPGFLGVWTHAR

SEQ ID NO: 974689 - protein, 307 aa, Homo sapiens
SSCSRGVGCFRGVLLGCSSCPLCGSPLEGSWSPRWLCRQVRECGLLLFRVVQERWLDSCCVLYVVGWWGPPEIVCLLCAGCPSVGGPGALCVEGGEGFQGFCPHPGGFSGAPVVSLVRAPCFRAHPGDVGPPEQFPGGVTTGCGRQEVGRHGLTPGGRDAELFVPRVGVCHSRTEVWPVRTFCLHPTDSVSGVGGGLICILACRGWWASPALPHLWRHSPGGDVSLPTGVHACGGGAVYSLVVVFSCGERPVDVLLPLAVEGRPWGVVPTRTQGCDGLSLRLSVINEGRGSPPPTLLWRGLSLLSRE

SEQ ID NO: 974690 - protein, 126 aa, Homo sapiens
VCVCVRVCVCTFPCLSTEHTSAQATVPPPHGLPVATMRRAEATALAQQDEGLVTRGGSRAGSVCLVTPGGGQSRVCVPRDPCGGGQSRVCVLRDPWGVGRAGSVCRVPCQARGSTEELALWVARTP

SEQ ID NO: 974691 - protein, 247 aa, Homo sapiens
FKWRMTPVQRGGPGAPGGPGMGNRGVFRGGFGRVVRVRGRGRGRWSWPGSVARGGPVVESWSWHGRTLIAGADLGSRGQLNDSGSRGGKSPNLFSSGVLYREIPVSLLSVAWRSPFLKCNEGVWREVSVQCGNAIRLRSCRHRVVQGLVVAFGGATVATLVLGAWFPLAAWVGVDVGHVRWCHSSPGLELSHSSPSDCADGFPGGTSCGRAPECPLGHVTSAVVGSVLVRLVPAHQGHLDRCRLPVV

SEQ ID NO: 974692 - protein, 220 aa, Homo sapiens
  misc_feature (63)..(63): Xaa can be any naturally occurring amino acid
SVCYPVAAYFLFLPRRDGCGTFVVALSCDVGTRLLSCRNKLRFGSLSVLDWRGVFCVISHSLXAGGVMHLLPPVFRKEVWVPSIYLCCWRESMCVVGLWAVHRCGYVTISLSFFTRRVPTDVEWLSPTLLFWFVWFTPTYRRPSEMHPDRNEESVVSVLYGVEGKRGAAAPQRRISSSGHISVGTFLSLVCLSPRKREEECLLRVFPHPKRSAQQIVLLG

SEQ ID NO: 974693 - protein, 335 aa, Homo sapiens
  misc_feature (310)..(310): Xaa can be any naturally occurring amino acid
  misc_feature (320)..(320): Xaa can be any naturally occurring amino acid
MYGETGHNTSWAFGGNPKGEQGGTNTQFWTVPNTGISANAIASERGQGAYPCGLADLGGRIPTFFSPLPNNKSSLKAGPCCGQLPRFTRNGSFPTRQYTKTNGVLQYEFGAENAPMEISAAFLRTTYKGEMLPPEPNTLRIYFERAPKFPQIVRWTLRRREAREPPTNGTVPHVSTNYSGLDSARGHMNKLPVHTTPNRERERWAEKENIPGNALAPAACASRAADNTTRRAAKGAQSNSPASRTVLPRRNLPHGGRPRRYYILAGTNYESLHNRSQVKTGANLHEAYSVRFIRYTHKYKSPWSVRPRGXVLLMETTPVXQIVVASAPRVIHHEG

SEQ ID NO: 974694 - protein, 216 aa, Homo sapiens
AVFDDLIFFVPRFSRSSAAAWHPAAAFLALSSPLYPVLPPSSVGLPLSGLVVARLSGSHRCFCLRVCLAPRVFSWMPPVAAVGSVLSCLCGWLPGSPRGSVLVCLFCVLSVAACCSRCRLSPFAGLLFCWCVVHLFSVLFSCCCLLLSFSWSYASSAVALVVLGLWVGSSYSSCRDCCVSPVQMLVFTLYPRLWGVSERDPTMFPEFFRGRATPLL

SEQ ID NO: 974695 - protein, 363 aa, Homo sapiens
  misc_feature (17)..(17): Xaa can be any naturally occurring amino acid
MGTHLGKTAVVRWSHCXGEYDRWGVLGQYMGKTLSPRLCWAVVLLLREEQPEAFVWGVHGGGLSPGGRVSRYFPGGGAVPPRGGAMGAPAKRGGLIFPWGTQGPTPPQGAGLYPLGARRPLGGGCVLPPGGDPFAPRPWSMFLTATRGPPTQWGALWGGGLYTQAFVLEDRALSVAPSWEGHSGFVPSLGGPLIVRVPPRGGRGPLVVCWRSLLRPCALWSHERRGSGTTPRDGRDLRPPFVCVTVMVNAPNEVLDDTNVCCVNSFPHKAGEYIVAALPQFYPPGFRCQATPRDEHHVVVRQTGGATTGRSGLTQKQGEFQIIKRGETAITYHLLELDHSSSTWISINQSGIIRRSYTAHDDH

SEQ ID NO: 974696 - protein, 547 aa, Homo sapiens
  misc_feature (35)..(35): Xaa can be any naturally occurring amino acid
VVVCERRRPGWGSRWLRDSLKRWGCCCCPPSDIGXGVLYGGSVTRLQLLGATGFGVSHVSTCGPHLRVGGFLCVRRLASTWLLLFWGWAHKCVRWRARGPTGVVGHTSAGCPGWVGATHCPGFVWGTTSSTGCFSGVCWSQGTLFVGGPTAKGLSSVASMRVASCWVEHPCGIPAMRVAWCPERVSGEWGPSGVVKPSLGHPLPVDPRTEVVSCAWSPPWEVAAHAWVGATKVFVGGATPLQCPALRGVCGQDANRAPPPHLGGGLARWILSPPRRVHNPTLIGDKGKWGVARDGRGCSTGQQMGDSTCAPPGPHRAGCPQRVCFTGISPLIACVTHTRRVPGTVEEDTRGYSRLRGPLWSLDHFFPSEFGHTHTQLSGDSFTVHGPTLRERGPPWDRHSGAVESSRRSHTYWLPELAGPRATNKRALSAAFLRVTVGHTPTSAGTLPTKATRTAGLVCAFLKAKRPPRKLLAYDKALRARALRPSLPYPCSGTLSRGSPRNPPSAPPFLDFLWPHTRRLPMSPAPPAPQPPVGNPIKAPFPLNKNK

SEQ ID NO: 974697 - protein, 114 aa, Homo sapiens
MDLWSFNTRSYRGVCYTRPVVRFAVRGIFVWGLFSPSYNKWGAISGPTAHKHCFFPPPPYYDAPVCISCGIVFEANRSSKLPLSLMELWSRLCGPPYIGGERTPTRPIYLLGGY

SEQ ID NO: 974698 - protein, 304 aa, Homo sapiens
MIFVVREDYQWKYVCTRSLVFSVRSCACLQCIVYLGGWLFALGSCCLFVWRCYQLCGLFCDRYRRCVGVCAISYVDLFVRGGPPLLVLSRPPEGVTHTVVVVVGMPSFLCPRGERWGVRTDTPAVWGWPPPWVCPLCSVFLPADGVNLLVVVRAAPPVECCCGAVDLSSSPRGGPHISWGPLPKCFPEEYCVCIGAHMRMFVFPVRVGPKPVVPFVLLPRPQLVCVRPPPKWRNVLALGFFTLGFSRVDFYAPREPPCPRAPLIFSVPRAYLPPPRDFGGLPTPRACHTIWGTGHNVFASEGLG

SEQ ID NO: 974699 - protein, 331 aa, Homo sapiens
LLASSRPEPANERFALVAQLECNGTISAHRNLCLPGSSDSPASASRVAGITGMRHHARLILYFFVVVVGGGGPSSVGSGGSRTPEPRVDPPCLGLLKVRGLYRRVGHCGPVALPSSFINHFHYIGNVVVFPIKGKMWQTHFPPPVSAFTRGLWKPKPFRDVAWAHVGEPAVRGAGGHTQGLSYPGGLPRGRGPPGAYPGTGHLQGALPWRHLELIPGALDLEVYPGPPSGLGLTIFWTASAPELPAMGPMAPCVPVIVLITGLPGNWSPIAVTIRAGEPHDPDGLNSQRDYGALHYYPVLGHPRAWCGTQRTRGEKQGVTTEEPPQRCTTT

SEQ ID NO: 974700 - protein, 224 aa, Homo sapiens
  misc_feature (1)..(1): Xaa can be any naturally occurring amino acid
XRIDSGVVLMLRRPGGVVVSVRVVVFDYRLCVCGRVSVRLCVAVARGPCVLRLLFGCWAAPRASLVGRAVVVVGAACPPVGVRPLLVCPVFCVPLWWDPLRGVSLPRVCSLFVRVLLGAEVSGSGGSRVVPQVFGGMVVWGRQSWGCHHRRGVINGGSWPCGGGGGVSAVAGCGAYVQPCTPGRARGPLGGCLISSGNGSFPPLFGPERGDSVLPPRGLWTAGP

SEQ ID NO: 974701 - protein, 329 aa, Homo sapiens
RGLVGCGCWSSVAAGLVLCCAPSRCLARWCLVGADTCRACVIVGVRRSNFLYIPVSPRRCSGVLLTITTTHISRRFIYRGGSHPPVVCGNPLPWIWGSFPPPPGVVWGDPTKDAHWAVLCYINPAPWSPLVYPFFCHPGFSLFNKGFYSSEAAPLWVFVAREIFLGRLPVNERVLLLLPPRETVLKSVVLFVTGLPQGPPPDLATRTLFLPPGEPPFMRRPHTPSWEERPPPRLCPFVGSLSCPTCLSARVSAGRLFSSRRRCSVALSGGLWGAREEMILISPRGAPFFRRSAPHIRGGDFFPAAPLAWGPLTIEKGCFSSSRGPLSRR

SEQ ID NO: 974702 - protein, 205 aa, Homo sapiens
LRGAFFPRSRKRSRDRAAFCAVSLGRHNTERPGDVGRGEAQETASQQCVVHCGSLGLCLLWLWVSRGKGLCRGVWVATVKTPVGEHEAAKVQCVPEGQRPAAREAPHKIYVCVAPQARGGLSWGLGAHSAVGRDASVRAGLCPQIHEGGPLWRGVCLWGASWGASYVAHTVIGETQRTQVAQTVGAIGDHKYIPTRDLYPMGRSL

SEQ ID NO: 974703 - protein, 134 aa, Homo sapiens
MMMSLLSFLLLFMLVVLLSLLAVCSLVIVALINRGCGVWVLFTRPLWCPVRLSSPLCVAGLCLRVVAYCVGIVVPALFFLLFLLPVFSLLFVSVVVSLRGVFCSPTYYWCMLVVVCGLGVMWCVYRRYVRVRVV

SEQ ID NO: 974704 - protein, 136 aa, Homo sapiens
LSTQVVGVSCDHASPWWPAEGDTRWGVLRPTTAARDVVGDSPPCGCLSPVHACLPTGECVDVRCWGSARPCGAPVVVVVNVVFSLGGATHLCGGRSQSGLRESLCFFASQEGVVVLVAWGRNSAVCPFGGGSPRPH

SEQ ID NO: 974705 - protein, 76 aa, Homo sapiens
MARTFKFLVECLGTRTHNSTCTTTPKEPPTPPEYSGDGQSGVLRTHDHPKILSALSPPEARVPLGDPEAQLKVQEF

SEQ ID NO: 974706 - protein, 151 aa, Homo sapiens
MGACGVRPLTLYGGRPPSLFFVGPDFFLFTPAYYHGGGATEGGGSGPPRLWPAPHSCVCYQHPGGVDFVFFRVPAKCCLVAAFIWGGHDPAPWWLPLASSPRGGVVSPLLSAFFFLVVGEPNQSRLLCALLSALLGGCLWTETHIIVVCCL

SEQ ID NO: 974707 - protein, 198 aa, Homo sapiens
MCPRGGANDGDTSSHNGVFPAAVIPVLEYRLANPRAQVKPRKKGPPPFVRPESKKGNPWGEKAKDLAMHRTSPLGPPPLGNGPLYQGQRPSSFLYYRLEVPLRITTVTHGPGPPYSYLSCLNWPHQYQTRGPNAREVSRDCWPRAREEGFCAKGDRPHEETPLSFGPRSLPPVHPPGGDTKEASNLVVIATTDSGSPI

SEQ ID NO: 974708 - protein, 376 aa, Homo sapiens
  misc_feature (329)..(329): Xaa can be any naturally occurring amino acid
VPPRFLRAQRGPRAPTKKGGEHLTAKKRRKKVVWCCEKQPAQSCGVLEKERKSNILVVKEEEKCGEKSGPPPAAEYNEAVGTKRMYRRRKIKMLGGKEREDARFSGCSTRPSAGDPPPQGRRTRRQHRDVGATILFGNMEVSYTQKRGGYFRFVLFLWKQRWEECFFLVLWKNLCAHRRIMVYVKKSCWPHHVFMGEENNCSPTTLWKSFNRLEEKKICVFTTRRFYINTFAPVETNITVFPTSGTAMGRILFISPPRGDTTQKMCGCLPHGVAHKIIWGTRTHNIGDFVYSVSHPCVKNASQGTLIARTWGIHIAFFWVSVFLCVCLXVFISIKKYTRSPNISRDIREKSAFSNMGSQHPHTQGLAHTISGEEKR

SEQ ID NO: 974709 - protein, 332 aa, Homo sapiens
  misc_feature (8)..(8): Xaa can be any naturally occurring amino acid
MGRAVGQXLLCVGRYWSLVARLTQWSACLFLLAILLCLSSSRLVELASLLATLLDAPAGGGGLSPPSPPSRGRSPTLVAPVAVPLVGRTPTEVVPGVLILPPAVSMELFYVPAVENVVTERRLYLCGFCLSASLMCVILLLMGVVPDHRHCGGCTLFVDGNEGDASLVGGEHLVGGGYPPVGLDLPTWAATCSLSEILLSGAADSPPWLFCGVFVPVPNCSPRLPPTVCAQGGFATPGGPPAAVWYTCLSTGRGLPLRRIVLVPTRVLRRCPKSKPNFRQGHTPAPTPCGHRRQGVHTLACDYRRPGPPVGVRLFHENVFPFLGAAHTFTRC

SEQ ID NO: 974710 - protein, 226 aa, Homo sapiens
TPGGPAQVQEDLIRRKAPSPPEDTWVGGKQCFHVTPPATPLAYGKSKELNLGVFRLDPGRPLKAKRETLSPAVSVLGEGDIALTGAPRPSWHSDTPGHPSGAPFATKSWAGLRVWGRRTPPPERKREPPGTSGSLPSSDTSHPQLVALWPPRPTTTHPVHFIRPRAMSTLIFIGHFAPTCPALRLGVIPIWFLTTPVFIVCSSVPRCCALGTGHLHGLPALVELVV

SEQ ID NO: 974711 - protein, 228 aa, Homo sapiens
ALDLSNLERLLTVLWGLYLDPPGLHTYLRSQMSPVSPPPVSPNWGTREVHVSSHMLAASPTWPSIPASHQCRYLGAEKALFRALKTRGNHPQNMDSIFPLPTFIGRAAAQNQGRISRYLANQCKYCLTNRFFSEVPTSVFGEKLREPHVEERLSFYETGEIPRKNLDVMKEAMVQAEEAAAEITRKLEKPEKERFEEGKENGWLHLPSRFPGNRRSTPEECEETSANP

SEQ ID NO: 974712 - protein, 157 aa, Homo sapiens
VYLFMPAFGKGGPLKAPPQPPPPRGTLLEGSHLVNGLPKPPRPPWREITFLHPRPLLVWKDPRIVALTGVVPLPKHGPRGRSLLGFSPGLVHFASFLVTHIQRKAPTAVTRTESHIHIHPRPLKRLLCLKPVASATPCSLPQRSPLRLCIHIICVSQ

SEQ ID NO: 974713 - protein, 204 aa, Homo sapiens
  misc_feature (108)..(108): Xaa can be any naturally occurring amino acid
  misc_feature (123)..(123): Xaa can be any naturally occurring amino acid
YEDPPAGTPWGPICWRPRLFSCHLGSSPNVPWEIVTKRDPHGFYTLPRRAHNLWRRVSPGGHALVLPREVKGERCCLPCERTRAFGDESPLPGSRIFLRPLWRSHDNXPEYLYSPSLYTRMLXGTNEFPGRNFVPPSARPLGLRFWGRIFLPGEHAKGEGRHMGSAFSSSLKDHDDYSFKGHWHVTHSVEFDILFMPTPLAYHV

SEQ ID NO: 974714 - protein, 309 aa, Homo sapiens
MYTVWPFLERQSRTRCLRLFSGSMFAAWVISAGYRAGFCFGEVRFLGDLRGFQPFSRAHMTVGQTEPESPRIWIPELGRFRKSAGSPWHLQRFCQATWNVVSSGDFDEFKKINASTPNKQKGKRSESSVWFFCEGRILVSMHTRGTSSPRYWYCSSSPCWSFPGAPGIRPGFLARGIPTWGSPCPQAPARTCWAQSLGLAGPSPPGDDPPRKRYCSNPSNFCPQPSIPGLPPRFPPGPGGPPPPYWAEEHPPPGTDGPPSLVLRPSLLGPPTGDPPWKRDSHGHAPSGMRPPPPGMRGPPPPGMRPPRP

SEQ ID NO: 974715 - protein, 328 aa, Homo sapiens
MCWCVLASLLDRCYYYPRCLLWAGCKGFCRPFSRLRRRLGIRQRPWRALRIGARGLALGGPRVLRGFPTWASRPGFSPLTGARPWPRLSRRPCPWFRVMSRPPIGPLGQGTRRSKSLGRKFIVWSAPAHFRNPEILWVLSLGPFLKDGSFERIYAPGPGSSDPGARPQRNPGFQKPIVAYSGDYPMGPSPVLGWFKWLPQRRLRHPPIPVGPLNPWPKRFHIVPRCPREANFGGHKNPAKPQNWSPLHKVNKAPAALVLERLNALHTPGATGTRFRTLGLKKAAHIEMAGNRVSCYTPQTRGLHLPPLGNFAQGHPLNATFYKTYTAT

SEQ ID NO: 974716 - protein, 162 aa, Homo sapiens
MSPVVFYPHSFLRCIGCFVLVALSVSVSVLSPPYLWWWSSCAFFPAQECACGPPNHPACVLLLGAGPRSLVGTPWGALFRRLRVCSPNRVVAPLLSLGAPPCAVPLCGVFLSIHVWLSSFFWGSPRCSSLPWGDICCGCVPSSLGGVSRCVTALFPGRDVVE

SEQ ID NO: 974717 - protein, 104 aa, Homo sapiens
MSDSPPPDEFYGPHPPLEEELSRAARPRMGYISACMAPFKRRFVYPTGGVCLLFSWEWRQTVLSAWWRAHLSLRVVRPSLLCGTVNSGWKATPGNQTVLCRVSL

SEQ ID NO: 974718 - protein, 315 aa, Homo sapiens
LGTRCKSVGPPRVLIPCEHFHWELPSYGGLAPPPWGVVLSPGVSWYHGGLLGAHTLSPPPSCGGGDTSPRLDFPSRLGDLYNHPPERRDCPPPEGLSLCERHTPLYRALIKEPSFSTLSVPRALVWAPYKIGGPTRNMGSTSTPTNRCCVSLETLWAPRRCRPLLSEREPQGCAFWASARLHTLYTRAPSLDPSARRSPLYTRDFPRETLYTPPRYTPGPTAATPREPPRLKVKAHLSFEEPTGRGPLGRTWETLWPTAHPFEGKVSHLEPPSHSTARGNSRPPQGERPHPHIGKGANSPERPRRAFATLPSFCF

SEQ ID NO: 974719 - protein, 192 aa, Homo sapiens
  misc_feature (71)..(71): Xaa can be any naturally occurring amino acid
MRRSVAESDLHQQRVVSPIRFLGFRTNTVWWVWGLSPRGRGEPRPLSPSSVSRLSQHATALRGAPLCVCYXARIYIAVSSPRCAPSSQLALTWPTERESVLWYTLSYVSLVTGVWLPLYSESVTELSFAPTGSVSVTVLSSVRAHYSHSPQAPQATRFATAVYSSHLYHTPSFYHHSLATVSHTLLNTTPLS

SEQ ID NO: 974720 - protein, 149 aa, Homo sapiens
  misc_feature (127)..(127): Xaa can be any naturally occurring amino acid
MRDRPLTSFVLGVSSPTATTNIVLSSTAPQISHSPLLVVRPFFLHTTGGANNTSQIFFYNISSSALSSTGSYFVSTDRLVSICYLLIFCALYGATHSLFTLLSGHTLTALTQECRDSLSYRHSLCSXKERHFSHTFCDTLSTLSETVVV

SEQ ID NO: 974721 - protein, 422 aa, Homo sapiens
  misc_feature (275)..(275): Xaa can be any naturally occurring amino acid
MRGTTLSCGEDVSWCARTEFRVADAACGTPRTPPGCLLAREGGSPPPLVVWKCAPAVRYCCGQFVAPWGEAPAPRGVSVDVVRPPRVVVCGWSAVAALGRFWRVRHWGVLQFCVDQERHVCVGPRGGGGVAPPLPDGGDAFSVVLGAALRYRRVGVCLVVESPLLVGLRWRLPPPAAVCVNKDGVSDKGSGSPLLGEVSSGAPGVDYGSHRTAAALVRGIVKRAIGALCLPARGAPPGGGDTHLFGGPATPRVVGATPRRVLRLLASPPAEDGCXIYVCVDKTPLLGARLGVGASSGFRGDRALLAWYYHVARLFWRHLESVFERGRERAVRRGWAERERGGAARKLSLACSVLTPGTVSPRGVCRHSVVALLGGPSPLYSSEIVCGDIVEAPHTLCDWGSHTQAARRLSLDELFPTVCVCS

SEQ ID NO: 974722 - protein, 164 aa, Homo sapiens
  misc_feature (155)..(155): Xaa can be any naturally occurring amino acid
CSGDYPGPFRPNLAPAMPLYWIAHTASNASQFAELKERLIPLLVKSWTDGPEILEVWVMLPLLIWFPASPMCVESFSRLSPLWVALLFRDMSTSTSSPVGVLSKASGTRRLLELARSPQSAPESSRRPKWILSPYTLPTPTSFNPVVEEPVSRTXLFPIGPFKF

SEQ ID NO: 974723 - protein, 110 aa, Homo sapiens
MSKGFPPSVVVFIAVLAARGGAPPGPPRCPLAGRLSRGAWRHSVLSERSFFKGDSRPPAPPWDCLGAGGAPRSPPGSCGRFFWSALFSGGRVKYVVYCKMLPTFSQCHHV

SEQ ID NO: 974724 - protein, 273 aa, Homo sapiens
MCPSAGVSLDRLSRGHPAVRGIYFSQRGFLACAAAVWGSTSPALFVAPSVYLAGSFPRHSGGRLSPGGSPPNCPGEIVGNEPLLPLVAASSSLRPPRVAHRNRHIVGPTGAPPLGCPGPPWAFLPPAGCSPVVLATPVLWGLDLRPPRSPTVPCVEAPRPSTGGLGTPSHGHGAPLLAGVPFSWEDGYPWSDPPIAPWWPRTQRGAMAPLKRPLLVRLGKIWGPPCLPTPAPPLVAPTFAGGTFLCSGPLGLVPLGDLVGFTSGDLLGFALPR

SEQ ID NO: 974725 - protein, 114 aa, Homo sapiens
ASSLPPLIVLWVVPLCLLAEGVLLLRAVSCSPFAGVCSCETTVHSVCVRGAHCLSKHSGGGRAATTPGVCSTPPVVGTLSSHSGVLRGELMMVVLRRQFGPRAATTNIFSEMPA

SEQ ID NO: 974726 - protein, 172 aa, Homo sapiens
MDTQHHVKRKMENRDYRDATGDLLLMYGLCSHHCYKYHPPRSQMLWPMATESYQDVFEFPLCPDAQMDPLEPGPFTQSSYMPMPPGLAQICLPEILPVRKVASESSSEEEEEENEEDEEEKESEAQTPRKKGLIAYARTTGPSFGPYHDHWLLCPRVPLSQPQRKREYNNKK

SEQ ID NO: 974727 - protein, 402 aa, Homo sapiens
  misc_feature (246)..(246): Xaa can be any naturally occurring amino acid
MSASQDNSPSVIDVDVPYTRIPTGCGKKDLFLPPPYAKDDVLSAPQNVTNPAGVYIGPPTTPTPRCAPPCGYFYMSSAAPYGKREGRPHTPLVMGEEILPNGVGKPRRRPPLVWGPHREKNTSVGEHWGPPPRRKKKASFVTTPAPRGETPCGGRAPQRWVLFAPPHRKLYTEFGSSGDRCQLSAGGGSPTTGAPHKGAYHHKKGGVATTPQLPLLGAHTPPNRKDLCPPPPHQGAPPPGEGRSGXSTTAVVRPSVIFLAAPHMGNSPSAFACVSDPSLSLVWAHTRPSRGAHRKKGYATLSHPPLSERLPHHTEKSVYKKILWVTQGLYPSYLTQDPAHTSLILSRTPYASPPLSLYEPQCLGHTQRAYHTPLSLGGPVVSHTKWVYRVDTPEDTLFSSPV

SEQ ID NO: 974728 - protein, 359 aa, Homo sapiens
ALVLLFFSRRERQVAAGRVSTRRKYIGALFIYEMCGHRQLSRKIKCVRTHEPFFPGTVTKFLERFQGPFLEPGVPKPLARETTTVFWAESPRCALLVARPPVERLPYGILGSPLHQALYPCGLPHSPAYGGTLDAPEYTQLLGFAPKPLGPDVRLFPKQLEQEDSRIVVPRTNLPPEFQRISRYCGHHVCPSGATANCYGRLLGVTVTPFSRPSTLSSQAPGSPVLNSGHPGIHRHLRVTWTQTPSNQYVCSITPGIKMACDPPSGRAPEMMIRELAPGSPTCSRVSYRCLRETFVFRRRYRIPLGKAPSQTGGSVVSRLPPWPTGSLLNDVPPDPHARGTPRLPVRKKVLAPRVNLTF

SEQ ID NO: 974729 - protein, 321 aa, Homo sapiens
  misc_feature (246)..(246): Xaa can be any naturally occurring amino acid
MLVSTHRTRGGSREEKERGRRNAALTILCNLLSSFASPLFFFVAAGCLTYSLSVGPYTVGSVSSLSKVTPGPFSGSQRTALCSHSRTPKGDPRRQMAFPGPSGHSQASIRSSQVALDWRVPTLKTGPYPVRPAPELLFSIHGDLWERGFFLHAAGKFGGDFLVYPGDPLRFHPPYIAPCWAPEDTTPPSQNLVASWAPLETTRYERALAPLVSATPDGKGGLHPPLPWASLQWNSRDLGDVAVSAXRALLDVPQLFSGRSRTSSYPSPRVVFDSRCFEQLTSFLMFFLVSKATYWLCFCRYLISPCELSREWGLGLIHLFF

SEQ ID NO: 974730 - protein, 228 aa, Homo sapiens
MGEPTPHGVTPTHHVLPVGFGSFLYDEHALSSSLEDRISTISTSLCVELPPVTVSIVEDICQEPPFGETHTLGGKSGGPRFSPFQDVEPESQPGDLLLRTLGVQITGAPEHRGQKRTQTAPGPKEYVGDLLSHLRSQAGGREICHTTPPRPAGEDGEDLYICWCCPWTSQHDVPMPNPSPKTHPPPDRWMAKWWFERPKTTQDFEAFSPPKPGTPWGTGGPIKNSEVP

SEQ ID NO: 974731 - protein, 374 aa, Homo sapiens
LFALLRLVWVLFLIAPLSSFLLCLCLSVLFVVLLRVFLLFVVVVAITSFSLVVSFALFFLLFFSWSVLLLVLLLCSSSLLFLRVFFAFVFLSLRYVFLFSLLYFLVLVVFVFSVVFLLYLFCLMCMSDYVDVCVVTGYNKSIRDRTFRCPHSLAVVSAPFFEYTQKRSRAIRKPRKKGTRLKTLRFGMQASPRRPPRLCECAGYQVQRQRASSERLEVLLRLPVTQAMDRPTATQLLKLAPQYRPETKPEKKQRLLARAEKKAAGQRGQSPPRDPLSFEHGVNTVNHPWWRTQKAQLVVIAPRRGSPSSWLSSLPAPVSVKWGSPYCHYQGKGQTGTVLVPQEDLHHVSAFTQVNSEDQGALAKLVEAIRTHYQ

SEQ ID NO: 974732 - protein, 360 aa, Homo sapiens
MCMYDYFISSSLASDMRGLVLYLFFDIASVVMNSPFVWGAQQCGATLNEDSAAFSFAGDCVFCERADTTLVGASPLSRGAPWGDIPPAGLGFPSLYSRGNWAFVCPPQGGLFFCEFSGTIWLRPHKGVHQLGVPTCVGAALAPHMVKSTLGRRAGTTGFGPLRETPLCSRSLGIPPAVNVPRGHHWNLCSDVQLDQDWRTQVGASEPPLLNMRQHVPLAPLAGQPNKVFDHGSIYHPEVLDIPEETLHSRFLEGVRQSCPVSVCQIGYPTVASSDPHSIIHGTKRVLALSVESGLHPSHLAEKGQGLSWLNPLCLCGCCPCGCCHPPQLLLLLLHAPRYKVETQEESEESDEDMGFGLFD

SEQ ID NO: 974733 - protein, 149 aa, Homo sapiens
MMDKRRYEGRAQGAEEWFVYNGGLSTIYVGPSSSISMVLLVRRDYRCPPARKCAVLRDSYPRGPFPVVTKVPAPGGPALFPNWCFQLPSARLLSCPRGWPVWNGLPRPPDRENPGFNGDLTRGFSPPLCPGLGHPWGHSTRPVHRRSPA

SEQ ID NO: 974734 - protein, 171 aa, Homo sapiens
MYQNCNSMARMPKKLATSRDPPGPPLAFAIQNPEVSMGVSPKSSERVFAKTFFRPSVQVFQWDTLVKTPHRRSDSPELRIVEPIYCHGGTPIWKSTVNGLNLTQRGYGPNPLRERDCFDNDYALIARSLGKYGIICKLEDLIHEIYTVGKRFQEANNFLVAPPIVFSTEVE

SEQ ID NO: 974735 - protein, 78 aa, Homo sapiens
MAPCSPPALLVPTNPRQAFPDTQPRNQKKGPPVHNLAENRLLCLPRPIPGFRVVSARLRQRRLSLLVFVTGEYNAPEG

SEQ ID NO: 974736 - protein, 123 aa, Homo sapiens
MIYGVTTPSGYWSPQPQSHSCCQHNHLHNLANHNQRNTYVPHPCEEEPRGTTKEFSSHSERETLESPESKRKGAGWPPLGLLAIPTLADRPPCMDYSLAKPGEIGPEGKFDELRPPLPHSPEW

SEQ ID NO: 974737 - protein, 211 aa, Homo sapiens
MFKEMPHPEAPGPFPPTGSLEKGKEPGPEPERSWFPHPRERGRRRKIAPALPGFDLALRGKEDKGEKFMKDAQQKGEMTPRGKVSVCEILPGARCLLNGLANEESARAQPGHEAYALQVGDPVTSVSALESQKPGDRNLLFDVRTPPTTSLVRPLHTSIRSCALLFGRIQEYRLGLPPPRRRRITFNLNPRYQRKEVNCPWPEENHGGQPL

SEQ ID NO: 974738 - protein, 197 aa, Homo sapiens
  misc_feature (40)..(40): Xaa can be any naturally occurring amino acid
LCTCSFAEPNPALGGQPTGPPAVCFPPGAWCPPLVTPPPXRGDSWGPSRRGSRLDAFLFLSHAALSLTHVGVCARRPPERGFSPNTPGTPENGASTPRTGLGTRLFQGAPGPHKTFRAAPHSTQRGHSHKVHAGGRQKPAGLKGHTLAFRTVGLAHPTRRTREMAAHTDRISWGDCRNREPCEVTPLRRTSQSPMSP

SEQ ID NO: 974739 - protein, 228 aa, Homo sapiens
MSVAVSRRWVDSLSLRPLFIAELSCVLVFLAAQGGVFPPAGVAARAPPSLFPRVYFVADPPEAVVDTFLSRSLSGRFTLSHKVVFPDPEGFFVAGPHLFLGCPASGWAPPRHGGSQSWGFHLSLQGWFVFLCALPLGLYILASAGLICPPWCWGGGAPPGRHLRCAQGHKCFALSTLVVWASMYFGVRPPCSLVVKKAVWDGMGAPLEICLVKGLLGGIALPNIAWHI

SEQ ID NO: 974740 - protein, 139 aa, Homo sapiens
SPRSQELEEPPIPEVGLFFCCSAFFVGPKHSLKLNPLYAISLSSPPVAAWGDHKELGGHQKKCNRGKNLRAFNTSAQRSSEETPHTPTHMGRTQHTRLYSWRDTPRETRFFSFHRDGSLPPSVGLFWEGTIGIGHGPLV

SEQ ID NO: 974741 - protein, 147 aa, Homo sapiens
MGVCPVVRPSLLFAPVRILVRHFAPFLRVFPPGGPLGLSRVVVNPYTGSLSFFGGTSEVGAHPSGPCVCPPLPWPQWPMPSGVRVGVRCRGSQARVSSCVPDVSFPTGVGLSGHSTYYCRNSTQWPNRRCARPGEPPVVSRPSGTVP

SEQ ID NO: 974742 - protein, 183 aa, Homo sapiens
  misc_feature (92)..(92): Xaa can be any naturally occurring amino acid
MGCTHTVRAPRLFFLFGALCTHTHTTELFWTHNGAQTLLRHTPSEKWPLDIFTHREDNSSGTFSSGFPLESGGVRHNVLGHTVRVSVLATEXWLYTHTLVWALHVNPHSSNHSTPGDHTHEVSWPSVLVERPRVNTLSHTLAEKRLQGLFLGEIPLLPLVDCCPSWLLPPTSLLLAAAARPTL

SEQ ID NO: 974743 - protein, 333 aa, Homo sapiens
  misc_feature (80)..(80): Xaa can be any naturally occurring amino acid
  misc_feature (293)..(293): Xaa can be any naturally occurring amino acid
LPWLAPYNRPAVFSFFVLAPPSFQGVWAAAALAWPHHRRALSWWGTPNEGGGASFCPPVVVGPPSARSPPPEGVWAPPAXYMVPSRRPLFSPRWRRRYNTLFCCDHNSPFLFSSGGPIFFSGEGLLSILGAPPPPQGWGSPPVSPSFVGGAFCAGPQHDCHPHVSPILSSPGGVFLPRRLYHNTCCVPGVPHPAPRRPSERVSLWWSPPPPGGTPSCVMIRPPPPRPTKGGPPNNLGGPSSPDKIEGGDARARLGFRLVGSTTNHGGGFPNILIAQDASKGAAVDLPVGVPPXGSCPDETPRRVCRTTVGAPWRAPTTLLALTRRLLAAFAGG

SEQ ID NO: 974744 - protein, 257 aa, Homo sapiens
MLVLYSSLAFLLRDALGPPRVAPRFVEKPPGVKTVFRLWEFVPRFSFPGPVPCSSCRVPRWCSLPPSYVDGPTGLSLKVLCRMCVPCGQILDILVSRGLIDEGPDLWSSSRRSYSCPLTPCAPKQGFHLSEGRTLCVSRYAQTDSRYPVAPDGKATLRGNGDPQREKKEAPGSRRTLRAQCLFPKRCSNPSSPWRSQERVPSWVHPGGSCTICPSVGDVAPHEVTQSRRASFSDAPVQGFVDHRTDTRPVRFSFAQK

SEQ ID NO: 974745 - protein, 206 aa, Homo sapiens
  misc_feature (122)..(122): Xaa can be any naturally occurring amino acid
LSCVCFLLVSRVLFVCIVAMSQRAAQTASTALVGVAVVSFSGPFVRFFSSKNLGPGLLSLSVWYGWGLKMRPGPLCVISCPDVPLMGHTGVPAPLSEALFRESPRHCVRSPITFGVVHRNNXAMALEVTYRGRLYRYKGQLRIRLDYHNIWARTCCVERDQDTMINWVEKHLGPSISTHQPGKEDHCPVPLRSLKLLAKKAPAPAR

SEQ ID NO: 974746 - protein, 106 aa, Homo sapiens
MALSLSPGNAPGPAFADSSASPPDTLNEDGFLAKKHEGFITSQEYFPTLSLSGNSQGPCGNGVDLGTQADETWKPRPRPSARLVHEPRLHPPVFSKWRKGEGDETN

SEQ ID NO: 974747 - protein, 159 aa, Homo sapiens
MRVRLLLGSRAALFALWLVYLLRLGCSLMPGRGVLCLRRCASEPDLFVVPLLLWPPPMSPLPYGGPSGQLVGSTRARSPLLASPVTPALILDMDGWCPLVLFFFRSTPYLCSHEGFHLLEWAQVADWRDKRGEKRGETPHVTRILAMMALAHASASVHT

SEQ ID NO: 974748 - protein, 261 aa, Homo sapiens
VCVFFLLFLERQSARVEREEREEDSRFLVRSVRFHNGPALAIRTFSCQLLPPPQQSSSLGAPPNFVWDLAFRATPVRLRFEPTRSRPVSGAIWKTIIPLISQGTPQWDFPPDPADSTHWADPGGRPRGGHRLNPSQALPPSPWRMPAPPLSSPLWMPWMERKVLWNVPSLSHRRTGCTYFVHTSCLLGKKGIEKNLGIGQVSSFEEKMISDAIPELKASHPEGGRFREDPEVSPCDGWPRFPLIYEGIMSLPNPCQINFVF

SEQ ID NO: 974749 - protein, 434 aa, Homo sapiens
  misc_feature (33)..(33): Xaa can be any naturally occurring amino acid
  misc_feature (181)..(181): Xaa can be any naturally occurring amino acid
  misc_feature (398)..(398): Xaa can be any naturally occurring amino acid
MPGSPRGAPLPAWGVVWGSLPPGRAFPVQSRHXLLCVRHPPPRGPLGCFSRQGPHHRKRCGENFASTPGAPSNMVVAPGDDKSLVVWLWALAIVAAPGPPPAPSWGWSHGPVALTALTGGAPTHLALTGDFCLPEGGAFSLGRVNIPGDMVSNAGGTTPKGTTRGHEGGAPARSVFSGGIXPRRRVPLGARPKAPRRSPPFGPHDPHKRGDEREDPRVSSSSNSALRSCVRKGATCGPHKSYLTGGATHAQGPAAFSRAPAPGFLSALHRESLVVLRACRPGEISRRHQVGPHSEACRRESLGAPRCGREMAAPCTGPGAWGEVFWGLLTPRPPPTKVLGRRLSKCSPRTLWNTSTRSTASESLSESSDSTELSASRSPREPAGAHTPCREPGFTELXHEGGIIDSRPLEEEKPKCSNRHVPTGESLVENTGLP

SEQ ID NO: 974750 - protein, 488 aa, Homo sapiens
ELFAPSPVGVLFFGLAHSVGVAIFACASLAGYSAFSFSVLRSVHPSRWLGRRQSFVVSRRVGVRPLSSCGVGQCCCLERPSCGSVFWVSPLSFPAVGIGFSGGCGGELSFFRCVGSFLYLAELVLFVLLCNDIFCWWLAPSRSLVLIFVCALFPLRVFVKVVFFYRWKMCVGSLPRPRDVVWGLPAAGLALFGVCLVFLAARVVLCGETTPLSSRCARLFRGVCLHAPPRGDKRGSGLLLPSPPPEEIERALPRSLPSVYALSLERETLREGSSSLPRNELVSSGVVGAHLSRTLARALSRARMRLLVGALSAAEVEIERETPPLSRLSVVCASARIQHRRARAVVCFCPPLEWRPRLSLSCGAPPRPLSPLLTDIVCVCRASVWLCSLPRALLAHMHTLRRARGAPRRAPLVVLCVCSSHTQAVLVGLFVSCGLLSLFTPPLSPPPPLLRSPPRCLPPTQDFPPWGCVCETPPDNRKTGTGEGVFSH

SEQ ID NO: 974751 - protein, 115 aa, Homo sapiens
MGPRVCHQGAPHRSVVAPRPSFSGRFVTPPVVGTGVIRILVASPPRQVAVPQGGSRRCLAATNRMVSTVGVHKEQTILSRGGPPHSVILEPEEAFVVFSPKRDDSSSRDGSAPNW

SEQ ID NO: 974752 - protein, 364 aa, Homo sapiens
MRAPPPPVGHDDPGGVSHTQGGGVHTPPCAFYHGPVFNVWSLRKLWVVGTHGVTVFPRLCHICCLAPRFCPPAGPTPGPAPPGCRAALCDVASGFHPPPEWLLEAPQGPIDGLALASPPPHWAPVTRGPVCPPAGSGGRQMSTERKVELKPKCFIMVPPTTYNHGTLYLLLEVGVPPPQCEKSAVSVNTTHTSRGLKNGLRHPFTLGNKHRPLPQRAVSQAHIFSRHRFTGHMFSGRTRPSHAHWYHPARRAHGAEEWKFNRRPERPTLNEPRWSRGIHSTYPQECPPQPKEGGRGFEGRKARRKEGGLRALTVTWGKAREASVDSLFTPRPVLWPVPLCALAVFPVHIPAVPDHPPLSLFIVE

SEQ ID NO: 974753 - protein, 131 aa, Homo sapiens
HLYRVFYGRPPFYGSLLRKRVPPPRVGSATNAPRLFVYNWSAPTVTYIYPGLFIRVIPGAPFVCAPNISGAPEERFVCLPLVVAVPLSPGRGPPRGLSLCPLQGFLKFRPPCVGPLRQQGIFAEEILLIGG

SEQ ID NO: 974754 - protein, 111 aa, Homo sapiens
  misc_feature (66)..(66): Xaa can be any naturally occurring amino acid
MLWCDVVVFAAPFLDLYIYRGGLLLVLHTFGPHPLCVCTLTLRGHPTPLWDFYILLCAQFCIVTRXVGPPFIYSVSIDLSLTHVCAHRETPTLCDDPPLFSWSPLPPDIGG

SEQ ID NO: 974755 - protein, 225 aa, Homo sapiens
MGKAKGLPHSAEFFEAPCTCSVHTRDPPVLDFGEDAWGIHLKIRTVDIGFATHPRFCETHQLDNRMESFFLPSCEYLYLLFDPTHFIHHHGSPFDPVITPFMGSASWGLGGTSSTPEAHPYRPCRPALLPEAEGRRQWEVEDLMREFLHLSNGARSKFQKNTVSSGPWEPPSKAQEHIFSPRKPMTQARERKPAQTRRSPLFQLPPVSPSPPRLALLGPVFLDSS

SEQ ID NO: 974756 - protein, 488 aa, Homo sapiens
  misc_feature (89)..(89): Xaa can be any naturally occurring amino acid
  misc_feature (154)..(154): Xaa can be any naturally occurring amino acid
  misc_feature (257)..(257): Xaa can be any naturally occurring amino acid
  misc_feature (287)..(287): Xaa can be any naturally occurring amino acid
  misc_feature (325)..(325): Xaa can be any naturally occurring amino acid
  misc_feature (363)..(363): Xaa can be any naturally occurring amino acid
GEQHHQDMGGSPQDQECLLQMFPPMLSPSLRGGKAFVVSPLCLGPPETTTRRVVNAAPQKTILPRRGPHLLGGRTPTPPPRVLSWVRRXTLVLSPPFIINIYPAAERKLFGSPFLWWCFSQHQNGVGLPPLSSSFVEEFSYGGKPICVCSLCSXTNIKKGCFTTLSVFSCVPPPLWTGGGRHHCGPPPTSWWREISHTCGGATRSPTGTPPCGVFFPGGVSPQLEYVAPFPSVCVPHAAFEWGNSHPRLYRVSPHGXDTPTFEDSPSRGSEMWLTALEISHDSRRDXHMVVESSTVEICPTRLVLGTHWAFTDSVCPRPVADPLXGTLCVTPHAHRCVFQTHTVGTASFYHTRPAERVGSGEXSPQRGQISLRTCLRVSLWERGVCPHTLCRHSVCSVLRTEFGVYPTLVLHSTGTPLSITPHRVPKRGPRPLFSWKTGVTPFPTLAEKRFKASSWLESTSASCGCCPRGCCHPPSCSCCCCTPHAKG

SEQ ID NO: 974757 - protein, 108 aa, Homo sapiens
  misc_feature (63)..(63): Xaa can be any naturally occurring amino acid
ANTTKSPNGRFVLLPPAPAPPACILLYISPGSFFTKGCIPRAGHPMGGCATIISLGAHPKKAXDRNICRVGRLSLPPSPCGGRTNRCWENISYRRVIRRMLSVLCPNK

SEQ ID NO: 974758 - protein, 122 aa, Homo sapiens
MKLSCCPLLLLPDPPSRDPVYPRAVPRFLPLGKNLSCFSLLLPPSPPSITLTPFCSLSSPLLPSRSPTPPLFEKTQALPNTRRHFFILTQDYCCLPMRFGGKKYKYKMAFPVPCIHGMPTIS

SEQ ID NO: 974759 - protein, 120 aa, Homo sapiens
PPLFHDINTRQILFTFTPLIGVPKTPNNTRIFLGRPRHIYKENLSLKGESPHTKQCCGLYHNKNTTHAPFVFISHLPWRPHTFNMIVTAVSPLKRCILRRRHFVWWAALFFPGPPRGGGA

SEQ ID NO: 974760 - protein, 155 aa, Homo sapiens
  misc_feature (58)..(58): Xaa can be any naturally occurring amino acid
MALSHGLPPVFPTGPAWEAPHALSPLIAARPASMPTLHGMPYGNSGPHSVHSVHPLWXRSGSRCSPHTLRGLRLKTHSWHGIFSGASPTTQEAALSKPGHRLVHPMSPPRPSGRAPPPSCRVNSKLSLPHASPGCRVCPSPKEPPPTLFFFLYFE

SEQ ID NO: 974761 - protein, 236 aa, Homo sapiens
MSRLATIDAVFLKLEALPVWPRIVLFSGHLNLMHTWSIICLRPRDHLSTRSHNWGTVKDELTDLDPSKVTEEHLKVEDSSPWPDTGNKENEVEEVKEEGPKEMTLDEWKAIPNKDRGQSQDLISGNPMKVLNGHTGRRDLFLHKSKSEEAHFLKIRLMDHSLSGSHANDINVSRWRSILESLGRPGAWRPGEDEVERGRGGRPKPWQHGAEPNSKCFCSLMWMTPRHSPLWLNWMP

SEQ ID NO: 974762 - protein, 126 aa, Homo sapiens
VKVSLSVGRLFPTKGLTSSCVSGPPPWVARRPVVLLGGGVHPYRDPPSPGCSSGGRFCFPGTSYKLPRVDLPAPFAPPPGAPGSLCCPPPCHCAGPLSGGFSTTSRPGLPGLSPPISQGPPPEAEG

SEQ ID NO: 974763 - protein, 150 aa, Homo sapiens
VCFRRLFCSCYVVCLVRFSVCVFSSLFVLLCCCVVLVRSVFAYLFFVLMFGLSDEVARRRRRARRLATTARVWSSSMLACRAVVFFFVDRWLVCLVDVMYITRGRRSCGPPLKWRGFPERGKGPWCSHFVVAPKCSLGPRCSRNGPCVLI

SEQ ID NO: 974764 - protein, 173 aa, Homo sapiens
MGKEGSKYLRVLNLPSGTHVVAPVDGVPEMAQKFSSLALELYHPRALVGFPPHCPLSWVVPRPRSVVVVLPQIALSMGSPHPSFRGHRASSGPGVFTHSSLGGRLTPLCLHTLSLCRWRLPPICPTVCAPVVKLGNSGPLGGAFIVFAPPLVAPLAPQEVACLPFTAPPVSGL

SEQ ID NO: 974765 - protein, 325 aa, Homo sapiens
  misc_feature (107)..(107): Xaa can be any naturally occurring amino acid
  misc_feature (307)..(307): Xaa can be any naturally occurring amino acid
SGLCVVVLSLVVVCVSGVMKRKEVTELTINQKATMNDHGGVCKLIICVCAVLKRSLGGLFCLGGQYSPRGGPRLFGASLLREVLRVWSKMPSNLVWGDLFSRGTHGXCHCPHRNGVSLTRDVVCRGPTHLWSGGPRRIVGPPRWWIAAGAYTVSSRVICSLGPISRSHICSLGVIGPLWNWEFGPPPGAHHLWQWHRCWPGQLYKDRTVCVPPFSVKKSLERLAPPIFSEKFSREWLAHLVRIIGCPRHRRPIGVFEEALLTSYDHPFGSLLLVSEYEEHDTVSVGVNPKHSGPKNRLLESWHKVYXQVCPRKAHEKAINGYLFP

SEQ ID NO: 974766 - protein, 132 aa, Homo sapiens
MRRECHWGLKDSTFSGRRFRIPAELPRIDLDRSGTLNSYAMRKALEEAGFQMPCPLPPVIVARFADDPLITLILISLFGVWFGWKRYSRYLSTLDPENTGTHRARPLCCSCFPTHPILQSQMHAWLPLSHEL

SEQ ID NO: 974767 - protein, 259 aa, Homo sapiens
MVTWLVDTGQWFRREPQFLANNFCLGNSGRCPQAGRCTRVTGVKTATARSLLGADRSLVRVNPRMVTPPWLSCGGSGRVGPPRDSLQASFLGSSRLPPPGPIMIRPYEFGQSFFQRLNPDRLLARLKGAQEAQDPVSPTGWGEAKEETQPSAFSSAPEGGGLFPFPPGDKLPGRAVPLGGPAHSSDTTFFLLLPVVGIHHLPHPPSSRPKSSQLPPSCFPCVCCSWACLPEHQTALTPGVVIPDPLLIPLSSQRWMQHS

SEQ ID NO: 974768 - protein, 218 aa, Homo sapiens
NRPQATACEAGHSRRLLERGYKHPVLLLHPLAAGPRMTKASETGRMNQHPAVLEEGVLDPQSTQWCPTFRLPTVYAGPHRGPMALQVPDDCGGPIRTIVGRDPARMPPPEPRRICMNPTHGGQVLSMAPGLTSVEIHFPFRMAAYQPSPKKPWTFYDPSQATMSLTFISRNSNEEAPPREGENPPRWLHGPPSLEGPDQIITGPFGEELRPLAPEFLF

SEQ ID NO: 974769 - protein, 156 aa, Homo sapiens
MVCASVLPPPRVRLFVDARATSRPHGCFALSLCCNGAIRRGAPPMGERADHSIYVGGEFAPPARVEQFGAPLLRAHTRHNPLFWGDMYVLLIFRGGRKKVSGAVCCCILRLCPPFLCGVSLCLPANKAGFCFMTRPPPLSWGNVGRYPYALGTIPL

SEQ ID NO: 974770 - protein, 103 aa, Homo sapiens
  misc_feature (1)..(1): Xaa can be any naturally occurring amino acid
  misc_feature (103)..(103): Xaa can be any naturally occurring amino acid
XTLSIAGWGYFFLLRLFFSAQWHWFFLQQVVFTHTLGASLLTWAALLGVRTVIPTHNTLRGCAALVICRCSISSPPEGGHNYTQPRKCCTLSLLPLKIISGAX

SEQ ID NO: 974771 - protein, 114 aa, Homo sapiens
  misc_feature (99)..(99): Xaa can be any naturally occurring amino acid
ALGIKSQVYTRTPTLYLDFQLDPGARHSPPIPKRVDQLHFTRYLGDRVYMGRDDATHPKIRTFHPPPASAMEKSAPDVPSGEPGSPEEAHICLNMLGGXHLRETQFIPTMVPYC

SEQ ID NO: 974772 - protein, 499 aa, Homo sapiens
  misc_feature (171)..(171): Xaa can be any naturally occurring amino acid
  misc_feature (227)..(227): Xaa can be any naturally occurring amino acid
  misc_feature (241)..(241): Xaa can be any naturally occurring amino acid
SAERMCVVCVSASVITNFVRDEGVVRSVWALNTLRPARKIGRPMLFSPRGPVLRSVPLFCRSPSCLCLHCACPPTFLREGNVPRSLVKSPLFCTPTPLPELFGGRKSPRLGGDHLSFSFPGALLGGNFSSTGERARVVALWCARCPCDLSLACFCPPTTVLGCPLVCHEEXFLLRNTQIFLGGEATQHNPSFFRGGRPASLPAGRMTLVPCVSAPTAPLCVVKQVHXFFVAGGQTGGVPPXLYDGVPSLARVGFPHPSKCSPRPVVLLSELSPSVPFPAVCFAPWLFVCPPLLKEEEASSVLCLLGGVAPPQQAELLVLLLPLWRLSGRHKPPTALLEAASALLLLCGADSLFKFGGGFLTRRGPNMSPSSFVDASVCAHTVLDTLSLPPPAATLPTCPHSPHLKGVGLYSLGGDTHPEVLTTEPAREGSPPSVIHILSHTLTPQPQRGEHFVHPLGLPTPCGLSRALSLSRHPSPNSRPRPDPRESFSPLHTPTFVRQ

SEQ ID NO: 974773 - protein, 101 aa, Homo sapiens
  misc_feature (1)..(1): Xaa can be any naturally occurring amino acid
XAPLASLVLHGPIVVLPVGPLVGWWQGPPICRHFFRGRHTFFGETFSAEGSPTPGLWGPHHKAPRALWVETLASAPPVYLFFPGGCLNKGYSGGGPGGVAR

SEQ ID NO: 974774 - protein, 107 aa, Homo sapiens
MGPLRPHAGDIFSAKIFSPRPLLENQAATSPHLFGVCLCTSPHLLNEALYGIMLTQLGERPLCVLETPPQSHPIIIRLNDPPTKTIGEKWVRPFVKIDTQKRGGNPL

SEQ ID NO: 974775 - protein, 201 aa, Homo sapiens
  misc_feature (200)..(200): Xaa can be any naturally occurring amino acid
MGGTKKDGGPHHLWGHPHNTRGITAPLGSGDLSALLTYRRGGEKNAPLPAPRREGPPLARGAAKRGVPRESPPTLRETPSGGSRKNWGDTWETPTLTPSLTGRKHTQWCVTTHKERESLIHTEKSDTLSHTEFNTLRGKFTHSHIGGETLFEIETTGREPSQQKGECITPSLIETTQRGCLAHRDTHKSSSERHNSLLWXL

SEQ ID NO: 974776 - protein, 133 aa, Homo sapiens
MAVSSLGGWFFSRWVGCVLYVLLRGVVFSYQRGVVVVVASPLVVCRPTTRLLGRRPDRLRCGVASNSCGDSLVWLGLFAPFGSSVSVAWGEEYVVCLFDMCVLFVLSPLLPPSVFFIMGGAVFSLRRVVFAPL

SEQ ID NO: 974777 - protein, 224 aa, Homo sapiens
HSCGKILPPCHIRAPFVVLLCMSRSVVVPPPTGGAVLFHPNNVSLHDLLACSRPHQCSSFGGGCMYFISRGAPPLFPPWWETALVKLCCAVVPRGPHRGGGGRPSRVCFCPPPGAPTMSTPCGVFISEKISGEVITRGASHSDVEVDDYPPPPLGAQPQQCLCISRATAPQPLLVALIRRSRRGAHQLVIIYGGGPQVSSLRPLSSSRLSSGAPLLLGAHASFG

SEQ ID NO: 974778 - protein, 135 aa, Homo sapiens
VDILLVGVPPLIRPVILRVCSRTPRGGGFSPVFAKRGGPQLFPAGISPRGGLAATVGAFYRICSLKKCCVCYTHHYSTLVETAGGIISYISLGGANDPPVVNFGSAPRPTRAWENFASRRDQIGPLALSYIGKLL

SEQ ID NO: 974779 - protein, 136 aa, Homo sapiens
SPFSHWGTFAAPPRGVYFFLVGTLLLRRAHPHSRCVCAPRLLTFVEHISVDALSPPPIGAPREMWRRRADLYTQRARLWRSRDIFVVEDFGGVYKHRVLSARPTPPASGCDICPPPCSVFPQGVPPEGADLDIAAK

SEQ ID NO: 974780 - protein, 123 aa, Homo sapiens
MATRQLVIVLSPASSLPRMYPCRVKPPSPGAPPCGSRVASAPSESCPCVFICFALPSAPSCFVARASGTGWEDRLFPRSSGSIPSGPPLWPVVPGASPGLVAVVLDTVSPPLVGSLVSGGGVL

SEQ ID NO: 974781 - protein, 262 aa, Homo sapiens
  misc_feature (244)..(244): Xaa can be any naturally occurring amino acid
MLFWSVAASHLTDVAGVWVGALPHTRVSWCRWLPCLLRRGLVVVFSVLGDSESPTPQRCLCGRAAPATPNLVTPHAWVWVGSSPLFVVVVFLVGPPPHTGGAPPLPFIQDEVGGCSPTPVVLCPLTIFAPRWLLIECTSPPPAPLFAGEMVFVSPSLPRGWYSIPLVFGSVVRSSPPLGANVAPTIFLRLCLVKGRVVNDQPVVPRSPCVDSLARVGVPPPPKVCRYPPYMLPSYRPGSGQLTXLAFFGPEKHTPSSGGGFV

SEQ ID NO: 974782 - protein, 125 aa, Homo sapiens
MVGVVRSSSVAAAVVVGGASGVVMAPAPRCGRAAVLAPQLLPPPLGGCPTRARVVDPVVRGPRFARESVLMFFLFRPPRSRFVLCSPLAPPAVVFRPSPKTCRRVSCGNDPHTAGVVVRGPPVLA

SEQ ID NO: 974783 - protein, 125 aa, Homo sapiens
MSCAPHWGVIWHTRGPTHWCGSVVGCVAHTHTLSTRAHTLGAPHRRGERNERGDIFGEERCALRSVSRASSHFVHADIETPHTLRVTSVWAIYRIVWRRLALFTPHGATPTSRRRREILRHTRGH

SEQ ID NO: 974784 - protein, 148 aa, Homo sapiens
FLEIDFHSTHAGAHTHAGEGCSIRKGCFSPAWESSFVEIFHTAWEFREIFGVPQRDISQTVSPQRDNSTWGPTTLLRGGPQIHPPCVSFPRAPLVFTRPKSDALLWGPAFEKICQICYTSILRFVITAPLPADREIVDILFVPLYAHS

SEQ ID NO: 974785 - protein, 138 aa, Homo sapiens
  misc_feature (1)..(1): Xaa can be any naturally occurring amino acid
  misc_feature (65)..(65): Xaa can be any naturally occurring amino acid
XGSIPLPALLRIRGRPLLYDAHYFCWPPGTTHTRRPLVDTPLCGANTGGATSGVSRTSQRHTLSXQREILGGAPHFSRTHAALFLCINPLAGRTSRLGESTSPNICFHGPLFLGGQSPRREMKNTPLGDSLSVRKGYI

SEQ ID NO: 974786 - protein, 126 aa, Homo sapiens
  misc_feature (107)..(107): Xaa can be any naturally occurring amino acid
ASSRPRARAREREQHHSPQRARESARARRRMKRERDSMCVCARARARSAAERPHSASARVRAHHPACSPSLSLPLFSLWPPLSLSLSLSLSPLCCCVRDDHLLSAVXRACGRFVCGPPPTRTPLRR

SEQ ID NO: 974787 - protein, 251 aa, Homo sapiens
  misc_feature (35)..(35): Xaa can be any naturally occurring amino acid
LAFSPPVPPVICPKPFFPESPHTTHLFPFLRPKVXPLRCAAKRLFISLSTYLSRFLPHPSPLLAPPRDIQIPHAAHTVAPAFRHMVFKKPTPVWVSTEYEPPSGFEAARLALWVTLYRLLELGTCHHMCTHVHSPLANRYHHHMHIPLRASTTQHLATPHVELLYHFANPAHWLGKGCGNPTSGHNPLHRSAPLPRHYAVWPRPEKANLGTPQVSQLAPRPRSDPPKGRAPPLSPCFYPSFWVLYTSGYPA

SEQ ID NO: 974788 - protein, 73 aa, Homo sapiens
GCVSPPLVCVVTHREYASRRVCGFISPARAPPALTELCYAARSSVEVCSRDVRAGAVGATYFAAHARGEHPAW

SEQ ID NO: 974789 - protein, 164 aa, Homo sapiens
CALARPLLFWCPQSFFGRRVFVGVEIILNRGATLSSGPYVFTDRRQFSTVIFPRGTLIGAHRVFCVSPDAFSSRGDTVCLCATRAFLFGSFSPPPRFSVVDHTLPGWRVCFPGAHVFCFPSCHSTGACVCPPFFPPLRLCGRPRWWVSLGAAFGFTGVTPLGDV

SEQ ID NO: 974790 - protein, 436 aa, Homo sapiens
  misc_feature (35)..(35): Xaa can be any naturally occurring amino acid
  misc_feature (145)..(145): Xaa can be any naturally occurring amino acid
MPARVVPHRSWSTLLSGGGDLPTGMHPSFSSECVXQPKLREKIFSAAVKGGSGGSYNVPFLPRVVEETRHDGGCARPDTAALSVVLSTRRRREFVLLLACVTARSVVCVAQRALVVRCLLVWWGSARPCCAATEYVKVVGADERXRTLPYCWVPSCSILLCGARDPRLPPLDVCCSLSWAAHSRRLITFRPGGWFTSHVLSTSCPPPLPYCGVGFFLSAPSCAATCCSAATVLRESCASPAVLCDDPPPPSLISVDRATPASGVPQSDVRRPSSSAALLYPVVLVVAARLVRVRSPRRRMCGGTPCVEPAPLWCCAVSPQRSSPLSYGARSTPHAPTLYIPPLWATHPRLITHTPFRTHTPHAPAAYEYMFPYMSRLYTTLFLAISRPLYTTLYRRGAPLGALYYTISTSLTSLSHNIIPHSPPHNISHTTPHKHI

SEQ ID NO: 974791 - protein, 111 aa, Homo sapiens
MAPLLLPTEVYSAPNICVLTPPTEKGVSPVGGVFSTLVGPTPRRGQRVPTATMSVQQRSCALCFRVGVATEDSTIWCPRFCRVSQGDMPPRLARLVLWGRSRRLSSGGVEK

SEQ ID NO: 974792 - protein, 371 aa, Homo sapiens
RAPQNGALPDDPRVSFVGRHPSWATLFVGVSHMLFCVAEKPVVSPTRVWCGRNIKWGFWEHFFAHRGEYLSRCVAQQGSPICGAAHAVVLLAQLGPPRVGPPRCIVSPPEGTTFFGTPPKIAVGGYTMGNAAQRGSPMRPPPRCWRSPRVFWNIALPPLGVVAHIWEKKMGVSPNLSHSLSPPLGRTVVPCRPPFWGRGPPHTAHYTPTVGDTPGWLSTESIFVTPGGPHFGCVFSRGDTFLPGRCERENFPAHNCWGCHTMWGAERPPLEAPSFGARSPPHAAHSEFGRLFSLLLVCAHTTLLRGPPPRGGDSTLSVCVQHYGGSIPARLKKNIYCARRVLWGVSLSRICATMEHTRNTLLTLTRPAYPT

SEQ ID NO: 974793 - protein, 255 aa, Homo sapiens
  misc_feature (82)..(82): Xaa can be any naturally occurring amino acid
  misc_feature (90)..(90): Xaa can be any naturally occurring amino acid
MGAPRAQKRHQRAAAPAKIWHHSWRCAPRAILGGFSHNLRAHTISGAAPLRPPTRVSRVIPPPREKGGVARPALPRAFSTPXGRGEPHRXGPAHIHTHREECAPGDHICAHVSLLEIPRGEAGDTQSHPEVSLHRPNRASRLKRRYLPSPTLISCSPQEAPLAPPQRRERPQFLSEKNCEKLATPTAEPEPGHMPAPGNVLIKKGEKSSRVTSPERRRRKEISKAFASFPMAPAHASAFRHTGPKEPREPPGPDV

SEQ ID NO: 974794 - protein, 102 aa, Homo sapiens
  misc_feature (4)..(4): Xaa can be any naturally occurring amino acid
MRHXKFWVPPHTRVWWDPPLGPPPAPPRRYKHPSDAPTPPPKRAPERGKEEEPPPPGESPPTTPVPPPPWISPPPPAVPTVGHPCKKGRGPGDPPLSKEPPH

SEQ ID NO: 974795 - protein, 121 aa, Homo sapiens
  misc_feature (98)..(98): Xaa can be any naturally occurring amino acid
MRARRASHACLCGRARQPTTNQPRTSLYLSYLLGDDPPPRVVEDLPVGSAPSPHQNYVRSAPLLLLGWCLLVLLERAAPHQRSCVAPQQPPLLLLIMXSFLSTHGSIGPTHNTPFCDDTPP

SEQ ID NO: 974796 - protein, 108 aa, Homo sapiens
MCHVVYVPANPFVFNTLPVLGPPIWSRQGPHTTVLTTKPAPFFTPPPPVPYTRFLKVCPRPLGVAANLRPLRGDPRPPKMRPTSHISTQQEGGEKFCLRLLYGAILFQ

SEQ ID NO: 974797 - protein, 257 aa, Homo sapiens
  misc_feature (85)..(85): Xaa can be any naturally occurring amino acid
MLLTVVWVPPAEGSIPEGPHTPRTKEELCTQPPHILHERCCVANTKYSRWRTPQGFLCALSAPTPRILTLVCPEDSFSPNGTVGXYPGRFLRRSKMARPLLSSWAHPISRLVAPTPSRLTRLEPDAMGWPMYTLSHISAHPDERPTVALPPRARDTRWPPDTRPTCEPNGVHHRRTIENPWEPSQARLVSSASPRRAQPGRSPAGLICLSHEVFPGSMARRQGTRARGLLSRPLPMPAWPGREDGTGWRPPQTDQCT

SEQ ID NO: 974798 - protein, 238 aa, Homo sapiens
MCIIIFVCMFFFFLFFSFLFISYFYICSSRSSVHIILEDNTTIVNTRLAPYIPRGTPMFATTSRFVFPPPLVFLLRLCNCTDPLGGQSFRTRGTLSLWPPVRYNPPREGFSWGVGPPPARDCVKSPPVPACPLLAPWVFPRGERKGGYKPQAPPQSSASAAAHCPAVYSPVHSLRSVHHPGEEFHGSSPPPVVLVYPRVPGPPVGCSLDAPLPPPPVDSPGGAEGNISTKGFPQSFHS

SEQ ID NO: 974799 - protein, 171 aa, Homo sapiens
SHYAGACVAVLFRRVSSVGDYCLAVGLLTQGIVVPLPGVGGTPFSRSIPSPCVLGECNPLLRQQLLSPSPRGYFSTLEDFLFTDRWVVPSAYPPPCRFVNTRKWFKRLFWHSVCAVDAPQSGDLFAYEERCAPLLEADISSSEREEYFHGAFHGFTDSLGTRTWSPNRKVG

SEQ ID NO: 974800 - protein, 385 aa, Homo sapiens
PPKRKERHKAEGREQNDKELPYQPSVVLFFILTAFLVEQVFVSPLLLGRMFFLTQWVLLFYMSCVSAISLCSSICLWCSSSSPPVSHHGPLLLGAHPLVHIVGVPHFMSWNSFPPAGVLGIVSVVFRPSSRRGIPSVVPAAQLWGPGACSIGLIFPLLSPTVSWGPHLGTLCAPGPSTPLLKPKFWDPPSPGWPIGKWAPILPVRPGNIRWHLLGGPPKRTTQWVHKGVQKYTPGRFGVPGLIAVWEESPKYWVHNCAEDPWPLGALSTVSMMGSSSVACAPPEGPLVRIPSFSPNGSLRAIKRNILSGIWVLLPIAHGHSTLTHARDHEYFHSEKLSHKSKVAPGECLVLCTDPKGPIPQICPLPELLALPHTHCHGHLVLHEA

SEQ ID NO: 974801 - protein, 485 aa, Homo sapiens
  misc_feature (134)..(134): Xaa can be any naturally occurring amino acid
  misc_feature (357)..(357): Xaa can be any naturally occurring amino acid
  misc_feature (449)..(449): Xaa can be any naturally occurring amino acid
MTDARQAGRRCWCCVCSTYRRCGCELALSPLVAPSFVIRCAAAVRRWVRRSWGGLHSGWGLAAVGACGRAHCCCVPRRVLVVWAPRYLAPRCVLQASRAPERELLRGEFLPGRPPGAVVDLAWGGVCPGVRTVXAWACAAPPWVCALYYGAWSMGNRGGVAGTVGARRRAPRPGGILFCAPSVGVALAGGEESRGFSAVFGVLGGLLLATLVAAVFCTWGPEPFCVVANKARAPRCFAGPTHVVETAPGRWEGPLFVGGGLALTWGHAPCEENCGATGASPSPLSWDAGVSLGAYMGDEGLTPPPGVGFTPGGGGVTPRALCRAVALVQPRWMAYRGPRVPAGHLRSLFPTAKVWAXQECLPVLPRWGPLKCPGGPRVSASEDLVKNCVASLGVRKFVTTWARYTTWAHGGCWALLLLPSRRARLSTGSLTPLEWAHSCAKGLHAPWRXPQEASQATRHPTELAEFFLRSILLGFSQFHVPTPLS

SEQ ID NO: 974802 - protein, 231 aa, Homo sapiens
MCAPQGWFPVQKVWTLCESVVCPRLAAFQGLWGLVPLVVVPRRAGWPGVCPRFGGLRPGASLIASGLVHVPGGVPRPGLGTPRVCPGPPALVGGLMGFLEGTCTLAPGFVFVFPGPCESFVACLPGVSSPGPRSSALQLPPRGFRLEDFSDAFVDDALGPPGPFLRKRRPRPFPGAAPLPPFLPPPLLFTRLFPGACPRPPRSREPAGLSRGRVHRDPPPFFCFGSRRTRA

SEQ ID NO: 974803 - protein, 405 aa, Homo sapiens
CVFFARFDRQCRREERRCVTLGCVGCLLAAVVVVLIRFVCSFAVLVLIFVLITWFPGRLLSLVWPAFGVQYAPAFFSCDAALWCLRLLSVYHLAVIFRLSPFSPYLCLLWGLCLRVARLVGSGVPRASGRDPIGSRLASLAHFPGECGLASLSGPSDSLRRFATVKVSPPFWGPPWTGHKPGFTSYVGVLRLTFDLTPACAPDEYPSVPQSPVCPMGTQFGAGRLSRSLGKRPSPRCMARAQGGLGPPQRICALVIWSTQPSILGFSLLCLVTRPPPNPPELISPSFPLSNFLCFLRIKKPILCNHPTTLTSRKAHSPIIVGVNPDPDAVPDDLLTFSMWISIKNPYHHAIYNCWAIPVDFLMFRMGFPHHLTPSSYIARKLNLWIWYFVNDLFQSKGHPFFYNQ

SEQ ID NO: 974804 - protein, 120 aa, Homo sapiens
MIFVATTTSLVLLKAQSLVVPPTMFISGAFSPPHSSGNIVVSQGAQWSAGSLGRALFYSRGAQYVFCGASPPPLVWGPFPVLNSSYWSCHPHGDFFGWCPPLACAVGHHFHGAPAALGCV

SEQ ID NO: 974805 - protein, 143 aa, Homo sapiens
MVFYKTNGGNFGLGEFIIICAGRLNKKGGSHFVRVVACALIREGELFFVAFFNWFEGNSCFPPCVCAPHSAVCVTVCPPHGPWPLGPKHQVSVSPDTPLWPTWWRPDHTSVSTHTPHACVWPMEDGFSSHWVFPLLMGTKSPL

SEQ ID NO: 974806 - protein, 241 aa, Homo sapiens
  misc_feature (95)..(95): Xaa can be any naturally occurring amino acid
MRGVPPLSVRGQSWSQLAPVWMTFYMEPIWPQGIPRVYTDEATAIAAESTGTISDATGRQNTTRFGQPPGYLPAISRKYFGDTPILSANFGSPGXALDTGFDTNMIPAETRLSPRRPDRVSARTGALGEVTCVHTTADHEACYPRSTVVSRTLSRECKSRATTLYFSCRRGIPACTHTAVRMGPLFLCDPAGSPRMEATRTEAGPQKGWKLSEWEFPSHSLLDIRYIPHAWSPQKERLRFS

SEQ ID NO: 974807 - protein, 412 aa, Homo sapiens
  misc_feature (8)..(8): Xaa can be any naturally occurring amino acid
  misc_feature (143)..(143): Xaa can be any naturally occurring amino acid
ACIIRLVXCLGARGRPACDPCSWFVGRVPDIVASFVVVLAAALGGDVCVRQRVPVFCARGVQPFVLALMCVPFCMVSVGERDVNLFCGWVYNTLFATYVGPHQGLLVGAPPSAGGVLFSSPLWLLWCSRYYEDGRLLLALPVXVGLAPFDLLSPAHTRRCDPRVDGRLVFSQWHCWALQKSSLWGVRRSTYCPGVLVGGVSVSGGEPRPLLLLPPNLSADAPPFGGQKPDAEYSIEGPPVSANGCKLSVGDHLFFMASLTRGVCTLPRCTVLGNLQQGVGAQLLQNSSQNCYRPRSNPCPHQLAGCPLFCAPLHPKSVQIVERSPPLCPHSSVLYVISHPMYRIIKMSPPTFKPRLSPHPLVFRPRPPQGPPLLSEPPCPLTWNPLGPHKYVNLYPPHTLCHEDPHLETPPV

SEQ ID NO: 974808 - protein, 102 aa, Homo sapiens
LSCCVCCCCCSVLFSVFLLCCSARFCVCVVFCFVSVVVSSVCWCCLCGLGHVYVVTTRWPLWLRRSPMLAKSGFFYAPPRFLYRSLYVFWHSGVPNIAPRRC

SEQ ID NO: 974809 - protein, 106 aa, Homo sapiens
  misc_feature (1)..(2): Xaa can be any naturally occurring amino acid
XXCGMLVCDSFRCALWSVLLFVRCTCSCSVASGLVVFVGCCRFSSRVENAGGSFSRRPGGEDAWLPRAVFFVILSGLLVVSPRVLLPALFCPADVCRWRGVIIVSL

SEQ ID NO: 974810 - protein, 123 aa, Homo sapiens
  misc_feature (70)..(70): Xaa can be any naturally occurring amino acid
MTNRGVEIDAPPLVVSTGCSYDAPECGCPATPYVAEELPCGFVFPLGNNRLFQNRGAPPSGNPFGEQLAXPPVGNRIGESVGVFPPCGPHKPGGKSSLYITDNYTRLWKTVEVEGTFLVAPSL

SEQ ID NO: 974811 - protein, 105 aa, Homo sapiens
ACFCCFFCFLWTRAEPDGTLVFFCSAACYVCFSVSRLVACTVLPLLFPPSFPCDSSSPLISAFVSTVPHLFRFWFPSVFASLGVFLSAVAPPALLSAPLQFPPGI

SEQ ID NO: 974812 - protein, 261 aa, Homo sapiens
FAASVLFVLGSMLVFSRSVRALRCFVGGHTIVGLSLSVFVSLSVCAPAISFVGAPLNRAYTPSPPVVLCAVLFLFVFQTLLFSRCALYVFVCLLYSVCSLTSPLSISSVGVAEVSLSLIRLSLLPSFQMFGVGAAALFFPTQYICSLRHPRWCPPRYVDLLYMREANASCSSIRSPHPPRPVPCCCSPPLLSVGSPPPPLRGSPLASFLFSTCPSPSLPRRAGCGGCGRGEAPPPPSWGSGRKKNFLFYYKKKFCFFYVCV

SEQ ID NO: 974813 - protein, 379 aa, Homo sapiens
  misc_feature (19)..(19): Xaa can be any naturally occurring amino acid
  misc_feature (306)..(306): Xaa can be any naturally occurring amino acid
MSVRFGLLPSSSLLDRVSXPINPPPCVDKPPHRVLGAPPLLWDLSWRCHTWVDPTRKHEGLVFTPPAPSFLIPVPYKGNQSPFGVAANFRPQKGGVLCNPPGRDVDIKRGEIAPLFPWKENSTGANSPKKPSWGHKNGKAFFPLEETFSFATKDQGMCTHLFLRETPPGASKQDPLFKRHLWRGPLAPSRDILIGTPGHQPSGHPGTIGPPRFERPMVITKNWASPLGVDRRFFKGALCVYPHPRCHPSLLRRENSFPPKSEIHHSIICEKGFSGDAKEGAPKGWESIFQEREESLRRPHTMPPKXYPRAQVHLWPTAEKEASSAAYRGSKEVVLKKPRRAFWKALTPAPSTELTRGRASQLPFPQCGPGCLALSSSPV

SEQ ID NO: 974814 - protein, 151 aa, Homo sapiens
MGFLGYVGVWASQSLRMLERGCECFAGPPGAPTSNELFLASKWVNLSPGLNVWDVKVKWGKDHAAGDAEDGPPGLLVNSWRTPLLRFHDFSWETPMSPWVTLLTCSEDNITADIGQWLEIFAHDEESRCPDIRIWRDPGFFNPKYRRNVFC

SEQ ID NO: 974815 - protein, 235 aa, Homo sapiens
MVLCRGVFALRDILCSPPTLEVFLSASLAHKCARLVDLLEGCSHRLSADTWLEHSPPCLDVVCHHFLWGEFFYYLQIFWGRRAHTCGHPHAPLCVIIRDSGALVLWRLRCPLTRRAVERVLSTRHTHSMWWPHGVCPTCPAEPHICVVSRLCEKYCRVATLFKYPRERFYRGSRATLYYIMSTRVPHCSHERAYTLECIFGLLYEKTRLSEENGNESVPRTRHAIAQMGVNPRGN

SEQ ID NO: 974816 - protein, 625 aa, Homo sapiens
  misc_feature (585)..(585): Xaa can be any naturally occurring amino acid
VSYVGCVVWVLGVLALGWLGGSGLSYCWWCVAWIVFGVLVCCARLFVWAVGVCGWWWWWYVTTLCVVRCLLALVCCIFVLIFCVGWGVAPTLGVLGCFCHARAPLVDCWFAVVCFLFVAASAVFVVGGRLSVPRRLVVVVCGSVCGVYFSLCGVLVGGFLSLTVVGWGGRLVVSCDARRWCWWCRVVVVVVGSCCGVLGGREWWVGGGGVRGDVWVACWGVVFFVRCGCCVLASVCGVARGSWCVCVGFVCGLVLLSYVCGWCGCCLASGLVWGSCVVLLGVWVLVFVSGWSLVVVCVVWSLCWCVLVGFCASLCVACALRRLWCCFGWCCARFLLLVSGVCGVCVCGVRWVGVYAGSSLLYSCAVCACTARVSLRHVVVLVPRSESVACVVWCSLWCSCFARLGGSSRSARCCALLDSLCGLRVVWSSLRCVCRFSQPLLSRLRAVLCCGCVVMSGVLCVLWVLSTLAARCHYLPTSLLRHTSLCSLAPCPRPSVRAWGVIVRVSASVIVRDIALPALRRSARAHWCLYCCAERAAAPAPSPSRVCVCVCVCDIRTSIHFACVFLMCVCRGRDRFTTVAVCLCXRVLCVGAPRHLSLVALSPGVLAHRTSSVSTCICVCVVWSR

SEQ ID NO: 974817 - protein, 377 aa, Homo sapiens
LLPFDTDTLVESQPREDKNSEQCVSACLLSELCRSSLLYTLFFEDTEGCVHSPPLLWGYLFLPPHMRLPPPFDWSSRSFVPYSFAPSLPLMISSWCLLLFSSSMGRRNPLVLCGGTSNGQPLFCGVPHFICCCGLLFCAPACWWCVIAYILVFWGHRCVPTGEDVAPCVATGRHSIVCPGGAFLQGPHVAALEVVSLQVPFGKPPTCGGPITVVSPMAPFVPFFFEPQGFWECLLSRGLGPQWNNMGPQYVRILLARENRMCPLFGRAPSKANITPVVIQRGWFTESIFPPGAFWVCSPGPICVKCGGRNLPKMLASNILPQKALVAPLVGSLSPQSNRDEASLSLLVARPTHCESPPSGGIYSLSFSALGGYPRAL

SEQ ID NO: 974818 - protein, 401 aa, Homo sapiens
LPLNFVLTLILLFSHDCGCPPASHQIVYPVEISLHFSENAFFGSPVWLTHPHGCNTRGMCAVFLLRSPPIVWGGPPTLLQRGCPISKSCRPLLDCGPTPRRGQYVREFPPRVPQGELLLEPLFYPWVGNLWGFHTCNKLRFLLKGLLVRGQLRFSQAEFVAPKLLKEGRGKGPLWRFSCNAGVPPPTICFLYPETTHFGAGEYTPRTDTRVPKDSHTGSHTREKHPLECPPGRGCSVISPLGVSLSDLDRIRLTPLQCKNLFSPNHRVHWIHGSHQTCIHTEKALFQAANKTTPAVFRNTRPTLEHAHLFHKALSDGRDTQDTSPGCVHFHLHHWKTQYGVCAPGIVNTHSTHLHQERTPHTLHATAPPEFYGTSATTFSIHGMPPPVGSPRPPSPDFGPS

SEQ ID NO: 974819 - protein, 115 aa, Homo sapiens
RAIWPALSYRVPSPSPLSPGQAPLDTRAHWPSLCGPSFPPVLPPRKGAHKTTTLNAQKGDCKKNVDPRKELHPLALKLPRIAEIARLMEDIGPGTRTREVNIPRSMSTLPGGPWL

SEQ ID NO: 974820 - protein, 230 aa, Homo sapiens
VWLVCWLVLVGVFGSTHGCWLRVSVFVWRCVLCSGGVSVGVLLVGVCGTLLVVVVAPCCVVSSCPRLVCSPRGRVMLGGCLLLVLVVVVNIRDGGCQRGSLPSRCVWLLVCCFLKGWGNCVVYAPLGWVSFSVDVSYCWAVSVVGMHRVAFGARPLVDKVFKGCFSPSPPGGAFVFVFGSSFPWEGVPAPEMVVCSSKSCAVISVCCQRGVVDCPAPGVCVIQYGEVVLH

SEQ ID NO: 974821 - protein, 376 aa, Homo sapiens
  misc_feature (1)..(1): Xaa can be any naturally occurring amino acid
XAFFFIVVARVDFASLLALGLCVGCGAAGCVLLSPVSAAGCLLSSVWLVGWARLVRTARLCAPAGCLGLLSCGVCFIRSGGLSLFWGVVVVVVGVRFALSSARVPPVFLLTSRVGRTIRDFSTLVALRVLAACNLRPIFRPFPALGPARPRFLGSSCRRTPTLGSQIRPEVVPRRGAHRHTPGPIGTCRPPTPYLSLASISTPMIGLLEGLSHFFPELAEEKPEGYERFLKMPNPRGGRAFLPRTIPESPRLKDMKLGVKTPQDTPIMKSFALWPLEKKLETQALFGFSMPWVLPAPEPPLLCELPGELTFLDEEVKAYQKMGDPPWATPSPRLGGPEAGLGEYSSFEKAHTSHKHRAKEPLLKPTANFLKGPLAK

SEQ ID NO: 974822 - protein, 203 aa, Homo sapiens
  misc_feature (203)..(203): Xaa can be any naturally occurring amino acid
METNVSTLCLSSLSISPWGEFSLPGDKIRWGPPVISLLCVPPRAPDQNLGERLYETSPLKAVSTGGKSPYECPRGYMEARPMKGPGHFQQEGLMGPDFEGPKQGSPFIWGTLGNSPPHSSYYFAPPPKSPSPGTWEPPAGPPRWMPRGRNLSRALFACHHIWCASAARPWKEATPRVTHTRVYESPLATSDTCSHTHTTQGDX

SEQ ID NO: 974823 - protein, 134 aa, Homo sapiens
SLLHRWDDTISGFFSRLSAALRVLARGDLPGPFFGHFLLFGTCPPPVFVGYSVSVPTHAWVPPGSPQRLCPGDLGRPPGLPPWVQVGDTAGPLYKPTSLWLLFCPPLMWLWKGLSPLVPPNWPRKSPEGYRASS

SEQ ID NO: 974824 - protein, 117 aa, Homo sapiens
MVSTPFVFVCLPPRPSFMWEHLLGDNGVFSTREQSCCGGVLFSLAVCLSAPSSGVLCAALPRGGSPPCRALFFLTRPGVLSSGARPLVREGQPRGSLTCCVYWEVGGFFLSQSSVGG

SEQ ID NO: 974825 - protein, 317 aa, Homo sapiens
LVDRPCPVRVVIPGPRKGPRSCFPRARVTPRKALLPLSPPGCFSCSGTVTSKGHLSRTSIPGPGSWAPLAQVVFPGSLSCFRTGLDWFIGPRRAFTRAPFGVLRPERPQLQPLAKVLPRGPPKPERSPIVCCPGERKTWRTLGQTLAPGHTREHYGPPCYLAPPTLWGPQKDPVVETLPSRLPQERCILLQPHQRLVVWLWLAWRLARIAPNPFLKAGPGALPTKYIKAQEELPGPEYRGVAHESLWSHPFWEVANPPSHNLAKPLPPIPPEMPPAGPPKWVFLAAPPTGRLRGTQTVPGERELVLRALPLRFVFMP

SEQ ID NO: 974826 - protein, 130 aa, Homo sapiens
MLYHRSRGNTSCRKLTFWLWGSSFANRHPPLFWGSTTSLYLPLSRGEAKRATRKISRKVCKLRLYHICWCVLPSVPPSVRFVHSLGLWRDTHCALTETLFVATPHSASVSLFTYCLSPTLVHTCEGISAA

SEQ ID NO: 974827 - protein, 324 aa, Homo sapiens
PGPLPWEGWALAPATGYPHISVAHIGRKRPHGGPPPVACPQMRRPISTHARGHNNLWVNTHVVRQGACAPQMGGGHKKKRRSWGVIKTETRGWAPVSRVRPYGRVATQQQVGATKDRFTLSLKKCGWGDGPTPERPSFEGRPGGHSHVLPCEFIESRYMFSGGRAPAPLGDTPLYRHSPHSNSTGLSLFGEGFHSVRKGLVLRPSVPWRLEHVVGKFRCCWKATHNTSHHARREVFDTGLLKNPHLGHGLKGSPHPGPQEPLKKAHMDTSCCFVNEGGTHSAGTEWHMETALGNCAGCLLKETLLDCFFWLSRQIRPNKHFSEL

SEQ ID NO: 974828 - protein, 291 aa, Homo sapiens
YSLCWCGILCCPPLVCGCPLARWVTCVAVCAVVFCALFWLTLLALLHSCFWHQTGGAPRALVFLEVRPSFFGGAASSLPRIGHPRFVGNTSADLVGFLLVFYGVFFAVVPYVFFWGSLGLFDFSAFWGTFSVSLSLLDPCLFVVSMHRVALLFVPTFIPRGVPQLRAQCAKGIPFGVSPVFVNGGFEEADLCPLIGMPLPKGLFLFRPMELPPVCLVGLGGPTCVSQALFFSSSPFEYPPLALGGPMRHNPVWAPRDFLRSTPLAHSLWRNAALGTPKVFPPENWEDMFFS

SEQ ID NO: 974829 - protein, 117 aa, Homo sapiens
MGRPPLVVQRFLRSPSCRKKGLNVASQFFNVCLTPYFWPAVYIRRSFGGVLDKGFQTGGRWVPLEMWATTNNLDILDFACGAEKRGKFVLMTVFCGGDLLSGPFLVSQPNDTDGGTV

SEQ ID NO: 974830 - protein, 124 aa, Homo sapiens
MPLCCPLREARICIKWCRHRYPLTPSVWRPLWVNTPTDLFSLSLCRLILWGHTSAHFLALATLTHTQGRVSHTPQCGCLDNVWCEISLVSAEIFFWRTMARETHHMCSPRETHTLTCERGTHAS

SEQ ID NO: 974831 - protein, 287 aa, Homo sapiens
  misc_feature (253)..(253): Xaa can be any naturally occurring amino acid
MDCVSMPFFVGGVLLSCSGPCFGVPSRAHALLLSLSGVSVVPVVVSWPRVLPSYRLWFPPPVFLSGSGCGPTVRGLHLCFCVGYPISSGLFVGELVHMGGSAFGVPPPLRTPEVCFGPARCSPLIGGLLQTLLVAPRWSQCERDSAHLIIIVFGGMPPSILGGSPVCFCVSAHLGPPQARVLFFVPASPLFSCGRQCRHCRFSSRHGVSLYSPPISRPRGDTFFVTRTPSLCEREHTLEAHRTHRCYTLTHSXVREISLCGDIRSLRPYSPERESHTVRHTRVSHTL

SEQ ID NO: 974832 - protein, 367 aa, Homo sapiens
LFLSSLIVCWCSAKMLIHYSPCCVGFVTQDTTIQESFYGGGPTPQCDRSPSLRSGGRPRHLQCGWWTTQQNIAPYGPLFVLITLASCGLAACISLIFILRGGPLLKKGVITSAAGPLILGVLGVHNIFSWVISPRGGFVLLLAGVAAPLGWVFFWLRGGLFVSNYFLLVPRAGGVKYYVRGDYTQGFFLTGRKLFIKYVCVFSSHPVGRPHHASRRAREEENFSSREREEKKGEEISRPPTRENYRRPPTGGITLGDQRDVGERHTPLYIADKKIGEKKSEKESPPPPFCGEERESVKGRPPQAPPSQRGYTATGGAQQRRLVLAHFAARAVDMCSREEGAHIIRPPQRERRESFYTVVDGEERVGV

SEQ ID NO: 974833 - protein, 175 aa, Homo sapiens
MRVNPHYYTLLNVKHWGIAFCTYHVLGAPRCAQVPRCVRKLHFHWEVISPLPKCLFLEKGETPIKLKEDIPRGYKAVYRKKVFCSFNTQTPLATPRNSCYIGEMNPWVQYVKKNCWEERLLSALFYSCPHSGKPLWKEPPPTKRKSVLWNMNAKGATPAVFSPRPPQRCCTPQHR

SEQ ID NO: 974834 - protein, 120 aa, Homo sapiens
VFVRLPPWFLSSCLGGSVLSSRVVYLCCSAVCVPFLAGRTIARRRCSHCWGRLPSCNQVALCYPSGVFPRWGVLSAEKVPPVGSPGFTLGGKTLVHRKVVVNDVTCRTGSNSYMGIFWGG

SEQ ID NO: 974835 - protein, 142 aa, Homo sapiens
MWRPQRELNPSYFTTGILAQHSLLISTQRPQLWRSLSLARLYMERSISLDTHRELLSHTLLSGCGSFGGPTLIRCEKWRPHRETFVYTCLEKGVCCVCVWRHHTESRVACHHLSPTHVLWLGGTERNARGFSEKRFEPLKFT

SEQ ID NO: 974836 - protein, 40 aa, Homo sapiens
MGYPEKVSPTVELGKKYSHLDKPYCVLHGKGPENHCPLSH

SEQ ID NO: 974837 - protein, 479 aa, Homo sapiens
  misc_feature (393)..(393): Xaa can be any naturally occurring amino acid
FYIHPPLSRLVVYIVAVRFVVVRGGCYSWGSLFSRHARLVLTHYGVGFVVFLPRPLTVGWLVYTPAACLSAHMLCLLAAFFTYYLYGSLLVPNYLSLLSRLLAASRLWFCLLRGNHPHRGCVWSRPPSLSLSPLRWFLLPPQSCPTRFWCPPSVWMQPVSAALSVALVPPKCHSDRVSQVVTPPLDEWYVFSLLYTVVSSSVVHQTRPFPLSLSVVVHVLALITPLAICLFSPTTNNVRFVCSHLRRRAILIGPPAGGGTHLFTIPYRGSISPPHLEVLPSPLGGKTVVFVCLGEPPSFVVEHTLLHAVMSVTPCVGPPLLLLRLVGQHTLFIYVRDHRASSLSRRALYLAPPTYVPFFLRGTLRWLTPHDCFPQNAHLSGPARLHLFLHQKXYFSHARARLLFTCHSPHCVSSLSPRPLFFCVVLSVSILESVLSAHSDLFFFSPCTLCASHTRREMRRSRERSRDYTSIQRESERST

SEQ ID NO: 974838 - protein, 194 aa, Homo sapiens
SPPPVEGLFLGPHRFREAQWPSPKGHTVAKSCPRSFLDRLRKTSGPSFGRHCQTARQWSSIKSEPGGPLEMIVPAATAHQSPRLLGRPILAFLGKGGDLSGVRTIPCPLVKGWWYNVGPQSLMLSAHSPLLPRPSVAYYHEKMWNEASQKGDHKTLLTPRMTGDPAGQLSPRRCEVPKVWRVLVPALATQKSYR

SEQ ID NO: 974839 - protein, 247 aa, Homo sapiens
MGHLPPNQAVASRRAFYNFGPPTKEGPGTPRSTLYALVERIPKKNMFWPPGARKNRKSVLGAKKRGTVPPNLRENPQRGAHFENQRRLTHTVRTTPLGGENTKRKTSHTLWWVDCHTPHIGRLPSETCGWSIFVPCPLCVLVKIVGVSLTCHYTRGKSQEHGDTFRVSTRKNTWPPTLFRPVQHTECNIRKNTKSAFLAEDWWKTIQDPITNRPDTDEIPPSTGVAKVLGPKICGVCICPSSEKAKG

SEQ ID NO: 974840 - protein, 183 aa, Homo sapiens
MCPPLFSAGTLIPRCFLFGGDHTSGLKQLCINGEYLLTTTSLLWGRSFLSPFGVIILSLGESPPPRCLSTLVHTSGTAGLLAKRGFFSASAHHPTGGCCPPHNLLAGPLLSSPRGGGPHDGFGCYHTAPRVDSSLHSSRSRTHTCPRFSRGSHRATGHTSRGVCPRETSGGNSHKKASHRVAR

SEQ ID NO: 974841 - protein, 177 aa, Homo sapiens
SILFWGGAKAVVYTPMWRRQTHNKQRCCVTHSNQRWEGLLINKQHRVFIKSSPFWWCAPKEGARVCATIASRSAAGWGCAHYNTPATVLAPTARQRGSPGGALVLFGGRRKWVKACWWVGRKKYLRPTSGVEIRFVKKACFGKGGSSPLLRLEKRGPNPRPPGVKRRKRGVFYPGEM

SEQ ID NO: 974842 - protein, 141 aa, Homo sapiens
MGKNFFGRGPKSPNTPLRPLGKVPGSTPLIEGEKPVTHRAGGSSPALLIGETPKGSDKWKIVHRLRTPGTFALNFVPPTLPSDRGKEHKDAPHGANRPLLGGRTISLCHKHPTMFLVEDLKGMVKGFRRGVSTSHIEKTTQ

SEQ ID NO: 974843 - protein, 119 aa, Homo sapiens
FPLYFLSVVCLQGVTQSLGVFDRVSLWRPGGAARWCLPSAGLGGHPLWHHSQHWFPRGCSIMSCSRVAPPVKVCARWEPFFLLGGTNISGPFLKFVTEKCWFLFTENIFFSLRQTVVVG

SEQ ID NO: 974844 - protein, 359 aa, Homo sapiens
  misc_feature (255)..(255): Xaa can be any naturally occurring amino acid
RPSMLCVVSPHSVVFSSAGVTRPYFFVRRNWGVHLSGPPPACLYPLRRERVILNTEGWSLKAVCLLREEMTPLRGGRLPPALVFAARSPPKGWSAPAFSSLPQSEVGCSAELPALCGDWYFFIWVPYAFIMCHHIIPAVVPHGRKKMGLFGSLPLLCPKVRGHCAPVFAGNNTPGLFVKRSPRPTAPWGRLGPPGVVPALLCSPQSAPQCPEDAPPEHTLVILHAWPFRGKERGLGTHRRKKVFLKGEPHAHGGXPRAQGDNTHMAVEREYGHPSVSPPPRAETFPALFEKKPPTRDNLTEMLSRASTPREGPHGGTTLEENRALTESGERATRKKFSVSLESASVGTQSSPRGTPRHA

SEQ ID NO: 974845 - protein, 277 aa, Homo sapiens
MSPPGLWRVLAPRTPRFLARREGDFCSLARAWERRVVSLPPECNRPGWPMCPPNTPQYDPPWCVSILGSPPDREGRPPPWDWEEFPRGCNPGRGQPCGPRRKSFGTWGPPPVRKAFVGPPKVNTRWEPTIGVWRTRNVRIVVGQVPHLGGCTPKGPKRRYPKKGVLTPGAGLGATRPAERELLAPPRAMSSSLRRGAVRAQHGGALCEFWGALGHCPRVSGVKGLWSVCVWRTPPVSGRTEKRAYTTVTLRTLGESVTRTQRRFCYKKEFVGHTRGL

SEQ ID NO: 974846 - protein, 116 aa, Homo sapiens
  misc_feature (104)..(104): Xaa can be any naturally occurring amino acid
MAPPNGWWHARKRRGFVYDRPPVPLCLYGPGLLNIGVSPRAPLGGGGNILANAKGGAPPFLPVGGVPRGFCGLARECFSRGLLLVVVNELYVARRCGLGCVHAXVEKCAATVYMGW

SEQ ID NO: 974847 - protein, 166 aa, Homo sapiens
LARRPMAFLGPVAQPFPTSSRLRPAPALALGAHLDSHLGDPLALPLDPRGPGPRVGWTHQPRPLTRHVVPNASGPPPPLRNPPELGTLAMPCNSVTPRAEPEFLDVMDPLSVSPRPHPFSFSLVALTPSASGSPLCLLSTRPHGTQTPWDNLAPWDLCCTFPVGGM

SEQ ID NO: 974848 - protein, 141 aa, Homo sapiens
  misc_feature (57)..(57): Xaa can be any naturally occurring amino acid
MLQAVVTHVGVCGLPPHMCWRRRHTERCVSVWPQSKRDVIEISELCATWGDTPHSGXIESSVPFKSSPCPVPTVRPLVEHPKILEFLPHTTPYFQAHTKRWETQNPLPIAPQTPSPPSITAVFPWPLYFGILVILLSYKTL

SEQ ID NO: 974849 - protein, 109 aa, Homo sapiens
DRALYQSEGRAIARPDPTGLSGAPPSTGLLTGSKGDLPLAPGPWEIESFPPPERKYSVWIRCSIHDLTGNRPTGYGIYHRSYDESGPSIVPRQMLFNGLSQMRSISCMG

SEQ ID NO: 974850 - protein, 76 aa, Homo sapiens
GPPEGCQKKQAFLLTSRPPFDDGGSLRISEAPLVADILRPPGAHLLKEVLKEKKDRQREGFPLPCAPTETPFCRNQ

SEQ ID NO: 974851 - protein, 170 aa, Homo sapiens
LLLDVLLVSRLYCFVSPTTNAVEGCCHYKGGHSTYRVLGVFTGGPWGQQNIISLVVYSSVSRFVSSWLVCSLPPPHLVSSLSVCDNPLVATTGAAPPRRCFSPPSPGGVYAKGPWRVLVSRSLAGVAPLPVGGVCLYRPLLFQGVVYQLAGAPMVVVGRAGAWLVSAPGV

SEQ ID NO: 974852 - protein, 385 aa, Homo sapiens
LVRAGSTLRGGHSCGGLPCWGGSRQSGPGLSVRRQCRWCWCEPLWLLCLGGRRSQLARRSWYLAVCVRAPVVVVRARTRVCWLAARERRGVGRLLGGVVEVGGPPLKNVFEHAVATEEVLPDETHNTLRGGPRLESPLWSIFPPIVCTPVCGGPPNKIMWAPRLGQISFCRWEGKNNPPFLRPWCDRKAVFFCGLTPTGRVCSSPRRHRAGLRAFWLEETAQARNTPQGNWGCKKNVVGGRPCGPPFRRYEKNTDGGVVGGGRLRVGVSPPLVGGEDPCGVVFPPRREIGGPRCGRGAATCGGDATRSRVEPPRALRALPRVFCGEFGVPPPTGGFIKESCGHVQQTMTHAPRPTLVWGAPCVWGEHLWPHTGTHRRRPVCGHMS

SEQ ID NO: 974853 - protein, 414 aa, Homo sapiens
  misc_feature (94)..(94): Xaa can be any naturally occurring amino acid
  misc_feature (268)..(268): Xaa can be any naturally occurring amino acid
ASMHNKCVDRVCLAINTRRVAKVVRRARTMCPSGAIVVLVERPGMFSPRTQCVFVCRGPPHRVDPVVEIGCRQWMLELAPEMETRRWCSHGRAXAFGAPLRKAVPLVEQLLAAGVRKPCCCAATWRSSGVFAATQRGAPRKGAFCSLTKRGKGGGGDKFVGCSSVVEAGKAPAELGAATSLMGGLNRQGCFYPQISNDLNKSRFGCVVVSHFGWTPRCGRWWRPPPPPEGPRRVSACVADGPRPPWVGGPSSPRAPVVCALLNVLLNXSPTLYWGASTTPQTAPFGCKGGDLLGTFFLGGARRVMNTAGGHTTSVFIELLGETTPPRGEKESGGLLTTRACHALVIDTLGPAAWGGVATPPVAPSLIGCGDDTAPCTQERHAGGRVAAHTKKSVRPRHTRRSPQRGVKIKRQSK

SEQ ID NO: 974854 - protein, 182 aa, Homo sapiens
  misc_feature (180)..(180): Xaa can be any naturally occurring amino acid
MCRCGQQMGECLAHHGLWGGFFHTMWPRNRELRCVRRGRAFVFGRTSAPVGFCAGAHNSSHTQGWLCAPPLPRGREVDTCVCTARAFTQTVALSHTHAPRVFVRGGSHNPPVTPPRGGPLWGGLSLSPHTQCAVPAEEATSPLLTRDMRWGAHTLSRCGILKNPSLYMGVSPTHCGDISXPV

SEQ ID NO: 974855 - protein, 142 aa, Homo sapiens
MPGGDSDVLWVSGQRVWDNVRPGGFCPCRGGSVRRPPGLGIIAGEPTAAASHGVCNRDPARGLFNGDLPWRCHLPEGGDTTAHRTGGPIGLWDCFHPRTVRDPCLDSGATQGEDYVPGGGPTGVPALETPFPPEPLETARPY

SEQ ID NO: 974856 - protein, 391 aa, Homo sapiens
  misc_feature (302)..(302): Xaa can be any naturally occurring amino acid
MVPRARRSGACCSRAVLACEGCADSAGCEYARGRVLAALVLGWAQGALGRCFRVDPCGDDLGERAVDVGGGCVALTTKVLSEHDAIGLGVVLRGRGVLCRGFRCGGGGVSWWRRWVYGDVVGRAVLLPGASLCQRGVCGRWWSPHTVGGAVARGALLCVVSCGVTLGGEEARVVVSPPLGFGVEKYGCNTPAVGCVLHAHMRVSAPFECGIPRQRGCKKERYAGVRTLACVVVACGGRECAWSTRRRGALAGDRRGFDPQRRAEVRGGAGPLGQMTTGPTEEEGAPLQRGRRGAPTAGSPWXSAKEERIGGSQRGPHRASAQWRPTAWWDNRHDTACDRSCARERARGTAHDARALWDAGGNTRGVHMGRCVTVFVGTRRSCVSQDSRVCL

SEQ ID NO: 974857 - protein, 151 aa, Homo sapiens
MRPQRAITLRPAPTWAFWFFRGFALAFYTSALTFLPPTRIEGYHLPGRNKIHGPHFKHPAWYMFEPFLALGLVCPRPWPQRSNTWETLTLPQCIGAGEPAPRTLCAAPNHVKVLPPSHCCCSTLKEERKVERQRKEESEESDDDLGFGLFD

SEQ ID NO: 974858 - protein, 322 aa, Homo sapiens
  misc_feature (85)..(85): Xaa can be any naturally occurring amino acid
  misc_feature (129)..(129): Xaa can be any naturally occurring amino acid
MAFVWSPALLSFGGRPLLVGGGGITAMLGVAPLYSEGGGGARFPPRGGLGRPPSSGENGAFGCGVEDMFGYSEGGTLSLLSRRRXGCLRLHVDRFAARCVLPLRRGGALTWSTNKVRVVVVATTSAGCXYYKAGHYRIRLDCRAHKDGVGGWGRGRAHRKRFRLCGCTKLCWGKGVLCPPAGASLKAWCLRSWVCEDSVLTTRWAAASLCSSPPPLHQLVWGPPHLVGGVSYSGATGVGAFSRGEPLPLVGREVWTPPPALSLRAPQRIVGAHRMVLGRAPHEVFFLPPLEWGPPFWKEVERCLCRDRLPNRGLPTICGDRL

SEQ ID NO: 974859 - protein, 188 aa, Homo sapiens
  misc_feature (34)..(34): Xaa can be any naturally occurring amino acid
  misc_feature (121)..(121): Xaa can be any naturally occurring amino acid
MYYLFPHRRTSLACGEKTLSIVVFLGFGKEKLRXISPAVLNTYNGRVAHKTVAKGYFENRIIMGPHTTRVVWCPPLADCRSHKRSVVATTPRCGRPPLQGRHTLENNPNQEVDGEEKRGGXDHHHSCCRGRQHLRRGEEVVFVDATPWVAPTPPPVAHLLCGGVAPHHLLWRPTQGAPCGHTHKGGRP

SEQ ID NO: 974860 - protein, 270 aa, Homo sapiens
HRPYNLRHQEGHRGDKGVLSTRMGIFVGGVVNSCVVVVRTGSSRHCFPHAWGITRAAIYAASQHHKHPVPPLGVSRVIFPPLLLQGGPAAPLRCVDNTRVTTVVLRLIFCPRLCSAPSECVGAPTLSCFVLVVRFTPAPARHMGLQHRRDLPPTLGKRPQERLDSPSQVPTAVFAEPTLGAHPQGVGSPPFFDDIDVIPNMLAWVWVVHNPGVSTHVRWGALEGQENPLWIPEGTRFPVGAEIHNPLPTSHPLGRIRRETSCLSTKLVEE

SEQ ID NO: 974861 - protein, 126 aa, Homo sapiens
MCVPSEEKAFGRLLSDKYHAHLGEVLCSKETSSVLCSRVVLWGPPLVCSIGESVKHSVWPPLWSECRHPGCSRGAARVCVSLRESCLSIREGFGPHRDTHLCVCVLSFLGGVSAHGVCGESVPHTR

SEQ ID NO: 974862 - protein, 177 aa, Homo sapiens
  misc_feature (88)..(88): Xaa can be any naturally occurring amino acid
MILCMCGSGEKARCPPKRQKHLVRVCESEARDCDLFGPRAGVVCHSTHLRRPTEGVRTVCTATPCVCALVTLSPCPTRPTAPSGTLWXSRRDTPRGPHREPPSSRLSFGGSPLGALSPRCGSDNPTGFSPPSPRRPLGVNLPRAPLAATPSPVPPPLHFCTLLGVLGFLFFVNVQFV

SEQ ID NO: 974863 - protein, 132 aa, Homo sapiens
VGWPESPSRVVDGRPPGGRFQTAGPTVVGAVPGGGPKWARFPPGYCSGRPSVPGVHAPTRRFSGGLVSRASPGPVRAPGCTCAPGRVLRQLVCSSALVGGRPAPLRTTDQETMLAFRGVPFYTVAHTGIEAQ

SEQ ID NO: 974864 - protein, 67 aa, Homo sapiens
YSMGKIFQSASFKGLNIATGGPHHCVGLRSWPPPPPHKHCLGRVSLVYSVGEETLSRRFTAPEKQFN

SEQ ID NO: 974865 - protein, 126 aa, Homo sapiens
MRYNPPVEPHFVKGGDAPPLRPPGAMCPPHWSPGEGFWSPFSASLVFGQVLKGLTLGVSLALCGGLSKVHVCHPGERPENGVNPSPLVEMWTKHWCFLAREAPPGDFSGASYRFGITMPEISDNGV

SEQ ID NO: 974866 - protein, 373 aa, Homo sapiens
  misc_feature (279)..(279): Xaa can be any naturally occurring amino acid
LLSLRGMSIDSPRIYFFICSSCIAYLICYPALLLFLPPFFGVVGLARPPPPLISVRPDIPPCWVSHTNIISCAPQRGVGAAAAPPEGDVFCRHLPLPRGVSFFEGVGGRPPARHLLFRITLLRSPPSGMVVCSRPPLLGGGPPFFLFCFILAPLVLAFLVTPACVVLSHTHLVGAHNHDGGLLVVLGHLDSRRCLWEGPPVPADMCLMIAVGGASSFWKEEGSTSLLCAPAHAARCTTLLVVGSHPPAPRGASFLPTWSQRHAERGGGGHTHKLALSVXRRILRRWKKWMNSPPRPTEGFLPTTRRGGLSPAPRKILLSSSLHAEIFLPAEIHLTQPSVLILKHLARESSRRRACRYAHTSGESVAAPHTHIV

SEQ ID NO: 974867 - protein, 187 aa, Homo sapiens
MGIFGSSGPGPLPAAQRFLCAGPGGNLVCQTLSLNWFPGPDPVLSHLPERPSAQPAPRGPEAPKGELSRSGVQNPGWTHCPPSNLPQRGISLHMPHTRGRLEEWDQRFASQPGPQNPAPCVFRPLGTRPRFIKGLDPGLLGMCEGEKRQLVIPLRAKGMENAGAPPKIPGGANLVFEVETAPNRATN

SEQ ID NO: 974868 - protein, 408 aa, Homo sapiens
FCGDLFTHAVLRVVITNGDGVVCFALAASFTWGLCVYLPTAVFYGGSPPFLGQKRGFFPRFFTGLPGLQTDFSGVEAQGLAVTPFLRFIVLPTEPPSGLPNKGGSPFVRLGGAPPPKEVIEKYVIKGAPSGEGEIIMSPLIISVAALKLGAPREKDMYHIENALCFVVVSDTGVFFSSGECALSFFCPNMFRKEVFPFSGIPRRGPPGCLVHLLSPRLLPDPPRWRKIGVFLCPAPFLGLIKLEALLPRRKLTWKLYITFYLSGPTAPLDRVSHALHSALRALGRPPQRLRTPQHTGPRFPFFTRTDLCPTHTSGFPTLWTGLPRSETLSVCHKSRNTQKVVSLVGTLSTTTFHRRGTALSWFSGDPQLGVTPLSGFPVYPTGTCDHRRNTEVTPGGHLSFPGHTEKW

SEQ ID NO: 974869 - protein, 215 aa, Homo sapiens
  misc_feature (75)..(75): Xaa can be any naturally occurring amino acid
  misc_feature (125)..(125): Xaa can be any naturally occurring amino acid
DRFPSLGLTRMKFNHGHFKLLFLGPMLKVGPNEFYSWSTPAIPPAGLFLRDIRASDTRGPLFITPPARRIHPGPXPRKGRMTDVFSSTSFGHGPHLEESFERVLPPRVGSSFPHERLNDYSCLGXRRWAHIAFWVAPPTREHGGILAGWPFYRMLPSYCKVPGDSSLPPGVGPNAHPHAFSTIAIAILKCLHSTSQGLHQPLAPIVAPRNVNFKD

SEQ ID NO: 974870 - protein, 131 aa, Homo sapiens
MPQRVRPPYVSHGPHRANCGTQAHCVPPRCGPFALTLGHFVGTRRVISAPPEAPRPTTLRGAPLLSWARPRPMSVWKSLCLGAALPLCGTGLFSLGYLSLGYTRDSEPLCALWHPVISQSPGALRTLTYNV

SEQ ID NO: 974871 - protein, 163 aa, Homo sapiens
VYFFQGETILGVPSSSTKPIHEGSEGSSLSSVFEHTWPMMQRDKLGGHLSRLFFLGPEPSAWYPDSPQFITRDWHGVPRANGRNHWLAGIYISGMAPRPSLATEIQGFGILQPRSMAYPVYQRWPPRRWPHTTYSRRPFPRHMWLSLFLHVTEDAHLGGPHTY

SEQ ID NO: 974872 - protein, 149 aa, Homo sapiens
  misc_feature (23)..(23): Xaa can be any naturally occurring amino acid
MRLLGLLALCLGEKPHGGWRPGXCVAWPSLGSPMVRSRPSPWGPGVAPLQGSWVGVRACFASAMQPQGVTGEESFSCAAGGQVSPPRVCSSGALLCARRDTVWAALGGPLVLPLPAVGLVVHALVPGFPFVVTALVDYASFGLDFGGRR

SEQ ID NO: 974873 - protein, 96 aa, Homo sapiens
ATPWVNLPPWIVALDPVSSSWHGLLSRRVSGACSRKGRLRLPEVQVRRTCASAQPKWQRRPGTRRVRSGCPQDRYVSPSCPLRGLLQPGFVPLADR

SEQ ID NO: 974874 - protein, 253 aa, Homo sapiens
CLCVLPPLLCAPPRPPRFFGGPPPCGISRGEVSPPWVPPPWAAPCGVSPPGAPLWFFPRVFLSGFAHAPLGGPTFWGPPIVGGTRPPLGCTFPPLRGGGSLARSSSCWGVSPSAENRCVFLPSGSRVFLSCVSSPVVSRASSRAPHLWGVYSPRSFFLARIAPPLSPRFSLGPHDSCGHVVRPLAPPYTRALIVPTLCVISSCPPPLLGGSPLCALSRETLFFALLPPRALPLFPTLSLLPREQTLGGRARRI

SEQ ID NO: 974875 - protein, 109 aa, Homo sapiens
PVMPSGILMSPHELVRFQSIQRSSPRDENGETSVIVNPLWKNCWIRGLATQTLLGMVPGCAPTMTCDLSFASSPWQLPQSSPCPESGHLTTRGGALLTEGAEEKWQQLT

SEQ ID NO: 974876 - protein, 134 aa, Homo sapiens
RTKREKILAQLQCEPVQTLTRRYVKTTGQSHGYLSGPHPRCLAQGTTSGQAATHGLPILRLPPAAPQGYSWTGTSRRLPWSTWSLSRAPAPGVLPRANPAALGPTHLLDNPVPPEPTLPPGPYGAPAGPPDCAL

SEQ ID NO: 974877 - protein, 109 aa, Homo sapiens
  misc_feature (13)..(13): Xaa can be any naturally occurring amino acid
MTHNMLLRLPMVXHKGSNFHGDITRTPPHTTLWLLLFFLMVAYKYKRPTASCTVMPLVGNLGTFILGSQILLKNGGLFHWCFVIVSKARFYLIDPMPCVARFFLGKSIF

SEQ ID NO: 974878 - protein, 144 aa, Homo sapiens
MSLSYVFASSRRREHDTLASRALVMEEQSAGVAQLTLAREREIVERTTRRLGRSLVRTHARRESETHTHTDVVVVCVCEKYVFGSVSLTSTPAEGTNDHICIYTIRNTHKTDYDSPHHTHAREREILSSSYVHTHKQIQTHLTA

SEQ ID NO: 974879 - protein, 308 aa, Homo sapiens
  misc_feature (60)..(60): Xaa can be any naturally occurring amino acid
  misc_feature (155)..(155): Xaa can be any naturally occurring amino acid
MGAHQEDRGCVNPSPPLYLIPRALKVYTEILCVGPQYSRTTQRCCHCPNVFPRERGENSXVRLRGVNFFIKNRCGSVKKGKVVSLTFREKLWVSVKREGHNLSGELLREYVRKVYHTPAIPAVIHARFRCIITFSAPPREGPPHSESEVFSYCVXKNKGLPAREFLSRGKPRERRPLVEGFPTQKRRVFWAFFSPTRGRTHCYRGAFYYALEKYRVGPPPKERVSRVVPTLWGPTAHEEVSLWARLAHNSPMRRGLLSCCAKGLVLYGDAPGFTPHRKKWGPTRLVARFWFFSGKNSRKDHTRVYKSH

SEQ ID NO: 974880 - protein, 337 aa, Homo sapiens
MRFVGRLLCPPAGRFLPCVPPGAPHEVVLTGSLFLSGPSVPRRVAPGVPLGEPTIGGPMALPLAQEPVLVIPGFWMFPPPGGHMGNWAPVCPYPTEDAGPSLGRPPPAEHGRGYTKGCYTKLFSPGRLFWGVVPPVTLCLYMGEDNRQQMVGGPHIVSRMPRLGPPCGPLSPRFTEWGFLSPWRGPPTLRAPLVVRIYCSFFRLWSSRALLQEKYFAAYCGFLLRMSHWTQHTSRTATYSRILFHSEKSDTTSPTSGPAESVLAGCARTQRVTIHPNLSLYLIAGTPTPHCHGHLGPKRLEPQSEALSVTSGELISFEKENVLTPTVEGGVPRPPFV

SEQ ID NO: 974881 - protein, 424 aa, Homo sapiens
  misc_feature (27)..(27): Xaa can be any naturally occurring amino acid
MIYVYVLTCPISLCAVSCAGLWDLFFXLYVMRPAGPGYPPVRVPLSAGVPRWWLSPIFLCGATKPIGGPTTPDAPPRCRDVSFSREAFVFIWHKDTLMCTGIFRGTLGTPLPLWKNLSVMYISRGNFGLLGLHPTEGLPWGLTGTIVACATYSGPRLCARGLGPLAPPWWKSPVGPAPRNTVVLRALAGRASPLCPERLLGLFTPRESVCPGHNPSGKSLSGIVAAYSQTRRHKVGSPAKIHPCLRHMLKQFRPFCPFGTGPHTPHRLFRPNGSSTFITPPEKCLEIFHPERKHFCTIFRFPRRGLSRHMCATLSRSAQNWLTHTLLHSTYPHFLITHTRVPQHESPGPLFCGETGVITLPTLLKKVRPFWLSPLCLCGCCPRGCCHPPQLRSCVRACTAPRYRLKPRKSREESDEDMGFGLFD

SEQ ID NO: 974882 - protein, 110 aa, Homo sapiens
MLVGPLEVLDHTERKMRSSTKSTKFFAEKTRSLAFSLLHVDISLPHKGNPRARLILCVQTGRSHTPPRVENQIALDSCQYLPLAKNCPALFIGLARPRSELFLRACFSFI

SEQ ID NO: 974883 - protein, 282 aa, Homo sapiens
  misc_feature (170)..(170): Xaa can be any naturally occurring amino acid
MTTLLSPVVFFLSAGISLFSESVVLPKVFFSPASSTLTTVVWWCCTPHDSSLSFYPVMAPHRVFVSWVWARYLFSCSNTIASLLSQYLVVCGVEAVLLILCIRVSLFFSPFQSDATGAGRPHSLCVVGRTLTSLLPPTHTEEVLCVAAPMIVVPRLLSTPLLFFVVLVTXAETNVFVSVLVVDPYIRRGAPSFLCFVFNCSSNTCSFLLFILRWLVGCFVLVLTPSSLVVRKLVRAERRCFFFLFVDDTLRFRRCVVDYKLVYEMVGGAPHQPVVVLSSRGC

SEQ ID NO: 974884 - protein, 154 aa, Homo sapiens
SALLLIVLFRPSSCFVVLLLVSIFCLVSLVFFVCLLFAHTWGAPFCHPKTRVVKAAPGLHREVTYSRPLGATDILTTDQRLCEEIRPLSPAKSSRHQDEPGYVTHLMNRIQRGPHKRYLPIQLPEEEKRKESTHYGPRGSQPWITEIIEVDPRP

SEQ ID NO: 974885 - protein, 209 aa, Homo sapiens
  misc_feature (122)..(122): Xaa can be any naturally occurring amino acid
QGPSSKYPLWEIPREYACLQQVDGVLSPLAWCNNRISAVVEHPLSFVVSGVVSLLRLLMERKGCSPPHTTHNWCSRSVCGLLLMRVHCGRTTGSSLDPPGALSAHTDYDSHFVARLGARPQXGVAHTTSRSHDLFPLVALPLFSHTTRPQSAERVSHIETPRERRPSSHSHCVSLSLSCGTLTQKPAMRGAGRSLCRERDITASHTLCV

SEQ ID NO: 974886 - protein, 112 aa, Homo sapiens
VLPVQSIFRSNLLIPGKIPLSHDFSKTLVFTSGVLTSPVGGSTHLAGIIGFVALGHSPCQACGPPQLQHFTRHAALGPAQHYTFGGCSPNTRPRARAGLLQNMATYRRLTLR

SEQ ID NO: 974887 - protein, 109 aa, Homo sapiens
MEKLPRSYPEDLDYRSLTEGDYTETIDLKADKSGLLWKMMPSRTFIDWPGEVSALASENMRDVLYVRRLDAAGDFQLKPMLIYHSKNPMALRTYAKSTLPVPYKWDNKV

SEQ ID NO: 974888 - protein, 265 aa, Homo sapiens
MRLYKDSEKRYSSSRTREMQLLSPDGASMLLGAEEQAEAPRMAVPKENGGTEQRYEGPHDLGPGSVTQPAKTLEENKTTSDSMLHFRNIICPKTGQQGKRRLMRKRKDPWFLARWVAHQQSPSITPADALAWLGWMGKIHHGTLVQEREIKARKLTQNGMQTKIPNPKNTFKIYTYNKEAGQYPHRRQGRKFNQRPQGNIWVGLQSGKLSKVHDLNDRHPKMALIRGPRNGPKTGGIGTGPGTKNGRAPRNSGSQLQRGNTHGGP

SEQ ID NO: 974889 - protein, 131 aa, Homo sapiens
MVCDVQHIATCHRGRPLRVTHKGCISLTGHRREELSVFCSWVCFRLLYWNPLLLEGLFPETVDLTLHGHWGPMDKYVTELCFATGDAVGQKAGQMAEAFGYSQLYPLLGYAILSYHECGASVKAVAMLWKL

SEQ ID NO: 974890 - protein, 111 aa, Homo sapiens
TEWGRPGTKRECTCVPANMKIIKTMGDVEKGKTRIDDEWCCPVTERKKMGGQHHTTWAKSPLVSFARRDRVMAALDTLDTMTPVKWMNEQGVIGEMTDTLEWSMTEKSQRM

SEQ ID NO: 974891 - protein, 81 aa, Homo sapiens
AWLVMPFCEDLYLWSERSFDLRPASLLSKLTVGWALTIVTRIRSWHMDMSPLRSQNYLFGCELKVRPKYYHLKVWTNDLIG

SEQ ID NO: 974892 - protein, 68 aa, Homo sapiens
GEAVTEALPLLHPAVSTVAHETSCCFVGVVSTCLTGVARDRTESNPWYQLKTRCQVWKSLSAPFQSGL

SEQ ID NO: 974893 - protein, 149 aa, Homo sapiens
LSRARASFLQNVYWCHEILCKLSLRRVIYSSTAPRSAYGSVKASYLTFCMLDAGMHLVEQSFETSSIEGPEKVSDGVSPFGHTMCRLEDTETIVHQKNQEYLHYLTLPRSKDQNTETCYQARVITVLIWVHLRRGMILGAIYGDSMDLV

SEQ ID NO: 974894 - protein, 212 aa, Homo sapiens
MMHLQAQHSGPQQRCTVGVRTGHQVCPVISSFIMGSRRVEPTGPETVQGWTADTNVITDKNRTRRTGDRRRSRHGRERRPRKGQERPSHGPTGTGRESQRENGAANGQGRHNRQRDHNMHEKDKAQQRARDEKNRRELRRPRTDPATETHSATTKDIELSTLYISKIQSTPILQSKTILERAKDTLERIHGQVRNTPNLKHVHINFSTYQRP

SEQ ID NO: 974895 - protein, 464 aa, Homo sapiens
TEKRDGGRVLSRDAGRQSNKVASNTRPDTQNKNNAQRQAKRDKRNEKKKDERPGQHIDETPLMQHTKQREEHNEPSTPPRKHPRGTPQHANTQPPHPPRRHRNSRAPHATPEREHPHATQETKTQTDQTKPRHEPLHTATPRQDTYTEEPTEAAKRTNTDTRQQTPPQGNDKSSPTLTPTDHHSPTAPDSDRDPHRDAPNNATGAHEKKRRKHHAPPSQLNPAKTPHPAPTQRGNTTTQATAPHHHHPTPAPTGTPNRQRPKHQHDCRTQDSRPRPGRRHQPSTAPPTTATPKATRRTSTKHQPDDHAPRQYTHKSYASHTEPQRNTTPTAHEEPPQQPTTHTPRTLTKTKRHTTPQIKKPESHQHTHQPRQHIPATAHKNRTQEQRPRDTNERQQTREQEETRQTGDGRRRKREERKTETQRAEQERETEESEEAAHAPGRHGSQQEEKGKEAERRRVGEQGK

SEQ ID NO: 974896 - protein, 81 aa, Homo sapiens
  misc_feature (71)..(71): Xaa can be any naturally occurring amino acid
SPSGESELSGCVVASRENRIALWLQWLSLTDLKRQIAEFKEALFTSLSKDGDGTIDNREELGTCQLDGSSXWARIPSMKQS

SEQ ID NO: 974897 - protein, 139 aa, Homo sapiens
GAQSGLVVRWAVLVFARRCGSSSGSGRRAGVGESGHKTSALGLQRKWPEPSRCSISPPVGKPPRKEWPGTAARKRRSFYRRGERSPHRISRPGRPVPARRDSVVNQRSTRAASSGKVGAPSQSVGSRATSPPGFSKTEP

SEQ ID NO: 974898 - protein, 169 aa, Homo sapiens
GLLSCKDAVSRRRCLSASAHEWDRVSHAVSREAVTGYPRDHESRLRQGIQAHSTSDFVTYGKPTIGTKLGCASPWQGIHGADSDVLLGYDGVVFAKTLVDYCRPHCLCKITVRSFCSVVCDVHTCHPNKKGTGVTLVTAIVGDPLTQHGVSRGRVARDTMGQGEEPTME

SEQ ID NO: 974899 - protein, 189 aa, Homo sapiens
LPAQSPGADYGCDSLYCLLRYARHAAARTQLVPFAFALSTSRTVRNDSCSQFSWKDTRGPASIQAGEGAGLALLHTQCVGLQRTHNGSHTLDVENPWVIEPLNILEQVQFLHVLPHQNNQGQRYAHMWANSNQVRHNLIATPHAHKIHNDGTDIWCDFPLHITPDLHPTAHFVTFGLPLAPRWPPSQKP

SEQ ID NO: 974900 - protein, 117 aa, Homo sapiens
MTIAPFSRRLFTKPYFTPNNWDQRDCIIEGTCERRHPKSICVDHLSWDTTPIFSVRAQPAYIPFEQILHVITYPHGALITVFPKQLWASPCTKSLCAHNKQIQSFRHTMTNAPVYKC

SEQ ID NO: 974901 - protein, 143 aa, Homo sapiens
  misc_feature (19)..(19): Xaa can be any naturally occurring amino acid
  misc_feature (129)..(129): Xaa can be any naturally occurring amino acid
  misc_feature (138)..(138): Xaa can be any naturally occurring amino acid
MSGAEVLRWHDSTGHRVGXRHALCDTIRALAHEKVNSCNTCYSDRAHSDINAHVVQPIPRSLLDGAPSRKLDYFSFTPSNYEHAGIRKITIVETKKGATPVFWVQRDAFGTFVHKGIVHHHMIVVGKRXGGILLELMXEILVA

SEQ ID NO: 974902 - protein, 260 aa, Homo sapiens
PENFAMGFSLQLDESAACFTDCCAACVCSYIGLISLLRNDLLLCESLRSTATGEEIFNCINSFMQKHDTLNGQHTCVACSVVHASRAVAWAQLPKLSPYYKYVAPDSTSSHCLLYRHALASEHNAYISNTMCYTRQYKSSNYIKARAHQSRLLTHINCEDTWVLQYHSTFFYIQTVKWLLEVKGPGSDYWNYHVNFGIPMDSGTRLSDYVTKFILGLLTTCRIWRNICTTITAVHWSNARTPVDRCPAFDYSVAHGNTLD

SEQ ID NO: 974903 - protein, 70 aa, Homo sapiens
IESLDADMPAVLKINHWTRGSRLCANNSSSTRTKIYMYINKFLMYWMNFVTVVCIESIRRTMITSVEDVG

SEQ ID NO: 974904 - protein, 77 aa, Homo sapiens
  misc_feature (23)..(23): Xaa can be any naturally occurring amino acid
GVSAGDRLREEDGVPDLVLDMRXYPWMISSIRDQTRSTYYPSVAGQSFNPCVRASSEALRRLTLHCFLSIVVHLELA

SEQ ID NO: 974905 - protein, 385 aa, Homo sapiens
  misc_feature (217)..(217): Xaa can be any naturally occurring amino acid
  misc_feature (307)..(307): Xaa can be any naturally occurring amino acid
RAPCGSCQQAGCERIPWCSLLGGWRLPVCCLLAVCPPVRACPVCAVYVMFVLAVDLLPPVPVCDACLAVWTVLTSAVVQQLTDWTRGTAAGCDAGDVHVHVDPEACATPQRAEAPAGCAAGTRQCPTGEDAERQGTCIDTDLHEENPYNTGWLKDLGICGPNSRANNSGKQLGAEPHLLYSRSLEHPSGQPRQENPFIIPKLDLVLPFNADGHLSYXYYIWRTETSSTLNSLEKTTTGVHVTAPHFSLTYSHAERYHLGYEARSLRTYRDTLRQNDAAFVDTSKGIFGLVITILMGPHWCIHTTNFXSIGHGQKSKITHTKPHLRLPGQQLLGTHFRVSLGTQLTRSDKAPRLNLLGLQQFGITGNTGLHHVTLDPHRFCLSENP

SEQ ID NO: 974906 - protein, 149 aa, Homo sapiens
MRWKKKARIRRLTSEPVRRAPCKAWNFDVCYSIQEMRRQIERSGTKLLKSDIQYADAQEPELTSQHLHDGDSFQMSSLRRCTVSSNWKHRLQFVIERNVKVHFMDALGKRQRWNYIKGEFLSKFFPELSSFADAENSYKNHSCKFTNAR

SEQ ID NO: 974907 - protein, 318 aa, Homo sapiens
MAAGTQYTYPEKLECAFKALIAAQYSWRLTVRVRLRTTPLPYLAKPTRTPEFLRKFPAGKVPAMLSGDDGFCAALTSNAIAYYVQQLRSCGEVLHEAAAQVVQWVSSELIPDLVPPASTKGVPTLGIMHHNKQATETVPQDGTWRRTSCRMTAMLYLDPHDGTFLGAADRVDTRVKSHDDPATPVGAPYKPGYKEAITTAGAIPKNTRTVHPTAINQDHRTRPRPGPRQTRCDHAASLDANTRWREPKLNKDDPGQQRLRRREPNAQRWAEAVKNERLPRVTTKQTEYLTQPVYSTQAKAQTNQPPQLARQQPNTQTN

SEQ ID NO: 974908 - protein, 98 aa, Homo sapiens
HSFLVPRDILAGADVCRSRLAPKGKDRLGVVAKTRTNIARWMIEIILLGSEASVIENSWEVPSMGYKRDLVTEVIQTRADSLGSMVTFFGLLEPDEPM

SEQ ID NO: 974909 - protein, 146 aa, Homo sapiens
GTRTFAASEMGYERQMPSQPLNATTLGSVALTVRARRDWRNRDISFQAYYLKFPGFRRTLFTSWTLGPVYSKKTQPGHTRVGNYPEPLETQHTGRTRLPLHSTTTWPSSLERGLLGRLENTRILREPGFGRNSIINITRDGFKKKH

SEQ ID NO: 974910 - protein, 327 aa, Homo sapiens
AVKGRRGTRRGPALVAADSAGLPAVEAAWRQDQLAAGASEAGAHGSGMALASPLSIQLLALAKFNGPTWVGWGGLFNSPRGWGQTAGRLIESLFMRKLARTPGAAGIRGSFRRALFGNGDGPTGTPYEPPGAGSTYPGAHAFVEAPWSAGRGVGTPGLAETDPWNGKARPTLPRRTAWSYPDCSMSTEQDGAKSRGCHQQSGLVWGTDSARGARGTRWRPSPEQARSDCMRTQTWVTLGQDTSSMGDNAPDRVEPNRSRTGEPLAAHWNGSTPLGPTQTRHRATADKRAAEHTPINRGASYHHNTRVVMRARAPGPQGRAPHVHPTD

SEQ ID NO: 974911 - protein, 482 aa, Homo sapiens
DDDVGTVRLRSGTCCCATRPTTHDDTYNYWVLYETHGNDTTFTYLNVVPMCHHLLKHGTATHNNLGQTLQCVSFGRNDMVKAPVTPRYTCRHTNDTNTCTTPPVGRRTTTCLRRTLDELPHDTYHSPWKQHTLTLWLGHLHDTDRTRHTRPDRLHYALTLHNTHAYLKDVTTLGATCTYFNYPTPPTTRVLHWTLHLYEMVTQSPFVHSHSFNNHPSHFTAFSGPLTWTRKLTEWYGRPDPVIFTNSLHEPGDFCWVFKHLEHYLFSSGSMSGQISHHFMVQTSHKLSRLTHGGNYTVGVQPTIIQQDLIGHEATYTNTGHMWFPPYINTTRNEMTVGHIPFNRTRIPGGRHMEPDNNPSEDHYTTLQPVGTTREHNYSIDPTIKRECRNLRPPTSEVQEPHRHKTSNRGALRAEHKPTQVAHLKQARAARQPNIKAEAIAQQEKRRIHIEPKTVITPRVYTLGVSPPHTTDSMGDIHTYQQ

SEQ ID NO: 974912 - protein, 350 aa, Homo sapiens
GNPAPVSIPCCGGSCCFALSTAYIFGSTLLYMSCNTHPEGLQLDSCSQQDHEPQGGTNNSRRAALRAVNITEKGLQLHSCSPAQATNPPAQDSTHSGTHPNISKEQTPRRATFTSCINTHTARGPRTSIFEVQGDQETNQFGATNTTSFMPGEASLKTYGAFTQQHIGSTISLQQLSQGAAVGRFPPILATCTSSDISRWLPGHARTTRRRNQEQHHGTTIPSPTSTTSTGIHTVMTGTQAASDGRNGMPRQGRPCAPSPWAQRPSTLTPWPHKGTPNMENDRCQLTRSARTHEARTAPGNGKLPTDRTKEKNTSRRDQPHGETTWRSEHAGTPYCGAAGAAQQNSRYSR

SEQ ID NO: 974913 - protein, 381 aa, Homo sapiens
KREEGEDGWWPGPGSWESSGCKGASRNVMPLGARTASHMTKAHVPGALILRTPASNGPPPPKQVINHACGQHHATLPGMMAMGYGRIPEAPMTDSQHEEIHGYSMGPAGPEVELGMNRCTGTKTLYNRNRVDIHPPDWYTWACHVYAKIIRDFLGCMISCAEVGKVYPGSISHVGPKAVSLQYFWYLERGGDHSKRTQRGWLTMSTDGGFVAALGSSTKGLPQITRNFNLSIELPYSHFSGGGNHTHNKTTPQHHSRQQKRTSESAKHTHTGRTRGHQKQSKRGNDAHQKEPRATDTGVGTTTQHGGEPQQANTTPTEQSQQRDKQRTRDYYTSSGVTPADRSRETTAARKDRVAVHEEASAHERHTQTKKERTDSAPTPT

SEQ ID NO: 974914 - protein, 374 aa, Homo sapiens
MAANQRISSDYKGILQLEHVGVTPGWAQDGVSNLRDPQGDRHTHMRTSQKVRGDLTGVETQVKPGGNSGTFTYTGTIRYRASRTEHLRALVRKDRGVATPNDPESPGAKGPRGAPITPPRYGTGTGRGTITVLERNIIPSWMQTWHNSDNSGDYGEPRNGLRSPGVHHGTTQKRSNWELWKHHGWRDWTTGGVTRLITRHRAHPNDRDQPMERRTSRVVPEANGPGENNSQSKHHPKGSTTGLTSTYEGATYRGRNEGATPVKDTDDSTGYLANHQVAQEGQERSKNTRGYQNGEDKPPQIGDCHGTTQRETTVTSTVSRKQQRRKHAVKQRVTHRTNSRPVTSSSASQGGTSHIRQQRRTRSHNAKKRGETPR

SEQ ID NO: 974915 - protein, 257 aa, Homo sapiens
MAVAIAAARVLAVNRGLSQAALLLLRQAWGSGTDRSSPPQGKQQASFHLWDDKPQFPGASAELNTITVGNSSSPNVISGIPIYRVMNREWPGSSNPKRGTPTCKAEGAEAPTMSLTLFNQTMDRILYESQPAGPESPSEMTNYGEEGTARGRFAAALTHHGTGVFDKYRAAKVVLMYPGTYPPWHLFQVAQCYGTPSCVFGARGRQIACPLRLRGKPPLSSLFLSIATQSPQGGGGLRRQAVHCQRSRHGTSDRGRH

SEQ ID NO: 974916 - protein, 119 aa, Homo sapiens
MVFRRYVEVSGWPMSPLDLMPKNRSRFVDVSRSEHGLRVDGTLLFNVSDDYGLLPFKVALQLSLFVILKFLHSVHQEVMSGEAWRDVLNNLMTKNGAAKYDRPTKRIEGQDEKGVPDGS

SEQ ID NO: 974917 - protein, 76 aa, Homo sapiens
  misc_feature (17)..(17): Xaa can be any naturally occurring amino acid
GPDVHSSSSGCTSCQWXRYEEVSVSGFEEFHRAVETAQWARPFSPTLRVLRTPGGKSCAPNACRAEPVVREGLTAH

SEQ ID NO: 974918 - protein, 83 aa, Homo sapiens
SSRSSVNSRSMMALVQRLPEAISIWDTLSQVYQVPPLNFSCRPASAVGDCSLSDPVCPTEVLFLKSCASDTFDFLSLECCFLW

SEQ ID NO: 974919 - protein, 85 aa, Homo sapiens
AKLRSQCGSLQKSRNRTQGSRAGMLVVLSAQEIGVLWERQDHLVQLLIIIILCKKMYKYYCITDVQGLSMDNFMTHGSAPTVYTI

SEQ ID NO: 974920 - protein, 173 aa, Homo sapiens
MAPKAKKEAPAPPKAEDKAKALKAKKASVEKVSTALSKRQKIQQRSPTFLGWTERLLRLLETAQISSGKPASQEKTKLDQYAIIKSPGPDEVLPMKEQNRTRTTQQNNYGCTQLGWESSQHAQPKAPRHLHTRLRDRKALDIATFDMLAKGTKKPRSLRALPSRQHEGLMYTT

SEQ ID NO: 974921 - protein, 121 aa, Homo sapiens
MARDLIGPALPAPVQDPRNSGGRKAGPEPVCRTKLCPPNYKQQQFRFIRPSGEGQVVLCTKKGHINESERTMTCVPNVQENRGNTQDAADSMMTGMGNMDPKPYPSLNSTTRRMILPPRPN

SEQ ID NO: 974922 - protein, 306 aa, Homo sapiens
  misc_feature (80)..(80): Xaa can be any naturally occurring amino acid
LLWVRHCQPAVAHYRAVSSASPSEPRETADPAPGTRRGGVPGEFPGTTHSVPTVSQESGHMGSTDVAHRIRGTARPQNLXPVEKYLTSASCMRTLNEAHFWTITLKEGEHGYAQRINTVVPQSPFGTGDHGNKHFITYARYNHEWASRQFTTTSDITILYALATIGIPQGSHNGQGYNHISHGTPLGGCIPNMSRDIERHEHSQYKKPEITNEDLKKKETDQAKYTTSYLVTIRQSAGQIHGERNLTFAGHGFIILPGFLATQHPNKVRITPQGASPKMDGGVTCGQHHVPPVGLTMIGMDPYVSH

SEQ ID NO: 974923 - protein, 115 aa, Homo sapiens
ETFFAESRRGFLLQQCLDGTRCSFPTPAAAHSQPSVTSLTAPWTGPKAPTAAPAGLAQPPAASSALLSRRHEDRVPPRRCARNYHQDSEARHSTRQINLEASTPPSVLPVHVLTT

SEQ ID NO: 974924 - protein, 74 aa, Homo sapiens
GKGNCEANVTVVPSISDLLVDLVHHHHVGARLVCLRVLPSRVCHPAFTNGLPCCEEFHHEESMAVEHLAGSMRT

SEQ ID NO: 974925 - protein, 164 aa, Homo sapiens
AVVGPAGLSLASPVWDGTDPGTLFQTSDSTSDRPSPYGNLREHLLGHSPAIWDLPSSELVVSILLGKTKQRAPRFVRDYFHADDGGGERSILVLGHIKVGVQDLPYQGERSSTGGLSYKKTRGLDDGRAGKQKMKHLCVLHAEYRVRRQERGEGHKRGLILERM

SEQ ID NO: 974926 - protein, 106 aa, Homo sapiens
MRMEWMAHGAGLVADVLVLLPCTCWSRSLYMLSPGSWTVFNSMLVSIVRDGTIHMDTLHAPIHIISRLLHYFEICTIDHTMATQESEDSIGRKTQTYEVGMRTYKM

SEQ ID NO: 974927 - protein, 98 aa, Homo sapiens
SRRLVTVTATIARGWVPETWRSRSPVGSCVRVGAETSPGQGSYQDGLRRPGFAEGPPAGRNPRRKKTQTDRRGGSAGSQPQACADGVRSLALYQAAVQ

SEQ ID NO: 974928 - protein, 34 aa, Homo sapiens
HKNKNKKDTAQLYYIYGHPLSPNDERSELRSEEA

SEQ ID NO: 974929 - protein, 249 aa, Homo sapiens
MAGKYRGADGMLLVGIPCTDAREHYDAERIADISGWHGVHELRSIQLASENPEVGRRHTMHACLRRAGTRVLLAVGRFERLTVAGNLTYRGGSERSVIRGGGRCCRARQEPVLADVVYQKNNSGVPRTSGITHPTEYAYLARQFRDKTKRHFLVTDAWGAPKDEGFDREYLGRQVFLQNVECTLDYTGTHLRKDHPVSSLTEGNLGKGGTKEMLQGPHPERVTLCCDDVVHHLDRGISPTRGIRDRPEV

SEQ ID NO: 974930 - protein, 512 aa, Homo sapiens
ALARARLCLALRSVYFTTADGCVSQNSSASASIASRMPKAWQMQLGHEFPIHLQHSGFPRFKTILLASALAEEYGTYHVLQTTHCKLGLRSLSSTAQNYTYASFNRHHTGTRKQLFNTPLVHPSKLEPVFKMSSELSVSSHQRIPETEQQANQTHWHISQLTTREQTNFDTSTPEVLTVTQPTGKSTNHTPAPTSEWQLLTWNWFALIHTKGLSHTFGSRKRTPPIGQGINMATKHFFKAKLYYPQGVSGQGASAKHGGLGTRSPPLGDTSFPWLPTSPNLYPLQQQRKQISARTQTQQGNLNVGHKQAGTYTPKNTWLSHQRQLTMRTVPPSTKQAHSHRSHPFDTTHCALALRTQDPTPKTLPAHYTERTHRPLNQGRPPTTSGPIWDRQTQIYGAPTTNIRYNIILAPDKSSIEQQWPGHRHTNPTLRHTYTLNPKHSYTKHKTDDSRTAHINPTTDHDAIPRTPTKRSTEELTRTHMKQQQPAPRQRARQNNKHDHSNSPKTSSSTHH

SEQ ID NO: 974931 - protein, 294 aa, Homo sapiens
MSDTSQNPCDWSSWSHNSPVFTAVLVICANRESCLWSRIYDLIIALCIVGYQAPDEWVSWHGVLMEILLDEMLSLGPACRYSVIAKEHKRQDCGLHMTWSVGILVLLHATEWGKAMERSHGFTESRMVIIFQESQSAEALDKFTATKSVEGVICGSGNPAQYQLSDCLPSQLHDIPKENFSCLTRLESQLSLKLKWFLKLGVTVMMYRMSSSGDSIPRVNIQMSAMQVHSQEGKGVRGSEKRRGPGDWRDGTECGGAKVNHHGHFGNPLASAVAQGGEGDWTQGASTRKNGAQR

SEQ ID NO: 974932 - protein, 225 aa, Homo sapiens
MPLEQRSQYCKAEEGLEDRGEVLEAWWVRRLLLLRSMRWLSPLLARRWIVRPGGGALLSSQQILPSSSSWVASSSRDLHELLLSRSQSYEDSSNQEEEGPGQLPVTGVRVPSKYSGGRWQSGPRFCPHSIERRLLVTTAEFGGDVSSSMWQDLVSCDRQRECRFVGGLGSACGVGPGLSFCTAGFLEAGVACQPGAGAGIRGVPGEGGCCGADLVTALGGRTCFA

SEQ ID NO: 974933 - protein, 178 aa, Homo sapiens
CLPAVWGDGGLPPYVAKCPASRLEGRTSFPEDTVITYTCEEKLVKLPGEKDSVICLKGSQWSDIDEFCNRTLRGANKAKFCIPQTALYHSELFPVGTVWTYECRPGYRRDTFSITKTNLPSDIEHVVHSSRICKKNIMPYSRDATTKWSTIDVPGGTIIGATISFSCNTGVQNYFGRF

SEQ ID NO: 974934 - protein, 119 aa, Homo sapiens
MSVMTGFLAKITTTIDITQLITGPVHYYPKSQTDSHIYITRHTHVTSLSNTTKTDTGNDQLRVNTDLHRAMGNCKFYQQGNDIDKLIPKSNHTQPRQDHSPSGNPILKGLRKCLTYERK

SEQ ID NO: 974935 - protein, 330 aa, Homo sapiens
TISRDPGRKGDDEGALGSFTGTVPDNHAWSAVEHGDTRWVSRNSDAIGGRGRRDSVFENLITVMQASENWACSDHGVNWARIARNRKHECHEVGRGTSRKNPLGQLPMRLYRCLHMGLSNKDRVPLCHLMGTSTGDWLTRHSSVDGYMGPLTGQKMTFLSVNRKALKTHCGTMMLSTTSGGKWIIGGRKGLATRCWENLIGGIAWGEQSLGGDGDLWELCSVLPVAGRPGSSNRKYDAVTMQSQPHAGPLRGVVTNSKTIMNKNSTTDPKAGRWAQGLSNMQRVVADSPLEGTMNGAPVGRGDRTLCGQKKAMVSATNTRINVPKKSGEN

SEQ ID NO: 974936 - protein, 202 aa, Homo sapiens
MQLVSAVLTRCEEISYRPVEKNVMKMKGSQDTSESLVHKYVLDAHEREIDGEIKSEAPSVNFIIEQMDRKIKSYRKFRYITEVKARHPSYPSPLLAKGTQLEGRSWYSSSQEACGQWEIAPLKISVTIFILMYRLRSALRIPWNRYNCLVFLHEVDLNCHVFTDICAGLHLLISEIGVRMRFRVNVMIASRNQTVRVPITVG

SEQ ID NO: 974937 - protein, 306 aa, Homo sapiens
ELVMMPLLGAVSHGGRRAFDLSVLSFLLTILEVLCSVAPDGIDFECDTGTSEPPWRSPRRKYSVWGCLTISAVQSYHHVDTVGVPECNTESPVILRTVSLEGWCKRMSCTLLKQRQLNLRRQSNESNTVQTLNNVCTANGFPLGALEITPPSGLNGLNCGSRASAYSGTSTLVPVPGTMPSQTHDRGGRCDILVYSWETRLLPPGRVDTARVRTAATVTLAACCTRLTMIIQQGDALQRTDHCCLSMTRKLLHTARAALSAYPAQAKQHMALINVYPDHVPTPTGNPSTQQPRRITTVLIRDLQAP

SEQ ID NO: 974938 - protein, 43 aa, Homo sapiens
MPAYSKYLYRLTHPEEKDQKETMTSPHYKRADKDMYNCENKHT

SEQ ID NO: 974939 - protein, 41 aa, Homo sapiens
MRSQHRLQPRKGQNTKDTKGTSNEITNRHRPQKTQKRKRTA

SEQ ID NO: 974940 - protein, 77 aa, Homo sapiens
MPYHPSWPESRHSRTRQTLPGTGTGKGGPRYITAQEYTRKEGARGQQYNKGGAEMEHRKQKQNKKEGGNIQGETTRS

SEQ ID NO: 974941 - protein, 128 aa, Homo sapiens
MGGLPSSSGKTTIKMPCLPYRVMNVVLLSLSWVFNSFWHAVPRGVGLEDGSIDQDLCCGRHYETVVMPSQFHAEAPKSVALTGVLMLVEGLCKWCELRNEMVGRVNDGLGDRRYLERVESEWWMMFNR

SEQ ID NO: 974942 - protein, 309 aa, Homo sapiens
  misc_feature (229)..(229): Xaa can be any naturally occurring amino acid
MSGPWRWARIFLLLAGICPCAPPGAVLSPTVLRYNLIGAVLEMDLCSQGILLRYIWMVSPSCASDRQKMQGKAARDSRAEDVLGNKTWDRETRDLTGNGKDLGDDPGFISRIMKEGCAVPSQEIRVCEIHEEKQHRGASQQFLATMGSFFLSQKLETEELDSGPVLQSSELGHERQEFLEGGCLKTKTKLSGYELRLACRNYGRYARNPGVRPERSSVPQGEWYQAGRXPGRIPVTGGSAQPRESYDGAGGNLGPTRMGECPGMNHARGHRSGRQDPEQEHNGAEGQESRGGGNTKEHEADTTLTVETR

SEQ ID NO: 974943 - protein, 139 aa, Homo sapiens
MNRAFHVCAVNVVIAGTYEKSVVSDSVFGILSTLKKGPGEDEQETFVNTVRESNAATEGPHCASMNRESIALSSAYSSVMVRPGLGIRPIEVRLIGVGGWAETTHETLLNVKQNAKIGTVVTRNRLTQYLHRNEEKPLE

SEQ ID NO: 974944 - protein, 150 aa, Homo sapiens
MTTSTSFKGVDPNSRNSSRVCGLQVVDPIHIRFDEPREQPVRKNKMASNIFGTPEENQASWAKSAGAKSSGGREDLESSGLQRRNSSEASSGDFLDLKGDGDIHDNVDTDLPGSLGPEEEKPVLLRLCQPGWPGPVPSRRIPLGSQLVWV

SEQ ID NO: 974945 - protein, 303 aa, Homo sapiens
  misc_feature (222)..(223): Xaa can be any naturally occurring amino acid
ATTAGVAAALDGRKSPVSGTAWRQLVVTEITLPKESYCEAIFSSGDGHMCIVTEPEWLPYAPQDLLFSLKGLCKSRKSLSDCWDHRGSDESHVAAAPARYSALEQCGLMKLWDPWTSRSEVQRSWEHRLGLSALDGTCFTEEKPGFINILPDVLAEVFIKVKDDEFMMAQEYVNEFQGNDAPVEQEINSAESYLEKGQSRGGHTTCAEIGAKELNPWFRTLXXGNEWNSAVQENKGSLDGGGNIKRRERVEKQRRKRWVREMAEMHRGKGRNSVEQHANGRDENDGHGDIEERNSERGVLSRA

SEQ ID NO: 974946 - protein, 113 aa, Homo sapiens
MELDFEEDKSDREDWDDEIVRTQGNLVQEVMLDLQRVKEKCGKRGSRDLARPRRDIPKAECKRAESRKATGTGQQRTEEADRPTHKRGHLDGGNTRSEQQNGHGEDNAEKPRK

SEQ ID NO: 974947 - protein, 45 aa, Homo sapiens
MRPMRDRRRVSTEGYKEPTRRETGGKVENTNQAPKKHADRRDKQV

SEQ ID NO: 974948 - protein, 262 aa, Homo sapiens
MIFFGKVYLVVTNELLPSHPLELSEQNFQLNQDKMNGHTEKHSGSICSAKITDGTSTAVEQVSVFHFFSKLKSFPGLFDGVLLEHYGLEDIFNDHQPTAKSLVTATFDGRNNKHLVTVNQTVLVIGQPERLHLGLLVNNRSTANLMLTTTIPKLTEHSNNACPTQDIRERCQMDGGQGKRTCHINNKRKSRQTKKYTTKDAPQHRGQAVRKKTTPKRAAMATEADQQSTEQDNTLGRPKKTLQANRNITTPHRTATTKAETH

SEQ ID NO: 974949 - protein, 81 aa, Homo sapiens
LSNDLATTYLLALRAKPCKMNMDRSVAVGTVLRLIVLDLDSRNGVLANRTVFFATNPSKLVSRRAITGDRITYGVPDAITE

SEQ ID NO: 974950 - protein, 178 aa, Homo sapiens
ARNSAAPLVLSLASSSVWTVTDPGGLLFQPSDRPPDCLSDCKTLLGPSLLSASSPCVLGTVLSHRCVCWYSSLLAEHNHRAPRFVGNEEFQLTWRADVEQALVPFVAMEASIHHTVTRGPCSEERNDVGVWTGVRTTCFRRNQGRGRSAEGYERLLKMHKSRDGRRGFSVLGRSQNAR

SEQ ID NO: 974951 - protein, 69 aa, Homo sapiens
RNRSAQARGADRRTGVAERDPLESSSRTCQKPQENMGRVFLTGEKAKFHIKEATQELMGFFEEIRQGND

SEQ ID NO: 974952 - protein, 191 aa, Homo sapiens
MMSVWKAAVQTFNVKKKKKKKKKKNFGASRPRKVFKPLGGAGPRKEEQNVGRKWVPQGKPGTNHIWGVVSSPNKRNRRGGTRDACSRNNPHGAGSEGASTGVLHYTGRSKAQPAMFKFTPALGMKMSVQHNGCTLGALTNNNNQWVLRLKCGSGTSAYYWTALSSCWRKMQSREDEEEEDVKILSISGKRF

SEQ ID NO: 974953 - protein, 33 aa, Homo sapiens
VWPSRLTTPGESFPDDEWVDGLVGVLYKIQYEV

SEQ ID NO: 974954 - protein, 57 aa, Homo sapiens
MPQKAGANRRRHYYIRQTKREQAERLQKASRLPRPRSLRSSVSHTLSATKAQKPREK

SEQ ID NO: 974955 - protein, 390 aa, Homo sapiens
VRHSGAERNGASDALRGSAADAYVQLWLTPGLPLLEARTERSYYTANGHETEHQGGKETWLRQAKKKTNKVQPHRGIRRLNKNIKKVGTRHKNRRTVATTSHEAPHPKHQQAYRTLAMKRNQQQNTHTNSHPREGDESEQQTHEEESNKTKGARGHNSTESQRGQQNERTTTQSHPNITPHARTAAHHTQRNANNKQHTQLRGSPDDLARSTRTTTKTTALDHALPVDKHTTQDALNTRMGKQGTETTRQRANKTNTTTANRNTGSKTTNASTSSTHRESRTHHTTEQTQYGAHPLSEQERTLDKQTKSAKRYNVDDKPTAHYLLCRPVSLYNEATRQDRPTRTTTHTRTKYVEPNRKKQELTAKTKQRQEATPINQHKHTKNKRNTRET

SEQ ID NO: 974956 - protein, 145 aa, Homo sapiens
MHDDIQADKTTAKSEVITTMTSKKRARATKRARGRKTRRRGGRREHGRRTPETGRRTEEERGDEERRDKRERRTDRSPAGEPAKENGRQTAQHDAPRPEQSGSHRQGRRRQAATSRGRAQQHRKAKSQRQDTRNKRHNAQSEGHT

SEQ ID NO: 974957 - protein, 182 aa, Homo sapiens
MTVNLASIAKTESYPDNNISTTDMTSQKTDNWNQTKIDAQEENYSASVAVYIIFEAKIKRQLLEGEPLTVMPPDATKKAPVPNDNDMSSTVRKHGRTTRNIHSETGQQGNLSRARKRRRMRKDTMTRETWQSRVMKTEIPPTSDAAETRSGGHASTRAQRKTSGKGQQNKGENITGPLSEGR

SEQ ID NO: 974958 - protein, 309 aa, Homo sapiens
MWKTTLGDNNAISFGKQFETLFEKEYTSHGRDPTPGLKPKDKELKGEDNAKRGHEGCPITHPARNYLAQHGRNIHLPSDRSNTPGAHSATSNHTILSKEGIADNAESPRNGPAAPHLPTRNQTDTNSAAEYKARNNEKMCTKDGTPQDENPTGHQHDSNTRQDRNRNDTDILTSRLRLQAHTIPRQAVTKEATPTTPQHTDNSHHPYHQKKKIKHVATASSINLSYYHTTSQERHKKTDTYYISYDTHFNLFCLPIPTNKHTTPQQPINTHKTHYKKPHGQTPTTPHTHQQTTQTQPHNTTIQPTTNNH

SEQ ID NO: 974959 - protein, 665 aa, Homo sapiens
AVSCGGFCWFRKCWVRDIQRPVVLSPNLRSAVLSRSLKSDGLLEENAFDPSERSQGRTVFITYCSNNWQLVKCVYVLLPQVLKSKSTEMDYQDEKRTKLNHPSLTESPESTTKDNDEFMMLLSKVEKCQTHITGDHAHNLTVVYRLGRAARELDKSPRNLLCITFLQPDELAEDQRTYDHSDKPHTVRTEFRTSSQSITFISTANNSLRHFNDGYEDDHMGQSDCRAITDRHPNRGHIRRQRRRLTLTTTSAATDTSASTERSTRSSFSLLSYFYFSRARARQETIRRRRDGKTGEDGGERRRQREEGERERNRRGRRRERARARRDATKKSRRRKRDERQREETNRRTARKKIETARRTADAQRATPRRERATRVRTQGGPHCKGVTTERAARTRESPAESGAQNASDPAKPGRERKEATSEKGSEGQDERTRDQAGNEETERVRDEREAAGGRKRSGGGGRVHGTRQPTRRTEATGATENHTTQETHSARDPRDDKSDQQNTNQRGRHKRHHTRQTAQTTRSRDTQHAKHTPDHRHDNDPKLARPSRGEPDTGNNSRVTRRRGEKTRNEPTHEPRHGTTDTPTRRAQPRHDAASAREQTDRASRTSKPGRPRDDADDDRDTTTEEPERAEAEATERRNKNTRQRWAHRRRLHATRHRQNPARA

SEQ ID NO: 974960 - protein, 523 aa, Homo sapiens
MYQRDVFEGWPDAYKCDYPESYRGTLLKDFHMSELSCNITLLIVTIVATMLVEAVTVTSLCIYLDLPVVSQDGVPDGPRPGAGPGTYPEKNSKEISSFSAFISYSGHDNFLGEEGIIAKPRDQTVCRFAFMTRNFVSGKSIVEHIITCIEKSYKPSSFVSQALYRVDWCLTELYLAIHKSLRMQDAIGNLDCGNPSEAPIHHVYKPTASCQATFGMTRKSKVVGQSGLIIETPTTPMDNPEPSDRNIVINNARVNLHCFIYYLFCVVYPKSAADQAPHYKPLPTTCTTLTTTPTLRPATQAPQTSHNTLNSPNHYQIPQAVLTHSINEPSTAARREDRVTSVERSGSARRVEVLQEELKKRGGVCTRGDRSMPLLSSVSGGGSKATWIRVDREPLRQDQTRREESAQRKKQRAEAAVAHRRFQTVVADAVAEDRTAKGRTSAAASQGDTCVPALQLCRTPRQDETMTRRLTMRSRIDMPEAHSATHRAMRCMKIESQHETTQNEGHAAAHRPHTSLTNEGKTP

SEQ ID NO: 974961 - protein, 142 aa, Homo sapiens
MPGETVRKTQEVTRVQGIQRQQEADKTRPGLNEHQHTTDDRNPYNSAQHSRTATRLNHNKRTHNRHNNSSGKTKKRKAAAEPDDSDATHQHHTSLRKETRQKAKQNPDQNEEGRHNATPRQTHNLKRDQRTTTARKTDNRGK

SEQ ID NO: 974962 - protein, 59 aa, Homo sapiens
MTPNTRINGEQQHSNNHHNNESYDQKAAHIHKVTDTEPRPPSAALQDEEDSNEHEKQEN

SEQ ID NO: 974963 - protein, 755 aa, Homo sapiens
  misc_feature (335)..(335): Xaa can be any naturally occurring amino acid
VENIGGSPGVQVVSSIDECGERPRVLVLALHVCVCLGPRCVNNTDRWPCASVPLETAVTQGPEKQQRETANKDAIISVLGKLNEYSVTTNLSGTRLLVCIPFETRKLALGIYSPGTTTRHTNHMNGKHGLRSQRTRRTSEQHTATTRTTGSTCLRNTTYTYTRHSDSCGTLAIQAPHTHGPANTKSPEHPPFTITHSDNNVISKTTAGSPTRADTATPRRASLGATTRHLHIPNSATQGNSTRHPPHPDAGTQHNNTRTRTTSRLMTNLIQHQASCPVNYTWHLHLATSLTPHLADNTHSVHSSPYTSLDPSVHASYDRPSSPTSSLPHTLTATXASDPRPRHTPLNAYNYTTSHTLTRYTTLVILHATTHTHTAHTTQTNQHNILIYSVCYPHVHLLGPTTIASPPHSPHSNDTHDPYLAPATPTYNTHIDPYNHTTLTPHPSHPPTPTHLTPPSSLPHHLLPPRQPYNHLQSYDPFIPISTILTTRYYHSIYAARFQKHKDITFATSHPSTHHYTNTSSDNHNPITPIHNTYHHDHHYNYSLPPPIHPTHLTTLRAFTQHTRLTSLNKLRHISPHDTKAIAKKNQTRTSIDHSRITKYLAHTNDLAHSHTTMRVTNHTLKIMTISCHINTSVPSFPRYCILLNCSVQLDLTHQANQYTQTTTYPRAATRLITKHIYYYYSMNYPTDTLRYLIMHSSAAPPYTPPHTSSSPSSDNITIKTLTHYHTSSYVYYTQYSATISYSTHTPTPHQSHLH

SEQ ID NO: 974964 - protein, 59 aa, Homo sapiens
MTTDDSQAHIDTRIDIKPHKTIHGPHMRGHSCKLTDMWSGHLSIPLVSPFLCMSINDTE

SEQ ID NO: 974965 - protein, 368 aa, Homo sapiens
MRWGAGGAQYGKCGPGAKRVSLGKLVRRTTVRDFSPIKKPPAGQPDAFVNNPKGSQNATRGLYTPREAPKERLQDNKINRGQGVGCQNAKAPRSRQLRDIKTKESAEPGTQDDRATTHARDPRPQQIMTAHHTHTPPQDKRDQANNDYQGKRSREMNRQRHTHDAATRAHAEDAGHAAATTSRQRPQRWISRTSPRVVTTHSAEDGHDSATNARAEAREDRPGEGTTRGQRTEEKTRMKGDEKERRVKKQRAEDSNESRRGKQSKDEGEERQGESKGSDDERYEGEEEGEKRKEDDQERASRPRAHKQDQTNERAHTEQATENNAQAARQKQKGKRPKVRNDNAKTPSSNSHKQTTEAARGHKRPNRR

SEQ ID NO: 974966 - protein, 125 aa, Homo sapiens
ILGLGLAAVCLRADEAGWSCKMRLLLLLLWRRLRWSGRGLGQSGRVCPRLRALHDASSATGPLLKFQISVSGEVDRRDCGESTMRVIENRRYPEDRALKGENDAPSSKYIGHIAYCSVFSLQTTY

SEQ ID NO: 974967 - protein, 160 aa, Homo sapiens
MYWNTFVYQQVMRMSDRDHELDIYGPLVCSINYPEQPMGAIAPVPTDMCDRGPEYQNVPDAPSYTCFGWNALRDAGLATALLEQTDLPVPGPAEHRRVTKDQGSPNRQVFPCVVNHSPGCCGALGVQGSDRNTRYNKQCNKAMYPPPLGHTTPRGNVWLS

SEQ ID NO: 974968 - protein, 155 aa, Homo sapiens
MVFLNAQSGLRGISRHRPLLRDPGVLNTASTSGEVKSRCYMGGGQNRDSSLSEDAPKARYLNETMNMRTLWIKSNYTLLARNMDVKYPALIWEFSQGARWMLTRKVLADLAIYEAKDLQIFGCLCASRRRPRTGFAAGLGDWDRNLTGHPSRVVH

SEQ ID NO: 974969 - protein, 118 aa, Homo sapiens
MRGSQERNRGPGTRGGDFPPKKRPPGGDNRKGSGEQIPRERESREGDHKRGDSYITQRGEPPRRRPQNSLKNYSPPGPRGGGGPRRGKQKRTRTQETTARRLPNKRKHKNVNTKKQGS

SEQ ID NO: 974970 - protein, 123 aa, Homo sapiens
MWGARARGPERESLPRTQAGGGARGAPNGGKGEHWGRITAGPQERENSRAPERKEGGEILSPQYNKTRAGGRNRRAGSWRKNLQRGRASRERDHISGRSSINTGGAQRRTPEYSKINPRTGGS

SEQ ID NO: 974971 - protein, 160 aa, Homo sapiens
GRARWLTPVIPALREAKRREDSLSPGVRDLPGQYSETPFSKKKKKKKKKKCGGRDRAPEKILNTKRGGRAGAPRGQGTGAKTRVPKENPGQDTKGGGFSTQLKNAPGGHTRSGSGQNLQREPGGDKKRGDLLSHTREAQSGKAPRILQNLPPADRGGSTK

SEQ ID NO: 974972 - protein, 238 aa, Homo sapiens
MYQQQQKRREGGDEGNSEQHRNITQDPDQKYTATTRSVCVYPRAPTQIPPTRRHTGQKESNLVIQTPPTQTIIANKRCGLSSKSHHNHQLVNSGVGLHSIENNRNTKRREKTKERRNTEKKNTKQATNKQRKAKKQNKEDRENSKNVKKRKSKTTTTHNTRTRTRRITKQNKSKKQKTNNERNKKQKETNKKKTQQQKTERTIQENKKNTTIKTTGTKPKRKKKEFKKREKSNANTTT

SEQ ID NO: 974973 - protein, 124 aa, Homo sapiens
MRGGARGPQWVRGNPGAKAGLPERKPGPREQGGGDFPPFKKSARGDTAKGFGEQLPRGESREAANNGGAILTGEPQGERPENSKIKAPGAGGVTYRERRRQTINQNKIQGEQQKRNKNSRNTED

SEQ ID NO: 974974 - protein, 102 aa, Homo sapiens
MNMRLLLLLLMVGVCEWSASRGLGPSLGGVPSKRLNDAGTPTGPGASGKIPGNLVIALKGLSRAGMFRRKLHCGDYLAQSDNPVASRNCKCRRDLLSTSTTK

SEQ ID NO: 974975 - protein, 104 aa, Homo sapiens
GKEGSALSHVRKIVEKHFRDVEKANKKKKKKKKKKTCVPGAGSLGALSRKKAFHRTIPVGRARRAPKVGISVDTVGQKRGFPKGKLPGRKRESREPWGSSLNQH

SEQ ID NO: 974976 - protein, 126 aa, Homo sapiens
GARLVSRQSCGQPGWDWFPCVALDYGIHHAAASHGQGVASSVGEMAASGTAKGLETWGAQDQPVASPGALVKGTLPVTCAYLWAQEVGPSLVQAVPARLLLQFWGALLATILAFALGVSVLASYGG

SEQ ID NO: 974977 - protein, 97 aa, Homo sapiens
HECLRNVGAAVGGYQGVFPRIVQRFLGDRVLSTARSHPQYLTRHHISAATRSIPRPIMTHSQLVDQGWIDCCNRLNELLRHPFHNRNRIVQYIYYRG

SEQ ID NO: 974978 - protein, 204 aa, Homo sapiens
DGGSVDLSRLALINRLCSRGKLAALHPCASETGRPTCSVLALLAPCCLVLGVRAEMHKQCKVHHPCKARACVRPCMPMVGMCQDDAQGLQSAKGRQKSAACCAVRPGQLCISECNIEQPYINQGLWEDNERGANPAEPRSGAQHTQGSRTSRENEEEKRGTTNAYNQQRTTQTHQQAQTTNTPQQAHTNNRPNNKQEHKKKHTT

SEQ ID NO: 974979 - protein, 76 aa, Homo sapiens
ELRGRTRTGMDAISPVLDCCRQPWSVLKAWKGCSEQRDSYKKDSVGDTDQGIGGIWKRAGKLNQSLRNRYSICKEP

SEQ ID NO: 974980 - protein, 137 aa, Homo sapiens
GRARWLTPVIPALREAKRREDSLSPGVRDLPGQYSETPFSRKRKKKKKKKKKNLGGAAWAPGEKFFKNNRGGGARGAQGGRGQWGQKARVPKRENSGAQREKRAGSSLPIYKKRAGGKNAEGSRRTILQEGGFRGGP

SEQ ID NO: 974981 - protein, 80 aa, Homo sapiens
RRVKEAWRDCDSMTSKNGTALLFLEDLHHSPITDHQCGVTVLSELRPIESQAAARLLYLTNIQTMGASLLDNTIPMLHTY

SEQ ID NO: 974982 - protein, 125 aa, Homo sapiens
MATGGSDSSATAGGICTKAGASSCLGGRAAAEGGGIAATIAVSGRIAYAILPLAPTSRAIVRRIGGSDRPFFLLNPKAITRSSWTMLAYRLTNRFCSSCRSWAVCKGGASHKATQQTILNQKCEI

SEQ ID NO: 974983 - protein, 155 aa, Homo sapiens
  misc_feature (152)..(152): Xaa can be any naturally occurring amino acid
LPRPSPPPPPPPASSASQPGEGGVGPARLRRAPGELLPGRGPGAAERRGGRRGPAKSGHTSKLASSILLSPGAPARGIRPPAAKMCGQEGRERSVDARRAARTRGLRRGCRQSQGSSGSRLPAGAPRGAGLYACCSLPGDRKLPQPEFPAAXGGG

SEQ ID NO: 974984 - protein, 168 aa, Homo sapiens
ARHHATFYKPLPKDKKCIALDQNCTNELKKGVRTTNNHILVIPGHLRAGSLPYWPSELPFTVEGARADTCQASTGRVGPSRGTRRIELKVKARQPQGPSMGPAQRACALQSVPHFPPPAGPSAHAWTSPALQQRSRDAAPGSRRRVDKAIAAFHFRRPPARLCCPRPR

SEQ ID NO: 974985 - protein, 101 aa, Homo sapiens
PVPLPPGAARQLPAPSWQVAWVAVDAGREEDVGLLWQVGGARRKKKQRKTHTERQGESARERALVYRFIHIIYIYVAFFLSTLMNARSDPRADSLQAGSLF

SEQ ID NO: 974986 - protein, 129 aa, Homo sapiens
MRYIQSGGFRRAGGALPLQGAEGPPAQGRASLQAAVGATVCAYLPRQPDGRPSPDRGSQGQGQGTSDAGRARGASPRPSPHFGGQLPSLIPASTLDLNHCWRGTGRDPFMPGIGSRCSRGVCSCILAFF

SEQ ID NO: 974987 - protein, 249 aa, Homo sapiens
FGLRGKPRGASTHICCLLLVTQLHKLAADLCSPDMPNLWVLSHEGHTYAMPAVLWRLECAVTGDGVPQWCVTCLEQAGGCTEAGWEPTPTLEGVLTDWTGAYGGTCQTNNCGCLFADLLTPDFQAENDPQCITGYSKLHRMYAKTGPIPVKCSLCSSEGQSCDTISSSWNVKNPRKPNGADGFVPWWACGTHIWPEIGTYVVWQEYNHADLRWNPVGHSVRHVTRWLLVSRAVEGLQAPVMRTESAVGV

SEQ ID NO: 974988 - protein, 78 aa, Homo sapiens
MQHDEKAKHRQSISHKKAQKKRHKQTDETTDTTRKRNHKDKRHTTVNRADQTELTIKEETQNSTHEEKTTHQQRKALK

SEQ ID NO: 974989 - protein, 284 aa, Homo sapiens
FLSPLPPLTIPLGGASRGRGERVTEEQYRGMQNTIKESRGKRPNTQPGQNRQRKEDKQKEEANRRNKTRKAKTSDEEAARRQEKQEAEKIKQRRHKTNKRNIHKAEAKQQNDERRKETAMNKRGDTATSESNSTTSETNSHRQRKSKESRQRKRHKKHRAKQEQQKKQETQRATTDRKMRKSRKTTNKDRDIGRREHEEEDKKKKRDEPKQEERTKERDTTEKQQEEREAEESKKKISKRDKRDKYQDKREKDSDEPNRHNKKNKTKNGEKEEQSTKQRRHETK

SEQ ID NO: 974990 - protein, 138 aa, Homo sapiens
MAGWKGVHSHKKKERSARHRTFRSAEDLLRLRILTKYPRTSAPSEKHSSDQQYAIMQSLSADQRELVLDEERIERRTNIDLCSWWDVESANKQPDETRRVLKLYDIDVAQGQHPDCGTDGEIDRYMFDWCPDDECVWM

SEQ ID NO: 974991 - protein, 365 aa, Homo sapiens
TGVVKTTPKSQSGKGKRLTSETIVVYRYDVDSVASPPTNWHMLDLIICCVVSTNSNLFVTNFDEWHVLASSIGTRARIRQSHALVMLCDHTHVKAAADELLDSSTKISMMRPYAEKHSGVPMRKLRNWLESSAISSSSALWAASKHVTCVMHNKQLDINKWTPSHPVAKSVVGIGPVSGVIVDVGSIIVVGDFVDRLVVMLPMRQIGGSTPQQDSALTRDLTATEGFVKNKATLDRIDETNNLGISDVKTKRFKGQEKTNNEGTILSTKERFTANVTIERKKWGLTKPRTRSEKFSSQMIKRIREIRVDQNNRLGRPKWLNNAHGEPHGERKKLHPSTRDWGNGHVGNHDSNTERRSGLGFPSNQ

SEQ ID NO: 974992 - protein, 78 aa, Homo sapiens
GEARQWLFGPTERQSERPYGRRLAWRPEMYLGKKAAARGGWLLQRAATRDGVLALGQHGCAPEELGLECGPAAATAGA

SEQ ID NO: 974993 - protein, 223 aa, Homo sapiens
ASRAAELFLEAAGLVLPAGSLGLRWALIAAVSPLQSSPCAPTGPVMQLVPLCRAWTQPGAPASHMHLTWVSAWSLSPHKMADGGSPFLGRRDFVYPSSSRDLVPLTEGAASRRDRDEEKGSRSSFDFQAQSPKELIYETGDIVYIHKEVDKNLAGGRAHGLPGQSSLLIMWRLLPHDEIPKPHQAPDYTGAAVWRGVDQYTFEGDLEVELTSAREEHICLIEG

SEQ ID NO: 974994 - protein, 507 aa, Homo sapiens
REAVLLAGLCVKALVLIVARQVQKHKSTNRDKYSETATQALYKKLYSASDRRKRGTPARHGDNAESKQEQLARPHDDARLRLTATLETGPPNEHGTPGNGHQDVLHIQHNNAHYTPHNMATRARGAPPGISSIKETIAHKTQHGKRMAHRGSQHSTTMPLTQVAHDPGSARSTRRTYRATSTYLDTVTDTKSEEHHQRKREETKRHRRPKNQIRGHAAKQHTNTRPQQQGPPLAPLPPTRQRKTCLGPTNLSPSFSPRRDPSLTTKEQKLLKGAPQRQHASNSDGQPITTTSTNAHRRPLADPNPTDTKATSRIKISPTHNHPTSPRDNSDPPGHTPPGHHNHTPQLTHRTRPLQQTQHTTDNSPTPSHPLNTKHHTTPKQAEQALQPENTVSNDSYSNKRNRNKQKHNHHAAQTDKAQHNAHRPPTSSRRPIDTTHTPQIATSSIISLSLISSAEYPMRHNSSANSKSYINTNTNNNDIYGAHPQSQINFLYTKPASLTQYSVGLS

SEQ ID NO: 974995 - protein, 535 aa, Homo sapiens
ANNWEQENDSLSTLVVIGHARFGQVHHYWPSDAINAAGIDKQNHLTTHSDDRDGCLTHWRPRGSLSHGTAMGLSAINPCTTPCTPLHTDGYSTPLELTPLLCCETLSARIPRHTPTHCLHPTSTSATAPPAHQSSTHPLYIEDTPLALYTRLSNSLQRPCTMVSWLPVHSGVSCLPWRCLSRPHPLSHTPLRLPHPTRTLGGLRTPRTEPIAPSSCALSPPNPCAPRRTQPRHKAKASRAGSPTHTPPANFSPTLHTPNPPYQATNHRAPHSLRRDNHSRPHPRTHASNPHPSNHLPARRHPPAPAASTHQPPPQATPPTATRPNTHAPSPPPLPRTLLAHNPGPDNHDPRRPQRPTLTTASPSPPTPGPRRTRPTRDRTHTCGNPRPLTPPGPKRRQTWPPRRAPLAPAPTPHPATDTTPRTPPPSQPCPTTPHAPPPPPLHAPTTTACDPRPHPPTRPLAHPVTTRHTGAHPPTPRTAHTPTPPRRHPRTRPHTLHAAPQPAPLLQQPTHATRPTHTHDPPHRHTHTHPGHRP

SEQ ID NO: 974996 - protein, 183 aa, Homo sapiens
MSGTGAEAGRAGATGGRTEEAGGGISEEERHSYDRQIQPDGDIGGPANWLQGLIVVASMIGIEIGLWRLENLLNESSFLGQAVDNGLNPIASDLTTQGKTPRRIPREDSEYTFGFHGDLWGVLGIGPWQTLGEPEAKDPPNRGRRCLTRDSYPNSATLGLGNSLDKRCGRNLDAALITEAKCN

SEQ ID NO: 974997 - protein, 601 aa, Homo sapiens
LEPQVGTDVWLGAAASLSRGLLPDACWHEAPWVSGWLLLLLTHVTLPTPEPRGLAGACLLVQRRMHFTCVLSPPGHNNVVQMSVHIKGPDSDVAQRVSIFSKLCFRTIRPGHVTRPGGPNPAPTTLPPGHTSERLCRTHTYCASHTIDDSTEPLDETLPKAHLTLPALQRSDGTCLAPSPGTSQAITLHSERNKVPSTPPHTILTYHCNEDDAMEQPRPPHRPQRRTHGSCQATAPSNPQPRPPRAASHHQARTQTQHANQTHPTSEQPKEPASARPHRTPVHPPTPAPRTTHTHATALQDAHPTTTTRAAPPAEPSATQPARRPRTPTHPHPADARPTTHTKEHHTPPPPPPPHQHRTHTRTPPSAATQGDRHARTASPRRTSQRAARHTRPGTRQTGEQKINSMRGETKGRAGATGGRLREGDARDGTPRNCEGCTSARQKRRHYTSPSPLTTPPTDPPKATNPPSSLSTYLTPAPLAEHTSRKSTQPLRRITPNSHTRHLTPHSSATTHNHHLTAMHPGEARTRDDRRDPCRAPRQHRLESDGDEPRQKRRHAAAERPRGRRTALPRRLHGGVMRGAAAPTAAADPDDGRRPTRRREG

SEQ ID NO: 974998 - protein, 337 aa, Homo sapiens
MWEGTGKTCGTQGERAARAQRFIGIRASKVGVEGVLFRELQKGSDRGWFKIKHKFKLISELCPQFSNGVTLSGRGSWPILRGTQEAPPVAFQQILSVPSLSTFVAKHHMCCAHPNHFESWRSVHDVNKPCGTIWVLGSPSICAMWHKKCQEPDSAYRSEGSSSFQIFSPIECGLWPPVAHQVGGVKLTTADTINPGNNSGEQPGTLITKILEDITQEGVWGRHSYQESLHILTGGTPPGNIRALIWANGPEGHHGHQAEKHNGGPLWSPLGGHHEGERSDTNESTKARGGCHHQEGQPCCDVIQPDEYKQPGGGREATEKAATRDWTRVRGAKRGKN

SEQ ID NO: 974999 - protein, 348 aa, Homo sapiens
MYNLVPHDAIGSTDAPSNHCNDCADCTLHGLSTLTERAYDPRTATSSDRRPGNHTTGQPTTRTTRHGPSATLHATGTHSHTKRRESPMPPHLRTLRYASRATGPLTNHAASDVTPLIHLHHHLVPLSTHGTPPKPLTCALRPSGLRRFLTPASALRLLTTSAPYSPPDHGAHSALTTRGPTPASQDERNPPDATPHQPVTPKRLAPNLRQRKPPRRKQPPQLTDCATHATTHRPQEPSTHMKPRGPLSHAPTSATPTAAPTQATCIPKRPHPRQRPKRRTSPKRRHTTRHPPKHAPRRRYGTPHEANHKRTTLPRRPPRTPSGDTKPQANKATGPHNRAQAAHRTQQA

SEQ ID NO: 975000 - protein, 358 aa, Homo sapiens
AVGSLLLHGPGQTAWSWSRLSWAPQRRSCTDLDLTSQQGGAWWKRVNTLMTLQCPGMEPPSSCPRWGSPSSRTDRHAGPDWRSAMPSWTDVRTVVWHLVRTTDEVDELASPMTLVCVDKTNVTRTERAITDDLRCRGCSQLKAPTADSHMKDNISIHEALLAAMWPQLRAHLDKYKVHFFGTILGTEQLQTKHQNHTGMTAHPSHLLATHTDTKYYRLPVLGLEHTSQEHTPTSILLDSALYQDGRVRHGYAMVTVHNRTQGNITRGNAIVTSRQRVATHTLRARQNTVPETRKHWLTHARETLSQRYTTNEWMRATTYEQRHYRRHTELTAKQDPPDDDHRHDEGQRKYRARPEATT

SEQ ID NO: 975001 - protein, 183 aa, Homo sapiens
MQEMCQHSPSPWWVLNTHYTLEEAGFNPPKVAPPKRICKKAAPLITHLRGKDPLWGEDNSRNDRHWVRGKPHIITHIHTTPCRTKEMHTAQTRDMVSTPHSHSEDAHEVTNNNSRRSTATTKEGDTQQHVSCENEANSRSTTYVHRLLTTIRRKPEDRRSTRTVTHRCINYRKDEINPHPTQS

SEQ ID NO: 975002 - protein, 108 aa, Homo sapiens
SHSVSQAGMQWCNFSSLQQRPPGFKQFSHFSLLSSWDYKRVLPHLASFCIFSRDRFHHIGQANLELLTSGDLPPLASQSAGITGVGFKFLICPRVNQTESFGDKGFLE

SEQ ID NO: 975003 - protein, 400 aa, Homo sapiens
ESRSHRQSPAQAEPELQPELLCGALSPCPLVLLSLICRRLLGNDPGTPGQQGSEAVWEMQRDSIEERLDMAPSHFPECTVVHTCHQLAAEQCEGIGRTGLGHLDTPTCDHTSDRHSSEQHVRPDRTVPTLFGHWEPGPTAIPLVARAATPRMAPLQLLDTPHTLEPRFLAETPGQPCEAVPEDNLYTTRHSDPGRGRSTGQWLERPMRLPELAMTAQRLCLSGANTWQGQPAPDLAPLRYKLNLSTYINTTAEQTGLPANMPHRSARQESAALTGDTHHRSTRPQLRRLHCPQCPMASKNCDPTIGHTAQQDHTPEDAGPACHPSRTRKALGHNRRQPRRNTAPTRWPCEHTQSRAPTVGRHGNNRRHSGQANAQATKDNNNTRGQSESQVVEEQTRRVE

SEQ ID NO: 975004 - protein, 104 aa, Homo sapiens
MDQLSYDNIGIRLSWNKIKVSLITCDSYFGYCKPIYTFSGRQKTRDNSCASQGLEAVVPTGAEEKPSLPDAVARGGSCGTAGERGQRSVLHRFYYLCFSLEKDK

SEQ ID NO: 975005 - protein, 181 aa, Homo sapiens
PSTSARAPGIMDGRLLPAYWYFVCALGMWSLVFMVLQCSLPCYLLHGQHWLLLVVDLVNVGPVLPDAAGGPETAFELTGDNYTTRIMTPVCDDGTPYLQLTRPDIRDPDLTLGKPTQQPLYPTRDLDAEHIAMTIAPTGIASHKKYTHITQEWFPSQPSVLAMSVATRLPVMRIASPQASN

SEQ ID NO: 975006 - protein, 346 aa, Homo sapiens
LLTRSPARTICMPSRTAEAIADFGRWQMFMTPCDPGQTLRLVVPVLVPEQFRAMPYQTVQQRRSARKGCRLDRSHIPRSEVHKYVLLSVWWWQSNMLLSMRRMKVASSMVDTETHTEDGLPAESNEIMTTRTLRRDNKIRSEHDTQIQPAQSMPKSCNQTTRENAYALHHNKSKKPKKEVKARTWTSDTPSKPRRIKQTERTDVIRASEQRAKANNHKEEATRRENRKENRRHNDNMKRRRRHLPAPQHKDTNHLPHKEEANRQRDDHTKKHSKQTRNTPHMQKPGQHGARRDKKNPHTTTETRPTTTDTTSEPTRQKKSTPDTRESKQAEEATENTATPTTKQRT

SEQ ID NO: 975007 - protein, 114 aa, Homo sapiens
GYFVYSSMADCWLLGGYMSFDFKSEELENRLAIMYVTRHACIMHICMQACMHAHITPRPLVGQASYAGHRYIKKFLIYRLSKGIGLRPITPGFSIYWNRTYIFPRLALSHTTDT

SEQ ID NO: 975008 - protein, 257 aa, Homo sapiens
MEVEHYHSCVQLAPDAEAWSELVATVPPELVPGGPRGVAGVAGLLATWSTCAWSGNVTGAQLLEPRYVANAAPCEDLAAEDARALKIREDAQRYDDLTDYAVSEMKMGRYWSKEERKQHLIRAREQRKRREFMMQSRLECLREQQNGDSKPELNIICPEPPQNMKKRNKKILDNLDHHTGDAVPKGARSAMRSGSQPFSQHPPGQLPGGTRPGPGEAPLGAPGAFKSPYRHMAAIAAAVVRQARLACSSRTQHFSLE

SEQ ID NO: 975009 - protein, 214 aa, Homo sapiens
RGVNCCRRATIMPGHYTGMASVLRGHQPDSTSYLTTNRDPFAGAEVQQRTMKKWMPGVVAGVWGALWCQDAAAHVPAAQTNSNAGMCKHACCNGVPEMTCKNPAMPPSCWAVVDTTEEHAAGPVAAYRTDSAITDCVRKQDLIQQTFQRVDGATLHSCYADDPSKQGGHTPLLNPCTALPTNSPTLQPTKRLPRPVRTFHSLITTRTIGPALIG

SEQ ID NO: 975010 - protein, 296 aa, Homo sapiens
CQGAEAQVQHLSNCAHDADCRSPCHLPVNAAPACTVPLSVTWSDMDSQVLTQSAQLAACDLVLPCPPADQLCPLCKVVVHPGPVPPVTCGKAYPIQAAPPNRLHTCTPTACSEWDTQIIGLFLAHTYPKHEMGDSHPVTAVQELTVSLEQLAARDRDRKVTDVSMVCQILLDSLDTTVTTLDLVAPQTLPRTQKGPKRTYDLGNPDSNLVDKLNTTGGLAPSAHDASTKRHTKFSGLAMPNCTSEPTELDTLAVQAPLTTGPLATRNRRLHGILKAERQPRETRPHGRHELTSYDR

SEQ ID NO: 975011 - protein, 139 aa, Homo sapiens
MGVRRDLPAGVSGSLLIHAVTTRLSGSVLARRMDDQWYVEPVVVVVRSCADYAWWLILAYHSRDPGLINRASPTGDHSSSACVALRRGKCPHPDEGAKFIALPGGPWTRACTCVSVQRSFVNDGDVPDGLNLGCSSERC

SEQ ID NO: 975012 - protein, 84 aa, Homo sapiens
VEKQTGKKDKDNVSLTKTPKLELWLMAGKECEGAEPASWKLPFTCWAANGEQNGLGHMDLRGPCLSWGSTRGSPRQERHGPEAA

SEQ ID NO: 975013 - protein, 126 aa, Homo sapiens
ALTPLIPSTVEEVLLPGSVEGWERSACASSMKGRTDGESVFLGTSMKDLVRVRTIRAANSIARTVLPSVRCPCRLHGPGRERTVATLANQRANQPAEVRVVHHCLTRSHHIRSGCGSLVWEPCNCT

SEQ ID NO: 975014 - protein, 241 aa, Homo sapiens
RFTCCQRHLASTGSCFPEQAAPPGAGDPVGWGGCGLALAGADRVTVLLAANLTWQPQAEACWSLCACAGPGQPCADTTRTSSLASYRYSPDCLAQPAPLLRGLGSLRNFVPGVKRYLRLKLLQQKAVLLVATRLPKAQLQYALPGQLRDAPCGAGRSPSVPREELENTGMGRCAGVLFLVPKAAVRATYSRTVEQEAVVADFRQLCKRELLDWAVSCASGPVDFMPSSCSGLAYCLTLLGL

SEQ ID NO: 975015 - protein, 344 aa, Homo sapiens
MWTSHHNLQVHPCHSLLMLCQLQCDPVCCDTCCTCERKRCDPVRESQLLAGSKPPVYLASVRGTAVCTPGDSVRMPVASNVLLLSYNLVISSTCGRKASRRLMHGAQVTRLLALDNIYLTRMHWSNCRRAYCATCLLTFTSDTRCFQQMCTYTRTTPQHGTIPRSPHNTNFPGSIMNRNLGHWLVRAPTLAQEIRRMTTIDSLPRFPYTRDHDHWRNGTHCHWSNIPESVPPYTVGTVPARVTFYQLSNLAFPTLDKNLPHMYCTPITAGTRCTFARCLTLSQETLRSIDQEISGPPPAMEVCTIATLYVPASHLRPPTNNSSEQKTQSTHHPSSIPRHTSYSN

SEQ ID NO: 975016 - protein, 41 aa, Homo sapiens
MGTGMAAMRTTDGQGIPCKEAAPNVAREPNGPYADASQFSG

SEQ ID NO: 975017 - protein, 324 aa, Homo sapiens
PLLSFYALKNQFKPPPIVKGGRDKRQKRHKASWEHNPFGCPRSFFALMWVWWFSTLCPVCDWGRVGGWRLRGGLCHVSPLCDAQQGDLEKALARTCGLGGPGADPPQGSVQAGSGGLAANTGSSTPRLFQRRVSERSAPTESTVRTHPEHDPLNSPDPTQSETEGGSNERACCNTRNDECSHHHGHRGHREFETNQLPSKQTSDASNHHHHQPRGKNSMWTATTPNTKDVRTTKKSDQKSTSEMEPTTRRDTRGGIRTATSTPQPLQTSLEHTTTDAPQTRSSHGTDPGQEWDCTPADTPIGIGENTEQRPTREHHRHARRHRR

SEQ ID NO: 975018 - protein, 229 aa, Homo sapiens
MADLPGRVISTHLSRKPWLMETEKKFGDTLKLTGQKIEKALETVDATDVLSLLDKFLIQTCNCLQYESKVSYLNMTGDSYRYLASSVASARSKNNSVVEASDSCLTGKPSTITNEQMHNPRIPSAGPGPQLLPCSNYEIQNAPSARLPLKQNTHRMHAILSWNTLHQRIPINAYQLNHMLHEKHKYTLDKDKRMSKRRKRVEDLTGHATHSSNTTIVQELIAAPKNNRA

SEQ ID NO: 975019 - protein, 116 aa, Homo sapiens
MTDAGRVSVTSTLENRGCSELGRSTKSAQKSSRRLRSSIIPYISCRPQSSIEWWTKGSSRNVSSHRATILGLRDLRRSLYLINPCLRTELHKGKGEEVWGALPDRLGGRGGTDKLI

SEQ ID NO: 975020 - protein, 571 aa, Homo sapiens
MLRSDAAPQWIPSPLPASSPLWTGWNVKVNDGDVNVEMTCDQHITPTKQDAAGRTWAVYSSDRRTQGPQTHSRTIHEQTRQTKRTHARDSKTTDTGETSTSSKEHNEARSDMRVRQRLIQDRRRVEEHREHTTEYDKKIVQEDADDRQSSISMREVKQRQTTKKETKRSKEENETKKRRAEEGQEQRATRERSTTQRRTGDEDHSSEDRDENNRAGRQAERAERQERQTSRQTDGEIAQRGGGREGESARRGRDREQREAHKGETTTRRDSTDEQKKATQDERQKNMTTKSRETTEKHERQQGRNEDRHDRRASEGAKRNIRERREREKTEDMKSRKQELDEEKVEGRRAESAYSEEEQVRRRYETEKDEEHRDAQQSQRKATSKRKDRAARAPRREKKNEQMSEHQQDAHREITDIRGHTRTPTRRRERATSDSQRGSSRETKQKRRRDSATERTTNNQRDTDKTKDRTEDRRRRAIRYADDDRQGARDSERKDEDAQTRRRSEETAVSARQRDARLRMITNRVATLLKQGNRDRTVHKYKDHDGHYEQKHSSKAEQQAERRARRGVDAK

SEQ ID NO: 975021 - protein, 485 aa, Homo sapiens
AGVLAALRLRTAPVAGTFVAADAGCPALAMSVLALPCVLLCCANPGLECGPVPCVWPSSQACCLGLMVVLSAAPCLAASFGAIYTCAAQQILCCCLPAACLGQSSFRICPQWPLLDPASIALWDGLGVHLGTPQDKGSPLSGSRPSSIAWRDRVRHGLAMHVDGDIEAVVPKCPQEHLRKLLKWVRQEYWHRATPYRTGLPGRETKNPWTPQIPPWDCIPYFPLGKTHLNTQEGTFNTGTRPLTPTKIQKPYERHRQAIRQASGPSVDTSKGPHEFGPALDEPTIPKGDHMTLNGGDSILDTWGDILATTNIPDRTGAFRIGGNPGVFQKVTNVEYELSGGKRHPYEPQNGEPTVTTSHITHVRHGPRTEERGNQMRQDRPHHRRKKARPKDERCSSPRKGHVQVPLGRGHQTPRRTQKTSQAQRTRRNNKASHQHRGPKSGHRRAPDTHKEKKTAKHRKRAQRKEDGQTENRTHRKREKPRRAT

SEQ ID NO: 975022 - protein, 172 aa, Homo sapiens
PGFGALGAGAFLVSASPCRHGKWGQGTPHWIVEEREDGTNVNNWRWRGGGLLPGSGEWPVCLLGAGAAWGLCGAAGQGAAPLSCWTQCSAFASRLGRVLEYGDRLGGLQLPLFDTSGWGPRVTFRQDLSTPTVCGLRGLPLLRSRPSPLDVSAELRREPGFERRVVTRSGGI

SEQ ID NO: 975023 - protein, 433 aa, Homo sapiens
ELDGQHENPVDILIMDDEDVIAMSRAPTISLSLRSPELLPPAARPGRDSAIASTDRNKENQSYWTWSCDRMRQETASHYALITYANALSRRSNRIPIASSRNRDREREHEHIRGISSKHHLDIAAVTTDTALATEPRRRAHTEDREDDRAKNTDAKPSRGGRVDTGTARRHSKAPRGGNNTATTTHHPDTKPHQEKALDEATRTQQPHGTTPNRPPQRKKETHRDGQQTRQPHGTPNARVPPNPNHTRKKARNTKKRNTAQTQSDKKEKNKRTREGRGRPRNAESIQRHAHRPRITTACGDPRSTLCEHEMHTKRTHQTRRVAHHHAPTSPATSNPARNKTTPKREDARRRSTTTPKHESQSKNKPKKQVQRRPPEPPTKTRTTKPHKPHTTDTPKAQSDRQTQKKATTTRRRKDTRGHTTTRRKQRWPPRPQ

SEQ ID NO: 975024 - protein, 421 aa, Homo sapiens
PGSQRGAPGPCLAAGIAAAEHEPSCAWMCLVCPVALMPSAGSAVPLLLVLLVGVVALNICASSGVECDVPCPSCRLLLTLPVVPHMLPDPLPVPHSALDGRLCHECWDVMLVPGMIHGRTDGPRQPAGLHDMTVDAQHDQQTAWPRCQTKKPWTLPRMCPLRQLRFRPVTDRREHVSARLTLNDTVRAASTALLLQAYLHRADSLANSRPKGLAARKTQQNVSWLCRDQLDQGTTGQVAWPSVLPTQAQDPRQRVLLKTHPFVLFNGSQLTSPITCSQGCREGASVHRPSNWRIQVTRPRTQANRRGPRFHGQSGVLAHVVHQGSSLELGMAYMEGTPKTHSTHAKTNASGIAKKTIGATPNLRTTQDESGPSQQNRKTRRSHKREHNTPDTPRAQRSKHTTRHTTQQKNRDNRRETPQHR

SEQ ID NO: 975025 - protein, 147 aa, Homo sapiens
GCSGLRGLGETRALQRQTDAAESSAVYCVAGSRLAGPLSCQGQLVSGAKRSPFDATQARSLAERDGDRGGVIGRVELERSRLALRGTEPTELLRVPVDRCHRRGKDRDWLCVEVWPASCGVSRRAMIKGTSFDVIVYLADVNKGIRA

SEQ ID NO: 975026 - protein, 246 aa, Homo sapiens
GLDGDRLIVHRVSRRQTSDGLDKSLASCDPSCRPLTMVLDSIIGAYRRCIVPIEIRGTDSKHAIKDVLIETRLVIDHRHPGYLSELFKGTDGAEYPIFNHSLAHDNGCHSPCGTINATMSAHNVVPRKKPSARDLCQYDHKSLGIINAVGPLTMGVINEAQYVTKKAQGTHRIRHVGTWGIANTQRDTDGTCIAALWCRGKAPSGNQVGPRNVGRAPHPKPFDLAYARLDHRDCFANKHRFLRDPM

SEQ ID NO: 975027 - protein, 362 aa, Homo sapiens
ASGSVSELSRSFSGRAGGGGGRAIYRSRERGAAGLTSRESCQLDSRSESHVPARSPDQTQAAPMGATQTTSWTMRSLRAYSWRLSSAPGRLVLAAEVRETCQTCETRSCALREKIAAPRLATTSPERRRQAMDVQAGVPGHGPRHQAVENITEDVTPMSEMASISMGAQCRMERTRADTTDCRRATGQKNETPKQHDSDRRECATSRDLEQMHGCRLQVKQHSDRERKVDLGKPGQAELVRNPDSVSIGCMTSLRKQAKQQYKLAVTLQRITVTRNTQQEQQKDTNDAGPAQDHRRPTAEETKKGSHTERPTSKKNRDHNEHRADKNSPQNIRTATHDNRNKQEDKKTRQDNNKNKRKETVT

SEQ ID NO: 975028 - protein, 236 aa, Homo sapiens
MPVAGGPSAKSQLEDVPACVSQGPLVPLPHQRKVRSGAHLTMGASLCDLRRRLSSTPCTWHRRAHMAGGELKSSQPGPGWPSVLGVLWAQAPPDWCSPSSLSKCPRSEYEHSMPAHQSSCISVRKGGRGYGPATQVRWCEETSERQLWPPSAAKKLASAPRGQVWGHGMDGAWKRGPPWASPRVVLFLATLGVGCVAVDLCLPPGGFQAPKFLSQGPRAPLFWDPRSFLSQRPWVP

SEQ ID NO: 975029 - protein, 510 aa, Homo sapiens
ERERMGRRTNAKKSGKRESAPARSNNAQDSSSAAVIQAAGEANSAQHTWQQATNTPTGQFGTICKQPQNRRQQQCKQQQALWLISSRYTRNSDSTVRESISSIRAQAPRQQTGPRSEHPRVGRTERTRDKTEQATLLQAPKRNTPAQTNKTLNNAYVHITPNNAPQQKTRHRREQYNAKTTAPTRLSKQEHKRKQEKPQNRQGIQGDKDARRRIGEQQGQRHVTQRKEKQQKKTDMKKHNRKARKEQKTAKQTNKKRKETNETTTTMPNQDNRSNIETEGSRPHKGHNTPHNKRNNTHDEKKKKQENKKQKRTRKEEKQKNGDRSCKDTADNNKSRTEKHKTTETRDRGRQGEHAKREQQEGQNTKRSSEQTTDQEKARETPDRTAKKEKHGRPESTRAAPRRKNTQKAARKKSKQQKEEKRKRAKNGKKSRQRRKTKNREQKPTGAMNMRKRQESRTDTEEMTNSNAQRNRRQRETRRGEGKTREKRRHAEEQRTYKYTQLYNTKKANR

SEQ ID NO: 975030 - protein, 384 aa, Homo sapiens
AEREEAQLVMLAAAAAAAAAASIADTLVGLEWVVPIRTICQPETEVKKKTVQPLLPVRVLACCIRTSGHKENCASDMALISTPLNQHYSEDHQTLVLIHGTQQTGSDDHIPQAATHPSQHSSQHHQNSEESSNTDNHGQHPASEHENQKPTSTPYSTRTQGPTKVADLQGREAPEALTRMPYHACHIEDPPGTNAHRHTDKQLASRSKTQGINSLTAQQHQAAHSDQSSRRARQAHGLMTRNKSHSSRQSDTPALHEPRHATQYSPNTSPQRKNEQEKRPKPNAQQTKQHPRPPTSTTKARTTKEAGKRPNHNAPHTHTHHGTRTPQQNNTSHPARALTTRSSATETTHNLTREQIKQQKQKHDTTQHTTASNRANQRRNPQRT

SEQ ID NO: 975031 - protein, 154 aa, Homo sapiens
MVGQAVSGTPGPQVIHPPRAPKVLGDNRAVEATGAGPHLTNLGSRGGMSQRNTMSPLSSKIISKHKKSWTDWGGHRDRTSSNPEHTSSEARGPHEDGSGGVQEEVPAAQAPPIVIVPGGETTAPPRERRDLLHHQRWRTPKRYPHQNRDSIADM

SEQ ID NO: 975032 - protein, 281 aa, Homo sapiens
MSPKGALLRPPNDLRTSPVILTLHCHKAPHTRPTSQHTNHMPMMARCNTDKADTKGHHTHYTCPKNGSYRIAGVIPDVYVTFKNVIDYCRHGIGYLEAILLPHSHDLDPHIPAQLYARDSLERLISETIYPRRESPPENSRTLLEALSVISSSIIGVTQIDLRETQLNKIIDLENECVECMILSGDVFSVQCSLLGSLILPLLARPSEYFVVSLHQFPNGHLRLSHVWYAIMAFTGGFHVIIWSSFLMICFIRKVNISLYIPKDHCWFESRRLILGFVDGG

SEQ ID NO: 975033 - protein, 403 aa, Homo sapiens
VSSRIEVDSDHSLWLGTGDRVRLCWLSGKLRLHVVVVSEDVVARTSNSEQTNLLSDLVCDQVYSMCVVLTICQPGILLVLGGMHLAQSVSGTEPCVTKGDAMIMKKHGKIYKTRHRDMTHRSRITPKQHNGYTYTCVCSPSTPLTERPGLYTSRNGDLCETTLTLGRSNERLASNRLTVSSHYLSVDCNSGRTQVTKGRQRKQRNRPAEPTVRSSTLAPNSTGQTQQTPQQHNHGHEQPDNHTARPTHNTNMHTRTRHGIGGQHPAATQTRPTPGETQPQTYKNTPRSQDERMTHRTTQTKERPIHPRTRQTTAHKKTDSTRRQTETRITNAPNTTVRQPKKKRTKERHQNGRTENTDTTQTDQQARKNKKRRRARPSAPAEGTTDEAQRTNKKHEKQEKNKR

SEQ ID NO: 975034 - protein, 37 aa, Homo sapiens
MALQGEVGGHQMERLFAPGVCLPRQTIDILFCRNIGG

SEQ ID NO: 975035 - protein, 403 aa, Homo sapiens
PRAPMDAAVPPRPRAVWPRASACLMWGSCDGREAHHPVPHVLPGAPDLSLRAGGAWVIPPDQLYPENHNAVSHYPPVFRSMSDQRMHAWCMLSIYMHSSVTLAVGLEEMPLEACHYYYQNQVHQWQGLPQIAIAWHLRRSTCICFPVLKAASSPWNLGERSRPWTVTTHCDACENLSRMCDQDMTKPGPRPFPCKEGCITGPAVAESGAGPTGNHTAEPRGHDGQQTAPNDTRRQEQRQGRRDTPYLAPAADPDAPHDINRSSTRQKHTDTKKTSMRSVGPREREETAQDTNYVNTRQEERNNKRRTALRTHGRGPPPNPIMTPRKRTRRPRTANHGANEGEAKSHEAQQDEEPKQKQRSTKERKEKKAPNKKKKEEEKKTARTEEANKQKKEDKKTTNAQGN

SEQ ID NO: 975036 - protein, 477 aa, Homo sapiens
  misc_feature (90)..(90): Xaa can be any naturally occurring amino acid
  misc_feature (100)..(100): Xaa can be any naturally occurring amino acid
ASCWVPRSRMCDYLGSNLGAHSRLRLNAMRVHESEFTWGSDESSPRSEGSLTTHRLFMSMGHRNKTRRVMVHRFQNKAGDVQLNALHESXRVWSLAQFSXDETPVSTGGEVCRGDARACIHGCKFYTRILIISISDGAGWREISLSHGHSGVANSECETFGLARGKFRGGGGTTANKEGQLVYAKGTPPGQERNEPRQLRKGPLCGHLTCGRIGYAPTLNCPRNRIGGISIKAHVDERQQGDMIESSRARIPVWGAIDIAAGHRERSRDGRQLSSWKPRKLCAQDKGVQCPRYKTFFPNGKAPMGAQTDTGFVAHFGFPMSFPKQGDPLSMNIGAASVHNTNVLSTMAVTHFADRTHDRSYGAHELSLRGVSARRDSPPSILQELCRVSLPWETPYSTKATGTCPNETPDSIPPGGATKGEADGPTHKHSHNHSNIRVVRRNRTKRHHTSSDDHDHDEDRHSTPHSENNSASNNQHR

SEQ ID NO: 975037 - protein, 179 aa, Homo sapiens
STAPLAPAAERRLCERQCAAERARGSAVCLYRGLSRQPGAELPPAWARRVTTQYGGNTWTVHTECDPEGNWNACENIRFCRQYLVFHDGDSVVFAGPAGTVWRPWWELLSRESPSGTMKSCAAQCWRHGPWGREGSILEGLGEEPGRSRASTCQRWRNHGPCFIDGLTCFGCHVLVALG

SEQ ID NO: 975038 - protein, 135 aa, Homo sapiens
MYRGSRRCGRGGGIHIVTPGLGRVLSTIRTFSLSKQKASQIMKIINITAVEEMNEPTDDRMFRGCIASGIAEIQLGSITGIRPQTVSRRNTKLDSPPTELLPQRTGIRERTEGNNGVYTMQATTGNNHADSEAPT

SEQ ID NO: 975039 - protein, 79 aa, Homo sapiens
QVVRNAARREDRAVSLQPPRAVTCDLDPDSLGSARAPQARSGGRDGRMSGGRRKEVAASSAAGQRGPSKSPSGVRCCES

SEQ ID NO: 975040 - protein, 242 aa, Homo sapiens
NPSLSFMALLKKPNKTPPPCVKGGAGDTKRQRTDTEGTAREKTTQVVAPETLTRHSGVGDLRVYHTSLGRGEASEGREAREGVEKHSAGEAHLRTKKKTPSGEKMHREGAPCGTHKAPHMVQRETWGIHEGRTKGGHRDPNRETTSQRTREQKRERERVYREQAAGPSPTESSTNAEVSLLEERDTTRAAVESTTWRNGNREKALRQRKTRKQGRNTQKRDRKTKNGRQPKKKEQEKNRRDI

SEQ ID NO: 975041 - protein, 260 aa, Homo sapiens
MAEVLCPGAVMVDALSWADWRSSWLHRYCCAANVVALYAAEGIEYILGLHLLSTTDRVREVTLVPFLLPHTRDRNTLNSIAREGLDYAACTRHTSADYSIMGWILVRVYCSTLSKDASRWTHGSDTGPRLARSLGLRDRQRRPLTTIRRKCLEESGVTYASALRSVVGVIDTTVLDDIVCSTLVRVVLDSNEDWLVKITESIDDQITAEGGITRRQTDERPRSRFKRVKKQTTINGGSWVSRSVRSNVAASTLLHQIILV

SEQ ID NO: 975042 - protein, 344 aa, Homo sapiens
GQSTTTFISKREVRCSRGKKRGGSSFPSKGDHGPFHRGQASGEQRGPQGWQAGGESRQKGIRGPGNAIGPWRKTMWSAPSLSHPRGRPGTVGRGGRHATEDHNRRAGLWRLREDLRDNLRRAPVKTSVHREGGAQIYSHLGRGSSESSISGFGPRMVRPLKEEVSLGKIPHIKPVEGAFMFTDSYFLLSTKIAHTFSSKQGWPEAGEDKGRAQELRPKQGGSRGPRKCNTGGRIPINISPKGPSSDAKFLHQSIRRTGREELQSAKKKFWATPSGGDHTERTQGDIDNTPLEEHTQWPKRVHPAGTAAATQYVQLRANWAQGGRDTPQKSTQEPAQEPARKHRK

SEQ ID NO: 975043 - protein, 239 aa, Homo sapiens
APVPCGGREGAKSETRACTLVCRRNGFDRYVCPRAVLFVMECRVSAVSNEARGRPSVAGWVDLPSVGTGCAPGVACVDVRRSVDVSYAKAANVRGCAVIYTLENSEYRMLAERSARMFRTQQLLSGGRISFARRSFKRLPSCAVVGELGRPKGSLSLERYAREMRQPPRSSVQGPAAGLGWDSLQELFGALQQLWGSRCFEWAARSGHLLLGDTGNFYTRLTRITGPRVRPRSLDYRRT

SEQ ID NO: 975044 - protein, 255 aa, Homo sapiens
GLVHVRPFPGSPTAWRPAGYVSQGTRMSAPLSECQVPASVSRSARRLERTYQRIAMVTVCDNYVRVLEGSLMVVRAWMQDGLSPCFFFTLVPSTRMALGSSGTWCWLFPADVRERPLVLIRCLGGPALASLPTCCSCFWRTLQAALPWPGLAGPGWALPWGAPLPRLSTSGLRAGLSLAGACGLWLLVVERSQARQRLAMGHLDPSSGTSPGLLLPLELGLFAAENLAPGVLEPAHSGGGQGRLGQHGQETGVLR

SEQ ID NO: 975045 - protein, 99 aa, Homo sapiens
EVAQGPPPAMDERLLGPSPPGGGRGGLGLVSGEPGGPGEPPGGGDPGGGSGGVPGGHRGKLEDIGGRFVLGEIYDASTDLGAVVARPQAEETRPLKCAA

SEQ ID NO: 975046 - protein, 198 aa, Homo sapiens
MVAMRIIRGCLKWTERVHKLEAQSYSYAKVPKQFGGTPYGVTYERLQMTANKTCVSSKEVARKPADLPYTSRLSSTSSTETIVCIRHRLSLRIVEPTTATQYPMPLLGNVVRPRAIATFIATTQTSKGLKALLFTFEVPLHAVHGVRRQIHRAMQRSSALVKGSAGNVADEKKKAPKEERSSITEKVLKPHKGQFEDA

SEQ ID NO: 975047 - protein, 122 aa, Homo sapiens
GTVSSRRCIHRPSGGGHETGTTQGCPYVHSEVRLSRVGAGPRGVGLMGERRAAQPQSCRWSSCPMGGSVIAVCALACIAGKEGGQEAYSGYGVKRIDGPSVEGLEETRAGPSAKKECHMIRE

SEQ ID NO: 975048 - protein, 279 aa, Homo sapiens
ERGKSFKVEKKANGGGQGPKTQPFSGCPPGPVCRGQSLACPKPGGPEAPREGGGKKVGGWQLSPTEYREETNRGVVELSLVKNPSRECGIHEVLQNLRCFSPSCSGKPQGLLSRVDTVILCHQAGKSIRGRRSDIGKSSGINLRGVMDSSGSWDHQGESTTPSYGSPARGKVHHLGRLKGGQRVSHSDRHTSMEEVPTKRMSRGGPCEAPPGEVAASGMSTTQGPSPFQPEKFSTERGPVRPQSRKGSGPQRKLGQSWPATRGGQDLGITNAPNPRMGQ

SEQ ID NO: 975049 - protein, 376 aa, Homo sapiens
QHKSKFRVVVEEVQVVELKVTWITNEFLSRGHGRAVQTRHLSVHTPDGKPRTVVQASLDALTMLQLAALAERWSGIVFPAQGQSHARDCLVHMSSNIQLRHRGEGVYAPQNGDSALFEDSMVCRGLIVIGSPRRPSGYPGPVSMARAMTQKGESKKHAAKRESAQNLRRRPMALTVQWRCRDEGAEEPHEAGEEMRTKFRDKKKAEMTGCNGRDKTQMMSADDEHGRNSTVTYYWTKSQLAPSSGSDKSRQQEHPVDNQGLKSEEKEQKNQITENRKRRTEAIEVYPEQPGEHDGEAERDDPATREQTTETEDKQNTEKRDKNTKMQQKPRTKKKNEKGNNSRQQKHRQPREKKKEENKKTKAYTNRQQEAKPPTR

SEQ ID NO: 975050 - protein, 187 aa, Homo sapiens
GDTGAGCPVRSPPPPRPPRPGWAPPPPPDPSPPGRRRCARRLALKPGPSRAAVRPAASPPAHPGRRRAVTSACRPYPPASGCVLLLLLCPAHVGCDCGGLWAALGYGPYQHLAGRCTGCAWNRAGMSQSCCHGLSLRKCVAEATLRGARARGAMSASSKFRFLPLGNLSRHQQRLLDCILQHGQSGD

SEQ ID NO: 975051 - protein, 102 aa, Homo sapiens
MSWSWDIAPWEGKGPEGWRGKHQEAIRAAAQLGNFYLPEYLRNATTVDDGVRFFLVTSESGHSTWHIPRALEPQNELIPVRGYCLPRTFHGGLWCGNKVMFK

SEQ ID NO: 975052 - protein, 276 aa, Homo sapiens
MGERVNQQGALANAGGGDTDTHEWHTNKHRDTNNNNRAARGNAALRGTPGAATRREVPADNHMADCGHGSNKQHSRPYTERTTRKSRRKRHNSENTNKDNKIAHQHQQQINTVDDLIQSPPTAKKNSNLKKRTASRAPTAPFTHTTLSKQMYDEHQTTPSAKTSKPTNTPSLLAVRNTNSSHHHNSLITGDARRQRRLTRYNTHPPCVVPAGGPTRQTHARSTPPVVPTPVVTTHHLSLCSPTSQSRPPYSIYHSRVASPPEAIFQLVQIDKSRHT

SEQ ID NO: 975053 - protein, 143 aa, Homo sapiens
MCRKRKSDRLQALARDAVALAGSVQKADLAWKSAQGTRLGAWGEQDPSHRRASVITQVCHVPRGGEKKYEDMKQCGEGEEMEKVWLEYHADERVITWSCVWRKDQGLSIMDVRKSWMRVIESDGKDMLDRTGSAHRLNQWLGT

SEQ ID NO: 975054 - protein, 361 aa, Homo sapiens
  misc_feature (224)..(224): Xaa can be any naturally occurring amino acid
RARAAAQRAGPPAGALEAADAPDGCLGPIAERRGRDAEPLLWLLAAWFSLFHGRKRLELDDDLDTELVAVRERELGSGPLVPDCSALACCPVSSHRSCFQIGANLLVAICTSQSLWPLCLSMEAPRRAGGPTKAQQLARTGYCRYTLLKVYRLSEEARGTCEERYVADAPRHKTCVLGPLEVLGWYPVSSTPFSLGTHGDMHRLVRSRHVSLNLRLPCSSDRWXPALAHWSHARSGSCVDLKPGVALSSLNVRGRSWCWRTGGEPGCDLGARMNFPGGHTPRVAPGQTCEPGENHGPAGRHNSRTGEPKFGEPGREGPLTQEDGRHTRYRDMKTELDCEITRGASRLVRPRHHQDDSGTTR

SEQ ID NO: 975055 - protein, 124 aa, Homo sapiens
MIHRQTTTTYSMSKWPQGALNRRTRDRDHTKKHSEHQHGHNTLLSTPTKERNQRNCKQGATEQPMALADRKDHRGTSNTTHRNPPGQEDNNANRRTRLQQHTNENINTNNNRDTHKQPTHNTQH

SEQ ID NO: 975056 - protein, 104 aa, Homo sapiens
QQEAMEATGTGDDGARCLGSGRETAGTVGQRPWVAGYPERPTGSDPGPGGRARMREQVDERKTVRSLCASRYGHGTRCGCVVTTGRCEQPWSHYHEKDMGKAAR

SEQ ID NO: 975057 - protein, 128 aa, Homo sapiens
MISHVVIQNRLSRSASAVEPAMSNICIAPIVICRLESAQRSPRIREVEFIPTVNHCRVAVDQMSGPTEDVTPTPYRRLVWLCCWGATVSLVRWLGYFNFSQGRGRNWSTLVLTGGYSRYTCRDFMNNW

SEQ ID NO: 975058 - protein, 344 aa, Homo sapiens
MGRLGALDWNGRLSTSVASTKPGGNVLDEWRRDNMRQPRTYQGGRGSLKSERELGQGIRSSGPVRGTPCEGGRPWWPRVTWCPSRLGAKARFFGTWYVSEVGHVPMSSEEIMQAVEHKSPIQITTRNAWGTNLVMNLDNMREFADWKHKTHRNMRLRRCQKVRCQYQCMDVYGDGTAVVARKVEGKTQKAHMETLEAPKRLDRGMARTTQLVETPEREQPESVHVPETTNGGQDTARVKGTARKRKQKEDRKKQTNRERQPKEDTEMAPSGPRRRSNGYGRNRQPGDTRRNRTTTQREEAMETEQHTRGKDGDHAQYDRQNRHHSKQKRNRGIKTIDLQVRHRK

SEQ ID NO: 975059 - protein, 345 aa, Homo sapiens
HLLSRPGDRSAGLARRPGHRAWWLPSLPVLCDAVINCCVMHGTTPVQTLAGSCAHAAVDLLCCPAGVPWGSWLGSSAAAGLSWLWSRLDDVTWLSRKPHLACNLRKVLFDPISFQKPLLKPLEKNDVTVPIKKDSETYTICEESGPFSRFKIDILKFQNASQEPNLPEKQPITRNGQTFKLRDILSPDMISPPLGALSAKHSHWQEGQTRLRGYILSIHGSLELLPGKQRKGRPGGRSLGLKGSLRCHSAPRAWVTEKHTRGGAQQERLPTLQAMVGETHENEGARQGDTRDEKRADERRRRADTRLRAEHEADRTEKARERKPSSVEILTDRTRHGKTRDGRRD

SEQ ID NO: 975060 - protein, 222 aa, Homo sapiens
TTSFTYEAVPEALDTLQACKRIPLVKPLSSEPHETQAVTGPDIFCQNWYRMAAHEASINCTVREKARCCVPGDDVPTIEDKNEVLDQFMDSKQLDPETVDNLMPTVTSHPSVMEKCAALERSRPGHCQEPCTCPCQVACQVLFTDVVHGFPERTIRDLGRKGRAVTLDYYSLKAVTEARGPPRRVPSSIYLQTVIRHQVMPALSPLTARAMRKRPSPHSPPL

SEQ ID NO: 975061 - protein, 128 aa, Homo sapiens
MDRYNRGTKGTRPPPTLGVPRGTRDSRGRHRGARATHKGKITPIRGASSIPLGGRHGAAVPKEGRCSGAPKRGAYLFHHPRGPRGGTAAGPPSHAHGGPPGGSTNTNPSGVTQRAPPKRGSHTRGPPH

SEQ ID NO: 975062 - protein, 206 aa, Homo sapiens
HEKIWFDRVLDMTTQKGCILRRQMNGPVVRLRSRQENGASVILRGGIASSPYRNIAVELLWTGKHQSALWGLQSVHHAGEEHEMTLVQSGIARSGTLDERSSSVVAVCTCELHAGRSPMSGEPSAVNRSWRYDALPWPTRGHERPAEPSTVSPIDSPMWSPLAKNARPTPGRRNDDGLMTIDLLMAVTMRTEDHGGGTACVDRAAT

SEQ ID NO: 975063 - protein, 375 aa, Homo sapiens
MPRQRDPDTATTVSQRLLPFANPEPITLAMAQAARDHVSTAPALTPRNPLNDQCTAELPQPLDTTIADHSKPDPPQNRTTPHTKAPHSSATRLIPHNKTSRTATQGPPHTATSPMNNDGAATAGEPPQDTPSRTAHIPTIPPWTATPPRTLAAPSPTHTPHTQPTPATPTTPLPYSTRLHAPNLRTPPPAPPPLPPTTAPTCPPLPTLPPTHRQPRTKQPRTSGHLPPPATDTRTTHPHPGPAPRKQTSARTLTPPQQDPTQPTTLQDPPYQPPGSSPSGTPRTTGNHPPDRATHHRHPRHTRSHTTNLRHPTRPRHNDDHRARHAPLHGQPTNSPNSRLTPQPPNNTSKSRTETTAKHAQHHPPYHTPQTTPLA

SEQ ID NO: 975064 - protein, 206 aa, Homo sapiens
VFRAQRMTGRICFAGAGRKSSCPVLCRWLSSYGFFESTVDASKDCRKSPYPRMLTDVTWKAGTWPNFVALRIEVLGIFACDQMRFIRTWCYVGGSRQYEIPWDPWTLDYMLTPRGRPFTKVKQCVLVQSGHLHNWAMNTGRSCFNVCSSKGILYQYRSASEVIPLVSVNMGGEQVAGLRGHKEPNTVCALILDVNFLPDSALPGNE

SEQ ID NO: 975065 - protein, 97 aa, Homo sapiens
VPLQCPGALVLLVPCCCSAPEPVRTDARVSDCHVCPVPAAVPLCVDVHCPAAALPVLPMCECDAVCCLRSLSSLPVLLLHLIFDDPLATVCHAPPVT

SEQ ID NO: 975066 - protein, 300 aa, Homo sapiens
  misc_feature (71)..(71): Xaa can be any naturally occurring amino acid
  misc_feature (73)..(73): Xaa can be any naturally occurring amino acid
AEAAAAAAASLPPFACRRLRAAASDHWPADAGWPTVAGCTPDCECPSMCPAAAELLTSTAALLLAGCCAQXLXPLNLACGPVCCCTPMLQCLCACWWPCAACGPDDWLVLNGTCLLDVLVLICLLLCASVTLHVLCFPCVPPAVGVLCCCPNASVWCALLPLMVCWLVDGCLAPCWLCLPDAPLDRQPLYQVLTVLVSLLCCQACWPLAMSLCEAHSGPWPPTACGHCGALYAVLACLGGAPAGSATGAGRGGQGKEREDRTARGTRATRKIRGNPRSGIQSREKKIFENDQSSEKGCIR

SEQ ID NO: 975067 - protein, 240 aa, Homo sapiens
  misc_feature (126)..(126): Xaa can be any naturally occurring amino acid
WTVSHRRHYPGSLMSVEPWLWLQLEITKKLFCPLKNRVVRDWGAVEYMAISISLTRLMGEPPNKMGYQVRVYYMSRDAARANEVAEDHHDKGASYILTFRLRGQHTNREGVPMRTGLSTWASSTWXSTIVLIFEGPKDLNFQSEKQRQKNTGFGEALGSLYEVSFLIMAAKGSFPNRVTGLFKREAHEAIQVRACSACWESDQGEDLNDSGTTLFQRCSTRSGESPIMALKLFRSLCANQ

SEQ ID NO: 975068 - protein, 275 aa, Homo sapiens
  misc_feature (3)..(3): Xaa can be any naturally occurring amino acid
MTXQSQCGSERMGRKRLCVRHTVSDSEYFKHRSKLVYAICRYFEEVDTTESSESHTERQRECLCMPIREGTCTIGMRVQSVQPPYINATSYNRRARDVMHALFACATIKLVRTCRTNIRMRNATTCRAKKRFPPKGVVHIGGYLYRSALLGLPTTSGSPIVLCAVHYPQNDGARAPNFSTAEQRHRIRRVCEAKASLRTLWGRYGRHPIIEPPLLSFETITDLEGLSIRNDGSDEKAADGVDPPKHYAAGDDGSVLRVILNHKNKNLSPLIITYM

SEQ ID NO: 975069 - protein, 115 aa, Homo sapiens
MGIIRQDEDGLALGQGRLLVVRDGIGKSCYATTEILIPASTARNGCPHGVGYGNNAAGHADARRLTNPVSKACTGTHRPTTTRREASRRVPQRAARASPHGGRRPQGRTPAPPTP

SEQ ID NO: 975070 - protein, 270 aa, Homo sapiens
MTTFDTLALQVLAWRLGGLHERHSRASWAWLERLWTLRVKVRAGGSRPLSSGPGLPSPASSMPRGARLLMKSQALLGQGAGLGKLDGPGDARCSPAPWPPGEDAARTRPHAFAHSRPRPASRPPGLTGSGNPRNPETLAGPPARAAPAPADSPGTQEPPARHCRLRRQADPRSNPTAPRPQRPPPPLPAPPPQDRHPAPPHAPPPPPHPATAQPPPAQPPAPRTPPHPPRPPQTHPPPPPPTRPPHPTPPNPPPRPPTPPTTHPPPHPPH

SEQ ID NO: 975071 - protein, 260 aa, Homo sapiens
  misc_feature (221)..(221): Xaa can be any naturally occurring amino acid
GERSEAWERTALGCEGARVRRQGGKRTPTGPMAPVAVWAVLGRSGLRAFLGVREHALPRPGNMQNVFCHQVARTTVCDFHVRTVHTLQLWNWVPECLNCGPAVASEHGGNVNALHSGREPHLHLQARTGTELLTQAVNGGVRCCDAPLRNVAAGLRGGHNMELRTSDVVWIALVPRVTFSNKTSFTVYWHGRRSDLYVVGMRWECKHGCSLHVHVPTRSMXPGAVHLTSVFNDPKKQQSEPRCPDSSVHGPPHEEMDCSL

SEQ ID NO: 975072 - protein, 127 aa, Homo sapiens
MDRGEQSLCPEVVQCQSTLSWAVQECLLSWNEGMQGDLHGRERVVATGSAERVRKFVNTLFRVAQEQAIASEDCNKGAAELVGEERCRGSGRASLYLSPYPRILAEPRVVTYRVSLRKSRASKDTDV

SEQ ID NO: 975073 - protein, 241 aa, Homo sapiens
SLAVLEPGRTPPLPGLLGAGRTVVEGSRSATPDFLAPPDVPSSGRTSRTSQTRRASRRQQVAPSFQGGPCAPRRSGALSAAPPGGVGGGFGDGEELCRLAQSSRCESRSVGALGARSSGHCAELRVRPADAEAVFQRLDADRDGAITFQEFARGFLGSLRGGRRRDWGPLDPAPACLRRGRRHTTARRTKATRTRWGLALVGRESGGLEDSGAIGEEASSFQRRAVVPVSKINLWSRLISI

SEQ ID NO: 975074 - protein, 288 aa, Homo sapiens
NRFNSRTYSKFSKLSGGFLSSDYCEYYRPRFFLLENVRNVCLLTSDSDGPEAHTSADLVRMGYQCTFGVLAGRSVRRGQTRRRAIILLTGALERSSLCFPEPLQPCLLPGPAQLSVVVDDEEVCEPDKQVDALPSSPGPISAMQRQRLSDRDRESAEVGASATGTISYERGASVPGCQRTRLAGRTVTSPSIREHICKDMMCIGGGRHAAHPLGPQAQTGRDLPRYEVRLSDGTMAEKLRNTHHDRKNGETALGPSVGSAPAVEAGKAATRSQQSDPHPWCWPTRDGN

SEQ ID NO: 975075 - protein, 60 aa, Homo sapiens
MLPEIGWDKALGGIDGCHSVTGIIALCHRGCAYKSLDEMLVCEERQHEEGVDRRVEAVRV

SEQ ID NO: 975076 - protein, 110 aa, Homo sapiens
  misc_feature (41)..(41): Xaa can be any naturally occurring amino acid
MGSWEPSLWHQEAVSRLMTCVFGSRSDVAEGLTLGARVDGXPPSNIHKGSQPAFDFAPHLTRKATQARTPVREKTPLVLTLFCGAGQGKARNRTHAFNLYGGTVRLDPRG

SEQ ID NO: 975077 - protein, 113 aa, Homo sapiens
MRPRVTPPTYTYRLACETPSYRNTPTKGTYKVTKKGRCVAKGEQTWDRERRLHTAGEIGELREDTGGMAVPGWTEGRYHEPRMDVDGASLRDDDEETHGVSWCSARMDVEIDQ

SEQ ID NO: 975078 - protein, 131 aa, Homo sapiens
PCCCGTRVVIIDEGHERSVYTGILIGLLVPQLVYSSGLSRNAGHVKSCHHVGPRCWGGMDLHPRKPHGLFGKPSPVDAKVESRQFPVTVHFNKRTPLENYMWLSASWKVCKIHLDACPEGGISEWFTVVGR

SEQ ID NO: 975079 - protein, 111 aa, Homo sapiens
GGEDLGGCWQKLAELDVARQVSELLRENLALTGMLCLVLGEEWGPRGGPAGAGGSVSRAAPGALSCPRAGPRDLVRIVKLQHWHGCGHVLDQLPLACSPDDLTRQLVPSNA

SEQ ID NO: 975080 - protein, 141 aa, Homo sapiens
ANDIRCVGAACRLWPWGSEGCVAPLDGVPRSLPCSPRTPAETEWLWQCLRWTHWPPSWSVEPGTWLTSLYPRSLSPRSLELDSTCAFVLDWPCMPTSAPDSQGEHHPWMQEILRTMKKGGLQWGVCAQSPRQPALRQLRYP

SEQ ID NO: 975081 - protein, 137 aa, Homo sapiens
  misc_feature (13)..(13): Xaa can be any naturally occurring amino acid
MRLLEDLNLTYDXRCGEKERVTQEKVQCRSGRMRFETLWHRLVSRSLALRVEVLRGQSRHCEYRYKWRRNRNCIAITQPTRIVHYLPAVQRIVARGESDTERPGFACNETRQKANPQFTIPWGPIVRSTKGLNMRMI

SEQ ID NO: 975082 - protein, 247 aa, Homo sapiens
MSQRNGPHNKEEEHHPHNSIEGQGQHPTAPRPPNYLTSSGGRKQDNNTDTAATTHHKPATHHVDTPPPGRAHTNNKSTRPPPPTSAEATNKQHHQAGTTSSGDQAEQKEAHTTRARTNNNTLMLPTQAGHGGARPTQNQTEAHDRHTTRKSCLAKKHQRGRAAKQPSPTRLYNTHSQTRPPKTRHKTRKVHDYTAHWNDEQNTSVASTTEHTPRCLNTKRTQLHAQTPHPPSPAETTATDTHNPPPQ

SEQ ID NO: 975083 - protein, 124 aa, Homo sapiens
  misc_feature (122)..(122): Xaa can be any naturally occurring amino acid
MVVLEFSLKVEGGLGNCGARVQRGYSVASDMFASGGNLLVVVGFGAPVGWCPRRQWALLPGCLAGRLGTVACCFPASLDLPSFAGRWGPNGPPSLAVDSTRFGTGSFLGHTRPPGLRCPFLXFV

SEQ ID NO: 975084 - protein, 73 aa, Homo sapiens
MAWAFQTEVWYVTQREKTPPWGAVDDGTPVFPRLPVGQDTRDSTWGDQPTLDVPATAELPRTLMCLGDGLPLS

SEQ ID NO: 975085 - protein, 204 aa, Homo sapiens
MDGDTVVPGCTGSCRLRLLIPETIDAVSASAIQVDQGECRKLARPAGQLIACHGTLQCYPDPEWTRNAHCDETVGGVTMTRSTPSISETGAGQGDGGPGLWSVDVGHPQVMDEVRNWRRYRAVSLPPWKRAQITGKDDAADKYARGHYSHWQGDQLTLCGTDIRKLADQCTGRSVASWFSTAYGWGNWFWVQPPCSWKRLSVDH

SEQ ID NO: 975086 - protein, 163 aa, Homo sapiens
MFNCIHSTTIIQNLWALEAELAGWGCVKVAVDVVVGRKPGGNRKGIGEGDKAREVVSKQLETDHVMGRSQTTHDWRRDARWCRESPRIGGSSTGLHNTGNARLQTRIGERKEDEWRRVVVPGAVQAGPPLSALIPAHPRVGTLGPGGHRTGGESLRVDDGKAK

SEQ ID NO: 975087 - protein, 469 aa, Homo sapiens
LPFPPFSPFPLREGGFPGAGGKSRVITPGSPGTRDAAQVGRQGKHPQHTQQRSINKRKRGPSRAQGEINNGTRPYSGNAHPKTDAKRQARRDAPEPEKATKSKHTGGTQTAHQRDTADITTQNTIHYTTTRQEPQKPEHKNQETGDLHRHHRHTVAKLKARMGKHASAPRRRQATPRGYNTPSRKKRTDEKNTVAHSEQQQEKATKNEHKYADNHDRRGEPYMDQQESGEGARRNKHHENGNNYQQTTRDTQRATRWNKRHPTPDERDTQTTTGQKQGQNNNQAKIHRHKTRNNAMKEQKHNTATTTRTKETPRKQTPPNHNTHTKTTHEEQSTTTTPPTPISTRKRTTNQTQTQNTQQQHTNDTKKRHSKQRDEEQQNNTHTNQEEQDRKKKEQRQDTTSSEDKPIDQDNDVRADNTIDNRRRQQIAAQLTHLISPTTDERTHQTRYNDCRDEENIIHMHYHINVFHL

SEQ ID NO: 975088 - protein, 116 aa, Homo sapiens
MKANLSIELTTHTIVSETRCIINTGRYVDVTVMRRSETRQNQGGLTSYHTQGRQKEKRHVSTYKKAHPQRNGTKQKGREGKPRPTHPKNQRHSKRHKQRPNPQHREDIQTVADDRK

SEQ ID NO: 975089 - protein, 68 aa, Homo sapiens
SRCQWRQPHAVLVGAMHITREAGASACRYLVEVEELADVACWRYEAVHVLVGSGTSYRGIIIIGSEGL

SEQ ID NO: 975090 - protein, 105 aa, Homo sapiens
MIRKVRDYVMVRKHKHAVLLSSRQESKQGKGIRRVRVVRALSRPNRYVSGVKFEHLIDIELLAGVPGFVHHHMTRADDRTTWIYGFQGAEKIGQVMDNGAIGPRN

SEQ ID NO: 975091 - protein, 121 aa, Homo sapiens
  misc_feature (25)..(25): Xaa can be any naturally occurring amino acid
  misc_feature (82)..(82): Xaa can be any naturally occurring amino acid
  misc_feature (84)..(84): Xaa can be any naturally occurring amino acid
  misc_feature (96)..(96): Xaa can be any naturally occurring amino acid
MGGRALLTGPPSEPYSLGPKSKPAXAAERRAPERQEAWRRPRRSSNDAIRGNAWNTPSASSVTAGKILIRGLPGDVTNQEDXEXVARVTSQQLKIXCFVDKYKGTAFVTLLNGEQAEAAIN

SEQ ID NO: 975092 - protein, 210 aa, Homo sapiens
MRGQPERASTGYAVLEPSRGWSRQGNVHGRREAVQFRPVRIPHPGGTARSNSSSRRSRFQALLQGSLEKRTRYRRTRPPRGWSHGPKTGGHSDAAESCPGNQEVHHNQTLGRELPGGSPGAGKVHHSRRRTNSGGLPQGAQGTVRVTMKIASVKKLVGCQARGVTGPTKKPRVPRKGSLDPGRKRSRDRVGRMGGPIGRTIPQPRAIPGT

SEQ ID NO: 975093 - protein, 294 aa, Homo sapiens
GNAEPGSRRYLVELRVVLEAADAEVPQRIQRGAPTRGEEVAPGRRQEEEREQERGAERPDPPCVLSGGKGRGNRPLREAPGGEGVSQVPAAAPLPRFHGRGECFFSTRLPPARAVRGRSIPAALRSGRRAVPAQLRGNASRDAWGVLPGPRRRGRASAVARLALVLLGWVSSSSPTSSVSSFSSSGRSGFCRCPPSPPLPDQCPGCGVLRGRRTASASPHSDARCQDCRLGGHLFLRHQVACSWRGFAAAAWGVAAQLRGSAEKCAGASRLPAGSDCNRWARLVSGSRLAPLVC

SEQ ID NO: 975094 - protein, 148 aa, Homo sapiens
  misc_feature (140)..(140): Xaa can be any naturally occurring amino acid
LLSSPSPVCLPPAAASMISSIRQFSSSMLLCNGLLRPGGAGSSRTSCRLSWRAGCRLLQAGDLAGGLEHGASGVAATPGCYSFGSGGGYGSSFWGCRWASWLEGDERAFMQESYYMTGLVVAYRVDKGAVLAWTEAQAAXSRGGEVLL

SEQ ID NO: 975095 - protein, 329 aa, Homo sapiens
  misc_feature (91)..(91): Xaa can be any naturally occurring amino acid
MRHHVRSSKSFHLHYGSRSSFVECGCSGLAKAYSRGLDEGQGLLLITRVLKDVIAWSIIQWTYDQWMAEGVRPKGKLQIELNDEDIPADDXWMRRAERSSVGATAGKVYTVTDAGIDQVVTDLRLWMRQTCSTSLVGILWELIRTMVDRAEAETVMYSFPGYTHLERAQPIRMEPLDSEDMPGHLTRDSERMLEVRKRINVLPLGSGAMQGYHRVWGEELHDRTQLGAINLNRWGPTRERPSGANYRAGGAREVPNSTEGAEKHTSGPATLPRTTKGQNRRDCAPKTRTRGRPQGTVVPSATSHKRQPTTYHERLDEEQAEGEKDKPHN

SEQ ID NO: 975096 - protein, 197 aa, Homo sapiens
MKFLLDILLLLPLRDRLLPKSFAKLFIPKRRKSAPGEIRAGLQELGHSTLGDTGLAYEFRLHLKASWVSGRYKYRFGLGGTTLAKLQGTGVATRPSPLVARLAATDNDILPALPTEGEGRTLADPLSRIFNVIIKAACTTHHTSRHRYPTRSIRTPTTLSPNVSPYNANLLPHTTGPTTSNSRTNSNRPYRHMTSHL

SEQ ID NO: 975097 - protein, 83 aa, Homo sapiens
ATDANSVGDAGGSAPSILDTRDALQLVNEIIDKAGYASFISLLWYGMLLPHMSYRDGKIMTLRLQCLATCSFPHDITGAADGG

SEQ ID NO: 975098 - protein, 148 aa, Homo sapiens
EAVSVLGLGPARSYPATITTIWDGMKVVSHSVVCHTESAGVIAGAFVGILLFLIPGGGKIPKRIGSTRPAGPMRRGTKWRPFSFVRKMRESRPLMVQTEAQYVFLHQCILRFLQQSAQAPAEKEVPYEDVENLIYENVAAIQAHKLEV

SEQ ID NO: 975099 - protein, 290 aa, Homo sapiens
FFGLGFSFPPDGVRLCVGLLGRAGSRRGVLVTLISHRKRGPGAGCCGPRGFRGREEKGRGKKTLAIPEYQDGPGGWLAGSQASETRSCERAPGGEMRWVRGCLVGEVGEAAGRWTSMGKMQSGGRGVAIGEESRCAGRRWPGGAGRRGRRRAQLLGETAVDRGDCGHSRLIHTGEQDASYRVLRKGGGNTGGETRATVSNPGTGLGVQGVPPIGHQSGAGWAPTEEAAARSSRDGGGPSGSKGRDPKKPGVSTGAECSTDVDEASIRTTRGGAQQGATGTPSRKRVEEAK

SEQ ID NO: 975100 - protein, 104 aa, Homo sapiens
MTYPYQAEGNFGVPLEGYGSRYFADVLTLKNHTPDRASCVHTPVLGSGRLRTLLSPSRFPALAMEELLNGTQPARLIGSFQLGCACNLGTNFCCKGSARNSCLQ

SEQ ID NO: 975101 - protein, 217 aa, Homo sapiens
NPSLFYALKNQFKPPPPCKGGAGKNKKRKTRWETTISCPRPFMRPDGDLGVSHLVPVAGVEMWKVETPPGGALCLWSPLGDLSRGDVDRRHICAGSGSRGDMGLVPKNFLRAKRAGVWGDRRSSLQVCQREGSLQGGRQEEEGGASLWAGPLESLAPEQGRLVGVTVCCLYHERVSPLPRLGEQGVAPAFRELSLMDPFSPLPPGDFLASPLKEPLS

SEQ ID NO: 975102 - protein, 68 aa, Homo sapiens
KPQMEESADHALLCSSSQHLFLDLPKLEEATGESGGRRTLPGSDVEHPYAQFYHPCLAFGMASMLNAD

SEQ ID NO: 975103 - protein, 256 aa, Homo sapiens
SREKGLSILYSGPNKCVKGQGVRGARGLLGWRDRWLSWKGEQFSQVASKMAHRWAQGGSPLCEGWRRGHQRRGGRRGHREGCGRTVEGGGGEGGVWWQQESKPPCRPGDGVGGPPATGGSSSGTLNNIGALAEHSHKGGGRQGTAPVWQVGRRVSGEAQIVCVEQVSTEMGRGTQREAGLVPQDGTEAPSWCRGSLWGERPGAQSNNEQHMREINSNSWRATRMLSSQAKETVPGRQGGHPQNSVCPRMGAVPRTL

SEQ ID NO: 975104 - protein, 97 aa, Homo sapiens
  misc_feature (88)..(88): Xaa can be any naturally occurring amino acid
DRSTSLAEKTDGPQTDMRVSVTSPLSLRKSVDHCEELSGLQTMDPSWHKAVYVVASHTRGRRIPPWTYAWRAAWIITSSDHPDGRVAXLVGAPSPSS

SEQ ID NO: 975105 - protein, 424 aa, Homo sapiens
SPWWLGPVYTYPEEREGASRLSSRGQYSGAQVRVSSSGRNSDFSIVGSKSIATACNVSGTISCRLRAPAICSGAMDGIVCCFAAANADCPSFMLQPDCQAACCGAQLHPSHGRAEHTRDGLRDRAVEASIAWHYPGVTQLPPHKANVTRRELSLTHDASVGLVNLHPTESHTTEEAQRMNDSSSPHNAHAPMPRTTPGNTFTLDRAQETLGTLEAVLNPSRHTAHRDRDTVLLIHWRLVAARNNLGKALATDIYWRTLGPIDPNPKAYLASPGPTPHSCIMDWQTILITLHAPTAAFTIQRTSPHIPCLLPRHPQATPFYPHARIFTHDKHGTIEEFTTSKPPLGRHFIKHTTSTPGTRTPPGDHVRTLCEPARHTEMDTHQFGRAANEQRTWWPRTAQADSWPYTNHKQHGPRTEQPETAITT

SEQ ID NO: 975106 - protein, 344 aa, Homo sapiens
GSCEKRRDAEYGRQPGAGGRASGDDATQKEAWVENHGGTAPWNSGGRREAVLAGSPVKSGYEELGVFLGRTVTEQAPADEGIRVAKAVTSESCELSSQDSWDHTPVQESLATGNWTEVRVSRDLRPCAIQDERGPSGSKLLVPGHLTKCDKHGLYNQRQIQCKMSLERAAVRECWCVNPNHREADPGKRPSIQGGTPSVISVYKEEEEARGGDTQADAVDRRQAVPGDPWTRRHIYKEQCRKTGVDDRGGSDEKEGDDQYRQRRISNGELEQERIDTNAAPTTYHEGKSPGMNHVALTRQEERETEKDTQEQHGKERRPQEGTTPGTIGRDRDDENIDHKERQQ

SEQ ID NO: 975107 - protein, 177 aa, Homo sapiens
MKSCGAVSRGGGNPPREGNNLFPWGPTKQQGFHRRTTDQGSSEGRSMSGTQRSTRGGEALRRKPARCGAHTNKESAAAPVGRQGRGGAHTERRAHPFLGGPTEVCDQLVEQTECVTHQRKRGGRPTREKPPAREHPQESPTQHVQLEEVSAGKHEHSETEETPTASERRDHSGTRHI

SEQ ID NO: 975108 - protein, 107 aa, Homo sapiens
MVGTAHECKTGLVMYFIIQNWGYQYGTYLPMVKRPQEIATIPVDHSGHKRAHTLPASLNNSIPHDPHDCPHATAPIHPTTAPHHPRPPPAGNRPPPPVMSPHPPERS

SEQ ID NO: 975109 - protein, 322 aa, Homo sapiens
MLRRPSRTNHKLVRKTERTPISQTYMACGRPRRQTTDPYNYTRGAGNQTSHPTTLKTPPATNPGTTAGLAHYPTAYRHTQAPAAHSPTVRTRRADTRHRKIVTHTHSPTGPTDHTTQYRTREHPAPTHTTALTGNRKGHINSESPNRRRLSTPPKGQTNNKQDTTDTQREVKTLQRGYRHTITRRKNTAAKLRRQHKRTPANTHYHQGEQKDIQRQGQRRGQRNTETKQKTRPPRTRALASIAHTRPHARHKNSTIKAPPRPDTPGSAQHDHERAERRHPRSKQHDRPSTAHTLAQTHADKQETDNKTPTRRTGPPTESRTT

SEQ ID NO: 975110 - protein, 601 aa, Homo sapiens
MSRVIARMDGLAGVIMIRSGLGALRRHRRGRQLYGSMRARRVASAATFSWWRMDAGGNVGGVRWGLRATVDAASRHLLYTLGVSECRQQSTEHMRMPPSRYPLAATPTCSDVHRVLVFGVRALRRPVWIHGNSAHDISKGVSGACFGAPGHAQRATRGMFTMSEAGRLALITAVPSDAENGTDAGLLIGVPVDTGPEALIRWALSQTPTGEARGVLGKRPDMWGSKAPRYIIGDRGGRGTTWGFPRGIRREWATAAQVRCSTRDNHCAENGRTSDTTIRLGPICWHMLQRSRTGPGHRIRDTLRAPRNGIGVADDGKNFNHQKGVTYRTDSAISHVGTLTVGRDPHEQGHKHRRKRLKPNIPRDHRSAYRDCVSTRGTLSGAPNEGAISGTQTRSRPEQEIAPVQLEALPPREALSNSALTTAYRGAAPIGDSAPERRNAKRTGHTTGAPALGKHQGETGTSRHENQRRWATTGELTTSLQTQTQSREIKTRGNDTPGDVRHEKPERAPGGPHRDRHTHPKSDKQQEGPKQRTDKPTEQGARPELIGKPTGLEKYTDRQGENNTVTSWHNSSKQEAITAQTTTRQNRQQTEYSKAKTRANN

SEQ ID NO: 975111 - protein, 167 aa, Homo sapiens
TFFSIKGEIGRSRGVGARVGGGRGGVGLSNAVIYFSVGHTTLGTIRCDWTGGGRVKLRYYVTATQAYETGDDDYGQPLSRPCVVTLRTRGLHNATRRRGDVWNTGAYTVAPGVSQIRWAPHVGGAHAHTLGTVGPIQDLTTRQTTREYGVVRGTKNTWAQVIRTDPQ

SEQ ID NO: 975112 - protein, 249 aa, Homo sapiens
MHQLFYQCSEELGYTEGDCRYFCTSVPSGKCESEWSSLERSILEPEREIRGDPGGFEHVDQGPKDDIVDQGDPQTGLASRDRIQRTVSAAYVSKRPEISVECRCASVHRDLKPENILVTRGGTVKLGDFGWQNLQVPDGHLHPWLLHSGTELPKFFCSQHMQHLWTCGVWVYLREVRRQALFGDLSTVDNFAYGGSKLVGESSGRGLSQRPRGSRERPGERFPRVSLALGTARRHISGACGPPLLASSP

SEQ ID NO: 975113 - protein, 114 aa, Homo sapiens
LPQVSPTAQRTEPAEDSGESEALECSSQHPSQLLPPDPAPRFATSRVPISQDAQVPQKMSVSLPEGPASPVVPTPDSVEQEKFLRHHFETLTESPCRELFPAALGDSVSALREA

SEQ ID NO: 975114 - protein, 52 aa, Homo sapiens
MQGITLKLAKLNGVEMHHTIWDKLAWPTLMVATEYKVRPKSTRTHNNNEQEK

SEQ ID NO: 975115 - protein, 287 aa, Homo sapiens
IRVVSDRWSSLCEQPDCLSPCRHLILPGEVPPSKRTLGPGSPGPCLLRVNSAFESLYQDKSFLSVTIRIQTQVYNELYTSEGRLTVFVGAPHGQREDYSCKRLGILRMHVAELGGALCVRHPHGGPGRAGIHGLGTRSVHGQARQEGGTPDRRDTASRPVSCWAIGTQLSSAPLRSGTYFPGDGSSARTCRNINLFVVDEVHLIGGENGLLRSDLSRMRYISSQIERPFDCGNQSSVSNARMWPTGGLSAPSTLNSFQCGSVLGVESRLNRHKNPGSRNGSSVQMQN

SEQ ID NO: 975116 - protein, 98 aa, Homo sapiens
MPPFTHVGISTRSIYSTTKKPPLSGGLGGSPVGSGSEPGNVSQASGGLGQAGGGASLKAARVLAAAHSGPRSSFSSGQREPLVVRRAAAGMGRDARGQ

SEQ ID NO: 975117 - protein, 138 aa, Homo sapiens
MDTENAEKPTDHTQPPQAHNTPSATRHAHTPRSNTHTRFKNGTGGRTTTTHQNPNPGSSLNHRHKPTANNAHEGTNTSKITHQQTNTLTTEHRSRTPAPRYNPTQTPTQRPDPTTADTDRHTQVQHKQHTTTHPRTHN

SEQ ID NO: 975118 - protein, 145 aa, Homo sapiens
MGEMRSGRIGPTDGRFAVGSVTVTERGARSGVEGRALQGQVELSRVSRRVKPSGSTVSSPCDSNVLISSPRRRVGRIQDLSRRRPCVQQRLSSSFTCEKDPECKVDTRRGSGEVKNQMPGGPPSWSGARIEWVQNPQNWTLGVEG

SEQ ID NO: 975119 - protein, 213 aa, Homo sapiens
MTIHRRELKATRLHQLRDEDGKIVRESRRNAVLRRPGLQARRMAADALLLFYWEATSLMQDCRGVGRYSSVYCEYGRMERFRCPGRSSVPSTILPGYGIWRNPRKPTSSPSRCVTMASMPRRDRCTVEQQCAVGRNHSCSPGIADRMQKEITGLAPRTMKGSHDHRYPQSAKYSGVDRWLHPEPHCPTSSRCGLAEQEYESRVHSIVHSVNAF

SEQ ID NO: 975120 - protein, 208 aa, Homo sapiens
ASSCECGWDGVLAVPEPGNLAWLSVHIILCPLSEMCVCAVAVKMHHLHCELCPGTAAMQCKKLLIKQFCVLTVLPVGELDYLCVWTLPPWVTSDEHMATIEDLLSLPAPLWRPLDGHHCTQCECPVGVDCDGADALTLHCSEVTVACRAECEKTTKRSNFDSRTLHSNETQPPTTHTVIVHERRANESQQSTNTVEMATITLILTSTV

SEQ ID NO: 975121 - protein, 86 aa, Homo sapiens
LSGFTTVSCAPELSACRGAPRGESGAVRSLIAARGAGEQEQPTLSRTIRGPRRNPEGRECPDATGQRVGGEGQHAQVAARIAPSRG

SEQ ID NO: 975122 - protein, 291 aa, Homo sapiens
  misc_feature (205)..(205): Xaa can be any naturally occurring amino acid
PGASIGRSRNRGPIAASSLPQCHDQTAFSSAAQDWRAARHAAAGAGVAVTGVHSWHVRDVEAGSPCNMSPEPREHVSSSGDLDVVAPDEASTSHKPCVNVSHLTVQTRTSRTGTKVTTVLWAQLHFVAGRHQGVLPLCDVHRGDILYQVGDTHQNDLDRRRARMRLLEVTGWLARGGRLSAPVVSPRGQLLSTKPSVGRLNAWQXMTQASVSSVWLRWFAELFARGPRSYALREMAVSESSACVAMGAAFVSERVSISAPPYHAMHAVQTICVHSPYAGMGGGRCKSIEIR

SEQ ID NO: 975123 - protein, 225 aa, Homo sapiens
MPELLGENCMARARMCGARACVGHEPDLCARTWTCRVCGTSEATDLRSIYISGAAAFTARAGVQRLRECNTETEESLVKRLVCCPGRHGRAEGARLCDVVIINDSWTRLRRAEGGALRGNQDKVKGPGLSLLSVLGPGPIHEQGGALSSPWSERSLCLGRFDGGDIFRVVEPGGPTESGGPGNLGTRRSPTNVVHSKRNRFGENTARYHFQKAYLPKTKSSRKDT

SEQ ID NO: 975124 - protein, 205 aa, Homo sapiens
MSTSNKRTLINAKEDSEAEFLGAGWMRQLSRGRRDVCLGEQRDRRDHPRMKCDRIALGPCSVGLYSMVAMKPFLSRQGLNPNKASDWVPPPGKQAPVPGVLERSETVENVVHADAKSWETHLRKAPPCETAPRQNRDSQGSREGERAGTPRWDGDVHPRLSSKAGLAPGANWGGRPRPESSQRREHPNGEADPRKQEAIPSTQNK

SEQ ID NO: 975125 - protein, 235 aa, Homo sapiens
MVGVRVSYNNVVYRYEERAKGPAGIDVKPEIVRIPFGKVEGGTAGLGNGGDHHHIRAKGHEGRSNQRGLGVRQGGTGQTTHLIKTRSDPVQSTDTEHSQYETAGHTAPKGPRKPSEREDDTERPPRPTSERHDTRVRHQRAAPQHTTTAHSYPAHPGASNNRTGSHTTTQQPTHPTPATDNKGSHTNTTLTPLAQPDAEPTNAITRAPHDIATKSRAPPIQTHTLSASDTTHPTN

SEQ ID NO: 975126 - protein, 275 aa, Homo sapiens
MLERQLMSRVDNLSDTHTFPRECELLKKSRTVESIELINQRARYRIRNSTGCVRWHPGSTMNEREPVNASNECHQSRRTVSRQQRSEGARDTAVELSTETSHNHKRPRVRSDAMTPFDRLKPMTANEAHPIHDGTRDSEPDDDEEKRKREAMHMHGPAECESIAKNMGEPFKPLVAEGQEEQTSSNRAETKGVYRTKNEYQKRTKRKNASRNKAGGKAAETDPNTSEANSHSGRPENKTEKERNAKQYTLDSARPKINRGKSDSRQQGYLKTTES

SEQ ID NO: 975127 - protein, 186 aa, Homo sapiens
WVGVVWEPPYSLKDFIKDLIGVMAVIRRHWIGALQVFPGDLGAQGHSGGKTSSPGLVGRRWEKTGKRMVCRCPRIVGEVAWVPPKEASRCGCTRGSQETGLSGVEPRRGVRRGVSGYKASGGPVGSEHFLWKTRVSRAPSLFFWVCFHREPQGATVCVGGIARTLCGERVALCGMPDSSPQRGDFW

SEQ ID NO: 975128 - protein, 489 aa, Homo sapiens
IGSLSVSTRPRCSLSGPSLVPLRRVGGPVKVTRGQWYDGMIRGRGMLGRESRRFCASGLRVDGLAGVTTRASLSSHAHDWTTRLGVLEEDRVLLMYCSYGRILSSAQGKRMRPAGNQLVLEGAFLTCKALRNAGAVRISRKEEFRRAEMERLKVPGDEGKAWEDMGPWGLYRSRGAKFGGEGTIFKGIPSKGGKRTGTKRVALLVEQHRVGVCFAIPHFISRLAPLENRPSRTGGQVGPGPLGCKAAKRATKATRPDWAHPGHTAPTSNSLVAPSQTGPGLGWAGGRWGVGSRGPKTPERYTHSRSARLKPPILHQPGRATIWPPQTRAPRRPVKPHPGDTRRRAQETPPRHVTPPHDTATPRSLNQPPRQPRTWTHTTSQTDPATPQQNTRGNAGDNNQARTDTTQLRRRRTTQPGATPKTGKGTPTRAARDPHPATSQAQQRATSNRDADPTPTQTGDTQPGETGAEKAASSIDATAERRSCETRLE

SEQ ID NO: 975129 - protein, 285 aa, Homo sapiens
AAGVVLCRGLADANKVSSVLPPQWTLHPPPGGLLQPALVYCHHDRQLAQPECWCRSSSGLINCGNNVPDVPECFGFKVNCVRQQPEEEADLDAVSSPLTECCGMLLGLCALLQPPGPLPWRWTRTGNVTCERCCVPCVPTACFLIVAHGRLVAGLLQSWGAHWLLLLDVTEDRLSLLRAGGVPAEKLELQHIAMHLRYSDLTVSPCKSLKLQPEVRVTDEEDLPWAAECAPVGLFDFAHKPSTFQGPVITGWKPATPIPLPHNAHFFGEPDLALETLRFSPEVDS

SEQ ID NO: 975130 - protein, 321 aa, Homo sapiens
RDLTVILQGAVSGRRRVDFPRGIEVQEHKVRILGNIAVLSSGEFYGDEEKDQGLQTSQDAGCLCSVRPVSRPFSNEGQTLVVQFTGEHMMHETRTVRGGYVKLFPNSLEPEQIMHGDSEYNIMFGPEICGPGTKKVHVIFNYKGQNVLINKDIRSKEDEFTHLYTLIVRQTDTYEVNDWNSQVESGSLEDRIGTSCNQGRSRSRRVKNGHWDVLGQIEYSKTFQVGDWAKPEKYSDLMYKSPGWGKHMAGTVVGPRGCKTRVNRGVGHRSYEKPDQEEGRTQEDETRIPTQQVITNNQAEHTVNLSTQKCTPQKQLRDGSG

SEQ ID NO: 975131 - protein, 59 aa, Homo sapiens
MEWPEFAYIVHSSRGLKERGGNRMSPSHNLTGGDSLQDHGAKGTWMTKAFKVNTSGAKQ

SEQ ID NO: 975132 - protein, 230 aa, Homo sapiens
MAKTNRPNNYITTTDMTFQEQKQNKHPRESEILLLLYSVVPWWNTFTYPVGGLTRNLGKTPSGGNWRAKQPAPGGQRHHTSTHMRPTGTHTMTQTGHHKSGNRNRPRHRRTPRAHPTKPPPPTHVGPPSEPQHRTAPRQKPANPPKHTQHLRAPNPGHPLKPAWQPAETERNKAPNGQSRPARNTRGTHPKTPRNHRNAPTRKSPKHTPPQHNQHTTLPVNTKWMRTRNK

SEQ ID NO: 975133 - protein, 87 aa, Homo sapiens
MVSPWQGYQSDPPLLKKIRPRVPKKRGGAKQRSGKKRYPQVTQAIPSPGSGERHRPARRTRRHAAHAETARTHTPQNSPRTPHHTWA

SEQ ID NO: 975134 - protein, 286 aa, Homo sapiens
  misc_feature (123)..(123): Xaa can be any naturally occurring amino acid
PTNCSCGCARCRSAAPIAICYRRLEIGAGPAAISASGLRFYSLTSSETSTSRPRFPSSPWRALHPKSVGAVSTTSDDHWAVPSWRRVRRVGPHYSVSGITPRCYAPTRCQDARSIRSIILSTXFMGSCTCYSYPRYMPIEMSASTPILVSPWQHSNRVESRTLSGVAGDRISDSEPGGKAAPRTETVELSTRAITHLCIADLMCRSSAEASGQSSLADQPKSLDLADTGNAPAAPSHYVEHHTTLPPSRSAHQPTAPLQSLTHRPHRHYPPCPRPPPLCPAHFTAA

SEQ ID NO: 975135 - protein, 332 aa, Homo sapiens
DNGGGGDGRALLKQQLWRLPLRDRGRSGSLTRTGFRVTASYCSCCCSTLPVEVLPPRPAPVPRASTVCPWSDVRRCQKAILRRFVVRDQGVARCVGHRCGQAQEGTSVDLRVIHQMLEGSSIVQTNGDYHFCLDKLVCQLALATWYTSPIYSIVPPALCAGLGASVEMNGRGELVESLKRFCAFHRGFPPLHLMLFPEEGGTMGGRGSALQFWQFYPRCGASSYPASSETPGLCGRVSDAPWVSNCCGHFSAFQRGPRKGVRRVMRALGTDVGVGPRDTPWRRIGPPGRASPWKGRCWKKPIGAGHDFHPETRGGRHQSATAAQTPEATRRD

SEQ ID NO: 975136 - protein, 85 aa, Homo sapiens
MVERALREGPKGIISPGRPAIIRGHGAWWGGGITLAASAGTAPLGTQHDTCSTRRIITIYVRRKEQLITHSPPNRETESSTADQT

SEQ ID NO: 975137 - protein, 286 aa, Homo sapiens
DALRSSKLQAVIKSSVCNRWVDAAGSCGICVGSELGRWHMVAKTAQQTVAIRGQADKNHHQLKSTEGVFHGRPGVRDVVTKYSNFVRLPLYLNGRRMNTLTGHLDDGPHRMSVSGKHEEFYRYVAQAHRQCPLHPATIRRTHRINIRQIFYVPDMKTVHVRCETGAGLQLLTVQPHKVLNPGPKATDIHAPSGWRFIEVWWTVRTFPELSESCADRHTFRETPGRFNTMQGDIKILNCPAVNNDADTYTNTTGRLPPVHKQANDSRNTCTQEQHSTPTSLVQHQEH

SEQ ID NO: 975138 - protein, 212 aa, Homo sapiens
MLKIRPYTLPPPKFISNKIREQEQRGAPLTVQAEALKVSSQGEVHSARSRAAPGGCGGLIAEGNNATYVQIRVGKIPAVNSGLIGGAGSREASEAVCGPLGLGGAGQEEAWLKAGPWVSKASRLGRHGAVRGRGSARKATPEGGELAQATPPAKRRLKTTGGEEKSALKTPEYESSRCRRYKKRGRHTKRVPTTRRQQSRNQKIAAAAHAQT

SEQ ID NO: 975139 - protein, 322 aa, Homo sapiens
YFLLLPRRRRRIMRDIVYLQAGRERKPIVRVQGFGRGSAMEHGIDPKGIVPRGQGSVAGMHQTCTIKESRRAVSIVPRAVFGDLETRKHGLRGATGPYTRHDLAVAEQTSCFASEWCCGDKHGVAQEGSYTGRLRSLDEYLGAWMCVTKRKVGNAVTAWIVSQRRHQIHCRGADVASGTSCPNLLDCPGDERIALTWIVSIAQAEVVLSWKLVGVKCVGPADRTAHTRHAGCSGLGTVTQLGTAAWIGERAPDTAFAVQSPLLVVHRATWWVTCTGLGGGPKGWGPAGGAETPSEAGWGVGGSWPRTGALCPFALAPGARPA

SEQ ID NO: 975140 - protein, 115 aa, Homo sapiens
MDNSSLNSLREIVPRDLATDYVSSAVTQYVDIVIRIELRATYMHDTYVGPLTAISMEGIISYASSADRILAMQLELGLEIVGSLDLSTCFRVGLCRTKCLLEGELATGVYHPYAH

SEQ ID NO: 975141 - protein, 227 aa, Homo sapiens
SLNPAWQSLYAPAADAHGQRQGRPGSPTTSLRSSNYLDDSSETVSLLREQHNAAAPSQTAARIRMLPSPGNGCWLLTAATNYHACAMASPDGAPGHHPPHALRRTPRLPLISGGTAAASRCFSHPRWTPHVTTQGPPVARPTLPRCQSACPAALPAPFSPPLLTLSPRCPGSPVSTWALRCAPDRKELSPLLPTCLLRVFHPGYRILSLCVFPISTNSLAADLPAMS

SEQ ID NO: 975142 - protein, 102 aa, Homo sapiens
MRRASTQALHLGGHREGGLPPSAHTEQATDRKQAGKGTSRSGNRQPGWYVQKMPIIGWTPRRGGAPTELRRLDPPARYPSERGRQPKVTKTPRGGSTRLGPK

SEQ ID NO: 975143 - protein, 139 aa, Homo sapiens
MLGRTDRADVDREARVVTRVASAAVYADFVSRQPGGIRRACCIDRDIVVLRMAGGQQAPLARRGGYWGRTEEQGYAHRANPSALVNDPKLRLACVTLEARDPSRYNEDLDYATHRYVALTEEESPIMKLDLRYDRTRMT

SEQ ID NO: 975144 - protein, 332 aa, Homo sapiens
HSFSEWGAVTTAGRGIRLGLSPTFWCGRPGGQALAILPILVPQQMALASDDSCYMPFAEEQGWGGSHRFGKRPGHTIGKEMWTGCLLLQGPPIGHVFSNTCTYVYDHSITHNHHPQKPAGPSRARGGGTRRHRDSGTRAPNSSEPRTTTHNPRATNGSTIRTSAPPNSAHPHHHLPQKPTAHTPRSLHGPPPPTPARTHHHTQPAPPPKPTNPPHKRSTHNAPPHTNTSPKRTREGSGATRGRTRQRKRDAKERNKEGRRHTPRRAAKRQTRAQHGATDDAGTGERSGGEGVDETTGARRRNPDGGGEEEGNEAKRQEERRGERKRARERRE

SEQ ID NO: 975145 - protein, 134 aa, Homo sapiens
MYYYTLSFRVHVHNVQVVTYVYMCHVGVLHPLNISHLGVRYIGPNAIPPPLPVRCTFVKPSLPDASVSKKKRQEKSIQDQVIKTLGRAQGLTPCNSKNLGRLRQGGTLESGLYLQGSSDPHPSWVSQEHGDYRV

SEQ ID NO: 975146 - protein, 491 aa, Homo sapiens
RGAESERAASLAEAQARQPWRLEGGTETAAERSCLYPPPPAAPLLRHAAAADVTCQLRAARARHTPCSLHAHRTHYTPRGVLTSSWFSSASAQLAHLYSPRCALLLPPPSPWPAPLFAARSPYAVARSCNCAAHLTLLVPPLPLERRLWPQYPFSVHTFVVLHLSFGSWPALRPRPQLRHLPWRPYCLASYRSRHLHTPAAHACIPTACSFSYTLTSPELPIDIPGGILSTPTLLDSDNTLNILATNNTSYYPSILLCVYAHLPPSDPAAAVAERGSHEASRTAPRPLHCTRSHKALKAEHPAMAPSRPNGDRHVPADLHRTCTSGTTRSTPGEGTPAPGSRSRREPRSQPMKKQPSTPHRTPRRHNRRGRPANTSAAQPAHNSGNAQQSAHGAYQRHTHRAAPRQAHGSYVVARQNTATTQREETDGKNELTPKWKQQTTQQRHTGNWNTGGDSCGTQNAPLTDRSTTSTRSMHEDQKSRSCTDEGAVAE

SEQ ID NO: 975147 - protein, 321 aa, Homo sapiens
QKYLTHTLRKVAPNVYEDIMNGQITNLLMYFKSMIRSRRESGTPCGSYLPVSPPITAGMCYVWRLSGPSRSCSWEGYDAEKLFLEPVFHTLVTTTMKGLIHILRFSSKGSSWLSRFNCRNLLIASYQQTPLVNNATSQFAVEYVALPLGLRVLMTWLSDAAWISVAKTGSVLPVRGLSMKAKAIKPCVQNFMFCPGFKLKVRLDDLLVYLHSDDSSLARSVSPRQVLRFLDLCTDRQECGDRVQDMLADSSPASHCIKSTSWNCMRAVSKEVLIRCAGLRDDLDCCQLPHSFMAHSSILETLPIEQPREYNFNRDYVCNEE

SEQ ID NO: 975148 - protein, 323 aa, Homo sapiens
RELVSSFGVVVSTVYKESEWAHPTDKSRGKPSFQACRDLGVNQGHQDWGSRSSQLTVLNLQMIQTIAPMWVGKGGPVWRRSPGYGPVTHNDSGCPWDSRNFWEKNGLPLCWWSHFILVLFNSHFLKGGENNREATVRSQGPHFICTFKNGLQRKPGGYDSDPRGQQQGRGATEGITAGEENLREPLRTLEHDPKRPRNNSASPGKGSQARYGQRLRWALGKQPRNPNLGSEILERNLGLEVTERDMSRHETWRRHDIDGGTTRAFRTTPRERPPRVVKHTHAGVSTQAGGGNPGRPRGGQPYKGEPGYDTPKEEAARLPGQVH

SEQ ID NO: 975149 - protein, 263 aa, Homo sapiens
MGKVKVGVNGLGVVSGAMDHQVLLLTLDKDGIIVAINDPISLTVNYTGEQCSTYDSSPLANSMCTRQGMTNGERYVINWQITIHHTSQETRIRSKNQSWEQMLAAADSVAGSPTGCTSHTNRQHSAGASISPGVGTPTPGVHTSSDPTSCIDAPQCFSSMRVAATPVQHSSCTNQNIKRSIQNTCNSIATKTTHALDNTHEPQGFQYPLTNKTGHTAAKPNRHNETPKRNAQMPKIHMDHAPRKRPMNRAKGHTPYTEANNNE

SEQ ID NO: 975150 - protein, 328 aa, Homo sapiens
GRLAVPPRGTARRLTSRGTLRSRHSGSDDRDAGRLMAASSRGTPCAREAGRSTPATRARGPRLLYVPFVAGDRGTRDGSLTDLGPLTARTGATQPNSRRRGLPDGPGRTPEHPVPRIPLGPPTLTTGRCWLGTIKTPCGRPTLVVRTSSPSSPPFNIAFYMPVVLGIDDRAKRLTFFHQRPRADLLDKILHQALNAFSTRVVAQLIRAHPLAFFTPSQPPDPHQTPPSTQAFFHPLTHFPQKHILYLMNFTLTIPLSLVKEHPSTGSLLFWKRPQESIKHTGNEHIWQNLGTTGKGPPLFPGAILDWVPTFTLVRGTIDGCTGHSTIQ

SEQ ID NO: 975151 - protein, 421 aa, Homo sapiens
MAEPRQEFDTLTGQTHAGTYGLGDQDTDSRGANPCTKTHEGDTGRWPDTAERQQALGSPPPSLDTRKLAEVHVDPKLSHGPATQQRQGLGQRMTQHQPQGARMDNNRKTRQNTRRTQHTSTDTAGDDAHTTTKAFADQNTTGPAIQKTRHTQTHGWNRRQKVKEGINRRQYKRGTPDYERTKYPGQARHPRKQRNTMTDGHNTQSRRSHRKKEERQMRTRDRPESTRLRTEQYAATRAPVRARSEHHTLGEVERHRDENGQRRTESRETPEAHPTKHTQERQQSQDPTTDPSDTTNRRLTRCVKRQQYHTNNMTERRQHSRTTRGKARNKKQVHRQNTHTLRPQHHGDSQRGAQPATAGRTQGEEAETQTRGQATSAGHARGGDGGHSRQGRVAKRTGDHGSENTGRGEEREPAARARTGE

SEQ ID NO: 975152 - protein, 132 aa, Homo sapiens
MREISASLGSERPQTFPKLKLQGIDGTCQMVFPQRICGGYRRMGLLPSNMGKSVHGGTVLILGPLLNEKVQTGNRLPPKVEEEQTCPVPLGRRGGGAGTCALPPCMPTTPWRTMDEFVSQVLGGDLGRSIPI

SEQ ID NO: 975153 - protein, 150 aa, Homo sapiens
LDSAPVCIMVRALCRLPRSGVWLLLAHQLLHDHVSCTGGKASGALLRELWLTQFQVDMEAVWGDAVVCLGTETIRSYRARWPDCTWSTWREKLGWSLVPMQESGQVLPVQCTGLLLTRELRPCSGRAVTETQPWIDSTYYALHRVVPHHR

SEQ ID NO: 975154 - protein, 277 aa, Homo sapiens
MNTTEPLQNCRMHMAWVMLAVMCACHHSSVVMMVLHHDDPNAYVVSSSQPCVPHSCRVEVKWALEHQEARQQALVTVCEWPSHLWAPSCEQSRTPDRWACLSLTPVSSVATLVPRSCREPERRPGHAGQRLATQAVVRLCPDCLRDLQGGRAPRQAQTEVHSQGTALDGLLPHPGAVTSCQGQLRPRHEAGTRPALHAAAPDPLEAMTVRYLRDATTSAPGTAHGASPRAGTQHMKSPTRRPKATAHGTVRRTSHSRDNPKGNQTHERQSWMDVERR

SEQ ID NO: 975155 - protein, 239 aa, Homo sapiens
MLNGDLPRWYRLTELWACTESLNKREHPPAQPTKIVRLFVPPVKLLKMAPPLTPGILENCTRRGELNVNYKPEQVFAAVTNVTAFTKSKTLLFQEAYSARCHSKLPQKLKISRGYTSGGRIPKNPLSDPAEFTSPCVWGLSHGNSHNHLAGGTRLHGLNWYPVPQLGKNPRWSHYVRPGPHTRRTALNTTFPSLDPPRDVGPPQKLPRNPARHSSPTAYPPTRNRAHPRSSPPARVQTT

SEQ ID NO: 975156 - protein, 56 aa, Homo sapiens
  misc_feature (45)..(45): Xaa can be any naturally occurring amino acid
MLPARCSADTPVTLGRLVRLQPVPMPERPAAAPCLPQASGPNQMXLSNPLFSPLTK

SEQ ID NO: 975157 - protein, 294 aa, Homo sapiens
SCLRNPRLAGPWLERGGGGRWSLEAPGGGSGSGDPGSPSPLSSLAAAAAAAAAAQQPTPPNVWPRPPRRPPSTSGCAGCLLLVLVYLHLHGRVRVASVLLMPPGAPGGQCRTPAPVQMNLYCHLGGGPELVQLRAYVLFSLILKETRHAKRNGHKILTQWSSCEAARVQKEFFASNEIVLPASGLVDTAAPINLSPFSTLISLTRDANEAEIIADQGETRYEESGPSWVEDLAPWDSSTLAEVMRDLMSDCDGYKNGGCLGWDNKIYCTTNMTRRTTERAAKETGMQPSQGEKK

SEQ ID NO: 975158 - protein, 173 aa, Homo sapiens
LPSPPLHSPAEGFPGAGAERVSPRGVSRSPGRRYGEREPLANTGLERQEALRTGGATWNINPHDRHKMAEAVRSQIESAQMSPETQEHPHESRILPTCILPLPLQRQGPDDSYRAACVPADNLRRTATDERLSKGWNTGAPTGEFTPRGYNQDVEKGLNQELTTRGARHGIPV

SEQ ID NO: 975159 - protein, 487 aa, Homo sapiens
MYIKGRLCDDSYIIEEHYSKGIKRQRKWQFYVKKRVWTKRVGGSIVSLTSCATVGNCEHMGIDVCESVKKSRRGVTGIVNCFSISRESQTNISGRIHSGITQKRECVVQVDKGNGVQEHVEVSEPEIIIRVVYYKVGWVQSEEQKWSPWGNNDEVPNEGVRREGDMGSARLKGEEKLMFAEKVYMRSLESRGRKKNGRGEYKQRFKDEKERTEKKTQGWKSISGKRDECMDSQKANMDSERMVKLEKEKTQAYRGTPKQVALPGQGTTIVGSTRQRGSQVNTEWGTTGQPTRARKATKQSEEHGEKGEMQRAKRHRRRSIAAPRKIWNQKGRTSQNMCRAVGTKMEQELSIENREEHEKYTRNHKGHSGEYTGETGGKEMKAKRENRCQGRRDRPNEMQTLRRKRGAGQERKRKGEERTQGAKRRHSGKQEERGHTEAGIKETSDREVKEQRRRDERKRERPREKQAKDKKRKEEMKEVVRTKIERN

SEQ ID NO: 975160 - protein, 484 aa, Homo sapiens
ARTPMMPTSCQIIIPQKQVNRKSDIYVCMHLLMRHQGSSHKGKSHQLIVQSHTVANPRSLSTGNIQTELCELSGTNWNSNIMFSIQCPPWYQKDYGNSKASIFIYPRRYDATTSFSSKHVVHAPSKKPSHHSRHAPGIQQIRTEAGNMHSRQASNAHTMERTTHTSQEHWPIHWKLTGTSISTNKAGDNLRAHNHRTTTNHTRAQGTMAHEGVQNRNNNRGTKDRIENKKPDTQAARIDTLTDAHIDHTRETQQRHTHNKPTTTAGASWDNNTPQTSGSTGTTQRIETGRRKRDKRHTNVEAKTHKRVRATQRGSKDLNDQKKIRGKRNRGNKRPTQYRARHSDEETQQGTYRTSTESDERQQNAQGRHADDEQTKNNRMATSPKESQAEVQEMPTKRDPQARQKRSKREKKFHKHSGTQPTKTRRNREAKTEPQDSISQAVNRKQRKRTTKQKQKNIDRTPTTEIRTEKLQQKVARQTKKKRE

SEQ ID NO: 975161 - protein, 205 aa, Homo sapiens
MVVEMKVHDFPKGPFCERGRTCDNENLSLKDTKYCRQFISGPLDAAAWNSPLPRVDEEITHKRVVVLRCSNIPGRKGLIAGVSQHEPLFAPQDKGSQNDPQGGHGGYEGAGNQWKVAEHVGLYTQCAGTAVNWVISRKAGKKFENSALFHKIWKRALYEMPDLFPGPHNINIAQVDHEITNKHIEIISNAVLYHHKVDLDVHSTI

SEQ ID NO: 975162 - protein, 147 aa, Homo sapiens
MDRAKVTARKSTGGKAPRKQLVTKAARNSAPLYRAGVKECLIAYMGPVHRGRILMRIRRVITKSNERASSGRRDLPKVGEGESPQGIQNSYLRFQSEAIVCRLQRGLAKRTWMGLYEDTNLCAIHAKRVTIMPKDIQLGRRIRGERA

SEQ ID NO: 975163 - protein, 113 aa, Homo sapiens
MNDTPSRTNRTAATEGQLTPTSPPGESFSPKLRSSTSRKITHTRPYATHQHSTPATGAQSTSTHNLPRGALRTSTKPRRVTKARPRELTRPEGRPRTTHSTGPATLTRLPQDP

SEQ ID NO: 975164 - protein, 234 aa, Homo sapiens
EGSEARHCWGEEGSEERGAGRGSSGGREEGARRREEGLAPRRNVNQSPEPRESPPICSDLTWLLAAALAAAVAAAEQDQLGERGRTDADAGGCAAQCAGPCPPMTRRSPPGEAVAGACRGVWAPFSVPCPRGAPVFVPPVWDTNYMLPLLAVQRRPGAAGRRAAACRRVGPGASVGAGASELNASGVLSNVLSVRVRGDLQPGRAAAATRYGPFCPTPGVGYLPQWGADELKAR

SEQ ID NO: 975165 - protein, 171 aa, Homo sapiens
MKQGWVPVGRPTRGGTSVGAVGVQHLLMKSSATPVYRTKNQGSFPFTTESSATAAPRGATHGGATPHVVLDTRRYPLWKPTQRGRRAAVETPTTIAPPQEGSTTLVCGSNNSPRGAHFRGERGGEATSPHKRSSPYGRRQHYYQARGCSSPEKRRRMTPRADKQSPAGGRG

SEQ ID NO: 975166 - protein, 171 aa, Homo sapiens
  misc_feature (89)..(89): Xaa can be any naturally occurring amino acid
MRKPSENVVRREMQPSCRRLGRIRATTLQCHQAPVWGPVCLPPGWFWCGPAGMSLIRSSWSPKLSLVPVESAWGAQCWPNSAETYKCQXPRLATYTQRLPKRRKSPTRVRGDETTAKVNPRSPRAHSKHNIVHNSNNSSYMNTHNKEVNNRKTERAELRTIDYTKIMRSTH

SEQ ID NO: 975167 - protein, 203 aa, Homo sapiens
TTCLAERTPCPPPRRNASVTHSLSPDETAAHATGLLTLTRALRHPLSHPAAHARPSRSTAPPPTRRLARTTPPPPPAPAPPAPPPPPPPPPPPPPPPLPPPSPPPPPPPPPPPPPPPPPPPPPPPPPPSLPPPPPPPPPPPPPPPPLPPPPPPPPPPPPRPPPLPPPLSPPPPPPPPPLRPPPPPPPPAPPAAPPPPPPPRPP

SEQ ID NO: 975168 - protein, 329 aa, Homo sapiens
MVIEVIGKAHKKELEPDSRGKTPGGGRLRNRGEPEFLTMLRENGLGSSVSENPCAEDDKAMFKSMVDVRKAKGSTAVNSLPGQYACRWTRLERQRAITDSSIGVQCMRTLPHFIRRMMYGLEQRRSVCGGTPKLCGVTTRAELLYPRRRMWGRSVKGAHGRRCEPRTGGEWMTSQGVGVDQDLHGSGVDEVKYDDDCVDTSNHREDGGQVVADGRRTSAGPGGRGIWCRGIWVDVEPVHGRLSKKNGPGFRVVTSEEGPGGHPGRGAGEGGAGKTGTPQTRERAIEPLRENHEGPGTGPGEHATGAQAGEEGRRPLNSAAHSPRGPDQG

SEQ ID NO: 975169 - protein, 104 aa, Homo sapiens
MNSDRDEAFYPTSDTRSMEIRVQHASCPEHRNTRALGEGEKIRWTFMVERRRKWEQRFSGLTHTMRSSSKDIDVCNKCPAKHNRNGRVSGHGNKDSELGTLKHT

SEQ ID NO: 975170 - protein, 188 aa, Homo sapiens
MDGPTMGMAWHGCPAPLNDLLRSVLGAMAACSASCSPQCVVKLTSRCPAWWGLHGLTYHYETQEPEPTPGRLVRTPPAGLGCTSSASVRTFLLCRSLCRPCNFDPIRCLRLAAFYSQVLLQVLIIITGNYSFFTPDDLLVLTTALLDEQQLACEPGHGTARKTGTFWPRALLGNPVGCCWNLPVNRAT

SEQ ID NO: 975171 - protein, 186 aa, Homo sapiens
  misc_feature (152)..(152): Xaa can be any naturally occurring amino acid
MGRVRTKIVKKAVRCRQEKSTNGARVGPNELPTRRLATLMLKEGSLIYTARRIYTSAVRQAEAVFTVSCDLECRGVTCERVPCNEVVCPITETCHGKEGEMTVTRRKERNILLYTWRDRLDTFGIPGTSVVASCEYLSNYWEIDVNALWASXRHSIIVQQRSGVIVMSVPVWGDDSSQKLHHREVT

SEQ ID NO: 975172 - protein, 80 aa, Homo sapiens
ASHPAAVFGLANRSYPTVGLCYSPTDILQEKLDNNFHLAARDGPGMHHVRETRLALEISVLGFLTRPLVEEVAERPRRRM

SEQ ID NO: 975173 - protein, 376 aa, Homo sapiens
LASALRGTRAPPSAVARRCLHASGSRPLADRGKKTEEPPRDFDPALLEFLVCPLSKKPLRYEASTNELIELNSWAIAYPIIDGIPNMIPQAARHDTSHSKKHEEVEQRYVHHFNTHNYPKRNSQLFLIPYPFKTQWQVISAHTERRSLLSSYRCTVLIPLVLFSSELFYYTPLWTDHFPQGLHSAQPAFGFYSLTLAYFTIPSVCISFHPLEPETARTFNRFQRHYIAQPTKKSTHCSPNLHRQRPEHIDISKTHTAMATTTSARATTAIATATNRATQRGARTTHLNPYQSTQPGHPRVMQHNCYYQAETTPYIPTDSTHEQATLRTTTITTTHQLTLSPIRPRSTIDHVLPPSTIACTNNTHISRSVLLTHITC

SEQ ID NO: 975174 - protein, 266 aa, Homo sapiens
WSNDPLLKCFPWCLTGWASQSPTVDVIDDVMRMAAINITAHCRGSPQDLFNGFQRVLGLKDRCRICRAMLTISSKVISPRCQMVSLVSFCLWGVPLRAWIDQGRGRRHHLNLGACLSEGSVSLVILRPFQSPVAWEMSSPTFLGDRPRGPIWAGQAEVAPISPRVHLRYTTWISWGSNSGGHGGGGGGRIEPGFGTTERKLPLGLPPSQGELRQVATPQGSVSSLRGSLLTGGQHPSSGAPTNPISAPGTPNPVRLTAARKQNTKK

SEQ ID NO: 975175 - protein, 281 aa, Homo sapiens
MSRCRTEDVMRPLVRNAGIPWVSRVGDCISKWLLMNNRKHNEEHCYMIILWKGIKGTGEEYMSNVLLGVVMMNGWSGRSHGKANASELRMNGTYKLDVVIRTEEKVNIRMKELWRCFVNGMKMSVMESVCEQIKKGDDEQVLGSMTRDQYGKGSVEDDVGPGICFTRWMGAVATEFSGSIVEMSSKKVMTRFKNVFCNATYKNWYICLITLFGNLILSTGCFLNWSKRVCLYRNSGFHSSKFFSHESSGMIVSVISQNDNVAVSWFRHINALHLLNGARDM

SEQ ID NO: 975176 - protein, 126 aa, Homo sapiens
MNPGPSNWGGWRARAQEAQVAEIRRYMPLALQPVATRSKRLPSCITNHYKKKIHKENLQEAGWGERKGEQKNGDKMGATGGHGTHVLSGLPRGTIGGEPPKDNTQYRIQKTPVNRLTSSKLAQQQN

SEQ ID NO: 975177 - protein, 147 aa, Homo sapiens
MAQRPAACMAPRLRSDTHQQTCRRLNTHRPEQRRPKGGIVVKSPPKTPQWTLAQEPSVSDAMGRATPPRTIHNKYQERPYYRHSIVHPRTSADPHCFPRNRDSQHLSNSILYKPQCGKIQTQGGINPGAQNGARATGPKENTLRSNG

SEQ ID NO: 975178 - protein, 214 aa, Homo sapiens
WQQHPELSCAVPAAGLLMALPAWLCGDDYCSCELAMHVPCCVMLCVHCLLCFDVLMCCVPAAAVLCCQQCTLLCIDVLPMVAVPVCPAELPDNCWPVFSVCPAFCDVASPPVWSHCGCRLVNSLRLAGCGCVTGAFLCAGVPVVLWWPLVVNIQGVFCGAWNPEMMNVVSPLAFGAPARPSGGPHSRVSFPEPGGTLHRLTIFRTHFRYIPPGE

SEQ ID NO: 975179 - protein, 323 aa, Homo sapiens
EYTQASLPSRGCVEPGRPQLLPDGRLLANSKPDPGRPVPPSTGAQSTATHQSQDITSATEQNSSSSSSSSSSSRQQQQQAAAAAASRKLWAPSSWSISPTTWRAVAPTTHTLTPCLPPWGPEALTTRGRTAATTSQQVYYSTKRGPNGPPVSSSSNSSSSTSQGSYPCSHPSPSPGPSWGALPLPPVTTVTLFGYLSRVMAPWLPRQQVQNGSPAEPHVRKESPVPGGYKKAHHAKKSRVGPLRREPSGYEELAPAARLSGATELACNWSLAHVHTWAAAAEYTHEADTQRRSKTTPVKDSTRHSTNPTPPTTKTKDDNAQAH

SEQ ID NO: 975180 - protein, 71 aa, Homo sapiens
GVKMAALCTAAPVPAQFKSIQHHLRTGQEHDERDPVVAYYFVYTQWRLEMKIDSKDSWKCGKFLSEVNGYS

SEQ ID NO: 975181 - protein, 52 aa, Homo sapiens
MSRYYGCARSPIGPDINAAAVGLWAYTWQGRHNGKSEAVARVQTRKYKRYTH

SEQ ID NO: 975182 - protein, 104 aa, Homo sapiens
MPKPSWDATKWVPTPRNRSLYSSHIMTHCDLNELNRLQVRSLHETRNLHKLCLKRDEIGRHHYNTGLFYNIPLMYQSNLLSPFFPSEIKGGNGETIKLIAINDS

SEQ ID NO: 975183 - protein, 115 aa, Homo sapiens
MADDAFTEMEGILDLIDDAWLIIYKLPSCRDASHFPLQVSFLIPEIRIWVGTTESVKEPRNGSGQTLGSFYQYLRMKNVPPIDKADCVRILSCGMDFPPKRHTKIQCDGLCEDAS

SEQ ID NO: 975184 - protein, 412 aa, Homo sapiens
  misc_feature (412)..(412): Xaa can be any naturally occurring amino acid
RDAEGPEETVRLWPAARAAMDAAEVNSIAEKELVTIIPNFSLDKIYLIGGDLGAFVTLVYPWEVPLWLAINLKQSTESVAVLPPVAGVDCTKQLDERSGISETMTEDIPFIRQVPSHLTTMEAYESSLLTHASDNIPQGTTKVRTLVKDTCGDTSYSQDSECLLTAFETAVRHSAKLDNLSLEWRSTSSGTFLTQALNTCQTPYEPPASGEYSVSGLLRERAWCQRLAGDVSAPRRELKVPGVLEPLDTLDALKHCVVHRTGSAVVGNNIDIPQQFSGKIYNWLSESERFPRVDKSTLRNLDENMSACNKLRVRVMHTKVRKRLSEIHKREEDGSRLHCFFLVLLCLRFSLLQTGGEQEKRKEKRRKRRARDDVPNSKTTTKINENKAGKKRGQAERNEEKKNQSKESKERX

SEQ ID NO: 975185 - protein, 116 aa, Homo sapiens
  misc_feature (80)..(80): Xaa can be any naturally occurring amino acid
MASCDRIQPEEKAAHWAQFVFARDCYRLGNWLVCLMIRKIMLRDAKIGNIPIGTHYFRVGDNELAEEGEKPECLANMDLXRNPYPNVQACIHLSVNGGLQHVRCVRGIRGAAMLET

SEQ ID NO: 975186 - protein, 37 aa, Homo sapiens
DTTPGGLGAGESGTSTIVKHMRILRVTGFNGEGGEEE

SEQ ID NO: 975187 - protein, 121 aa, Homo sapiens
MLASHKGDEISFVDILRVSPVTDRLASLESFVEAFEFPEEGEIQVTGRKSWLDNTGRWGLGHGDDWTGAMNSAKPYKRNAGSLWADINNSLGLGRKQAGHNGTGTWGAKGSHTLWRVDWQQ

SEQ ID NO: 975188 - protein, 150 aa, Homo sapiens
MKSQAHLDRTKYAPPRGPPDPHHAHTHDSTQHEARTPHDGPPEPTGGARQTTRAAPPAARRATGSGPRRPTPDTRAQRNARAPPTEQPTKEAERRRQADPGAQKDATGTSEESEPRTDKEPGQGRDDGTGQGPEAPAGRDSTHDHAQAQA

SEQ ID NO: 975189 - protein, 262 aa, Homo sapiens
  misc_feature (89)..(89): Xaa can be any naturally occurring amino acid
CKTMRRVDPVYIHLAEDYGDPKAKVNILMRKELDEQVERMLGWNFLSSHCTHQREPVPALHGLATMTPQGRTVRVSKGWLISAGIITWXLRTNTIPAHPLVATVDRSCRPVVPGCGGNLDRKNHINPPTANPVMHATELCPRLSKTYWSTSSPRGVDRDRWRERDTTLGERVLNAMEGLSQTERSSRRVRLVLGKEKARLSTGMGPGLGRYAIYCDPIMEGKERLDISAVYPRRDFIVSPRHVYTFPLGLVDIVSHGPRKVE

SEQ ID NO: 975190 - protein, 248 aa, Homo sapiens
MTLGDAYEYGWTWETSDLKSIFVTTSNNHIEVRAEKLAVDGSCGDEHASLTSAMLPEDVEPDVGDPRSLRGGLAGSHILRGTWSTRIQNTSQLDSSGRRSKSRVPLAFPLPVSPRHQALPAKASLIALQQLQDDLSPGSSPHASARALGGPILPKLGASYSYPGRPGLPGLTHDAQIITIMGSGSLMPEYRGWGQGRKHLENHCGAGKWEQRGRMRQATEDRQTRQTPLIYESLSSAIGTRDWNRLGQ

SEQ ID NO: 975191 - protein, 282 aa, Homo sapiens
MIALFPHHRNDLRTVSAVLWDIEEPFKGVNINGRLKADKLNCNWRAFCRCDQDEVIGKYEWWITWTGECDPVTLNVISGPTNLSAMTVSVDPLIILTHRPGLRCENLGSRGLPSRRNWTFDRNLGDQLGNPTKENVGSDRWVVEPFVYASKGSDASCLRPDVSFNPIPDTSRGAYRGRVSHTVIVVIEATPGTRDSTRLEFFGQIDKKGQPKLSLENKIQVKEALSVWGLAQKGGVRNHAFVLSHPESQDMGGVWNNQFWAPGAGREFCAPWPQSNLGCGCH

SEQ ID NO: 975192 - protein, 162 aa, Homo sapiens
MECMNPDPVSRNVKTCLEQCRGRWYTGSSRCIVGCDTTEGHGVLIPGINFLDLWVHQEALGRSSSGESQWILISGQHLLMNIEVNPSSQVITHETLRRIEARLYSRQMLVRSLGRGNKISQLTGIQQDSGMYSGHKKLGIRGPAVKCASFSGNRCRNATQLR

SEQ ID NO: 975193 - protein, 118 aa, Homo sapiens
MAGLLLAVVVAHGLTTLCRPDSGTAWNSLIDCNVISGMIRSNLRIFPMRVVYVDIQWTQSDYPISLCVRARSDPLRGGIAAMLREYSSSLEGRKKNANTRRGTVLSSVHCIGVVQRRT

SEQ ID NO: 975194 - protein, 547 aa, Homo sapiens
PPAIECPNPDDYVQAQAPIGYLGTYHIGGCADLRCIPRLMRPDMRTTATDCTLTILMAQALAQEGNDFSGRPWNERAPEGVGAKKDVSVEDVSRECVEGSYILVPPCLSRYADSSCYCTDTAYTPSWSPFISSTEGPEIGADKTKWVKSSQTGYGGAKYVSHGGHKEKLGNRLRVLVMRLKLLLTGPPRIKVIAPWEEPEFYNRFKGRNDLMEYAKATWDSIPVTPKNPGDDETSAISTVLNLRTQTSAPGLTQNQDQQSPNPEFEIVKKAVSDTYVAPKSGLVKIENMGDMEHESGYTPNIARRTSFAFCSIFCYEREKQNENKKAKKKQKKTQKKNNKKKRKTKTNKKAKNKKEKERRQRREKREEEGKSEEKAERKKTGRGRRKETGKRQGRGRTGEEKEEETENERKEEAQREDHRRQGKKKKTDKRGTETTRRRRNEEGREGGQQEKEQERKTRTEKAERQREKKSDREEEREEESERMRIKETRKEQENEREKQKAEREKAERRSRGTQKQTTRTERKSRETRSRGDKEDRTKKQRRKRRR

SEQ ID NO: 975195 - protein, 138 aa, Homo sapiens
NLEIGGDAGGRIGCKELVLHVRSRTPESQPWNRLRVEQAPPVIYYVPDFISKRTRRSICFDRFLNAPKPRVDPVSLRQTHVTDTGRAASLIPDEDWFLQRLPPWFQRYVDKCQTSPSLDASQSVHVLVNQYLPGEGIM

SEQ ID NO: 975196 - protein, 244 aa, Homo sapiens
  misc_feature (171)..(171): Xaa can be any naturally occurring amino acid
GGGGRKRKSRLSLLEGRRKAEKRGGEGEKRRCPLSEPSFNKPKKVRSDPKKRSVQKSEEGREDIITTGSTLVGFTTSQLRKTITPEVLTLRGRKTIKKTRGGPACEEGPSRNEGTVANQWVWRGKKACAGETVVGTWRLPHRQWWAGGKEQKVSKAQLTQRDAVTFSPKMXSLGRGETLKVNSGGSLWEKPGSQFAPGPHYKGARPVSWLEQRTSTSLCVLIRKTRWPMGGLTNLIRRSGGFSQ

SEQ ID NO: 975197 - protein, 270 aa, Homo sapiens
MSKTQATEEAATTTTAEKRETAEAPQREHEKRRAEQEERGRARESGEERAEEKEKGATQDKKKKTEDEEETGTEEDGRQKEKKGGEERTSRRREKRETEAGGGRGSGSGEGSGRGTSERAESRDRKQRGQRERRERQEGRSRRRSGEGEREKQRRRTSEKRGRHRRRKGGETTRGGRSGGGEEATRGAKRSAEEGRRAGGHNIGRKAERKEAGAEEAGGSEGREGTEGKRRRRGRTRGGRKEKPGRKQEGAQKEERRERAEGAGTRQGRR

SEQ ID NO: 975198 - protein, 84 aa, Homo sapiens
VHRCRLLLLPLLVLLCARAVRTWYLFVKRAEEKSGALPMARAEKPKVEESKTENNIILIVKVAGQDGSVVQFKIERRTPVSKHK

SEQ ID NO: 975199 - protein, 120 aa, Homo sapiens
MHMCSVWDYYWSDGESLRIGMQRLTLGNSGRQGTALPEPCGMRGTGLRADKWGVYEGAEIGETQSYLSGLDKWLRANGGMTLTRRGLRPTGNQYTSAATRLGPQAQAHKDRTHNQRQVKG

SEQ ID NO: 975200 - protein, 325 aa, Homo sapiens
ISEHLIALREVPHEGPTVCTCWGQIQMTEEVGDISPSKGPGVTAFGLRYLLRDVDHARWPSRGVSRSSSQLVLEGYDWVAMSRECDHPDVLSARNYFGVIVVVTKTVYFYVEHSERYSFYNSDFLDFGSVDPQALLRRTAEATTVHLRYGYTRHDLNVSLQVNTCRNNSVRKYLPVRTIIIRAYAGNGGGRRHTSKLTSRVHDTDAGHNLISTQNPGSYSTWDPKHGMRPTIANQRQALRDSQTARGPTLKTRNPASSGPGRKPTTLRAKRHLARRQQANSGEGTPAHLGQQTGRRTETGTTPAQNYDKPHHEHRPAARRRHAPT

SEQ ID NO: 975201 - protein, 311 aa, Homo sapiens
MRPGTRTNDAQIVPRRTDTERHAKRTNYVTNQRCGTPTRSQKGGHHQKTVDRETELDDKHETGEKQKEESENKKSQPEGGATLQQQQTTKQKRGYLGHRRIEGCTNKEDNNEDHTTHRHKHTDDTNGASSLQHKRETIYYHKRGNRWRNNTEESQTTPRSTGAEDQSHKTTNETKKKTKQKTIYQQKLPPRAETQTGKHKESKTERSKAKHYRRKETPRTQEDRNQMRRYPKVMDDQPHTETRATTRTEHNNTRWNDINNRQHRHSSESRIMTRTRRGKRSTISRDEQPHNKEHTRGNNEQSTQKHDKKNP

SEQ ID NO: 975202 - protein, 473 aa, Homo sapiens
GHVSERVPTRFCLIAFNKCIETGTESEWTSSSQPPTSPSDIPYIRIETLSRTHTYSSHSSMHYWRTLHKTPYYKDRVRLPFLCQNPSTVTTTTEFQSRKINNAAETLTSEDTIQARPRIHTSWSPLARDTTLNKPYPFLLHGELHDNKSGSIDCEDIVGKMDDCTPNLILTTAETCVTRKGQTGSATGPYRASGSIHWNRIAKQTHGCGQDTERHSSIIQVKQHKNEKAQTSDTMNLERYKTPPENGTKDNSTAKMGPMRKQQTAMTPQGHLKRATLQQQAPKEDQRPRTNGEHHTKHRGATMTDESNYQYPFSNEENAEKAYIKEKKAGDKTRNREPPEREENAPTDTATGKHTNRTGTSYKLTENRRHDGRQNPYLKATMQRYRGRGAKNYLKQSTHVHTLNDGTKGQTSDRPTETRNHTSLYRRSINLCERERKDRQPQRRERQEREGNQELTPTPLYVERAERQQIVPY

SEQ ID NO: 975203 - protein, 221 aa, Homo sapiens
  misc_feature (215)..(215): Xaa can be any naturally occurring amino acid
MHARAQQANPPLQYTTMAATTQYKRDTGTTGVRTPPHARPCDTRGHQRRPPTTTPTLTRGPKERNHGRAHPQTHQKRSEATTANWITRGPTNINNGQRHQLEPRNEAHHRPPPTSHRRATSRNNLTIPPRRDRTKTQEGPGETPVKGGRTTDGTQQPWGSKTRARYTRSHTARMRAKEPEQRHGTSRRTSQGTPPPVRERAPRGTRDDGPSQDAXVHNHRS

SEQ ID NO: 975204 - protein, 283 aa, Homo sapiens
AADAESVCSRGHFTDSLAPDTAALSIHVAEAGRYSGPQDAECDEYCDGERHWNVAEYLTPVLKASQFKEHRCNYPRRVSGSWRSPSPPLSNMATWAYRGKNCHVQAIPYQQGKHIIRITTNMCRAYKRVPNSMDIIRALHSEAHPSTHACMVMAAGSDTYHNTAYYTDITGNSPVTTQITHWKTLTGHIIRLHKTWLKHHNVNDATRTLQADRQNDCTPIETDHTERSVDMTGQHRMQAYPKDIQGHNADRHHDHSPHNGNTERLQDTTSRPSHTPLVPSTIK

SEQ ID NO: 975205 - protein, 99 aa, Homo sapiens
LAYSLGDEAGTFSLTAGGWCSVKLVHLRDLLTAMTNPEITTEGLKSSEDMSPETAFREAEQRSNKPGGDFAGSSRGLIRSQVLTSRSLQRFACASGCSW

SEQ ID NO: 975206 - protein, 299 aa, Homo sapiens
GSIRKVPDGVCLLHSTVVWTEQDPGDSYFQPPNCPPHYPLRLHSLRDHLTRTSPCYLETCQNRNKWLSSLLAKPTMSSQIRQNYSTDRGWQTVKQALANRYLQAYLPTTSTLGLQYTTDDDVDSGRRDANHYTEKLGRGRKREGQRAVSCKMQHPAIQGRDHSNQRPSSKATEDCVRVTPPSTPIDNACQCTHVTTHTFESRPHLASLHALRIMAQNGPHNFYLKYMHDVIFTTLTARATIFTEPTGMHHLTQASTRRSRTRKNELGQKNLCTGHQINTDKKTMDTPKHMTALGQAPGI

SEQ ID NO: 975207 - protein, 89 aa, Homo sapiens
ESSVSSGRQSSRGRSDIIRLSAEHLKTCATRCTQCQHLIVHAILGCGTYVSIHLLPENPLQEPFKNAWNYMLNTLYKVPDCNMGIPYSS

SEQ ID NO: 975208 - protein, 138 aa, Homo sapiens
MGRTNGKSVMSVGVVLFALRHGMQRGIVYNPCASSLPHRLRVPINWYVVTRAVRLSRFGFVDYHSYARTVWTTVTRRLQDMSVVSLLRSDTASLAHVFRAHGEENSWGSRMDEYDIAVMPDPEDLGPYNDADDQHLEW

SEQ ID NO: 975209 - protein, 158 aa, Homo sapiens
ISEHFIAYKKFPMRFQVCDLLVVRSKDESRMSWGYISLEQLCYTVWRKIFLRHLIIANGLTSVSRAHQLGDGGTITGSHERNVDKDYQCSKVHGYQLWKIIVLFMVLDEYYYQRTTVLGRKDQHARRERVQNVNYVVPQTTSCTEIVRLEEYAMNHDI

SEQ ID NO: 975210 - protein, 136 aa, Homo sapiens
MDGRLWGPGWGMQWVLLDDGQLASRSTSSVPTAGPLRLAGSMGARSRGGQRVVLGGPGERSDSAEGVRVHGQSVRLIEPVTVDSVAYEWLQIQAVHISIRGNPEGTWSSPLGSHESRGRSKSTNAFEGFTLVGGKL

SEQ ID NO: 975211 - protein, 205 aa, Homo sapiens
ARSTLEYKRFSCLSLLSSWDYRRATKLPYHAHNYLTSDCININISTLVLPTHGLHTIEQQLHTRFSTPQTVNPQQRIHNRTRHLNVSQSLCRQIRSPTTTCSNTNRCEYYRRTQMQHFAHSNHNAHWPHDYTCVTHSNDNPPNGTPLAQDSHTRTDYSLMKSAEHNTTYWSAHITHQIPPDTQKVRQHTNPIHSQRARPMKTPTN

SEQ ID NO: 975212 - protein, 562 aa, Homo sapiens
MLRVQVSMTDRPPGYKKQKLSGMDELNAGQRYYHQGTPRCTQSRHKDADERTSGHYNVPRADPTRGATSPAEHTHTTSRPIDGTSSSTHTKAASRHGRATLTATDRPKRRAPPHPNRAQRNHNHCARHDKLERHHDSGLPDQLDEQKARRIERHRPGHGATPGAKYARGQLGTDLNIRNTTHATGFTLGTEPTAPREPARDPLTQPTYNLAAGKHDSHTHTPPPPSTPNTPHQHTAPGHHHNSAPNANARTTGLPIAWAHTPTKHPESAPDARTTDRTDNTHDRAPEQPNIGAHTIAPTTPHPHHSTTHGHTRYATRHLSHAAPSYTPTTTPSATTPQTRQPHHEDRPTATNTTQQTTQPRTNQTQNKHNTAAPAQTPAPRQHQHNHAATRGTTHRTVTAQPRRHHHAEHTPATQPNNSTHQRRHYVTRHATPATTPPTDETTQAKRNRDAQDRRSRAQATHNTTVNLRVSYPRHARVPRSAAGRRSAGTSSRPGETERMNLRRNIPYCATPHRRRTTPARPTNTSPPVATPRAAAHTTPATQQNTTIHTRATPTPRRTTPP

SEQ ID NO: 975213 - protein, 449 aa, Homo sapiens
FAAWLRLLGGATHAAVSSLVVSSRPLSAGPGAWRAVTPGTVAPSPAELKDKTLCLPRSAHGCSHPSILPPALPQTLTSPTITRHLALMVTQAGYITTPFAPTPTRTRPYPQPHPQERHPARTNAPPRIGLLTNHIQPSRKSAAPPPKHTPRPLPPPQTPTAPKPPTHPTPAPAPAPPPLTPASPPPNTRPPTPPEPNDPPAPPAPPSAPNPAPRPSHRPLLHSARTPCPSPPPPHLSVRHHPPIQRPTSARPPHTTAPNNRPTPNRTSHRAPPPRHNTLPTTITAPLAHPPSHHTHTRPPNKPTQRHTNTDTNNPPQQHPNRQDHWPTTQKTDQLALTKDTHTVGANTDPTQTRPTHNNRTHHNHSAPPRHRAHHRPHHRGAHHNTETQAHRDNTDGKQHAARQITHRQTPTRIHATHRAHQQTRALTTHTRPEQHPTISSHHTEGYTR

SEQ ID NO: 975214 - protein, 495 aa, Homo sapiens
  misc_feature (85)..(85): Xaa can be any naturally occurring amino acid
AVTNDNGGDGETSESSQGGGRRPRALEMENLSVVYACLIGWPSIDARQSEFRAVRLANMLSDIGGVVDWTALVGGGELPPRILMXAFHDSISGVSGAPLISRTVWHGRREQPRRDWAPAPSDLLLDSDAYRGLTESLLGEVLDMSVSGVSEPERREFRCWLGFTGEVLKRERDEVSEGDGSLSRYEREAHLRRWEGGESLGGWRTLSSQAKRMSLRTTYGAYPDGVHNGAHAALHWAQTHNAKVPGSHRNARWRMSSACIRRLTYYAKDIQTEPALWQTINNGGRDAGELRRITHFAEHPRGHQSGDWAGGGTRHHGKIAPTGNGLIEHPGRRGMRRPNIPRGQHRSGNRRAKPYGTHGDTAEKPVRSHRPRSRKRKATHQQRRRTPTTDKNAARTQPSTEHVPAPPTMKRNPDKAPPTPTSTAHTPTREETRSPARQQARREEKKQPKRRRTERIPTAAERTHTSGNHNSKQTAHDERNPKAAHTSPARPHSAP

SEQ ID NO: 975215 - protein, 542 aa, Homo sapiens
MHEAHSVFHKHELTQRNEHERNGKSSDRPRIHTTDTSVIKHTCARHTPQTTWQEIDNQHAIEGKAAPKAHEAANTATNSQARARQDHQTGGEGPKRTNQATNHNNKNQPKSNVANDQKTITYPQRNAYSKHPDNAVQYTPAKSKGHTNEKGQRGDTQPLTWATTDTQRRRTQIAHSIQHSRRAHSTRRTEKRPQKKDRKKNSKQNRGGQSQTLRGQKAGHNNYREKNTQKYRLKPHTHKVKQKRTTTSSHPLMHKHNHNESEWNNTNTQHQQRQAPNIKIQQPMQETKNKQLEETNYHNNEYHNIHTQNSAIATSNIDNTDIQVNTSKAQSHNKHKNRPALYTEQQARHSPAHVQDEPSSHRISTHNEDTYDPETDKERTAHKYPNPTEHAPKDCLKTIVKPTHTYNYTNQIKTYTDNTEETPLEDQRRLNINQQREHTKGVDAHETVDMRTDQTQRNSKTAATNERRIHGYIDATRERQTRWLSREVQTKADNHSMRAEETHRELQQDKTTTGEDEKKPTTLGHGKTTYPATQHIRTKAEK

SEQ ID NO: 975216 - protein, 375 aa, Homo sapiens
MVSHTHQLGAQHSHQRQQRAPTHPHRQHMRCISLALLPKASAHPLHVTTPHNNKFQSHQPRHTRNRLTTVTPDLGNSMHQTMRIKNTRTRQGTHTGHSIKANTTIKAHNPHTQLCNTKRPGQGKQEQQSIKAQPPQPPTLQGHNYEQSTKDHTQPRRSKETHNGPVYQQAHSTNTTDPEAVTPVKHTHTITQRNNPTLYLDPWAHTSPIPNNSPTHTGNPKARNSNHPNSRQRKHLTQATQLHYKGYQPVPQHPNLPPPITDNKRNTEPLQASFTHTNRRTNLEPDHSNPSRPKVNNKPSSKTTQQSIKLTETGEYQMGQEPHSKHQGPQCPVHNKGTHGRHNQQTARPTATPIPTTHLHYTPHTLVTTPTTHTP

SEQ ID NO: 975217 - protein, 126 aa, Homo sapiens
MNNGPRTNLVNQLQDERRHQVCNPGDTRLSTKVIMTWAEFGVQELLVRVQGGWSEHLRSPSSRIGVGIVVGARRAEVGQNITKGHTLFEESYVGCMALDDRNLYGNIRNESSTPSGECEAPSSWDV

SEQ ID NO: 975218 - protein, 248 aa, Homo sapiens
MSQIHGECKRTTNASRTTHTRRQANQNSRHTHTTIALTKSPINVTTPVCNRRNRNATATTKRLATHTEKTHEDIHTLWTDAESDDKNGSRASETDRERKGNNKNAKSIHDHVVRGDHCTDNHGHKVNETTDDRDTTEHMQTEVRSNGTREKVKTTAEPRSSEGTRNKKEEQERNMDEERKENQKERLRPLSGEEYHEASDKQGDKGEINRGRKELSGIDDTRNSKGSERAEHAYAIIGRRRSISTGRE

SEQ ID NO: 975219 - protein, 153 aa, Homo sapiens
GRLGPGYTYRGKTWRACAEALIAWSVYSGGSRSGVRLRRPMRHSAQFGARGKPAPREIVSRKLSCPGKFRRMYVEDDVDGTVLLMVWSTANGPNMPYVIVAAICMERSSGNSYFSRGHDKTRESCGSNQCAGGFCLGFPVVIDRPRKAQVTVV

SEQ ID NO: 975220 - protein, 144 aa, Homo sapiens
MAPMTPAHTATHSQRPRTQALTQPTPGKSPHRSAYTTTDPQAHNTSPRTDQHNNRQQPRTYHTHNKPPTRHTHPGNKRTRRPHNKGEGKHTRPTREQRETTKQAQEYNNGNHRKTERSANKQQHKHEDREQNKNAEQQLRLPPW

SEQ ID NO: 975221 - protein, 522 aa, Homo sapiens
TLRPRVPDQPHLQCNSSVFNTSTQHGQQSVSKICPSHMDRLVPWSSHFVMQQPKHNTAQQNAHSITVPTNPRSHSATQTMQTQLSGQDFCPLCTEFRQQDNTQPLPQTYPTHITHTFAICTTHHAILLHSNVQTKQRTTVTAWAPPGTTGIPHPYIALEGHNTNRPPPYTLAMDTGHTATLTRTHMPNHQTTEEPPAHAHGTTRETNTQTYKTQPKTPKDIDQGLTTRHIMADTKRPTQKAPPPHYPRKQQRRTKKHKGTPETLGTNRGPNRQSKTTNNKRAHHQAMSATPQHTHHQHTQQDDRATSQQHEHHITRDNTHTPDTNPTVGSNDPDQETTGPHNNRPTNRDNTETQLMAHKRRHTKHKQTTTDTAQTDTEAQNKRDNKEEQTKAGRQRNENTRQNQPNITRRKQRRAIETTQTRAHSRTPEKPSSRQQTTRDPDKHEHRNDTRHKREGQNEQHSNQRNQDKTEAKKATTAECGRRHVADRTEKCTEKETPNKNTARQSRTTTHERFLDTGNSRT

SEQ ID NO: 975222 - protein, 47 aa, Homo sapiens
MDTDTRGREQQGYLRSQRQRRGRTERRTRESSPAANAARNCPNAAPK

SEQ ID NO: 975223 - protein, 319 aa, Homo sapiens
  misc_feature (85)..(85): Xaa can be any naturally occurring amino acid
TLLLVEEKAHLNRICPQFRALQDSVYNQIVCGIALACPIETECDIVRQLLFTDDKRREAKHIRQYYVDVPSLAEPFQVKYIDSGXISLSEWRTQARTSMRGRINMQTTSITGPLRRSYSLGKTLGPIITRTRAAVRIQGFKALDTFKGNSSQMFLGILLTDTSVKRTRIYPPTIVLILTTNIPDRIDTACASRTRHWGHVFSATGYIDKTLSPNETEFKRHSKTALVVYFPFQQPTFNKIGGADYTPKKIKPFIAGIQSCMGIDEGDSLSGCNGILGVHASHILLHALGPSMTHTTTVMVTCTCTTAISANDGQHTFGQ

SEQ ID NO: 975224 - protein, 272 aa, Homo sapiens
VCFASTHQRWTVPANLQGTQSPAEFQVQEHSLLETSKTRPKDKKKNGELQSLKTMGVARIENYYYQKHFPATKRKMKTERDFNHHQMETVIIKEITGFASCNLHLVSDEGDRVELESFLRTGAPLTPNLFPVRDDDFRNAVSVLTSAFHCRGSWHCEPRCSIWCHHRAASLVCKTPVSCILTKYTNKGSDGRYPYKIIVKASLRKQKSRDRCSPGGQLPPLSKLLAGLTSNTPGILTCTRVCHPGTGAESRRALNQADSEHCSDMTTNTYPN

SEQ ID NO: 975225 - protein, 129 aa, Homo sapiens
MNNLTQNGSQDLTAKETTTYTTLSKTLVAKHTPITPWQPRAHHSQPKQNNTVPPRRTSPTPTRLTKRDTIHNAHKKRWQPWTLQQDPAAAPGTFHTLALEQPTPSLLKVTRNHLLDTAQYRFNPTFPKY

SEQ ID NO: 975226 - protein, 234 aa, Homo sapiens
AKGEWAAGWVRPCAVGPDELTATEEPTCMGIPRLPTSSGVVIDGTRCLELRSASVLAPLDSGATCGHATSRSPVRNQCMRAARVRDIACTTVMSECRGRACTRGGRVEQSAADALGGPGCSSCVGPVLGEPVVRSAGGMCADSSYRSWVGGSTEGRAGDCPGYRVGRPWSLMRSPGFDEDVPEKGSVVRGFGEHLRNHSSERRGSVSADPTKVAPARKPSAGDRTVGMEKHYKL

SEQ ID NO: 975227 - protein, 135 aa, Homo sapiens
GRAVERMEARSSDEGTGVKWMPKKKTWMIQQTDFLVGIHVMNPFWKHVYKLVYGNNASGKVTRRHHTGDVKNQVPPRNSHKTQHKVPIYYHKIYLPIKLKRYIILPAVDAQGTNQTMGTRIDVSLIGNPISYPGT

SEQ ID NO: 975228 - protein, 382 aa, Homo sapiens
MSKDAPEAQLAPDFGPMRLTRCHGCPGWRTYTLKLLGPHSMSRGCSTMPRNYPGPVGPDRASDCLDPVSPSWCGSSRHRTTAGALSWIDSFLQARPSTSHVVVAADTLPYAEPWPCPESHNSAHGSMIQKPTCDRHSRRLEARKTYVDTEISGPQYLTGGAGTERNLGTELKQTLRRRAAPEPTQTDKINEWHAPGMDTGTNPCKRSPGPQDKGPAPAPAVRTQTRLLGSKDHRHEHQRSRDDTRQADTVRAGPWHTHSEPQQTHQQDAHPKGTGEEENTTNYNMKENANRGWHERRTERIESNDRRRSTNTPRPGRTHPPTDTNRRNHTRHNSKDRKQETHKRDKGPQQKKQRHQREPTNAQLATQPPPSQHTQRRSNLPK

SEQ ID NO: 975229 - protein, 166 aa, Homo sapiens
MEGYQGHKNPRARGTNNPRREGTRVISGKATGFPGTTGGGGHDVKRRTQENNLAFPKRTWATTPRDERLRGAQYGAGNHWEGHTRRPWHLPGGTNKGDKEERQQGSNNKGAQGITAPAKQYNYRMGPLGTTAQQQYTQTHTQPPITSGTHASSTQRKGHHNNQSGQ

SEQ ID NO: 975230 - protein, 141 aa, Homo sapiens
LIVPMLSRKGIPNVTERENSRAIYKLRKGPQRCRPRTGLLTNPSLEADDKLCHRRGAPKRPATSTRSPVLRSPRPTLSSRPSLFVLWNPLSAIPNPLVNLNLGLRIYSSLPLAYASILNPLIRGEHQHVETTPCSRLHCER

SEQ ID NO: 975231 - protein, 200 aa, Homo sapiens
MGSRTAQWRSRAIVTTTFSEKRLISKRIWTIYHSGTPTDSGTGIGPIPTTNTPPPKWAARPEDILSDKFGHPPQTGQTNSSGRKPNLCGSTVSTTRRNPATTAVAGQSDSSALTQPSAKPLSGHNGELFNDAGKEAPSSHDFIPDRVTNQHVHSATHRRATHHRRRQLTNLLHLGQRGTHVSAAELCKAACTYHKSREPH

SEQ ID NO: 975232 - protein, 617 aa, Homo sapiens
PGPRVHTCSGLQDGFSHTADIRTLAGSSPSQLALCGLWCLFMLPGSAGVTLGLTLEDEPLTGLRFLQLHNCAGATVMPRCVPGAHALHARPVGLHAADHAAASSSLVAGRALACPQCPAPLLLRLPQRGPLAASAHLGVPAAVLTCTSPWPRTVLGTGKGAGACCGSEPGTRWLLVALDGGTALVQPRPNGCRCPQWTRYVRGSASRSLAIGPGGAAELRSPVLEARFSCFGKAARVASCSMTLGRHCRLQVWGYVSLVREPAEDKKYGASSAPLVTEDSERIQGHGKANSEVRYKNHTRNEKTQTQNNKKTNTNEKKHKERNKEQQKQKKRDKNKRKKTSRDEEREGTDTEGGHERQREKEAGRRGAAAGRGKDDGSTSGRRDEREEAAREEKKTLKEGDETERGENGGEQGRAEGGEVAERNTRNGEGRGEAEKQAEKAGSKVASPGVGEQRDGESGQRREQKEEADGRGKGRRVEAGVEATRHTGGETKRRGEQDAEAERSGEDREREEQRRCPEERGELHGKKGEEDERQREEQTHRATHKRGKRRDRSKKKELKDEARGERQAGKTNRRTEEDVRGGGSAATQSSDRPQSAAEHGAESRATRHHPIRKDREA

SEQ ID NO: 975233 - protein, 152 aa, Homo sapiens
  misc_feature (139)..(139): Xaa can be any naturally occurring amino acid
MVVDLCRLRSCATDRSALVHANDARGCRESGSCYRAGSFVCLHAVARRLMACSQDYSAVGDTYHDDCLVSQVVVWSIRSRIMKTVKDCNCGLGSDIVSESYYVRTDTVRPLWVEYAWREGTTDDMSRGGKRSHDSDSGXVAFEIGGYSEPVR

SEQ ID NO: 975234 - protein, 124 aa, Homo sapiens
MCPQVDLFYYTHLTTAPLAGRRCCMPASWLNQEGKFVAAWASPDMLAGKWPRSVPSATAWLASATVYHVMYQRPQPGMCKPTPFPGSSHLDLRFYAVKPLAGAACWHRPPQPALNRLWHPRHNF

SEQ ID NO: 975235 - protein, 72 aa, Homo sapiens
LAVGSQIAVLAISETPVGVGPSEPGAGYNLVAAPFIKPVRKAQYSGGSDPICPGVGFHPLLGLNQNIPVGTQ

SEQ ID NO: 975236 - protein, 134 aa, Homo sapiens
LNHSPKTARPRLLPRQPLAKPIYPNQQSEAHQNMETWQQIDIVTAKGQACKTFISQSDHIIATGLTPYHLLPYMHIQLSKSTLAKAAAKSLRPRETQTRLPQEQLKEHSPSYVRHNSGTRLYTVEAHKPTEPGG

SEQ ID NO: 975237 - protein, 113 aa, Homo sapiens
MRFKQNSPPTPFQTLNDYTPCAAVKGTGELAAWNERRHFIRCFASTCRLASREYSLEVEQRLALSLWGSIKTTGELGHNSSKPIVESRKRGSITESDAPKRIPSTGGPKRLGY

SEQ ID NO: 975238 - protein, 241 aa, Homo sapiens
  misc_feature (165)..(165): Xaa can be any naturally occurring amino acid
MGIANRATRSVKESPMQHRNPGPHSTVARVACTAKPFSTKLLDVPRAMAGFGPMLGGGSSPLSLPSGSGLVGSSGSSSTFWLACSHAASVMGYQVPWSHAGDTGGRPICILPSPPAPEATYRRAVSRPTPAVVKRGPKKPYRGYPEGTHQLGRSPRIDPPGKKTXASDENPPEMLHRQQTYSVQTVVTPGGAPPKDSCRDTQQLALTQRSPRVYYHQLHNGSVHNTLSYTTTSTSVGANYR

SEQ ID NO: 975239 - protein, 461 aa, Homo sapiens
LGKPHNLLYLYLRRNTCTLTYLWKPKFGHTATLRTDVTYGYDNLRPYHSTTRLTDASTTCRLDDTWNLQPYQSLLSHDYPYNTLPSTLQHGHLLYSLYVLDTLQHITTTYLLASRLSHYPFTNATGGHHTVRGYPTASGTRSTRAPGPRTTLASLVATGVAELVTHGTGNSPNGVRAVCKDSHPYTRTTILPYIPTLNVTHTPNVKLIIRGHFHQDGPPGCTSLRVPSLTHTGLGPLQDTSPWRPPCVTPNILSKAHTPQGTLSAPPQQALTRLTYPNRLLKITPRGYRTNQPQRTGSNHSNPWPPTHSPGELRTVAKYQRQGRTPDSRCESHDHTWLGARPHVQNRYATAVQNLGAVTTRPRCSRTGEENHKTRPGPTGPPNNETPETPHGTTAGPTRTDHPSKGNPVQDNNLPNQRDNTLDTAQPDNYDTSHKSTAHQEDPHTATDQNLDRHTADPRKR

SEQ ID NO: 975240 - protein, 251 aa, Homo sapiens
MPFSNSHNALKLRFLAEDEFPDLSCPQQPHGQGADPRAVLRMLRCQGALPELASLLDRQSSRTVRVTTLVPPCTSMTRGLAWPVLTEAVLTQVFNGSLRPRSYEGPGTGCATMPKRLQHNDLTSTPGQPARAWLTDLGTHRLPCMTLRERCSDRSLPRIPVGFHALPHTAHIATPAGETAAQRRTIRRKPQAGWDSPLIQGLATWREPLRECPRTYLTTGLKGRQWTREAPGEPRQARLNPTRAQLSLPSD

SEQ ID NO: 975241 - protein, 174 aa, Homo sapiens
MAPNCTQRTTQKPGDTTNRDNHTEETSPKQERTHDKETLGQRKHSKSPKHMGDPPRRKSAGRKQHDHNKSLLGTNPDRGQKSRGRNKHRRNHGTNEKQIQRELNDNNEILSPPKRGHTQSCTKRPHTSKQHPKEMTTTRNTTTCEDTTHRSNKPSQEYPINTEKGKNRTTEKHI

SEQ ID NO: 975242 - protein, 403 aa, Homo sapiens
GAGRNLPLAAEQTRQSCPMNSAAHERPCKRRLDSETPRTPTRTHRKQPDQPHYLTDAPGYPAAFRPDAFHRRHRRRFRTRTTRSQHRFSVTYWLTRISFSLLYLGTRTLVTTFHAPDSLNLPSSASDANALGTGLPTPLNTGPNRHTETTANEPANRPLGTAPWHPTQRSRHRPFVHASMDPPQLGTPDRNRGPNATRTLAWHQNPPGRVRPSRTPTNPSRGAPPTPHNWLWSALAPATCTRYTAHGTPHTLLPSTNQPLVFGTTETPRHRRHTNVLACPAPPLRDAHPPPTPRDTHTAPDYAQPPGPCAFLPYLKTTLIYRANWREHFSLQAPSSDLWPLSYSCRRTLAAPLPRRASFLPTLATVVTEPPRFQAGHCRRAPTLLAGLTCSLLHLLPNTIGGL

SEQ ID NO: 975243 - protein, 51 aa, Homo sapiens
GLCWGGSRATGGGCMPPTSDQPSCLSTNAAARLLRRRRSLRLNRSSRRRHG

SEQ ID NO: 975244 - protein, 157 aa, Homo sapiens
MARTPGPSRQLAGLTWWFADDHELSPEQENTLKRRSQSPVTVACAGVSVRKFTLTMSYVEGESLSAWARSTSLNESLSFMTGGHDRCTHSPRRCHDMEITRQRGAHNRGEIIVEPLKAGMIPRDTDPRRGRSTPGTRKIIHGKRDRHVRGEHKTLQH

SEQ ID NO: 975245 - protein, 68 aa, Homo sapiens
  misc_feature (6)..(6): Xaa can be any naturally occurring amino acid
VDGAAXISHVVIQYLKASLICRDAHMSPLMRDSLCGIGRMMKRYSILKTKARTTLPYILEGDSNGCCE

SEQ ID NO: 975246 - protein, 102 aa, Homo sapiens
MAAVVVFGRKSDEETPELIPLGLLPIQGYLLATLLGCLIEKVPCVKRSWGEYATLIALRSTGINYFNSPWGHHSTIYRGRADFWSHEGVKFLAPEPFGPVLH

SEQ ID NO: 975247 - protein, 94 aa, Homo sapiens
TDEATGCRRGDENVLGVLCKSTNANINRFVEVIRVHYIIIFKNSKEVSVAVYLSKSISIFLLIYGEILRNIDLDFDTIYCSGITRLCGGVGILR

SEQ ID NO: 975248 - protein, 130 aa, Homo sapiens
GAWGLRPHALEAEEAALVANAVAHDVYALVVVSILPHTPGGTYILSMIIVRTSKCRLAMTGLNMAHSERQYAFLGPYRQVQIATNTINGNGLCQFQFSLFTNGEGYARLHYLLGTDVETCRQIYSPEEFS

SEQ ID NO: 975249 - protein, 420 aa, Homo sapiens
MAEVEQKKKRTFRKLHLPVRQLDRRCEHAWNKCSLTDGRHDLSSVLSKCSGHVGSGVLNLGPAVRQAAVPAEAPAQGQEGGAAPWKKPEDGEDARVRDSESSPTPMKVGSLVGVYESCKTFNSGGDQAPEMICYYLGDVLHQLLDPYSMAGPGIGAIHSSRFIPLKIVASTNQGLHDSNEEHHHIKTDMKFPGCRLWDGTHQGLQEARHPRQVESDVAPRELAGPDSQDPTDMGVEGDCGQPYRWTMGLVSPKRRGSGPVRGHHGRPEGRGNKWGWNMGSGAHKTGVHMVGDGTTHKRESKHTRPARKIARDALKSPTGSRKKPATGEDHRKRGENQGQREQDGRRAEENPQSRRHKDNNRGENPRGLSTQEETNTRDKTGNSKEGEEKLGEKGRSNIEARPGADARRSRTNAKERREER

SEQ ID NO: 975250 - protein, 103 aa, Homo sapiens
RWKKVGEADLLSLPAFIFLPCCMLPAHEHQTPSSSALGLLDFTPGVCQGLSGLQPQTESCTGRLPCFRGLGLRLGFLVPYLVDGIFGEFTLWIVVLVRNGWSP

SEQ ID NO: 975251 - protein, 440 aa, Homo sapiens
AGVEPPSWTPAVCRPIKLARVTQRSCVQDTVSSGNSSTAGAAWNSCDRQQSRSIIRQCKKGPMSRLGRPVVSPIGKITSDRIARTVVAEAWTEFAGVSGMIVDSTHFGSRTAETAIMVNKIMRHYCNVGLSTQQRLAIDTGSPLRNHKTVGEDSTNTATTINRTIKDTALERPIHTLRTNRFDNSDTPLEIRHQRNRHHYTAQPQACLIKNRVIQISEPMGRSMALSINTRLIKQMKHTGYTDTTRHVKHPRHLKHRPTTTHTNGTLQPPTNLLSSGPTLHLSRSYQTNRKQHTAPPPTREQGRPKDTTHRTHDKDKTDQHGGYRPHMNAPEHRTHKGNNPDSHKTPTKKTHGKKHNTIATPHKVYNNAETKRTRNTSRSPRCLSYHPPEPPTPRTKHRPAPPTPHLPIHNNTNEPYSQCRTRPTTTSTTHPTSTQANII

SEQ ID NO: 975252 - protein, 129 aa, Homo sapiens
MNPGVVHASPAHTRSRVPRVKRPVEVGRIAGRHCDDDKHRTRGQSCHKWLGTQQLGLEIPKSGFRRAPQNDLHHSSGQPPTQCYILSRRSGCSRGHCADSPLLSPGLQLSPGPLTQSVAPGCLVMTSVP

SEQ ID NO: 975253 - protein, 326 aa, Homo sapiens
MVRQRHKVRASMASRLSTAGARRTPSPSKNAWRCTTPLDSGSPQATKNRYVKALHTRRAQHTLLATTTDTPPSSTHPNTRAHNEYKKPMAYKEITDTRHRGNNHGSVNIGTQPAVTAHRYHTPLMGDRTTGKRYTHHTYQNKHSSIMPTGTPLTTTRPKGPNAQRSEQGHEAGPPHRRSNRQNTKAKAPERQDTSTTKNDVSTAWNSSAQNTPRQKEEHKRRYCNAQETGQRTPYNGHKDNTQEYNQPDTTHTGVTRTRRTNNEPRERTQQLTPAARPPRTQTTHPRDPQTTSQPKVKRQKSNAPSEHATPVQHGRQTPKHNTTLA

SEQ ID NO: 975254 - protein, 289 aa, Homo sapiens
VTARLQPPELLQGQKPGVDCVFGNWLLFHFSGVTESSAPRLNSVPFWHDWELMHLWTCLPKSWSISCFSTTKLGGKNIWHSEIQKLGSAWHERMTGQRLNSKSRLQALRKAQQQKQEWLSKGQWGTPEKSLVHSDFAQEVTGRVTMWLAIFYRDFHIQVYTYQTDILAILVQEQLETKFCTLNVEQSTFCFCEQTAFSKFMPETSTGNNAWGQHKSHVWVTELGHTDDSTRNLHWRTRISDILITGDFTGATISDPQVLGTTFKAGTHLRGTHYPTCGDSPTTVDGVSP

SEQ ID NO: 975255 - protein, 236 aa, Homo sapiens
MRSRGFHVVNRDMSRIGKSVTFSCSLEAFTLRGSLRNLRLVDVHLGGGNPLNRLSDRIAVELARVGAKGKRYKQTASGFIGFYPETNNSGECQRYRFFLRRHPILVGSRTEGWMRHQRGVTTVRFSLPLEKDTLFIELVSPTQFGSLVFWPPVRKTRVERRVWWGLMSLMGCLKKGSHKEMLTFDSMADFWVMSTLDSMELSRNSELCQTGLAKWLILLTWGITTKGVPKTSDIGF

SEQ ID NO: 975256 - protein, 337 aa, Homo sapiens
MRECISDPRCARAGRPDRKSACWELYCLATRDPAASALHGQVTKDNGGRTTEVRLKQLTLHMEDRERWQCNVPRGECVSTYLVTHSRPGSRFLHMVCLADQCRSQPEAMVHQHVHMERCLAQNRSNGRWVKYTPIGRLEDTYETGCSGFWTFDGSIGLNHDDTRIVSGTILWPEPTGVVWRVEPGSGLQRPCSLGASCSIEYGGRKSKLQVAPFTPGNPCFNDGVRAPTSPAVTTEKQPWETLVMGEHGKARRPLDICRKKPRDERQLRTSGILARRSPHGSHDGEPDATEKSTTGQPEQTRQGGTRRNTRQNATHGLAPSRPLNPRAAAKQHNWVR

SEQ ID NO: 975257 - protein, 87 aa, Homo sapiens
PIAAAGSTAAKKPEWTCLLKVLLFHFSGVRESSGPRLISVPLGTVTADASVPCFPEFLEHQLLQITKTGGGTLGFLNFKQLDQMAEA

SEQ ID NO: 975258 - protein, 437 aa, Homo sapiens
  misc_feature (373)..(373): Xaa can be any naturally occurring amino acid
AASTDGSGPDPWPVGGVTDTWCPVLEIPSAGRQTGDVTGALGLDCLVELLRGHVLRPVGGLDEGGSWMGRRRAPALRLRASVRFALALSPGRERPPLAAGLTGGTSDYGRSHRLDRPPVAYVDVSGYYLTGCKRTIESVHAGRVDGPNGGLGLDSAVYLAELRTLDKACLLLSLSPCASCFLNRCGTLIPELVRLALYPYTLRAVPGGHMKPYLENEPGDLGFGAQGPSLTSILEPLTHVDTKPKKLGPKNTLARTRPIGARRPLGLTPIWLSTRREAPTLHIWDHRNTVSYALLGITMSGDKPYLALDTHLLVHMGCDKQYHMHNHRDMNINKTRAANHHEHTTTQQNECTLLLFISDHITLTQVTHIHIIXKTISHNSRTPTTHTISTPLHTLHSHTNTPYTHIQQQDLTHKPHIDTTTPKHNTYAQIHRTNTHP

SEQ ID NO: 975259 - protein, 129 aa, Homo sapiens
MSDTRDEQNEGEPRTRTAIETQHRKQRGETNEEQESERTDDDAREREKDRRGSRRRGGRNEGRAQHEQRLRPERTNTDRDGRKKQCSDETMQPDAPSEMRERRRGRERGIDTRRENESDAQRRSERIAE

SEQ ID NO: 975260 - protein, 94 aa, Homo sapiens
MGPNHLGDVLAYTSSHSGPNIVAPPPPSYRLLDRTIGGELHETGPPGHRGGLPNQIRMTVNGHYSEHSRDNPTFNTVPPNYCGTLGTPTCLNTQ

SEQ ID NO: 975261 - protein, 112 aa, Homo sapiens
DASIAKGCPWYRRTRAAGLVPGEFLSPRCGLEAPGEPCRRSCASGSTRGVDRVSRTVSPKSFAKAFSQWLIYLEKSTPSLNFRHDFPAISLDSRGFNVPNLITFSRWGSQTF

SEQ ID NO: 975262 - protein, 303 aa, Homo sapiens
AQDWRTLSASRRTASFLQACLVFTNILCKLSLESDDSYSPKCIWVCRKPILIVMLSVDAVNIESRHQDQRCGLSVTMCQHMTTRSNALGDRILPSCTREGPTTVELCNQQLKSALSGHLKTVIWGLLKTPAQYDASELKAAMIGAGKPEGGLSHGIICSMEPGRSCRKLTESTREHVKTALEKGHYADTSGGFQKLMVACQGLDERTNGRALRRELNDQEVGNSMTPALDTDGLVSKRIVQDEMLPTTEALKVNSHAFKGGTLAKGTDLNARRVGLNPRCGRVNRAGKAHNQRIISPATTKEK

SEQ ID NO: 975263 - protein, 288 aa, Homo sapiens
GGKPGTAPESPPVWGPVTQSKPPRRRRRRERRLFPCPLPEASVGPPLLDPPGTGPSVELASPRGGGVPRTVGGPGAPVRDPGCRRRTPPLGSPIGLMEIPPGVDGLLFPLETQSCLRGFSNRPYVASGLGGVCCGDFVTMVILPPPVDIQAGGRWGLTPPGYLGTRPPVVWHVGNLPVYHGQSNSFESTFFGTGCSPSKGRFQKYSGGTTASLYMITRKTKARPRPLGAIVGTQRSGGNKQRDFNPEFILTARLNKQQVLHIEGMFVQSGTNGGERSLDISLAGEMTR

SEQ ID NO: 975264 - protein, 35 aa, Homo sapiens
NKAPHNLKKNERALYTYMGHGLANDERQELLSEEA

SEQ ID NO: 975265 - protein, 254 aa, Homo sapiens
GPAEVPRRRQRVVPEIQGLALLPRLECIWRDHSSLQPRPPELKRTSCLSLLSFLSSCDYSYLSQPQSENIKGILRQKEERGEKPDSPYRCPYDMNFSMELMEPVSSVAIIGRNGLLLAFDLRVNRKVLQATVMPRIRLVVLLLSILDGGSRGTNFRLSRIFARKQARSTISQNSHCHTWIGPILDKDKRLLGGLVNFGLLLGNMDSLGDVKLTSITNLGPDLTLLIDYKRLIARRVPGCKTGVTNRFLVPLAYF

SEQ ID NO: 975266 - protein, 111 aa, Homo sapiens
TSRQAVLVTVTSSLNPAWYSLTHRREMPREGQADLKIPSYFLKIIQSYWMIIRRCCIGGSRTNVGSKQGCSKIRMSLRGTGLCVVDWARNEHDARRAFRGSTCDITQRTAL

SEQ ID NO: 975267 - protein, 221 aa, Homo sapiens
  misc_feature (159)..(159): Xaa can be any naturally occurring amino acid
DRPSAGLWLTMFSRAGVAGLSGLDLAAAMGFTVRNMAHFEQISPQGRLKMVQFKKTIPGKINPKVYDNLGKRCQPKIIAPEVGSSSTPGKTKATEITSGDIARDLPIKALLWYIATQTRLWNNYKRGGALGKGHPKGTKGRKPRPVSPLLGDGFGSSVXGHFRGTGNLWIDIAERHNSFDQGVSRIATMFVGIEKHAKGIVRTKHYRAMQPGPALSAHIKT

SEQ ID NO: 975268 - protein, 124 aa, Homo sapiens
MAPKAKKEAPAPPKAEAKAKCLKAKKAVLNRGVHSHKKKKIRMEPPSWARKTLRIRRKAKYPREERSQEKQSLNNNAIIKVSADPLSLPMKNDKKDKKHTCVSIVWGLFNEAQRKHPGFNTQGW

SEQ ID NO: 975269 - protein, 170 aa, Homo sapiens
QFVGPAALSLCFNSAWTETDPGTLYPVSDAPPMSSHGWQTSGDLSSLAISLHSMGTCQHGFVVVSSFLPNNHEVPDCVRFIQTTVEAAVNSLVNFVPEACYSYLSLGFYFDRDDVALARREPLLSGKWADVRKRRGLTRRTTARMQENQGGGLDALLSREHQMKPLWEPN

SEQ ID NO: 975270 - protein, 117 aa, Homo sapiens
KAGGSACVLGASFQPGVGLVEHINKNVFQKSSVSLTGEEEQSDQVETVIPVDVMSELGLKVTVCMGLVWEKDPDNRCSPVMWTIVLDAKPLKDATKTRDHMIVVVHNQEGKSWAQQE

SEQ ID NO: 975271 - protein, 232 aa, Homo sapiens
NSQLPQFHFTNRDCDSLKGLCRIMGNGFAGCMLFPPTSPPVRCSVLMPPVLVQEEDLHWASSPKIQSGFVKLPSRRVITNPKARQWDLVGVNFMAPGPDRQQNKVFLGQWTWWSWELGMEAPRPLSPKQVRVQRQVAMPFPSVLTVEHPRGDGSLEEPKARWAQWETPSVTFARIPVPRERKGLLGHKPISCPDCHRELRGLVCPRFPTFSNGDLVRTPGRRPCCRDPMEQT

SEQ ID NO: 975272 - protein, 221 aa, Homo sapiens
SAARVSRSHVCECYDGRKGKKQFTGESNKDRQDKKTDFIKHSDPGSSKTFPHTGTLLTDGALKSHLGHLGERVSQKLWDPHGCKSSSRITQHGDKFTQENNIPAGKSHFTKTEKYSSQMVEAMNSAANEAQTGLTFTKRRQKRSGSKADNSVDKPNYDIVGPGHSSMWDDFNARTHRTGSQDTQRKIVTHKHLLLGAPCGPWETGLSVTPNLGCVRASSPC

SEQ ID NO: 975273 - protein, 183 aa, Homo sapiens
VCRPVLQPPDGTAGGKKPEWDRVFGKLLLFHFSGVTESSGPKVNSCYHCGRNGELMAFWWTMFPPNVLGASACFRITQMCVGRHIVRFLEIQKSCNQMDEGCTWKALLKRKENPGHLRERFNEEKHTATGFPKRDLWGEIPEKYPLKLQREDFFPTATSTGAVAHTWLVVPFSHGRTSHIPGC

SEQ ID NO: 975274 - protein, 300 aa, Homo sapiens
  misc_feature (139)..(139): Xaa can be any naturally occurring amino acid
DGPFSASSPSLMASLTVKAYLLARSDAARGDSAGFSFRVASPRSLEAEGEGLAGASPGPLGGAGLVGPRVLARPWFPRGLRPGGGFPGRDNYNRGRNWRATGGNLWGFVPFFPQVWTPEGQFVDHIVATMCSHNGVEEXTLHTIFLSRRRISLTYFISGPSRQHLIVHHHIVEQANNELFCVAAGATPAGTLMRGTPPVSDKTKQAVFLHPKKTHTPDRRAVDDGSTNAGDGCDAPHRSDNRGGMHDWGANTSVCGDDNKRAGGVVDSPPKREGNTTPPGGHASERANETGRGPRGDTFP

SEQ ID NO: 975275 - protein, 142 aa, Homo sapiens
VTDANMAAPVRHLLVRKGSHRIFSSPLNHIYFTQGSQGMSNQRKKFLFSETKRTIFPTTGNRFAAGLGQVSFKTTFAGSLKAPIKRKPDLIVNRTTGHLCNPKNGGGQPRAIYATFHRTLERDSTNSPKGGFTITGLWVQRL

SEQ ID NO: 975276 - protein, 211 aa, Homo sapiens
GSRMQEPGPKQQLPESEGAEEEELTEGACEFSASRTGPSSKQDGRRSATGPVKPESAQALKSLLIRNGNPADQVPSLQAALVAQNYYQLPAGDPAQAVEVQQGQNKPAWKDIQEEAHKYHLTFAVDSKLSTTPELTVELCNSLKYFTLQQGQEIAPEVNFTFDRRNWDKNPDDRSKHILSETKSMRARKKHTISTTFGTVLQNGAVHISRL

SEQ ID NO: 975277 - protein, 186 aa, Homo sapiens
DPTLQRATIHQTDHRDPISQTPVRMDANHQTQAQVDKFTIERERGEKNDSRSNCVTIGENQPNAIYGVKTSQMADNLYAEILYHHVCKNTSLYTGDLWLVKIGARNSWGVRLGGPTAGFGRPLHGWAPLVSPQKGWLSAQKGVNACSARNITHRQFRHRVEQTQQGREDRSAIFTPLLLRGPYTNA

SEQ ID NO: 975278 - protein, 47 aa, Homo sapiens
MVEAEAMNYEGSPIQTYTLATFATCLYSQGFPCGGFDINTTRWSSRS

SEQ ID NO: 975279 - protein, 308 aa, Homo sapiens
SRTCDTAHPLDARVAFGRSLPLQAQSSAMACPPGSGHVPPRAIFHKYSGWGRVDKHTLSTKELKGADPEGGFTIGSKLQDVANCKRDGRLGPGTRTQELTFPRTYVTPFLGDLGFDSTNEMPQGAWTNTITGTNWSTTPLGESSSESKLHVVCATCRNHIFVWYHIPTRLQQTHTNYTRSTYFGATASWAPSEKVFETHYVCAPARATPVGELRHTEHTGVAQRRAPGPDTRERRVTPTANKTGRADNARCVTNNYKCSVEDQRGLHTAGTQRPWIIHIAPRWVDTTCSRNIHTVEQMHASCNATSMQ

SEQ ID NO: 975280 - protein, 113 aa, Homo sapiens
RPFFDRESSGLPATTVLGRNRALVPHPGPMDHSQPSVHLFSAPSVFGPKGPCGWIQVLGKTITTEAGGLLFHEVAAHEGRVCNTRKGAAEKYTRPQGNHSRGGYLNAATESNA

SEQ ID NO: 975281 - protein, 125 aa, Homo sapiens
AALESKAGSGPSSLSEQSASSLQMTDARLCPSPRGLSLDKVYVTRSQSPNDADSRHQKGRLKASMLHGGIDSRRDAKTRRREYTKTQRRFHYARRYIKEIPRRCTASCCDLVMGERIPVPHFVHQ

SEQ ID NO: 975282 - protein, 185 aa, Homo sapiens
  misc_feature (18)..(18): Xaa can be any naturally occurring amino acid
MEAPQFVIILYITEDVWXFMKLVPQQLRGLNTHDCTSRDGYKPKTHISGYHGTGGYYYGVKWLLTTLVGAKHQVLIGHCPSHEVPLKLLDIGAGNYTYVTRFNALQSHKQQHTHRSKFGAPTALKRGDKNMDEGRRPQERTTAPRDLKNRHWTMMSPKNTRERHGINTEKDSVTRTGKKPATGAA

SEQ ID NO: 975283 - protein, 136 aa, Homo sapiens
SRTNTGNRCLPGEGDTQVTRTRKNYGAISSEEIIKMHIGSGASNAVCARTATWVPGTPETLSNDLEMRSGLTGSDERILPLSGVNGHFTRRCYLQRGKIGRCPCSKVSMATSNDSVDDLCYPQIDSSDFCWNLPGT

SEQ ID NO: 975284 - protein, 121 aa, Homo sapiens
RRKPALCLEETRRMSGLWVCQGPTEKTDDPVSEILMGDNLVPPGDPFSHLETHGRAMPSEKALHSSLRVGIIRKNSHTVVVTTLPSDAPPDSDGLKSNILTLEKDGEPTIFSRPVMTRSLE

SEQ ID NO: 975285 - protein, 103 aa, Homo sapiens
MIKLAELNERIMYAQPVTNTKEVKWQKVLYERQPFPDNYVDRDSWKSSGKTSICSEIPILGCGIGVQCGDPAAVQCWCLVVSGCIWMRVFWPPMCFRDCRVLH

SEQ ID NO: 975286 - protein, 85 aa, Homo sapiens
VQNEVRTCCRPECNRVWPLWMRTRIRAGRRMVLEWVPDVEYGRKRRGESSDKCHGLVGSRFPLHNKSTGVFEGAGKIRPISEVYF

SEQ ID NO: 975287 - protein, 170 aa, Homo sapiens
MGNRVESGGNANRTHAGPIHRATTGASIAGHRHFLRPQNKEPLLMRKSRLDKKRKISRPVIQRARHRARPKGTPPRGQSTRQERRYTSTRHNQQSGTEPTTLHKHERLSWGRTTVHIHKRQQQGHIRQTGQRTHSQRKEYYNGTAPHSSGHTSNKRGDDIPPRPHGQGTP

SEQ ID NO: 975288 - protein, 73 aa, Homo sapiens
VCCQSLLAKWLPNQYALAAYIVLCCGVKCSSIVELMSLLSALVFTDIYHTSLVALIEIDSLFGEDQLCPYIIE

SEQ ID NO: 975289 - protein, 121 aa, Homo sapiens
MGIGEDSYQPFVCLLGTNVRFRGKVSNLTTCAHLDLIKHCAWHSGIREPSLHIHLSETESALHCTHLGNRRLTYQLSATWSLGVKTERGWMRETVALVSAFDYLSSSHTCVDDHAKGTRSR

SEQ ID NO: 975290 - protein, 68 aa, Homo sapiens
VPSDTSFLQQRRGVPEAVKESIAGICSYLRVWFQQDQKLEKEEEETDPISARSHCIQRRISKKRTQKE

SEQ ID NO: 975291 - protein, 68 aa, Homo sapiens
ILEPESARCYCGFCPRCLRWSMALVAQIEVQGDTISVQRKRLCLTWVQAILHAVSISSSLGSLGMHTR

SEQ ID NO: 975292 - protein, 118 aa, Homo sapiens
MLNNILQQGLFVESILHKITIEHRGPRRDTGGEASPIKHLGNQEGQNNFLNGRGDFNPPFFRARKRARLRGGHYHTGKNNRLILCARAHSKAVHLKRGQYFLSPPFWGPLCAPKSPPS

SEQ ID NO: 975293 - protein, 205 aa, Homo sapiens
MKVHACGHPNARLTCSGTRALRSPEAYFSWNGCNSGEARLLTYTKRPLTQLHAILLPPGVLSPTVTRRTFSSSDPSRKEPFHDRTIALHALCITHTLSLHPTRVLPLSPPQSSIPFHFTVHTPSLRHKLYYPTFAHHIRGHHGVSARTPSTGRHRHVAPQHILTADIGANEALHYSPTRIIAAPPFPGYLSKCGYPQHPSHPFSR

SEQ ID NO: 975294 - protein, 229 aa, Homo sapiens
MDENDTKHEESGEQEDVVTLKETPWRRDYGIELYSVFYIQQGKISFWYTGKDQMLDNPFQGGLTANYVCVVIHYRPIQAGVLEENVRALWKLMGQTARTQTERADRGRRIGTTPCGTRRFLHRTGQNHLINPPEFHLTKVSSLDGYLGVEHWTLGLTYCWWGLRNSRCTFWTSEIPIVRIQRLWVIVFQGEELSRNFREKRQPGVEIRDTAGLKIFGQELLFRCGNLIL

SEQ ID NO: 975295 - protein, 285 aa, Homo sapiens
SSSKYAPSYYHVMPKKIPLCVGDKRSDPEQNERAKDTEYSLWLAATPCSVEERKFATRVNTGHLGTIKKRQDRFHRHRLISQNAIDHKIAAVIQRNTQDTTVHRLTNWTDPDNHPRQTLSRPERTTVNQHHVTHMPPENAHTGTLDAKLPLTTTSVTYYRPTLSPLNRNSYATGPYQAVVTPDTLTQEPTDVLCQKSDGCLLKPSRRINYYYLLTDTTAGGHRTRGGGFVRTLNSKPKKFPSGKKQASQLNSLLEPRAFGHSLISSLTTLHLVGGPLHRGLHHTP

SEQ ID NO: 975296 - protein, 190 aa, Homo sapiens
GRHQTVCRCSRVVVVFLGLSRSSRSRPLALRLLKPKPVVDVILLTRSACSGVVRTRSTMFEARLFPGLHPQEGVGGHSRTSFNEACGDIRLQRVTLAELGSLSPPYSCVAASPVRGCEASTTYRGATETWPVWCEPSPVCPKILRSARESGQISLHSKGRRLTAEYPVALGIGGHQNPSEKSPRHIEMNV

SEQ ID NO: 975297 - protein, 96 aa, Homo sapiens
DSTDVVAALGEEVVFRWALVLKTRSGSPLAVSYSPKAPTRLFSHLLCRMRRAGLVEGVPPRNLWERMAMLIVRIVPVKERTMRGSLKVLRSKSKVL

SEQ ID NO: 975298 - protein, 116 aa, Homo sapiens
KKHSAETRGQLPCVQHGLETESEAAAANDVGLGISKTLPKRSGSDRSVICHKSGTWEVCCRSRLTGSRHAGESKSTLRSSEYKDRALDLAGLRPRKLTTRELHRAAIKTRARIPTV

SEQ ID NO: 975299 - protein, 143 aa, Homo sapiens
LLLGLLPLPRRTVDCASSWPTGCRGLPQAIVEPMYDEGTTVIYKLFSKPSSQRTSCRTQELFTKNNSQRWFHQIHYLLVCITTVLRTRTMRVLKQWLLFNRWLELGLPSLPQGSGLGTSSFNVTNLIYQYTNSSSTPNADGTA

SEQ ID NO: 975300 - protein, 106 aa, Homo sapiens
MSQEGRSRMLSAGLFLPGRKCARLANELRCLDRKPGKFRMGNAAGPRPNGLFRIDTGLSGRTSLKEYDTPEPLPIDDPGYFGNPGFGGVKASGHVAKGIQYGTSTG

SEQ ID NO: 975301 - protein, 138 aa, Homo sapiens
MGVFLAGLDVQALRGFLAESPGAVRSSCPVCGAPICRRMPRPPPPIISSVQHAGSVMRLEQILSRCGKQLCAGHRNYRVWTTVIETDTNNDWGHTLLTGMFYTQQEVGELLVAAVICEFRTNRWDKKGSSGFIRADSA

SEQ ID NO: 975302 - protein, 66 aa, Homo sapiens
TENVTLKKPEIFQNLKRRVFELRDLKGMLEVLEELTDVQTLTGGSLALCSPRPDVQVARSRFSATS

SEQ ID NO: 975303 - protein, 79 aa, Homo sapiens
MVPGEEPAGEAYGGSVDSEVPGVVSAVMSLRAQAEWVEVPGIVEMGSAGKGGQDVFVARLKATQNMGWYYSLLFRPKWN

SEQ ID NO: 975304 - protein, 141 aa, Homo sapiens
MGDVSPKNEANKSEVSVASKFPSLSMTQGDAKHPSCATRRDGGAPGGEPKAAGKGRLTHSSLKSWCRRVLHTPFRHKANPDRYRVWAKNWDTHFQVPQTGHQTVGEPFQTYLWARLTGVTSRDIQLCGPCDLNSSQANGPK

SEQ ID NO: 975305 - protein, 519 aa, Homo sapiens
PGCDSVLRWLYLWSSVLYIYRPPSLLPKCVPPPDGTIRWTMDIEPPEAPELSFRECDLTGPTQRLSLERVAYLHEQLSTTYTLLNERLTFKRAGCQQRMTLATLLLSNATQRTLAISRMGTSQISHCKPSGAQPLGHTLSPVHMPQPGLPPLMAAAPLWKPSHHPTQVALLQHRGSCNRWIGHISSGPNVGQLTSQLRNQGHLKRSGPVWATRTTHWHTTSFHANPTRTRQAEGAAAICLADTLSLYKHNLLLGAQTAPGLPRPAPLAHRAWRITPTRAFSPPQRHHHHMRLHNTPSATWPRHSHTALLNQHARVAIDLHTPAHLHLDIRNQQLDRDSGNWTATSLGPAHASTTAANTQHTRRPHRGTGRTRNTAQATTCPQRPHTTCAPTPASEHTHGPVPRRPHDPPATPFTPRQPLHTVRAPQHPAHATTPRSTHRSSHSSCQACTNLRVEQHHHKPKLCTTPIYQHNTGGPLPRSGRPKPTHVKHAARNAHARNTLDDDGTVPNAHRTRHLTSLH

SEQ ID NO: 975306 - protein, 130 aa, Homo sapiens
MSLDFQFQRTSDWIAAVTHGCLGQLQHVVHLAYQTDFMVNKIIANKAIDKPFTIPEKTTPRISTCCLTWQAIVGALHRLGYIAVVGKVHKQVPNSVNGGLTQQHTEAAVQTIVGPLDPSSKTRTLNLDNF

SEQ ID NO: 975307 - protein, 172 aa, Homo sapiens
MSPANQRPGMHPVAHVSVGKTPLDRTWSHSEVGRPSTSAMKGGCWHRRLLDATPPLATVGATIRDPFMPGEHFKSPSISHEGDTHSVTVERDTVQKPLQISWPSLVPARYKRNVHSEAQTICGLNHNPTAGKRRKNLWGIFAQFLPLERGDEGSAHGADFWKRAGLDADVGP

SEQ ID NO: 975308 - protein, 254 aa, Homo sapiens
  misc_feature (152)..(152): Xaa can be any naturally occurring amino acid
MVVGRRLVLPSCGGWPKALSTLGFGPLRLEPELLCARHLSGSLGPLRALGGPKVLWAAPCRTFIFTANPRGKSTAWVFGPCVIAGKPACGEKQNTMRMGCGTTSFNEVPCNRAAYTPRGNSYTISPPHRFYWGSKIYIFRRPSCLNLLWTGXKHHPLPTLGRAVWRTQIARGLPADCTYQHTRTAGHKTSLYNPQHNRVDGFVSQGTQGQYHPCVGVRAPRGILPFGRDNVVRWLPKSFEYPCEVLGRSPPCVA

SEQ ID NO: 975309 - protein, 297 aa, Homo sapiens
LPVSGLALVSGFFAVDQDEPDSSGKRKPRLQAVQAWVFCMGHGGQVERESHCQGSIPRWGAVAEWMCGGSDRVMMQRGSCNGLWLEQKALLMSQKSIQRRFDAASGNESVPKELISSRGNMRHLYTIQVFERTSKDHRFDAIDHWDYKGDERTAYMASEDRQIGIYKTSYEGSDGIMAMLHGSGACVCVPELVKSVESKWHAYWVSSWSRNSLIAYGHLPGFRVSPVKHDVAWGGTGEEPATVCSRSLQSTFGENYLSIVNKDPSRRESHFAHSEATHSHSTQLRPFTTSIGASLLW

SEQ ID NO: 975310 - protein, 280 aa, Homo sapiens
ACRPCGVTVAFPQMYLSAQPALEGRTSFPEDTVITYKCEESFVKISGARRTQVICLKGGQWSDMEEFCNRSCEVPTRLNSCIPQTALYHSELSFQSVTVVEYECRPGSRREPSLSTKTQLAFSTFYHSVHSSRHLLSKRNHALIRRRTYEMLRFDVQVGILSCEPISFSMYTTGYNSLARLLVSSKFQAGPVQCGVDRWAQSAEEHFLSMQPPTNGSSGIIHGDRGHHGIDALSQHAVNTGFPLLEHLSSAREHCAGMWVDPVWEEIYSSHKVKLYKSTQ

SEQ ID NO: 975311 - protein, 69 aa, Homo sapiens
PPGAVTGAVYGWTSLMSALVPGAAAAHSAPFAFALSTSRQFGINSETIMKAASISEDEMVDSINKLNNC

SEQ ID NO: 975312 - protein, 232 aa, Homo sapiens
MPRKAWCWRCNGRNTALQEVLKMPSSTMAKHGGIREVAKALDKRRPNLGCAVLPNVMSLCMSSGVEALGAEHQINLLTVDDTQETRRLREALVQLDREGNPVKGLARSCVVVQAYGKGRPGPRPVIADVFKCENVTNSNLGSPEEEHTHNNNVSAAKKALKTIVGAGQREERGQRAKNRARMAVAHKKTAGNGGGHTRSARATDSTARLKTPPRDPPRTALPPLRPRETHRR

SEQ ID NO: 975313 - protein, 231 aa, Homo sapiens
MMGKIFNACISFTEGKVQHVDGEDDQDGENFGADVEEYEVAGTCGGFDHQKKLWSFYKLLMHELSVDIGSSDFSGTTVEARDVTATGENWNANSSATRRVARMRCLYGPLGEISPEELLDIIRSAEVKGYFSRRSMAEPRRMKRTQGTASITGGKLVQEAARDKLRTSGAKTAVGRSIQDIRGGLGGTKHAKLRAVASTDTGALPIRPRGPKAPGPSDTAAARAPQATAAG

SEQ ID NO: 975314 - protein, 242 aa, Homo sapiens
MTEADVNPKAIPLRCPLTRSYDLVQQSCNYKQLRKGAMSNKNLNRGISEFIVMVQRRATEIILHLRCCVQDTELCPYVLVRSKQALGESLWGLQACHRLVLSPSKKARSGNSRIQSIQQSIERLFSLNLCALPRCSLQVFPPEVVIIYLVLSHGSIQGYSSNGDYNWSVVNTRRRHARRHTHFWARPARKKRSLATPVVGSGTKGQEARPHSGPTETGASTSGAVPPTTPAPARLKPRRRPR

SEQ ID NO: 975315 - protein, 164 aa, Homo sapiens
MGSPVGGLKNLQNLITREGKQNGFRKRGIGRSTTPRASGNKICPLTWHICQLPPPKVDSAPTLDKCYTNDSQGWWSNRGALAQAEGVTLYFSCTTSTAHDFKTEGIPNQTPRSSGATSAGKSKQVWKAKDLNGISWKTQGKFGKNPALCKNGKKPYSLREKYEK

SEQ ID NO: 975316 - protein, 301 aa, Homo sapiens
GVDCEETWRPDVDFENVYFPGVRRTSTFALTIIVGVSVFERASIKAADAYLRTTFNEGKLWNTHSGTGMRTSEFLWRGPPSEAREDPGSNPKQVVVPKSCGALQLGRIEVVTGVPLSGGPTNVGVLGQGKGVFNFTKKKESFNPFLGGVGIGNGMVKGSGSVLQGNINIVELCPCRNKTHKRRNKRIAKHILCCGRALGPMRKNGLFLETPHFLLLAPRCPPSKRSMCVPRCGHNRAGGPQREHRGGATTTCGLVCIPHTKLQRRPGGTHGRCCWDTIPEVGFRRELLGGDFTRSGQEVYY

SEQ ID NO: 975317 - protein, 111 aa, Homo sapiens
MDKGLEWVWEKGTKFPWGGIPLRNYFNCGSQEGIFWLKVVGLPAPPEDRKRNFIGRGCAKALWIWDRAHHNLLWTGATHKRKFFESIVDNGLRWFETIINELVQYIKARKC

SEQ ID NO: 975318 - protein, 112 aa, Homo sapiens
QRMENVNTNALKGAMVRRVRDKKQSITHSWTTLTSDDDLVSATVPLTKKSRTAPKELKQDKPKPNLNKSPDRKSQYKRKPLNTRLALDDKLYQRDLEVALALSVKELPNSHH

SEQ ID NO: 975319 - protein, 295 aa, Homo sapiens
AQPELKARAWSAAQSPRGPLPVIPVPDLHRPQGPTETFLPPFFLPPLLSLSLSLQLALGALQQAHSPGVAPKTPFWLLPHSQACPLYRPWAPLHLSPSLLSPRLNCGQRQATMAAFCGLAFGPLCDCLAWPEQPAQSRCVHNRGRVQAARIKSNQTQFSHNPTVGALNVGRHPPRSATLIHTHTIRGFPPANGPTRCGLGPTALSNIEGPPPGDSHFPFRKKYPKASSTLREGEELANRIRWHRAISRHASRNERWPATALLGRHGLRRSWHVPVTFFANQTRYFAKMRWGISGL

SEQ ID NO: 975320 - protein, 73 aa, Homo sapiens
MNAAREKPYSKDRGWRKHDGGADRARNHPGKNSPGSHSAGLWTTAANTGGREQGSTQREARTGERTHPKGYTR

SEQ ID NO: 975321 - protein, 215 aa, Homo sapiens
MHGRLKGEDRQKSRRRPKGLEREGKLKAIPMSAHPRPLSRGARLWSCMTSRALEWTSQILGSQPLILATLLNRADEEGAPRQLEDLKEVSWKSVGCSADRHDTGAFLDELTVRGEPPSLNVTVGHLDAGLVGRCLSKIDREWKVWGPGFPAGGLRGTFHVGGALSGGCGHKGSGALEKSKLHEGYYRIFKLFPGLLLAWPVAPGDARGLDWCHTA

SEQ ID NO: 975322 - protein, 244 aa, Homo sapiens
SPKPTGCLLSQWGPLIIVAHAREICPRGSCGSHSFEVTQYAPSGRKVRFPTAISWSRTHGGILCSSHSSGTFYPEVCNLQNALGKSLAKVGHQEICPRRQCQFGWPFQISPAVGGTQSLPLGGRDSHVALQTVWNDAHRKNVHPFFPHFIPMTTEIRGRFAHPCGGIFGVSQGKQDGIEQGHCFVTARGGGLGIGVLIKKAGRLSNLLPRVPSATHLRMQILQGSHPPLQAWTGSTTQWFAPPV

SEQ ID NO: 975323 - protein, 247 aa, Homo sapiens
  misc_feature (113)..(113): Xaa can be any naturally occurring amino acid
GSVFWTIRCRRHQVSLGDDVPELCPRRSQVASVLEAEDASRNSIEYARVVTRMQSRARSEMAAIDASIPGRLPKGEFQREAEIDNTTHPAFCRDCPKTNDTPLSRPRPLLCWXSPLLLAYPLLLRCNPGFTRPCLLPSIARHPSPTLRSLDPVLADRHTPPTQRPAPLTLPPPVPTLPRSPLLTTLSPPHAVLPLSHTTSRPLALRPSLPPSRLGARPPAAPRPPLPPVLAFPAEPSRLAPSRPIGP

SEQ ID NO: 975324 - protein, 126 aa, Homo sapiens
MGWKKPDFWLPRKVADHIGGEHYEVLFNSEEGIQALDDVIFSLETYDDYEQFVLQLGMYLISKYIRKNKIGGDLLLEKDPDELTQGYIYFHKGLLLKKRGRRVRGSEGNSIVDVLRQIDYAAMVLN

SEQ ID NO: 975325 - protein, 310 aa, Homo sapiens
DSAYGDALSSRRMAQLPIKMSSVHEILCKLSWQGDHSTSPSAYGSVKALYYLRMLSRHASDHGTQPSRPNVGNDGHPLVNHFLTPILQSHGTRAHATTCAFRSLSVSACAPSPRVTCGFQGLLGSSMPFSSCVPPLPAIGAALLWLSLFRPYLLLAFHVLCSPVSLVALLHRLFPCLSHVRAFGPTSPVVVDVAIIFLSFLISVVLFLTLPLGFFTMLTSPLHTPRASALRLPVASRRHIALFTALPLAHGSSLYTRSLAAVSPPPVWSYTRTMRGALRLRPALPLGCGSLHLLVRMLFSSLSLVAPPAS

SEQ ID NO: 975326 - protein, 102 aa, Homo sapiens
DSPWEAEGRGVGWGVPGTPGPRHGAQEGSARAAAEGGRPRTSRALPEAFARGGRRRAEGFRWSQGGLTRECLARARGGCPCTGWALWEVGPICEPPGVCPGA

SEQ ID NO: 975327 - protein, 176 aa, Homo sapiens
MRIEKCNYCLGAHLSPGHGMMSSVAISKVCRYWQCLNVNRYNLRLEAQILVESTGGTKGILGNACWVEELYSGYFHVRDLKNGGSEAIKYRWESIAGITMYWDCDEDDGVKSFNRKASQSIENLSRCNEDLDRRRLNEGYKKSPRDIKTESHSTVRSIYIRAPPLQCMRENRSRRR

SEQ ID NO: 975328 - protein, 105 aa, Homo sapiens
MKEVVLSAGGLLRAGICYWKCARYKHTLCACDRNVAVTVLIANQCLSLNSQNHYIWLRGRSEIGNDLKVGRPWTQPQIQAGATRSGQGWHGVVEDLRSPLRFPGG

SEQ ID NO: 975329 - protein, 112 aa, Homo sapiens
ARVMCAAASRGLAYVCHIQVFRVYGVSSCLLICTCANIRSLAPRPPGTEITMALVGLYPGKCRHEIVNRKSPYVAVCCHKLMAFQNSSSYSTLGNTCQNCSCHSELMCEPRT

SEQ ID NO: 975330 - protein, 326 aa, Homo sapiens
AAPGAECHLIHCTGTDDVGSFQKSNPSWRMKICQSEDLVDKEKEPQALKAIPMLEPELMWQCGHPVAPGNNDLSEVTRLTGEAILRCDSSSPRSLRVGANSRTHWLQRDSLRTSQLGEPKFFLAYSPFWSKAWDLQGFLTGWCRVQKKTVRARKANLWAKGLLTSRFSTFGRVCRAHLFLETPWYRYGLLSWERNFFQVILVVLAIIRTQFQKFHEAGGGNSSGAKKGEVTRTPKGAVLLGTSGPERRPGEGKETAKHCAAARLGQPRDHWAPHQNGLGGQPRGNKGRQVGSHTLVRNGNRARWAQDNIEAWTEGWNHCAGSQKHN

SEQ ID NO: 975331 - protein, 74 aa, Homo sapiens
GSAQEAGLEDGVSGEISDTELEQTDSCAEPLSEGRKKAKNINTDMTEGAFSSRKHLEEQPCTLFEVPDTMVTKT

SEQ ID NO: 975332 - protein, 182 aa, Homo sapiens
GPLGSDATGGGDERPPAFESSGSSRARRRSPLTGTPGTNGLFIHHQQRRPHSGNIINSQFLKDRAVLWAATKSPTLVEHKIIIRSADHAELKPPGSFYQGQSGDSSVSCPCEERFRWAIKDKQEGMEEGPEGALLRLCETPFPTLCLTPPFKLPHRGRAAVHSHAPLGATLHRDNGGVLYLD

SEQ ID NO: 975333 - protein, 122 aa, Homo sapiens
  misc_feature (29)..(29): Xaa can be any naturally occurring amino acid
RGAWLTLVIPALGEAEGGGSRGHEIETIXYTGEPGLYNTYKKIEPGVMAGRFVSPQILRRLEGSEIGCDPRGAEGLPVDARRLRPPNLATSQLWGHQGGGEFRVLKKHYQMATAGTTQTCGY

SEQ ID NO: 975334 - protein, 114 aa, Homo sapiens
MTSAEIKQLEVTTTSETKCKSIYKDFMRDLEKWETRHEAQNRIWKLRRQSGVPEENLPPIRNGEFLGKTKNRRTVKESSKKTREENKKTVIKSYDMRLGKIDVDRILDELDKRR

SEQ ID NO: 975335 - protein, 235 aa, Homo sapiens
MLWENTVGTKDYIPLLDVDEKTGNSESTKTPCSETSQIEDTPSSKPILLANGGHGTYEGSDTTGSPAEFLEERMGYQEYPNSQNCQKIPRVGDQTEQVVDPIQTVPLEMYHLMMTGGLVFPSSATGDTFNICRDKMIPGRDEGRMSPLKHRWWELSAWLGRPEESQGSEFQFPQRSWSTFLGKGLPLETSHENKGSEEAEPSLDNGCGHGGRQKDGSPGSENGWRRLTKRQEGTD

SEQ ID NO: 975336 - protein, 276 aa, Homo sapiens
  misc_feature (124)..(124): Xaa can be any naturally occurring amino acid
VRRTLRTSLWRFRGSGKRCGPGHLSSWRNRRKWEVLEPEGGFQEQFLAPVINEMREEHSASAGTPQEHKGRGAVYLCGDTGSQAWWGTMATKICGFNTQWHFKTPGNVVEEGPFGRRSKDACPXSKQHIFPKKTPGEPRTCRLGRSKNPGTTSWETLASVTIETHFFTTRVSDFWRGHPFVTHQPVGEEHHNYGLAISRCAGALETQFWWTKATGMPFTCAAPGENFNPWGQKTRPEDLYTMDYGVPPRCRHLNNTRQTRSAGTNRTGRHITIISL

SEQ ID NO: 975337 - protein, 295 aa, Homo sapiens
RYHRASLLLYDAMSDNECAFKSVYYSYCAPDTDECWRHRPSCRATSLEQCNGGESREPKLERASRGYFDHVVLRGIFRNGGIMEKVSLLLMDMVGYRDTRDGSGRPSYKYAELKYRGALFVKTVLLQSEGRIRQVNIEGVYIFGENQSVIECDRKLMHLYNTDRSMKAEKMSKTSYDTGHLIQNKMIFVGLKQDQHCNYLFEDLGGQNCRTNCRALVKTSHAGPVASTWTIEEKRAGKGAYEGDRYLLNEEANCGYLSTSFCPKQWRDGDLRYPIYSSSVRLASRCALHHCAHSS

SEQ ID NO: 975338 - protein, 122 aa, Homo sapiens
TPRGRLRCANFVPFPPARPQARCARADASRTSQRRCPTLPSVRGRVSHVVAALDDCPSQGRDMKGDAQPGLGKPRIGRSHRLPVVHKVGRHFLARANMSVMPPSKIEDRQIIGSYKGGLVAH

SEQ ID NO: 975339 - protein, 117 aa, Homo sapiens
LDNLRRAGRAPSSNTCRPVPGVPSWHWVCKVCVIQEKLQLYQISSYLRPATGGDHNSSTYVLRHFPQFWAVESLTLLQEQGASRSRGLMAIACAVGIVLAKWSLKLMCLVNLVMAPL

SEQ ID NO: 975340 - protein, 74 aa, Homo sapiens
DSRRRQLTRDMDAHSYTDCFGAGVVKPEEELGRLRTFGALSIIRKDSPEEETCIARRPGVQSQGCKQPVGLEDF

SEQ ID NO: 975341 - protein, 110 aa, Homo sapiens
AFPRPSGGWGGGGRPALKPLGAHGAQEGGAGVPAGVSGGRGVGIGRGAVCTNLAVGPGALWEALQGGQFPCGGRAGRFGALEGVPGLCRVVLRALKLWDTGCGGPRPDFG

SEQ ID NO: 975342 - protein, 71 aa, Homo sapiens
VVDTNMETWYRVPYLVLECPNLKLKKPPCLRMPVGHECVVLLVVVSYFPHHRERYKLYDVSVFDTLQVSVL

SEQ ID NO: 975343 - protein, 159 aa, Homo sapiens
MEWGEKGYMTGEAWPSPEEVLFPTQEPKVNPQITVKAGARSSCLNEPGCWPIVLRGKDLEHPKGPEDDTEKSGGMVESNVSEAGVKSTRSFMEGCDWRTWMSCTRLGVGRSFVGGFPQSRIRAYIEQRAIFSYLCERINETRCSWIMRDGSGPKFLDTE

SEQ ID NO: 975344 - protein, 311 aa, Homo sapiens
DLNLTELRARTRVPGADEAGSPGQEGECPGCQPEHVFNLQLIKEMFTLSVGKVTVLSLSGGYDFCLTPKATEETWLVKLVLITGCWRLDSEGSSALAGVPGCRLLFLSSGNINKEEAMRKTCNDGSGKLVAHQGVQRLLPGELHAKKEGVVYGVNPDQVYQNDTFGEWFPLLIKHAGNRNSGQHVPLTGQDEAYGNTSFDGDISTRHFKGFLKLSTCYDGYGPMPLVACKVRCVPGDNGGGSRARIGPWGPASVVATTVPTTRRNPLGPPFKSVCSAQALCSPCIKDHELMGRIYNATFTAHLPYFHEFLL

SEQ ID NO: 975345 - protein, 75 aa, Homo sapiens
RDDVVRRGWPVGAEHGEDSLSRKRIRAGRMDHHQPRLGATRCFLLKRILRIIGYEQHLFKPSTEMVQGCVFKHKH

SEQ ID NO: 975346 - protein, 225 aa, Homo sapiens
MATENPQQFNHVKHDFPTCQGPPHVGSAITRPILDNWDLTDCSHNGLKMQDTLPWIPLFGPGARPKKSDTQQQVSTSLRTTLGVHTPASTTQTAGHLALPGRPNWHLWATSANSPQPRCGNTRHGYFAYQAESWVPTRTIEVENVVQKLLRSKLSHQPVTYLIAYHDPTTKTHTEEVQTTHGCPQPGPSATAATTQGDKASINPVRQNISTDKQGEDHYIQKSTT

SEQ ID NO: 975347 - protein, 107 aa, Homo sapiens
MTTRCTVPEPGLNMRCETYCTTHEGLRRASTSMSCSPVVRDNPAFVSPGFASPLGYLARRTLTQHEPSQPYTSLHKAPQVGPVEDSPFCQNGIGGHYNACPCNAIST

SEQ ID NO: 975348 - protein, 74 aa, Homo sapiens
GRVRRYAGADVLESGHVQARLQLTVVCPRTSNPWGSVGERRNLGGLKTVGSDEAQGVLQEWEVYARGLLQRLRK

SEQ ID NO: 975349 - protein, 70 aa, Homo sapiens
QDIIMRYGARNLLIGEHGRSWFIYICANNYEFANNQIISREKNFAVVGVNHKMYVLEVLMGRYTRGQSDV

SEQ ID NO: 975350 - protein, 82 aa, Homo sapiens
GGIVDACVRSDSATLNPNEGLRASAVRNIYNIVYSQRGRKWKLPSRLIIAVKAVQQWTVLVSRSRETLGSVTEDIPESVRSS

SEQ ID NO: 975351 - protein, 111 aa, Homo sapiens
DDVCQAIMTSDRVPVCAISQKEVYPEHTSAPSKLKIDRALQETDPNFIRYDEQVISTESVRMHGISGKEKIESELTRQNIVESIVTESIEAHPVCPSGSPGLVLIGRLPRN

SEQ ID NO: 975352 - protein, 343 aa, Homo sapiens
  misc_feature (28)..(28): Xaa can be any naturally occurring amino acid
  misc_feature (46)..(46): Xaa can be any naturally occurring amino acid
  misc_feature (57)..(57): Xaa can be any naturally occurring amino acid
  misc_feature (170)..(170): Xaa can be any naturally occurring amino acid
GILNLAAGLHAVKVSTHLSTGHLELLPXPRFGGGPGCKEQAVATLXEAEKRLPCTRXSGEARLREPGRRRLTHRNIAAARWVGPTGELFCGENPFDKAQGGDPLAESTVEGAQGPLVLASLRRLHHSGGQDQGSLVSHLTSEGEEMPGGPQGLERASLAAHVEGSINQIXWPTSRGGSQNHLCREAVKGQTNRVSGSWVTASREGTALELGDTFKAPRDVLPLLGLLETGSTRQVLRNPRRTALRVKNTGSTNSPVKQLNKVNRGAGLNQWRMHRGRSINYGSNTEDDPDFGVPSAPQWTPEGATRGGHTGGGGAPGDRPKFPQGAHETRHSEGGPGEPNTEE

SEQ ID NO: 975353 - protein, 284 aa, Homo sapiens
MIRGDAMCVGWCRFLLMNTAGDSRLCVSPRRRELEKRWIVSRETVRRNQGRFVHAGPEREQDTCDSSAGEAERGRMVRMDPWSRKQRWVASPMLGGRNSLQSSVGDLVTTMAVQDMPLTVTNVSERPEEWNSVVPWCYAGGGVPGGGSRMRPFERKGLVSRSEHMSPAASWGKACCHCGWLVPGGGLHRGFVVKEGRLGGLRTVGGLLLSWRMFLARTASEGCLCRLDRYAGTRLYKLPSYVVPVRFALRWRWRLAITTAGAPWVSGTLHRVVGLSGVLRGSRR

SEQ ID NO: 975354 - protein, 92 aa, Homo sapiens
ECVTLLRSRTVRAPMTWTTVGIPSEMNPVPQMEMRNHPSSASSCWELYGSGAVPIRPSCGSSPVGQFKGKDLHNREPVDGHLLKTNQREDYL

SEQ ID NO: 975355 - protein, 193 aa, Homo sapiens
MASSLVLTVLPSVVYLQEGLSKIAFLNSRNLSGGILRDWNDTLFPFTRGIFVHARCGTSQPSSPFFCLQSWLCTNGKDGPAEKKKLRGAQIAQWIMSYMQRTLVIGPWQVSRELSSPRRCGTLQRYPTYRGSLYCHRKALCGGKQLCSLPQGAPLVELSHFFGKRQHYLFRCPLKKIGVTTRTIACTSSCHRY

SEQ ID NO: 975356 - protein, 261 aa, Homo sapiens
TLLRLMSASHGYPDPERMSPDGMEPEGVIEEYAWHEHLLTRLDGHEPLRSTFSVAILAAYDWDESLCRSSNDGILPLSQGDDVIAQAQSETGKTATFAISILQQNELDLKATQALCPSNPLENWAQQIQKVVMALRRLHGRLLYACIGGTKRAFAGGLRKLKMEGSPKSSWVPLPVCRYAYLKILVRQNTFKMFGTRHEADEMLSPGFPGQIYDIFRGHRNSREFGGRPHALSVEVTKVRRPNRSCRTKVPGGTQSHQDTH

SEQ ID NO: 975357 - protein, 105 aa, Homo sapiens
MSAERRLFSTKPQRALEQYTYNSWHERESWAQTLSLLIRAELGQPGNLLGNDDIYNVIVTAHAFVIIFCIVIPIIIGGFEYTEEFALIIGAPEYGVVPAINNISF

SEQ ID NO: 975358 - protein, 138 aa, Homo sapiens
KRDEEKAKLRKADSDHKDELETGKKDQQKHKGISKDNWQEETVKSKVTVDTGVIPASDEKADDSQSCRTDDNEVRQKARNDKKQKARRKRDRQREPEQQTTKGDPKPNATLLNAYARKLLARLNRGRHDHATTETTEV

SEQ ID NO: 975359 - protein, 68 aa, Homo sapiens
PEGNVRGRKVTGTEHADLLGENLVHHHHVGARLVCLRNLPSRVSTQRFHHRPPLWVKNSHQESTQWLV

SEQ ID NO: 975360 - protein, 251 aa, Homo sapiens
  misc_feature (163)..(163): Xaa can be any naturally occurring amino acid
FALGCTNGLGRDESRRRKKERCPGGRRILMTGMGGQFRPGENYRVFGQCPSSSVYFRRRRNHFRAGGYPFRLGVPSLMLLWEPPSIQLRCTLPLLPMKRSSLISTRWQSGIGWPRQSGVTRSPEICRKNPDLSGEESLCPDTIVVTVLIGLRIPPLSAGMSNXTPKLRFMHHGAKGVIISRSSDVTYHDVTRAISSQPDARGPYYQGQNSLTPWVCNTLAHFRHNFLSMAPVRTTGGPVTQNVHRFQFIAK

SEQ ID NO: 975361 - protein, 44 aa, Homo sapiens
MRLAHDHRMWYNSAQPFIGYQRVCLSPEVIVTDFDVHLGYLRGV

SEQ ID NO: 975362 - protein, 304 aa, Homo sapiens
  misc_feature (228)..(228): Xaa can be any naturally occurring amino acid
GARGRNAGIMEADKDDTQQILRSIARRIINDDQNRDLIDEDYNRKNIQLRKEIQKLETEVQGGYQEIQIQRIILKKEDELLNQWKPPVRMTASWVKIILLSGSKVKLEKFLYEITQKGPALYPLLEKRRKVGSTTGGQGIAVTFHGTGLKIVNSGGTGPSQFPLTIQESSIQVTLYKVLKLEQSNCYWKCLNTWGGDSNERTTKSEALKVPESGGGEVNRVDYMTDSXGGEAISWWHGVLHNILDRTIPSLLNHTGHEVLVHTGFLTVSDFGTQRRAREGARVSMWVNTLRQWGAVRSALTDVI

SEQ ID NO: 975363 - protein, 101 aa, Homo sapiens
VVSIYVQCGPYHGEKTQKSVKIALEQLYVYESEIRGDVHYRTSEQLIHPKARIMAERGQLVMGEGNLLEEPGPYHKCLPQIISLLTLKDPERKNYDHWAPN

SEQ ID NO: 975364 - protein, 106 aa, Homo sapiens
MDASCSKTQKKLGLDKTAINDLQCDKELTCLSSTSCLQHGEDAILDRDSPVIGDDGGNMWLVRVLRPHCSMLWDPVRGKKVPKRCDECGRRRANRSKISLSNREYI

SEQ ID NO: 975365 - protein, 168 aa, Homo sapiens
GQPAPVSFHAVEALCFALSTAYSSGPHCFYELVTLTLKVCNLTPEASKTTSPRRNEQLQTRCLRAVTLTEKVCSFTPEPARPEPTRRKKSETHPNIRRNKSRRATLRAVNTHREGPRFHFEAPGETKNQPIRDTIPTLSCQEKPPLKNFGDNKQPHGQNLLKVEPGEL

SEQ ID NO: 975366 - protein, 240 aa, Homo sapiens
VRSKMGTRRTGKGLGYNSDEIRPRTELIEHLMERWQDRDHHTMTGVMGDHQEIIVAEFHKKFKRGILKSLTMSRHNTSGCETVSLYCPGQEPQWAVISASVKAYNLLGSTRILMPTASQVPGHTEIPEDGLQKSITVIRMLSNEKGELHDLMAEIQTNFQKMSSSTLWREDQLNCGFLTKDRAGSSICMDEEGVRSDRPGLTLQWRDTGSVKPPPPGSRDSPGLASETAGIHALNHPGMG

SEQ ID NO: 975367 - protein, 72 aa, Homo sapiens
KTCRHLILPQEQCPFQFSKGISMQHSVAYNCGCSADVRRLECKPFLKVLMSNSKSSLQLRTERLTIQQRFPV

SEQ ID NO: 975368 - protein, 108 aa, Homo sapiens
AFLRARAVPVLLPSHGSRRGFCYMVGLCHAALIFFAIVATLYSIDELKTDYKNLIDQCNTPEIPYMSRPVMSGQDSSDPKTIMNAGYLGMLSDGPAGANSLNLLAIFY

SEQ ID NO: 975369 - protein, 276 aa, Homo sapiens
GRTLYEGCWRPRVVLADIRWTVRNVIVWRLGFIDGSCFSLYLIPALRPADCRHVPKTCEQGMFSPTLAGESLTLAGPLIERHVLVLNLTTAILNGRTLVVVNNMINHALDFHVITNHVVPRATKRVGSKGHCHVSTGGHNLTFTWDSTWANSYLNTFHLGALFKAPGIPLHLVHSKTLSTLNIYDRKTSTPGSLSGAGYLQRTMALQMFLQRSLVPADTRDFGDYNNFFHNLGLHTPYNLAGNFYNVDIGRKRGTRSPRATYGVNPKVGKTTLARR

SEQ ID NO: 975370 - protein, 118 aa, Homo sapiens
MVPLTAVGAFHCYSSSTAFDFHFNVRLYRFSATWTAQSFCLVSPSLLGTTGFYPGFRIRWRTVASLSLKAGLAVLSHFFGLYGLSAGLFRPLPPPLRALRHPPASGSPPIAGPPFLAG

SEQ ID NO: 975371 - protein, 255 aa, Homo sapiens
MYSWPCVCLPTRYLWWVHVISLLTTKTDFRGTFVDLGMVCLGPPLCSSCLVLTLSPYVGFVPLLRCLAILHVMFLFWPSNLATHAVSEGMPWLPGGMIGRLRVECMLCQTCHGMSRGHNAIVPARSGRVTSASPVRWWTSTKICLYVPVFGAPHCTSRTPSCYCHIFPCQVFVIAGRTDATCGCEQHGWGCLHFALIENFFYDLLLTCVPGLLGGGVKSNWAFKNQGGVSLSTFVGPKKGVFKAKGFHFNIKNAW

SEQ ID NO: 975372 - protein, 136 aa, Homo sapiens
MSVASLLPRFVSEDAHSCVPSTIMVVSRVCWHSFRVPYTHGAYRYAADRNSADGMFCRMHILGVRSQDTVTLRRRDSGLLEMYLLEWSGAFWVGADGGGRVRLYLGGTEAHEMGYPPSPWTITQMVIGLSIATVGL

SEQ ID NO: 975373 - protein, 158 aa, Homo sapiens
MRRAPLIGHRSLLCSVSAACYGPVCAGPRRESWKRECHYLYVCMHVLKCTSSDPIHATEFGKGCGPPFLRPLRESVCRQTRGHLWASGAEHFCALMPVQMLVNQVASARLNLECCVDHGIFAVAFLEDIRLEREENWVNRLIGLHQVCLNIVLSVRSG

SEQ ID NO: 975374 - protein, 85 aa, Homo sapiens
MIQCLRDGTPPGAGNTIMENNGPPDSTGLNGRMSGTLPSRNKGGLRPTGDVTNVQYGVEEGANEGAPGLRKCENRTLSSDEPGDM

SEQ ID NO: 975375 - protein, 110 aa, Homo sapiens
YAKCYPGTMDDMVVDSDEEVDYQQNGTRVDKEGALMAVGTFDTQEEYSDVYEQQEKLCRRFALQYGINNVCRADNQAFKANNDKAELDRQWTEDQCNHEKEDRTMEADGR

SEQ ID NO: 975376 - protein, 267 aa, Homo sapiens
PVQYRARKMASATRLIQRMEYLGVRYNLRELTPPGDLKELNAILAKSPCVRSIATSSPNNLLCALAIGRRESVPPSIIMSSQKALVSGKPAESSACSCHLRKKGVTPAPPIKRWQLSSDQPLPVTLHPHGHPITLPPVDSSRETVTLLYDKYVEPQVSTSSLLLQTTTDTTRQEFSPMVQTQQQQNRTQQTTVSGPTSAPERNGAPKKTSSNHHLPLAPAAPRRTTRDPGQHAVPLREPRATRRRLGSPQIKAAGGTQALSTTPGGR

SEQ ID NO: 975377 - protein, 82 aa, Homo sapiens
IFRETAVEGRGGTSKSAIVAGEEITEDYPVEFHECLSAYENSIEAVDEMLKTMMSVSRNELLHKLWIQLEHANSGFGFCNTH

SEQ ID NO: 975378 - protein, 181 aa, Homo sapiens
MRAPIIKGGHRGASVVASLLVIVKQHPVTKSPLSLHNVAMLLDALRIYTNASKEVVEETYHFPGTFTKVTPGLPCTSLWIRQRINIEWIPITLKQPRGISFHKGGQVARGFILVSRYVVLTNGTLRTGGSRDIGWDKFICLDLLNNAANGSGLSLHHPCPFGRRTTCYIGPNKCYNHFSIG

SEQ ID NO: 975379 - protein, 99 aa, Homo sapiens
GSAILALWASRRLENPEREVVWWAAFCVLECSLAYTCLGPLMADSYTSNTGDGRYSRVVCPTIRWDLRLLLYEGNRVRTQNIGILRANFDVCKSSAVVI

SEQ ID NO: 975380 - protein, 47 aa, Homo sapiens
MIQESTKSKAVEFQKGAPTQVCHPTDVAGDLLVNDRPPLGAKNGGGN

SEQ ID NO: 975381 - protein, 77 aa, Homo sapiens
MCLSSRAPRTVNDLLASHEPSRQYWQLVFPDVTVSLDTELQLDRISGGGHKGCDSRFVSKDPYMKTNTFVSGPRSIR

SEQ ID NO: 975382 - protein, 128 aa, Homo sapiens
MRNGGVSVSRWSLSSQWDKELAVEERARALVLPQGPSSKDFSGMQHRELLDSGGVCDPEYATNLLTGGRRCNKHRGDRLRAWRENPRSHAVWRKKCCQGGDFLESGVFANRRRYLKRDLDEGAKSQWG

SEQ ID NO: 975383 - protein, 107 aa, Homo sapiens
MAIRTYIESKRRGILHLGEALYITGHNTDVMNLATDGWLLGNVASFVCSYTQGKPGRPLAIDEFALSLIICSLRKEGQVTRNVHEPQKAGWISAGPLGSHLLDNCKV

SEQ ID NO: 975384 - protein, 220 aa, Homo sapiens
AFFGKMAESDLTTRIAHTFGSASESYRFLNCSLYREIYNEQELLHGKTLDLLSDTNMVDLCYGCITKTFYSDDILMLVEREKNHSCLATNLKPAFSARKHEPNCERLFEDPKKPTNGNCGSTQGWFRNALCDYLVDKPLFHAPGLIQHPLYRYAKFQYECGDFTQETRRISLSLKSACFPSHRLEHAYSSPLGKAGLCILHCSMVAAIEDLTWLKTTIDK

SEQ ID NO: 975385 - protein, 99 aa, Homo sapiens
WRGPKATAIYGHFSGCGTDKGLLTPIIKDAAAKGIQEIADSVKGSIKESKRWKMCCLKNTKEDVLVFPTVGMLDIEEFTAVINPLSGLHFAGWEVPDLC

SEQ ID NO: 975386 - protein, 72 aa, Homo sapiens
DTDWKTHSMNTHGLYAGHKYFGQFCISWNMSTESSRGSPSKNRNKSHKEYPAKHVPTYQPLNHIYMMLLPIF

SEQ ID NO: 975387 - protein, 160 aa, Homo sapiens
MVTLVVFEVKTCKYGLGQVLPYSGELDSSALVGSSYMSALEVRGPLYGQHRSWLRVKNGAMDKGGDCPIDGKPSTGAVGGCMMAGMTGVQVPLPCSSDQGIPQGRIGYGNGFRVPRMAIGRWGLAKKGLQMVGSTRGLGKGGRRGHTWHTRAPGEKRTSS

SEQ ID NO: 975388 - protein, 317 aa, Homo sapiens
ELEEIRKCGMHNTSVTSRLHDSYFIDLAKGFIVPDNPPYDNGSLQNRTSTFQQSTHSTPPKITFLTTQDLSPKHRTTPGHRSALPANLAAENLEASNPKPTKKSTSLIALADMTPSLTHPPSALHRSLARTLPHQGPAHNTLSVPQLLARTLYTATFIAATPSAHPAAPPTLGPTTRAVQHHAVHARDPPCPRHSKTPPAHQFPLLGHFASLPPALPFASSPHHTPTPPSTPPALLPSPPPPPPPSLPPPHPHHPPPPNTPPPPLPPLLSTHTHHNHHRPAPAPVDPPPRTPPPPRRPAPRPPHRPSPLSPPLPLPP

SEQ ID NO: 975389 - protein, 84 aa, Homo sapiens
YCVREQNDVTKLTRNGRSNEVIVCKMKSCVCKRCVCDPKILCLLRVKSCVTTCKERKESRLAKRISHFDMISDKEAYPKGKNYH

SEQ ID NO: 975390 - protein, 273 aa, Homo sapiens
MAVEIQAVATRLDSISPAISAKHWTSFNDRKKVIRHVNDWAHQYATPHYCQDMVTPIPCEVLPKIPMRFSPQPTKFKCLRNNNLPRAYYLAGLRTTLPLLIAVRMAWPLDTRGTPLEPSYRTGFTGHPGDTVGEFSVFIVAMCSSGHIRLHLGLPLHWSPWVQSTPFRLTRETSGSPTIFNNSKPFTCTIGTIHNIKSATVGSTRHNVCHRSCHKDSVYLGSAPKGERQLPMGISSIARGERIWSNSQVIDLGGARQENAPRFFPSCPNFPFG

SEQ ID NO: 975391 - protein, 148 aa, Homo sapiens
SCAKDLTTVLRRILLKRLCGECAVGACCGCCPRQLKARDIMVRVSPEANERLRYSPEEQGKFTLSGWDAAKNSVDQKFTIFITSHSKQSIFQLFQGLCQLLFPIVEDPFFTSEVGRNNPGNLTIFGLGYNITWIPLKAYIETDSPLKT

SEQ ID NO: 975392 - protein, 219 aa, Homo sapiens
ARENRRTAKKRTEQKQNSKKKEHTNKKKKKKQTKKERKTTKRHETKQQRRQTKKKQHDNTKKKENDNTKKKQYTTTTDKNEQHTKNRNDEKKTNKEKEDTAQQNEEAKEEKAETKEKERSTKEKEETAEETDERDKKKRKRERRKREEGSGMNGQEEKGTGEEGGREVTGRGEKERRERSSRDRRERGGEEREREEERRGRARGEGEQKERESAKSGRE

SEQ ID NO: 975393 - protein, 81 aa, Homo sapiens
SDPYKSFLILNWVRCRCCCSCESRTVANMGLEDEQKMLTESGDPEEEEEEEEELVDPLTTVREQCEQLAEMCKGPGAVELL

SEQ ID NO: 975394 - protein, 300 aa, Homo sapiens
LAPCRAPNPAMERPSLRGLSSGRGLLLLLLPPLLFLLFGHLRPCERPPAPPLPPVGCLLGRDPGLRCGCCPYVRPVGRATRCRGVAAPGGAVTCGAGAIGSCVKNPQECEVRYHAVGSNAGGPGETRRTLLPLCKEPVYPVVVAASKGPNLPERVYHSWRAASNEGAEKPGGRRRNHPGSDRGTPGEQVCLPIEHVCEEGTPVDATLSHLEHRGSILLVTSAAPSKLVTPPKGNLLRIVLSAPGGILTCGGTCGNTEDLSAIVEQVNGGSMGQQDKTLLERGTVPFNRCGKTIYGGAHPR

SEQ ID NO: 975395 - protein, 362 aa, Homo sapiens
  misc_feature (277)..(277): Xaa can be any naturally occurring amino acid
DAGRPVDGNAVSALGSGPARGARTLCSDKSSETQSCAPPRPLAPTIAGKPATDPTNQKCPPSAPRTLRPLSLPAPFSFTGFANYPFWPARAQLHAPSSIAHCTTLTPRGDASVLPPFPKHVLSPALGEYFVPLTPKGRNQLVYRLTPGAILTCTFGADHYETPPTLRASDGGAHPHYRSPPSSQQPALSPDKTSASLSCCAHITAGSLLHTLVRAPSTAVATHPRPAAWCPHADNRSNRTSTHSLPVPSFIHRCAPPHPTNSRMLAPNTSPAAIPLXATPQLTMRTPTRSSINRHAAAMILPPLFISTPALGNRYSHSAPPSCCAPPHFSQTCRATTQARVRPAFIHSHVRYIQTHVSARPR

SEQ ID NO: 975396 - protein, 67 aa, Homo sapiens
GTHRLFRFCGLIFLRVNRPAEADFAGVCGIRAQRSSEFGYTHGWPTWRQGWDLSYNPDTPKIWCKKQ

SEQ ID NO: 975397 - protein, 108 aa, Homo sapiens
MLITKSVLTGPARYQRSPKPSVEMYISAGEHVKVHRDLLVTMCWVDHVQIDIARKLDKAESRAPAAVRYLLSRSWEQAAELNACLRSYHEEVTHPCQCRETSVDEAAC

SEQ ID NO: 975398 - protein, 101 aa, Homo sapiens
HPGAPKRRGSSGSVVVDLLYWREHKKTGVVLVPAYSCVLSLTVSSIVSVNSLTLPLALLSVTISLGYTRRVIQAIRNQMKAPIQGISWNLKLLISEEWFQK

SEQ ID NO: 975399 - protein, 236 aa, Homo sapiens
GTKTAMAAAEEEDGGPEGAKSRSGAGQGATFECNYMLGECFGKHVVSVCGAPRYTCMDHGHFIQIGWEDHGPRPGATKCPQYCTTLENQHEDERWSQTYYAAKGEGPGRPQRESTAIKKRPNTRTQQGTKEEHTTGAAKRENYHGTLRTNTGGAIHSVPTLEKIAKHIHHLMHIIHNQPGIIKGDTIESHIDPDRGYQIVMRILEQQGVNTKSIPWLGHGNAHSLHMYTVAKEILA

SEQ ID NO: 975400 - protein, 218 aa, Homo sapiens
MAFPMKDKHENDCTSDDSVNILIVRNTLGGTTLLNCRLGHQGRQMTSHLNKYCNRIWTTPTPMWPNILPFTKGPYICHFMGTPPSDFAKIPMQKIRARTCFGESVDPIGVVRDNRGSKDFFPSVGRKFIQMVQGSLGNLGLFMGSTRGNPIGHINGLIHAELIPESPQEVHGIWPAGNTVSPRGYLGSLLSSAASFSAPLGNRTPLLQGIHTGCARRL

SEQ ID NO: 975401 - protein, 409 aa, Homo sapiens
GKTEWSVLPALGTWGPRVATGWLHAFLMISCLNSKFEALARWQNLNNSCDPARYDTTTFHITPYQQPGTTLTRHSYILERTVTYHTNLPSDRNPNDLTRLWASLSGTRTLASTYEACPKPPTLTALRIATTFAPLDDNPTGGPQTSSSPIPGYPLIATRLGGKGTLGSHTPRSPGQQLQRSLGHPTLATYQPFPTRQRRSVLQPNLGYRPAKQPGYAWWISSTANETSWWTQAHTAPDCPRSFGPGTSCDRTRQVTKGTAQNVGTKRPTTLPTRILHVTRLKSELRPYPFHPWQHTSTPVKPTQDTYLDAQQGAPFVNTFDSHRATPHSRDHLPLTPPTVYRRPGNPLDTTQITQAPHNGPRPLSQISDRRHPLANTRAITAPTGHSAHTGPSIERRDEAPIGSRGQDS

SEQ ID NO: 975402 - protein, 102 aa, Homo sapiens
AKWIVIIMVPLGTTVLLWSLLSMWLRVWKRVCVRARIQALCSVPRPWLRTLGSLLFAAMRCCLAEQVQCSDGPGESGMPRDHKNTYNQWMMRMSKLAYSTDN

SEQ ID NO: 975403 - protein, 74 aa, Homo sapiens
SCRTIHHESSDDPPEYQPHLDSRSETIGAVYMLWRWEEFAIVYIKVRITRRLSSITCEICSLDHERDTGHYLTR

SEQ ID NO: 975404 - protein, 186 aa, Homo sapiens
TDHRRQRYGTWSPGREQTNREDIREISINILSPREQHYNKEEKEKQQERIDTKTKQKDQMTPTNTREKTKREEKKNDETTEQTNTQNTYNNRNIDKKHTEDKTDNKKHDETQQNHTTKRTSPKRHEKKRGTRMRDGNPKQEGNTQNRRTHRRQHRKQSTAKENKQDQDRTTGPKTKTNSRNNHNKE

SEQ ID NO: 975405 - protein, 271 aa, Homo sapiens
MRRDMIFSTECFMPKIPACLSSVYTCLICGHFVALLGPNIQGSMTKLVSSDALLYTSGATLMAPTGASLLAPCSTLTSLGTPEQRNPLRKTKDAKLPPKAPYFHVLKINPGLRYPYPPETKHYLCAQGGTQHLFPCLLPPLGSTWQHGHTASALPCGHASPQVRLMVSAPGHHRVATLPPWELCFRESAGSPLCRTVPPALGSPFRATHPSARHTCVRPHEPLLFPISPHPEQVSSLPRVYALSRAPAPDSPCERPTPRVGYSAAGDGPAC

SEQ ID NO: 975406 - protein, 122 aa, Homo sapiens
MSSPRTSLERTLEQRATKWDEAMLKLNDHLEKRYNEGPIEKFVKQEVYEYHDDITVTNGQNAHRIYVERNGNKDTLSPDGDPAIVHPTMQFLTHHHVSMRMWQVRAKNSTAHMTTLTHESSY

SEQ ID NO: 975407 - protein, 195 aa, Homo sapiens
MLADLGRSSSLTQVSGGRRRVRPLALRLLKPKPARLSSFPPACSGCCCQVRSPCSRRAWSRLHPQEGVGRHSRTSSTRPAWDISSSGVNLARAWTRPTVSYGAAQPCGLRASIGYRDDRNWAWAVNLTSMSKNTYQCAGNEDIMTLRADGERGYLGLVLKHPNQEKVSDYESEVEDLRLWNNVGIQKGSKLCRTD

SEQ ID NO: 975408 - protein, 163 aa, Homo sapiens
DSPWGGRGARTWGGESPEPQVRPWAAGGQARAGGGMVAPRHLPTRSLEAFAEEVGAALQASVEPGRLTGGGPGRLALALQAVHVGVGPLRSPRGCTGRKRGRSGAVAAALSRGQRFGGLVLSPVVKAEQRPRETDRLGGAVGGRRHRLFLGMAGRDSVWNRWR

SEQ ID NO: 975409 - protein, 103 aa, Homo sapiens
MGTVTPEPWTGALRWEHASAALKSGTAPMNGRSLEKAVQPVHWLLQSADFGSVPLFHPRARPGLAGPLASCATSVARLARLVSSPLFPWPCSLPLGTRMITRP

SEQ ID NO: 975410 - protein, 260 aa, Homo sapiens
LYACFSSSKGATTCAVASAIDVRKSPVLGQLEHQLVVTEITLPKEKLFGTIFSSGDGQMCFGKQSQTGFPISQDICIFSLNRVVNPKAIYDMQWIIMVRMSSHARLLTPSTIYAHATVWPDDNYADPLDLTGSERSSFSWEPLALDLSPSNGDLASPDRKHACVHQNFCRDCPSRNLLFNVCYDLDDLVNRPPSIVDLPFQRVHGLHPCMYTRHLTSDQTLHLDTLPTVTCSNTTLSRNRLSHPFTITCSPNCTPNGQPH

SEQ ID NO: 975411 - protein, 163 aa, Homo sapiens
MPTTFQSNFSLSVPSAIRHNRDALVLHGFALNARWVFIEAVLWYFLTQVCTGDVRLPQRDRVLSRGEPMPRLVPCWEILFGAVWKVTLSCYKQSKVICISLYTIFDVPCGYTKSVLRAGGCKVALSPPGCFSWSRRLSHLWLADTFLGCVQGFSHKEMCARRV

SEQ ID NO: 975412 - protein, 230 aa, Homo sapiens
MSLEPLAFIFIKYPLHSDSPGGDPKTLSGAQACKKHKAPGNISPQPKGEPFTQWSRHATGNRSHGDQQWSGHIVGHHENRAPSCIKPVDNLPKLQRHTFWGRHPQETRLAPTIATVYPHENAPSWPNRNGVAAQRTPTADAQRASQLERRRNWHRKRKKKPHWQTLEPNCKRKRLGSLHTLNSARKTAVTHTLAHETHMTRHVDRHALNHPKANCRNETLTERYCQNNTA

SEQ ID NO: 975413 - protein, 51 aa, Homo sapiens
MRFGVARLGPMSGNVNDGQIGLVGLSEILVNDVDDRSPHQVNTHARSADRV

SEQ ID NO: 975414 - protein, 66 aa, Homo sapiens
KAAGLTIRVHEVRATIVDGCCLKHFTREQGGLERSEGGTDGLQFERAELSNMIAKLAQNLTLRIKP

SEQ ID NO: 975415 - protein, 232 aa, Homo sapiens
MVCILWLGRSELVPDYDIGACSAGRSILRGSTVDASKGQHKNLPSGLSGPRIILIDTGRNGNFQKYIMPVFKSKWLINVVDLNNKSNVQVEVVRLMSSWGTQRSFWEALRRYAVNTVIYLMRHYLIARYEKCALRKSIGQYGRRIMGDTWRAEQLVLHLQEDGRCDLRLEGSHSEEFYYYPLDTLDDHMALTLRTHGRMLSLLEECIPRGREAPGILTTLYDSSDPFHLESI

SEQ ID NO: 975416 - protein, 87 aa, Homo sapiens
RGRVHSGGGNVSRRETSWFPGVGSPGSSWKGNNGAEGTAVAAAAARRPSRICSAPGIASSVRCPQASSRDRTEDMYSSEKPWTADLG

SEQ ID NO: 975417 - protein, 148 aa, Homo sapiens
MLIKIKIHLKLPNGKDVCPGALPVAHRRFYTVAHKCERSEQIPEKKTGGSHFQGLLSRKAHVGVLAGREPSVPSSRSQVVWMQREGAAATHLHIPPGPLGPVSSPCHTGQRVPWAPFVALLAHVPRVAPPGHEEQRHRGGPLGSPSSV

SEQ ID NO: 975418 - protein, 286 aa, Homo sapiens
  misc_feature (148)..(148): Xaa can be any naturally occurring amino acid
MTDNSQHITNTYESYPRGTGELHVGEEYKTYNNETPCIWACDTIMGLRFRVFHVSVLRGKPSACVGHWLAYARLALKTSGKKYYPPRKYARVGVTFHRCIPLTPKNTQFETGTHLVLDKSLPSWNLAATNSTLTFLNPNTFWHQAARXKPGQTVRHKLSRNGLRGDDLQLRIRLSDPITLKIIGPIKSIGWKLAFTSKKLLQPVHWGQTLGPGIPLTYRTQTWDITLGKVPKATGSHGPFEPETNLKCNHRVAKQGKYEENTVHAIPTAPPGGPRYMKAAPRPRNA

SEQ ID NO: 975419 - protein, 81 aa, Homo sapiens
KQAWAMAGCPSANLACRACSFDLRLAVLAISEIPVGVGPSETRCWDIVSWLHQFFNACVLSTAQYYAVCGVDPEYFPGSNL

SEQ ID NO: 975420 - protein, 195 aa, Homo sapiens
SGAVALAARCGEAGLWAVMYYKLSGFTAESWAGAWGFGGPIGPAVHKSRGGYPKECNHLIHIGPPTRLKIGPPGSPPGVLNIMRGDKNQCSQKLNKKVFSRTRSMVVARFIPETGGLPDPNWIKTGTNNGELNGGKEPILMALDRHLLNGLSEAQQTTLKYGCRSAPWIWRHCGQSPTLLESFPYRKHWSKLQSL

SEQ ID NO: 975421 - protein, 226 aa, Homo sapiens
MRRDAVRMRVRAAGPGPDMSVLVKSKASMGAFLPNQDANNSGIRNETLKTGSHLQRPQCCGFTVMRPSDCLGGTPVNAMETPFQPAKDSLVDPITLDILHQIGITSHLWRAPQRFGTRFSGGLLYQEKEHPSPKTTAGILYYYQVHWGSHRETTRNYSGERTILKRWVHGRYGKSHNSNGWRVKTPKNQSLFLVHKDCSFRRQWGHHSHNYTFIAGNFVEVLKRST

SEQ ID NO: 975422 - protein, 126 aa, Homo sapiens
  misc_feature (105)..(105): Xaa can be any naturally occurring amino acid
MIIRSDVKLASQALITTWATALDRTIAERLQVAAFAALMRQICERVIGEAVAIEHVYCCDAQIVYPGEVRQEGSSILMEFIRTGNRTRHFVDNIDAFPDGSYGAXIGVDHYTVIGRQFHFNRERGS

SEQ ID NO: 975423 - protein, 72 aa, Homo sapiens
GSDRAREDCCSPFAALILPSHIGHHCSHVPVLWDYTLWDNAVVGRHCTHGHQKLSDTTQNRGPHHTTVTRTY

SEQ ID NO: 975424 - protein, 68 aa, Homo sapiens
MCDNNTHKEQTPKEYTQREKTSVEKEHRNKTGVTEVTTRATKRPHVAQTQNRSTTKKHTLSKKKITAK

SEQ ID NO: 975425 - protein, 128 aa, Homo sapiens
MSGPCQGDREGREGRPAASCPSPFPPGLLVLHLVPRLASPPCCVPCAFHSASSFHPVAVTRQRPQRMETSASGYGATLCESSMYLSLPRCPFSTGTEQCRDSGLDQFPISYFMSHKFFSTSGANIHSR

SEQ ID NO: 975426 - protein, 109 aa, Homo sapiens
DRFPGNWSRMADEVIVSKSAIMAGEDYYMNDYPVEIHEYLSDVLRIPLVLWMRVLKNLMSVSRNELLLEVGSEIVTKEKWIWSSAVQHYIQCVGFYLATQGVNPKDTVQ

SEQ ID NO: 975427 - protein, 167 aa, Homo sapiens
MALSLLPSQVPPFQLPPMLRKRLPKKEPAKKRYVESRGAEVVRLTEAVKARWLSFSDNDYSSDVSAGLPRVEGICRTRANFNFFPIRALPYSSPPFTLGSCPRNFDGTTEMCPPASSGTTFQVIYGVLHDFNVTRTPSPRVWNPWVYQNHGLRKDSCQKLGPMAMTI

SEQ ID NO: 975428 - protein, 105 aa, Homo sapiens
MSENTVEGGLENTERTSSNSGGDGGWKGNGFTVEHDIVYDLWYVDIGECIFKLTRPNFPPLEIYGKKRTIKIQGQKGFINRSGGGKYRLNIMWRKHSDFVDLFIK

SEQ ID NO: 975429 - protein, 200 aa, Homo sapiens
MPKRGKVSIVGGANPKGSFSDVHTNGSGKTTSGLRYLQGLLPGMNMLAFIPPATPDRIWVLEVQPIRKSKLSTSLESETGTWDHAKKVTKHPNHPKNIQHIIREQWKQANMVMGAGRRGCQPAGPGRACVRAKLWRVPAEDTGASPPGGREGQRTSPPRGWGAIICPGVMAEEKHTGPGGHRPRSDWGPEENTKGYPEAG

SEQ ID NO: 975430 - protein, 280 aa, Homo sapiens
ESRLLHFSGNLPTKEADSFRLEQVRTRPSGVYQSRRPARIVQGRTASGETVPSKGCGVISRFTFGRNLYRLGSSSCVWPPTTCFKAPMQFTSISNSCDLHCCIWGSHLQLQGLPPQFSPTEYLPQSPGGFTVNQNQVLSKRVVKPCVTLYFNVKCSSTLRVMNIWSSGGSNTMRWTLELAASHAESTFPSPRPTSRSKCCGNQYPWMETGDHDSVFYLGKLTNCDNGFSNSLGPALGFIPVPRPRTTTSGGLIGTVTRDQRGFFFGALHAVSVGSPQFGS

SEQ ID NO: 975431 - protein, 285 aa, Homo sapiens
ELCDGPERGGAMLYPTPGRGGAVGVPCTRPRRCCNPHQPTPFYIEDICGRGPAGAAVPTLTRSLNSSFTSLVSPYRTPVYESHAMIPLRPYSHHPKPFGTCHTHPAELRGALLGPPFLRDRDESDLKRASPLHSGQYPHVLKPPIPGKPHIFDTKCLTVPLAPLHRRLLLEKISPNRYMTTSSTPLTQTKQCREEPPEKLIIQPPAAAGGKPGLGPNACSGVSITSDAVSSTWVMRQSKPIVEMALSNKLRFTFHPTSICQTGITATSLLTLIQWSTHSRCSLGE

SEQ ID NO: 975432 - protein, 169 aa, Homo sapiens
MLPEGDEAISILNTGTQHNCTYGCLRAGIPTSTGKTEELHNSSEAARIDAIRTIADHEKPPDDLLGLHRQRIIVTSRLATTMTFSVHYTTDLIRTVPPLLVLQGGALTHPSWSAQQQFVGERHLCSCPNSHGGPTLDSRLIAHAALFFLSQVFHIYIPALLSPLLTNHS

SEQ ID NO: 975433 - protein, 248 aa, Homo sapiens
EQLRVGPEGSGLIASTAVLRRHTRSGGTTTIQTIRIRPITTFSYSRFGNLTRHRSFVRDTLHHIGVLLSDPLAHDNTGFSDMVRLAPHISYAPHRTAPTARASHQGRIQTPGKSCNYAQARTRWAGARPLAANAAHVRLSKSYWATPLGPRGPQFRVNGPPTKPLFHVYLPWGRPLSIRFLREPPGRKLATCAGGLLTLEHTAAGPGVVKTPKPLFRIPPHGLGTHLADLQDRCTGTTALSRNSRSLF

SEQ ID NO: 975434 - protein, 84 aa, Homo sapiens
ERRGRVLKPRARRGPRAPDAEIREMKRWGRHYGTVFKAKNRETHEIVALNAGEAWMTMMRVVRVPPSGDLPYSGAEHKNIVRAS

SEQ ID NO: 975435 - protein, 30 aa, Homo sapiens
MCPKPYAFVFGFLKSVTSHVDASSSRKAHW

SEQ ID NO: 975436 - protein, 116 aa, Homo sapiens
DRQPGELPGVPRERCGSSPGASGGDYPVRSKRYLCKLKNMPPKFKRHLNDDDVTGSVNKWKEKSFEDDSDEAKRTFFLRGPSGPRLCARIDKHYSMFRIIVDEVMMSCTEHYYKGN

SEQ ID NO: 975437 - protein, 193 aa, Homo sapiens
MGGSVVEFSPATREAWNFPWVLPTHQPMTQPLRECTPGTTHTHLLPVLDIPSEPPDFREGLDRLASPSQMAPTHGPPGRRRASPNCAWGHQELRILPKLGGPLQGPQLQPFKDPPRQSPGKYHRAKASLGPRGELAFQLRATGVMGPPSNVAWSRGGPRSSCVETCIPEREQRRDEAYVYLLGANPISLMNNK

SEQ ID NO: 975438 - protein, 123 aa, Homo sapiens
MHTSRDVLNQTNFHTVHDRGYYTGQWLCNSGEQTKFHAIASEISLKLWNRAVLPIAHSNPLKKHTKNVGRGHQAETPGGGQENRPCPERRRGPNTGGRTGGPHSEPRGTASPPTSTEKRRDAT

SEQ ID NO: 975439 - protein, 234 aa, Homo sapiens
LYLVPEVGREKGCDGGIAASEVLVNSARRGPSLRGGGGPIRKREQRLRKIRGSLHLDGKFEARKLNHQEVGGRKIKDLRITLQFGEKPKKSSLGRWGKLKGRREKKRGCGARRDERYEKRGTWVKDQCKKIAEKMGEGKQREEKPCDRGFTRFMLLAKYGQVSIGLTKRIKLGCGKHLRDLGENSGERCFPKQSNRFLSWEQVVPYNRGIGQGGSLDLKNSLEKGENYGGERFL

SEQ ID NO: 975440 - protein, 84 aa, Homo sapiens
TVTATVAKGWVPETWRSGSPVCSCVRVGAETSPGQVVTGTVSGGRDSRRVHQQEETPGGRNLRQIAGEAARDPSLRRARTVCGV

SEQ ID NO: 975441 - protein, 71 aa, Homo sapiens
MLLSTYVWAGSQIGLLEYEMHSSVSLEIPVNAMTWLLCDSLASKLIDKRSGEITGPGSRYAIPAIADRGGR

SEQ ID NO: 975442 - protein, 188 aa, Homo sapiens
MGIFHGGAGFLDQGNLCGIFREVLTHLQGHTSAVQELRDKKLPGITGRYQNGGYQIKYGADVWVTRVIIALREAEAGGKLEPEEWRQAGTLEEPSLKERWKMTGQGGGIVIPRLEGHNIARETRRSEIGEHGPRGDTWNPSTRKNNLSHCRERTKTLRLAKITPWRPKKDSPKAYGATTGSGHEADKP

SEQ ID NO: 975443 - protein, 122 aa, Homo sapiens
GVGGVILIRSGIEMAVLWRHECRNAVPLRRTRLVFASKSQWSDPCSYCSVELYSQRSRPVSSEVGVDVAGQVYTLSTGATDVWWLPRAVTLSALDIAESVSSVVPVLESCCRLLYVLKSLLV

SEQ ID NO: 975444 - protein, 142 aa, Homo sapiens
LGFTRLVRTVFWVALNVLCSKVLRGKTQGGRLACHYEEEVEKYEFDGVSTQRGVKQQLLGEMSARSSEWSTRYETQIDLNDELEKANGVSQGRRVEKIHGKLFRVDYHSYCVSYERMPVNSMRLQSRGGAVVYNAFRNPGFP

SEQ ID NO: 975445 - protein, 323 aa, Homo sapiens
AAMAASSLTVHLRSRVASACSHRHPDYLRGPGYRPPFGLLLESSHSAMQPHSYIYQDMLPKTSLSSPSFVPSKKYCPDPVEETQDTIAKKVVKKVNVDDRHRGSMGQVSFVRWVQLSRDRLVDRLTSCKTCSYHLEMNVDLACGERIRLENGPADRVHDNFMLPWKDTPREDGSCRVEATVIEEDRIMARIIMRSTDKDPCRRKESSEPADCPRITTIEMAPGRGLPSYDLHRVRITSASQDGQRDTQKTWAGLGQGTLQTTVWAAGPVKATLALVPTSCQIVGAPKKLGTVLTPTVGWSQDALAPAEGRSWEHAYPSHRVRF

SEQ ID NO: 975446 - protein, 316 aa, Homo sapiens
PSTSAAPRAGAASWDTEEAVERAKVVCQPVSPDAQSRASVMMVRRARMARPCIHPCSDVRAVSESMHTDEYSGIMGDRRPERLVGHWRGHLAVFKVGAQTWGVFRVIQRECKTMCMSRSRHWDEVHCPNLYVVHGAVDNVRSGWFWWLVLQQTLSTTYHGVYAREPIRWKHQWCLICYPVDLLCMKLWGPLWWDARCPRFVGHVTKISWLTFGFNNQLRSVVLVSYWDPKTEYVVHADVGIATHIMHGGHPAEGMARGLFGEPARKVTTSWGGPGRQVMVQSRPKVAPKNAGARCNQRGVETGRVSTGGPTAGTRQ

SEQ ID NO: 975447 - protein, 113 aa, Homo sapiens
YTKKRNKVRLYKNHLLRAECHCDREELQKSVVVYGLSVSSLNRVSELCESQHLGAKRMQEESSMHWSVQSVQREVRPEAFPTVQISRVCFEVISFLLDYFLYFYMYGVIAFVN

SEQ ID NO: 975448 - protein, 190 aa, Homo sapiens
YYSQVATAVVIHSDKRMGEEVLGLQPLETELDDVVLYIATVHQLCCRSSLRQGGRCVSALQILCASADVLPISPWTFRLLLGCILGYVTSCHNQSIALARSSEFGIETQVGLASVGPKEMVARNIHGRPVIEFYGCSPYRNLACIHQRTMNPGVNEQCVWHVSSSVCIRVQLESHAKVCVNVPDDSYHDP

SEQ ID NO: 975449 - protein, 218 aa, Homo sapiens
DSRNKKARKDGGPMPRGAPSKGAGRESMETGSAPFILILVLQLLLRIRRNRQQRVPPCPQPPSLFPGCDLVVERLSFKTTPMDADRLMFAWDHSITTCTVVVYNKECHFNTLTGHDAWEGANVTSYPVIVGTRMSEAKKPSELRLHIVLRNTYGLTHTSEERPLNRCQTLSPVVLQKLRSRYISQMDGMYRLAVCNHAIGNRCAAIHKARIDLVAVRS

SEQ ID NO: 975450 - protein, 64 aa, Homo sapiens
MRGGGGRPNVEVRESTWVANTGGSPEGENPGASENNRGAGGIPHHMRKHPPGGGNPQGGVQEER

SEQ ID NO: 975451 - protein, 75 aa, Homo sapiens
VAIGMVSFAGPVVIPVRLIRSQDVACQKEVVQVRKRINEEEKQEELDSMCSSCLCAARHTLTYFDEELRSFYISP

SEQ ID NO: 975452 - protein, 97 aa, Homo sapiens
GAASALPVRWASGEMAPSGVLQFPCSPGAVALWVLPGRTGLGEQSVGVNQGTENVERTCLEGDLMIEFYALVCCCVLFKIFNGKWESLAEWGEDLGG

SEQ ID NO: 975453 - protein, 297 aa, Homo sapiens
MSLPWSPVEDLAARRVLSRMFLLPQMEFGLSYTASLGHLYVDKRVAKIICQVSLANRAPFTASRHWTYGTKLVGGTTPGKEARHIWAPVFNTVKEAKEQTGATDSVTLSSAFCCVRAINEAIDGRNTLGVCVSLKEFPSRTWYESSTKCAPGTRHGYIGPNALESSILESVNLGSCLAYSQQSGRTWHCVRSGNPTNEVGVSINARGHRGQLCDENSGAILIDARIHDAAKPRPAGHEAQWRERCPKATSWEHTDHPRQKIQRPDKSSARDHRAEHQNSNTSHKQKHRAKTGHNMRR

SEQ ID NO: 975454 - protein, 213 aa, Homo sapiens
AGSTRRWRVDPASDEHGHCCVLLPILSLISCLLQSPITEGVAATRACLNKYQREGAEAHLVDLSDMCVPSELQDQNLHDCAGSMFTIDKVVRQCLRIAQGIKVRSSRYIKISHRLVLGKSDVHSVSREPACYPKQYYSRNHRHTIRCKRTPKVTHWIQYHNGRTTAVAITQNTHSASTLDKRTLRSPVRDPGYFQRPNMGLPWPYYHTLVCVS

SEQ ID NO: 975455 - protein, 115 aa, Homo sapiens
MVCSFTQEASETTSPRRTNNSRHTALRAVTLTGKVCSFTPEPARPRTNQKEETPNTSEHQKEQTPDTLPLSNCNTHREGPGFILEVSETKNPQIPDTILVHEIDRLIMDFDYGSF

SEQ ID NO: 975456 - protein, 74 aa, Homo sapiens
  misc_feature (6)..(6): Xaa can be any naturally occurring amino acid
  misc_feature (61)..(62): Xaa can be any naturally occurring amino acid
VGSGTXPRILPGWDFKVSDDAFPSQVQTLPSSPACAWEPNWGGWANEEVHFEPFREITMTXXSPFMTCLAQFYC

SEQ ID NO: 975457 - protein, 109 aa, Homo sapiens
MIDVATQSGDELQNMTPSNGIPDESQWLRVGHPVQVQGHSRDRNTCCMDLRSGAFGCMWRSRRSMDSQMEKLGDDLNFAVGMLHVEMSGTHVVGDSKITVMKGVEEENA

SEQ ID NO: 975458 - protein, 319 aa, Homo sapiens
MTRSAQHAVFMLDTHSLTTADTPLLFLSCLLFFFLSTFYFITLSTPIQDTQNEQTYTTTNTQHAHTRTHTPAITRQRPTLHPQTPKTEKQSRRERKRKKQRQDTNRAREEAEQRGTQKHGEKTKEKERKRRTEGEKEERTKEKEKEETKEDTTNEKTKAEHTRNNTKERRRQRNNRQERKEQAKAREKEREISTKKQEKTRKQKRDKQRKKEKTKTAQQRKTQKEKENEKRAGQRKDEKQRTERAKDRKRQKEEDNRKQKQTKRRESREDTQTDRKKGKRKTAKTRRHKAERRENNGTKKEKAEEREGQRGRKPAEEEE

SEQ ID NO: 975459 - protein, 506 aa, Homo sapiens
  misc_feature (186)..(186): Xaa can be any naturally occurring amino acid
MSITREHDALGDDPTWCVGPPTENSISKRKRARGNFFSIVRAPYMGVASNIQGFVRQTCTWDLVETIGTGLNATHRDPGLQPFWHGNSKTVGGISWPNVASLSHIYRAFVLALEHSRCGPICYTQKNTTQSANPIYIKTRKHNKLAQTKEKTTCVRALINHNTCCGGRNRHSVNALIGVSKAARIXYDDLSSYARRDDDQPDECPANCVTTTHDNEDEDSIRIMTDEQRARHITHNTRRENDRRHTDDINLIVLTMTDTETATDRLINVTLSASQQQTVKLERSRGEGRGEQETQEKKEREMRNRGSETYTGEQHGEPEETARASERARAGRQTPGARQPARREERRAERARETKSREWKGGEAGREEQWEKEEGPSRQVEQGATGQRRENRHKTADIKALTQQDKTENRQTEKNETTDETRKTRRQRGKKAAENHEQEEAEGTRSEGTAEMKQTLGRGKHMRPRTHQPSAARAAHRTTPIEITNHEVKQNKTIEKHTKEHTQTTR

SEQ ID NO: 975460 - protein, 690 aa, Homo sapiens
  misc_feature (281)..(281): Xaa can be any naturally occurring amino acid
GAHTVACSSRLYQLDARITFVCRQPGIGEAPPAELSSILPVPTFSHARDLPSTLRTSDQLREHSGLCRMDYEDPTPVTDIFLGRQPSFKSTDQCPGRPALGICQAHNQDLQCGRPIDGSQWLVLYPCLYSFHPDIAIVTNHGQYPGIHPVFVSVWLVSSETSNCYHVGPNVEANVYGIRKHVLDPVIIRKRRPRAHNRNSTYQLAGRRHNHGKRARGLRTLLRAIKRTPRLAQGDARTKALGPFQGETLWARQPRQQRVHNKTPHHTPLRLRAVVATSMMXTSQTGESKTSTQTTRRNDTRRTTSHSEASHPYIATNEDTSAHDTQQDNQQASQHNNQRQPTTQPARKEQQNSQRREQEETPQDRETAAEMHTTRRVAHTQPRQDMPSENKSRGEREEERKTQSEPATGEQSDNEERTTQHEPDRTEPGEREAEASDSEYKQSRERREAQGAQPSADATQRGSNKGTRETASKATGQSETATQRGNERYAKSRDESKEAASQRGRRETAEQRDNSEEEQEEPNVEQQRAESRARSSSTPRETQRGGEEDGQKVAQAGSEGTSDRKRRKSETRQGAQNRGQKKRTEREEEQTGSEAKGETARADKRDRTGAAKERSDEPSSKEVGEENREESAARGPAQKTKRRLQREKAGASEQEDKTTPAEKAKTAGGETRERREQRDERREGRQEGEM

SEQ ID NO: 975461 - protein, 496 aa, Homo sapiens
  misc_feature (313)..(313): Xaa can be any naturally occurring amino acid
VLYHHKVVQQKLLLLILLKLLKVTTLYPMDTDSGEFSSVGEEEIGIILSHRFLRPYGLDADEWIWIPNGVQISSVNPAGEVSAPSYPGYLRIVRYRDNSLDTGSKPSIPGFLQSLSTGIYPLVPDRSPVLKCTAGRLHVFLIQVLQAAGCHSEGSTCPLSYHTLMTEEAPKHRQRQPVDLYGIRQLDTAPQNRQDANPGHTKTPPSTLKKAMGTDGNRWHQANTADDHRTRRKGTAPTEQPPSQRHGTPTTPKLLLEGPSEPNASAHPNLVPNRLTSYHRTVPRELHNQSYVPNQPSTTMWSFSSHYLFIYLXPLLTDPSIESHQMQSKTQQSQRNTYTEKQRDKTETTGRAANHKTQQSNGKKKEKQNEKNSEEAANDETATRNAYMDEQQQTNQTESQQGDQKQHGNNGQTNNQTRQHDLDTVRHDKSTHMKATKYRSQTALMIEPSKPTNSNYSHQHTISNTHMTHLQTNSNPYNSITSIVPRIYTTAYIIIY

SEQ ID NO: 975462 - protein, 529 aa, Homo sapiens
LIPKQTSHPQTPLSTQTHRQTKQQQHDKAEKSRTRRQNTENTPTRTKHHHTNDSDTQAQEREQTTSRTSKRTRSRRQNTPTQDNKKQQTEKPPKPNTQHSKRRHKNKENNAKHRSHKNTYPHHHEKHTPTNNKTEKQQKAKRAKTHTRTERNTAHKKNSNRQTTQKNNTQREQKKTTKDEHKNQETKQNTKNRQHKKQEIATARKKTAVETYRSDESTSTQNIVNVNKYSNLYKEEPKHTTRHTAKSPEYTHAQDKSHHISQTKHTLKQRKQQQKTQEAEKAKQHYTQPKKTKETRQHTDKHKTKRNRKTNPETIRHKHPNRQSKKRKSKHQKKIVQKQPTKRITHRRRETNKKKSRTQQQRHTNKSTNDDRQTTNINNQNSTTRTHKNRAQKRRKAREHRHTARANRQKTQTRIREHTKDTNADKTDNLPYNTKRNRVHRDRATQAQIARRREPPSSRTRPRSEEHNRTQERDEANRKEREHMSNRHPHNHRYREQQHPRTARTKEKEPDTLRQPHKHRTTTPHMKKQ

SEQ ID NO: 975463 - protein, 172 aa, Homo sapiens
MRDAATVRSRDPGRSLKTAVIYGSLLSAGMIAQEARHCPGEANLHVFCSHNGKMKGCVRPMNMDTIHLEIMADASNLPLCTDRDPGNGIRGVRLPGLGAFTNKCAPDQSISREIQTAGAPLLLPGECWAKATPCDPQGATKWSVNQWYTKSLKVKPVPTARGNIPLAKFPWI

SEQ ID NO: 975464 - protein, 245 aa, Homo sapiens
RWEMLARAARALGPFAEGLSTGSGRLGRPPLDVPRNTGVLFGAAARKRWCWWQRLGRFHRDPWSVVWNILILVEDRIRYVQSLTELGHQGALSSRGVTLDKCNLWQIGWRSLYRAHSWTPLQGARLGVVRGTLSYAGHHRLSFKTTHGGSELGKTLSGPKVSPGTRGVLEVPGFVCGLPFKPGLLTWGGISRRASRYLEIRGYHMVPPRVEEVFARCLVEGAGGEKGHSSQTLREPEISPFHGAE

SEQ ID NO: 975465 - protein, 127 aa, Homo sapiens
  misc_feature (112)..(112): Xaa can be any naturally occurring amino acid
  misc_feature (125)..(125): Xaa can be any naturally occurring amino acid
SPAMAFTFAAFCYMLVRCCSLPRSSSSPFGTLIALDELKTGLQRIPIDQCNTLNPLVLPEYLIHAFFVCHCSPCVASHEVGLITTWGDPPKLCAPLSCGPFIHYICATAIIXATTPCSCTLGPKXTS

SEQ ID NO: 975466 - protein, 158 aa, Homo sapiens
PGVSCVVGKRLSEHGPLGVRVSSLVMTSCLVAGPRQEHSRGGERICRDLPIMDGQYLAGSAPSEAHMEGVRMLQWGWLLIIAELTAHRVQEDFIQGGGRIDNFAPLGRAYCLFVDQVPIEEFCPYQKGLQQPFGENRGPLVDYCQIGPSGKTTRLDNG

SEQ ID NO: 975467 - protein, 111 aa, Homo sapiens
MVIVWLGVGRNWDFSRLFFRPSEGWTTRSVGEGIKDRATAQGAGTCEKQARDHLESPGPKKLQPHLRRVSKDGDAHENASERKNKVGAQVNMGNGDQQSKGVTQEGQVKQK

SEQ ID NO: 975468 - protein, 128 aa, Homo sapiens
MRQVHNWIAFAAQLYVMGQGKAGSSEISLGIHMRGERNIDEIGYWTMEKVNRLIYTKKLDKYEKKNTTRTPKTTRTTYSTQSPQDGREEAKSSHHTLGLGPTEEGKDPTEQTGPPQGTPMEATAATQE

SEQ ID NO: 975469 - protein, 141 aa, Homo sapiens
STAVCRPGGEGLRNVALAAARPATQRAVRQTDRAAPRSVWGQPPGGPLRCACPRFSLTGAVPHSQRRPPRPSSRPTELRGGDLSEPSAMTAPCSPAGAASWTPPARAGARSRRAAGTPLCGCDVMMAAWAGRGGRAETWSC

SEQ ID NO: 975470 - protein, 99 aa, Homo sapiens
RPSLQGSGSPPPVFSALCLVMAALRQAIPHNCYEIGTLGTLPAGSPSCKITGGALEGVPEDLCSSVLDSHAILRKRKIRAIIYTNYSLRSYNPASFLTC

SEQ ID NO: 975471 - protein, 168 aa, Homo sapiens
MSKLRSAEISTKSINCDLWYAVGMPVNVPMETLRRDGLNMEDCVGYVTDVHYLLHLGAQVVGIRKLRLCHLGVAEPEQQEGPLGTSPFSDFRRASDCKWFRKKALITFGLDRPCSGLKRKFLVLGTHVLRLELVRPGLSLDRFLWPFRNVLTCCEDAPPICPYVGNST

SEQ ID NO: 975472 - protein, 159 aa, Homo sapiens
MCWFSRGALGRWFGDRSDAMSGRGKQGGKARAKAKSRSSRAGLQFPVGRVHRLLRKGNYCSSVVGAGAPVYLADEMLEYLTVEILELAGNCGREDKKTRIIPRHLVAVLRNDEELNKRVSVRVTICLRAASFLTSRPLLLSKSDRMSSPIHGFMVSVGV

SEQ ID NO: 975473 - protein, 115 aa, Homo sapiens
MPAVDAVNRVTGPVLPACSPSPYFSSLPPFPSLVDVLAVVSRTHMTHLRTSSAMRLVLGGPAEIAPWTFFSGLSASPTSYVSGEGEHMRSKSADLRCSMYTRENEHRYEALHSRP

SEQ ID NO: 975474 - protein, 181 aa, Homo sapiens
ELICQAVSAKHRCRRLLPFDGSEESGSRDSWRQMSGRLKIPLYQRKAILRTIFSSGDGQCALYPEPDWLSYLPGFGSSVNKGSQSQMPLQIAGSSGTGLSLSVSSLAPTRYIAHRTVWPCMKLWNPLDLNDQRFQTSLGNIGTRSVTINGTASQKEKTGSYNFALMSLGRPFIHVDTHLDL

SEQ ID NO: 975475 - protein, 41 aa, Homo sapiens
MTFTYFLSLYTLLIALPTSFLLLDLFASHANIPSVNLHIRY

SEQ ID NO: 975476 - protein, 167 aa, Homo sapiens
HVRRRHRRGKPCAISTWSHPTVFFDIVVDGEPLGRVSFELCGRQGPRDSQTDFRALSRLETQRIRVSGLPASPELFQGICVRVVTSDAIMVLVGKVSLYGEKSEDENFYPSKQYRVPGICDPMAELLDPPPKWFLTFDPVVQLTPYLRWFEIGKPCGWLVDTVKRKA

SEQ ID NO: 975477 - protein, 86 aa, Homo sapiens
GLLGLASVGDSRTQVVMWGRVSEALGYSYTFATSRPSMPQYRDLGGSAASAAEKALPRRAIMKAGVVRRNIGYSDGKLCVQSNQMI

SEQ ID NO: 975478 - protein, 85 aa, Homo sapiens
MRTEDEKNNRPTTASTNADAANCHEQQSVNIQHSQPTLCMSPGNPVYPQTLHLPQAPPYTRCSTLPTQELYLSELCAPMGLAQVP

SEQ ID NO: 975479 - protein, 110 aa, Homo sapiens
MARKRRLIPVIQGYPGKRYFLIDDSSRVSHISFFQLGPGSNNRVLAITMVRWRRLAGQCDRSFQTIPGTRRPLDFPRWGSSIDSHLETSFCVHTNARFLGIGSSPSFLPC

SEQ ID NO: 975480 - protein, 244 aa, Homo sapiens
NAGAGSVRRLGLRGEADWRNIGPRRSMKEKICSGVSIAQSPAHTPACSPEQSHHASGAEESAHECAEEGLECLRCMRPWGLVGAQVLLLRSRRLASILFYSEVEVTLGEVLLRISQIRPQEVLMVDASKTSPNTMNYASLGAQSYEDSSNQEERRGKAAFSDLHVQSSKAEFSSSDAWPELGSLYLLHHCIAPRKHGQNGRHWLSDCRGKLAGCPPRFLAQYQLLQWFGNGDMTGPIAMTFGSA

SEQ ID NO: 975481 - protein, 88 aa, Homo sapiens
ESAKTWSKTLERTAAVGVTYREDYSESTSFSKVAGYELLYIKNIFLKKHQVRVPTLRDGFLLCYPGWSAVSNCWHYHGRLRSQTPGLK

SEQ ID NO: 975482 - protein, 147 aa, Homo sapiens
MLRTFSGGVGHPVHPRLIFGLTFPMVKKSMPPKTSRGVRVVLILAIRRRWPVDAAASILSSWGWETVMTAVMMCGMTNCGKLMCQMLSFMYRLRLIGIAGSRLVCHGGSPWLARRDHYVLIPSGSGTRPLHEERVQVRFWITLHDWY

SEQ ID NO: 975483 - protein, 317 aa, Homo sapiens
ADTELQRLGSNAVAPSRKFFVGGNGKMNGRKYSVGELIGHSGDAGHRCRAHSEGGWGYTTMTALFIGLSAGEETKIPKDCNVWCKQLTATKDATRWGFDLGGDRALVHDRGFHCGARGGVVLGLLGRENAIVVLVADVTIEPVLGQKKWRQCVCAEGSSGVIACIGEKRDEREAGVTEKVVDETVAIVSIADKREGLEPGRSLGMSPVWAIGDWKDWRTPYRASKCRENAPKMGRKCNVSDAGVTDRILVARCDWGTGRVGSQRKGRLLGGVPRERESQATRPLPPPRTRMQQGSHKRGPRAQTGSEGAPKEAGREP

SEQ ID NO: 975484 - protein, 74 aa, Homo sapiens
GTRNNKARKTESSLGGSSNGPGRESMETGERAVSSSSLVLQLLLRIEATGAGCRRSSATVPLPTDVISGGSANF

SEQ ID NO: 975485 - protein, 82 aa, Homo sapiens
SARSYGRKMAAAAELSLLEKSLGLSKGNKYSAQGELTRFQILLDESNGPSLTRIDVTIAAQSSHSIAIQRNICWGVLQEEKA

SEQ ID NO: 975486 - protein, 379 aa, Homo sapiens
GEPHPVSFHAVEALYVSTLSTVVTLRVHTAFMSCNITLKVCNLTPEASNEHEPQGGTNNSRRAALRAVTLTEKVCSFTPEPAEATNPTDRKKLCNTSEHPHGNKLQTCHLKSCSTLTARVRGFIFDVSSDQEPTTLRDTIATLSCQEKLLPTLSAINQQPMGPQSPDTVAATGSCHTEFLLFSHMQIYMISARRPWPTEGTTSRATPTHSPQGTSDAHTAAVRQPGHETAHPLTPWSASRPHRGDGKCGTNKSVWPLPPARRGPIEKGQSGDTRTGLPPEGNQKAQKHQGRTTGQRANQEDIGRGHSRDHATDEVNRVANKHTGETNQNLRSLSLKSMDGSQINEEEADTEHAGRHAIIVSPVAVCSFRAPTARQPREH

SEQ ID NO: 975487 - protein, 74 aa, Homo sapiens
GGSRSFWCSLHCSVSSAPRGPASVASLPAGMGDPQAKTPGPTGSLEMLAPKSAAPSSPWRSSASVPFSHRMAAG

SEQ ID NO: 975488 - protein, 379 aa, Homo sapiens
MSSDFQLPAYELNWICSKITIASWDSCNLVIKLTTRFDCIKHHRNITAYASTPSTIQHKHNPKQSHMHYMTWQASGQHKACVTCQYVWAVSQNTVPHSLSHCGHHNKDINGKQTWRHTCGAHLNLSKANTSKPSHWHHLSHASQDPACRRSSPALGSQFSNALTTSGLIHPFAAILHWCAYLHNLQAYHIDWHSGLCLHTIPWCAQLGVHKHPHNRTGTTKHSSHTVPIKPGHLPEGTQTNAEQHDGTNRRRGSHNIRHTAAPTRHAPSTLTRYTKTVPLLGNWAWLNATKREHPQRHESETAPATAHAPRRAAQAVQAHAPQDSRQVRNSTTSTAGQPRRDTRDAQRQAQQRARDDKHGSDTRSSEERNNADTDAHQQ

SEQ ID NO: 975489 - protein, 116 aa, Homo sapiens
SSSGARPAFRSCGSVLFVASDSTHSSTLNHCGCIVAATCASTAFFIHCKLFHSCRDQLQNGQCNATNDLCAQHLPLVFFCELCKTGVMAHCASLLYHMPCLIQHTTRPSLFGSQQA

SEQ ID NO: 975490 - protein, 618 aa, Homo sapiens
MILVDFFQHSDTAHPTYPTPALQPSGVPVIHRTIIHAFVRKPCTSNTIYYDGFSIHIIVTKPQHNEDITRISDQENYFHEPGTDRKETMPRYKQRTMGSKISWSPLARGHITIHPLTHLTFLVRIYINLSDHCKKLNLTELFIADNGSWYAVHPTSLQFPHSWNTVGDPVTTARTSAGKNIDALTRYVQVHFTVEASKWPHTKATNMADLVTMMAPRKITSDHSPQVDNEHRNGKNAPNAAVQRHWHGTGAATNNTASPTKQNDGPTMASRRALATRWRPRHECRHGTNTHTGRCAHRTDGDTPINQLAQCIPSSQLGTPRCERLQPMNPTATTGTNNRRHKTDPMRRVPAEFAHEDTGPHNTSPPQQMTSSTREQTTTMTLQQRQQQMGATDTQPHVKHPKDDDNTAALVDTAAPERLLLRWAQETAEHTDNADITTHKRATINATPSKRPDRDHTDAPHMICANDRSHAHNTPVEQRALTTTCTAAAQHTTSDNTDAPRAHHAQTPTNNAPGADTMHSTSFSTHNPSVTTHCTQRTHPDSHNEQNKITDTDTQGSTRTTRPRTRHHDSNSSRRASPHSRTLKLTTNENNTTNVDDTHTARRHDPPHTQHPRSTTPD

SEQ ID NO: 975491 - protein, 306 aa, Homo sapiens
GLESDVEVAELTGLAEETASELQPKAKESLKIGEGGQGVIMGGFFSSIFSSLFGTREMRISNFGIRWSRKNHNFVQIHKCARSCYYYTTIGSHVETVTYKNLKFQVWDSGGHDKYQAILEMSLFKTQMHVIYVGETVVTETESAFPQSEYTGHVWRNEELTNSHLVASANITQDMEPALTSSADGHIHLGHLLAGPDTVGAISNTFADQRDRDLHEANGTWVAAPITTADATQPMLFPAHADQYRPLGNARTNNTVTPDRLGAPPATETNADAQHEQRAHRTGDTTPHRRQTHHHATPREQTRNAK

SEQ ID NO: 975492 - protein, 103 aa, Homo sapiens
MHIGMDESDPVPPSGDLNTEGCNLYLEDKGSNYSAQGSDFCDVLHECRSHGSASEREESAIGAEMNCEIFRVDCAVELVGFMLEHPVRESAIVHSRLCLAYHN

SEQ ID NO: 975493 - protein, 111 aa, Homo sapiens
MCAASLVVWLNMSMQQNILSSGRTMTDVIILISSDCLAEEMFGASCTNNNSCYDLVRIHLPWPDAHTSTVLKRNADNSVTSRSGQGVDGVDVQIDRQPGARDGGGLPLLLS

SEQ ID NO: 975494 - protein, 247 aa, Homo sapiens
MTSANNSQSQITTTSETKNARKKLQAPLCRAFRHKLGTQQHITTTPGYGTTYRRQQWVSLQREISPPYSAQWGISQRHTQDSKGKAKRVFLKKPEQEKHKKGGIKSYALMRHGQNLMWTVSLMSFATSTIATHAVVCLKDSRVRKTMPLHVDSQKALYLTKKTGNKILQNKDRIIDEAKLGVCYHNQGMDARSNINPGVGQRNSSVRPNLRTANNLAGRPQSAWPLNQLPCSTSYTTLVPTRGGHGL

SEQ ID NO: 975495 - protein, 86 aa, Homo sapiens
VAETREGRSGVRLCKLGRPGDVIPPPLPPRRVRVLMDPRGCSILIEVDTREAALPAAGAPDDVNLLGDVHGRSLGQSCDSRAEACW

SEQ ID NO: 975496 - protein, 111 aa, Homo sapiens
MRTIQKEQDSKTVSTPFTVSVLKHLITGYVLSRCAFQFFLQRSVEYQGNHYPELRVTHKHHTSFSLATREMPFPLNTTFRVALHMTAATGLHNSRMNTLSQQRALVARNLL

SEQ ID NO: 975497 - protein, 37 aa, Homo sapiens
KREKERSKENRGRKEEERKRDEDEKKRKRHNEREEKI

SEQ ID NO: 975498 - protein, 106 aa, Homo sapiens
MRIEKCYFCSGAHHIAGTPVRCSGQATRWHMVSRFLQVRNWSIKNLSRRESAIALLKYSVGPELFLVKQRVLRELYSGDKCILEFEENVEIEPIKYHARSILVIKS

SEQ ID NO: 975499 - protein, 148 aa, Homo sapiens
  misc_feature (148)..(148): Xaa can be any naturally occurring amino acid
NKSETPSQKKKKKKKKKNVVGGRGQSKKAFKNQFGWGSRGAPEEETGGHVGPTNCVTPREKESRGPSRQQEASAMGIYLNNTQNIEKNEPRGGNHHQEPASRENNLTENSEDFQRRDSNNGGHSIYNRRSTNKSGVRKYKINAPTAEX

SEQ ID NO: 975500 - protein, 219 aa, Homo sapiens
MEHLKVDQMQYKHGGHPPKDENCREQKASGGSTQNIHKQTQGSNIMSWQVVSGAATNSQYALGDLSLGGYHHKEHNLTGNGTDIERNYKTIPMRIYLELLQGQYRDWNHSMTVLERLEERTQYGAGPSDGNLHGNYNRGHELTVQNRLLAKHRTSTRGTDKGRRPPRTREKRQGMNTNTLYTTQRTRKHPPQTRKPQSDRVPQPTERWRPATAHRMTEQ

SEQ ID NO: 975501 - protein, 202 aa, Homo sapiens
  misc_feature (60)..(60): Xaa can be any naturally occurring amino acid
  misc_feature (83)..(83): Xaa can be any naturally occurring amino acid
FSPNAANMVFRRFVEVGRVAYVSFVTSIAGKIGSADLVECLLDPGHEGALVAWHLCNSKXTEDRPCPFSKCMASSLGISCLKXFSPGQQRWRPNPRKSLIGSPDHKAPWARQKGPGPSSKVSEKKVGGPTAPKLTREIGGVPPKKGKTQANIFGRKINPKGRQKKAEEEAPKRRIGKPKGNLFLLWGKIFPGGFFSFFTQTN

SEQ ID NO: 975502 - protein, 269 aa, Homo sapiens
MQYPAPRAGGGRRGGAVYAPTPCCTGHPTPFYIEDILGRGPAAPTARPTLPSPYSSFTSLVSPLPEPRVYEPSRSIQSSRTTPAPAWPWLTDPACFDGGPSVYPFPAGTVNDLNSNGPLATGQQSAEWGNLLTLSSRPLLAGWPSCPLKRGATRQAHCDEFLPTEPILNYGSKKRTGPFRTDASHTLVFVSVGEEEKRRSGQRMLDSIRKEHTGDTHLGIPRKSDVGYNWEDDYHNCEDSLTTQCPTLTGRGNRFGTVSWSISGTELGH

SEQ ID NO: 975503 - protein, 166 aa, Homo sapiens
KVTRPGRRLRPTLSAVAVARYTIGVGKIAAGTAVERLRDPRGARRRASLLTGTSPPQTPRRLKRRRRQAKKQVKKANRENPDVKGPFPRVERSMPGHGLGVQTGSLKKTPKGWVVEHKLNGRESLKATSYEFKAEEQSLGGKLRWTFRDHILYQAFLLKHHWCDGS

SEQ ID NO: 975504 - protein, 105 aa, Homo sapiens
MAQWLNTGDNEQMAALEAKICHHIAYTLGDFTILPRDKFLKEQIKLDEGWVPLADTDTHSNPVDTVYQSDFNVIVEALEQIQGRTHWKSVNDNNKNQKVSKTNPT

SEQ ID NO: 975505 - protein, 154 aa, Homo sapiens
MLTRTQHVDKVKDDRPDQSPRLRIYIIFHSIFTTGSQTAHLLKGQCQARADPVLDSNLSSLDKAPEQILNPSRDTKRQAATHKVQHQKPQAHRKGPTSGANIQTHQVTLHQESRPGGHHTIHKRNTYPRGNGDTEMRTGENGTEDEDTSNKHAD

SEQ ID NO: 975506 - protein, 177 aa, Homo sapiens
LVFAESPMAAGTLVHVVLKTGGSFEGVSSRACSSSGAQVRVLSERTPRSSLAKTNRTPEFLREFPAGEGPRRFEGDDGFCVFESNANCRYYVSNEELQGKYSQRQKPEVVQWVSSVDSDIVPPASTWVCPNLGSHAADKETGHVRMQQDGSEAKFWGCVDAYLTDEDFIWMGERVTL

SEQ ID NO: 975507 - protein, 102 aa, Homo sapiens
MDVPGSYVIHGPEECWMLTTENNARGGTRRRSGNKDPRWRLPEESSVGGSINEGVRIERRYHLRHRRRWQYNRSPRPSNILQIEANESEEVRKPEIFAQWWR

SEQ ID NO: 975508 - protein, 261 aa, Homo sapiens
GAYLGPREHGHMIMSTDMISPGARQYGTIKVSTGTGRSVNVRLLDVDERKAAAAGSRDLRGHGRIGQDSHGVKGSTLRGRDIKACSSKLLNEGELYGRDNNSGRHNIRERGRPPRGEEQEHSLQKKRQPRGGGRRGGAQEKGKNGHPWGGKYNRWDTPNRKRTPRAGNSEDTNEPATGNLRHTTNYQKNHAPRGGERPTGRPGVAVANTQNTSQRLGASNERGRCKQGGEPYYQNNGGSPHSEAERARLYQNNFTGPAVAG

SEQ ID NO: 975509 - protein, 135 aa, Homo sapiens
MWACGAGPTRGDLLHKRVSTGEEPKIQTFPPRLGEQTIDQPTPNPTAQHAPGPNAEQSEEGTTKTQENKRPHRTHRGEHQQRSDGRRQQRRNQQGGNTNNNQTNKLTETTSDPHTDKEGGHNKPTPKATNQQTTD

SEQ ID NO: 975510 - protein, 153 aa, Homo sapiens
MRVGAARGPREEVSVEHVGPKSGFPKRRNSGSEDQRRRGILLTNKKERRGGNKAESGWLETNIPREGEFREGPNYEGGLLPKGGGPPKRGERPAELYLHIFNAPPGLPGVDKETIIHGERSQHKLNENAQTAEQKTQQTHYINKTNSTTNQTK

SEQ ID NO: 975511 - protein, 520 aa, Homo sapiens
PLPVSLRGPRARDCKPALPARHYSTAPSFASSPGSQSAPPLPPQAIATLRSMSTRSVSSSSYRRMFGGPEHREPDETPAGATVTYVHPQPTAWASALRTRTSRRLYASSPGGVYATRSSAVRHEEQQRPGGARSCRTRRTTSQADAINNRVQATPGPTKGPLQERNDGSPINPPGAQLEAAEKDLRAEAQTRQRPRQRAGGPATSRNGKRHAGPAHAIRTGTQPDRIRARKPENRNRHTNPITPAPQDDNAQDQNIRCCLFAPRRALASPRHEKTTTKRATDTRKKETREQQDNTSDADNNTKERTKDKRTRASQRTTKEEPDKTSEERRRERPHPARHEGEPRTRRGPNEPETPRPTARGGRRRRRSKQNTHTGETTKATQATTRSKTRDDRGQGEEAETGSRTEHRAQRSEDRKNEEERRTEAKGSTRKAAPRGDGQGEEETQKKDRGAKQEEKKRKSAKRAATQESGTATEHTRTQSKSGKETTAQKPQQEREKHTAKQRRKRENKRAWKRQNRRSR

SEQ ID NO: 975512 - protein, 69 aa, Homo sapiens
SPCGFLIARFRTEGIGYSPLAWRSLVLGGVRITAGRPLGFSGGERGGSEYYVDVEQAASNSSEVPVVAD

SEQ ID NO: 975513 - protein, 63 aa, Homo sapiens
MKECGGPKRGHQSATLKAVQESKTWEALERKHGTLRARPVSEATVLIVDKIGKIYSCMGKNSD

SEQ ID NO: 975514 - protein, 172 aa, Homo sapiens
MGCEVLVMSPCVSHPWRREGGRPGGGVWLHPSTGRGHARHQRRGQPHPCQAAGNPVVLHFTGDTVFFIIGSHIFLKEWRSECDLYLVSDVRCVKATNNVPTTPLSGAHSIETGPGYLLQRRTCGRGDSWGPPSSMGVPITQKKQHTNKTQHAAAPPGPEKSQTQAGGHRPSK

SEQ ID NO: 975515 - protein, 168 aa, Homo sapiens
MSRYKTRLYAPSTEIGKNRLGLEVGPAGSNTVCKALRCYVYAYLKAQHLILYILYDEDFVHVFVCDLSPQCLVTLENPPLRETATMMIILGKQKLEDLIWDGGPGTLSYQRRGLLPSQSPKTQVWGPQKKPTGGAHSAPGRGTRRTRQRAQPTRRTTEQWRPASTHCR

SEQ ID NO: 975516 - protein, 120 aa, Homo sapiens
  misc_feature (23)..(23): Xaa can be any naturally occurring amino acid
MAVTKGIYTNYSPAFIYYAYIIXKPINTTNPTIAKFGAYWAMTRSCASLRKQAVGPRPELVLQSCQHDMGLRHDVAISLKRYVHYANNYIVPSEVILTTTVTLTFQENHITLNRHKQPEL

SEQ ID NO: 975517 - protein, 242 aa, Homo sapiens
MVRAPCGPKKRGLSQNPHCGGGPGGPQEDESNKRVRTTAVVPREKNRAHTNNRGRGCSLPTKKKSAAREATRAGGACVENNNPPEERNLLSKALPIRWGLSSIKEGDPSPSEQRRDIYYKISNPPARARGCTIISSTSSDRRSYIIPTTSRLHITLNLIPSSASHHNHALTKNPNLPQLTDNHATNTSTTPAHDPDHHPHRRPHQLTHIHRTPSNTHNNPPSTHNSNTRSQPRSIPNDTPQP

SEQ ID NO: 975518 - protein, 196 aa, Homo sapiens
SGGLVIGDWQGPLSRHLLFSHPHGERPSAHVFSDGVHGSASGWHCPAARPTASQAGIGNRAAGAQADGQKPDTAGHPPSPTLHRPPRTPFSHPQATDSHPCNPALAPAGPPGHQTDPGSGADNQVPSTTTIILPPQLHHFPSAQMPTPNYGRKTGPIVTFLPQHNNSIIDDSLDDPVITAPHHLVKRQHHYNTTHT

SEQ ID NO: 975519 - protein, 104 aa, Homo sapiens
  misc_feature (102)..(102): Xaa can be any naturally occurring amino acid
MVEDSSVGKMIGQAAAARPGMKEDLKVMASVEVQCLSTSGELRMGQASPVRFESGTCSDRTRLHLLPITLALIGTCPSSSPLSCSISIYPFIILLLSLRVLXGC

SEQ ID NO: 975520 - protein, 112 aa, Homo sapiens
  misc_feature (103)..(103): Xaa can be any naturally occurring amino acid
MHIACICISLRFLVLPMCPIDPLQLTKEHNLNYLNNLQNSIRDNMKPGMNIALAPPIMPSRVNRSARHPLRILDITERGPSIAIPLIPSSRIGLQVVTDTLAXIASEVRVGS

SEQ ID NO: 975521 - protein, 155 aa, Homo sapiens
SSGINADCPLRPGGDKKKKKKKKKMGGAPRAPRKKLLYKHTLRVCGRARGPTRGYKGEHVGHKGAGSTRKTARGQRNKGAGEFPHHNIKTRARAGAQPRGRLLETNIPKGEFSEGELSYIERGISIYQERGRLSKSAESLAEYISNIIAPRGPGV

SEQ ID NO: 975522 - protein, 78 aa, Homo sapiens
  misc_feature (50)..(50): Xaa can be any naturally occurring amino acid
MRGGDFPNQNKEKRRGGEQTRGVLVKQKSQEREVSRGRRQYRRGELISQXRRVSKTERRARDISQIFTRPGPGGRKNQ

SEQ ID NO: 975523 - protein, 123 aa, Homo sapiens
MGHKARVPIRRRLRGQETKGVGDFFPNIKKRAGGGTRGRSWENNLRERGNTRERAHRRGDSYLHEEESTRGGSRKKSKNIRPRERGENNRKKQQTTQTNTEQQKTEKAEDNKNKQATPNNQTR

SEQ ID NO: 975524 - protein, 58 aa, Homo sapiens
HWSDMSNKDRSIDSAICTKKTIRTQTLSKHEKRQQMHQKVTSLQRELVENRPTIFYGP

SEQ ID NO: 975525 - protein, 104 aa, Homo sapiens
MWKRGNLVAKEIQTKKGTKQVLVRKVDLSDTNVYIELLHKGFLAEEKKAPPRFVINNCRSDDVVRTSKTADGLTMHIGSKQLGHYLITIWLIRETLKGIKPDQG

SEQ ID NO: 975526 - protein, 186 aa, Homo sapiens
MLTICEEPQKTLPFPIIDDRNRELAILVGHAAFQAGGRMKRACLVTASCGGVFGPDKKLKLSILYQFTTGKELDEILRVVISLQLTAEKRVCHPQLMWKMRDSVMVFKHPGRRSQKIFPKGVSQRVPFGKNTPVKTNLKSWEVCCAPVVCAMVSAGILNLWVSRQFAAPRLKTARLEFLAETHNPS

SEQ ID NO: 975527 - protein, 140 aa, Homo sapiens
PCRRGGGGGRTRNSGGAVRVVSRAPAWLVAPPRGPSSAERIGVDSRSSKPRLGKEGPRSAQSGRPRGALQDGGRGTSRQGASLTAYVTQPFLGSGSDTGVPRDGGQVSNNGQSPDSKQKTTRERHESTGRPKSLVGDLLS

SEQ ID NO: 975528 - protein, 120 aa, Homo sapiens
VPNSQLRHIRLENNENKPVTNSRRMCRSWYWNRRKPVTNSRDTQEVPLEKAKQVLKIIASYKHTTSIFDDFSHYEKAKRKTDKCYTRNVKVVGNNKAVLHRLQQRLHLHILRGKNDLQEN

SEQ ID NO: 975529 - protein, 236 aa, Homo sapiens
MDDDIAALVVWNGSGIVARPASRATMPPAGFPLHRGGAPGHPGCDGGHGSERIPIVGRRRSQSHERASFTLKFTPSSHGFVSPKPATDLCEKTYSGPPQPFLTIELRVGSPEDATPVACLTRRAPPLKATKGQTRWRTIDPDSMVGRHLSKHLHKPIVTVWFIPGVCGIFPLYGLLGVVPTGPSVELSSRVDRGITHTFVPNLPRDYALPPFACLALGPGWAGTCLLTVHEDPTER

SEQ ID NO: 975530 - protein, 185 aa, Homo sapiens
MDNIYLTVKVGISREHLGENARIRPGELSTLNTKRRRRSPGYCNGLSQLPSKYGRQDIRSVLQNDKGEDPVDVRWNTIIDGRQPLAKMTIRIVNVYKGPTEHACRNAQPSVRPRDPGQLGRGSRLYDTQSSRPHQTSTSLLISITAAVYEGVHHNRPHTHVAETGAVRVTTLEKIPEGPLRAEST

SEQ ID NO: 975531 - protein, 134 aa, Homo sapiens
  misc_feature (110)..(110): Xaa can be any naturally occurring amino acid
MVQRILTKRLADVPLLTSLAARLALPYFTHLHTTRANGGTISSTIRAAHLRLPRLTHHTPRISAGTRRTGTPAPKRRRAPNTAKRHTAAPHRPPHQHPTHTSDPTTQRTXGPLHTHHPHHHTRQHNRTTPQQHN

SEQ ID NO: 975532 - protein, 127 aa, Homo sapiens
GQTVPEAQDCKEAPSSYDHQPSLSYLDSFDGEMLDAVDPQHKGDTPLQKVPWVAECQNILRNSRGGPTWKIDRRPATVVGQGAKKSRTHQEHQPWAKEDRLFLQFLVTLLAVRASSVSRYLCVSFPM

SEQ ID NO: 975533 - protein, 110 aa, Homo sapiens
RATAGYGAPALAPNITMGVVCKLPRAEQSSSPHQRFQRTQRPWVVVLMAVLLLLALLDRKPHPLPEAARSNRGAGLLRVPRKRQEVSSPNEATEKNILVSDHGTLIEQQE

SEQ ID NO: 975534 - protein, 222 aa, Homo sapiens
KPGARHGWRGCGEAWSPVPDHAECEHAEGSPQRLREMALRRTDTGIRPVKVALQRQSRGIDGPFAADRGPQEDLERRRPGEITNQGKVAGQLPWWVALDHPKKTRIKNYAGDFKPTSGTLGIYTWNRTVCAETFGFNFPKINICGMGRTPPIKICGLYRIQGPMASREHLDHLGLNTWVTEQAGHTQLDLVWRRHTSAQLDYNYNAFRTHTHLLVHRQQRRY

SEQ ID NO: 975535 - protein, 74 aa, Homo sapiens
RDKGHRPQSDTADEHRTTADKKTKHKQEYNKRTGRQKTTKGDKENIQELVANATKQLIKNEADKNDKTNTRDTA

SEQ ID NO: 975536 - protein, 303 aa, Homo sapiens
DRRNSCGGEAPVALPCCAGGMGFLAENADLSRNAWGSGLALSTRSQYRDPGRAAGTPGKCYRRCTGGTPSEQGGGGPGPKQIIGWQSAREGKGPNAQEERGRERRPGHRMGAERYGRPTQGEGPPGEKRELCHPVWTDGNLLALWADRNFQEAKAVSSCGGPRERSRGTEEYQCHRTLLRRTRDCMPVGGEHRFSTKPLNVTWLKVRKGDRAGNDERQVADLKAPMTAMSLREQYKRHHKNVGRPRTKSSQNSGARPNSRRASARNRVNRRATKNAERATPAVAPHKRGKPGERHAAATDSPR

SEQ ID NO: 975537 - protein, 193 aa, Homo sapiens
PVAAKGRRQDAQLRAKLSRGREPSPIWWWAPSVPRVQDASGGLGSPARCGEVRAGDMREEERQGLGGEMRTRMGGAGPVVAAHHLWRCTQGLNKSRYKNCQGAKSSPTVKDHGGATVALPEWAKGVGDRAGIDRRPGEYCEVVTKAREWFVPNREQLNGPRDTGGARPVTVGSDFGTARISGLNQRTGRTKKG

SEQ ID NO: 975538 - protein, 283 aa, Homo sapiens
IPTPLRFPHVPLCAPGLGIPLFPSASGPALFGGTVWSFHPARQRGEGARGPVKRLMPPSTDASVGVEVLPAALSLCEGGGPSPVPTDVGRQERGSERVGAPGVSELPSALCPNTQVAGRMTSSRKRPQFVPKVVPDVALRVLKVAVQSHPLRARGLPVGIFQKRKKLHVRGPRCSLHRELNSVYSRDNAALGVQATSLDKDCCGRTRGGGGMRIKKHRKWKNSRFEITQGSPLVWHSTSDSLWGPMVTKGPGLTLEDTAGECRVDNNPTGFFKSGATEKARSQ

SEQ ID NO: 975539 - protein, 272 aa, Homo sapiens
GPDPAFGARSQDGSRTRDRLGPWCLALGPSASCTPAGGGVHARSPCTVSEGGHPGQVLWAKEGFRGKKIVGLFPVVAFRFFVGPRFKEGTPGRRKTGGVAPELIPRDSGWVEQMEAPSFGPGVGAFLPPRGLLVGHPSGNFPKGALLGCGSQRETKTQGPLVGCLDTALVVAPRWVKGPQVVTHRGVGCAKGICPGALDRLVQEGPKRTQGGPFGSYPLSRHLTGARPMWGTGHFVRPNSLGGAKEKGAKVGPPEGQYGGPKKGPPEGYIKG

SEQ ID NO: 975540 - protein, 317 aa, Homo sapiens
MAGQDAGAAVGDDTQEDEGDSSVSRAGVEVSGKLKDLKCPFLEGLYIHRGQKTIQELGWLQPPQSTVVRILEVMLYPGVLALTAGHQVSAHLRGGPPTKEGEDPKKMRKVWATAECLGFAPSIDPGSLLQGVVPAPKKGRYTLFMAQWPRYQFGRPDPLCVGSELARPCWSNFRRQPPGADGNEPLPGGALHIDPQLEDAPESKVGTLVPCGFASPSSNKQSGDWQWASASPGPTRGTADLPGSCRTMLPIGPYKGDCTRSRAAWPRLSPNKTLVSAPHLGLHTGEVPHAPRAIAPMFNTRVRHCGRTECGPTRISR

SEQ ID NO: 975541 - protein, 77 aa, Homo sapiens
GGTGAQTKPRPCQGDARGPLAKGFGPEGPVGPRLQKLSLPTPVGATCWPCGQGRHEQEAGRGGPFVVWWSTSLTGSR

SEQ ID NO: 975542 - protein, 154 aa, Homo sapiens
VRAQRCSKLSYNTLHSVARKLQQYTPRRTIVTRRIHTTILNPQRINNTPCSAHPPITTCAITQQNSHLLLDNPHQANAQTTSHSRLTRNNNHLMRQNCHLTANSRTPPPHTTSSQTVNKKHYYIHHGDINNQTPQSDPSMTHTNTNNAHFVEPH

SEQ ID NO: 975543 - protein, 82 aa, Homo sapiens
FRKGKPLALVKELRNRKDVKVFNVTKENRNHLLPDIVTCVQTSEQEVKTTCIPAFRDGTCPVSRGALIGAPCLFEAVMPNGG

SEQ ID NO: 975544 - protein, 176 aa, Homo sapiens
MQRKTTNILVALAIGRSQINISLPNRGRRQETSMKNWSLNISKVWTDKSSGTDIGDIVDLASVRLDGPGLGRRCCGLENDCMTDQMMIQPDPEKSSNILKAIQSQSNDALCCKNSQPAETPDDKRRHPKNDKQDAKSNDTKTDDNSRGSYVPKGQAIVNYHEALMDTKCQRNDLAI

SEQ ID NO: 975545 - protein, 111 aa, Homo sapiens
MRQLYAYFVSRHSHTPFPLYGQTNCAYIAYVVLCLHDTEEDGVLSPLLSLRSQTRIVGPYERKDNTNTAVSANSDEAKRESSPLPKQIEYYTEHQLEHRTVPQPNTPHVHL

SEQ ID NO: 975546 - protein, 379 aa, Homo sapiens
MKNTQRHKETRNKHTKERQQRGPVGNRTTEDNDETHQQPPRPQRQTAAMEQQPHEHNNTRTREATHGHDTSAHKNRKKAHKQEKTKQKRKKTTTPGGNPKGERPRQKHKKNSPTAGEHRNKAQKREQNRENKKTQKQTTKQQNRRQSRRRRTEKKRRDNKAEATTTKGTQQTQAQEEKARKEAERTNKRPKRRENRRTKTQEGKTDTPGRQRKRSSGRRRRDTERSSGRGRQHEERGGTRERGEEEATARQEREEERGHKRRRKEAAPEGRRRSGGGQPEQEEREDKRRKRKKETEDHASRTQTTRRADKQNKQREKRRGDARSETRQQAGKRENGESRHTRAAKNEKREKTGERKKERRQSDRQRPRDEEHHDGSRAR

SEQ ID NO: 975547 - protein, 290 aa, Homo sapiens
  misc_feature (43)..(43): Xaa can be any naturally occurring amino acid
VAEMEWSREKGPWQRGLEEFSAPPGLRVGCLPYLCGHILRASXRRKCSCVRWSGGSGLRERDEEEEAARVGGGAKGEKSQKVPGTRSALRKIEQVNEGSCTGSIRGQRIPRRLQPGTEGPHESAGLHNGMTTGQPSSTMVAWKDEGSQAPGLAPTQEMGKWAPRERELARPRRTLTHKKRGAQGPGGGGPVAEEARSATGWDAREEMAGLQEVARSRSRVADTGLKKEPDPGAPGQTMGLPTGKRPDEMQKWPFIKKKKKVGRRPEIQHVGAPGESNARAERVQTGGQRG

SEQ ID NO: 975548 - protein, 105 aa, Homo sapiens
MFEGAPGSRASILKKVWRHSRDLINEACWDISSSGVNLQSMALAPQRIIMVADHPWGSEGFDTYRATANLDIGLNLTQYVQNTNMRLANEDIITLRAEDTRIPWR

SEQ ID NO: 975549 - protein, 242 aa, Homo sapiens
  misc_feature (30)..(30): Xaa can be any naturally occurring amino acid
MVTPTPYPRSRSRTIQLWQQCALPRAHPNXAQNATDLGGLLRQVLNTEASYSQSTMVFQVISVVANGQKILNKMAQFIYVEANGLSSCVICSPKQTQDFQACLGQFGTVFCEQDSMKIVLIVLRILGAKNVSWKTGPMTDRSGCTKNSLVPSIIFFGLDFVTLFWGRELSFFYTTLTCGTNYRPFVEKSLTAFLSSCGVLLTTGDFQHVFIPVSRTDIVPGEPCVNLGVAPDSVHDWVLKRT

SEQ ID NO: 975550 - protein, 376 aa, Homo sapiens
HKIISYHERNSNEYKECGKAYNQSSHLTSTEDNSSLERNPTNVKNVAKALEPDTTHHYQTIRYIQYWQRSPYTTDEECGKAYRQSSQHILKNKHKVSYLESNTIQDVQHVENRLETKMLNNLRRPQEHAIPGRHTRPKPRRLQQKKVSNRMNKRRNTINKHKRGTHSPKHMQLPGQQNHPEPKHLMTTPWSGTKPREKHRRLKHHNQNTNTRKEQYVGKDKPDTKETAANGSQTARKTARTARNTQQPIKTDPTNTGNEQQNRTTKGRQHKGGPRPKHERKASPSTTDNQPTTHNREENTPTHHGQPHAPHTPDNNTTPTQDTEHRITHTRKQQHHNQGDETAGTRQIPLQLTPTVRTVQRSTRWKENTRQQKDRR

SEQ ID NO: 975551 - protein, 221 aa, Homo sapiens
YRSGPQRTVVHRLVEMYSSGCFLTEENEWETEAPVVGETPEESSCEKWSSDECADQVNNPAGYIAVKERYAKYLAHSAGRNAGKASRKLRSPMVERLTNSVMMHGAATKGKEAHRYVAPSVGACLSRSYTCSQARTLLKGPGERPSSNSGSPGGLPHACGRAGTVRRQGCGCVPLGVVNKASGLLCTGARGGCLPEHSDHVLKWLADELINAWQGPRILMA

SEQ ID NO: 975552 - protein, 33 aa, Homo sapiens
ADTRQDARKREETVTYWPSVSNDERSEARSEEA

SEQ ID NO: 975553 - protein, 250 aa, Homo sapiens
MAYLSPPGVWGLKAEAKARGGQKSMVSMEHGLYILDRMLDIVGSSSDTEMMCAWFLAVFVDVMMTRSSGVILIMGTVDCLLAVGTRQGRCWMKGTRLSQVAGSCCELSLGGRACCRSYPLRGDGLLCPDLVRRVSGRETSKIVMVTPTERVQWVQNQGGSPGLLKRGGSAVILVSVLPHLGGPQDGFARRQPEGEAKIGKPVKNPGNKDRDPGKVNMWAWNGVPVIRQWTVGDSSLEATLTLVRYTKFIA

SEQ ID NO: 975554 - protein, 122 aa, Homo sapiens
MKLQQSRSNISDVNSKGVKFAESRTLHYGNQLSYPRYCIAAYSPTSRVEFLPTSTSLHGSTHSMGNQTAHGGQRPSRRATERAQGSPHGKRGAGLTAHTQNNTIWRRTNRAHKSPHRGNGRT

SEQ ID NO: 975555 - protein, 335 aa, Homo sapiens
QRTGRTDGRLHLATLPGCRLPFVFLGGDERRAGAEAAAHRSARRCLSHSSRPSARFVPGQRPRAPARQPAAGPPKLWPSGESRGGNRRPLTRNHRAIGPIVGPKSHGRPENHLPRTGSEPNFPVISPSRPVAPGSGYRFAPPGPSRAQVGATHRPQATRGRAPRRGPARAPCRRRTTRTLSADPSEACPAACPPRGAPLKRTCPQSGPPLTGARNFPAKTLSRRTSSSPPRRRTASPASADAQSFPDTFRQTTRTTRTHRPSRRTYIIAPDQCPSRRNVTTAANACALQHLTPGGGVLIINAQPAAEQPSQPSHDGASLAQTTGTAPLRAHAIPE

SEQ ID NO: 975556 - protein, 278 aa, Homo sapiens
MPLHALPGHIRHSIPCNRSNKLAVHSKVHHSRKPIPYILERTGHDSGRLLSETLATLLNFNPSGSTRWHTYATFQPSAKMHAPFARQTINTHSNCPKQLTLPVAQTYQQPTAAQGIPLDRKAPKALHCHNDMTHRQRSTRHNSAHTATPRLLGGITGCQQDQRPPRQTYIRPIHELAISGRHKHTSNHPASDRPGGTLALHDHSGYSQQACAHNREDTCTPEGANRMPIRTGRKWPGGGSSPTKTQELQTTQQPGTGAKDTLPRNRDARPGTTARDAK

SEQ ID NO: 975557 - protein, 109 aa, Homo sapiens
MRFTCRLLNMSISGLYEVRVYEKWVRITLLSNIVREYMLCRFWRITWWDSDDSYGIIDNMRHIVTIVIHLKLCSGMYFQFLPQGGEVIFIVICTFFYFKNRIHTTLQHP

SEQ ID NO: 975558 - protein, 383 aa, Homo sapiens
NCRGGGLHYSQVLKFGDIARGGTQVREDVKSHRTAQHIVLENCVQAKRNPFTTVSHIHDATKRHAWDNAPHRCYTLYSPSPVETIVGNLKSCSRPPLRAYWLIQCRIGHKTPPSDSHTAGSHSSNKRARKLWRQTHKPPATNFTMRVYQDAAAQQGTALRLDIHSSPPFNRTPKKPPRNDDTRCTPQSHNTLGQPNEGQLQLPSTWEHAHTASTLVASHLPVGPSDDSRKRHGTRQTAREQKRDIPTYTRTPVRIPPGNFPRHATPIPTFGTRHLADPTNARGKRNPNHTHGTAQGGHGNTAKELTHKARRHNPGLSHTQRLGPPHTNATQRANPGAATPREADNDKASSAAHQRHQEDIIQGPVTRTATDHEVPTPPEHTDT

SEQ ID NO: 975559 - protein, 359 aa, Homo sapiens
DQGLDELEFELNLTFVFLEPWVSYMSGLSLVLGFAHPSTKRKLYSLHNKTNNTNKHTQKKNNNTNNQQTNKNKHHTKTTHNTKNNTKHIQNHNTPLLAQPLLPTRHTTSFTTQSSPHPQTDDHYKIKHHIYKSQSTIKANTNQQTKYIPRLIKLTSSPAKKKTQSLLSTHPCIITNKTLPYTPHTIQNKLYKEITTINPLTTYLTDKTLFFSIIALHITPTSTHPPLLQTITLRALSLMKTPYLFTTTPPPTLKVSIHHHPPPPLTRYHKHPTTHKNHIRTNPRYTQKPTLRSPLTKLDQQITYHNVTTITIDTSSHLYTVPYTITRIKHTRFTNPRKQLPQQLLSHLLTPIPYNTHAQ

SEQ ID NO: 975560 - protein, 108 aa, Homo sapiens
MVREDGVPDANAGVHEWVMCTINYEITVFHVPLHHGRVYCTTLKSYNDQDATRIRGSLGKTHLRSWNETIRCDKGNSSRCQHNQAYKGLKIHERTGKIILTHVVCLYF

SEQ ID NO: 975561 - protein, 339 aa, Homo sapiens
AYEPQGASGYDYSYAGGRGSYGDSWWTYHLLHKLTIPKALRLDSTYRQRWLSGLKQTPLTELAEPSDHKLDEPFYHTDSDTIGIHLPTSTAHTPAHPRITRNATSYPCLQQTSRCTPTYLPPLLRHGLLTLPQHYSPSPPPLLRLLATPRYSPGSTRSPPPPHPQPRPHTLTPRRSPGPSLSPPPLPTPRPLPAPSPQGPPPYSPFLASPSTPPLPSPLLDALVPSAPSSSALFPPHHLPPWPSTLPPFYTPPLALCPPAPPSPPRSPSPPPTPLLPPPPPPHTPPPPPRRRSALSPPSPAPPSRPASPTPFLPPLLTPPAPPPSPSRGPPAPPPAPPP

SEQ ID NO: 975562 - protein, 105 aa, Homo sapiens
MVHKSYAPSHTYSSNPEDSYNGGSPSLMKRQKILTKLGPTVGKQHNVWGGASRMEDHDNFGEDRNGRHAQAAKSPAELGGHPKTRGRFQTKGACDTGRNPRKQKD

SEQ ID NO: 975563 - protein, 198 aa, Homo sapiens
  misc_feature (49)..(49): Xaa can be any naturally occurring amino acid
ELQRLRRDPEAAPASAARPGPAPPVSVPPAAPPAPPRKPKASPRVAQRXGPWVAGKHACLVWPLGDPFGGRRAVVLQPSLMRGVRGRLPVCRLVWRWAPPGVGGPLFSTRAFSRDLARSAGTQRGRTTRLEPPQVGLSTKGHAHVSCDHISVQCPAWHNNSNTPPSSNSPRIARVYVGFTNPCNPRAVPFRALQTPTH

SEQ ID NO: 975564 - protein, 205 aa, Homo sapiens
EVSSATEQTGVKNMSFFSIYNTDKPLLNQLSVNNTNFLYLVLSKIKFCGIKTISVEGLHDCHDGKILKQELIKTVCRCLILRNQKYQQDDETTHRTTIHEAHDAGPDRTLFIQVSLSARSSTRSSQAQQDDATAHQRFPVPHGQPEDTGTSVTQDYPEVSCHENPQEHHDLVRMPPPFHEQPYLDVTPGLAGEVLVDDALLARMT

SEQ ID NO: 975565 - protein, 187 aa, Homo sapiens
TNVFVYARGTSNAENLAVMPQAKFVSENNNLPIDNTHRYLKHTWLAVCRVMLDNTGTTEADLQLKRQCHSACTVLVGVIILYDHVTYQWEHMLNKLPTIAYARLVSHVLKDQPPNSVEGLLQCSQVHNHTHLHCMTTTYQDNIKVHAAHNQSWHYSTCLSDRQTSYSLPVTGEWQLFNADLPLTYSH

SEQ ID NO: 975566 - protein, 100 aa, Homo sapiens
LYRVTKISGLHADRVRDAVQYTRPLISYNTRYNKRDCTREHALFFIVHTDDQTRLYPKQMDTTGNTEEEDTEPPPSTPRTDTHNFDTNQDRHNQTNRNET

SEQ ID NO: 975567 - protein, 347 aa, Homo sapiens
MAPALSPYRFMFRFPPYFTDVVLCPRHPAIRLEIEVASTSLRIDNQLKAVLRISQRPEMGYSTSEDFRNTWFAPRNAQEDIAFLPPVEGWTVRNPSYVICTICLVESYSILCPSKKIYIGFELRVIGTDGGPRDYAAVYYAQPYESSLVHRVWPRYDNVLGRLVPCELKVYSHSMWEDLAKKGLEIIPSSGKTCFAYRALKNCTVIDCPANRNWTSSEGAVSCNYLEEKFDEYLKPAESSLRHEPDNLQGDFVLGPSELSDINGVRLHKPDTGVEESVRLHPGWNDGGSTRNAMKLIQAQVITAAAPRTSKGGGRGPPDARHNPRVDFNGRCPFRTLGDGNIAALYI

SEQ ID NO: 975568 - protein, 117 aa, Homo sapiens
MPGGVRSANPARCPGLERPACGAPRAEETGGPRVSNRSSRKCNRVLRAGHWGHSRGWRHKQVVLTPCVGGAHLHRDGNEGSQDPLGDRPHGLFELTLKPRGASDILSQSDQPRLKAR

SEQ ID NO: 975569 - protein, 309 aa, Homo sapiens
VLARRYLCRVTSCFLSLSRAVWVAAVRSQPRKCTNRRRRFRGPVRAAEMLRWAIASSVPGTRPSIPDEGWPRVEQGVTMAGFDVAKSLHTPNAYFVGSAQLTATRSGGWKPQNCIVPNFPVPGISASRRAPVNVANSVLSNESNAFLRHWAPERHSSTKGICWDTLKLRAPITRFQTIYSLDTKPQRRHKAQEDRDRGQDYHMNREPRWHDRRHTHPWRHQVCADGETYVVTKPHKYGSRMKRRPPVTPQKGTSRQSEHKAMIPIQRAKAITLDKRQPTSRQRNILTRRRRAETTPTNEKLNTNTRHLV

SEQ ID NO: 975570 - protein, 215 aa, Homo sapiens
DSTLRGGPRVTRFVNEKCPVGVAKRTLVVQCRVLAVVTMCKQPGKRGTVLKNHPDDGYMRVVTGSLIHPWSPQAEAWDNHTWGPLKMAGLPQKGSPREKRHRAEPRRDPQRGESRKGSPYAHKGTHARNTQKCRTQEGGCPKERPRRAVWHPKDGARRSLTKSWRDRHKTRKKLPETKRGQQIRRTEPQEGQHTGKFNPRLYTGATDHTQDSQQY

SEQ ID NO: 975571 - protein, 101 aa, Homo sapiens
SPCHVVDAKLCLVCYMLVCVLHAAGPVYLVIVLVLAYARAVHGLRTNLIVHMMYVPVHAPCELPRELTLRCNRLSLMCSLYRWWHADLAYTRGFGYCPSVS

SEQ ID NO: 975572 - protein, 520 aa, Homo sapiens
SLSACGGGGVQERATPGRNLSGVVSLVPAHLVARLPPHSRVQERKTAIRGWAHRESSKGTGAGERNGRPGDHRPDSGTHLPEGTTERRRRPDKNTAQETDRHSSPTAETWRGDTPYVDDRIIKTRGASTQEGLNRATANPQWAKARPRTHQRRQTPPERDRHPDRITRKDRSTHRRPRSGNKPTRGNLRKEVPPAAEAKRRGAPPKEPAGKNTTRKQTPGNNMYGNPRAHRVGDKRTHRTLERTAPKTAQQARIQQGHTAKKKEGIKRSNHGSTRGRKRLQKRQTDAATTQHLDKANTKSTRTTKGKTKGHTRGGTQGHNRDHPEKDGDLNTKSTTQKHPGEKNPPRREHHEVGVNSPNERRKYEKAEDDQPRDNTDRAKMQLASRDTPPHPRDAQTKAPKKEQAKTQHIEHKTHNITTHTSETRFHKTKVTNSARHNTPRARGKTNQTAGGVTHKSETTAKRDAKQRRRPKHNVWSHAERTTIGPATTKRTSTTGQSCNKPRTEIVCNQHRTAQGEQQN

SEQ ID NO: 975573 - protein, 72 aa, Homo sapiens
GLFRERRVLASAVWAWRLFLARWQICRLIRKKDVAVPNGGGASVREADINQGKKTSNNLHSWSKSNVAPTLT

SEQ ID NO: 975574 - protein, 185 aa, Homo sapiens
MAKSLRELRLAGTKDCVLTMRYEDCPPKECRAGLEKYSQKLDGDVYSERMFQEIANLWWYPKTSKRFVQGAKHACVRFTLYENKYELLTVVRGVVVTMKQENDVFYEPKHVYEWLDEWMNPKGWRKRADGAKVEMEKEWGEIGIGKKSVENVGKRGTAAGIESFRNPLGKIAIHWDTMTRLGLVS

SEQ ID NO: 975575 - protein, 257 aa, Homo sapiens
MTNNRLDKHATKRRMGRNGGGSRDREAENSRQETERANRRREADSRRRETTSEREERAREREGEERRRRQRAKRKEKERERKAERERRRRGQSKKGHEPQHAQRKHGEREQANREASDDRRREEERREESIERGEQGRTRRGEKTGERIGRGARRKEKQQNQEASTQQDARREEETHKEPSKERRKTAGSKTKEKRTERSRDEGKEGEEKERRNGGEEEEREEVKHETGHAKGRRREGESGRRERQKTAGEEERKDN

SEQ ID NO: 975576 - protein, 33 aa, Homo sapiens
EKTTNHPNKELDITNRALGLERTTERRSFERGS

SEQ ID NO: 975577 - protein, 398 aa, Homo sapiens
MQTEELLPSQIARGQTRALLLKMTPCAQEDLKWLRATTCPPLCPRCVSQAENDSMPCGSITAIIKGPSGEGAQNRGARTWGPTKGIENPADDEHSMEGPLVLLPPGGVSVRYRILSCYNTSPHPATRTRPRPTVSQQVQSTQYLTRRQRPPLQTRRATTRPASGPTTEGGTRRGAGGRERGGRAGGSGSEQEEGAAEDTGAAPEGRRGERRGASGEKRSTAQRRSKTEGPRGRQGERDGEEQGAGGGGGGGPGQRRSREKKTALKNAGRGGASRGARKAGRESETQRGWRHGRTEERERGRDRESGQREDGEGDERKREPARETPTEKRMPQERREERAREGRRVREAAGRKRAQTTQQTEETKEETGTAAEGNKARGQRPQGAKHEERTGTKHTEAQ

SEQ ID NO: 975578 - protein, 70 aa, Homo sapiens
CGARIVCSNSLRPVLPHSAAMSFLKSFPPAVPAEGLRAGQPQDIEAVVETEKVLAHVATLYTSLRAACLC

SEQ ID NO: 975579 - protein, 327 aa, Homo sapiens
GASLERVRTGCGRSCRTEVQRPRGHGVTQRGIDPCGSHVRRTPLSSPTRVSACALRDETSVLLPVWRGPEARRVGLGWKAPIGGGGWVPPLKGGKRRWGCGGWNPRVGPGSGRFPTLWGTRRVPPAGDGPPGGLRPDALGARDIGLRAPVVGPPKGQANLVGTFAWVGLATSSLGGRRLPCLRKRQCLGCVHRPGSPDNGGARELGCALVGRDPGGGQARALPPVCGSSSDRGVACGFVHDAPWGAHMVWNGGAMEIVIPLGEATGPGGGGGRSLGDSQGLWRLKRGDRVAPVGWLARSQGRDILGRCGNCWTSLCGHRAFGRPPRS

SEQ ID NO: 975580 - protein, 78 aa, Homo sapiens
EAKGRYASVPDGPRRLCLHLSFASPFRERTVSLFLSTLGGCCLAAPSYCSGPSLFAPLGGRWEALGSKTPSLEIVFGL

SEQ ID NO: 975581 - protein, 316 aa, Homo sapiens
  misc_feature (67)..(67): Xaa can be any naturally occurring amino acid
PVAAEGRGQDRAIRPELAVVVSRPAWWGAPSRPRGRRIGWAPGLQPGREEGTRDLRERGNFGGPSAXVRATTKVVVGPGRLRGHLLAAVLTQRAPRKRVTAHRNMAQEGRIQGKEPPVWLGTGVHTAGQQEYWWTHPGECHGPPGVNGGDPTRREKFNGTIRGCYGEPRAEGRLKPAPGGKSKGRGNCRHPQNRAYQKRRQRGYVVRRQQARQRCVTLRSDRPSVDIISGTVAYGLKRGLTNRHSRGNSRGSSSGPHRALKAESTVKTRDMVSRRHEDFGPNDKTFGLTQIAELRSERTRGKAQWKTRLWQSPTER

SEQ ID NO: 975582 - protein, 120 aa, Homo sapiens
MRLLLLLLVAALCGWSGARPRPNLGGVPGKRLKMQYATGPLLKSQICVPEVIARVFRRSTWRGYEARRYPDIRIEGENYLPQQYKDHIASFRVSLQKLVSPRLNYCVGKDPFAFLCIASS

SEQ ID NO: 975583 - protein, 109 aa, Homo sapiens
YDWNIFTVSLGVLGKNFLSFMVLFKPARMKLSTDTSSSIWKKKATSHLTFYQSDVQADLRTLEQLSFIPEDDSVGDCITLQVRNPNVMCMSQSVTHQSIVHLHLFHHCL

SEQ ID NO: 975584 - protein, 341 aa, Homo sapiens
AANWRAAVMCMEEQPDHIIKGIVFQDGYQTSLALPVNIRGAQRQIAAATQVCNGHLKPQGANRPTTPDDETKRMHARHTLSGNSPSYGQAKPLRTGMSHSKTAAYSRVQTFCTAGRNKLGHVYVKDNFLQLLRLLIVPNSQKELRSPWIVTLRSALMAPVTIFNCGSHCHPVATLPLSIHLFGLPEIHSRSHDIPRITCLRQGPHNFVATYLWLVHLVSQSLDLHSGQRRRADRRKPSRKPRHASRHTSTINGQQVHNRGADNRLSTHPKASWTCHWVGKLESDAHIEHGQYRSDAKHRSDGAQLPHEHARKEGTGTEQSRDPPEHTAAVHHATTTGVTPE

SEQ ID NO: 975585 - protein, 72 aa, Homo sapiens
TVPGAPVLAVGGFGHGDLFWPWWHILVSLNPQKDVAVPKRRLRRVRQSGFKPVKNTPGANFSLGDRPKVTPI

SEQ ID NO: 975586 - protein, 387 aa, Homo sapiens
GLLARATGCRCCRGSLCPAACGPPAPGPWGLPLAAVEEPASAGSKRRAAWTPETLERRPERASTAGGTTTGHQCAQNSPMHNLGVEGVPFTHGRNSYLHQALGTNLANEEALVKAAKGVTQTQFACRPLGNLCGKQCGHKGPNTAGPWRQRVTITTNSRGGTLAGHHTRHCAPHTVTILGSVATCGQCAHFPSNGETLRPNGTSQDTRENSQGNSQRRHCTQCFRKHKMGPTGLLPVLDPNISLRGKSHKQHTSVNGESFLLKERRTRKQANKQKGSVTGDAHITNKGYPRIIPSPPPGQFKKAETKSHVATKQEWCGTQILTSNKQPRDRHETPSTAQNSGQQPNSDMQRDINGKTPWQRTSGLTKWHRANGPRDETLRQSGNTEV

SEQ ID NO: 975587 - protein, 90 aa, Homo sapiens
ALPGAGITLRGSAEIVREFFSFGINEHFNISVAYTPSEPFTSSAEYTDSPVLCNYVICELIKYLNNVVEPSERWGYTSVQSRNWCSYLKY

SEQ ID NO: 975588 - protein, 322 aa, Homo sapiens
EGCEQRGGEAAWTDEEETYRSGKSRRTIMQLCNDAVVILLAQGLCLDQTLGDVQSPFWWTHACIEGAAGAHGPSTRCLFAHKMMTPRDQIVCGLFPGWSPMGGLSRTFQGWSLPAPCRERRTSFTRGSSFGGWPARDLTPFRQEASPRGSDIGPPDGNSVEARFLGGEGGGHSTFSWGTALSSLEHCRSCPKAGTVDQSLGGPDIKPAGGRTQACPGSQGGATLVGALLGSQGWGPLLHSSGPCERVAGYITNGWCGVPAEALEGEPVAPSWVKAWLADSGPKFQVWLWLQGWCPRPLWGFVPASVLGVTKEPGWCGFTRLV

SEQ ID NO: 975589 - protein, 178 aa, Homo sapiens
MHTDDALRRNLRLHMCDTHTVRLPQELQGTSQGYHRHFALHVTAMSGYNSSHNKAHELLATLGGKHKLVFSWELVRILAGFTRASGIRDTGMAGQLGFVHYNYMVKPLTVEALLERVGNTLKRRIFAAKINASVNSQGGKVTGNDIGQSGAGGNTTTPNHKLRHYNRYELKYKCYVGY

SEQ ID NO: 975590 - protein, 235 aa, Homo sapiens
MRRDSRERTTGHERARVQEEKRGNEDGDSRKDRETKHNPEHEETKQAKKKRSKRTSNEGNKTRAHRQHAQTNQTADETKELKKSKKTKRTRESETEEAKEQEPEKKEGETQRTPARTRKREQREREPSAPAASRTTESRTAKTEHRGQGQHEHRQNRTRTGAERRQDGRPSTRREREKDDEKQHAQTESRERADRARSKPSQNKERQAEKNKQRAEANSRESRKGQQARAQPAGA

SEQ ID NO: 975591 - protein, 31 aa, Homo sapiens
MAQQWHARGHANLAHFHIRTDSLDTSMRLST

SEQ ID NO: 975592 - protein, 102 aa, Homo sapiens
TIGDDSGCGEVSVQSAHGLRTVNPSMGEVQKGKKMLLCVKCDPAGPYRMTRPATRSKIGSTILHVSSVGPDSTFQAPMVYSFNSSSAIKNKGTSIVGESTTT

SEQ ID NO: 975593 - protein, 130 aa, Homo sapiens
GWGVRGRSLKGDSSSNQYVNDDTGVSLPSYEEDQGSKLMRKAKRGTIRTAWNSGFASPIVAYGLYKTEEQGKYYNVRIHLIHMRVAGQGFVVGARTVGMGYSSVSGMAGQKPKPLRRRDAVYGLVGGACL

SEQ ID NO: 975594 - protein, 249 aa, Homo sapiens
RWLTPVIPAVGRPRRVHHLRSRVRDKSGQDGETPVSTKNTKISRAWWLMPVISATREAETGECLNPGGGGCSEPRSRHRTPAWATERDSTSKKKKKQGESGALFWWFAKTGWGVPLVHNFLFIFTLKGYLEKVWPGGHSIKSFKPLQGIGGTERWGVQAWTMGAGNLVGKAVVVTLERGPPKVLQVNGQHSKGVPKGSQPHGEVHHGGATCGENWNQWLSLVRERLEARHREKASGRYRGGRGPPTVGH

SEQ ID NO: 975595 - protein, 246 aa, Homo sapiens
GVTGKLVSGLHLNDLLGKLCEIIEKSEGIKQYLFFMQQVAQKSYGNDKKVFLPTSLCISYGQWMEEHTKEQMERDGVSLNKSLNRCAFTGIGNSDQEMQQLNLDENELLAQPKHGIYLTQYKRKPLHVVWYPMSYGNSDDQSVCSSAQRHKQSSPNLPIQEAVIEKVLTLCHCLRETKGGLCSNLTTIPRQLGYPITGLSERRSLPTGQLTRQWGSLFNHTPLAGSPTPKGEQLPEPGLGSSPFGP

SEQ ID NO: 975596 - protein, 313 aa, Homo sapiens
MALSSPSSSLSHLGNSASEVTRSPRYAQNEDRTSTATTHTLRTTLQTTSFARQPCKLPTLHSQMHSTSQDSISLGHSCLLLRHSLTHMHIGHARTMQSSTTEATAQHRTPSPAKPGLPIRNPLTTRTTHHTPAHHTRHTCPNAHPAALRTTTQARSPQRLTHILPPPLAPPPRTPLATPGRQPPPPPPSPPPPDPPPTASPLPAHPPSLPAHPSVGPQAPQPTHGHAAHIALPWASSAPRLLIPQRPPTPPPRGNPHPHGTPPRKAKPRQRTANRAAHNGPTPTLGTTPQRHTPCPEPTATEATPHTHSATRH

SEQ ID NO: 975597 - protein, 41 aa, Homo sapiens
MDEAHYLPPGEAIPHDSRTPAYIDQMVGSPDKVALLSSLAR

SEQ ID NO: 975598 - protein, 70 aa, Homo sapiens
MGRLGPSSPRGCCWGATLGGVALLALKRLLSLPLRCSCYAATSVSCVRFVRHPSVLGGFGATPGVALRVL

SEQ ID NO: 975599 - protein, 120 aa, Homo sapiens
  misc_feature (107)..(107): Xaa can be any naturally occurring amino acid
GLVRCVGVGARCRTGSALITDVAASANSSPTMLGRVASFLPLSVPLFNYVGPFKQIPRSRNESGAFSDPGFPGTNKLLKRKAMRRAYRSGLFHTFHLSIPHFLKPQXQPKQFTKEPKTLQ

SEQ ID NO: 975600 - protein, 103 aa, Homo sapiens
MESRGHRWRKNTGVPKREETGGTTVTNSGARRSLHNKNNKNPARGGTTSRRGGYAGDKNSTTKEERASLRGDQKHQGGRTYYPTREGALTKQGRPPRNLLQNI

SEQ ID NO: 975601 - protein, 142 aa, Homo sapiens
MAPYIFFNKRGNNNTRNGGSQVLNSISPGAAVNHPGGRGRPSCGGPWYGRYGGTTRGSDRVATKRGAGSPHYTFAPPLCGCPILISQQDLRGVGGNKQARISGQTTMLNRFYTYRIISQDSEHISTHGGTQPKAGRAPIECG

SEQ ID NO: 975602 - protein, 126 aa, Homo sapiens
MLLVTGPSRPPRKSSFRNRLACWPAAGPPIAVTAHTSWHQPVSPGGEHAGETGSHGRVGIPSAMKTSTRAGNTRGVCGPSPQRLAPRQATARGDLLSAGGPEKERVCLKYYPPGPSGCVPLKRLKT

SEQ ID NO: 975603 - protein, 116 aa, Homo sapiens
MASRSRLLLHAGAALLTAALIFFAIGNYTHSDELKTDYKNPIDQLKYPESPVYSQSTLIHRFLRVSCLLCASRVAYTWVLNYCPFLGIIHTCGGTMSDQLTELGPGPSYDPYKPFH

SEQ ID NO: 975604 - protein, 187 aa, Homo sapiens
GGSTVRPEHESLAFADPPPVQPAAVTMDDDIAALVVDKGSGMCKAGFGAQHECPPGRLSPSIVGADTRQHRELMASGTGVTHRSLCGADGGQETREDILHPTESTPTSTPTVTIRYKPKTGGTHHCAATTPWDKQPTLTVTKERWQMMDIPKEDTTVAWNEPGGTTPMKAPKGSNTEKTELTTNNTK

SEQ ID NO: 975605 - protein, 241 aa, Homo sapiens
MRILVTGGSGLVGKAIQKVCSRWSWTSWRGLGVVSSKDADLTDTAQTRPCCEKVQPTQRHPSCCKWWGGLFRNIKYNLDFWRNKMCTLNDKVLHFRAFEVGSPQRGGVLPVSTCIFRGQRTNYPIDETMIHKWGSPQQQFGYSYAKEDDRGAEHGPTFQASTGCTLSPAVIHHQTFFVTPGTTSTIQEHGSGLTVCGVTGENTADGRFIYFAGPWPSSLSRVLPSHKKWRPYTSRGRAMRF

SEQ ID NO: 975606 - protein, 85 aa, Homo sapiens
ATSYTRVHRLVPPVWDSIRYLNGSIQNAVVTFKMMLFIEQIQKFTVVLVLCNNHYGKISRKPACGHANGVTDTGDICFEHALCGW

SEQ ID NO: 975607 - protein, 292 aa, Homo sapiens
LCLIPFPPNPDSVKCSSSPPRTAAERGISLPQPSSQPFPSNNKQLQVDSGLWEVRLSQPRKELLYTAPNEMAHKSTIRQSHTSSVCQAPSFLPFSTNLSAGVKGCVAPIYRHQGLKLLGQTNPRGKTAARRNYLLNHQLRAWSAILFPIVCGGLQTLMFPASVFPRNYSCILGFQTLTRRTSVPPGRRGLFISRCAPGIPSVVDFHGPVPGQGPLPHLHGRREAFNSYCKAAIFTLMDNGLPQCGKSLSYSKFYTTAWFKKLINLKALALYASGRQGRALTYGSNFYTDLSG

SEQ ID NO: 975608 - protein, 85 aa, Homo sapiens
MGGDKNCCCSQEENRSWSQQHTCAGGDSSHTKLKKGGRGETRGTVVETQRPQKEDCREGNKRRELHEGGCPKDRAEGKIKPARGG

SEQ ID NO: 975609 - protein, 116 aa, Homo sapiens
MHTLGPNGGPKEKKPGAQKQWGVWVSPPNKKRRRGGHPRRCLGNKLPKSGGVSRGGQIGGSYSPREAPKRRRILKLYRPRAWRRMMSRKTRGQNVVSYGSRRTNRRNDHEETLRHT

SEQ ID NO: 975610 - protein, 131 aa, Homo sapiens
AQLIDSMANSFVGKGPTCRQKDSRDSLLCAVRHLEHGTVSGRDGGWRGIPSLLQMPMELELMFGCQVEGDAVESPPRPGTPGGGPLSSYGMDSRPPMAILGVCGITIGQSEPRSKKLASGVVSPWEFQELW

SEQ ID NO: 975611 - protein, 200 aa, Homo sapiens
MNVIGTTWRNVVGRETTGRGAEINAGGQDLLLQGKTINETHSGEMQLFEGLVDPIYWLKGTWAMSRLAQKKAVEPFIRVPGKLNGGTFSAKWGAKLAPRGGKRDRGSLQKVSTETRNDPGEERFRVETPLGKTDGGLDHRGLEGTPRGKAMIQVWEVIPEGVGPAANCRGIAGHDSFEPHHFLGKREARGEHFETCRPGM

SEQ ID NO: 975612 - protein, 223 aa, Homo sapiens
GETGPPGAQSLAFADPPPVHTRRSSPVDDDIAALVVDKGSGMCKAGLRGRRCPPGRLSPSIVGAPQAPGVMVGMGQQGILCGQDEAQSTRGILHPEVPPIETRDRPPNVRRHLEKHLGTKHRPTNGRLRVAPEAATPGRFAMKPEGPPLENPPQGPHPAERTEWTPSDSTAADKPIQTPPPQRHVDYRLPPTHKRLGRLYHPACITRHFMAHREPTGTLDDWA

SEQ ID NO: 975613 - protein, 106 aa, Homo sapiens
LLRQNQPVACLSQRRPLIHRLPCREVCFSGDVGPNFVRPHTTVGRIRFHRFLGDSWGILFSHPRDFTPVCTKSWGELAKVGTRIVPRGMSRGWALSIEQCGGPSVP

SEQ ID NO: 975614 - protein, 172 aa, Homo sapiens
RCNSTATSCTDSKHSSLYSIQDSFNGAEGLTPRSGTTPKPVINSTPGRTPLRDKLNINPEDGMADYSDPSYVKQMERESREHLRLGLVAFLPLRTDFGNWFYQKMAEKDAGKNVNLDDYLHFGNDGWLDGGMLEKQAIEMQSVYQAQWKRNAIKLVQKRSAKDPSEVNGNLF

SEQ ID NO: 975615 - protein, 76 aa, Homo sapiens
AAAGLRGACCLLSPQWRVLALVISVSSEQGGVTLVHRCHFVPVGIPKGFLFGPSIVVETVVHIRNLCRRKDIQTDR

SEQ ID NO: 975616 - protein, 270 aa, Homo sapiens
  misc_feature (150)..(150): Xaa can be any naturally occurring amino acid
  misc_feature (177)..(177): Xaa can be any naturally occurring amino acid
MGGTGSPGVLDGLKGPELWADAVLWWALGENPLTWLWSVVSSPTNKPGFSKTHKISNQNKNHFAAGQDFGPIEENSVFRHTTLPVGERGPPRKGETRHQWAPNGESPRKKHPGGTRHTSGLSIPHTPDKKRRRGGNTAQTSSGKHIHKWXLRGDTTLGTIPTGRPKRGSRKSKILGXRDGGVKNIRNQQHTSNEHDSDRHSPTRASTQTTQQTTKNAHLRIPQQTLPDHTKTTTDSSASHDTTRTTKDHPDSDYSYPTAYTTRYSQQASS

SEQ ID NO: 975617 - protein, 300 aa, Homo sapiens
PPSDFTPVCTTELESCKGGTRIGKRNVRDGPFNRQCVRTIFALEQGIINAYNCEEPTEKLPFPIIAGLGIEELCQSLVWAMPGIPSQSKADKGACLVAQAPRGWYVSRVPELHARLGSWFLSLLTQFTHLARGNLWTGRTPLKGGYAQSFFLPQGVVPQPGTKHKGFLPTPPGVDCGPRTGGIRWLDRAPLSNTNSPWTSKRNGPHKKPFFPRKRRTLFNPNKEASPILLRNGHTTFRLTRPPEAYKSLLGDTLGRFVEAQARDWSRCHNCRPSIARHFPLYHHSLGGHPQPSGFIKGWS

SEQ ID NO: 975618 - protein, 117 aa, Homo sapiens
MVAPFVLPVLYLGHLKWGLNTSYLGIPRMLPFPPIPPSLFIPVLVKGLFLSVSDTLCYGELKTEFYKELIVGPSFGSHSYPAKERVEQIGFNSRVSAQAKDLLWRSPYIRGGADDSP

SEQ ID NO: 975619 - protein, 95 aa, Homo sapiens
MQGPQGTKRPNQPRATPTVSDTPPTGHTNNTETHYRTNTNPKSTLHNTNEGDTKGTNTPITKNNTQGEQRDRQTTGDTRPKHNRTTDKRLEQQTR

SEQ ID NO: 975620 - protein, 303 aa, Homo sapiens
GSRRSRGSVSLLQQCWDGTRSGDSLPASDRLRFPLGYELSGTIFSASPASGTGQHRLVVSSFCAKPTMSSQIRQNYPTDVKRSLNSRGQIGYLQASYSHNPFLSLGLTNFRPATMTVGLLERPSSPTFLPRRNWGPEGRKGHGGCYTDAVLLGRIATHTNARLWAPARGPIFQGTIQRQAPAVKRTEGGDNTPKKGPMEHGCQRALGTQKRTVTNPGHVVGNPARAREFLGQERRPHIMVAELRGGTTFPYDGRQVAPSSQERLGSPRWDQLATGQERARKTGHGRTTSNRKAVTLQASMNKL

SEQ ID NO: 975621 - protein, 418 aa, Homo sapiens
AFSCHLAVPVCVRQSSGGPAETRFEHRTLVPRRWPIIQLRHRYNNRLWHGGSGQAGTGQRGAGKFPARSRAQGRAKGSRQEQEGRCDRTTAHPLKALTSREGRRSSQGPGLALADRRPTPCLQTLQPRGRDTRRTPDASDAQHHPTPVTPREQHSPKTWHAPPQCRHSARRHTAQWASASTHRTDKAESHHRYQAQPRPNGHEHNTPSQTPPLHPRTATRARTTTTLLPHWAHLRTQGLAHTSFRTKHPQRDNHVLTSHFSPNPFKSVPRRIHLAASRKPTCHPIYPAPNSARDTPRATACQHRTTRAHPQGNLLKPPGPAGGRNKAAHTSSNTPTAVAPTPRSATQPPHPRSPCQQQRPHRAPPGPHATPHAHNTSHNLGARHQRPTRPHNSSRTPPPAPHTANTPPHDHAPRHISA

SEQ ID NO: 975622 - protein, 183 aa, Homo sapiens
PLSGWSVSFQPLDPGQRHSDPFSERCSPWPSYYFKPMMKEYRFEPSSQTGSSDAGKARVLKITIHGVFENRLTGMLMDYMLSILYTERLRFKGFARDELVRAKIVSCRAISRAHDTVGQTEHEGPKFRGIEVRIWLPGIVVYPYRCKSQGVNGTPDPQYAAGRISHSTNKRLIRSVRGIHCIL

SEQ ID NO: 975623 - protein, 69 aa, Homo sapiens
NSVVATGNQIRSYSCASLPLFLRNHVDKPDYGEIEKLDKSKLKKTERQEKNPGAFQRKDWTRRSKQGNR

SEQ ID NO: 975624 - protein, 68 aa, Homo sapiens
KHGGVGYEAGTKPRDAGVVPVGTEEAPKLFVLNSHLRCGCPEDGMTVSGLPGALAYTTCSLNYERMWT

SEQ ID NO: 975625 - protein, 124 aa, Homo sapiens
VVAVRGVKARGLFVSLAMGCSLLGAVNHPGGRRNIGGEFSLQSGINEHVYIGGWNTSNFETFTFRSAGNRDSTCVCKLRWFCEASLKIPKISVGGTTHVGKHVVYYQGVAVQENVVCRLSSKLL

SEQ ID NO: 975626 - protein, 323 aa, Homo sapiens
KGAKSMAKGRGEEQQEREEKSKRKAAAKNFRRLQALWDGGDGKRGAITRLKSGCRFLRGFERFREIAHRNGAAEQVNVHRWWKQAAGGREKVGLVNEKNLKIEKERLWGMKGRTKSLYRMIDGATSGCIDRAHEESLMDGQRALIDDTLPSLKFASYFKGKREFSREDSHLAIIEIRPQGENEYEPCEPAPPQVNTKLTVLIHRNEDVCLERKLVHTVHSHEIFTDLMGLTGDRNTHRWLHLRHLQMVKWSLKMSRVARTDVEEGAPQNNAGNSGIFTDRGINGVWAPFPTTYRRGALPQGASISYRKGWRTTHVSGFKNRGN

SEQ ID NO: 975627 - protein, 103 aa, Homo sapiens
MRRKHARRQEDTERGRTMPGRTTAEQTENAQPAADRTATPRADMEQASERGELNQKSTNRSQIRITQYSSSQSITEGRTRPKESRRTHTPTLTGRTVTAARTT

SEQ ID NO: 975628 - protein, 95 aa, Homo sapiens
NSVLPTGRTDFARTRAPRCGMLWNIVEKPIWMRIDEIQIEVEELKKSDEGKDNGPLLSNRKRLDSRSKASREKVEMEACAVEILELVYSIKHLPS

SEQ ID NO: 975629 - protein, 218 aa, Homo sapiens
MASWHHTHTAAEDRNTLVEQAWLIQHFETGRTEKYVDTPFGKPSDALLRGRSQNVDSILLARHARQTHHHAFKGQLPGEHLGLRRKRAVHNVIVTTAEWILEGGDYSPENIVIHRFSTFTRDTTMKNSRPYTYACDSQFICSQTKMCHSSTCAYTRYSLKHETRIPRKQNEHTDTPRHTRDATHKERTHRTHNPKGPTVIRNRETHTIHEPQTQKTTK

SEQ ID NO: 975630 - protein, 267 aa, Homo sapiens
MAWNFHRNSANNVDTNYWKPDNRNWTDQIGSRLRHTGPISTTTRSTPKSPGHQCTHAGYTLPTFLSFTKHAHTRGNTNPLAHGQRIALEAKYGWDTCKSNGVHAGPKASLQGMGHVGWGVTPQYWTPFVAPVGPNSNSSGRVINTFGKQGVTRANCGAFTQPKQHSTVAPTLATRPFGQRLHFIIQNNVWVHAIFDPPPEIPPVHSGNTGYPTLYSTVVADLDGQPTPTVDPRGHSHFCRNSHNLPSNSSRHNNTTLEPDVVAYTCA

SEQ ID NO: 975631 - protein, 84 aa, Homo sapiens
DGNGAERLSQSGEDDCQQDVDLEVKDSIPVTELQQVDLLKVMHLSSERVQLVVKNELLPQIIPLTFQQMKISRFSQDKMNWEPH

SEQ ID NO: 975632 - protein, 157 aa, Homo sapiens
MCVGRARPRRPGEKEVLKTHSRVGARRGPQRSVWEHTGAHKRGVPRGRNSRGRTDTRAGGCSPPPNIKKAAGGGTTGCVVEAKHSTRGGSSAGERHTAGYYNTRRGATKEQARIYKIYPQRPEGEEHQIIILLVKPTTTSHRNQHPPITIRNTNSAE

SEQ ID NO: 975633 - protein, 107 aa, Homo sapiens
MRISRDDEQLKDAAEDIYGGHEGMGGEDGLTVGQRTYTGLPGPGSSGHLQKYGRTPQVHGPPLVVGQLHRVPVARRENTIDSTLADSYTHKRLQDACRGAPACEHNR

SEQ ID NO: 975634 - protein, 451 aa, Homo sapiens
RFLKILLFALCVVLSVLPEQDLCCKATKLLLNLCTWHLYRNLVAARQHGYLTPFGLNGIQRNIYSFNSEVYTCFLPSGGYPCNSAMLMERKTGNLKPRPKPSLTFSLNANRYQQFSTPHHQLRISLTTFCDHIQSTTEWASTVYNWHLLTSPSPPYTTNHIPSLPPSHRPPPTTPPPQPSLLPHHLIPNPLVSHPHTSSHPPPTHHLHTIFSSTLHSLSPYTQHLPSTLPPPNTYTHSPPDPLPTPLTLFTFLSTTTHYSTTDHLHTMCPLLHLSCALLELKHLLNLPPNSNLTHYQLTHNITYSSRISLFVLITHLLNYCLSTPSHNIKTHWVGSTRDKLVGRNTDQMTPRLVRVYGDRALEPVLRRLGRSTESLVLSDVSCERIDELKLTDLQTPKANSTTCAAQLHASVNSDSDDISVARSTCAERRAEEADKHTEVTLSSSIVTDTK

SEQ ID NO: 975635 - protein, 434 aa, Homo sapiens
  misc_feature (324)..(324): Xaa can be any naturally occurring amino acid
LSPGVLVEVTSSLNPAWQSLTHRRDAQVRQGDLAVQLLPYDHPTMGLIYPKCLIAGTQTHVGSQADAARLRIVPSPPTRLWLLMGNEHHDCAQAIRRAPGHPNPALAENLLPPYPRARNRCASRSSHHRSAPSTEHPADPLLRRAQYTLLPNPALPVSCAAPLAPPLAATLPLVPQPHEPTLASFARPRSKPPPSFPRPSPRYSPPITTLPSARHPIRHHVPRPLTACTAWAHRHCRAPTRGVPPAALPSPLPVIPAPTMLPRLRPLRPGIFNAPAASGTPRPQRTFFEPSLPTLPCDQLPPTGRPSGPCPRASPTCQTMTNAXRLPTDHSPPYPNLGITPHLSFPSQSTANIIKQHVASLTHTHFTSNPPHQHAFILTQTSHTSTSLSATVTHHTMFAPSPLLLLPPHHPLMFESHISHTTTTACHINPTLIK

SEQ ID NO: 975636 - protein, 250 aa, Homo sapiens
MDDDIAALVVDNGSGMCKAGFAGDDAPRAVFPSIVGAPGTRPGLVGMGQKDSYVGDEAQEQREAILTLESTPIEHGFRHQSGTTWRKICGTTPFYNEAACGSEEHPVLDDLRAPWNPRANGEKDDQIMFETLKNPKQMYVAIQGCVILVRLVAGTTGIVKGSGEGSPKLVPSTRGYPSPRHSGWTWWRTGEHSGNLTEAGKSHRRGRTGGNRKRGGPRISKKAAVNPRETNSEIPGRGRPQHHPRSAPHK

SEQ ID NO: 975637 - protein, 63 aa, Homo sapiens
MGRNSWKRKGAWQQISRGGRGICDHTIFGHIPIVDVSPLVHHQRYTSVEYRWDPLGQGTNLNS

SEQ ID NO: 975638 - protein, 177 aa, Homo sapiens
MSSHGRARLVVQIGNVLLGALFALETMGNPSLDGQDAMVDMTYCGMADDVLSRTFLQGDGRWRGDVAPALWYVDVVIPQVIDDTSHWDLPRRSFHAEQLIAGKEKDAGKYTMPEEGQVQAIGKEIIDSCVRTRHAARAWMTQCRRVFKGYLGLPIESGDGNMVLGSTSRASVGTVLR

SEQ ID NO: 975639 - protein, 451 aa, Homo sapiens
AVPLGSEPGVVGGLGWRQTLEQHLEDTTEESLHCLELLCTASHKALNSWVAEETLAQHAAMLGSDIVSLDPANASLSLDHLNPPPCILSMLQRSLSRNSGLPGRTPSIESQDKPRSGSQRAGQAATNTLRPRLNGVHYSCFYQAKPLDHQGTAGLHTHNATTITFHRTPYLKQLYQANSYSGPRLNLHHCLPFQPRLFSSLAPPSSTGQPPYSDTLPQQCPPRGAPLLLTPPAIPFTGFKRNTRHSIWLPRPRPPQSIPRGPTSGVTSFRSTSRPSHFPLHTPLVPDQRATTHQPHYHIILPPPTNHHQLSFLSRRTHILPFLMNNNTFLYRTQPTILCTRNPPSTVLYSLRYNYRYLTVLFATYGGATDLVTTHPTERSAVPHSRHLTTNPRGARHRDSCLLWQNDSTDVAALRRPLMRGALTRRVLRRARSQSTRLATWEARRSSGSRP

SEQ ID NO: 975640 - protein, 247 aa, Homo sapiens
MDYMRVMPSRTEYIGHHVGGIACNLNSSNSGAATQSPGGVPPLVETNPDRNNGNLALHTPSHWLAYARAAPSRLEQDGGSKRSAISFMNNSLPQCSCEHYHEEWWRQYTSESSNNILISFKDVVRPGHPDSKLLYGTPLGDTVDLCRFLTGKIMGIEPWTDLTRHSYETLLKFVDHPVVSQGNLLIPGFRCTQHPKSKYYDPPITTIEANRQGQLSVDTELNVANMRYNTAKVTIPNCLFLCQKLPT

SEQ ID NO: 975641 - protein, 144 aa, Homo sapiens
EDTVDAVSGMHYNTDGSMLSQQSTDKTVAVWDSETGERVQQAKRDISSFVNVLFIAGQEEALMTCLQLCGERWQQLELRDYPEGRAGIQTFQNYRTRCELVTFNDASDQIILVEETMISRSGTVRQNKVSYTMRGHADSVTGCV

SEQ ID NO: 975642 - protein, 302 aa, Homo sapiens
FRRERALAPEQGSVSGANFRRIRSSTVNGASVGGQQRSRAERAGAGAGDAAWDRQPGSGITASQVNPCRPRVPPGLCAGRRKEGPKSAGAGRNTEAGRDSGGTKMAGPPGKLGRAEGANQGALCPAKESRQSVPGAHIKLPSNKNAGRKITGMARLTTLNRSAPGRRITTLVNCEGVPRQEEAGLDAHFVVGATDCGAKRKAKEGGIKSWRSLGQLYGIGGNSYSTTQWGVKPRAGVKTTGRRKSDSDQSADSEKTADAETLREPKLTFGVQLEVRPPGDAKVVAGGTLRRRTHSEKTWDRN

SEQ ID NO: 975643 - protein, 113 aa, Homo sapiens
APGSNDETLLSAVAVLCTQALRPITGQVSAAVAKEPCCCGLTHLNPSAKAYMVTDDDIRNQDERVQPSTAQTHWHTKPLTGRPSVSRCCLTTEARMRLLAHTATRARLKPKNY

SEQ ID NO: 975644 - protein, 569 aa, Homo sapiens
GTRRLPNNRPADSFGSWPPTFKKAHTMAIKFSATKDMSPKPAASLKQPPSRSIRAQLCDLFRIGMGTLAPISMVHKNTAQGGHMQAPLALLQPLSTRTAHMSEQPILAIQRWQTSGHHRPSAHPVHTHIGNSIRWHLLHQSWVALHPPCPHMRHRQAPGIHFTRAHAHNILRGHNRRRFSQHQGRSPSLGTRGHCDLATPPVGRVTRPLLPSVSTTPHFTLVNPPERIGPPQVPGSSPELDSDTLVGHLGQLARGHGLRATCGKHIRTCGTLGTQPSANYRHSHLRASTRRHQRCVQGSQRPHTTACTLLAGTLAHFGPHKHGTPHAPFRTCYNVNYHALVSSSLMSETLTAGAYWTTTTWAIHRYSNISEALGPLAPSVGSVDANNSLRCGVPAVSVTDTCIATTPAMCYTHTNRDHDYASYVMNSQRSYQATSCNPLGMDPISYFTARDYWGHTTAPISEPTVARVLATWCDTTVYSWRHSTTLKLLRKQAETLIVAINLHSDINKPWRRIQRYVKRPVEQSVRMNTHSNLYDADYTQYTHAQCQGCESRACKRSRSHRREYIRGSD

SEQ ID NO: 975645 - protein, 72 aa, Homo sapiens
APLLLLAVPQSRMPELSAEPEPRGLWVVKSTVNDEVIKRFEDYELYGNLATQEEIKTRKKVVLLAVFKTMYK

SEQ ID NO: 975646 - protein, 38 aa, Homo sapiens
MGDQHTGHTTTRMNRPTKAPRYQVERHNGPNKTSLHKA

SEQ ID NO: 975647 - protein, 178 aa, Homo sapiens
ERRPGGVLRSVVALLGARGECKLLVLRLERAARGSAFFCRDPRRSDECWHKSLTRHGGERVHGLPRVLTNLVIYEFGEAARLGYMKQRKQRVLETYGCGKNEHTGRLVIGRSQIKSHSEPGKKTTTHYMKNWRSQISGKVWNSKFIRKIRRHCGLGFSEVEDHDGEGDVGWTLTDDDR

SEQ ID NO: 975648 - protein, 97 aa, Homo sapiens
ACVNEIPRPVAPVSQWRYLATQRDWLHLTRNPQDYVDSYMRKYSCPLTTSFVFRLCEKLLSSQHTMASNVTNKTDPRSMNSRVFIWESQGLCVVHEI

SEQ ID NO: 975649 - protein, 230 aa, Homo sapiens
GGRSGSVQGSPVSRRAVVRCRWALQAPGHAPFPARQPGNAAFPRRAKECSKEGTGQLPDTKRAPPKRKEAPRKRQTSGGEVWFRLNLFLCNGVWAQCGKAPEKKKGPTPAEAGISPTSLTRGNPTRCVCQKPHYGAPQSAVDAQTGGPHMRGPRSVDLHPTPTHHYSEKGIYTVVRETTAGGKKQEQTLLECRDCSPRPPLCIETSHGAINQRAKCPQRLQWLYNLQPDI

SEQ ID NO: 975650 - protein, 396 aa, Homo sapiens
AFHPRSPTSARGQPCCPSPCLACALRPSCQRGPFPGRTLDSMAPGKAAEAIHYKTRGRWAPDLHAGTMKAATDTHLVPSGPTAAGGEYPREAGNPTGRPIYTTHRYLGHAEIPEGHRAKGECEHQCPPCRCPGHQQRPGEQESPKPWLYEAHHGNTARTATTPVYSTQAPRRSTGKWTKQPECRCHAGKRVRKAQHFSTTGTQPRNTSTQRRPSCDTATSTTTPPTGEKSTTQQIKNEPAVEETKANTLQSPVGTQTRGSAPHSEQHEIRHPGQSHYRTTVASATHLSPERTTNTIPVRRLRNPDPPHHTRRKQHKLDNALDSATLPTLSPRMHSPQIVAKPTLRLTVAELTTDSSTGDNNSERAPAPHQHYEPHHTAVKNRHHTSFIRHNTPPTR

SEQ ID NO: 975651 - protein, 236 aa, Homo sapiens
DTELSSYLDSPNKSGLLFWLLLFETGALALSPKLELKLARPLASLQQSTPRFERLLLPQATWEADGRQNHWNLGGGGCSGAEDHAIARPALGQPKGADNFRSSKDNNGAAICGSACCDSASPSSAPLYSPESPVGSPAGVSDRLNSAHTQCRTILRKHVYNDSGPSGRIFLQSRTTRLQRRELPRATAYDRKRLCCETVCLTNARTTFHPRNGSLQTVFVDTIGRNTRWSTSFLIP

SEQ ID NO: 975652 - protein, 114 aa, Homo sapiens
MSLSTEWKKTIIKFIETKRVRIPKAILRKKSKPGGITLANFKPYHKATLTKTAQCQYKNRHIDQGNRIKNPETKLHTYSHLTFDRVKQKEAKGKELTIHYIEWCWNSQLAHAKG

SEQ ID NO: 975653 - protein, 408 aa, Homo sapiens
GAGGGTLGKIGCVFEWELIETAGNFKKPKVVQAGEENQVLESSIHRDGAIPRTNDLRHLTQGQPFIMDNCNVPHDTHRHVAAQRRPVITPRRLPTHTLQGNARTHTWANSLVLPNRERDEKLQRSHSDNTATHTQGCLSPFLDSTTTFKVLHIRDPVPRSNAGMVAPTWDLGFQGEPPGKTCEPKSDFRTMRKAGLTVGQDAHNSFPNYNWRVTGPFYPSEDWHFGSQRKTWPRMFPCAPPGTPVGQVHNGPGRTRTMLTHAKFISKMRLPVATPPWALIKGHMDSTVLAQDPMRNREPPYRQRERDGPNWAKRVSQADFPRTGNRATTRALNTGSRQKCPQGCQNKPRLTRAVRKSGPSRHRVRRQAEPSELAHSQQARPEPDRHCPPAAITPPRAPIVLTGAPPSR

SEQ ID NO: 975654 - protein, 373 aa, Homo sapiens
GNRWCEAVVTIERCKSQIILLTVRWCLSSKKVFGQYLTKNYCEDELHSTVTGCSGSCYQAAGDAYRNYVDFQNYSQGRQEEAAKTEAFKFAINRGHTVWSGASLSLNDFGETRYCYLIATLPPVHLALFVSCLPSAVSCGDAFCSVALPASAGWVRAPLLGVTWIFAAWRSSSGALFGPLSGSLPRGRAGHTAWFLCATLSLAVVGWPKAPLWAVLILLVVHPIGEVLGVLEMRSRSLVRALLLCGGLVVFAPRGSLSRGGKKPLASFVGFYPGAAVWWVCFRRLLGGFPPSLSPPSFPCCLLGGVPPGLTRVFDGMDSCFTTLGEHTSGSPLRQHTRLCWLCPVLIRVCLGRCGPPHVSVLHHFTLGPLSGC

SEQ ID NO: 975655 - protein, 123 aa, Homo sapiens
SLVLTDLEWRLSILTRMAAAAGSRGVGAKLALREIRIHLCQRSPGSHRSSMYFIENRYVELRKANPELAILMRECSDVRAQALCRLRIGPRDECPFEQLRVADQVTRALENGSKVVNTPEASN

SEQ ID NO: 975656 - protein, 150 aa, Homo sapiens
YQLLTALQTSVPCVLVAGKEELVDPQIAPSSPPFLLFGGPRICVTDIWGKKLEQETTPTELSRKQQQIMQKTLQKKTNRKAKVPACKRGRKNARMDELNASKQKGNLKTEAASVSRRISTRNIDYEAFNDEEMTREGDEDAKVLDEIQGV

SEQ ID NO: 975657 - protein, 312 aa, Homo sapiens
VLVSFLDVRNIILGKSHYVMYGLVAAMQPRMLVTLDEELRHCQCLSVWARQVDVVGQACKPKIYHRVPDAYNPSVVAHGERAEWAPEEFFLYTPILKGFVILRKNPNYDLYVTTKGLCNVQADCNQARPLPSLWPRVGTTGLQTFWGECVGSMLLCQLSEITVVQIEDFLFPKKKNKTQETHFWGASDPQKNFINHFVERRGPPDGPETRATRSLGKPDKESGWVPPNENAGGNEVWEQIQGTAATRIYREHGRFKPAHGKATLNNQHTTQSEESDTRTTTRSTHERQTKRAMHTTTTAADTLRHSVHTVRS

SEQ ID NO: 975658 - protein, 141 aa, Homo sapiens
TQCDQRRVGITAGRMYDLHDLSKARTGDSANMLECATGNNGCVIYLVGEERRMAELMPVGITTFQIVKKEKDLKKSVIYKVNLMDWKTWKLRSLELSVVEPQPVFEASGAPDITGSNKDLPPETPGAEDKGKELEDQTLSL

SEQ ID NO: 975659 - protein, 71 aa, Homo sapiens
GHLGGGHWADQIRSYSCASVAFLRILSDKCDMAEMEKVRVSRELREDRYAGEKSSVFQRNDVKRRSKLGES

SEQ ID NO: 975660 - protein, 146 aa, Homo sapiens
MGILACVVRKGNLPVVPCAWLSNITLFAAEGRPTGHLPRGRPLTPPPPGALSFLGMRPVEDRSLRGLKGRIAWARRAGRAPGNTSQGRVLGLPKNPHRDGLNPRLRPVRESPNSVGTKKKAGQREYTLRRGAQRLKTRPTERGHRD

SEQ ID NO: 975661 - protein, 147 aa, Homo sapiens
MALQRVREAAEKAKCELLLICADLTSIGPILQWILLDPSNLRYEVEPCQFERDVSPDLSQKDYRSMFKKAMLKMLEVSKSDIGEVIYVGGLTRMAQGFSHDMSRVIFLGRASEVSSVCNPDEACGPLELQFREGVSAGECPRTVLLG

SEQ ID NO: 975662 - protein, 253 aa, Homo sapiens
MSGTSTKQGGTTKSEIIKIYTPRARGKHTGQQWVGNNNNQHRRPERQWKAPNKPTSGPRCEYHEVAPQETITTHIGRDSGDTTNSEAQEEKTKADTANRVAVNVEPAQISTQKEGSHLTNKRWKAKQQKLDRHETLETNRQGPRSKHQPDEQSFVKTRQQNREICTPKGETVEKYRRTVKGALIQITTQLTAKQPPKAQAESNKGKTLNSSGHGETDARMQEKSKAQRIRDYNATREHRKRHRMRIPKAHIVY

SEQ ID NO: 975663 - protein, 389 aa, Homo sapiens
  misc_feature (254)..(254): Xaa can be any naturally occurring amino acid
MGCNPKFPGGDTSCGYAREPLPRYINHATNWVETSLCKLGATLALLDKIRRRKPTKQFLQHNSGELRAGKGPIMLGVNGRIPRHGGPTPFGDHHRDFNTISTIQAFQRGGCINLGSPRPKYHPRGGVKIMLSPKDPSPYCWVLGALQGPTFSRVAGPPQMVTPFDQETIHDCGVGNKHMWCARKASICETPPVEIIQKWARHTVDCWAHKDNGRLFVQTTRHALPPIVDSNFPLGTRAPLFGKPEPKFTPTSAXIGDIATVDALLFGRHACYQHTVGDTLQPPHGVTGIRPRVCPETVVSFPRGTTTHSVCNTTSGSSVFCRSQARRQVGDKLSTQLEAEYNYTDSGGYYETKFKGWTSNSIASTNTLVQNKRRQVTHYLLVQRRSATH

SEQ ID NO: 975664 - protein, 576 aa, Homo sapiens
  misc_feature (8)..(8): Xaa can be any naturally occurring amino acid
SSGNQRRXAITAGAGRLMTVRGPQHHPRPTMARNTQPTYHKTTHTLQARRKQPGQHTPRTHQRTHPQTTPRGQTRTKQHTQRTQQHPQRTPLRTIPRLTGRTQENTQMRKRRTRHQQRKAQQKSRQERDRHDSQHQPEKTQYSVTELSTAATQDNTSASRDVTTVAQQETPARHRGYTRSGQQQQTPQRENTAKKKGESEKTHNAEKKRTDSAQETTTTKRERERTSAAQRSSKQNKEYSERPTTRTTKRHEHTAHSDSRERSEAGRRKEDAGERERAGDRERIGRERRRTGAREPGGRERGGDRGKGTRRGEQGGQGAARRRDEGESKGNSAEEGTREEGRGHTKEEREETRGEDGERRKEGEKTETEETEEKRERRRRAEREKAHNERHEDTEERTPARQKETHRDQRGDKKSRKHERGGANGTAQRGEATNSERGQQTTREQRPQDRERRGKRRKARRRERERGGRNGRRGDSSRTAERPRGHTDARKRQGRPRRQTSITQRRPADPRTARTHTDEHGSTRHDDCETDRRRPQREPGPEREERSREATQATHNETQRTIETGKNDQDDDTRQG

SEQ ID NO: 975665 - protein, 137 aa, Homo sapiens
EEYTSPEEIERSAAETQTVKKKKKKKKNWGGAGRKKGFLNPTFRWSARAPQRSVSGTWGQDGCPQKERIRGAQHIKRLRVFPTPNRKKPPRGDTPAAVLDTNLQEWGCPASTKHGVSNHTRGATSERRKIKISPAGG

SEQ ID NO: 975666 - protein, 551 aa, Homo sapiens
PLQYLTRAAFQLSCRDPCESSQEQPLTLADLTTGRHYHYWTAWHALTFVTPPSDYTIRPSSTDLHFPKLLLATNTLDYVTFTVPNPSLAALNLHSQPQGTTAALHSKHTHLTGTTAPHTTRTHTHWAKLHLVTHAHKHTLQRPTTTCYLRPLRPNPKHLRSLPLKRLTAKTVGTNLLEALHGATHHPHGKTAKSVDTTALGQHVPQLLATAPFNKDPRRSPLLLSERRDHSYRRPTGVVQFLRGKTTIGRLHNEETYYTAPLSVPCNCEKDRYAISNVVSEHSGVTLALNAPHVYEGQYKPCSVHPPQDFVYKSVSISHNERNPWPHTRATYALVSTYTNFLVNPTGDDWNSGPNSNSRGHSRAPNSLPCLKTALTHVGAPTHNLQPAGTIRRTLSNLHPTPWGTATHIHIHHTNPTTDEPRAQTDDKHDRTRDHIQHTRTTNHNTTRVRTHKPVIRTHPPNRTPPSNTHTHGEWRHPEPPNTETDTAGPKHRAPTTRSTASTTPPDERGMTQQEYRPPPRHRDASRPTPPATTPATRATNRDPAQQYTTA

SEQ ID NO: 975667 - protein, 167 aa, Homo sapiens
RWLTPVIPALREAKRREDSCEPRSSRPAVGNIAETPVLQKSGKKKHKGQKKKKGEKKKICVGRDWGFWKGFTRAHCGEERAGATEEGQRRHTGAKTRGPKGEPGGPGAKGAGDPSTTILKKGARGGRHTGKGVSGNKLPKREENTGEGPKPGETLTQPRGAPKERAE

SEQ ID NO: 975668 - protein, 287 aa, Homo sapiens
MRLTGSPAWLLNPGDRLSYTRVLRGPHWGHAHTVHKTAGGERGLLEISIPGIAKVHARYINWSLIKSGCLNPEWRISKIHNLALRLTRLHGGRTWAQPESGVTPFSDLTEEEFGQLYGYREGQLEGSPAWAEQIRSEEPEESVPFPAVNWRNGGRAISPIKDQKNCNCLLGHEASGSANIETLWRNQFVGYGDKSSVQGNCWTVRRMGRWPGNGAPTGTAVITCPHNRRPGHVKRTTGPRQGRAKVPPKSTKGAGSGLHIVKNNRQNGKLAIRPTALKNLRTEVSPT

SEQ ID NO: 975669 - protein, 140 aa, Homo sapiens
MIATMKLCQLRAHTFKPAISYSPFSKYYIFGPPMRPNQPARPLDTDTIWHTHNLGSTTGFIHTYTTTPLVVCNNASHPPDVQQIVATLARHRNYTEPSSIRFTTSHAQRTICVDATNLSVLPKTSSTSPHTGIYTPTAPR

SEQ ID NO: 975670 - protein, 269 aa, Homo sapiens
ESRFAPTDGRRSRPQPRRARAPGRVPAPHPAPAPAVPHDPAPCGPRGGQATTCALGPPETRSLSAQRAERPESGSSAGEPPGLKLAQAPGPGRWAWFSTRKEDADNMYYMCRKNKRSKGHTTIGHGKIFYTFLSRGIHNKQCRIQGGGLWVAQNLMLEKQIRDLARVEGQLLQDLGPIHIMVIGLGRHRLVLKVVWQHHDSVQERENDVPMIQDLDFGKRPEEEPRVPPVAKPGIVVHTQIRCMSTGTDTGMHRQQVLNIAAKCGVRQA

SEQ ID NO: 975671 - protein, 178 aa, Homo sapiens
MRTLTARGPELVILILIITWLPKRGLVILARGAEAMVTVIHVRMSLVGAEWVLRSLDDEGLGWINGPVTCVADECGSIRYLMTNTWKDVTNPEGTILSVVCATSEVICAAQEAIVAVCLMCIGKYTEGTHGNNCDSDIDKPATLVHGPYMNSFALYDIERSGDQYLVYHNDSIWMQIS

SEQ ID NO: 975672 - protein, 131 aa, Homo sapiens
ELHFSNNGNGGSVPASVSIYNGDMEKILLDAQHESGRSSSKSSHCDSPPRSQTPKIPTELLKQIPISMGEKNSSQSEEDDIERRKEVESILKKNQMGYGMGQVGRKIFPPRSSSLNTRSARHPQHEEHERH

SEQ ID NO: 975673 - protein, 98 aa, Homo sapiens
DLSRVESAEQLVACPEKILLELNHGCWSGRQERVDLKPGEVPFRVRGEVWLLRLKELRCWNLGQLVPGKRDPVPWNCFIPLCLQTAPRGERQKANLCC

SEQ ID NO: 975674 - protein, 158 aa, Homo sapiens
MCPVCITDWTTPGDVREDTCIFASKCSVRALVSWLFIQTDVQSSESDHCQDYSPESGVGTNKWAMPEESTRAARVDKFVNKPCKRLQKDSCGQSNTSQPLLIRFSFQKWNNTEVWESSCKKSPNQLTPFLDNLEMDAASPTSSEVRAGSAKIGPPIMR

SEQ ID NO: 975675 - protein, 117 aa, Homo sapiens
MEGRVVEIFRLQEIFTEKVLQQEAEIDSIHELVVGATWNITEGTEDVEKALKRKWVRVGIPVLLEDGVFSSIFLELVDRRQAGLEKVLDIVGGAEGSRMVKCTRKLVMEVVSKNGKG

SEQ ID NO: 975676 - protein, 93 aa, Homo sapiens
QDSLSVRYAGYPDRSEMAEVEETLKDESQKGVQGIIVVNTERHSHQEHMDNPHTTQYASLMHSFILKGTEHRAVTFGPKKDLHLPSNSGSKKN

SEQ ID NO: 975677 - protein, 174 aa, Homo sapiens
MQHHLYYRSASNDEDNDVTKMTDRREEENAVDKQRREQEKTYKKEDRADTEKRDEHEQDSTAERRENKTGTTTQTKQKTAKQIDKRLKRHYRQPASHHNDSTNRRHRTHERHKTNSGTQTQPAEEERGERQTTHTATEHDARKQSETTSHTHTKNQRIQTRHDTQTTDQKTRET

SEQ ID NO: 975678 - protein, 66 aa, Homo sapiens
YSLFSNTEPRYAGIDGGLAIWMMPRFDLVAITVMNKKARYDVWYCIGMRVLLRGARMVNTALLYNV

SEQ ID NO: 975679 - protein, 89 aa, Homo sapiens
GTLWDTVSPRRCSCLEATRSTPWPSHFLRPQRAELQRAFPGPIPVLCIHIGILVGGEEKQACLSSSPRFQNVLPVPPKPALSRGRDGCL

SEQ ID NO: 975680 - protein, 200 aa, Homo sapiens
AVVSTQRGHYGRGRGAVVTPVIPALREAKRREDSWSPGVRDLPGKYSETPASSQTQDQHTNNKKHQGAQKKNKNNKNTNTVVWARPGPEKKVLKTHTGWGGRGGPQSEGRLETECGSTGGVGPNRKKKPWEPGNKRRGGDFPPPTRKKNGAGGKHTRVVSWNNNTPEEESGRDNNAGRSLHEGGITGRSPKKKITPREGG

SEQ ID NO: 975681 - protein, 67 aa, Homo sapiens
VGRQTVCFQNGGSDGCGYPERTNSGAGKKRLEVKKWNAVALVGLGYGGDNCAICRNHIMDLVHRMSS

SEQ ID NO: 975682 - protein, 123 aa, Homo sapiens
GVLRRAARTTDWRSPHGRYTFLVTFPLVGHELERPDQNTDASATGLQVYAGGLEPLTDTTTDHLPTVGPRPLTHCGASQRAAKLTDNTTDTTSEALETGTTLAGPLEVPADNASFALRLYALW

SEQ ID NO: 975683 - protein, 494 aa, Homo sapiens
PCSYSSLLVSLSNHMFRVAIMHLNSCMQHTLHLCQQASMHVAGPHTFSTHIHSNLGISATKTTEHAFPYLLSHWAHTGHSSAIFPKAPLSGHTPLTFSSYPSPSQAIFHRIATPRDRGSNNTRFITRSLEAIIHSKGPRHEWQPHGSSKWPYLGQAKVHPNCAHRGLPEGHPILPRGNRLALLSLCATHLVPSRPLLVNSGPELRAIRHWPHTQWRHHSSTVIFRHRLNYLGEPTTFHPPIQQGAIGAQAFPSSPFPILWRLTNPRRRKDEPSNLNLVHTERGPFNFNAVFTPIYNLAFWTTNTPQLGDTASTKPYPPPGWPTHTMIAGLTTQAFPHTVHIGPSGTLTPCCAAALPHQTVYASTPHSGDLPKTGCGPTYTLGGLRAHYPNKQLLVPVVSDHTLLPNQDYAPEPTKPTVYPPYIHRALGQPVYATPINNRSALIAIAATLHFYTTSAGAAQSATTVPSVPPTSPERPLHLAAVDTHQYSRRYRKH

SEQ ID NO: 975684 - protein, 204 aa, Homo sapiens
GPSGGAVSQAGGKMAAPGGSRAVRVSEMAGFKHLGVLGRGNPRWGGCHNKLDIELEQTCERAWKKSPGAFDRYGRPGRSREAGRARGTGVGGNPTGGVIRGEEGHRIPQKEERIAIMGGGRSPPQKVLPGNPNEALSGNGGKRGPNPKGSFRGAQLGGETKATRAGHTAFPRNKAKVVPRLKLLCGGARSGAGQDLGGPINQKQ

SEQ ID NO: 975685 - protein, 264 aa, Homo sapiens
  misc_feature (68)..(68): Xaa can be any naturally occurring amino acid
ACSQEVEEEAARESDSELVDRRARVRAADAGQRASKISDLPLYRGSREATGPGGAPGQGPGPKDRVSXYEGLRRPAEGVRQEQTNHDSKEAADRHTSLSRSRHEGRRRSEPGEPKTLSSYPRNQVCRHVMTRGKLLSWGTRGTIIYHTDTVVKASTAITPDGASHLTSYTRHKQQPYTITTSKEQSRLNKKPDEQQGGRKKLIQQTPASNYGCITPSKTETKERDTTRSTQHTTGTTRDCTHNSRRTVRTRPIVTRRQRTRVHD

SEQ ID NO: 975686 - protein, 176 aa, Homo sapiens
MREILSQEIKGATQDAEFQEEGSLDIMMLDYARVIVRLREWEKECTKMKTLSNNTQARRLMESKELMRLLIHTHEVSIKISLPRMAAKLRILELRQELTDNTWIEAPEKVQAIFDRSVRATKSSSPDMPSPHSCMAKCDTTRVLQQHPYCVTRKAGLDVGNCAYQLEYHGSLKRIC

SEQ ID NO: 975687 - protein, 212 aa, Homo sapiens
VTGCSEKPSLHCSSSASLLAAAPPPAPPPPPRTPAALSPESLNSRFLFNPLHRITGVPHHVRRSRRHQLRNHHQGLKRRRRKLWKRQKHWNETPLLHGNANEDTPGEQDVLNQDGRPKNDGKTVGAGHRRRTDHDTTGRLVRTKDWQMQDEELSQLRAKRAAEDDEDDDVDTKKQKTERHDLAANKRNKFNLPNTKGRRNYSPPFPSQKSKR

SEQ ID NO: 975688 - protein, 106 aa, Homo sapiens
MPGQGFGRHKLSAGQALMWRGATTKDSWPKTKYQTGSPEAEREESRRNGKLQEECSSAKQRVASDRGNPATQRCTETEEKRETQKGDKQTETPTKHIQHKEGNEEH

SEQ ID NO: 975689 - protein, 162 aa, Homo sapiens
  misc_feature (61)..(61): Xaa can be any naturally occurring amino acid
MALGFPSQIKKTARGAPGRLSGNKFQRWCVGEGHISGFLLTQGRPKERGLGFSNSPPGGGXMDKVRKDRRTEVSKKSAPPREGEEPNTDKQRTKIGLGYNRTNSDKRGQRSERTKPKNCTGHTRDNEGRSKNKTDTTQAQKTEKHKPTGTNRNRRRQTQNQS

SEQ ID NO: 975690 - protein, 107 aa, Homo sapiens
MNNRGRRGNRLHSQYITDTRQGGGNPRKRSHSDTKISKMRGILRGSHARGGSSKHNRGGVLPREETLAEYLKMLAAPKQGGSPITKKKQKAQKKAEETQTARPGRGA

SEQ ID NO: 975691 - protein, 133 aa, Homo sapiens
MRVPKGENPGPYGTKARGVILHTNITKNAPGGGKTGEGVFWKPNSRERGEIHGRGAYNAGYLYSNSGRVPKRERTALRDYLKIFNAPEPPGGGGNLGQTITRRRVHGEKQHKTQSDNNTRTTRIGSTEEARTD

SEQ ID NO: 975692 - protein, 74 aa, Homo sapiens
TGVREKMAVPALSGLSRPACDAAVTSEVRPCAKLVRPPVRYAVIGRSVECHSILYIVRAVNETMNIESLAARSR

SEQ ID NO: 975693 - protein, 136 aa, Homo sapiens
MGGEIPTRQSGAKGTTDANADGADKATHKTGKKQSGPHCHANQTTDPQPHPQWTRPRARLHNTKGADEEASKGEQVTDNTRKRNTGQAETTRNNNENTSQRQENSDQQKEQEAKNKVSKRRDSEKPPRQPRGTRVQ

SEQ ID NO: 975694 - protein, 114 aa, Homo sapiens
MRAKERVRVNPKSWPKEQWGQPQRKRVRDRGRKLINPKRREKTPEREESTTDIVSDFLGTINAPGGKKKRNSDEKPNINCEETIYNKQEKTTQNEKTDPRKTKKLTRPRHTRGE

SEQ ID NO: 975695 - protein, 235 aa, Homo sapiens
MEVFEEEHTNAGLSPSRRVPKGDVPESTNLLPPRWENNKQRKQTSSTQTTSSKQRHEQSDNQPAPATDSTTTRRDKHTQQRDSSTASDNRHSNNNRPTTRHAKLASRQKSQQTRPVTETGRTYTTSTAGRPEEPMPTHRPAESQLQDGDALGTHHMRRIEAPSRHRTDTDAAHTQQPRDREPPDVGAMPALTEPRIHEQQQTEADRSSTPQDDGDWMPQTESDPTTRQAYLNNVC

SEQ ID NO: 975696 - protein, 99 aa, Homo sapiens
SSRINAKGPFTGGVRTSDTDLKWGGESRDEHSNAMYFIEFLMERGGIMLQKFTLCGIKHEPCGCTCLHYEWWRKIVMIDACKGVLVYEQVLEDSGHLGD

SEQ ID NO: 975697 - protein, 410 aa, Homo sapiens
GCGDGASLGPAGACKAFPLYGALKAVALPETFPVLRRPGQSLSLSGALASSRVGGGREDWTTCARLGSPDALRVYHEVHREGDKVGRPTTWTVGPHKEFGPPGATGLQRTRVGDGTDHGPKGQHGEELGKGALQGTHQVGTHWNPSQRNPGTGPQNGTGGVAPFLGPFLAPCGITIPKRPPLEMGKPQPQEEHPGNEETPQELDTPSFTTQPRGGTLLPRFIGELARTWGSNTHMFGPSEHEAMCLGPPAEIPLIGAEGEANLSLGGVKNPTHLNDASTSPLGRETVAPRVTTSGDMHKGLGSASGPNPFHCDLSYPNRPISKPGGLPCVRQWPQGPRLLRPLHRGAKHNFSQIEGGLPLGDPRCHRPITTCIMSSRPPMFRARALLTSRRKLAGPPIVLLERASGCPPD

SEQ ID NO: 975698 - protein, 115 aa, Homo sapiens
  misc_feature (37)..(37): Xaa can be any naturally occurring amino acid
QFGGPAGLSLASNECCETGTRSRGLSSSLRTALSGFXVPRAVRPPVTSLLWPISCLLGDPAQQPVLLSRLDSVPFGGGGPRPQKKKKAKIRQIWKPPRIRHEVIRTRTVGKCSPV

SEQ ID NO: 975699 - protein, 73 aa, Homo sapiens
TEVAVERVDSVAVATVASKCVRGGKLKGWNLGGQDEIMGSAARLLAVVNRGLVDVRGEKRSRELCRATPYMCI

SEQ ID NO: 975700 - protein, 218 aa, Homo sapiens
MCLLVAYEICLKALRWKLLKYRRDYWGITIRVDTRTSSNLSAHIDIIRNVDRVDSSREWLQLVECSQEQWCGSQRESCEPVVSCNSHHSGGIGLLGARLALTELTIASVLTCLLCKGGRMDYNNLHASNAHNQGFRPSVLRGGWMARGLSASFGGEAHVAPLDGTNRVERTRPSRPCVMDCAKVGSLACLGSLWARPVGSALGWPDRCPCGAPRVTEN

SEQ ID NO: 975701 - protein, 78 aa, Homo sapiens
ISVVAIAQTRLRSYSCASLRIASASDVRQNTGMAEIERMQIQSNLKRHRDARREIHVPSKAMDGTGASEQANRNEGVR

SEQ ID NO: 975702 - protein, 294 aa, Homo sapiens
AGSLRSLQCLLLRRPPKLGDARSRRGPGKDAPIRTLVQRIHQLQAELRQGFPPTEEGHPPVTCARGPEYGFGGANREATVQRGLTPGPFAGPPRRKGGGRVGKKKLGGGALRKGQAGGSPGQRCAALQELEANGGGARVALPAGLIGERQKRGRGPGRHAVTDAQQLNNVRGTLNTLGGRSAEVPPGTMRLDGEICRVMGGPRDCAEEDGTRGGLAAKPKPYNCKLVGVGAPLGLLTFRGVKDTSKIKEVLLGTQTSKHTETHDHSEQQDKVWAAESYNTGRGQKRRSGEHRQR

SEQ ID NO: 975703 - protein, 189 aa, Homo sapiens
CPSWAQLNVDDKIQIINNMLHKGTEMIIAEWNGLTPFLKVLKDMEIGDFSVLMTRGEPLIVKELMSKAEKNGVKMYLPVDLVIADRVDENAKMDKSRCLILVIPGWVDGLGCGPDLSKKYAEAVTRRYVRCVWTWSLWGVFEWEAYVRGTKALMDEVVKATSRGCITIIGGEDTATCCANGTLEDNVSM

SEQ ID NO: 975704 - protein, 170 aa, Homo sapiens
LCTYRPIGVAVIADIVELGCMFTMNGPGLIRFRRYRSERPSTGIEDVHTLELTVEMWQESIQGMLTVTGAMTSILDTRCSISYHDITVGELQVSVLVPQGEKYLPENSILYGDVLLTLSESISAIILKKRSRMDDMCVERQRTCIGHCSDISGCIRDTSRSSDIIWVAFR

SEQ ID NO: 975705 - protein, 146 aa, Homo sapiens
RRIHSLGSTDTGDPMALCITGYLITPAREVTLVQYLRRTRRIQEEDGEEDILEIKLEIIAILVCLCSGDRIVIEASKQDDDAVRNQEGWKKEEKENSKRKSRKKTEIEDVGSDEASNEKKVVTSKKKRKIKEKYIDQEELNKTKPI

SEQ ID NO: 975706 - protein, 95 aa, Homo sapiens
PWCDSVLRGCTLESAQLLSPADCLSYSKCVPHPMEDSMGMDMRPLRALELSCYGGELKWPINRLVICEGGYSDDQVMHRDVSLRTATEQGLVVKG

SEQ ID NO: 975707 - protein, 133 aa, Homo sapiens
ASLTGILPVVAGSHGKRENFYEKETYVLQGCGPLLFYAMAITGVSGNRREHTALLKIEGVQARDETEFYYGQEMRVDVYRAKNRTVTPGGNQGKPESIWGTVTRAHGDSGMVRAKIPKQIFRAKGHVDTRNPE

SEQ ID NO: 975708 - protein, 282 aa, Homo sapiens
PGAWLTPVIPALREAKRREDSLSPGVRDLPGQYSETPFSRKGKQKKNTKDQKKKKKKTKKKIWGARSGPKKVFKNQLLGGRAPQEWLDEHVRQKALCPTKRNLGGAKTQRRWGGFLPNIKKRAAGGHRKAFLRTKITKNGDPEEDTKPGRTINTQGGGGHKGEKPAQSEYNKIIKHPPRARGREYPNNQHNRQAKQTSADERHGARRQRSKQIAEYGGEKQRAQATADRTGRRQREQGKTERAARDDKRRKPPRDEEAERQRRDAQSTEAERQGSSEEKRRR

SEQ ID NO: 975709 - protein, 215 aa, Homo sapiens
MVPVYLHCIYVALDMVFFPGVEHLCEKLSSIIDPYRSSLLTERRENSRHQGCPGMINSPISKCWLEGVRELQRAAGYVPMRRPSSIELLAAPSPQTLNEPGMSVNMKIAKTKKMLGGGLGPRKSVITKHDRIGGGGVDPSMDDVEQPCTLAAWHEEEGIEGKRHIGGFVLCPRIKKHRPGAHQYLGDDTMSEDRVLKEETGAYTEKIKALILIRG

SEQ ID NO: 975710 - protein, 94 aa, Homo sapiens
MSVLGRGGPTGRCYGETWGQKRVVPKGETPGAIDAKGAGGSFPILKESARGGTTGSAFLDTISEDVGFREAHQGLSFTGGSRAAPNFSILPAVG

SEQ ID NO: 975711 - protein, 203 aa, Homo sapiens
VIEQHGVGGVALRTRSSRDILAKPQFRVQLSAGQIRIQDSRVVAPKTSVEESSGSAKAIKKMEGHLCVMLGTSCATQRHFLVVTQVPMWGVGKNKCLYALEKRGIVRYTKEVYVPHPEKHGGCGSGSPGCQGVLVLLQDFGPRGSCQCPEGALQTGSYVFDVLSRPSHRDWSPSVNRTMADYHEVTGRGWRHGPPEEKGLLDG

SEQ ID NO: 975712 - protein, 191 aa, Homo sapiens
MAFSYYASKTLDSDAIPEGTPVNYYLLQREKNNPYLKATEWNWQIDPLGFRSIITRYANDWRMPGLPDRKRHGVIESWDGVNPIEDTYRIDYHRAHINAMKEAMFEDRGRGNRLPRLGVNRHSQLPGDMRKRYGWSMSTRENHDLKDLKRVPKKSYAWLKQVIHTKRNARCKRYRCGRVLWTDVMANYPYV

SEQ ID NO: 975713 - protein, 325 aa, Homo sapiens
MAKYNNQPARCLAHACHSQHTQEADSKRRIACNLGGSTVYTRAKHRTTGTPALGNQRRETPLKHTTHTTPHHTHHTHTIPPGHQAPRAAQTPHYTTQTRTGPHRPPHTPTAAPAAPTPAPPRRHPRPTTQHTLTSQLSPPHNIKTPHSIAHHNLITHYFHHTLLPQLPLSNHLQYQAEHHIHTQSTPNRHAHNNPNTKTPPRPGHTHRPPSHRDHPPPTRNTHTSHTPHPTHHPNTRIYPHHVPFPHSQPITILYHPKTHPPPHSNNRGRKRQGQRKSPAPPHRALTRPPSAHTPPLPPPTTADTPQPPTPHAPTAPPGRPPSPH

SEQ ID NO: 975714 - protein, 212 aa, Homo sapiens
MLDASAEEKPCTISHWFNPTVSADIAARRRALGTVSFELFADTGPNRHAEPLFVLVSTVQRTWIAGYYTGSCFHRISFQGLMCHGMVTFTGHNGTGGKSIYGEKFEDEKLSVAKAYGSWHLVHVLMLECQLANGSQFSICTAQTECVWMAACGVGTVNAMACNIVDDHVALVVQEWQEQQRTDQSFAELLDYLEIKFDCCISLNQAELMPFR

SEQ ID NO: 975715 - protein, 318 aa, Homo sapiens
ERGLKASAPGSCGRVVLRLAAVPAPEGRWLRASRSTGLGQPWRARGPQGAEERRGRSRHARGAADHAGDNMASWIQGSPPGFAFTFRAAGAAASAPGSQKRIWPREGPDEHAGFPEKKLSKGERASVDPRFRAAEGLSKHFRPRAKAPPHLHAGCRANTGRPVTTLLGGLSYGRGRASKPGAAVTWLQRGGHVIPVATTTGDWRATATGGWTRPGGLKLAGPARPRAGGHARGTVPPRQQIEQALTPRRENRGAGISEITGQEPRGRGRGLKPDGTLGKKTTEETAAQESGPNNRKEGQQQGDRSQSPVDTKCATPPL

SEQ ID NO: 975716 - protein, 191 aa, Homo sapiens
MAQEGSGNLSWANIRRRARFPQKQQRKTKTKRTNNRVTDTALPPRKHTITDSTKERQGSGMRTTNRRAKVTKRGGKKRGSTQKGNTTRVTQDKRREREKPPHAREEKTRAPAGGEDNSAGEARRQRKQTKIHKGEGADKHRRGAHKLHNRREATNSTTPTRRNNQTARRADRKQTENKKKNSPPRPREGGG

SEQ ID NO: 975717 - protein, 264 aa, Homo sapiens
MGFSVGPRHSYEESPRSMLLGRDRGHSDKEWTTEPTTCVATGECHWATLSVPGIAMRGRVSVLVDRGNAPPTSLRLCNDFLEAYSPGGIVSRGRVKYGIEYSDIVETQSLRGRKLKQETHSKRHITLECEQHGTTPAKNVNQGTKGRVEWRGRPTYEDKDSKCVHMNVILTQEKPRTGHQKIRREGTHDKLNKNAPRETQVGFRTTPKSGNYQRNYEGPYSTQITGSDRIIHPREYKKATDTDKSRQVTKQGPRNKQQKNKEHS

SEQ ID NO: 975718 - protein, 274 aa, Homo sapiens
GTRAKKVKMATKSCPECDQQVPVACKLMSFVDYEYLVSRKLLTCEIHVSENVTTFYRETRKRKLTSMLTCLMKRLSCCQSPGQKINRENYQSKTYSLILVCKIWLKLLVRITSANSQDMLWTLRSISDCINKGHRSFLSRLSVDACATLREQSCVGLDWSVGFPCLPKEYGQCLVVGIYVSVFCQQQKKNQQKNADGCSRITHVIAGMGYSMTTKGTNDACMLPGWHQKMHFVTSCRNSVLSTLSFRMQAPDAYSALPINGTIYAGPPSRIAPH

SEQ ID NO: 975719 - protein, 104 aa, Homo sapiens
MSAAWPVRKPYYWSVLVRLGSVILRQPCADKTRYGVSIREISISRETAEDRDAREKSHCLPTETIDQEKQAGESVGEACAVTYALYIPQALPSYVYFFKLCYLL

SEQ ID NO: 975720 - protein, 218 aa, Homo sapiens
STGINAELPLRPGWESEGCLLPRPLLHVPGIPGRQAQAGPPGPQGYCGGNTLELQAKETATFDRTVPKSPGTKRKKKTIKERAEKHIQATGHNGHQEHTRRRETKHNNRNTENRDKEKDRHRTGPDDRNQREETHHSREKKREVMTQKKQQMERKGAAEDAGTTHTDQRQSTGSTHDRKATTSAGDRTKKTKTTRRRPKDNRKGRRRENETPTHKNTT

SEQ ID NO: 975721 - protein, 157 aa, Homo sapiens
MLNNRSGKLGVPEWVDTVKLVKHKELAPYDENCSTGELFHSADLYLRVRWSWLHDQRSMGDVRETGHCQAISAEAPKSVGLPVLQGPEGAGHMGGKRTKMGPKIETSGPRDLDQNRRTGGSCQQEALEQTMVGFNKFASFGQKRNQKQKNFVGGLRH

SEQ ID NO: 975722 - protein, 202 aa, Homo sapiens
MCWGRGAGFLKFVNLRLISHQPWGLPKRGRGTKCVLSPTWFRDLALTVFCEDKTYAVSKPGFQTALSRRESTGPHTPVKSQSRGGGREAIFAGPKIGNTTNDPQKHIGGRLGGREQKHAETCVRRVFSDPKRVPGHSERATRGILLSKKTRVCSHCYSREGGRDRVGANPTAFGETPPRGVGGPNSGGQTEEEAGRAHSRQT

SEQ ID NO: 975723 - protein, 206 aa, Homo sapiens
MVRGTPPVELLIGDKPKYPVGYTTATVTTAQATVHQNLGDAHTIFLLGRTPISGTQHYGGAAITSERHSPKVTNTGFVLCNYEVYCDTAVLIFIGGIYSSGTLTTKSKRRTHSSFRPHVFSKLNETLETFTKRDPNTTTPIPLTRHLYPGGMQDHRSNKNYSPRRKQFFYQMYEHINHVVTPPEYPPGNNSALHSNTRGLHHRCAP

SEQ ID NO: 975724 - protein, 175 aa, Homo sapiens
MLKPTIKHPQHNGHEKKHELGTTTDPQQHCKYKHPTAKCEREEHTQCYTDTPSTNRSKYTAKQLPDRSTQDDSQHSPTHKKTQRRQTTDNSAKKHTKNGEHCNKQIKDTNTRRDQGTHEMKITPQPGDNNTDRHYTDHNNAGRHTQRPRCHNDQHTPTTTQTHKRRHEGNTTYRA

SEQ ID NO: 975725 - protein, 328 aa, Homo sapiens
MLVSLNFILLITFVETRSLYVAWLRLKPPELRLIIYTYSLPKCCALHRHEPMQPGLRHYITSGQISCEHGVSLLSLSAWMSQLVPIFGYTGDLPALPQVSIAISTLPQPSRSTLGTYRCFPNQPLPWPKLYIWVTLSTYERRGYPPAVKAKEWALRIYIEPALNPIPAPPVFPRSRPGEFTTLFETTNGPRPCKFNFSTTVLAMDNAFNMENSQPYGPSNLRQRCTNLPWSGAPGQRSHSHVSTKNQERTTHTTDHHNQLFTAAPHAPPTKTLSERSTFVGRRHTHYTRHHTDSALLRKDLRVQSKSSGASPHQHSAGSHTLFITTHC

SEQ ID NO: 975726 - protein, 48 aa, Homo sapiens
MARDKHALLYYAPQAEKQTQCTGPAKGNLGNKRKGPRRHAKSTALVIS

SEQ ID NO: 975727 - protein, 99 aa, Homo sapiens
MQRRDPNHNKDTYAAPNTIFTTLTCTTYRYTNTYSIAQRRHVQLDTTHKYNRRIEPDHPYTTTTGPHMRTPPQQSSYHKSANIATIETSTKRDITQPGY

SEQ ID NO: 975728 - protein, 411 aa, Homo sapiens
MDPNCSRAIGGLLARETGSCKLQRVQMHLSCKKSCCTCCPVALCQVVPRHASAKGCIRENVQADVACMCGTRLSLPRLYHYEPIRATNLGILFTTYYTHLTTNLWLAIILSDTPINIYAALDPIKTNQLFRRKKYTHTPTTTHNNTLTIHSHRHTYRCPSERTRYIYTRTPNFSNSDAQHVKHPPVSAHHSEDTSNGATKGVFPQYSERPLAVAHNCKRERENIFHDRNNKKARPEGEPTRTGSRHQQPTKNEEENEDQQTRRNHNTKERTEGEGGAIESSARTMQRTYEKQKQRTKTDGAKTDRKGLAAVVAKVGADGGEGGSEGERSGAIEQTSETKQEQVRREGWEKDTRPAWSSTVVRDGTAGDASGVWRIDTENQNEESDLTRKGPGLSGTARTDRGGTSKTEQIG

SEQ ID NO: 975729 - protein, 212 aa, Homo sapiens
MRRHKYDGCRRRYRTWLHVDDRSKIALGEHAFHEFEIVSIGSIDGERSGSSREIPIHQLEAKESGAAYEEAQSLRSEVIIVSVKPGSEVVSSLIIYQIEEELAHHVKVMDYWPSLVKFWHLVALFSQPVHLFARWAIILQSTLSLYRYKRSPDGIALFEISDLRTERMNLNHVRVAWIRGACQGRLLDRVMISMTQSGGNSWLTDWCLYWDV

SEQ ID NO: 975730 - protein, 167 aa, Homo sapiens
MHFDTTKGLEGGTHGFYDGISQLAQNRTEMNEAPINQDHAPDPGSRPQRILMALRPRRSKDLDTNAEPGKISQDRKQGHSQKETKAHIGAGTNQTDISYSICEHVCKAALKEQEDVKLEGQFIMLHYSLGPFPQSSHKNNPSYGINGQRDDSPCNENTDRLTDTHNR

SEQ ID NO: 975731 - protein, 471 aa, Homo sapiens
RWLTPVIPALREAKRREDSLSPGVRDLPVANIARTRTPETRNQKKTKMTKKKKKKKQTHHTISRRTILRPTSEQTAPAQQPLYQSDRHTTEGPHENRASTCTPHTCAHSTRCTPQRANPGDTQHHRVAGDTTTHGTSYNNTRAPWVGTHTKTATYTENNQHTKRRRHTTERHQPTEGAHLTQNQRNTTQPQTPHRTHNTIESDPRHTRREYTQHKQKQKKTQKTIATNQHEHDNKRQKDKSTQRTKDAKTTPAKTRKRKHKSIKNKKKKQRRQSERSKRSGASEKKKDKADTARKIRTTDQPENKNETRRELKRLKYATRGSREISADAETENIAAGNTDVEDRCTTEKEARERGMIGGRRAAERRVRRVEQQKERSRATQAGTRGRDGKEAIGRERRSTKERVTRKSERQEESSNLDNKNEEHDQAEQKKCERTGGVVPMSSHTDEADRARDSEKARPSERAKEERRYEQ

SEQ ID NO: 975732 - protein, 251 aa, Homo sapiens
MSRHALDITGDIISIAEDECPQGYTFEDISSKLEDLLRKGPRKGDQEASTQQVQTLKPPPEGYRDESPVGAVFITLGPRKGLLNASFQYRALIGANKHDPVKIQRTRDPFKYQGPGGLPSAERCTNEGSQDLMLEIAQIDTLDAQEATQERAKNGLIDPKGEIAPLGFQRRGVSAGGKSNYLEASLVRVPMKDQLQYWRANPDYSVCSSTACNDLCRICAASTDENSSICGVVTEKSEHNIGAPVTRVDPV

SEQ ID NO: 975733 - protein, 259 aa, Homo sapiens
EPRHGAPCAEDPSLERHFKGHEMQLPVWTSVINTKQLASGSMDSCLMVWHMKPQSRATGSLATKDARHLCGTFLSFGNTCFGSGSRDKTCPHLGYPNVKQVSPLCFVPHTCHSEDVSHYLQVDGQFLSLTASDDKTAKRCGQLNRKKFLFLPEPSIFNLLSACANVLPTTGGASSSVWPVDLNNEVVSSLGGDKLSMRGHCVHSVFGELAGFGPPNGGISNPSGDVALAVPAWTTTSGRLGLRGITGVCHYPLPVTVKG

SEQ ID NO: 975734 - protein, 72 aa, Homo sapiens
VRAQREDDRETLCPANAGHTLFTQELVSADTKEERDLGMQKLNQVLVDIRLWKSCCLYKPMESLKLEIPSAI

SEQ ID NO: 975735 - protein, 85 aa, Homo sapiens
VLFRPFPRLLLVVLVRARAQRASSPMPRQTLRQHQGLPAHSPTKGCQICQESRKNRDNVKYKQSDASRYLYTLGHHLTKREGTRN

SEQ ID NO: 975736 - protein, 189 aa, Homo sapiens
  misc_feature (71)..(71): Xaa can be any naturally occurring amino acid
MRPDVNRTSANSPVEQIQEAQVIEMVLSHCRIACEQSSDLPVLDAGEEHLGPAGKGKAPWGMLGERQGVVXTKCRQDVLAQEKGPPVGIRMGTEIGRAFDLAARGKYWPSQGQREFTPGLAHHFLSIGKWISGEMAGPKTKFLAFTFPTPEGLPHGVLNPLLGKHPASSANTRRGRTTFWPRISSIIQE

SEQ ID NO: 975737 - protein, 265 aa, Homo sapiens
MVHERLEKLAGSYASHERRTLFGYLKGVNGNWHSSYNPPFCYIITLGNGIPPPVNTLKTFVGLARIVNQTTRNNQISVYNKHTIFPTPDVADPPKTPYFMTNTKRTRSPPQSPTTTHTRAHAGSKESGATKKNTTGHNRPYTGRRLPPRKKKTPPDKTASEHEQKSDEERTARTPRAQYNTGRPGDALIQIPPPRGGPRGTPQPNTRTQRQHPTVATSEERGREGRGGRGRQGGGQGRGRADGSASTRRGRGEGEQQAESGVKDR

SEQ ID NO: 975738 - protein, 184 aa, Homo sapiens
MAENPVFSQKHGKQQQKPKRHHNIQNTDNHTHHHTTHNSLFLAARPLADPPSGQKKRCLSIKRTHHPSSGDNVTAATASAPHNGGINRRLEHTIAAAPPPDHPPPVSPHTKEEHTNPRGAHTGAPPPPPRTPPGSKPHTPPKTPRNQKLTKKQTAPPPRAARKTPAQRRASPPPSAHPPHTHPP

SEQ ID NO: 975739 - protein, 140 aa, Homo sapiens
MYEWRTHLEEDGRREGKKSAQKNSCVKRDKALCKVAGTREDVTHKEDTPEDGAATQKVRENSHATTTTARRSNVSPTVEYNHTKARESRGSTEREDSNKKIVGPREDTVLHQRRTSGSTNNSGGERRPRGGKESTENTGA

SEQ ID NO: 975740 - protein, 35 aa, Homo sapiens
MFEKGAVGQGPRVVFSGPDVGTSTWCYPVACWWPF

SEQ ID NO: 975741 - protein, 238 aa, Homo sapiens
  misc_feature (57)..(57): Xaa can be any naturally occurring amino acid
  misc_feature (102)..(102): Xaa can be any naturally occurring amino acid
NFTSFSCVTWYDAKRLDQVEMTVLPLSHQRTTDNEGLRMPCPSVYLSGWQGRKELAXCVNGTNVGCEEVAVGTTVDNLEVKTSLAQGVLQAVMQFNQSAIFXFFVPKIDLIYWGNAPTFFSIMPHFTKQKQTQQQTFVGGGTRRPRKKLFLETPLPVGPPAHPVRVEWTMGPKERVPETNSRRRGTEVAGVSSRKEKRRAGGTPQGVLGTKSPKGDAKPKRALYPRAPASRLITARAD

SEQ ID NO: 975742 - protein, 121 aa, Homo sapiens
MSEGAPCPLCVGTSGDIDGVHSGGENCGCSQLVRAEKGDGLKDQELEPSGSPGAWPPRATMGAYGETSGKLNILGRNKFPWDGTPGSSGGYTKKKYLGLHSRLLCYLVWIYPLLPCTYHGL

SEQ ID NO: 975743 - protein, 271 aa, Homo sapiens
  misc_feature (86)..(86): Xaa can be any naturally occurring amino acid
  misc_feature (193)..(193): Xaa can be any naturally occurring amino acid
NSVLATVQTRLRSYSCASVRLDLRNLSDKTRYGVRIGEIRSKVNTDEDTRRATRIVVLAAFPTMTHRCEQGTKRNAGATSVIDVLXRRQSMALLTFPQSHLAPVLSLSPLPVLTAWFKTIYCYRALATEPEVVCTPSKFCHTNCTFVRLCPLICPNKFNRQHLPGNKREQVAQGGTVGPFVPPNLGFPSVRNXRGRFGATRQHRDHSETFWPIMFRVVDATPPRGRFLGKPNRWGVGRTDAGLKLSSRKLGIRQALGPNGLSLARAWSTAG

SEQ ID NO: 975744 - protein, 151 aa, Homo sapiens
MPPHESCGLLSIPSPHITVWASHVDVAQHKPCTRDDGSRLCKDLFAFLFHEKIRTQMTGGDLKLWFQNPIQANKSSESLQWSTRLLEFQHTDILPLRGHEGNEAQVLRKNLKFPNSNWCLMVYYRRKVLAFEFQKKGCPKISVATEETECV

SEQ ID NO: 975745 - protein, 159 aa, Homo sapiens
MLSKRRGYNGNLAEKPRSQSGKLGYKPPVCCFPATSLFGAGTFFVHDRAATQIFTTPHNEFPEKLSRVTRVLTLPLNTRCARGFGEGPSRGPQRVYYMLQAPHLSLYGLAQDKNYHFSCRTFLAHIELAPLKRQLVNIIALGATSSSRAVTPGGVQVIR

SEQ ID NO: 975746 - protein, 291 aa, Homo sapiens
MEAGAAGGPRRVLALLCVAVRAARRGRSNTNATASDSFPRDGADAARVGLPDTRWTKYSGEHLGRRAWGYPGDHACGVARVCCADGRRACLGQPQGEALAPRTESRRAARQDNPEDVRLLGGPCCGRGAHCLKGAGKGGLGKRCRGTSPRGPRPTEGGRVGDIRKAARGEDHKKVALGPGSGVHCRGDVVLPPKGQFRAVVTTLFIMEAPVLVGQTGAQRDLWDIINKEAAPGSRENNLIRAGTTILRRRRPDQRGTPGTGESITHHRRGATPHATMRTARRGQAAHPSTV

SEQ ID NO: 975747 - protein, 344 aa, Homo sapiens
EPWPVSSRVLLVGRGVFEVAVTNTSGGIIRYHCEIDTRFAAVEVVSEVLTRDDSTGARMRRGLSVVVSLIVYLLYGRLLRSLGEGLIGNVHDTSAGVGLLGPRAVPSVALWWALLLEPPVSVGEYAKFRGYLEDTQESAYGGAHQEIGAGWCTNSQKARGGPGFRHAGRRRRTTARPRTSLAADGPPVVTKEHGYIYGVGRQMRGGAPTSQTRGRAAPWEAARRMTDDETRGRVRFTNRRGRATGQRRQKNAPSRRRPAPKRRRKGHDGSRVGLGPGNWWNPRLGSSSAHGKVPLWAHSTDRRLERGHPLGPGGSPEPQSPGGGDPQGRFLERDPLTAGGYSNK

SEQ ID NO: 975748 - protein, 43 aa, Homo sapiens
METCLSRVLSGSKNGEGYTCGGSAFISRGEDGRWEETCCVSLV

SEQ ID NO: 975749 - protein, 117 aa, Homo sapiens
MTTRVELLREKLPRPLIRLPLGYHQDPPSSDRRTTDGLGVAPHSVAAAESVSPFRFIFTFHVGLGPKTPMFGEAKTYPRLGPPGRNLRPGGPGGAQDPVPRGVANTHMTVGHTPTTE

SEQ ID NO: 975750 - protein, 297 aa, Homo sapiens
LGTSILSHFHLASHAWSPCTSGGHRVLCIPCLVPCAAPSGARTLSLRAHEGAQSRSPGPLVPFHRGLPRRLHLEVSRPLSRCSAISPSHSLPLFRETGSLPASSPPRGLGGLHAGSGLCGIQCKPFGLPWVHKRRSLRCPTGPSGDQPWGIWQGHPGQTPSGLAQFPPVISKGQKHGAIHTPRSAHAPSLLSNSLEPQGGGIPNLCHQAKWLANYHGASAAHNAQGPKIDRSKTGTAFLAGIVKLPRPASRAGPNVTHTRALDTIPPRANISFVAPRDTPIGTRWLHHSGDERGLSH

SEQ ID NO: 975751 - protein, 66 aa, Homo sapiens
QPARSLSARVQSPVAKRPRRLARVSRDHTKNAISNEQAMETMMFTISQIVGDKGYLTKREDLRVLY

SEQ ID NO: 975752 - protein, 129 aa, Homo sapiens
TVCQNLEIIRNGYSESMLNYWKMVKEGTRVVSSLDGVVTHGVWTFNQSLRWEISSFNTMFGKTFDAPPALPKATRKAWELSTELQKSRVKDQGTPQTRISQAFLAKKMTEKTVTAKGLCSVPQMMPIQK

SEQ ID NO: 975753 - protein, 69 aa, Homo sapiens
NGKWRLTARVVLRPWCPGVPPVPRSGREKGSGATRDMHPMSRERAKFCQKWPFMVKRDTRANVCMPVAA

SEQ ID NO: 975754 - protein, 236 aa, Homo sapiens
MNLCSREMLMAMVKDEYYGYPHGEKEYWHAAGDDLYRPCGDCPGKELWFGGSIAYVDSEVRWIVCAGMGLRRHCNGRSILLRGLDQDMAKQNGVTTMEEHASSSIHDSSYHLNRDPTWKQGHPGRLRVVSSVPADSDGNSSDRQTNNTTHTTTNTHPAVRRPPPPSPDHPPPQPPLRPAAARGPQHRSRSTGAPIDAPRNTLRPKQTRARHPPHIKKPPGRNRGSAPPPKAHEPHG

SEQ ID NO: 975755 - protein, 294 aa, Homo sapiens
MDPQCSLLACGSCALCLVLQNLKECKLHTSVQGRVVVLGGHFVGMVANGVAQGVHLAKRGRVRNKGEGCCDWSGQGPRWCNQNVKLGRKVLIQPVDSWRTECHIQVVQPPYEPRMRQNSDCAPQLQHSVADTGAKHLPADNTSKHTTNTTTPRATADLHIVRRHTRAHPQTNSRPSHTHTSSVGAPSKPATQKDKKTKAAAHPAAYAYTGNRNVETTSSEREGPSVNGEKTAGARGNDQRARQEQKRSEVRSMKKKLCSRAKMRNRARRQQQRRRRGENNKDETRRQASPHHRR

SEQ ID NO: 975756 - protein, 72 aa, Homo sapiens
  misc_feature (30)..(30): Xaa can be any naturally occurring amino acid
  misc_feature (34)..(34): Xaa can be any naturally occurring amino acid
  misc_feature (38)..(38): Xaa can be any naturally occurring amino acid
  misc_feature (50)..(50): Xaa can be any naturally occurring amino acid
GHISSGYSVSGGGFKFFRGVKGSVDISGLXGSSXSGKXYTNSSENMSRRXMTPREPNLLIFPPGTGPLITKG

SEQ ID NO: 975757 - protein, 212 aa, Homo sapiens
LLRFSLGSPVSPRLQWTPMLLRRGVSCTCAGSCNCKECKCTFLQEELCSCCPVVGNASVPQGCVLQKGAQQKVQLLELMPKDKTFSPRLYTRETYVQNPGFFLYTNLVTPFGYISFSLVNYCDVTLFNSTFRTFKKQTTSMKLTQKNNIVCGGIHRALLENKTFFHNAPNYFVFSSRRRGPPASKGIAVAKTVGRPMTRLVPQKRNDLVWSR

SEQ ID NO: 975758 - protein, 110 aa, Homo sapiens
MWRNKGLVPQKEEHPLWGNKKKQDVWQREIHPPQNIKRRRREGENNQRWFVSETQPPTELESALEGEDKKGTEGNITIQKRRGEAHQRRKAPIIIDQEDMHAPRWRRVEQ

SEQ ID NO: 975759 - protein, 135 aa, Homo sapiens
MTMCVQNPISFVHREVGGSRAGSEYKISLTEYGHLPCLLELQELRQGSGGNAVVNSQTRSRSGESVREWIGRRGRQRSVSELRICVLLSRHWVSEANTSVLKSLNEITAKEKVSLRPSTSEFVSQSVAALLEKVV

SEQ ID NO: 975760 - protein, 232 aa, Homo sapiens
MAFETMPKTRIRGDSCGGPGGAKGVPKLRTWGESSKDGFLRHGPGSPFPRFPRIDGQGILRRGPRWHFGFPRGSPGWVPSRGNRFVHGHQGAARGRIVGIRYKGALARLGFASGTLVGAQAYIGRGVFGPRVASGGLALVGRQGASQLRAGRLAGDSPERLVDVCPWTRTFTVHCVASGCQTLPAQLRAAAAQYGALVGALRSTGWFAGRHQRLFGGRSLPDREAEHCEGAA

SEQ ID NO: 975761 - protein, 289 aa, Homo sapiens
AQNWGRSQLSGTAQFLQNVYVTKSCASSAVRVITLTPKCIWVCQSLYKLVIAERDCFDPWKQPSRPKCVHEVTMCQPFGPTAALHQRRGIWALRLPREAAKKENCASDMKSALSATLTDGDLGLCDRHLLRYDASELKASMKGAGPERDSLIEIICSRTNRSCRTYTESTRDLYTRLDRATDIHSGTPFLVDFPEAAWWARQRVEQHASDRAVTYEVTKQPGDFMTAGEETGTVATGQHRPPRASTLKSLWQTIPPINGAVEGDATTAPTGVTPDGARHERRALLRKAP

SEQ ID NO: 975762 - protein, 123 aa, Homo sapiens
ERASAGDVPAAMCENLPQGYCVHVPVAWGLPEGRAAGRPKVVSRVFPGYSMPGEERCLTGRFGRHRVPGSTRERPGVLPLGRDTEHPSGFRYRASSWKEWYMVAMTHLSDSKRVPIIKGQWVS

SEQ ID NO: 975763 - protein, 125 aa, Homo sapiens
MVYTRSVDTMKLKLTKRRWQYMDSGSQSWGSQHYGASTALARAQHSARTNQACKSGPQHHQLSCKHSGPVPTTLSNRTGPVPKFGNVTHISQHQHKARLRSGAPFHLRHWAYPLGLFGTYWSKTS

SEQ ID NO: 975764 - protein, 190 aa, Homo sapiens
EQERHVGGDKILQSKYHYKEEVKSSVIKFKLNSAGKCFHPYNTCITDYKDFTGEEALQETKGGAANRKWVKNVISFEFYTFTAYDIAEDVKAMLLNSKGGRLPSINEWGQTDPEAEDGGWCLVSPILDAVVVGGEQREEKTSTVHINNLCNLLGVQLGDCVMVGCHIRHRHPGGLNARMDTQQSDHLNLH

SEQ ID NO: 975765 - protein, 96 aa, Homo sapiens
SPSKMAEEPQSVWQLPTSMAAGGEGLTDVSPEKPPGAPSSAAVSPGTEEPVRHQEKNSIYVNQSLGSSPDQEVELSMSVGSDGKAVLHYCKSQAWG

SEQ ID NO: 975766 - protein, 79 aa, Homo sapiens
LEALKDSTEVEMVDENTEKKDRTRKMANSRPSSTQVATNRFLNDGCVQSVSPGQALCSPYSQGDDLLKALGWSWDRNMQ

SEQ ID NO: 975767 - protein, 70 aa, Homo sapiens
VRARVLYRRVAPPQESRATMVEYHRHGEVGQMLRKPTIFVKECVDGVSGGEDYNQNNINQWMCMLQWNNP

SEQ ID NO: 975768 - protein, 131 aa, Homo sapiens
AAGRGVESGVKEGGRSRKSGTGVAAGNPCAVRRGRGPDSDPRGGWPMAGDQRPGRQIEQAGSLRSSIKEKRSQGPWAAKGQKKICARRRATVQEGCTRQSNRCWGSTIPLGHFYDLKRACQSFGIRDRIHN

SEQ ID NO: 975769 - protein, 130 aa, Homo sapiens
MAYIKVLQRFGIVMTKPWVRKGYVSELEVDETCSGKQILVGMVKKTMKEVCEMMTATRENLWRMCRLLWTKLFDWPLLWWTGTVERLSLARRKVACLQLEIICQVFRYLANVLNWFERMIRYIAVGYGEV

SEQ ID NO: 975770 - protein, 170 aa, Homo sapiens
MATDPSLKGSFKGDATDRVRNLLKNKISDAFKLFDFRQIPNRQIHYEGLTNWLRSGADSGLDEEQLAFFPLTLEGPRFHNARVHFPATYTVNPKNGPIYNGRHSLQRISVSAECTTRLHICTAEGWSNDVGTQDIVGTQFTPNVNRENLDQRIFGNAVAPWLYNAPNDTG

SEQ ID NO: 975771 - protein, 81 aa, Homo sapiens
  misc_feature (44)..(44): Xaa can be any naturally occurring amino acid
SWQGFYNIGIVEQTCWSWWVGSPFKKNHRAPTQEQYNSLDFVSXPICILKHTMAYQTYTILYYIISPLNSRTWLPYLLHNN

SEQ ID NO: 975772 - protein, 30 aa, Homo sapiens
MVVRSYRRTTIYPSKETSRCKAHPTRTCAP

SEQ ID NO: 975773 - protein, 119 aa, Homo sapiens
MAKERPLRSKRQVNFGHLWRLGLKSHAPMWQCQSLGLAKWADLLSSSALLLKNDDCKNHCQPSSRHSPIEGFIFTADHRSRLIGRQPQALGAGTGVRCLAQAQNPLSPLTRGGRRGEVA

SEQ ID NO: 975774 - protein, 80 aa, Homo sapiens
GSSAARGSVSWLSTSVWTEQIGDSLPSLRRPPISSRFEPLGPSSRPSPASGPASNRFVWELLLCQPTMSSQIRQNYPTER

SEQ ID NO: 975775 - protein, 126 aa, Homo sapiens
GDRLLAMPPNETCTVKGITLHDEPVDWAAEAIMLVLLGSGMDIIKIKCGAGMNLVAPKYPLNACTRFRARILIFNIEDSYQLRGFTVCLLHYPKPVSEPAVIKRLISVLNKSTGERHKGKSLKFCD

SEQ ID NO: 975776 - protein, 293 aa, Homo sapiens
LLSPGVLVQVTSSYTLVESLTHRGDAQEDRATWRSNYSLRSSTYVDDNPKCSMCGTQTIVGSKQIAADPNVPSREGCGADVGNNTMMRRAIGGAPEKQPVLTKMLAQYRGETGGLGCPPREGPLKWRIQGNIVLVATEGAHLCWPVVWLHFWPPLFERFTWWQAQENVSRAQRKTSFLPRALSGITTKIPPGHHLNILECCAVDQDWHDTCDEQDATVGLVQISLFLVAGPQEGSAMAALNPEVLFRGTLFPSGVPMSVLLRLYHCVGLSSRTGGFGRTSWRGLAHWGPVTSC

SEQ ID NO: 975777 - protein, 131 aa, Homo sapiens
MSKEVTIGADNNVCCPQNKRCGFPKQERRTTPGGANKNTNNGGARGAISLTPHAENKKNDRPLWGGEDQTPRGGVLHRRHKTFSTKKMGGTHRRERDPQNKRGGGDHTKHNQRSGGQPPHKKKRRTRRQMN

SEQ ID NO: 975778 - protein, 146 aa, Homo sapiens
  misc_feature (142)..(142): Xaa can be any naturally occurring amino acid
MEGTGQAPLSVPVENTDAPTSFGPSVRDTQGSIRNKGNTGADPRVWELAVTQGHWRCVQRGLHAINQLLEGGRSTTRGAHTGHYLRIVRLPFAIKERILCQRGYRTQGDVRRLWNYPKHDGLGNPSHKAGTRTRMGGPHTLXRGKL

SEQ ID NO: 975779 - protein, 57 aa, Homo sapiens
  misc_feature (8)..(8): Xaa can be any naturally occurring amino acid
MPRRVEEXKQCLGNYKTRQQDEESKATHRQATNGTTRSTIPRNKSKQMKDQAEKQTS

SEQ ID NO: 975780 - protein, 142 aa, Homo sapiens
AVTKLVTNVSQWFYNPEATSGITASQSSLVSNSSSGSSSSTTITYFLIQCAVTAVVSSTPSVVMSTVAQGVIYISNQNGINQIPSPKSLVSAPNQILCKFPKKSKSPKQQLYQCTQDTATSGPAFSSISSEKLRSSPCATVY

SEQ ID NO: 975781 - protein, 314 aa, Homo sapiens
  misc_feature (55)..(55): Xaa can be any naturally occurring amino acid
GSHMLTFLQQLRVAVARASERASSHSLRSHALKNYLCFDGEDIVPVTFLGRLVVXNAKLGWREQGRIVGIDPNLTTVLVTEGSPSLVLVEFAEEGSNWDCPEEQATQAWLGPQNWYRAARFGCGPWWVAGEERNVPAKHEVGRCLCRRGGFSERVPSRRETTYILVGPWVKGTGGTWDSGLIALEYTRSSGHPQGCCKGSDFEQHAGNLAKRPRLGKENLVYLFWGAHPCLVCEKAPKSRFPGSGCTRCSRRDQMGLCMIAPVAILEFSFRALFAIPWELATERGGGAPNPWRAEGRPAISGIAEVNTAPCSGG

SEQ ID NO: 975782 - protein, 103 aa, Homo sapiens
TGRGLGSAAGHGSRLCSTRAKMPILGGYLEVPSRQVTEAREVWPCDVGIPPHRVCPLCPRMRMSVGVPHSGRTLSGSRLGESVKELLHRQASCGASLPMRRPW

SEQ ID NO: 975783 - protein, 102 aa, Homo sapiens
MRDTTSEGGPKKEHHPGEPSKTRGRRRRTHTPNKKKTEGAGGMGNNNRRYDGEYMEKQQHYCKKDGREQPRGRHHNSSGGGIKKTNKARGVHQQRARHRLRQ

SEQ ID NO: 975784 - protein, 184 aa, Homo sapiens
VAAAGTLGVWDATGGKLNGPFQAFGVGTVLSRRGRGRTIPIYQADPQCYPKCGLVFIHPFNKGKTPTTFGGKTFLLNLHKFFKKRTPEKGSHNLAAWAIPKSGPPKTPFFGGTRGLHLKSRDCGKNQNAPGELKTCPPEEKGLLKPKAGQYTAGRPLIPRSEVVGTLVVWKGKKQLYAGGWGAN

SEQ ID NO: 975785 - protein, 83 aa, Homo sapiens
PARWSRRVIPALREAKKGKDSGAHGVRDRAWQYTQRPVFLQEKVTQINKAKDGAKKRSKGGKFPPNGESPNLAGVFPKGGFPG

SEQ ID NO: 975786 - protein, 276 aa, Homo sapiens
MAPSRKFFVGGTENERAKQSLGELIGTLNAARCGDTEVVGAPPYAYIDFARKKLRSQDGLWLLQNCYKVTNGALTGEIKPWEGSKTGEPRGWSWGTQREGIVWGESDDADVGTKVGPMLWQEGLGEIAVHGGRRYMTGDGGITEKGLFEQTEVIADNVKELTQGRPAMSCVAHGTGKSATPPNAQEVHEKARGWLRGHVSCWRGTEARIINEAPGGLGTWKEVAAGLMDATGGGLPTSESGDIRPKEAPISNFGTRDNPETERARKAEEDAPRRTK

SEQ ID NO: 975787 - protein, 76 aa, Homo sapiens
PLGRNWHLAVVRPNQECTGKSTAEAPDICPLDLAENVELLVVSTYMQNLYEKVNTSESNEGNVVLFLPNAKCPREC

SEQ ID NO: 975788 - protein, 100 aa, Homo sapiens
VDFELEVSPAQVTFIACSFAFFLPPPLPPSPSWPSALRPLQGHLYTVPIREQGNIYKPKNKAMARRAEREAKCTTRTPREIDLVKPDLKNLNDDVVKDVI

SEQ ID NO: 975789 - protein, 70 aa, Homo sapiens
HPEQQSKEDGVRASGALTTGRAGVHGDWERARSSSSLSPASPSHPTQPEQRCRRSQPTSSSHGCDLRGER

SEQ ID NO: 975790 - protein, 264 aa, Homo sapiens
MADGQVAELLLRRWRRLMAAGQRRVGGELGMEHQAVVGAVKSLQALGEVIEAELRVHQMDYVQRVKRTHSQGGYGSQGYKYNWKLDEARKKTYWNPNQISQRPCASTCCAQKEALHSGSSTFSIDLVFRNETPGRQRTWLSPPDRGAWWRIMVSPVANLMGVCGEFFTSWVSRQLRSRPARNHKRGQHGGCSVTTRGLKKWGGVGKLGGLQSEDAAAMGFRESVGHAGLSWEPTVTIWLPFRLGPKCCVCGALARWTALKGVCP

SEQ ID NO: 975791 - protein, 251 aa, Homo sapiens
MFACSNVVSPLPPWSRAPHMLREPYAIVQMVLKDRRILTDESLSSFGSLMSPFLDWFIAKAFQTSAISGDIDTAAKFLCGAGAATGWAWPGTGGWHRNCVGSLIIWFCQEPFSEATVLLLRHSGLALSEAMALFCLMVAFLILLCHGEGAVSTSHRFSRVLLARVVPFLNTSPGSPEATCWLRAFARRRDHLILSQTAIETEKDVGAASTGKFEHRFGAAQVGRGQRPRTGRNGGPKKPGPVAPRWAWLRP

SEQ ID NO: 975792 - protein, 113 aa, Homo sapiens
  misc_feature (72)..(72): Xaa can be any naturally occurring amino acid
MHYEVMKKAFLTRLVAEEKSVLETIAVGARGPPRLCESTVAIGITPRGNPGVVKKWGGSSPYWKYPPRGDHXEGEVFATQRSNKRARLEGRAQTGTLRPKEGPMVDLFSFASL

SEQ ID NO: 975793 - protein, 173 aa, Homo sapiens
MTSCKEELPSLLDSGRQQDNQLQRGTAHSRASSLLRTEHSTGRPFPQRGATHCVSPLSYSNTSIKLLLQSVNLSKKKNKQQQRLDTAHNASPRTTTPNQRRPRQTTHNNNEKAVGGAAPQAKIHNTGVGAATPKMNWTTVRTTGAERGGFHPKKPAARLTTHRGGTVFNDSHT

SEQ ID NO: 975794 - protein, 307 aa, Homo sapiens
MERSRGPEGTRALSLSCSPLPLGESCSMPRSWPSVTCKEQAESGALCDRVSTDVTSRESLWGSESLLRYRGRIVSSNDVRRSCLGACPRGKHVRSTSRPVEVGCSLFGKRTGQRFTVECGLTTVAGQENGSVIRGPTGWQDGDISMASSYQEAPGGPPTFTVTVNQDDKTLVWLMPNHACPAGFDSTRMYDTASTFAVPYCPRLSFPLTLPKFDPFFSIITQTFICAHYPYLIGAKPIAGAKLDEELPLQFSRVWCNHCMGVIPTHSLLNTNQRHLHSHSCTPRNRKQKHAARYSGQQTHVAHTAVS

SEQ ID NO: 975795 - protein, 32 aa, Homo sapiens
MTTDLQRLMSSAMESSRIVLRRGKLEMNGRNR

SEQ ID NO: 975796 - protein, 94 aa, Homo sapiens
MKHRGAKNGRSKEHRQHHTRVDITPNRDHVTSEHNIHQNSLQAATPHVSTETAQRWTYCSQTGAQGGHKRETQTWIGDQNRPRTIPNNGVTPTH

SEQ ID NO: 975797 - protein, 269 aa, Homo sapiens
LPVWLLTTGEAGNQVGGMAERALEPEAEAEAEADAGGEAAAEEGAGSERRGAGRSSRSSEPGAGVGPESLERWYDVRRVFPGRGRTGALGGSCGAAAGFGGSQGSAALPQLSFLRGGRASAGKAEPSMEKAFGEKFSVARIKGHKRRVGKMGVGKALVENLVVERTVGRHPWLTEGAQHMHPVWLRKEAGPPRDESIGRPELLLRPWLPKRGPVLGGWRSAGANRALTFPGARGIARSRGRAPYKGCLEPLIGLRTVGVNRRLGWAGGV

SEQ ID NO: 975798 - protein, 238 aa, Homo sapiens
MVSVINTVVVPPHDGHDSRQPRWTTMGTRLGICSSDQVRRNIFDCVAMEWQILIARPSGVMTGPVWHRWPGHHPMCGYILALCSYERKVIIWREVKLAPWEKSHRACGETEFSHVNIVCAWASHVLTGLILACVSSDGAISLLTYTGEGQWEVKKISNAHTSWVQCRQSGDPAVGTRGSLIDHPSGQKPNYIKRFAQVGCDNLIKLWKEEKDGPVEGGSKKLKSAPSDWVRECWPGPL

SEQ ID NO: 975799 - protein, 66 aa, Homo sapiens
MVFTVNTCGAYSVVPLGTTSCRQGTKAVRDSPPNKNARAGHRRVLNQSRGSEGPKGPYTEVKEPII

SEQ ID NO: 975800 - protein, 157 aa, Homo sapiens
MTWRKSRIMDLTYVLRMLVRWLLSVLSVVIYVHIMAFIGNASKYLRNYDRVLDIMIAICALKWTCCIEHLSPLWIFRSWENKEPVNLYTFHYPREVPLEDPGLSVFPTDILDPVSTDSLVNCAKRQDVSGIKIEPGLQHFGVRLKKELKYAKSENLV

SEQ ID NO: 975801 - protein, 187 aa, Homo sapiens
MAMHNKAAPPKIPAHPAELAELREGGSRSCRKLVEIVERQIYAFGGKLPWKDTSDVWQYYSWWDPVSDQPKKIPIAKVIEGTRKLKEAEGVFSKSCGYLSSCSKCMCQESRTSSWKQREPAKVGRKVTLSPDFHNSGNMSPAREDPEDLDGSVQGVNLRGCSSTSSGSHHQQHKSERIKPATGIALS

SEQ ID NO: 975802 - protein, 238 aa, Homo sapiens
GPYAANVHRAIISICCCLFILFLFLSELTGFITTEVVNELYVDDPDKDSGGKIDVSLNISLPNLHCEWVGLTIQDEMGRHEVGPQSTIHEDPVNNGAGCRSRGQFSINKVPGNFHVSTTQCHSPAKNPDMTHVIHKLSFWDTLQVQNIQELSMLSGEQTDSPQTPVGLPTITILKMGGPTVNEDNEWASRGNSITSTTGGQQGIRRYSQTGDSSLKSGSVRTQAHQVKYTERRAGVQI

SEQ ID NO: 975803 - protein, 94 aa, Homo sapiens
  misc_feature (26)..(26): Xaa can be any naturally occurring amino acid
QTLTFSASAPAPWRPPGSSSVWGETXRKGWNTGAGKGQGSFVAEGKAFNSGDNLPWKSRRGPKKGVWPRGARETNPGKEAVADMLDWPFPPPPY

SEQ ID NO: 975804 - protein, 349 aa, Homo sapiens
MSYPASATYDYCQIRGHEQTRDGAKQTTRGHRRGRRECNERGEQREKGGRAEESREAAGDEGRETLQSGGEREPRGEQWESEGAERGSDESKPERRDGREGERDRAAERRNDREAKREKERGDAEQRRTESDREKKEGAGGQQDKQKRAQRPEDKKREDEKDEEEREAKKQGERITSQTERRREKNKEKRKTGGESRREDGQGERGQNNKRHGARRKKKSDQANTRAETRGADEAREEEHEHNRRGESTAQTNDREGSRTQERTTAQTTERADDSERETGSEHEAKEGGRQRENTDRHKSEDKQETQRRREAKNEERPEGSEEEPADRAANRASERRNTRRPNKRTRNR

SEQ ID NO: 975805 - protein, 95 aa, Homo sapiens
MTIEARREYYEMRSPHIQTEGDDPTKPTKDSNTDQIYLRDHEDSKGNTVQATKKRQRRKLDEYCANIATFPRSLFLYVRLLSSFFSNLFRAKGGR

SEQ ID NO: 975806 - protein, 272 aa, Homo sapiens
MKQEAVIRRRIHTVGPRPPPGGAPSRERKAKNAPPTAIVLFTLPSYFLFILHNHTKQQTTIDYIFIYIILPPSPYPTIHNNTIPRTKYISFLLLSTSSSPPPSLTLAQQRKSIVFIFTLSPFPSHLSSPPAQPHNYEKAHKPTNTLFLLFPLSFFSPLPTHHERQQIRTLIVSSPRSAPHSLPLPRNHDHSDMKPPALITLSITIYSPLYPPSRPFLYTIQAEQTDKYLPSLTSPFLVYSFSYCLRASSLRYTRVEESDDNASFHQLLSLFS

SEQ ID NO: 975807 - protein, 110 aa, Homo sapiens
LVTKVANNGYTGEELLEWLPVYGTLDGVLNVKRELKALELGKLKQSIYMLENELREKDVKNKKLLVPRLINYYFWLIDHYMNGTVEKSKIDEILLRIKLLDEKINDRYIR

SEQ ID NO: 975808 - protein, 62 aa, Homo sapiens
MKTKVLPVGPVNCDEKIVVLLQRLKPWDPRVSLEHALTWSPTWLQLRIPRIEDGYHFGVAVQ

SEQ ID NO: 975809 - protein, 131 aa, Homo sapiens
LLVMVVPVDQPVMNMPKRYDNNSTMPNSWQDIDLDPGCYIEERTDSEYAQLAQYNMSFSVVGDKEESVALLNIRTMRNKVHGERTISETIEAATAASIEFLQHYRQKKNFNEKITQIWLHGKGGISVSVEY

SEQ ID NO: 975810 - protein, 123 aa, Homo sapiens
ALETQRRRKRSSEPRASRPHGSMCLGSALDAVLEEMACLCDLPRPRPEPSGSADSPATIHGALALLSLPLVCCRRLRMLLLLLMSLLSGWPWPHRLTLTVYLRRLFDRLSRMIILARVVQQML

SEQ ID NO: 975811 - protein, 217 aa, Homo sapiens
RSNWLLAPGSAVEPGEMPPPAASAPCHDDATRPRASRAGTALLSGLHSAPMMPELQRCVMCNAHAMNEMNVCYNVKTEKAKEKDKKAEWRWRREEEEDPECESEPHVLACMMPCLMANGCGNVRMPWPCDCLMWQWPEDERDVAEKDAVLCCQCDVMCPLNVPEPWEDCEGCVQRPRLKPPKAPEQEQVRPPGPALRWLVNGPQKLLEVRRRSPVSE

SEQ ID NO: 975812 - protein, 111 aa, Homo sapiens
ARVAWMVGSEYSAWFSGSSSGRAPLLALCGSLLWTCIYSPQAGRPLCFGAPVYSVNVFVTSDCRCCYNTTLIRSIHTGKGADVNLVQVVRIFQEHSLSRLYMLARNAGAYV

SEQ ID NO: 975813 - protein, 81 aa, Homo sapiens
  misc_feature (1)..(1): Xaa can be any naturally occurring amino acid
  misc_feature (9)..(9): Xaa can be any naturally occurring amino acid
  misc_feature (12)..(12): Xaa can be any naturally occurring amino acid
  misc_feature (15)..(15): Xaa can be any naturally occurring amino acid
XVQAYGYEXLRXAEXRQSQLMQHVIMCSELQKDDKDKKKKYNSVTNGKERKQRDQMLQQTATGDSLSFSSSLLFFSSFFSF

SEQ ID NO: 975814 - protein, 131 aa, Homo sapiens
MPRLQCMGGLLIRALGRSRVFTLHAGRTPVSPLWERGRAGATGETLPDNSLPRFSQTLNFFEKNFSNVSLSRAGAPLERELSLAAWKTTAWGTFLKRPGVVRGTTPVWRLHKRGGGEDTEIEAEGVMEQRV

SEQ ID NO: 975815 - protein, 109 aa, Homo sapiens
AGAAVVFECASVSECECRVLPLLVPPAEGPGGLVDVAGGLLGGRGSKSAGVCVESLRRIGGGESEMSWSESIVEWKPCKQMNGILESHGEQNEMRSGRRMREVGSRKRG

SEQ ID NO: 975816 - protein, 264 aa, Homo sapiens
ALSVVKAICRGVARPTECSRRRFGAQAPVRQRVKTPTGPLPYKKILGTFQKLKSMSRAFEHHRVDRNTVALDHAHRRAAHCGPTEKLAEVGEFDPSKERLLEYSRRCFAGLDDETLKKVQALKKSNLLLPITYRFKLVIAPRHPQPSTPGLPPPWTPVDDHATHHPTHSAPLPPSIHRIHWDLGAPIRPGPHQAATGPGPARGTTSRTPAPPFRLGMHQPMSSPGPFLLENQAGRVPPPPRVGDCTDPVSSHGPAEELPHLIPG

SEQ ID NO: 975817 - protein, 213 aa, Homo sapiens
LGSPKLVVLRDHFIVSVMWRTGEGKHGSWTGLPSPYRGHVQARGWRGETRPHRSMTEGQRHRWEGQRRSAWTGATHFVALAVAVCCCDFCVLLLHRSACFTLIRMSPAVCTTVAGVWGILAMLCSTFNGVKSSERFRADRIDAQSSPAEGTHGSFIVLKGVEDAALAAHQADIDGRRRRISPSPLPSSEETAPLQQRQGFRRCPLAHSYVFRK

SEQ ID NO: 975818 - protein, 136 aa, Homo sapiens
RRRDLPHLPPRLWGSEWGRGFGKGGARALRCIVSFPDLTASKENSGEQPGPASDPNNKEAAVRKLPDKPRGFQGNKLWPTGHGRCTEWKSERGLQDFCPEGGERYRGISSIPVRLVTWQKLAPLPSGLGDRARLRL

SEQ ID NO: 975819 - protein, 30 aa, Homo sapiens
MKYTVFGKVIDGLETLDELEKLPVNEKTYR

SEQ ID NO: 975820 - protein, 65 aa, Homo sapiens
MTQEVESYPRQRSYRIIGKSDVVTYLLEHLQESVIFSKNAHDVGIVLNSGAGPQRAREQSMEERP

SEQ ID NO: 975821 - protein, 202 aa, Homo sapiens
QIQSMFQKDDYGGTLTNKKTILSRLKQMQELEEHAENNFSNYTKKEGVLMSKKLAKLQKNLNGIRGLKFINNDKLIMLVADPNKDIIAIKEAKKAKVKVIGIMDSNTDPALLDFGIPANDDSVKSITLIFTVLADAIATAKGGKALFAYQPTENIVLPEVPDKEHKALNKFRKVSAEVQNQVHHKSFVAKAKPEVTSQQKEE

SEQ ID NO: 975822 - protein, 98 aa, Homo sapiens
VVHSWWESDAQGEEDETEFQYCGNGDSWEDIPEDILLIKPSCTLSLPISRTSVLSALVTVTLKCRVPTDALGTKDPCKIPHRCSTESRITEAFLAPKC

SEQ ID NO: 975823 - protein, 103 aa, Homo sapiens
MSYLMELEPPAYARATATRDPSHVGDLHHSSRQCQIVNPLSKGRDRTCNLMVPSQIINHCATDGNTHLNHFRVCSSGALSAQYGATITTDLSRAVFILQALKL

SEQ ID NO: 975824 - protein, 70 aa, Homo sapiens
SGLILGIPAVSQWLMTPTTDDEVQVNPGLPWVRIRLCRELLVWVADVAQIPHCCGSGVGGRLQVPLDQIA

SEQ ID NO: 975825 - protein, 112 aa, Homo sapiens
SAVLVQSIRRCMSCGVGADVARIPHCCGSGVGLEDKVDNENNKTTSRTYPYVAQVINRICPVNHEVAGSVPALAQWVNNRSGVAMSCGVGCRRGSDPALLWLWRRSEETALT

SEQ ID NO: 975826 - protein, 33 aa, Homo sapiens
MAPWLTNPTRNHKVAGLIPSLLSGLRIWRCHEL

SEQ ID NO: 975827 - protein, 69 aa, Homo sapiens
MTTDSAGGSSIAIYAIQEIEEISQKIDSRAETILNAIEAKKRRLQSFWASPGCEGPSSTQALGPPSVAA

SEQ ID NO: 975828 - protein, 34 aa, Homo sapiens
GLLFEAQIPDMIADSGKYIKLQNVYREKAKKDAA

SEQ ID NO: 975829 - protein, 87 aa, Homo sapiens
DLCIRALNVTKARVTPWSPGPPGLQVYSGGGYDFGLRMETSTVADQASHQHRSLQTPEDYASLLLPLNVSQATSIETHSCSMEGSQM

SEQ ID NO: 975830 - protein, 74 aa, Homo sapiens
LDKVLDRFTPGTILSGCTEEDVVDQGGFARGPLGCFLPLVGALNGLSAQDNWAKLQRDYPGALITNYYLWPAVS

SEQ ID NO: 975831 - protein, 36 aa, Homo sapiens
VTDATETTITIAGERKTETITGFQVDAGPANGQTPI

SEQ ID NO: 975832 - protein, 59 aa, Homo sapiens
SILYCCAFLTRQYTTIATDRRFVKEGASRQDTLDTLSCFKPGYLCSPQTRGSLSSVPRK

SEQ ID NO: 975833 - protein, 102 aa, Homo sapiens
LRHSRRLSVLCWEVGYSIRFEDCSSAKTILKYILMGCYFVKLMNDTLLERYGVLLLDEAPDRTLATHILMGCTERRCKTEIRFTGYSSERYSRCRKIPDKKH

SEQ ID NO: 975834 - protein, 62 aa, Homo sapiens
RNGYLVQADGHRVQSPDGTLLIYTCGPEDEGSYTCSAYQGSQAVSRSTQVKGGLTSYPTAPA

SEQ ID NO: 975835 - protein, 70 aa, Homo sapiens
QEGRSWLSPDLLMVGVMMGVGYVMATSMVDGCNSVVNEVMSTDLKVESRMFCSRRTTQVVGNSVNSGLQD

SEQ ID NO: 975836 - protein, 45 aa, Homo sapiens
MIRTEVYRPRIIILGARQRRRNGKRSSNRMKVPPGSNVLLKLLKL

SEQ ID NO: 975837 - protein, 43 aa, Homo sapiens
MYSKATLGVIDQTEILSRSVNADDLHDSSRVGYISTDLAIDSK

SEQ ID NO: 975838 - protein, 93 aa, Homo sapiens
MVLLILPLTISSHIAQLGFNTADQRLYMRQLGSKARLRFCQCVFQGSFHAQLLTADHSRDPARVRRRSVTSDLLIWSCSVWPATSRFNSSVRL

SEQ ID NO: 975839 - protein, 57 aa, Homo sapiens
YRCTETSKEMEVKPRTVTADRKSCATRSQNLYFHHLTNVAPFAQKNARTVSREWTSE

SEQ ID NO: 975840 - protein, 151 aa, Homo sapiens
MHQKCGEKLIEIARTSPVEYHMIHTGERAYECMECGQACQRASQSLASTSVYISGEKPYKCNECGKAFTHRSNVVLHNRRHTGEKSFVCTECGPVFRHRPGFLRHYVDHSGENPYECLECGKVFKHRSYLMWHQQTHTGEKPYECSECGKV

SEQ ID NO: 975841 - protein, 65 aa, Homo sapiens
PPGGDADCQLPVNLNEDGSPNLDFKAEEQYQLDIKDEFRCSPCRSWYCGACGRKTLGVASPGVMA

SEQ ID NO: 975842 - protein, 107 aa, Homo sapiens
  misc_feature (55)..(55): Xaa can be any naturally occurring amino acid
SAWGFKGTRIRVGAVSPSTGRHLVDADDVKEVEPHPDMEAIFATTFYHVLIWHKXGAAFRGFQKDKLAQNFNLDNQCGPLKGENSIQFLPFFPAPGSKKWGGYRGSK

SEQ ID NO: 975843 - protein, 34 aa, Homo sapiens
PEDTRKYTCGYSDTAERLIKSVIQVGEERATKGT

SEQ ID NO: 975844 - protein, 50 aa, Homo sapiens
MRYWMCQRHSPGLLTHFISLVYKVSLWPAASALDHFISLSMRPNLPHDAA

SEQ ID NO: 975845 - protein, 77 aa, Homo sapiens
DTASSYSAISFGTPYVLLSRSRRTSADSKSLLVTIREEPSWPRQTCCGSLGTKEMRWWKASWSSRVESMSVISLDRT

SEQ ID NO: 975846 - protein, 81 aa, Homo sapiens
ASADSCIDISVTDLSSLTDSIKAPYGRDEALSPAEAAQQSTLGISFIPRRRWANIWSALKKHGDHVDNSPVSIMVAQSDDS

SEQ ID NO: 975847 - protein, 140 aa, Homo sapiens
TEFVKDILFISRNGVLVLIENMARDCREYAQTRYFRGGMLTMRAPLWPTVLLRNLIIFLQTLKNIFEPHVRVGDAAKMNIPICGIVDTKIETPASSTTLYPEMTNSPIAVHLYCRLFQKDITRTKEKRQQLRLSIAIRPR

SEQ ID NO: 975848 - protein, 53 aa, Homo sapiens
GTRKTHAGMLHSSLSEAQLPWLNNENPTHACCRSVKHAAQELSGSALADNPDE

SEQ ID NO: 975849 - protein, 156 aa, Homo sapiens
CASCDTWARSIPAVSAYPGPYPPPGPTQERAGPDRLTQLPPQNLASYDVCSILLGTSTLLVWVGVIRYLTFFHNYNILIATLLVWPCPASCASAAAVAVIYLGYCFCGWIVLGPYHVKFRSLSMVSECLFSLINGDDMFVTFAAMQAQQGRSSLVW

SEQ ID NO: 975850 - protein, 161 aa, Homo sapiens
YFRSANGCGMHLGILLFEVLYRATAVAAEPLHSSSYVHRRESQAMWPGGGGASSHQAPSGIIVTASGDCFVLFHFGHVLGPRVTFTREYLILRLQRLGILYRSWRGSSYSASASAHEAKCGGRTALPLRIPGASGWGRLGRGRCGPGGGSSVPFGRSEGIL

SEQ ID NO: 975851 - protein, 67 aa, Homo sapiens
MGVFTVYTKDVTCFKNAVSENAIRDPKWSLDDCTLTGTVLKRCFRPPNSTALPVSVLTPAALPHSTC

SEQ ID NO: 975852 - protein, 48 aa, Homo sapiens
NATCSFLQDSRITLYQIAFPGSFSDQAMPSSVDPVDRYFVYIHVRRNG

SEQ ID NO: 975853 - protein, 66 aa, Homo sapiens
LDVDMRKDLYANTVLTGGTTMYPGLADRMQKEITALAPSTMKIKIIAPPERRYSVWIGCSMLAWLL

SEQ ID NO: 975854 - protein, 41 aa, Homo sapiens
QIDHLTPALDTGSPQGRWLHEAWLGGQHTGVEACAVPLGRS

SEQ ID NO: 975855 - protein, 89 aa, Homo sapiens
IRKVLYANTVLGGGTTMYPGIADRMQKEITALAPSTMKMKIIDTTEHKYSVWIGGSILASLSTFQQMWISKQEYDESGPSIVHRTCFQA

SEQ ID NO: 975856 - protein, 149 aa, Homo sapiens
RACHMEAFLHLLTFFVLVGLFATITIDLLLRDDPPRCRRSAESEEIARKLRAASMRRLGTVRSICQDSTHGGSGHCGLRGNPSKAPDHQDCLLLNTSVMNARGVSIRLGITSKKKAFTKYCKKWQDEDGKKQLEKDFSSMKKYCQVIRV

SEQ ID NO: 975857 - protein, 62 aa, Homo sapiens
LDRICAMVDNNAYGKLTLQEYQEGSKAYPHIVQALYLNDGLVEAQAGAGGMGTGYHTRWRIK

SEQ ID NO: 975858 - protein, 109 aa, Homo sapiens
AATYAHKLSQEICSAEHYEPHLKNSGDQAELHIHIEEPVLKSKTGDNLTTYSSAYIPPSSANPDYGYIESARTHVKTLAQGLTHGRSRKGLHFLPQKTTIAFMKLKVRR

SEQ ID NO: 975859 - protein, 65 aa, Homo sapiens
MSLHLLPLTRGGPAGSLGACSEEKDDEWEEECGVDTGATVMSSASLMLPAWASRPEMGSIKDAEL

SEQ ID NO: 975860 - protein, 73 aa, Homo sapiens
FWTWTYGRVLNEPPYSELHHIQDETRRGHHDHSQGRWPREMIKEKEAHSYRKPQGAETGKETPRETPTAMGRP

SEQ ID NO: 975861 - protein, 53 aa, Homo sapiens
LLALTRAPRGGDHPFERLPYQLSMAAAVPTMETTADGESGARFRRGSLRNGYG

SEQ ID NO: 975862 - protein, 146 aa, Homo sapiens
MPTAVTYAPLLALLSLTRCWPFALTLDLDRGGLLSQREIVLDWLVRSYRLAHLLLTLWRFQFISWNNIDEKIKLIKFRNCHGDIISLESPALVIFCVRVRASLLALTRVQPLTSKVITDLLLLNLVWLNATCPSKKLGDADRFGDA

SEQ ID NO: 975863 - protein, 37 aa, Homo sapiens
VDIMDVDFGGERSRRKCRRPDGTSSRVSHSSRKPLFK

SEQ ID NO: 975864 - protein, 114 aa, Homo sapiens
AASRGSTLCSDPPARGSVESLIDVIGHPRGEAPVGGAVLEDVAQRHTAMGEAVHEGRFQQALDVVERVTDAAEAVRGEQPQLGLFRQVFCLPLPSSHLPHLLHHCVPTALKVIF

SEQ ID NO: 975865 - protein, 46 aa, Homo sapiens
PKIHTDNNKSMGYFGRRSRKVKKQDQDVPMPEEKSTHKGEGWLRDS

SEQ ID NO: 975866 - protein, 72 aa, Homo sapiens
PKAAKTPEAKLRREIWSTATSDDKDERHKGTQYMLNDANKKLLFPSDTNEKPPSMSLTEITTYLMLILGYSD

SEQ ID NO: 975867 - protein, 253 aa, Homo sapiens
  misc_feature (152)..(152): Xaa can be any naturally occurring amino acid
  misc_feature (208)..(208): Xaa can be any naturally occurring amino acid
MQGEAVSAVCRHHEGLSVSMPPLGAAATRWQTQGPRGPASLRAGLEHSAFLMVVALIARAGRCAQRPRALAVRLTGASSVFTVVLVMAPRVKYAAHELSLAFSRLAESFGLARRHGCIGMSPRERALDDGRGTSDLTGGSASVVSAGLGGTXCDRAGGSPGRLRYAASSSRVGGTWYSAGSGVLDVLAPVNMPGEARAVWQTSDGRRXVTKGPSKEVARYDVGDRATFPSMSSKPLDMKPTMLARPERGPGAS

SEQ ID NO: 975868 - protein, 249 aa, Homo sapiens
VTAVMSRVALESTADFEAGAGIRPLDTTLRVLSDSDFLSETGARSAGQRGRGSHHGRELFQYHYPERTCHKLKPSFHSTGVPGNGMSDTSGCGMSVGLNGHSMQSPSTLIFTNEGRALKTATSLAEGLSLVRLVSRSGTPAVVSIQEKLNGKARMHIIWAAIHGHSNVSLSDPNSWGPVFRTVGIPGGRHARDVCDHSGGTKYVEVVQGIQHRRIGAQCDTKRPRGYPQHVLEMPCQILFYTNPKSALE

SEQ ID NO: 975869 - protein, 106 aa, Homo sapiens
MVRDAREGGADAPSQYLGSLATVPDEMFTKVMGSANIHVLNMTLNEEEYLVGALARLVYEEHLLPRSVTMVTSTAEGINGDPDLNVGVEPGDPCSEGRLLPENALT

SEQ ID NO: 975870 - protein, 67 aa, Homo sapiens
  misc_feature (15)..(15): Xaa can be any naturally occurring amino acid
MPPFAHRGQLRVGHXYRVTPFHPKVEHVVSGGGENREGATQYISKRAEKPVTYLICEALSHEQGFNT

SEQ ID NO: 975871 - protein, 326 aa, Homo sapiens
DRNGQLDQSGGVERRCSPEVKVLGKGGVSRANSAVHKPAIPAQSCSVTSTHQQPCTTYAQTGRPGLDSPLVHNIPCSVVWCNSIQEVIDHRERVSSRCVLPVLSSRVSVETTETGVVSNSSQSHNEDQTTTAIGCSVNPQSVDVNRLRSSDSMIRDRRSRGLYKKDASTRITCHLPEATPHSERYHFHQLLSESKRRLLELRGELNAGEGAWTHFVTAGSKMSVSSTFNTREMVGVLHNVVAKARAHRMIFRMDCIAVGHTQRDKVRPNVHIKPNARPCKFTVVHIPKSCQTEVRPGLPKNIQHIWHCNAMNEGIIVGRSKQDEKF

SEQ ID NO: 975872 - protein, 313 aa, Homo sapiens
GHGGSVREVGAAQSSCLGVVSQCHLPGSSCTAMKQKNSGQKPGMRTWVMSEQKADPPGYREDPPGNQKVKIRRKQLNGDCGQHILTRAMAEAENLRREEPEIGGGGKIIRHSEPSARHLFGGGMTFWMKGTASDVPPMNESYETNETLIVKSLYEKRLVMTECPDPEECSQQHWHCLMLNPCGAKFDPYEHEALFHHTGRGEGGQGTVALVSQSCGTSCIGLHSGYPAGCEGGERKAKLMIDGGGLFVSLHGCNSRQLFNAPNNQQFDVYQTNVYLVTMGCRQAVPDDDGPYGRSFRPPFASILEDKPVSEKE

SEQ ID NO: 975873 - protein, 323 aa, Homo sapiens
MTHLRRHPLARTGGYTLDDYVCTRSPLSHPLGSHEFVPSLPVSLNTRTTSHFRTPSDSPRNTQLSPPGTSKTFLYAPLFSNVTPRPAAPRHPAPHASPLPPRLSPPPPRPTHTPSTIDSTNTNSHHTHNTPTPTPPPLPLYPSPAPRFYVCLTPTPPPPPIYSPYSPLPPLLYHSQKYLLLYLLASTPLPPPTTSIESSSCFPSSHNSSPADTNNYYPRYPAHHPNLTNPPSPGPTLGRITSTPILHHTPSPPTHITYSPPLTSVAPPHPLPPPSSTLLMFTLPPSRIPLLFMPYQTHILNTIHQFLTSRRLTPSPFLLLHFL

SEQ ID NO: 975874 - protein, 216 aa, Homo sapiens
MGAWGSSCGDCWAVRLYVQLLDPSGHRIKNRNAERVSISRRSSIDGHNADASGILWALEVVMTESAYNMNGSSDRHVTSAVMRNPGGSSAVIFLQGKGPLMTPLSGSPLPGTQSVEFQACCYLHEFEAAPLTVASRRGLQGSPAWKKGSAYTPKGKTDHQLPGVSVNINPEAYGHPNDKNLTNGTRPQVPDTQGERLLNRSTDNPNTTAGTEKGKP

SEQ ID NO: 975875 - protein, 85 aa, Homo sapiens
DGMHVTISTSYDHGCQIRWFRLKDSQGVHQLRGTRVAELFKRLTSSVSERNKGQIDSLIERTGMYYGGTLAKKNSGRWNRVLLYA

SEQ ID NO: 975876 - protein, 172 aa, Homo sapiens
MSKSESPKEPEQREEDSSLVGLSFEQQLTGAACRSPLLSQLGQRLIEDSCALHEAAVQKHLNDASRGLRAEYVTYAICATDEWTCSLNELQRPSLQAGNANEFVEPKTELSPRRTILKDPGWPSFNLCTIEPYFVCVAINRTPHCKQTFTLTEHSSPTTAHWHKPWTLPLTN

SEQ ID NO: 975877 - protein, 229 aa, Homo sapiens
GGNFWVPGASYARPRPLTPPWGSGPGLDLTLLEPRYTPTQQRNKNKGYKNGQEHTRQDEKQVKIPQRRQRSQKAPRQARTHRTHKQHTRHERDRETQIETQAADRKDTEHSRYNTQSLRDGCKNHPRTRRTHNPSHADLTMKRQRDKREYEQAAAKQEEQTMRKTSRGTTPQQQDETDGNRSGAEKRTAAKEPTAEARQKISQRTERNKRNNAQGTENTTRKKERRSKK

SEQ ID NO: 975878 - protein, 91 aa, Homo sapiens
RLPASEAQQQNASDGKVKSFPKDDPDSSRSTSQTSWDTRLCMTHIVTGSRKGERSKSEQVRQRVCEDIVNHLSRRQLTSLDELGECMCCAP

SEQ ID NO: 975879 - protein, 220 aa, Homo sapiens
  misc_feature (139)..(139): Xaa can be any naturally occurring amino acid
MALVALVCWCARLGGWRLSWCLGCCGADGALDVRAWAAPCEPGCAQLAMNADGWSVPCVSSTVVAVSCALSTAADSAVFDGGGVHAFVREERMCAVSIPFCRLTHASKCDRCGPLLSGCAGHVLARVIEIRYCALVDPXSSRGDDLVSQEEIIHSVEVSLCRAYSRIYITLHLSPRKGPLAESSYWNSSLGDAIGELQDQRGFSFTDICEFFTIGTRETK

SEQ ID NO: 975880 - protein, 382 aa, Homo sapiens
GTSPFGSVGERRRRCASRGRVRQATRGAETTCERLSPAFLPGFLISQPPRVPGGVGGSVTGRWLSCSVLLSVRGTARPRGPEQTRGQGRNAAGMEKQAGWPEDVRPDDPRLGVRTCEPDMSSGEELDVGSQRLLPSLVAPKPGGIEDHRTMRFRRPHDTPFSHIIRIQTIRTIRSMQPKNQQITHAKQYGVYLQSDFMARAFNDPFIHKEARKHLTAYDIGTTSKHWWQLRNNSVKTTGDEQHMIIADEPGTIRGHTAHDEDRKRRDERERTERPETRPSRDHDYRHEERARDVTNDAPPPTAPVSSDKHYISEDRHYHSTTLENNPTHPLNPHHTTRPTHNARKGATTHKHYPLNSYQHTATSHNLPTATTYLSPTYTQII

SEQ ID NO: 975881 - protein, 303 aa, Homo sapiens
TYTITRAYANAGGLADGNFRTVRFAWGQLQRSGNCFFQNLALRFNYDEITFIASAISVESFSEVYTENRFSVRILTGNISLIFSKEPEMTKQPEDWLDDVPGDDIEDEDDEIIWVSKSEIKRDAEELKRLGAEIVDLGKTALDKIPSHADLRAAYELAQRITRWKVADRQLQLIGTMLRQTTTVQPYSTRALDMLKNRHNQTDGSCTITLENYARIVTESIKRDETIDRGSYTLLTGPTAESLTTLHYPEYATPQHRTSTGNTTDAQPARPKYTSTMHKLAQHRQANYPTTHTISLYHEHGGQ

SEQ ID NO: 975882 - protein, 67 aa, Homo sapiens
MTTGHRATCTGRKPRRARAQREENTARRQQDSKADTKQTYTTKTTGDSNNRHAAQRETTRQQPQNKS

SEQ ID NO: 975883 - protein, 356 aa, Homo sapiens
GKWSAPPPDSLESALQCTSISWERSHELARHVKETCGCVPRDRSEAECPGPQAREHMGTGSTVRASVPGEVAADPVPFPREEGGCEGGSTPAPLAQGEPVAGKTSHTRLPDHMGGSTCLAGGGYGRQGPPEQASPMILDGWPAECEPDDLDLDHGDSVRGLDTVFRLIPHTDAVHIQLDDIELHTFSRKATDSSPERDFPLKLRSPQQLDVTAIHTARSHRCTMKDPSTGRTPPRGHPGPTLLRRSACQVTTKSPICAVERSALSTVRQGRPTARENGATQAPAARTRARQRPQKARKWNRPPRRTRGGRARRDNATERPRVAEREEHLQHRPRSHSAAGRDPPSDVGPLSTHRSP

SEQ ID NO: 975884 - protein, 54 aa, Homo sapiens
MGEKSCSFHLWSRHACAVEWPMGCIRAQLQRRFGHNALASRLSPVSRGAESGAI

SEQ ID NO: 975885 - protein, 67 aa, Homo sapiens
VANHPVGDSAMPLRRPCLAGISAITTGIDAGPNERPLCCKHSRLTVALLCHFVQCTGSDTSIRPPYT

SEQ ID NO: 975886 - protein, 253 aa, Homo sapiens
  misc_feature (69)..(69): Xaa can be any naturally occurring amino acid
MVRYVTTNSGRMPACSIMYCQHRPSQSLFLHRTGNQQGIFISPDRGSLMILPAINHRGHATYPGRKYRXQASQFSQSTHAFVRIEVPDPDVRQCRRYRYDAYIAHQTRAVADITENVCPSASLSTLSQADSSTISSTLIPCHSRVSSSPATPLPQYPTMTAQGKPDTINPPGITSQLHVQTSHEWHIPTNIPSTQQHSPASAGDSPQGQQRTRRRPPKHGRHQQAPPRRPTTPQVTLPPLAQGHPSEPTRHTA

SEQ ID NO: 975887 - protein, 474 aa, Homo sapiens
AEDGTTQLDDDDYFLLSTFQLLTLRWHSRSLTDEHWRTTSNFTTGRYTQLASPKQSISTVRLNTAHARARASERWTRTVSQASVKERYVIQPSVAPSQQEDAPRCMIDASTASGPGLTEATVRSKSHAIQTACRQHSSQTRLLRPQRRATVRSGPEHAPCQRANLQDVSDNTRGRHNHSSTRTRPQLPTRLHILAERRPRLARSEHEANSQPHTQDPSHRAPHGRTSGERPRKYPIPTPTDPQTHGQQPTQADHHPPTPQPTTGTPRQRYTAATLSAHHEPTTNRPCMTQQSAPPEKRRGRTPSTPNATKDQLGTPDGTRTMATSPAEQLRTKHNTKTTVTHRHHRTIATNTNTRRERQIDPNNNSDKRSHPHHSTWEEDTLEQNTTRKTPSTDRKQTAQMPQHPARLTHYSKQCDPNGETHMYGPPPRLQPGIAAPPRRTKQVKRHKQRHNKQAHERQERAHMEQRRDTRGTT

SEQ ID NO: 975888 - protein, 488 aa, Homo sapiens
MDCTWWHAKACVLSLASLSGRLVSDHTTTAALRTDASSEDKSVSRRHLENHGLSHTSNPRMANKHSMAILLPTLFPWRHQGLDPRPKSSGHHTPVLAPLARELLGTVPDHNPLHLPKCNATKRPQHSLRTTSNTARATPHNQHAFPMGAQYGAIRWHTEPGDLNTHLHYPPHHTAHATKRGSNSGAPIHTQGALGPPHIPGNAITTDALDRRGTTLDAARSTVDRNPQTQGPLALPTRTFAHTRLAKEPHNQKKPDTQRTHPGQTNVRGTQNLPATRPRLPPPQPHRHPTPAPEPARPTPNRTHATPPNPPHAPPAPTPPTRAHRHPQPRTASTLPPGAPIAQQDTPQKQTKTAKDADDGTNQSSTRHPGHPTGPPSSHKTRNPHEKGAQPERTNRTSVQTAAVPRQQQNEREEQQRRGLQQAEDDTQQEVDTSKSMEANHTPLASNQLMPNAELSSKQGSCANQQAVQQPTARHTNRHAPTTGETTA

SEQ ID NO: 975889 - protein, 612 aa, Homo sapiens
KEQAPKYAFSEILRARITKAITHVLGAFLPSHRRHYLCPMGSLFGQPHSFIIHHFSFYMLQKQQYFPVNCTHQAHIIIPLSYYCTAHSHHQGSLVMSRASHICQVVIQQHKQNIQSRHVTAQYIPHYTYDIPDQFTTKFTCQSTRKIPRRRFTIVVHGDQQTWNADWARRLDNSQGTKHRRRQRTHPHTEHIITVKFKTRTHVDDYADLWTPCTQADYKDPDNDNPYNFPSTDRYEKKSGHSRTAFHDHTTTSQHKEDRDLTPVTTQYVNITTLTHYASDDDMNQPTITGGNTHSRTGALWITAQHIHKAHKRKTESYYTPKLPPQIHSAFTHNTHTHWGGASGPQTRRLASPHTGTHRAANEGANLHDATTTMSPKSGTHSDTTLVTQHTTRVHEQPQPHVKREKVRPNVPHNERRMESTTRDTVHARTTTSQGSRHSQWEAHNTMGNTHSGRTNHRVRPQAENTRAQRRITANHLAARNTREIRSNCRRHRRHILTRQCNQAGTQHTNCQRRGHRAVSHTQAGSGHRSNSEESKSTQTQTPTAQDRCNRVTEKPANKEETRHLTNRHRRQTHTCQHNAQAPRVDTAPEPRDDEHQQHPQCHQAHEHKPGD

SEQ ID NO: 975890 - protein, 643 aa, Homo sapiens
PNTKSANCIIGSICAWKLSYDARDYLDTRQEELEHRVESYTYPWYVTEEASRSKKVGNRASKDSAHERTKNNVQAHVIECKMYTLSFQCRLDIRGKTMPILYLVKGRRLVETLTRTMAKSHIQDIQTLNTRVASAGLNTKGVIFDVIVLMRRHKDHKLKGEPSIAKAKEPHHGYKGRRPYMTTARTLAYSGPQREPGMHKDMSLALGVEETGEGHRSNSIARDQAYGKRRPHWISAYCRAFAQTYTVFNSHTLVTRPKPFGCVSRKGRRQHEHKRDLSQDHGRMVAGQFVVTPNRNSGVGGIIRVDFRALALGHIVRSISPCWSTYSPPNGLRSPAYNTTKFDDRGGYPAISLNSLPQLLTFSSSALLQHTLAKRGLIGRRTHELTFNVDAPNRQCGSQRTTSALWNQPAKCLWIPSPRFSEPPTRDCKTPPGALRQLKTKGRLILWRTYTKPTALCATTPISRRTPKSSAMDRRHLRNLEGNPCAGTPPLPRMCAHTCIRIGGSSPYSDYMRSGFCIIIVGRQTSFRITMRHKLGLNEKSVPTFTTWGLNQCFTWSEHFTRDPLHEITLQTLILAHEPSVNTLRSRHPHILSATHVRTAMVATTHINSPQHNATSRFPQRHRARYNTHECTSRPIMTSTTHV

SEQ ID NO: 975891 - protein, 315 aa, Homo sapiens
MAVAATYGLGRGRLGPRGWQCGPAEVWRCEEKKVLMHRGDGAVRAGAGGGRAIDPELCKILVDLLKLIRGPASRVFQMLEVHVCPGNRLSELSPRTHAAVSLPTVEQCPRPREKQREQLPRGSIGLGESSSRGGSIPDGWMTHSQVDSIAGLAQGQAGLSKSTYTGQHTRMGQRLVASYVPSKGYMFTVLQLDNKPFREMQSGPGSSPPKSSFDPLYKPRSESILTEARRNLALAHGAGSATVTRTHRRPCEHEGSNDGSPQPRAAIHAEPAETHSKSPTRRRPPRKKQRTQSAETLHRSSSLACTRQHNVRPPD

SEQ ID NO: 975892 - protein, 76 aa, Homo sapiens
RTRTPRRAQSLRLFADPSPGRTAPARRKTSPMDDDIAALVVLTNGSRSCCRGTGIRRGRLSARPQVPVVPHPICGA

SEQ ID NO: 975893 - protein, 155 aa, Homo sapiens
MAYDRGATRKHPEPHHCANDGMRRTRSNEGETATREKDEARNQHRRRGLVTATRTPGGPQTRQHRGNKQQKRQSRTNHTHHRHNTDEDKQDTLHTEDSTESEHTNSGHKTRTRNESTRTRRGHTSNEGTTRNWPPTTTRTTRRREKRQQSSNKPA

SEQ ID NO: 975894 - protein, 240 aa, Homo sapiens
AAVPGAAAGLGLHMWRTWRRYEGSGVGTPVTEQKFWGLSLMAELRPGLGARWYGAPRAAVDICSLAGQAVLRSALMGYYCLSLQAGPLWIDTLGSWDGPFRVLCLEPSVQTWLCSRVHGNMHERVHVGNWGIPWRPASVSLLELYVCQTILDLVWLSHRAQNTNRGTKNMVWVVCDVFGEGSFLDGDVKPGPVLTRAGLEASLASFCAESKESWPCWEPYRAPPYSTAHIAPCMASQAPR

SEQ ID NO: 975895 - protein, 102 aa, Homo sapiens
MLETAGGAPEASSTGHRMERNPRMGVSQCPRHPDQDLRGPEHERESAGQHPKRCKTPTRKERTRKPRQHAKHAGHTDQELAGGLPTPETNPETDGESSRPTQ

SEQ ID NO: 975896 - protein, 535 aa, Homo sapiens
GQISCGRRGYASEEAMSGGYQRHHNLAIMTVGERQHMYAGRHIRTDYVTDVLTSLQVRGREYFIWPPYQGRIRTKASCRLSRSRLLNLAEMKVTVADQSPETTSPKIEKTGKGADDESRRSVRSGVACIARADVNPRIVHSDQDKKGDPCTSPNRIDMGYFASEGFPFVLAWRSSTGGRASTRVVRSPRGLGLGPMMGTIRRGLGGWYTPIGPREEGSLGRLEPFHFEAPRSRFRGGWGLGGSIHAESKGVDGNTPDSDVNMHGLTRVIGKGPALSYRVRIGTTRPQVNACPGECFREYPPMKKLKPLGVRLERGVTVPPPGPYLWSAERRRTMACIPKGHLALRGPVACPLGYLEGTLPLNGGFPPQNRGEILRRLGPWNGELTQNWGGNVPPSPGKIGGNVPFPLLGGIGRGAPSGVGGPVWGPQQRVYSGTVSLPRKKGAGVGHSNYRHRGHPVYPTRSRVRKHKQAGWNAGRLSGDMWRGVTPSKGSPPPPGKRAPMRAEETRVPYQTHEGQQAGRTRNTTADTGRTPLQR

SEQ ID NO: 975897 - protein, 211 aa, Homo sapiens
MDFPYNFPDPLRGLQAMDFVSGPRDTSSDALRRDRQPHDSQMGPVVPGGPGSLSRMELDESSLQELVQQFEALPGDLVGPSPGGAPCTLHIATGHGLASQEIADAHGLLSARSWPGMTWWALWPWRAHVPGFPTVAREEPLQSLPRDCGRPLRTQTEDTDSPDWAGRRPPPEARRASRTRQQTHGPPGLETAPLASPRQATRAAPTHQPGN

SEQ ID NO: 975898 - protein, 265 aa, Homo sapiens
LRGCGCNCSSCRRTGAACLPFYSAAGSIPSGVSGRRRLLLLLGAAAAAASQSAWPPDRACASREAGGGLPLWPPLPAAAGALRPTLPSVPLCCRSRWRGRAGRSGGARYGTEMSKNSLIWKIFTSTPPEYELAPSNVKKRKCDDVFLIRVSKELTLVMHYGRCAELFFPDCRIRNGENGIHFLLNRDGKTERGDAFTCNTGVTRRDCADKPLSRTTACYLGPAACGNYMTIRHARIACPTETLAGHSPLGTLRPPARQRPPSHRK

SEQ ID NO: 975899 - protein, 211 aa, Homo sapiens
MTDPRTASGAPAVTAGQEEPDHGPPNTGPPPARGTDKTHRLNRRSRWLQPMRGSRARNGTTRRPREPAPRPPPNAVHTPAQCPTRKPRNTQSGTAPAALREANKPVQGAELPRAGRRAAPQPPATRAHSTPLEPRARPDAPNHRDHTTPAHQFAQTPPSPPNRHTRRPTRDAPNPPRSRQRHPRSWSTTPTTAHNPSARATSHQSSTSTPT

SEQ ID NO: 975900 - protein, 465 aa, Homo sapiens
MGSGGGGGREVAVALSSLPDLLELDHFSRHRSHFPSPLSYSIHSFTYPYPIFNTYTTDTGDAAGEMAYTANRAGAPQHRRQQAIQRNSINRLCAQENNQRELGQARGLQAQGPWQMEQYHQLSSTAVTLGRDVTGCTHEAQSGPAAATFESHWGTSDGTCRMEGGSTIPTGTTRRNPRIDILRKSDRPIRSQMTRRARKHRHEQREPPIRPPMPDANRPQRTGGPSHAKPDNEEDTRSTRITGKRDPSRTPTATKEIKKKPPLEPERDKTTITHDRELTRAHPVKHQQRRPAAHVATDAEPANDKHITGTEQAAGRHARDFRQRTKPRNPQNGVNKQTTSGQTPHGHSAQSRETPDNTTPKARKITRQTRGRSQPTRRAAPTEQKHTREQHNRSHGESGAGPEAHGGRDERPRTKNAAKRSHRGASATRAQAAKEENTDRGYTGHGPGATDRRTQRKPPHGHRPP

SEQ ID NO: 975901 - protein, 138 aa, Homo sapiens
ADGVPGSSRRASVYRTTVAGAASHLLSCDESRRCLVGDHVSMWLDAELGDMDGGATDSMKQGRDRCAMLTGCGVGCSGDVRRGAARAKARRSGKVRCRCDVDPAFITIETIHESPYARDVKKTHGEAWFQNKSKASLY

SEQ ID NO: 975902 - protein, 310 aa, Homo sapiens
GCEGFSVYAAKSKAPRNPHGQVVLVGEGPLNEFAYLALMACAPGLCEPGWLPAQSSTSDSMLLLWAHERATLGGPCCVCAGALTAAYVVDVVAKMTWSPCGPFNEGQLWWLMAMWHTSPGSTLWPFDPYTTMVQRRAGDHAARVLHGRAGAARNEDGHEEPTHAAGATSASGTHDANRIIKQLRTTIDFAYHTTTSHPPSRRSSDPEPTEHTNGTPSTGQGDIPPRTQRSQLTPQHTRPTNDKTKHANPFHRRKKQRETHKTKRGRPRQNTRKRTHEEHGDNKKSKTKTRHNKQHKKKHRKPNGTQTTET

SEQ ID NO: 975903 - protein, 155 aa, Homo sapiens
MAHIVFRTKLRLSGPLCFGEEHQIRIDHETRTHTFVESKTDNSSLGIRSANFDQHALETKTPNNTTYTYVVYRRVSRHRKDIPCRLGPPLLVVIHNLRATVAKKFVSVSVNSHTILRSRNCVDTSGRSQTYRCTRQAELPRLLLIKFSLPFAPRY

SEQ ID NO: 975904 - protein, 328 aa, Homo sapiens
VKEKVGLKKLVCGRQLAHLVYRGLMSGPVPSSLPVNWAGRLRLSEREPAACCIVPELAQSRLLSKLCVLECSTPDVCASAPSARTPAASGPIAHHFLVICSTKAQGHLVQHKHTLVTIYVCIDDQPNGTRMAPALDRLDSLHIILTTATHLDTVCTNRHTLQHAMRRAYGDSSKEREYHTITHDKTNAPETHHSPTTWHTPSQTQTTTHHPPRRTNHARQHAPTPHQGQAHTTRPRQTTTQRNKEHTQNRRNMTKEKHDKTHNRAHTNKHIRKHKTPPQEPRGTHENPKKKHKHTEQNETKYKQKHNNTIKQAKNKTQTKPQGDKTYT

SEQ ID NO: 975905 - protein, 78 aa, Homo sapiens
DGEEEEFDEEDDEDEDVEGDEDDDEVSEEEEELDLMKKMKMRMRMKRRKQGGQQVQQAGKQQQTSMHARQQDALRPRE

SEQ ID NO: 975906 - protein, 228 aa, Homo sapiens
AQPPPSGLQPHAEPGGYSGPEDIMPVDNITRQNQFYDTQVIKTGKRVRLREETTGNGAGRTGRIVQIMKSRDEARSTSPCIPPDLKDFSKGVNVQIRQQIPESERGLSERKPGTGVLFEDYREAEEGAASSVSSSLTEEVCTAVQLLNWMTLGSALQTILTQSWDSFTALRRGGLLTDSGVKIGVSPAFTKLDRALCYNLVRHRSPVVRANGASDRGRCIAFPKTRPI

SEQ ID NO: 975907 - protein, 315 aa, Homo sapiens
MPVLEDYYVFSPIPAACRMPGLCAAEDDSRPSRLAHHPVSLPACSPLPRLAVPDANAAGSSAGGITLPPSPRAHFPSCTKQAPATMQLLPSTLLASSSAHSAPTTCTAIINSDPSTRTHHAHDYLTKDLRTPTSHNLAPTTSRHTPLICLLGALPLTHTHLAHGRTPTHTTPTRTHSPSTASPTHTTPIPTPPSTSHTTPHTPPHHPPSPPPTLPPPPTPPPPFLSPPTTPAPSPHHHIPPPTHLPTLPAPHTHLTPPSPPLHTHHSPTTTLPTPSTTTHSQPTHTFLHHPPLPTHPTYPTNPPSPTPHLTQPQP

SEQ ID NO: 975908 - protein, 87 aa, Homo sapiens
MTKTSHSRASLSLLSDFTRGVDHVHYQSQRSNPNTLCKNKPKHDQPTNTILFRAYQTTSGVCTLAGHSYNIDSGSTSSHGYYRPQHN

SEQ ID NO: 975909 - protein, 313 aa, Homo sapiens
LTVVNNWYDSLMARRHLSDLPLEPALLHDLLHCDHGGACTHHCRLYPRRPSSSDMNSQPPQNQDSEVDGGITLDDRTSPKKTLVADPGALPGRPGGPPRMSPGCCRPSPQMARYQQHSMAYTGTGAPRPTSELSLKMSQRARSRRRHSTAPATPPHHPHSNTTPHPHPPQHTNHPHPPHTTPTADNLKQPHQTRAPTFPILPLTHPTETARHTHRVNTTPANTIQSTQQDTTPITLTTHDTHPTHSTIPHPTQHHHTTQDTSTHNLTRTEEGVHRRETGGDGRPHEAEQTTRDAAPPPDRNARTRLAAGEGGG

SEQ ID NO: 975910 - protein, 75 aa, Homo sapiens
MHLQQMWRSAAETDVLRGYNNLCSYRTINLVTSHQYPRFMGNIIREQLRENRTGEPLKNSWHAPYGEAPPVGTQS

SEQ ID NO: 975911 - protein, 218 aa, Homo sapiens
MRCIRDSLHAPPSETPIEYAKDHARIIIPQNQVKRKSDIYVCMISFAHNVSSKGKYIAIVRYNCGNQGDLRRKSDSFGALGTQLNQKFVASVDSWYQTDLGTESQDLYSPHIMMPPSFWRTNCVMTLHTTFYRAMTGIQRFDFGEQMEAQARTEIYGEDYNASYKVLGTSTGHTAIRHTPSRVIIPVQASRKHPNYTTTNSTTRHPPQLSYTPSSKIS

SEQ ID NO: 975912 - protein, 337 aa, Homo sapiens
GVSSLLVRCRPAGPSVAAMVRGVCRALVSAQWVAEALGPRRWEASAGLWTPPGYHGRKLGGATREGRSSEGRGQHPRGGRLFFRNCAPSGKATRNFALRNQFVCPGGHRRTFGGGVTHKAALVCWGTAATQGGEYKRRAERTRGPHTPGPARCLWREWVRSYCGPTTPGVQLAYDAGPPGHVGWGARNHFAGYSSGKRRNGGSQQEIHGSISTGPGYLEKRLTKDITAKTWKPRAPTSGGEPPEQWGNVTGGTNPEPPEKSMNAGQFQDGESLKRFLNTGVWEKHRETALARNKGRNQWRVWLAETTGRRPWEQTTITDGRKRHREIRGQPDSATQL

SEQ ID NO: 975913 - protein, 130 aa, Homo sapiens
MVDAATLGDEAISNPGRTLHLSCGFHTAWLSQCTSVVRASSHRAQLIHRVVRERVRLCRPDGPMVSDPTLMGGRSFGWVTRLCYKVVGGPSRAGIAAVVVLIEPQRLQVNSTWEPNATVGYYTTWGITIR

SEQ ID NO: 975914 - protein, 48 aa, Homo sapiens
LSVRRVYNARGYVSNEGQARADERPQRGADITKNVITKEKKTKPKGEK

SEQ ID NO: 975915 - protein, 153 aa, Homo sapiens
ACLGKMAAYDLTTRIAHYGIGIYVFPLLNTLCKGRYIMKRLIEGKLALLSDTNVVDVCYGLYKKLYSDDIPHCFCRRRPQTPLLVAQGESRFGQETEANGDRLLDDPDSTRPYASTKGLGRLRLLSYPGRSKHWYLAAGIYLGYTLRICKIPM

SEQ ID NO: 975916 - protein, 144 aa, Homo sapiens
VSRRKMASATRLIQRLRDTGVRTDREEAEYHRRSQRISSSKLPVSPSHKLSNNYYVHSRWPPGICAPFHHHVVAEGAGVRQASRELCCSCHEKKAVTPAPPIKEVGACPSDQAYRVNTCTLKATRLILASLGFPPQGDMWPSVY

SEQ ID NO: 975917 - protein, 339 aa, Homo sapiens
GLCEGMAGNLCNVSPEGDQSRVTYKVDKTEQKGNRRPFTVLPVEDFFGFAIIRLRKNCTYSGLNNRHVHVQGYRALSYLSGPELCQWNPLKGFPKCVTEGIVPYSRQRIFPGEPFDSRVPLVLTEAGNNVIRGETLGTQGSLRATNARIVLFVATYHSVCFTPKYAVALSTGTFECPQVWDRIGRGVFPTSFDEHGNKTRLWREPLRPCGNSPCGGCSNRANGQRQTNSSVLENLPKWERRPGEMTSPRVKTHGNTSADGGINGHGRKHPQPGLRPSVWPTTVGNGSHRDSEGEGKPPGPRFPYDRFSHQAKTTGVCMHVTHACRVQQTTDGSLFYQHA

SEQ ID NO: 975918 - protein, 256 aa, Homo sapiens
  misc_feature (256)..(256): Xaa can be any naturally occurring amino acid
MSQTQPLDTSLRNHHPRTYRRHTGTLVAKRQKLKEDAPVKLGNAMREKCRSRRLTNEVDEATSTRRWGGKEEEDKEGDGEERGWQMKMRKLSQLRGKRQEDDEDDDVQITKKAEDEEGRLDRQKGPFNKKKKAGGDLLTSNSGSEIKVVTFEYKETARHRGGCTGRRKAFPQTKQTMGIWHRATHTKSRPLFLKHLKGHAALYLKYRQFEGHKLRTTVGGPSHLGANQETYQSKLRPVVIRAQFFGLSTYHSSSVX

SEQ ID NO: 975919 - protein, 217 aa, Homo sapiens
MVSTQSGHYGGYVADEEYAMSIRSEVEQMTLGNNEAHIDKTVRQRTHRQDSPHKEKPKRQAKNAHKNSESRTTQRHKQRRKQTESKRSSIKAYGYNTEHNRQSQREQGDSRLEKHKRKERQKRHNERHGESKQSLKHRDETQQKRRDRAKETEKRTVAREAQAEWTPQREYLRRGRADKHRAEREKEEHTERRDTSKTEKRTRRRQRDKAEKQEKRS

SEQ ID NO: 975920 - protein, 70 aa, Homo sapiens
ALRHARRGRTGEQQAESPAKEVDSLEKPRREGPAQFAPYLCPWFKYADLLLKVWYDEGSMCNTGILGGRQ

SEQ ID NO: 975921 - protein, 78 aa, Homo sapiens
LLKLGVVGGVHAGFNMRIEKCILSGPIYPEHGMMFVRNEWQGVQICANLNVIKIKKKRNPRKVGGPKAFRKAVVKSLQ

SEQ ID NO: 975922 - protein, 211 aa, Homo sapiens
VFSLRCATEDPGVAMGRRPPFVPYVRTSRTQSLASAEVSTDAKIRIFDLGRKNGKSDEFRFVPMVSDEYEQLSSEALRLPEFVPISTVKSCGKDGSISVCGPPPSRYPINKIVVLVLGLKRLQNRLARVPCGKAPWAHCAQWFTFAQSKSCPSGTKLQDKGSIVDEGPLRRAKVQFPDARRSNLKKWGSPRFMLMIWRLVLKGLIQDVGRQ

SEQ ID NO: 975923 - protein, 121 aa, Homo sapiens
MILQIMYRIMSRLRNGVNDPVGWSSKVGPRKKQGCMGFSKEIRQYYGPFFLTKREIWRFSRPFQKTFGKFRGDRVGITTLGKGGALVTHVGPNQWFPENVCEIRVYGKRPPCKMVYPIGQF

SEQ ID NO: 975924 - protein, 102 aa, Homo sapiens
MGSFYSQFPMMSIKIWLWKTGSIDHMNLEGKPILFFWQNSPSVCNLVGIKILGRECNLNLMREEGINMVENEVEEEQSYHDMGNINLTFFYKQEKSMIEWKL

SEQ ID NO: 975925 - protein, 136 aa, Homo sapiens
GGGGCEARMRVAQGCEEVVSNIADYRGCQSLDPGLCAHRRRTKGAGSSPFVVSSFLSLTLLDFPASSEVQFCAGKQPKGFEKPSTMTKLVNSGLLRGRVDNGPLTQGLRNLDEEVWGKESLFVSLVAPWGKGDWVK

SEQ ID NO: 975926 - protein, 69 aa, Homo sapiens
EWWSGVDEEVLVCVKVDDSVRRYGPVWVSAAKDPVRSTAGHHECCRVSIGRLIQRQEREVKDSSGDMEG

SEQ ID NO: 975927 - protein, 277 aa, Homo sapiens
VAPGLNRADEVGDPSSEYRRDSNRMIIPSLEELDSLKYSDLQNVAKSLGLGANLRADKCVKAFEGLHYNMRQKGNETQDESQILIPGDEMRYRSATRKKLRRQPLAIVTKTGRRCKNCPCGPLIHKNHGTQDKPGSQSYCKSSLLHQRAPGKLRMLFPQVPEIHRYLQRERNLSTQMSHPNLEKIKERAITYSKIEGKLHRSSFYGKLASIAQSFCGAHTPAPFRPNTLPGMNWSPPINKGGVLDFQDFQEGHSGVNPIATGRKRVWPSKTLAEGPK

SEQ ID NO: 975928 - protein, 158 aa, Homo sapiens
MTHVVHEQRRWRWGALDLALRLGIERDNPEHGLSQTSDLVQHLGIWVLRQGHFWLYSEGSRVSIHSAWVSSLTQHEVAKMTFTTVAVEPYSMWTHWTAAPGQARWLDGQTLPAFRHIIRDTVRFLPTPLHAPYGTSGHSLKKGSPSTSGRRFGTVPGP

SEQ ID NO: 975929 - protein, 69 aa, Homo sapiens
LAPEQQSKEEESEPRGLYQRAGGSPETGSAPFILILVLQLLFRIGTQGGSRRWRRYPQHRVPSSQRMVI

SEQ ID NO: 975930 - protein, 267 aa, Homo sapiens
RQRPSLPGLAQPLGGSSGRAEQLPARPPCSPGPRQAQARSSLGGHWKVGADAGRRKVARTCPGKPVPPAGAGKGGPRGGPPWGHGGAPDNNLERGLRVGGQRNGVRDLGGGRGERRRKGGTWGGSPAPGGRRRPPAGQPPGHPEGGGGNTLVKLPRAFIRTQGAARHLGGKQKKFLGGDIRLRGERGGVTFCGTRCERGTTGDSSIPGGPPKGSGGTPPTGSHPPVGRPLGGGRARTTATPNVSPLVHVGRTTKRGPQRGQGKGRTT

SEQ ID NO: 975931 - protein, 106 aa, Homo sapiens
DSGHQDSKMASVGECPAQYQLKDKKLLEVKLGELPRWILMRDFSSSGISGAFKEVTTVLQQVHQCEEGEQSRDYHVLACYVLLSYSFSYKHLKHERSENTTEEDTL

SEQ ID NO: 975932 - protein, 122 aa, Homo sapiens
ISDCCASNQRDSLGVGPSKPDAGYNLLVRRFLSPSEKRSIRVGVTRFSRCRPSPLSCDSERELPDPLRFPSEANASPCFWSCTVRTPMTCAHCLALPSEMNPVTQMEMQKSPVFCVAQRWEL

SEQ ID NO: 975933 - protein, 71 aa, Homo sapiens
LPPRSSEPLDLFRDLLRRALGRPDPRKVCGIRREVVGPRSIPRGRMRSDDVPLLTQQIQDEDDQYSLCGQP

SEQ ID NO: 975934 - protein, 125 aa, Homo sapiens
NPADRRWRMMQRAGFSPVWLTSLVTVLGGCFLSVLPCGESDSRFFSLVAPGALGPVEDWTEEHTVGLSWLWGPWDVAGALQLLCGLSWGPSALKTPAKFPKVSSLADDAVDSLLGSRTFLREYYK

SEQ ID NO: 975935 - protein, 244 aa, Homo sapiens
  misc_feature (176)..(176): Xaa can be any naturally occurring amino acid
  misc_feature (212)..(212): Xaa can be any naturally occurring amino acid
  misc_feature (231)..(231): Xaa can be any naturally occurring amino acid
GEQEEGQKEEEEGEEKEIEEESHELSGYTANVHEAGRAFQDHYVPGWHVSGSWVTQQNDRLLHKRRELCTAFASGFHDYSQTCIRVGDKYAPSRLTFPQEEENNYSAEHEGQLVRASIHPSLPHREGPSDRGRSYAHLWANEVLRTTTLRWQESPQFGVESHAKNPKWCTTVTLFXKAIFLNIQSKSTLLWNTHTNQWVKHVQENFLEVIPXRAGDTIPTPPLENKVQAVXSWNFERKNRQQLT

SEQ ID NO: 975936 - protein, 312 aa, Homo sapiens
GWGGRRPPEHLQFCRLLRAGPLSSRRCRALHGSPGGAAEGGLQRVAGGGRRGAEGQGVTFRVAEVHSCRRGVQRLGDGGHFPMCLVFAPIFTHKFSFVGENQNRGGLMDPLTWMWPVVSSTIYRGGPGKGGTRASATVAGPPVEHSLQLVVPTRVTFKPTGRGGPVGSGTSPLREEPRGNHAIRGQGGGASSHWLEEFWALPQGSLSRLSTTKVPCSHNLGFPSKKWVERATGGKGPLVAGTAWAVVGDSYTGALGLRSGPEIGGGGPTWPEGYGSRGAGEERRNGGGDYTGTESLGGQAAKSKGGPDDSAR

SEQ ID NO: 975937 - protein, 149 aa, Homo sapiens
MGKVKVGVNGFVVMGRLVTRSAFNSGKVDIVAINDPFMGPQYTWFNHVPIYDFHPVANSSGTVQWLKRTGKLCSSSGNPITIFQERDPSKIKWGRCLGRYEVTVPVWKVHLWAVLYTQPIGRNGMGASFVPGGEAQKGASSFFVGPPLC

SEQ ID NO: 975938 - protein, 38 aa, Homo sapiens
MVARNGRRGITRTNNQSQYSDGRIAGLSSRHICFPRLV

SEQ ID NO: 975939 - protein, 135 aa, Homo sapiens
MGSRSYLWVPYGDNPPPAPRYIKKILDEREFIEADNDRFQQGYQVQLHGKKRCEGTFIGPGYVAKLAEGVPCWWGLQRFCLALAAEPTACCVHAPCLHKEGEVDVEDEGREPDRVRSDMKQGILPLFGLNSLCSL

SEQ ID NO: 975940 - protein, 203 aa, Homo sapiens
PTAALKSHLCIVPHPPPCSPSRLRGALLRRGLRSFIARVLNLAFLFNSRASDHRVPTPMSDGSGRNTVRNIHHQGLYGRRRKWLKRGRQWKEKALVKGKWLIGEKLGEQGGDHVEGEGRKKRRNRRVGEKEGGGEETTGVMGSRDTQTCGTIGGIERNAEVKTQGGKAGKLNELIEGLPIVGYPRKQKNRGGIGLRTGKKANV

SEQ ID NO: 975941 - protein, 149 aa, Homo sapiens
  misc_feature (99)..(99): Xaa can be any naturally occurring amino acid
  misc_feature (115)..(115): Xaa can be any naturally occurring amino acid
MERNIAPLAACDDFFRVRSLCRLTSGTIPNEQRVVEQPVYYQTNYLCVAAMDDFHVGFLSPFNMILEEIVVVLVSTGFVWAAHNKDVLRRMKKRYPRRXVNGGHVGELFPYLHVXGSHGLGGWHNFSFAVDVYPCIVETSGTFKKQSGE

SEQ ID NO: 975942 - protein, 106 aa, Homo sapiens
MARCNTMKALTKAIKHQLSKKAFDPGESYLLPQKLVLAQGCFGAFYQLQRRPLGPPIWMGTGPHTRDHRVRSPRSPIRKHHRYYIRSGVSPQLSSPESSRKLSEGK

SEQ ID NO: 975943 - protein, 76 aa, Homo sapiens
  misc_feature (36)..(36): Xaa can be any naturally occurring amino acid
CVEGHGALTMELSESVQKGFQMLADPRSFDSKRLHXFSIAAAAFQSLLDAQADEAVEIIQIETYRPSAFKTLSCSS

SEQ ID NO: 975944 - protein, 74 aa, Homo sapiens
GQRGRSCGAPGGGSRARDRRPPPAASAMDASLEKGVSGLHCPGLSAVRRSRIPCNLPPSRDSSDSPCLSLPSKL

SEQ ID NO: 975945 - protein, 203 aa, Homo sapiens
  misc_feature (28)..(28): Xaa can be any naturally occurring amino acid
EVRRSRGSVSVLQQLLGGNRSGDLSFPXLPDRPSGFSFSVLGNPSGEPIFSGHPPGIPWDLCTATGYKWWSKASHSHCDPEDPKDTKLETAFPPQKGPRSTGAFHRGTHCFKFFPQKRVETACVLHTGAHQGAARVFTKTARRSPLWGPSHKVCGGVTPLLCRGPFRIKNLTFSRGPIIFAERRLSVRSWKGRLNPIIFSGKN

SEQ ID NO: 975946 - protein, 104 aa, Homo sapiens
MSCTASGFPLWGAWKYNTTKWSLGWKSWVRAQCILGDQHVSSLWRKMQSQKMKEEAELGTVLRYIWKAVLALGGGKPGSTRPICKTWCCLKMFDDDDAEVDDEA

SEQ ID NO: 975947 - protein, 94 aa, Homo sapiens
GRAAHFRRGGHGVRFAALLLHGSQSVNLPPEKLITSISAVPIPQKEDVADFKAFCGFFNGKKNIDPFQRTRIFNVQGPKKISKKKRFKGCGYSG

SEQ ID NO: 975948 - protein, 170 aa, Homo sapiens
MREMHLHPRGQAAVQMAMPGGDCSSVLNTWIQPDGLMPSDKTMGEEMTPSTPSCSETGACASTRALDVFVDSVNPESWMNVRTGIYPQVFHPEQFITGRKMLLNNYAEVVHHVQGAHGRSVVYRIRKLVDQCTGLQDFTWFFHSFGGGTDLGSTSLTHGTSLSDYGRSPS

SEQ ID NO: 975949 - protein, 87 aa, Homo sapiens
KLKMACVVGGLLRASVPECECHSLGHSAIVALRLLMWKKELDKFMVYWYPVKQKIIQLTQFLMPCTVVTQNDPILWGTAVSMESPKT

SEQ ID NO: 975950 - protein, 127 aa, Homo sapiens
GRPGLRTGCGMGSEAPASGAAGREEQPGEAAGVGEQLGRAEPGRSTCRRGGGPPWRFEEKHKSPPSAEHEFVLQNHADIVSCVAMVFLLGLMCEITAKASIILYSSVQVSPSQNGRTSYLNQVSLYN

SEQ ID NO: 975951 - protein, 144 aa, Homo sapiens
HACAHEGPVIPTVRSLMPAKHGSDNVPDDGNKRTLGPVTHIGSEDHPMVWRDYQGGSQKSIPPWIAPYKRMKSPVEKTTMCTPFGSTAAEKCPIPSAHVVTHFTRAINWATQGLHEYPIKSCPQLTLQASRCPLRFQRKIRSCT

SEQ ID NO: 975952 - protein, 146 aa, Homo sapiens
AAVAAPFGWQEESGSGQLETVVVTEITLPKESYLGELSSPAEMAQCACVTEPDCFLISQDWLFSKKGVSIPKAFSMQDHQVPDESHVAVTSRYMLSNSVPDETMGTPCDPQDQRSQLPGNIGLDVSPQWDCSQEEKPVHKTLVPDV

SEQ ID NO: 975953 - protein, 148 aa, Homo sapiens
MSSTRPSGPNGRLTKSGSPRLWAMVSQGWKSGWPTPNGGGLLWKSSVAALWTSKWGSEPQVVKEHQGPGRSIGKDSFITHGGGAEPRGTWWGPGIVSVRCPRPEAPLCRLVCQDLEILQRFTGARPIVGHRGGPLKHIGTIPGGPTQS

SEQ ID NO: 975954 - protein, 294 aa, Homo sapiens
MNALASSSRIMDRKCSMALCGAIKSLIQWVHLGWYCKYLVRIQSALAQNELDTDVSWKRSWRNCRLVSKLMGWPPIISALMDVVHSDCQARWWNLSKSSSRFVASFPGHGKPTREGGFVDDKRSLSLSNEGGTSVLTAEEIASQIREITPDGFIKAGVVRSPFLGSNLEPEDREEYVDVFSTIKRANNANLLVFQEQRYTPELGFTNCASTPCLSAVTGWLRDRRGENGQPFSGDQIMEREETHVSVKLFQCRQGQCGETPVGNSTKWLRGLCGETTDSLSPRDVRKTWDPQNG

SEQ ID NO: 975955 - protein, 108 aa, Homo sapiens
GQPAPVSFHAVEALLFRSFYCLLFVVHTAFMSCNTHPEGFATLTPEASKTTSPREERTTPDALPLRAVTLTEKVCSFTPEPARPEPTRREETLNTSEHQKEQNPDVPP

SEQ ID NO: 975956 - protein, 107 aa, Homo sapiens
MRSCRRKTQVPCAAEVLKQLVETKREREKEGFQKRHIEENHEVSSQYCAEEESGPTKVAGSTDETEKASNWCHIERVAKTRGYSRYDTLSGQTQVNPKTLVGGGLES

SEQ ID NO: 975957 - protein, 255 aa, Homo sapiens
DRETASAPEHRASPLPIRRPSTPAASFTMDDDIAALVVDNGFRHVQGRFAGEMPPAAVFPSIGGAPQATRPDGGHGSEGIPMWATRPKKQERGILTLKVPPFEHGNRPPNVGRHWRKILAPHLSTMSCVVVPGGAPPVGDGGPPLNPRANRGEDAPRSLLGGPFKRPRAVYGGLIQGLVVIPCEGLSCRTNWAFVMGLPVDGVPPTLVPILEGVNGFPPWQFCRWALGWAGDLMVYLSEVLTERGTGSTTRRGRM

SEQ ID NO: 975958 - protein, 166 aa, Homo sapiens
MVTSPVCVRVMKNPWLMTSQKRTLSLSLHLTPEFPSSEALIKVNKQYSLIPIEVEYHPESSHIQKKKNKWVIDTELSHSKSQRVVIENPSVKDYFVRAVGGSGILVAKNERLWVPREGPFIKTNFYLARANFKKQFLLYPPFFVGYNGFQKKHSLGIYNFSRLSLL

SEQ ID NO: 975959 - protein, 293 aa, Homo sapiens
SREDLLNICIEPDTISKGDFISYGSRKVRNPKLHVEGRSGLQASQCTWLDPGGSRGSLSMDSEEYEARPVEVKGSPEKLQSLWILRKREQMLKKPHPSEQQKTSKSETTLLGHRVDPTQGTGASAIPTVSSEGSPRAIFHGKYPLVPPTPGSASQRCALSPAWALRDSISACQHLGETGCPLLNNRDSPSGGSNDGTQDFPRGLLPRLTPPVRAQRGDKLPRPLQFASMTVQGLQEGASCPGTFKGQGPQRGGIREPGTESKSVHPKAKMEGPLSQDKRNRYNTQRPQGWQPE

SEQ ID NO: 975960 - protein, 146 aa, Homo sapiens
DGNVTRKYGNASGTTLLEALDASYTIVPMKALAASPGCLQNGGLWVRVPCVPSGDWVSQTRVWLVTLCAPVNRYTGSKNLVRNATMKALSEALPGDNCGASTCVTEWCLVKAMYRPGATVWPGEPGKKMTPANWTASLGSTGLQGD

SEQ ID NO: 975961 - protein, 105 aa, Homo sapiens
GQPTRVPFHTVESFVLSLFAINLATAHSLGPHCFYELNTHCKNLQLRFLKPAIPEPTGEERTKSRRATLRAVTLTARVPGFILEVSETKNPPISGTPPSNLGRLG

SEQ ID NO: 975962 - protein, 195 aa, Homo sapiens
LSRVWCLVLRVTLSCRLNPGALGSAPWGRLATKSGIKDLPLGTACFPKPRTRIRNWWQKLTWISTRLSEGKVQRLKRRAISLLWRIGPPALCTHVPWAQKIVGSTKILVIDAKLGAWKAPLVPRGNRFLESGGGISSPFFLSLSLQSFSSPQGMCTKAGGGPFVYPRLDSPKPPEGVLSFNNVQLDFNPCAINQK

SEQ ID NO: 975963 - protein, 219 aa, Homo sapiens
MPHSVTLRGPSPWGFRLVGGRDFSAPSPSHGSNAGSKGCYWVALCPGDLIQAINGESTELMTHLEAQEPAIKGLHDSTSQRVCGARPEGQELAQCPWLTGRFQGTQDPTIDPEIQDGSPKNQRAGPSGTRDVGQEGVARPKAGISIMDNPPPFPVPHKCSRRHPASQDEAPCSCVSTPKVTSRGLTGSRTESRLAPEGGQMLGTSEPGGEPRRGPRIGG

SEQ ID NO: 975964 - protein, 274 aa, Homo sapiens
MAPCVLLGSGGGGAQSVYAFSGARAGVEPVSLGSLRAKVLLIENVAFPLRHQGPGTTPQMNELQRRFRTRGPLLCSGFPRCNPVVGHSGRNGQGNGRKDSGIPLQSTSGPGWVGFRAQFSMALPRTVARLTRVAGGRHPSSSAFLAEKALAKLPGEGAATRGFMKPDPKSSFTCSSGRGGPAHRLFASWNLSWRKFPWVGGPLDRVVGHLKGRVHAPAGFPRTMWNNRRPWTSEDPWWSYKGGQVVALRGGPFFNRGLVGNSQVCVTPGGGTPQ

SEQ ID NO: 975965 - protein, 57 aa, Homo sapiens
MAQVNSGWKLNGARLNKFSPFGNTRVPLDTSVPDIYPGTGTLPELVTHPWDNERLSA

SEQ ID NO: 975966 - protein, 174 aa, Homo sapiens
  misc_feature (32)..(32): Xaa can be any naturally occurring amino acid
  misc_feature (53)..(53): Xaa can be any naturally occurring amino acid
  misc_feature (58)..(58): Xaa can be any naturally occurring amino acid
VHRRSLAAVSGGVSLKKDHLALWGLAVCNTPXGEAKIYVYTRDSVMFCEEKSXKICSXIEVYTEQYYKLRSWLVVKGGTQMFKNIQRDQLPEAVQSRQRCIPSGRDTIESNIWRKDKHERNGTTIGSHLVEKEPPCRISWNMATYTLFNVNLVLVSHGGTLECTLTYFWLLLRS

SEQ ID NO: 975967 - protein, 69 aa, Homo sapiens
TRGMESRWRSTRESFAMGIVDDCGGALYDGYHCWWYLSSNQRFRNSPVGETTDYEGVVTVIKTRLTVRR

SEQ ID NO: 975968 - protein, 159 aa, Homo sapiens
MPWDLMETFSRTLALKSLGKKNITRMEVCTCCIGKQKLDGPSKPIIALHRKPSVPRQKIGANAPWGSARQFYNPLLQTISAGILKIQVHYYEHGTGSARESKDIQIPNGLMSAPPAFNRWTGKRNRVPGKFDTWPFNHVQGYPMWDTFHMREKTAPICK

SEQ ID NO: 975969 - protein, 286 aa, Homo sapiens
DRGRGVGGLAHGETSLPELGGEDKATLAQILELEELLRAREVFFSRVDEVVPNLFIGDARGPGTASLLSPWLAGIKCPSCPPQATEKNAFELWKLGHHPRAEGRPQGLLCSGGLTSTAAVLSYPGVASQDLSDFDNSVPTFSSAVTFIHRASTTPGKTASVGREKAVGKPGENVPVKKCHTLAQIFPTDASGAEGGLRGPKSIGQPGIPYSGIWFVSVVWSGSATDIIVEVGPLSGDGSGGGTVLWVPIDAGAPGQAIRLRLIGGPLRFLGFVVTAGAPLFARHSS

SEQ ID NO: 975970 - protein, 87 aa, Homo sapiens
RSAGSRVQKWCGSDIYLRYYVGHMASLGRVSEDRIRPEGVTCNCHHRSGMRSTKQEGRGKVPQEGVRKIFLEEALCEMSLEMRDCGL

SEQ ID NO: 975971 - protein, 287 aa, Homo sapiens
  misc_feature (58)..(58): Xaa can be any naturally occurring amino acid
  misc_feature (286)..(286): Xaa can be any naturally occurring amino acid
LLFRRECSPPPAPPGVLQTPDFPVNHEESREESGANTVLTPLQPGYRPSGERDKYLVXPSRVLFLPLCLRVLLLGGGFTPSLDRISPLPSRRKKEWFYQPCPEGSWRSSTSFRWRGLRYGFHSWPLQRAKPELLGTNRKSDGVHTVETEVEEITVCFDNTFSTIPEKVTSVNTPDYIWETGHRTRTLEAIFLPKIFCYELETSWNHHPLTVRLSKWPLQLGESFEPGDLNEALEGPGLAQGGGGPHVARLWKEALPTALRDYAAVHDKELNRRAGAPRYGLYNIFXA

SEQ ID NO: 975972 - protein, 241 aa, Homo sapiens
MAGYSTGDQDRQCAEAVTHCRDTTHVVVGIVGLCENPFEASDLRIVFAAAHQCMNCNQGSYRDWHNLYGKRGLYHMYWQGNGQDEEAKKGMVDAGDLRASLKNVLPGPSLCHIGPNQECAGSFCARKRPHLDWTLTVTRSAGARSTLIGPKRLPAVPCNPCCLARYMIRVIGAQGKRSRGPRFGPKKVPEDHEPASGQIGHEHADTLDGESSHGGTRLNAGLKREEPYTSPGARNFSATLT

SEQ ID NO: 975973 - protein, 117 aa, Homo sapiens
KRQPHALPVRGLLCPLKAMAQGSDAPARDFDGEDSDLRGIHSFQQFQLSSLPKCTVSPQNKTNEASPWRALTRGTWGPGEFGFSTGDLIGSPVPLDILALLILSIPSDFVCSGMNAH

SEQ ID NO: 975974 - protein, 76 aa, Homo sapiens
GLVTASVGATTVAVAAPFVMAGRVRFWTAETVVVTEIILPKEKLLGELSSPAEYANVAVCNQSQSVSYLPGFALFK

SEQ ID NO: 975975 - protein, 73 aa, Homo sapiens
YLFKVPQRVGLEAEAVLRPSIPGSPGPPESREWKEPSFVLESSPSCRKRMWDPCITQGISRDRSWGSQKLENN

SEQ ID NO: 975976 - protein, 88 aa, Homo sapiens
SRGRGGRIAGAQATMQCKIMAHELDLVGPRKSPAHKPSGIAGRPPGIVRPFKELTLNNFYTNFVGNENEVSPKVYLKDVPPRVGINAL

SEQ ID NO: 975977 - protein, 306 aa, Homo sapiens
VRLPLSLEVPAQRRSRLPPPNHRPSFASSPGASPATCCGPAQSHTLRSHVHQVRVLVLLTARMVRRPGHQRKPDESSRSQTLTYVQTRTYSLGSGLCAQRNQAGKTFRLRPGTGGFSQGGSFDGAPCEATTVPRGGRAPCERTIGGNFPRVAGPHNSTTGCFKKPPEPRRKCEELKKLEVTGLQTNFDEVGLREPAEEDHAGRAEQLRAKEVGWGPLSTGTGGHSHGGEPQTKKQPVRSTHNWREYGTDMTVTSNGDETCNHGVTVESDEQDCESVGPGTGAIETVTNPGANNHRAQVWIGANVNR

SEQ ID NO: 975978 - protein, 154 aa, Homo sapiens
  misc_feature (78)..(78): Xaa can be any naturally occurring amino acid
  misc_feature (134)..(134): Xaa can be any naturally occurring amino acid
SRLSAFFGKPLRHESQVEEEANAQVKAKEEQMRQRVHVNPLACGTGGGPQGAETWNARRWGNAWVTNVVGDLAIANGXKEAFVLQKWTSKKPYIGPSESARSTFCEDPNLCFIKTNMAPLLWSLLPLETLVDIXVDQFRRGKFVVAPEVVTTHY

SEQ ID NO: 975979 - protein, 244 aa, Homo sapiens
MPLPISSTDPRSRKKELSDIAHRIVHLARGFLAADESTEEHCKAVQSHVATENTEENRRLYRKVLLDKLNDPWLNPCIGGCQSSFHEKSNRRRMMGVPSPQSIKSKGGVVGIKVHKGVVPLQGQMGDNTKGWMGCLNAVPVHEGRELTFAKVALCAGRWGTHPLGLRIRENASVLGRMQESASRMHWPSVEAEISLMAHDLSAEFGRRRGGTSPMTTLLAPLDHGRPVSNSRDTAQGQAENLGR

SEQ ID NO: 975980 - protein, 100 aa, Homo sapiens
  misc_feature (42)..(42): Xaa can be any naturally occurring amino acid
KGNCEAKVTVDRAFQICSCRPGASPPCWCKVGVSPYITFYGXPPSFTKASPVVKNSITKINGCEHLAGICHKTRIGIRRGENCARTQRGSMGTIDGKQHI

SEQ ID NO: 975981 - protein, 106 aa, Homo sapiens
SCCCLGRPVGSSKLSSLWGCVPCPGSPASQADLEEKRANVGRMRCGRVTDKKRALHSRGISGWSNLLHEKEQLTTGEQKWHTPQVCYIRGPPTKKGCPLGVGHRSQ

SEQ ID NO: 975982 - protein, 138 aa, Homo sapiens
MLAHWERSRSGMPHPRPAHGREGAHRGRVAAGLSQYHGGRLQVVPVAGEELTFVCCIPCSWKRKQERFDSFWKPGNSNFDLIACNPSILGGGQGGQESPWFGDFEDQDLAIFERKCVLANFNNLATILRHGVVGTHPL

SEQ ID NO: 975983 - protein, 73 aa, Homo sapiens
AVRVPIFVVVSVVGLCSVTAKMWESVLFVRWGRGDKHVPEHLKIRFVEEAKMFQEDDEIPLYLRGGVADALRV

SEQ ID NO: 975984 - protein, 118 aa, Homo sapiens
GARLLCRFSAARFESVRNLLVCPELEQRMLRSNHEYRNVPSMKEVCCCNRNIHEHGGVCSCPRICPIDCSQEEWECLTLLRRHYTRDVLIGELQQPVSLGLSIPKPDCDFLTEHGKEP

SEQ ID NO: 975985 - protein, 173 aa, Homo sapiens
MNVLYGLVAAAATNAGLQFDEELEDIASVFRVGQDSEMWWAKAGKARNTITGFQTAYKPSVYGPQGERGRMATEGVTFLSPPSSERYRIPYAKQPPESVDTLKVTHPEGHTENSKPDRSLRQGHHGSHWHAPKRREPPGGKTITARRNETQHHASLRSPTGANGWRRYTHGPP

SEQ ID NO: 975986 - protein, 91 aa, Homo sapiens
AEKPGLQRFRTVREPHPLPRRDLSTAIRGVVNSLRKNHLDILSDVRGNKCDLRPKKSKRCTVLRQPKSASKMDTKAVCGVPFRADTSAMSV

SEQ ID NO: 975987 - protein, 87 aa, Homo sapiens
RASSKERSRRGAPCCMPSLPGDRADTEEEPRAVMCCRVEEGRKRMPIAKCPEKNPQIRAQRGPGWEHILSLDEITLWLERPMCRGLL

SEQ ID NO: 975988 - protein, 80 aa, Homo sapiens
MCPFQKITHTGGMGPNWYTLRKSPVTRPGDSLRVSSRPKEGPTVVLGTLWWACPSTVGSGWTCTHSAREETPVPGGFVAP

SEQ ID NO: 975989 - protein, 86 aa, Homo sapiens
SVTLTSSESEDRAISEALCALIDSSSGFNHFGQNLINEKSVMGNLYFGAHGTNIYFLIHIMWIQKTCGSHFSQQFTGMNMGFHAIP

SEQ ID NO: 975990 - protein, 67 aa, Homo sapiens
IWGFDLKKYQTYDEKNLATDAIPRVREETYNKCRSRLGELDLNDESGDPDEESDAVANVSSLIAPPQ

SEQ ID NO: 975991 - protein, 112 aa, Homo sapiens
TVAGKLRTASDPEQQSKEGRESGDSSWELHRQSVVRGQSEFPMRSSWSERVARSSITTNALICPCLLSLSESERHPGIASGVVDCRKSTSIRSFASYSNQGVVEILTGSVMG

SEQ ID NO: 975992 - protein, 117 aa, Homo sapiens
MGREESGFLDSVRQCVVTEINYQRKAIWRTIFSSEDMAKCALCNRARVFSYSPRIGLFIVKGVCHSQKPFRLQDHQVPDKSHVVLNLQIYGSRTSVPDETYGTPFAPQIRGPSFLEP

SEQ ID NO: 975993 - protein, 57 aa, Homo sapiens
MVEVVHREGSGGGSMGAQPISLTHLVEFHTGTDLTKGLLEARKESGGRSGRSTNEVE

SEQ ID NO: 975994 - protein, 121 aa, Homo sapiens
SDVSAACPRVTVICQYPWNVNFFPFRALHYVAPFTWVMCKNTLMNMKHVSTCSSGPPSSYFRGIKTHIGESNVQVMEAWLIKSVLRVDPVKIVRCHEHIEILTVDGEYSVVDKEKGLVSNP

SEQ ID NO: 975995 - protein, 240 aa, Homo sapiens
MIERLQAEREWSSSSPSVSAGRRDVRPPRSDAHWSQKAGRVSSFPALDVARVVAHIRSTCSRRAVVQGSIPHKKGVEMAPQGMSIKQCALLGEWLACERCKTLSWRHWNRSDVVLGRSSHPAVFGGHRDAYRLRTASLDDGRLNLVTQFTGHNYLHKYAPCIRINTHLHIGVRKGLIANVHWWASLFESTIDQEEEVSDYEMELEGLRLFEQLWKFRKSEDMRVFVKDAFSGELEVYVVM

SEQ ID NO: 975996 - protein, 244 aa, Homo sapiens
  misc_feature (158)..(158): Xaa can be any naturally occurring amino acid
FFNLVGVPRERSCCRHGRRPARMYRDEEQAYPKSRSCRGVPDAEDTAIPDSWGGRTVHIGAYAVHAASVRQLSGVQHDIIAAQCVLLIASVRSAPNLCAQSSQHGVKQVCAQKNGLPIIRVCGSHPFHTSSRHQQGWLFLVLGPDRAPQQGIASVALXTRPPGHLWPGVHIWPKFIMSNPAPKLAEQGSMLIEALPRGKVQRFLGRQKDPHLTEVGLTKFNADEFEDMVLKSGHPDGVGSGTSQ

SEQ ID NO: 975997 - protein, 243 aa, Homo sapiens
LFPFGVPLKILVSPWAPPRRGYRYGKNKPVPKVSLLAEVSLMPEIRICDLGRKRQQWMSSRLCRPHGVKMNMSSCPLKPWSLARICVPIRTLVTEVVAKIGSISGVRVHPFPGHPASPKMWFPVLRADSAPKQGIAEVPCETPQGTGGAQGFTIVPQLSMSIRNQAADNQGGQVECKGPVRRGPGSKVYLCPPECIHILTRTGAALHTSSNGCCILARTLGLAKGSIPSCLGGQVLPQSCPSD

SEQ ID NO: 975998 - protein, 68 aa, Homo sapiens
GSERLRRTWLPACSGEPEYPKGIRAVLLGPPRARKGTPGTTDVFENFCVCHYSYWGHAEGIGGFVAQS

SEQ ID NO: 975999 - protein, 130 aa, Homo sapiens
MCRAQDGGPHTCCAWRPPYVAGETFTVDFQELDWRNWILSRGYQWILQVGGSLPKRVGGQALLPFHSGVQAPKGKNPWLPTSVCLLPGPFFSYWYNGLAPVSIVGALLLPTAGWWNTSSHRFLGDLLPPT

SEQ ID NO: 976000 - protein, 78 aa, Homo sapiens
ALPSSVSRCPAPAQPKSQEKPGRSWSGEDYAKERYGISLSDTITRKTRSSLGPGKDDLTIQKADEVVWVRARVQYKQS

SEQ ID NO: 976001 - protein, 290 aa, Homo sapiens
KGTPGLQNASVVPVKDKKLLRSNWGSCQADLMRDSVPSAIRSVQRGYYRTTTSTINVKKGSICADTMCCNATCSLSYSFSYKHLKHEGSGKSIEEDTFLNPPTKDCGRGPRVRTHNLTSVGGNSFYINSLIEEINLPKIKTLLGFTNTRNTPKKKTLFWGARPRKVLKTPLRWGGGAQYMYDTCAKGVQREEPLGTDKGVGSPQKKRGGTPRVLTNQGWAGANWPIRGHRGRKSRRGEANNKRDERQVRKERQEDKEQRHAKKTDRKERQGQKQSTETQRGKKTEQSSNS

SEQ ID NO: 976002 - protein, 130 aa, Homo sapiens
ASPNANEGVLARLIGVRFFLCCGDLLRPMRRRGAQSHRQVVLTYECEMKMYGGVILSLRKDCPKTVDNFVALATGEKDLLQKQQFPSVIKDFMIQGGDSTREIAQEEEHLGGALPRMRISKLKAIVALVG

SEQ ID NO: 976003 - protein, 104 aa, Homo sapiens
MGLGSYMPSGTDPEFTEFMHVIWPTLGGGHGCNVQSWARCLIFPLHRDGQREAARITINLPEIQKVPVESERQVRQETIWRYYKGSSEMGTFTRKNIGIKSIKL

SEQ ID NO: 976004 - protein, 128 aa, Homo sapiens
EAGRGTSRGRVEDASLGLEAVKQPLSWLRVENVVPGRRCKKGGPPVTMVSMSFKRNRSVTGSTAPGVARVAMSGTGRIIRGGPVTWVVKPLLCGNWADCGQVTHQNSIAKLSTIQYERHSEYISSEKW

SEQ ID NO: 976005 - protein, 95 aa, Homo sapiens
YVSSTHHADVSVKRDLLFQALGRPTTSEKEIISKEQGNVKAAGASDVVLYKIESLPIDMISCVWEGMGRGLQVFKERIRAPVYKRCNGLMEKSRN

SEQ ID NO: 976006 - protein, 163 aa, Homo sapiens
  misc_feature (104)..(104): Xaa can be any naturally occurring amino acid
MQQGPGPPHVPYLVPEWGMGCSACDVALKPAVPSIAVERGLFPQCFLLTAHAEFVPLCKIDVVWAIVVPLSPAKLGPPKCGVLYQTTLKVTSSCSSFTKIYSYXNILPSVAGIFPGKRHLKLSMGIFLFSPHCESEFLYKTKQCVSTQNFIFVQRGDFCWIQS

SEQ ID NO: 976007 - protein, 58 aa, Homo sapiens
VTGRRFTQATAHTTHSPPNNSIFHTQQALTFTTPQPPSGATLNLLPSNHQPINNNTKP

SEQ ID NO: 976008 - protein, 81 aa, Homo sapiens
SCTSSTTCSQGRGVDHLGGLGTWYTSKGSHHQRCHCDSRVPTPLCEGCSSTKSTDSGFPEDTFGPPTSWTETFEDYGYDDT

SEQ ID NO: 976009 - protein, 124 aa, Homo sapiens
MGNQKCGQAEDQKEDGSDLEAHRLLTQDMVHSHNGFPRAHSQRVGRLGFSTPDGADLGLCQGVRRKTWKTQGRKKASSVRTRNLGSIDPRPTKIALYQEPSKYVCKGSPRMMTTLKLCVPTTTM

SEQ ID NO: 976010 - protein, 213 aa, Homo sapiens
MATQTDMETGLCYYGPLRSVWVVENPPALFVSNLKIPEMQLMQSESYHGRPTIVGCRVHECHLSEWCKHRSRLVPTSLCGVVALEMISEEESSTSSQSHHHVSSHHPLNSAYTQVIFKPFTGVHVDPAAPQLQVGAGVSVPHWSPSAWAKSVRFGHRPFVGPRTHCCFSSGTFSSTPSTKFRAEPTSDGPKFSGQSRHGVIHHCAPQLKHALG

SEQ ID NO: 976011 - protein, 145 aa, Homo sapiens
EETEVLRMVGTGLVAETVWWMRCRIVIKCYDSPCCAGKGRAWVEVGNSQYTELIKNNVSYRDEPRDIFLASVENCTSVSTLTLEQIGWLGQTNVNVLTYGKAIIEASEAPFLLFNNNLTIYCRGHDWLSTQLLMAPQIRSHQGPR

SEQ ID NO: 976012 - protein, 91 aa, Homo sapiens
ADANVLTCLGQGMEMSPRKYGNGSEPTLLEGSWTASYHQFVKLTSPLWLLLQDVYKMGGMDTCPVARGDDCVLQTGVWWSPFAPVNVYNGT

SEQ ID NO: 976013 - protein, 78 aa, Homo sapiens
  misc_feature (49)..(49): Xaa can be any naturally occurring amino acid
LATGALVSSVPSSARGPDLSPSFPQRMSGFQINLNRLKEPLGFIKVLEXMASYLVLCATCGGFKGQTEIHVIVSSCSY

SEQ ID NO: 976014 - protein, 86 aa, Homo sapiens
PVCIHSWVFPRMLFSGVVGPQPLFTLGMMEVWAGSSRPIKAQSEQRRLWWGMDSRGILLQRMPQALKPSSDPQLCGDCTLPALSLN

SEQ ID NO: 976015 - protein, 262 aa, Homo sapiens
IVRKRVCARNTGVVKIPLKAKMERKRSYQHCRHVDTVDRAVHHYCHLIYKCGASTKEPLKNFAKEAAEMGKGSFKYAWVCDNLNTELTVYHHDISLWKFETSKYYVPIIDAPGHRDLSKTMITGTSQADCAVLMVCQLVWDWKLVSPRMGRPEKLPFLVNTLGGATTLNWSGVTHTVGIPHLEANPNRPGQDDTEGNVVHGQSSTYLKDNMWVQTPGTKVGHFVPNFLGGHWLPTLAGRQWQPCLGSQAGHVSRRLHSGHTV

SEQ ID NO: 976016 - protein, 146 aa, Homo sapiens
MAMPVEHAVEALESSYHQFVQVTMPLGLPLQDVYKMWVVLELSCCRCGRLVSQNRGMVGHLLLTVNCLQRGRYTNLVGNAPIESFGVKLFPGDKLWGLHWSRNCVLCKGIGPVRWGKALGSGCTGQEKWTPPKLGKASWPSKLATA

SEQ ID NO: 976017 - protein, 144 aa, Homo sapiens
GSSEYILVKRIVELLKSCSSVLLWGMCYESCCQNKLIYFLSIPLSAQVTYILVPFFFFSTWWLYFGFPFNSLGKRWIFQGRNPCVCVPFAKEVDRVSKLWSTVLSLVRGGTPLYNGGIIAKTFHVIPVEGGRRQVTLSHVGPFN

SEQ ID NO: 976018 - protein, 125 aa, Homo sapiens
GWEEGTPGREEHGGGDLVSFLMWTSTPRGSPMYVLIGSPFVSPLGAPGLAESKEIVRGYKVAAEVPLWTSTDKCVRGELCKKARFGRLVSLSGGGGRIFFPTRNVQRDQEEMDSTCCKRGNPQWP

SEQ ID NO: 976019 - protein, 104 aa, Homo sapiens
MLKGATVLLGYREYGSGLLSGEIERRKKGVFLKIQNNVEPVEGKGFLTIDDAVRKWCKYSSNINKSCSVYVVKSCLLTWACVSKLVPPKLLLWFGLGGKTFVHD

SEQ ID NO: 976020 - protein, 79 aa, Homo sapiens
RRDPGCGSSGGKRAVPRNGGAHNCHGTAIVSVWARVTLLKCLLIPNSRGFARAAIQQICEVHEKWLCINSQVCQYHSVI

SEQ ID NO: 976021 - protein, 79 aa, Homo sapiens
WCDSVLRVVLWSSVFNLRPPSLLPNVLCRHPMKDSMDMDMSPLRPRTIFSVCELKADKDYHLRVDTAETEHPVILKNGQ

SEQ ID NO: 976022 - protein, 122 aa, Homo sapiens
PPCRSFFCRSCAAVCARCADLYLFGEAASEETPGSQCRRKAKGRSQDWRTKDHIIWKVGAQEMVSCGAVKDKEAIHPFSKLFEAPICERQVLSMTGRSDPDFCWAPKSIESRHICSSWTLAL

SEQ ID NO: 976023 - protein, 235 aa, Homo sapiens
LSWRNHHGVHLYTYPENEGLKALIAAQYSGLRSGALRHPIPFGKPTTLEFLRKFPAARSQHWRVMMDSGVLESNALPYYVSNEELREDSRVSSPVVQWVSLVIRICAPKPVPVVPTCGIMHPQKQATENARREVRPNLGLWMLLEDEAFLVGDRVTLVTSQLSAPCCGSISRSRAFPPGFPITRGLTWITAQFGCLGDEMVVQWAFVPKRWGAPLKGPGRRSGRQTPVGREKAPA

SEQ ID NO: 976024 - protein, 72 aa, Homo sapiens
GYLKRMGTKAAVYAAVLASPSRCSLVKSALNRLQVEASANNGKESHQKCTPDFHDKSGNAVLASGATFCMCT

SEQ ID NO: 976025 - protein, 187 aa, Homo sapiens
MPHPRRQFIRRQSSDAGLRQEQPVKPPRLPYDKYSYSKDWRRQQRSEGSLPDKCPGTTSLDTAWIGRIDLDGSGPLLNWRWLIRQFSPGSTSGSHSTGPQSMSADEQYLEGAMLTPTRLWGSTYSTVLTQCSQQSQGATIFALGRNVLTWALGSLLHKRLSRGSHTMYNKGLVKHTRGTFSMDCVHA

SEQ ID NO: 976026 - protein, 103 aa, Homo sapiens
GCDPSCAVVSGAASFISVRLLSYLSACAPDGRSMDMDMSPHEAPRNYLYGCEPVKADKDYHFKVDNDENEHRVIFKKVSLGAGAKDELHMLKQRQLIYEGSPD

SEQ ID NO: 976027 - protein, 259 aa, Homo sapiens
  misc_feature (235)..(235): Xaa can be any naturally occurring amino acid
ILRLTWCRDDRYLMKILMSEVQFTTTARENRARIKEKAVQVARGFRAGDATAESFLFSEEELEWPDCPGHHHVPMSGRVSGAAVPSFPSVLWNLGGHPGDHLSIPIMKCCRWTTRKKDRCNGPNSGVACPGGHPTQCYPGHLLTRIAKAEITRLGPKHPIGRHQDHWDPKRRKELAGDSGGSIRCSLSTLPARCGLPTQDYESRALIVQRKVFLKGLSRMVDVAGGNGNLGFGPXEVKTYVAKEWNTLKRMAEVVDISW

SEQ ID NO: 976028 - protein, 70 aa, Homo sapiens
GCQLKSGSKRSGVPMRYKNFINPPVSPEQCERRGENEPEANISTSAGRLPGVQLATSRLPSLARHRMSIR

SEQ ID NO: 976029 - protein, 69 aa, Homo sapiens
PAVGCQLGWKAVVAAWVLGLGCSSRDVFSEAEPGRRMWEASPSNHRRYLKHVMKIRKDISAERTLRMLL

SEQ ID NO: 976030 - protein, 102 aa, Homo sapiens
MSESWHSLSLLIRAELASQANLLGNDHIYKLSSQPMHWVIIFFIVIPIIIGDLCKLTSSPNKSGAPDMAFPRIKQHKLLTLTSLSPTPARIYYSGGRSTEQG

SEQ ID NO: 976031 - protein, 286 aa, Homo sapiens
LRFFHTQSTHGPDFSWDSSKIRVRCSRCHEGDDAFAKETHVGAQLPEKIQKAFDDMAKYFSKEEWDKMKASEKISLCVYEARKYEAMIKLGFKATLPPFMCNKGPKIPGAHDLIMTLTVGTQVERPQMTCGRLRESPRKIMPKKPAEEDMIGGSARSFCPQNDCERAVPPVKTNTSEKIQERSGPKRGEHAGPQTAERKTGGGLLEKFRTLRKMRVLLLRFRLALGGTRRGAFRTCACAASYHVLPLSLSPAVRLLCQRGPVYNARAHLGPLCGSPNLAGTPVGGS

SEQ ID NO: 976032 - protein, 137 aa, Homo sapiens
MKEEDVLKFLQEERHVSVARILDCPECNQYDAIKRNGDGLLYHKSQEDLGEALCGHFVGLVGMEKPVMSSVISSQGIRGTERLRSSHICWFGNWEANLQICRGQIQFLENLCIEAKIQDRLPGTHGNSLWSSRYPRG

SEQ ID NO: 976033 - protein, 205 aa, Homo sapiens
MPNKNKKEKESPKAGKSGKSSKEGQDTVESEQISVRKNSLVGVVPSTVSAKLKGTSLSAHSEERQRAKFLQGFRRKAILENFQKLPSLKDVLRADSREAFYPEVTVRCGVLFDFVFLNPLSDPKGDRTCTNGAGFNVEMVELYHPIIGRVTHQTPIYPTKYVHYCCRYTLFRTIYQPFSSILNGSGIFDPGGKDDPIVRMEAGFN

SEQ ID NO: 976034 - protein, 99 aa, Homo sapiens
  misc_feature (27)..(27): Xaa can be any naturally occurring amino acid
VAREKVGGPPFIQNCSAFVLAFLPLCXRQSCEWAPEKRKAPVRRTNISVGRGALAHEAKAQTSTSDLCSDNGTSGGAPRLVCSQRFSHRENFVLRVFSL

SEQ ID NO: 976035 - protein, 157 aa, Homo sapiens
PRPGARGGKAEDKESMPVTNVAALVKDMKIMSLEEIYLFSLAYKESEIMISSGGLSQGMRFEDYASAEEDPCRPAHQVQRHVVPIGDLQMATLVWVKRCSKEVATGKSVGGPSIRGTKLSIRPRAQEEWGGPKDGKGPKLSPCKVKAVGSVMVRLIH

SEQ ID NO: 976036 - protein, 250 aa, Homo sapiens
IRFRSRGFGLYPLGGRLCRLQVFLCGSLALQGPVELGAVEELAGALRRESRHGLVAPIGSHLQKILLLERAYTCGGPHLNSFRPFGPGVWLCPHFGAVQPDWVPAPQTRVAPRENGPCPKESKVALLLLIHICAQSQVLWNETILWWAFKTYDEGFGHMCVLGLRGATTFFKALYVKQRFWSRGGGFIPFLGIPIWLYHKFVEDDWREEKGAPVKVLGNVSSRESRFADALEDLRTATDNINWGGLSGRQ

SEQ ID NO: 976037 - protein, 293 aa, Homo sapiens
LSIVGTLSVLGRKAPVPSKCLGVLEILCKLSLQRLITLHPTGAYGSVNSLYLTLIAWRGHALDTFEQQPFMTNGCCGCTVHPLSTIWTQPAVIARETGIMAFALNPEKGPNKGTLHSTPLTVKPFIWPLWETGDLSGPELEAPPCFKLVNGLPGAKKGFPMKRVLWKPGGGPLLSGRIHRGPQNAKQEAAGKFNMESNKGSGTKIGFWEEGNNIWDNILWISRKLDGLPLTRGCRRAEGLGLALVMSCLRKMGGSLIKAGVKREGIGVPVVQDIVELMWPLQKEWREEVAYDW

SEQ ID NO: 976038 - protein, 189 aa, Homo sapiens
EKRASKMATTKRVLYVGGLQRKWTTKFFMLRTSFVDITDIQIPRDYETEKHRELAWWNLSGQRMLQQVIDNMNESELFDVTIRVNWAKPMRIKEGSSRPSCQMMTVLKKFSGKTLEENKRGHEGSEPPKAETQEGEPMCKKAAQILRLSHGPSRLEHSRCRFQMLRGLIVVPMTAENSAACAINEKAVV

SEQ ID NO: 976039 - protein, 131 aa, Homo sapiens
MPCNSQPLLAAHGRSDHLKVREFRDQPRPTVVENPGFLTKRFQKNLAGHEWGAKPWQHSRKVLRRSDESVELRAHGSVAVDPKNGTSKFPAWAPGGKLRSQKKYDRQTQTKILGHATRGSSKHNLWGRAQK

SEQ ID NO: 976040 - protein, 68 aa, Homo sapiens
CERAVSVLLPSHGVHVRGFCYMLWLLISASHHSSPFAALIGTLNELKDCLQGTPIDQVKYPEFPCNYP

SEQ ID NO: 976041 - protein, 145 aa, Homo sapiens
MLYNSERVLTPGLKEAVGGPESPKNKERVTANVLGIPARQVFIDYYFDLAESARGARYFANYWVRAGFSPEKTLGGKKTEGRTKRTAGRNPTPQTRDYHATSGGPMGKGFMKFTPFLRLSGQHLNRPNALVVAEHNARCSSRFPL

SEQ ID NO: 976042 - protein, 71 aa, Homo sapiens
ACQSAPRAVCGSVSASVEASGIMSGFSPRARGQFSLGDTEWFAEGIAEGTSIIISIAWISKFTADKDVSTM

SEQ ID NO: 976043 - protein, 122 aa, Homo sapiens
KQRYQRRVPITAGEASARSSVGVRVIYARTADAVVGISSCRLLVDPGHGFPEVYQQTVVRSGHWTFSSGGNATAWGKEFAGLGTPKRGKIFRLQTPVGPKGGDTRGFFRIDPRLSLSLYEEH

SEQ ID NO: 976044 - protein, 76 aa, Homo sapiens
LLFCRLKHGGCMKRRRRRFLLCRDPEEKAKEFAESEDHAPEKEVCPKDARKALEDSLSMTNGNSGITRNMGQMYRI

SEQ ID NO: 976045 - protein, 155 aa, Homo sapiens
PPCRAVRARLLLPSGGPGVLCRVLGRSYPALPEARGLGLDDRTARAPAGAAAPWAAGGKALKLFQARTINSASRESRALCLQAARRGGLKVPDPDYDSNFLGVGNSPFGWGWEERVLWRTIQFSISGWEVVLPLGIGFGAHMFYSTQLVLGFLDQ

SEQ ID NO: 976046 - protein, 288 aa, Homo sapiens
  misc_feature (98)..(98): Xaa can be any naturally occurring amino acid
  misc_feature (205)..(205): Xaa can be any naturally occurring amino acid
PWCDPVLRVVSGVASLISVRLLSYLSVCRHPMKIDGHGHEPPEAPRTIFSVGELKADKDYHLGWITDENEHQYLKERSVKGLCHMDELHLCLTAEAMXYEGSPIKVPLATFENLSVQPTFPSWGLCEITPTQCLKGRQCGSGASALFSGQHLSKLVEERCRGQKDWTGARRIVETLKYILEKAVCPLRLVSKGSHQEKHVTTLLXDEDDSPDCMIEQRDADARMLTECTAFDEVTRSLKKKRGSVKKSNYENIRGKNCQSQIRMGTTKPLYTPVQRRESSKKGKILKP

SEQ ID NO: 976047 - protein, 218 aa, Homo sapiens
GASGQGRGFRGASGRGRLAWLSFASAVSQSFRMCLCCAGVPCVAGLFRSAGPRGLAAPGFGFFGRSSLKAGHPGLVAPPGPSGVWLQGCGDRVPEGGGRGPSLGAFGGTPWRPVWGLGALGGLPFGTHRQAGKNKSLGGGDPPRSWHGHTQEGGNKQTHLPEQAIKSPLPLRDWVWKGVGSWKNLSGGPRKGENLRGGENRSARGRRQTSRRSTFQII

SEQ ID NO: 976048 - protein, 314 aa, Homo sapiens
DRASPRVVGVPASTVLGTEPGARSPPRAGAHSKPSVTSYRSLRIVPQGPLVCGFQGAEEGQRQAMPCTVYILLKYGQPIDGSGDSNLLAGIAAKKINKAQGDPQRGPGYCNPGEEYTLGRVCYDLTSTRSHPLYPDVHLAQPFWTRTVVLVRSSRKGNFLLPKNDLFVLINQTSSNERGQDRGHNIRVGRTSWVSQVCGMRTHTERGGAEISVFRCQAELTSQEAPGTVSGHSNLWGKNCGGLRTSAQVVLSVGHYTLFSGATQARGWNHTGPIYRGHILANQNRWRPTWATHKNVVAPTSGVGSLTTLLGRPL

SEQ ID NO: 976049 - protein, 180 aa, Homo sapiens
RKTLLKALKKLQAEPELPLQVQPRASGPSRSAEGPEALLSCLGVPLPKRLSEGLSLRPEDLFEGASLDKGQNAGRLVRGGPLLGNGLRNIELEGPRLRKRTQGAEKNALSPAPRETPPHGKRVLCPRLEQPQYQGSLFATGTGHSQLHEGRSKQTEEGVFAPPGHTLMLASSHHHTAAVT

SEQ ID NO: 976050 - protein, 81 aa, Homo sapiens
RLGPARELLQSFAPSSPPNRIMLQFLLGFTLGNVLGMYLAQNMIYQTWLKKLEEIKSGLWMPRRNPLVHETVPPAIASGYT

SEQ ID NO: 976051 - protein, 107 aa, Homo sapiens
  misc_feature (94)..(94): Xaa can be any naturally occurring amino acid
MVRKSVGKGFRKCPRQEAGSPARREPGFAGPHGGPVFHRHLKILGQTSSFDVLWRANWPFVVPGQAHSLGLYLYKRKGEIKLWKHMGARDTCAXSKGNLKEAYKKGV

SEQ ID NO: 976052 - protein, 332 aa, Homo sapiens
VRSSEEPKSERAEEARAPPRATQPRPRAGRKSARAPREGAPPPGQPAGITATNRQRKAPGAKSRGGGSHELRRGEGHPTTNNKQTLPRQDSRREAHQDAVASKVTPAPKRPGVEHAVCTPRGGAHPRDTRRAHIERRRKNPRSGQYTPRPLSETTHRGTDRCEHAHTLYISTPSNDRDGRHARDKRKNVSRDSTANVLVCKLRTQRRATGVTEEPTRLYIPPDPHPKRKELARPQPQKRAPHRRKPKRHEQLLSRPGRTKTVHNLDNNGEVVSSTKREREPPAAMGTGTEWNSCGKGTGPRQSGRRPIAPWRNSDRAALPPPGGGQHRARGR

SEQ ID NO: 976053 - protein, 94 aa, Homo sapiens
GRVPPSFSRSPRFGLPVPAFVSELRLATGSPGEEVHSDLCCEMVHPEEMVMVVMEPCGKNACHSLQQGPVPEVYVATVFENYVADIEVDGKQER

SEQ ID NO: 976054 - protein, 242 aa, Homo sapiens
SSSSGKQFVRYINMWINDTTFGSMQSLESLKRIHEVAGRDERTIESGVAPVSPGISRQCSSVSAVLRMSVCPVSYLRPWLHREPVELCSTFLHEVRVQKALPPEPEFVVTPEYGCECLEAVYSLQTTFVGPQSVRDLKKVEKPRVEIRACEPKERTVASQSDGYATYQAGPVLRYGKAHCWRNSSILRSKEWSEEVMQRWRKEGSNPPISIKKNISCSREKVKGDRWHDRRRKKFDLKEALD

SEQ ID NO: 976055 - protein, 109 aa, Homo sapiens
  misc_feature (93)..(93): Xaa can be any naturally occurring amino acid
APSVLSDGLEIRRRSHSELIHNLRKNGIIKTDKVLKCCCYRPSHYAKCKPIHGFSKSIGFQAKISAPHMHAYAQEFYLISCMKELKLCDVGSXKVNPYCMFCTVLVGCT

SEQ ID NO: 976056 - protein, 320 aa, Homo sapiens
MSSSEAPESGRSEETWLTDEDQGKYRGRELVMEGPEIDVNVEVAVASTCVDENGSIVGEQGYTLSGTEGEGNSWDVVKIGGGPECGLPGGAQLFGEGTDKLGSFETVEGREKAVWPKRYGLGPQNISYIPKIVATHSDKTKKEWDLHYLGTRGKLSKNLQEERSSIEPGNSPRMNTGGPASGRCCILTRHSSTALVTPGYPPTQLEGAPNRSRGPPKGIQGRWGHERRDEAGKAAHTAPEGSNTGGRSSEVTHKVVTRRPAPHRYKQMSSATHNLTEALRGGVHTTTPGGRQYRATKRTDTKIRVNDELDMKRRVGEYVR

SEQ ID NO: 976057 - protein, 98 aa, Homo sapiens
VSACALGMFDERSDVHRHQVTKISFAERGQKLRCAVIVVCHNRESFNRLVEHSGFILNVYCELGFQKRTRKVELHVDVRLQIIEACDVCLKEDDIDVE

SEQ ID NO: 976058 - protein, 98 aa, Homo sapiens
  misc_feature (59)..(59): Xaa can be any naturally occurring amino acid
VLHRGPCEVFHYGFQHCPGERCGSVMNSRNTGQVGDGLRGVYRCATDRNDFLETCDTKXGLLCCGSGLARNLSDIDLIGTSARGVRQVVLMPPVVLSS

SEQ ID NO: 976059 - protein, 68 aa, Homo sapiens
MRPTVRGCHHTVGQKVVAWQFQLPKAKEDYPNGTPLYCERSSGLPIAKRVQLHTKHWTFRGTNPAASW

SEQ ID NO: 976060 - protein, 299 aa, Homo sapiens
TRALEVKMEEYARRLPMRIVMTVVGLYDGSPLVGVSFHAITGCLRNSSMWMLTTDLRRRCLTGLNKNQGSTEGRYPFGQLGEALVSHDWTWTYGSHVSRGNKGRSLENSITSVFAFKVGSHNWQAKELAPSCPLLGYSRNGGGNLPSLNGRDAGSSCGPRDLGLLQQFPIGSSQCGKDPSNVASLQYPSSPFVRIYRPYPGSTSFPKDFYQETELVLRERFQDDPVTVGVNTLVWTVIGIGYKDLALFPIQDTRQRLNAHVLFPLWLLPKFIARNSSVKEPRPTERLPAVRWVVNNGAL

SEQ ID NO: 976061 - protein, 284 aa, Homo sapiens
VGHSCFLSASVLVLTLTSRVLFICLLLAPFRVCPSSSLFPGPVLAVPVFILLICLFLAHPVSHALPSAFLTPLSFGALLALSLHWPLCTLKFFHLPIRCLYFSIIYLSSSVSAHPHFSLPFLSWGTLPNAPLPNPLFPFPSSHPPFPSFPSNYQLCWSHNLFDEKTQPVVHARESFPHPCFTMSSWRTHTRQQTRITAGLMLSAGKAVDTYKTLERSWLPPRDPMGPLFGPLGHSTKISFQMAPGGPNLLIMERLEWHLCSHGHNWSCALCAVHGLSPLLVWKM

SEQ ID NO: 976062 - protein, 261 aa, Homo sapiens
  misc_feature (152)..(152): Xaa can be any naturally occurring amino acid
ILIILTDATAPRGWFPEAAASANELVNDLCSSIESSTKNTPEFVSCAIQPKIDISNCKIPKTILLMLTSKKKSAAEARDTRRVEASSNHRRERQLWRYREQRRELASETWWPPPNFLPKIFQKGLFPSKVPRAKPLEILGVWASEPRFGIFXSLQQIWGLSLRFVLYGTLILKIDAGFNQKKQPTTYPRSSRAKQQRRGSGARRPEEEFNTQRVGGGPKVRTPRHTCPKHSKQRGALPKKPAQRLTHQASAMDKGPGYRPG

SEQ ID NO: 976063 - protein, 46 aa, Homo sapiens
MACSTHWRRDCSTTGRATLRTHSGTNTRSTFLALNPRVGEHAKGLH

SEQ ID NO: 976064 - protein, 128 aa, Homo sapiens
LSPGVLVASDIVFKPCVKSLTHRRVMPRKTGDLNSNTSLRSSNYVDDYPKCFICWEQTNVGSKQMQQIRSVPSREGCWCLNGQRTTHDCARPSEGHPGKNNPSSGENWLASYPGETVALGVHPGEDLT

SEQ ID NO: 976065 - protein, 215 aa, Homo sapiens
PLRVLLVLSSCLDAMSLDPPPVLLILHVQVAAEGRGAGFTDESGDPRTLKQELSTVTMMADLARYARWHRRSHQDEGISSKPIVKARTAPLAKIQWVISVVFNVWQAPLIDLTHWDVYPALLLSCRYLDNPLYRPREAFPYKMYAGVCRNTLWHLVCTKFVAYGCSNPGPGLHPGRHWNYKARGVKNTRDFPSSIAKNFVIQQVLRFNQPTSVHR

SEQ ID NO: 976066 - protein, 130 aa, Homo sapiens
  misc_feature (71)..(71): Xaa can be any naturally occurring amino acid
MPSCALSLEQRLYLRRLLSYLMCVPPPDEDSMTCHEPPEAPELIFAVCELKADKDYHLGWILLHQGAPVIXKNLASKGAVPTDAVALLLTAGGNGITKAGPISGTPGTFEIVLYQPPFPLGGFEITPPVF

SEQ ID NO: 976067 - protein, 141 aa, Homo sapiens
MDMDMSPLRPRTIFSVCELKADKDYHFKVIHDEQAVQLKYHCTLKMLYSQRFPLGGFEITPPVLLKVAVCSGPVHISDSSLVAVEEDAESEDEEDGGCEHSLSISGRRSAPGGVSKVSTEKSKTCADEDDDDDDEEDDDDR

SEQ ID NO: 976068 - protein, 201 aa, Homo sapiens
  misc_feature (129)..(129): Xaa can be any naturally occurring amino acid
APVNNKARKTELRASGGSKSMGRGAQFPWKTEERARLILILVPSSLLPSLFLTRIRAGRAAARDRRSSSSPFSSLPHGIVLLRVVGTLTFLMASPPMLCRTVWSALAFLVYLMSSVVLSSHWCVPFSTXLRERIALGIGVARMFTGTNPAEVFGSEHVLNLRRGYGNNPVENTALPYLWVLTCTQTLMSLVGRHPEWDRNG

SEQ ID NO: 976069 - protein, 315 aa, Homo sapiens
AQSLSRREIQQPPLEPPRSRSPSPPARFSANAASEPSTEGKGIVSYVRYPRISTLSTPLLMHVRVMTCSCLATEDYIHIRIHREHGGRPFTMSRDRWIDYDKRTLVTPVTAKSLPANGTVNVSIRNMETVHSGYKGDQRKKHIARFLVGDVHVLKDESVKVHGLKSACGLTEGYVTGFLASEYNIPFSPLSPGLQTTSTGGYYSTHGRSAYNWDLVYVLYALSEKSHAGLVLEVLNLKDGSQIAPEGYSREPANRMLQQPSPKIKQLRDPSTWRTTIKGTRTAIQERENPAKGVVPVQRHKPRRLTQPMDKHRGI

SEQ ID NO: 976070 - protein, 113 aa, Homo sapiens
MSPITEARRIHFTLQTELITPAETCRAVRARPARSGQESVRWSVNIQQEDPRARRKGIAQPPLMLRGPTHTNKELTRAHRIKSNQNTLNPQRTKYPAPTVRIGSQSAGPSAIL

SEQ ID NO: 976071 - protein, 142 aa, Homo sapiens
MRPRYSLRPTALPVGRRLIAIRGGKVLRKVEEPFAKFTSVIDSRFCGTRGFLTYPPGLQNWTQVEVERLPCVFMNRLPFCVNTQIFQIHLLLGDKNPENPVPIKAADPLFYSGAQGGWLHNSDGIGSTAIGCLATRATRIWF

SEQ ID NO: 976072 - protein, 147 aa, Homo sapiens
MLPEKHLCMSLIRSCFASRSPALSPRTRKLSQIPEFQFLNPVLGITVPNNVKTQAGKTVRKSPQGLRTTTQFVKDAKLEKRRLEKGKSLTMGKWGHTDGSPIGGRHDNTAHTFCRADKERGQETHHGVHGYDNHERREQCNQIRGTL

SEQ ID NO: 976073 - protein, 306 aa, Homo sapiens
DSQPGPVAERKCGPRQARPRDAGPRGSGDSVGPRTQRGQARQSERRGGSGKAAGEKWLMTGLLSVRRKSGAPEGAGRRDPGGRLPGPSKGEREMGRGIEEDTNRAASGATCRGHMAGPGDPAGGPNRVAGGLLTRPGGTHAHWGDWCPGGQTPRSLDWAYLREPWPVGEQGVTTGSWEEHPANVEEGARRNRAQQMDSLASKGAPDTGDGGEKAKKGPVEEVTPRGVEHFDDDRSTRHEELREDPAGPQPGGKGPVFDYPREQRQVAPAACRKSRRGEGAHGGGTDVRDNVHHTPGGHPGPPKRFG

SEQ ID NO: 976074 - protein, 102 aa, Homo sapiens
INSEMVIRAGRKGMRRHSKNGGPLRVSRVGPMVSVLASGLRVGVRTLLCQAISVTESSRDDGTVLRPAKVRFDDMERQANKVVVTLQEPGSHQHELCGQAAR

SEQ ID NO: 976075 - protein, 82 aa, Homo sapiens
  misc_feature (31)..(31): Xaa can be any naturally occurring amino acid
MNLVYNEATGQSERSPLAAQVRIGVAEIHCXVIHIGSYVDGTGKPVTGGDICESHVYWFPTHSRLFYNQTTRQMRNNHIHRF

SEQ ID NO: 976076 - protein, 182 aa, Homo sapiens
DNAAGCPRARRVPRGRGALRAEGGLGSASLRSLKRARDQRGSRQEEAEGSSASLSSPLKLSRGKPGGPGVSWKEGGVPVAPKIGNSSSLRNMEDLFHSTQGSHNSSFIGGGGIMQGKLYHFLTKFPIECEWYITFFLKIREVCTQKIVCNKYMFPNVAIWWTKKSSWSPWKHLLLFTTGVGN

SEQ ID NO: 976077 - protein, 149 aa, Homo sapiens
MTSCRITQESDARARISMIDCARATGKDYLSHGRTEFIQNISEQIETIKKEKARRTAQHQHSAMIPEGAPPMSSTEPLARRLLDEQFVPIVVYHSVALRTIRQAFFSFVDKDLLGNLLAPVLLQPQGCIAVIRGADGMTTDPLVTGDER

SEQ ID NO: 976078 - protein, 110 aa, Homo sapiens
HFVTNCCQLATTAADLATTACVSEAELGLTSSAQVILPPRLGTTGETAPGAMNGDDTFAKKTQDDAKASEKRSKAFDDIATYFSKKEWKKMKYSEKISYVYMKKTYKAMT

SEQ ID NO: 976079 - protein, 220 aa, Homo sapiens
MNVERFIMSRVSVHWNTGQLEEGNPAGIPGLMDPQGHDGLTRVDHPPASVRLHKDERSTTCVWAKQSKPHKKHEPWIGSGGHGPSQCDKSIEVYSRLESPDTNTASVYGKHTLRDATHWEGPGKDKTNDLGVRALDHSITPTLPRGDTAEAQVTHAQTTEQTHECAPQPGLAGCSATVKSAQRRRSSEQPERPEKHAHTHQPQRNRTPPHGTEPEKRQDT

SEQ ID NO: 976080 - protein, 89 aa, Homo sapiens
MVVRVWSIIAERGEPVFSGASSHGFQCFDIHPWGGAVDTLAHWLVEDPLVLCPGWVAAFDRDRAWSQGGVKRVGGAKRHTPGVGGRHPR

SEQ ID NO: 976081 - protein, 123 aa, Homo sapiens
GHPEQQSKEDGVRASGALARGRGGSPMETGERAPFILILVLQFSFDRTQPEQRLRPGSLEPSGPLLPPGIVTLPGVGNTAKFLKTHPNWYSQRPVAWLALGPHSYSQLGTALVVSTTTNGLVI

SEQ ID NO: 976082 - protein, 72 aa, Homo sapiens
KEPLGQLRGVLYRLGGVEDITIFESRMAPSVELDSIKVVGGKSSAIITLRSVFGPNLRDRSATVCFSKYMLQ

SEQ ID NO: 976083 - protein, 105 aa, Homo sapiens
DSGRLQRSLTKDSVAVFSVPKPAMSSQKRLTKGLPQDARALRCVHLFATGPRQYDGTFYEFRTYYLKPSNMNAVHGKFLRKTFIFGPLTLNVLDSWSVEFWRQNE

SEQ ID NO: 976084 - protein, 90 aa, Homo sapiens
MGTRFQGLTVVQDCCRLGLPCGYTYCGHGKVCVHLLTPITKVIKARFSGHSGWIDLSVKQHLCLKLQNLAVSALTFCRGSQFFTNSGIAD

SEQ ID NO: 976085 - protein, 108 aa, Homo sapiens
MSTTRNSGEHQTERPRTRARQSRKSKQRARAEEKRPPDEREAGHDHSKTTTEDAATTTDTTPTRSEASREQTERCERTTRDSTQATQTGNRREHEETRHEENPEHRAN

SEQ ID NO: 976086 - protein, 216 aa, Homo sapiens
MCGQGPRQRAVGEEVVRQTGYSAEPHTTAPSSWGTHTNNNKRQERHKERTHKDKLETTPRRRDDEKRKNECKTKSTSDSKDNKEAHEERAQEEKRRALKKRHATEAAEKGKTSDDRARKRRKEKADGREDAKRNTKEETQSERKKRGRMTTERDKTDERRRRERRGTRRSTREGETKKQRARRKERARTRRGEEERGRREKDRREKTEEDESEERQ

SEQ ID NO: 976087 - protein, 185 aa, Homo sapiens
PPPVYPVLTGRGCIHEEINLDQVGTDKTWETPIPSPNAARPLHTHYFPLQAQPMEIDLDGAGQLALTSRSPYSYDLSQSHDLLPGISRGHCVPSAMELYSRLLLGGLGTTASHLLTPFSHSPRHTGPLGWDQGVGMEQRWSINSRVGYVGPGRGNPQNCGVEKAAQDGRHPSELLSPATPIIPAA

SEQ ID NO: 976088 - protein, 112 aa, Homo sapiens
RRSSPRVVGVSCFNSAWTEPGARSPPRPAAHSQHLRSPLHTHPSDCTQGPPTDRSSAAQTPPTTAALSLVAAHDDRSPPSQVPPELHTRTSRRPAINPPDHPGRSTPHYVIP

SEQ ID NO: 976089 - protein, 131 aa, Homo sapiens
MVSFRETSQSCFLLSLQNCESVKPLFFINYPAPAVLYSSVKRYKYTTTLNQMTKIPVQAIESKIRILYACMFNTVISYKRTQKPFNPSYAVGFFLRHFLKLHRCIFTYVHVCFRNKLFAKKSQKRPSIGPL

SEQ ID NO: 976090 - protein, 176 aa, Homo sapiens
MKWEKECERRVAAKQLEMQNKLWVKDEKLKQLKAIGLLDTYNMWKPGESLSGEARIVEEVSHIDRICPLNFILLPLLFSTLIENAPPIRLRHRRSRSAGDRWVDHKPASNMQTETVMQPHVPHAITVSVANEKALAKCEKYMLTHQELASDGEIETKLIKGDIYKTKGWWTICSVY

SEQ ID NO: 976091 - protein, 110 aa, Homo sapiens
GRDGADGDWQDFYEFQEPARSLLTRRTVTRAPSLGEGGPWAVGVAPTFSRPLACSLWRRKLEPVLPPLGIRAPSPRGRRAANTRERSSLQGGPRIVEIALTRLLCEWCCL

SEQ ID NO: 976092 - protein, 111 aa, Homo sapiens
RRGHGTPEGFSSDEVVGPREEWVTVPSWAAENRCFSTPTHYTLHWKCLTDDRLFVLLALSSSSRAPGRSRSPALPAVSPVGPNVKINVLEDFEGENPQVPKVEKSISGTSP

SEQ ID NO: 976093 - protein, 293 aa, Homo sapiens
GQTLSFSASVRAPWCPPGSSYVEGNWNMRLGGTSSLGELIGTREAADKVARTRRSEVSLCGPPHTCTYDRRCRSDNKLDPKDWCGAQNCYKVTNGAFTGEISLAMIKDCGATWVVLGHSERRHVLGSQMSCCGQKVAMLWQRDSEYSLHGEKLDEREAGITEKVVFEQTKVIEINVKDWSKVVLAMSLCGPLVLEDGNQKARKNEKSRMVESNVLMGGSETGLLMGVWDGDLNEVAAVIDGSGVGSLAIGIIGNEHLFYFERLSEPMARCEGGGHRFVPGATIGKVKGKNRRM

SEQ ID NO: 976094 - protein, 92 aa, Homo sapiens
MEGKPPPPPIKYTCIQEPNESDLPYHEMETLKSRETCPMAELCWNPIEKVDIVLYYYSRSSAMPLLQLKWKSEVSDLFSQQLTLFHLQTPEA

SEQ ID NO: 976095 - protein, 559 aa, Homo sapiens
  misc_feature (160)..(160): Xaa can be any naturally occurring amino acid
MAVRRVLKTEMSMEWDVFLDVVACYSGTSSTMVGVGFAKPDGHARYLTKLRRTSRALEGPGAVRRTVKTRRLNHKERKRPINGQKKLRLATHTERPTEAEPSKSHGKPLLNLVPVLPKLAHNTRPRGTTRPTGLHLHVGAPHVGTHTPQRGLVFIVCGAXPSAPYPLVVYGITLTVPFITWRRHRRGEHFGDQPDTHTRRTDTSGKTLPDLSGAPPWPGNMARLRCTAVMVQAETRKGIPVQTAPRCGLATTSTTLEADDTYGGHTRQRLGPRNTGHTILARAEGLKQTLGGENRATHTGKPSKLRTQPTHPQNKTQLRDNLTYSSLGSAVPRTPNSARPHGQRVPTKGEGDPHGYSTSDWHTLTVGTKHTALTLPHTHWDMTALPQHQGDKGAGHLQAGAASYVLRKNRRFPKKTKPHKRSRLTSCGQHNTWLLQPNTSARCAPNGEHPQGGGAHRDVNRQERIEKSPGHTVAASHRNNLPRVATEQATHYESAAEHTTDEEEEDTINILTVREAARQWNTELTGVPNIARRTNGRTPTMVQTRRNSDGPQRKRSTPH

SEQ ID NO: 976096 - protein, 88 aa, Homo sapiens
FFSRALSGFRIMLVVRDYNSENMGGPEGMDPDGCYPRALEVRIVLITFDEYCIYRSLSFVDLCLRVWGKAFGNSERANYSLVFTGYEW

SEQ ID NO: 976097 - protein, 267 aa, Homo sapiens
RDTARGESKDRSEQKERATARKPNERDEQQKRRQAARRDRTTTARAHTSQAPSAHQEQDSERERQSKAEGNSRHGPAQPEEDQRRNTDTEEEREGENKKTSKTKDGTERGRRRKGRDDKKIDKAKDATTRPASRGQTRRTEEAREEREERSSRSPESEKQQDTSAQRLEPTREQEQEKKEENRRQTSRENEEKNSRSEKERRQTRESPEGVRRSSERHDTQQSISKKHNDSRRDDGEAHKESGDSRRTERAKEKRTREQKSGEEQRR

SEQ ID NO: 976098 - protein, 272 aa, Homo sapiens
MKGARGMAVGYRGEMTNTMECVWDGIIVLGYGMKRRHDEIDMRRELGDVDRQAGRSNRLDTDTLISLAQNRTPQTGGVNWHRSKVNTGYRTEKGLNWKRRGKPVTVGAGKKLDTWSQVQPAIPWWGGKCRTLRHAQHKDSARRASPGLITQRIGPWRGVGQTSSFTPARENSALGQGKRQDTPQPTTSPQWAERIRPPRVRVTHEKTIQGGTTVHRRRRVQPSEKTNKKEGQPSTKVTEEHHDREPRGTGATQHRDVIGGGKPASGKGSGKQ

SEQ ID NO: 976099 - protein, 84 aa, Homo sapiens
GRRSSPESRLGFPASTDAMDVNPGARSPTPGPGLPISQHLLSPLTPHPSELAPNGPRLTVPSALRKTQPHGRTAGHTHYKSAAY

SEQ ID NO: 976100 - protein, 101 aa, Homo sapiens
LVWEPGLGRGRCARVRAGAVRCVPAPCPPCVLPGWGAGGEVTGGHKPLITGPGGYCGGSPAGSPVRARARLPGRLHKPQRVQPRVGPRRRPHQKICALPGE

SEQ ID NO: 976101 - protein, 210 aa, Homo sapiens
MPRCSVELMAVPLCGRLGTWCNTLGEGAYGERSTCCDIRVTERSSRSDRSYDMKRAVRPVQNNYYERDLVSIQLLQSLTHVATHSMVTGANGNIHISIFCAVLEPEETLLAQNRSRHRHAWTRMLTTIFHQLIAQGWYICHGMALTHRGFYSQKNLLVACTGYTSKSKTWVGNQDSGIIIGDVCAPDCVDLPYVLRTSVTQDFCDHRRVP

SEQ ID NO: 976102 - protein, 85 aa, Homo sapiens
MQEEHLSEGAETRLASAVAKGEDAFITRGDALAGRNVGQHQTIGGPRMTGDLSGPVQEHAQEGEGHHQRYTGTVRGKRAKGDMRT

SEQ ID NO: 976103 - protein, 175 aa, Homo sapiens
LLDDSVSRVETQIGKGIMYTRLVAIETMLNTKVQQSGISPATFNNIRATDGHTSRSRTVVEEYLMHSSNKVAVIDAVSLQLRQSSKRNCRALKIYCAISCGEDYQQVNCYITGHIRTNTLKPSMAKINGPHKLHTSNSSDKRHAFRTSTTRPDELESSARATVTYSPFHLVYSFT

SEQ ID NO: 976104 - protein, 180 aa, Homo sapiens
VSTQSGHYGRECAPARAGPRGAPTERGRGEAELQANPFYDRYLDKIQLLLQGQTQLLCESRLEKRSEFRKAASGAFQGKVIFIKCVETRRQMACAGKNKSCEPEDSLGTKTLSSNLSTFEMVKGKNLQKKLKPDCGSNIVQQRDTVYAVIPCRKVGILIVNRGSVLSNISIVLCQGREGH

SEQ ID NO: 976105 - protein, 43 aa, Homo sapiens
MAIPFYVENITAKDTDRRCGWILPIHLGRRHFRNLDDELGQLC

SEQ ID NO: 976106 - protein, 117 aa, Homo sapiens
EGGREATSRARQPASPAPRFVSPQWAASERVGLPSRRTRCADGATANGCGVKTQAAAVCSPSSRSLGGGAHAERRVMECPVMENLLTFLPQGIRELLNQTKGISKTTKCECFSWLHK

SEQ ID NO: 976107 - protein, 166 aa, Homo sapiens
TASVGATTVAVSAAFCWQEEYGSGTAVTTVVVTEIHPLSKENTGKFCELSSPADSGQMCFCNEMPALLPYLPGFGSLVKSVVDIPYRVFFDAGSSGSYESHVGAAPPGYMLIEQCALYDNLMGHPVWYPRRSRGSYALPGYSLGGACHPRLGPVFTEEKAWFIKLA

SEQ ID NO: 976108 - protein, 117 aa, Homo sapiens
MGGEIAISFDGDWPQGGITNIGVRTKISPQTYYHNLYVVSTLGESITVVGNTSAHRLLCPWLRDHARLPWVRVGPTASIKGDNRFNKGDTGQDYSQIPIRHENNVSYERCTEIDDIH

SEQ ID NO: 976109 - protein, 122 aa, Homo sapiens
MDVDFQLMRGTYGHLIRRSSYNLPIDESMWRPRLLRIDHQAQQKLSGPKELTGIVPIPNPCGGCPVHTVLTALTDFTKFNAIILWFPMYLLPLFKRPRCRQIPRPWEGQSSRRLPEEGFNLA

SEQ ID NO: 976110 - protein, 132 aa, Homo sapiens
MCPVTTARGPCEMGMNCCNAHVLERRSNVTKNEDSWNRYGLTVSEYRIVTHYRARAWDPGTTVVAEYIFAVGSEPSNRKIELIDGAEGGAEIEEAVHFSSCCPLLLSQILMSVCVNAVGQMALIVESRSLWE

SEQ ID NO: 976111 - protein, 205 aa, Homo sapiens
MSEEKPKEGVKTENDHINLKVAGQDGPGAVQDQEAHAVSKLMKAYCERQGLSMRQIRSGSDGQPINGNGHSSTAEMEDEDTIDVSSSDGRVCRKSHAGRAKVLEGRPSRPGHPRIVVKVSHVTCRNHKGVCGKLEDIHQMISSLDVFSATHNYICRDDLYLIGHSDVSCHGKCVEIWGHLGPFVFPLEIFNQFADGDYRRMTEWP

SEQ ID NO: 976112 - protein, 153 aa, Homo sapiens
ALGSRGAGDGGSRSGAELAAERGGSRSSSDQAPRARGNILAQHWALQGSGLRPEAGIEGIREDLGVVGNKVPGPGGGLFAGARGGGVTGATSNSRGSRVKSGSSRGVHEHVAAQLWGHNVCLGGGRALLLAGFFRLRKGLSWRSAAKIGLSGG

SEQ ID NO: 976113 - protein, 110 aa, Homo sapiens
GGGKRKGKLEKKTKMKKGKKMETEDENGKRDEQDEECKENRRLEQKVNDGKGTVDEDVETENGEDLTKRKTDRKEHGDLEQRRLDLMCDNTTDLTGWQMTERSLEKRKKI

SEQ ID NO: 976114 - protein, 33 aa, Homo sapiens
ENNKPTKDYRKQTVCLCRRGSAKTSAGARSEEA

SEQ ID NO: 976115 - protein, 81 aa, Homo sapiens
SDPTKQHYAIYAHETPNGGGDPFYTNTYLIGSVTLKLIFLSYQASEESPICNVTTPEKKEPLWIHRYGLSYDINGFLGLIV

SEQ ID NO: 976116 - protein, 107 aa, Homo sapiens
MSYSATFQLLEELPICQHSILRNVELALRPTIFFSHNTCLMASTLRPVLSSPIHVNLCSIPKCVEMMRKFDRVEVRNNERNRTVNCVKAKYKVSVSKEKWQGFRTAK

SEQ ID NO: 976117 - protein, 429 aa, Homo sapiens
LPWCDSVLRGCLVEQRHLISVRLHLLPKCVPAPDEKIRWTWTMSPTEAPELSLTDGELKGDKRLITYKVGKLTDNMRHQLTTFTETGYKDREDWMQKGLHVGPHLVRKPDGTRDTYTQTGQFHLTTGNTLAKHCCNNCSWYQATAGIPRCEEAIVGDITPTPPPGWGSFNRYLQKMVEITRWAKVGTSHPTLGDRPPIPVNTCWAGPSIASQLPGNALGHTQAASDRRLALYTHQPVNNSEDSFPGDINAPGSTYGPHHRETAEHEQQHNKAISHDRENPHTRSNDTSLAWALAVAHRTSRCESNVNLLLHTQAHSQRDLHNAHCHLTSAAEPCTSGQRTDTRATLFKLTTGRAKRRQSTHPVDQGSKTPPTAPRKTVHTELSNTTRPRRTGTSHSSDKQFDDTQQAATGGQEPHPSNATRADASNSTM

SEQ ID NO: 976118 - protein, 141 aa, Homo sapiens
MSSHELGTYSRRDVPFLVLRTRGVVKTNPKFGAVVNIECWDSNSVMHPIKGSKNHYADDVGTWTAGPMMEQTWVKSRKQGACGTPHAGFGSAATDQAGSQRGPCTVVQGGMCPARHDTAGHTGWTDVTGFLHKRVIVRPDA

SEQ ID NO: 976119 - protein, 175 aa, Homo sapiens
MGDGNGEAPGKGTTVHPRGRYHPSKRHTTGRGYNVWAVKRKDTCAVGPAGSNNGGFRYTHGGHVATPPHVGGAQREELTWTGMSDERVTENTVAATREGRPRGEGPAKEIMTNTIVTWRPLNAGTGHRGTIAQGREANRHGVGAAAADSRAWDLEEGQDGRGRPRGNTQPVERPR

SEQ ID NO: 976120 - protein, 215 aa, Homo sapiens
EVLYSLGNRGFNRYFALSVKVVSQALINNMASPWQRQLAERLKGAGYEPVKKDREHVNGRAGTMMQGFGVRFRCLSSTSAQDGIYYEAEGKNSTCRNDDVCRCSLPFCCHQVWFDLSSRWPELSEPIDIKRAAIRELLSVVEPLARKGSWHDIGVGQEVLLKDTCVRPLVINLVENSQRPSGEDTSWQKVGSVSIGWEGTALDMQTEGTQYIKDI

SEQ ID NO: 976121 - protein, 312 aa, Homo sapiens
MESRYQTGVIILNYDRAVEAFAKGGNLTLGGNLTVAVGPLGRNCGRKRALRSSVAVFTYCRVKGTLCRRVFRKGAVDRTGNTDPSRKFCGQDIRAYEIPWEIHRRPVQAEDLMKFLIPFTEHSHDTLQDTEIIAGKAAKGARGSLSAKEYLPKPWSKTTAVILRPVQAGTLALQKQFESTHRSDERCIPLSGSTLGFDFKAGTRLTVHVKKQIPCGWVAGTTSEVNWICPANYGTIIRAIHVSGSIQKFSYWRVLYAVHIAKICGQISGEDGSVEPGTVTVTHWANKRSVNTGRLGEVNIADLAPPSFVYLS

SEQ ID NO: 976122 - protein, 404 aa, Homo sapiens
MPQKPKPETDSTKRKRREEHTRASSGDANTEMKAAMTGTVKPWRHPDYLTRLTAKNGQQHQTREERQQTTAQDSATEHAKRVENNRRKGTQQSTTPRRREEAQTGNRDRETTSDATTNQRAAANTQGREGRTPHTTHPITGARARHNQRRGTPRLAAQTSDRMEPKRQPDNRTDPSANHHKGTNNTHQHACTKTTRGTPTGQKGNTATQDAHRTADQCQHHRHRQTPKDRHDKDTHGTAHQSDACTTKHRTRQTNTQGTPTQHTPPSHTEHAPAPETPSTRHNTTQSRTGTGTRGPNSETHRQPSTDNGNKHKNGRGKETNVTQEHSQHETKDTGQQQQQRQAKQPEGPDSTEGTRYNTSRMTTANTDGKGQRRAGKQNHRSEREHYGRAQKSKRERTRASLFS

SEQ ID NO: 976123 - protein, 249 aa, Homo sapiens
  misc_feature (249)..(249): Xaa can be any naturally occurring amino acid
MVKPVSELGKMRVGLECTGEFKKGQGDKLILEDMGSGSLQGLKTESAQEGQRGYWLLKSKKHSGSQLERTAGFMNGSECSKKTRVKIRGAHIRLKTVSDTSSLCNTDIFKKWDDGVTQWCPSIMYVGIETTHFGRNEITCFKCGIMHKPMEMKLNGQAYIQDYDGLTPQPKGKQQLTDTTTSTTNTDDKTTLVDDGPRSDSNTTSGGRPQRRNKGRGPSHRNTRRSTQKPGGVLTEQNKNKSERNNPGX

SEQ ID NO: 976124 - protein, 149 aa, Homo sapiens
GFPGEATPGASAGVGEEEEEEEVMATRPGAGEMLRLSSDATQVAVTLPGDIPGLGAPMIDARSAVKLKASMAWDLGQQGQPTRTHRNTNSARQTQHKNELLKGNLHCAQHIPTVGSPVVNQMPRTHSYCLSMGAIPKSKEKCQAKIHGQ

SEQ ID NO: 976125 - protein, 240 aa, Homo sapiens
MYERNSSACKFQGSKIDSMRQKVLVNVTNAVGCLNKYRGYRGGDQKLSLEMPQNMILWERCAGNKSVETSEETSFNEMHVTQRVEPSNSPPGTNSGSSFTGQPQGAKRVGFHERKLHSGLITCDWTSGPSNRGSSNERKHHQNIGHVPNVQTKKSILKQCYKFPKTSYVIAELPQKQGKLGKPQNTQEGEIFETQEPQQKFMSIREPSARLTQNGCGPPNIFPQIKAIPSVPGLPANLVH

SEQ ID NO: 976126 - protein, 303 aa, Homo sapiens
MFETFNTPAMYVAIQAVLSLYASGRTTGIVMAAPVTGSPTTVPIYEGYALPHAILRLTCLGRELIDTIMKILTERGTVSPPRPKRENRCVNIKEKLCYVALDFKQEMATVASKLPPLEKSYELLRARSSPWQMSGPLPEAFSQPSFLGMESCGIQKYFNSIMSCDVDFRQRPVRHHSAVVGHHHVTLIVAEGMQQDDSLASGTHEAWRSRIIGPPEAESNPRGIGRSNPWPVVHFQQWCHDSQFEILALHLTGNVSGGNDYFVTLFGTLLANKEWGTWRGGYGDRQQEDWAPHNGGVVLSRNT

SEQ ID NO: 976127 - protein, 57 aa, Homo sapiens
MRTPYTTSKQYWETRRKTLPYNKPGVKGSYRPDVPANVVHTQWYRRAYYGSKNQKRV

SEQ ID NO: 976128 - protein, 305 aa, Homo sapiens
EGVRAGGGRCMDDEEETYRSGKSQDHHAVCHDRAICDPGELTDPGGVQSPIGAKPIEGRRGRQGTITVLLPTRGPPTEPECWVSFQSTPKCGNTRTINVCTCQAQCKARKNITRLLNRGARQGFSPPSGTSRLPLVRIGPRKLHSGSKFRASKEAWLTQTSGTQELGPPETEVVYDQGDGCTRRVARILAPRNTSGPEIQAGGPCGAALGKTRVARGYSSHGPVAGGETSHTACSNQPLKALEAANSDPNPGERPGSKLAQVGVALVSEWPPSSQLESGAATHVEKAQTGSALRGGTNALGSAHS

SEQ ID NO: 976129 - protein, 158 aa, Homo sapiens
MGTSGFAAEVFVVPATKKRINMGDVEERQEDYMMKCSQCHTVASQGGKHTRVGQISMVSLWRKSRSGPWILLHSRHIIEQRHHLGERIHVMELFAESRKKVHPCGTKNDLCRHYEEGRKGRLSSLSQKSYYCVHTCHLPYFITPPEMSHDYFMCTILY

SEQ ID NO: 976130 - protein, 119 aa, Homo sapiens
DAPEEEEEAGGGMVLWWWGLRLARDRRSAGGRLYRACRVVHPRPWDLGSVSPRASCVFIPKVGPGIGARQSRVAPDEGEGTGRPNGRSINEPNLLIGRAYTRRQTIPKGVLDECIKPPG

SEQ ID NO: 976131 - protein, 220 aa, Homo sapiens
  misc_feature (203)..(203): Xaa can be any naturally occurring amino acid
HPIHSSSQSSRYDPSRMASVHDTGIEIPRGVHRALVSTTSDIVPHSTLCNAGTHYPNLHRKDIVPCSNLMPANSPIQNVSHARSVDIKPQEELCLRSHNCSSQGMLRKKPTGGARNDGKHVGVPTNLYKKASPSYGIVPWREVLGTFFVVTPRHVCLTALEGSYDRPLTSESSSPIQRSQSTEDALWLGRVLDTDTRGSYYRXHGTHSSRQLKPGLHWSI

SEQ ID NO: 976132 - protein, 231 aa, Homo sapiens
MSRYEHMCLYFTFLRCGVVLERYTCAVSSFLNSPHPWMQTRQGYFFTHEHPVQAIDFPHVIRCREEKCTPIDLSIPGPLSQEPQGGPQNKPCGGGPLCLMQVYGGLFALPCGEGTIVPQSYPSPGLYWDPDGPPLHRLVTPGNVHDPYVSRTISTTFWKSQLPQTCNGKNRIFLEHHCTQRITRRIFERANKVEITNEVNLSLELCNNQLHNEGHLTVATDYNPNQGSLAS

SEQ ID NO: 976133 - protein, 35 aa, Homo sapiens
MDIFKRALAITPWSTRVTLRAEHAARYQNLDCLAH

SEQ ID NO: 976134 - protein, 285 aa, Homo sapiens
MTDQQREDITSSAQFALRLLAFRQIHKVLGMDPLPQMSRRFNIHNNRKRKKDSDGVDGFEAAGATQSNKKDYDNFSHKCLVNLQCSQQTDAHLWLFFIHNNVYIYTPLITDFTGFHGRTKFFYDINKIVTVLGIIDMERHPINNNCAPTRAANHARPIFSHYLISFSGCPSFPPLYSVSIHLRACVLLQLFPVFNLAAMLCFQCSGALRPLHLSDPFACLLRTSVCTLPSLIRWDSFTPFLIILQATRSRPVTLPRLVPICAGLPPHRYPASAATCVCHLGCARA

SEQ ID NO: 976135 - protein, 86 aa, Homo sapiens
LFRLSPWKVDVAAESRASQMSAIYNFQSLLTVILLLICTCAIYTILGTQPPWTRNKTGCVGIYRGKRCARNGLTGQESLIVAVVLS

SEQ ID NO: 976136 - protein, 156 aa, Homo sapiens
SSLWPGCRCSCQIRDLVLLEKNLQAAHGVDIQPACLGLHVGRPYYLQLAQLRNLWRTVGYAQEGQRNECPGIFGTAWKRISREFYEAALSWDCWRCFLWFYDGPSYEWYSGKKSSSALFPTHHCIFECSMAAIITLLVSDPVGVLNIRHMSSMDAF

SEQ ID NO: 976137 - protein, 132 aa, Homo sapiens
MNEKLKGNTRATAYKTSVSRKGTLHPGAHRFTCRQPQRKVNEGHARHLTSTLPFGSTQEATSHHAQGQIGGTMRGTETSSVNRIGDGKLSFSELSRNTIPCSLQQTDRPEENAPQQAIVSGILEVALGYDVK

SEQ ID NO: 976138 - protein, 304 aa, Homo sapiens
KQWYQRRGPIRAGVKSGGLFCTAASRVMALVSRPPRCAPCRQERACASTFGTACGTLASVSCVIVSRYQNMSPWPERSPGITLRSYYKMYLNCRSLVKYLFNKSLYEGLNAENHKNTDHCCLPEDEKYHVFAIIINGSVGGPSVVLVIWFILSQCGVFKPKISQLNLESIRKAQLRIRESVEGRELGPANPRGERLSASSGTGDPDPWINLFPSGCIKSAGTAGRTTSEPILGPQGSVLWHSNLVTCVSYLPFWRETHTNCVRSPNLTLGAPDRAVEPSGAPKRAVNGGRHRRHALASTKTKAG

SEQ ID NO: 976139 - protein, 85 aa, Homo sapiens
GFGMATFSGPAGKSCRLIRRKMSSSTKEVAQVRKRINPWKKKEQVIRGVVYVRHPNYTYFEENPRSFHISPSCAICDTVSVLSRM

SEQ ID NO: 976140 - protein, 75 aa, Homo sapiens
RCVGLQEKMAVSTGVKVPRNFRLLEDLEEGQKGVGRRYQLAWAPCKMHEDMTLHKVATGMIMWATHGQIYCNQNI

SEQ ID NO: 976141 - protein, 312 aa, Homo sapiens
AWCDPSCAVVSGAASLISVRLLSYLSAAGTRWKIRWTWTLMPPEAPEHIFSVCELKADKDFNFTGGSLHDTHEHQLSLRTVSSGAWLHEAWSCTCGIQRHMNYEGPVHINVTTGNFLTQLSVQPKRFPLGGASTLPPTKVVLEGLEVWFKGQCIIPWTRTIVAVEEDCRVRKMTEAEGCDLLNVYLARGCPEVVARFPRQQTGKTLSAYCQMMHADDAQALIDAAQLKPEERKLENKPGENQRGYPATLAKVIRGKLNLPAQTKADSQKGNLKPRLWRDQTSAHKALQASNRNRAQTLAATKSHQHGTIEHV

SEQ ID NO: 976142 - protein, 104 aa, Homo sapiens
ASLNRGETKGVGGGDLTVVRISLFSALFVGRFSGNPKVGCGQRAETRDFRKWATTKGGSRLAEEAGPLHVPPVGAGFHSATLKNLREGPAQWTVVGPTWPLCTR

SEQ ID NO: 976143 - protein, 97 aa, Homo sapiens
PVRRPKRLDLTPVHITAMGSQHPLCRPPPAGESKKDDQGRLAVLKREQEEAIAQFPYVGIPGEDSINLVLNVPGGQATISNSSNVNWTCGWLVIPHR

SEQ ID NO: 976144 - protein, 108 aa, Homo sapiens
MGNVKVTSVVRCGNSHLKSATQTVFIFRFWCPRNYQICIEPLLVESREVLWARHLMRTLRTVAELTGVSDIGHLKHGEVQQLDMLSLIHANISHDQSDRGEAGGGRPE

SEQ ID NO: 976145 - protein, 185 aa, Homo sapiens
MTDAMSHGAPQRIADRDETVIIDQLDFAVGTKPPFKSTRCIVRRVNNHFISTTGRRLTPGQDGIEQLAQLSWPSETQFALHIAARGKVILENVPKKGTPLALKSYPKITSLTGEIPVEATEGIAKWGRAHPEASHIGHWTSGGQEPLLLLTTQQKTLDKGTILNARGTPNMVCLGYDSQRLPRTS

SEQ ID NO: 976146 - protein, 117 aa, Homo sapiens
DREQFRWSGSSRSWTILTGFYVLGTSPLSLPPPPDALYSDPPSPGYRHFQRRLVIVVSVVEATYHWDYGSFHSGDVVEEGECPPPPRWNVTPLPKWTCMDFYLLPRLVTNSLGVCRW

SEQ ID NO: 976147 - protein, 102 aa, Homo sapiens
PDVMPSCAVCRSGGSVLLSPSRLLSVPKCVRHPMEDSMDMGHEPPVRRPELSFSVCELGGRPKISHSKVDNDEKMSTSDLSEAAVRRAGAKDEWHIVEAAGD

SEQ ID NO: 976148 - protein, 68 aa, Homo sapiens
MAHLHRQACKQMRATTMHIQGLTQEEYPPGAKDKRGQKLDPCRQLRTTRSNREKTKAKTHAHHARRTV

SEQ ID NO: 976149 - protein, 142 aa, Homo sapiens
MGCHIMDKDIVTYVRIITRVWAGGNMGELNCGFQETTIRTQLPVGDHFAYIARMPRKPVRSRPCSGRRWSRGLSQWNERTILGLLHGYLVFGRCLNPILESSRTQPVAVAHVVQVPVRPLSLLGIIGLRSMTPTVGCEDTIP

SEQ ID NO: 976150 - protein, 115 aa, Homo sapiens
MVYRKQQTRSSRSRRETPGAFWFSYMGIADETRECAHMGFFHIRGCAPRHVMELGGILPTVPNPRAKVSCQRAVYCVLVAQGPLREAAIFGVKEPFTNEGMDLVSRGSEPFGLGS

SEQ ID NO: 976151 - protein, 96 aa, Homo sapiens
DLCRAEDEEETTFRMESNLYQDQSEDKREKKEAKEKEEKRTKDETDSKGRREQLVDLASGGQKSPETMREQRAQSCGQIPCVPLPGSPPEDASSAP

SEQ ID NO: 976152 - protein, 522 aa, Homo sapiens
MAEDRESSSKSNTDRMTDDSKRKIHCLPKKRLNMEKQGRRTRNEACAANMHCTFHKHGLLILTSFELYNFVRCKEVGSSVNDCAAPLHIKELLTTKAVHAFPICLSIWLAREGKKLACLVDRKKWGGKKWGGTDSELYEENKLAKVSAGRNAVNQKCLFFESTVTLHLSHCPLLAICTLRGFTHPQKYNNNNKRLCAPARKIPNTVGGAPGYDGECKHAHGVVPKKRAGTKMCVMHALAQHIQASQQLRVRGTYEGEEGRGKGKRREGRGGGGAASGDAADGRQRQRRRSDARRKRRAHTATDTTKTTNKGRAQRKQGATNEAGMRPRREAERRTRAQETNQEKQREGRRLAADGRETRQRSEKRREKQDRRKETEEQEQHRGERAKARTRKDATRGGSRTQTGNTTDPQAERTRNSTHCRTRQGQQQTRTQEDTPQHDASRTGRPGDDGRRAHKPTADDEHRNRREHQQQHASHNSAGDSQAGSRTPPGRSGGKQADRRHAQGTSAARTSSRATQQHQGAQ

SEQ ID NO: 976153 - protein, 162 aa, Homo sapiens
MLAAQAMWIHDDTQDLGCTHRKDALRIMPAISTRHHSYCVHENLGICARRSGQHNEENLQDPMLYVVSITLGRHAFQADPRVFGTSATQFRVKTNCVRPWYQDEDLFCSDSSGIRQLLIQELDSVILACAGSQQWSALLSEFCCSTDLTGGGRHGRILSAGG

SEQ ID NO: 976154 - protein, 41 aa, Homo sapiens
MLNTIGGGPSDRNGIRVHRNWSTTGVSPQHTRGAGHNQQMR

SEQ ID NO: 976155 - protein, 189 aa, Homo sapiens
ENQKHIYYITGETTAPGSEVSLLVYRLRKHGLEVIYMIEPIDEYCVQQLIGMGGEDFELSVTKRRPGTSMRHEDEKNEAGREIRTKFENLLQIHDRHVGRKNVERGGGVKAMGDISSAVCVTSTYGWKATMDENHESSSPKRQLNNGFTWRQEKHRGDKPVTIPLWRPEGNQAEVRMNDKSVKALVNLA

SEQ ID NO: 976156 - protein, 156 aa, Homo sapiens
  misc_feature (156)..(156): Xaa can be any naturally occurring amino acid
MDAIEKAVNWPSSIVDGIRIHSTYLYLAGSMGYQACLHRSSKKPGPRDSLNERPWRTTIGCDLAAWLELEAGRIYIIPARQAQTCWVHIRVQWGTVVPLKMGALLTRPDTRVLGPQCVSRNLMPGDALDIENTPGRQGRESLSTQRASLPYELFLX

SEQ ID NO: 976157 - protein, 69 aa, Homo sapiens
FRYCAKMVEEENIRVFVVAAGVELRRAVSLQIKVYLCVSGDLVKVYRHSYRKSVYTILHGHRNLVTESS

SEQ ID NO: 976158 - protein, 160 aa, Homo sapiens
MRPTHRGHYRLWLLEQCNSTVNIPRTHCISPNYIMYTQVIIDDHSLSVSLPSPSKQHSKREAESAKQARRKRKSENKRAERRARGHTEKQTRQSNRKQKQNRKGCENAHDEAETLDKTEQRTTERSSQDEQVSRASTENDREKIINSERESKSGDKLETQ

SEQ ID NO: 976159 - protein, 169 aa, Homo sapiens
MASTIKPYTCTYLLEMHPSKGIILVTHWTNNWPMYSGTLTTKADLKEAPTVWGSTQVLGCTWIYGRDVWAYGKCTKGILFEHSGMILKRNLRVRNENNTIPCYCNFRTWHKRPARKYWANFKTYGGVLTNNVDPPTTRVKRRKTATWTKLEQTRISPQEGCPWPQRNVA

SEQ ID NO: 976160 - protein, 203 aa, Homo sapiens
MEPWPSLDIYTRETGPLENPQPEGTYSDATYNNKLVSYSTGSSSKLLTRTLTPMKVYNITLVKPCSGTRTPWSHHYSQWAHWMPRNHGAHTEHRHDKRNNMTPNRENQLAPQRPQHGTNARHPDTTPTTDASASRHTNDAPTTRPKHAGEKRTDARADQNATPHHDSRESCYVLENIYVTAQTTLTRDHDAPSHSHDPGTQPC

SEQ ID NO: 976161 - protein, 67 aa, Homo sapiens
MPSASRSPPGRARRKRQGERSKRPHSDETTDERQTVAAREETTHNNNQTRDARDKTKSQHEPEAARE

SEQ ID NO: 976162 - protein, 104 aa, Homo sapiens
MSSKMEASVEFLAVSVSILDGQVVKLWYARGGPLNVHQGLYIASCGLDKLIIYHNKGDLIETCNGFVIIPREMSPGGSGASNNFVGKVFIWTRWVTWFQYGTWL

SEQ ID NO: 976163 - protein, 136 aa, Homo sapiens
MRPAYAVALWRYTGVTPRPSGTFYTSDGTCPSTAQPRGRTPYNQPPHPKRTPNIRPPTHRPNQRGHTQTHPSNAAAHRHYNTPQHTGRYNSSQRASTRPTQPTPQLVNENKHPTAARRPPALAPQHPHPHPDRGYS

SEQ ID NO: 976164 - protein, 68 aa, Homo sapiens
HIMASVANDKAAHDSPNAARVTEGGEIAGIARQRGCYTHKQLIYIVAPVYELACGHMRGVVVEIHWIC

SEQ ID NO: 976165 - protein, 66 aa, Homo sapiens
MSQSRKTRYDEGANVMQEGFQQYKGSRKSEVALLVFSSFVISSLLLLSLRPRTSVQRHTIITRQPS

SEQ ID NO: 976166 - protein, 211 aa, Homo sapiens
MTTRDDGLWRCWFTLVRANSVHQRIRPHNGDYSDIVDTPKKRGEPHYKRQRTHTGNASQGLFLPKDYGGLWRIQVPPPRNHTGHKQEGDLHPLSHTALRGVTKKNTLRRAPQQREPGPRDPKLWRPGPKTSFLTATRGETQRRGHPHRCARHSKRRHTPPRCQPRADQLQVGGGLPFKSTGSLLTKSTWPDPGETQQQQAVTKATMYHSTP

SEQ ID NO: 976167 - protein, 109 aa, Homo sapiens
MVAKSAPSYSSCQETTFQRKTAPIDNIIRAVDPDNCVLLGAETDCSPHSQVLNLLWALHYHGSCGHQNKHQGLWLAGGAIPSFISLFGISPIAPPQLAQAGLGPDNIRK

SEQ ID NO: 976168 - protein, 525 aa, Homo sapiens
HVDPECSNQSTTPTDTSARRHGNTHPHDVIQCLNPDAGTRTTLRPRRRTEPATLCYYHTNSNPIAQAKVRLTIQTLPILTIQERALSAKAALLDNRYHTHDSVKIGPLSTTVHDPHCYTQRQLEHCRTMDPMQLQHDTTSLVLTTRNQHRYTSRLPDIQNTSYIRQHPHDHTTHKQPTAAKPQHIASGHQHRTHREQNTRQHEGQTTQLTHTTPTTPAQLHIKTNEQETTTTLTNSTTARRNTHKHDEQQTTESNTARPRSNHTSGTNSTNARLTPQHSAPRYTIPFTHSQPVVNRSTYSTRTENCSSTTTHHSNSRRNTRPTARRTRYTAEEHTNYDNIETDDIERLTYTYTHRYNTHRTREQALNITNETANDRHRLGREYRVATADRETEVLDSSTAYELQSAAPTDNSKRKKPPEPLNTDTYNASAKPSKRSASRGDRGHTARAHAALDRTTDEKRTEQEVQQRSLTNSQTHSREKLATQPKQKHTAASNTLVPQPHTPSTPHTNTLTPQHHITACHNTLN

SEQ ID NO: 976169 - protein, 238 aa, Homo sapiens
MQRNTGQSEKRRTPRKGRRKKRSADEDTRERSETHRQERERRTRRRDKKPEDTEKTKRRDEPDIDNTTRAEQTRRRSTNAEGRPPETGRNEKDDETQREHTKDDVERKAAGRQKSKKTRANTHSRHNRKHRAKADKQERTQNKTEKEEREETEGEEQEERKNKKMSPTRRSGKQKEKTEKKPENRETRRRTTRKKERQRNRKKDNQKRKEGEEERRTTKAENKRKTHRSKRHDRQTTT

SEQ ID NO: 976170 - protein, 95 aa, Homo sapiens
EIGASGTRRKGGKSAGGEARWGNQEETGGGFRKVQAKTPKKKRNRCGAGQIKGHATSQKGGGRHGTEQRAPDSPRAPGCATGDHGWPQTKGNRDS

SEQ ID NO: 976171 - protein, 104 aa, Homo sapiens
MRDPVSSQYSSYSISGGCPSQQLDLSDLEGWVCQITANYKVKDSSMSGNNDPGNATCSKTSENKPWQVNGLLEYKHLQLLESSHCQHPLPSNWTRSKSKNSIYA

SEQ ID NO: 976172 - protein, 155 aa, Homo sapiens
TDYVTHQTEASCSQVNCNLAKGAHKAHPGACTNHDLNVATAQLKIRRLRWASGGPRLRYIMCRSMHCSVSGLCEKDPPSDSAGPLDGTSLKKHLTISNPIFSAYAVKTAARLPRKPYRPSRMLSFRLRKSYMRIQQEGSQLHSVEDSPETNTDGT

SEQ ID NO: 976173 - protein, 108 aa, Homo sapiens
MVKAEWLVYAESCWKHREYRSRFTNEETVSFCWRVMVGVIILYDHVASSGSICKISKIDMTRLSHKFLTDQSSINSCGTGFRTMVSGYRTKTFGVLRLPPSQLNPCGN

SEQ ID NO: 976174 - protein, 339 aa, Homo sapiens
APKGWRWRTLARSLARLKSESLVSRIVQLHMNSNSNESQSEGLVKIQVNQGNFCEQRLQETEGEAKTLRAIISRPLKDLVNMPKPGVLDLINKAKLGRMECPWQACPKEAARQELCGLGCQLTSFMWNPLVTVTAWKQTRKFTVGLKLWVGDLRKIGSTKIMSTGHNTNHAINPEMFMTLLRALRRCQEGGLNHHVVSPGIGVSYTMGTDLDIISPDFPRVLIYEHVTYADRKTGAAKISTQCGDTPRDFYTIEYNEELQDQQLATNQGDLHPRHCICLCYLQFIFLFMSKSDDPAPPEFYRTHTTHYRNTSHPDAPTPIRSPPYPSLIQSTTDSTPRS

SEQ ID NO: 976175 - protein, 154 aa, Homo sapiens
IGAKAGIGELPPADSPLSSRYHVSHARDFPRLRNSDQLRSTPALSMDIKSNTVTDSSGETAFLQVGQCPGRRLWHLPATQARTSNGTPTEDPSGALFLCLFLSPQSFLVLSWAISRLQSLFLLSGCVSSETQTSSPCTNLKAKTSNFFLYHVLA

SEQ ID NO: 976176 - protein, 267 aa, Homo sapiens
  misc_feature (38)..(38): Xaa can be any naturally occurring amino acid
  misc_feature (135)..(135): Xaa can be any naturally occurring amino acid
MMVLVHKLGCMSVIIKIISKPVLPFILHSGLVIWNLTXIISPQVGSDFMQRNSSIYLLKGLGRARNLGPPLGLRLTLTHLGLDIWCTPRVLPQLRRRQRSSAPQVPPRHPWTARGIHSTLLMVFSYQCAFNLFSXERCDTATRQRRPTDRVDQHYRRTKTTYARLLLDDTSREKSRRLEKGRVYTQRTTGRNANDSRDRPKSHIQQRRAAARQEKRARDGTERPGKRDHNSATRRTETYEPAAPPTNRRPHTHTSKTNRRQNTATHN

SEQ ID NO: 976177 - protein, 144 aa, Homo sapiens
MRHQPQQQPQPRQHKRQQHSEHQGTEKPQQAAQPRQRQRETTAQRKAPGHAAAPTRGRRPQSRDSTNHENSHRASAAAQPRAARTTTDAPGATNQYTPAQGTEETERDTPNATDERKRQANDADRLGAPDTRGGRDTTTEVYEQ

SEQ ID NO: 976178 - protein, 32 aa, Homo sapiens
MGGKTFEPCDNRCVAGHIIPAGDWNHKGQMWT

SEQ ID NO: 976179 - protein, 279 aa, Homo sapiens
RPLGQDGGGRVGAATARGARAQRSSMWWGARGGCRLAALVPACGTALSAGGQRVVQPGVDSWSGLPGSRVDPWSVVCPSFLASVPAGAPRARFGCAAVRRSGCPPGCAMTCFGEAPGVPTRVRSISRYGYRAHGLVWPARRFFITPGGGLRVWPTGVRGFFAGESGNFPGVTWYQGRTLFNAFSWGKAVPPLCDPLIGTSNTAWQVVAPNRGGSQEAFGFRAECAAPSIGERTRGLLTPKRTGEEGRRGRKIFWFQFSPKGVLTFMGRGLGFYFEEGTP

SEQ ID NO: 976180 - protein, 133 aa, Homo sapiens
WTGLPSPKPCPRKPTASPAAAPLGLGSHDLQGPETLSFPSPPKGPSQRSYPVLSPLTPRCTECKASCLQQLPQFPTCFRRPLVCCSGKGLFMGMFLAGARVGVWSHTLAKFPEDEGLSPLCGDRHSVYDLSSC

SEQ ID NO: 976181 - protein, 257 aa, Homo sapiens
PVETHMSRKVNKLKTKKKRHDINIRPSGTHTHQHNFTHRQEQQETKKTENELPHRARTTRSKRTKTEQKRGERDESRRRQRITRNETGRGNRDREQRRSREGEEMRTKQTSNRAELRNLQYRNMRCIRSTMETGTNSKAVGKTGQKDEADKHKHNTIEEVERGRRQRQYNAAETNHRSIENVQRNEEESTETTREGIREDEASKQLEPPERHNKTATTERERKDTESDSNTGRQYTMVEKAYRTAEVTTESNGDAET

SEQ ID NO: 976182 - protein, 248 aa, Homo sapiens
GLRPTQPVPDGAAGPGLWSWVRRVGPGGDGRSSPPARWAGGWHGGARPALRGPKASACEACAAARFSFPGCRVLCRPIVFGPAGTLSHRRCILPSSCCREGNLVLCRSLAKFRRDFNYPGKKSGFLLQLLRPLFREEFFPPEKQRDPQGLVPQGKGSRGTILCRGLRRLVRGPKKGCLPDSQQEALLLDAGEGFRPLKEWRLRDHKQSAGVNKPRINCGTNISSQAHKFPFSPDLWNGHRHPEDAIIA

SEQ ID NO: 976183 - protein, 111 aa, Homo sapiens
RREPACRSRDPSVRSPRPGTGSAPPQVASIRGVGPGIPPEAAAARASLARGRRRSSAREKGQAGAGAGNEGWEGRKEGERDQGGGYQGRMDKRALRGEDPKSPYKKPKSLS

SEQ ID NO: 976184 - protein, 216 aa, Homo sapiens
MLAPLSTTYVNLCLCGIYGFAFGGSAPILLETLMDLVGTPEVLQAVEMVTMWNAVLSILGATTYKVGLNGHVVADYKYYITVACGVAPKSISGIYRLHWHGASTYRLLRKETMNSNTEQNKGTVHEAETSHSMSAGGKPKHDMFTKRACQKFLPVTAEQDHQHETRDTHGMARRHTSQGPGNPQLGALQRGYHLDGQFPFDPTGILLEQHYSYLGP

SEQ ID NO: 976185 - protein, 367 aa, Homo sapiens
FYLVALLRARWVTSMLYLEPPAKIRPWVLSSMSVVLFKPGTGLILEIWPQLLCRHVISVRYRTGYRFHLRQDPELSSIGTAYWRRPPIIHPSWNILRPDRDSQSIIKKSNQGSHGKPVSTAYVPPYKGHTGWKQHQQRHRTNRGPINHRKQGPASHAPNMGTHGHSSKTKQRTQKDEQFIMDTKQRRSHGTQIPQGTHTHAFTSERQGNTSHGKEMTDPATHTHHGVIRTAINPTVANGYPRPKRTTVQQSTIPMGETRRQRHKGETNTTRNTKERKDDPAGTKRCNHTAPRSTTTTSRRGPQPGEACNTPPTPITKLSTKQQQQPRHTKQPKNKHNQTHSWHHPASTPTTTTLDRQHNKTKQQPPP

SEQ ID NO: 976186 - protein, 449 aa, Homo sapiens
MMIGRRNRGSRFPPWLSASIRSAHPCNDTVNYPPLSTQFHAPYTALTSRGKPQWSISMIPIHPSGQGAQVAITAPAHIPGAPHHSAHTPCTKHTTGHGHLYVIWDSSTLNIKDRLRQATTLGIWGTCIFMQFPMAFNVKRHKIANRKPIALGTAPVDPRYIAEQEHTATLQQNNANAHHGTTAQEQQAMDTTNVQREEPSATKGPTWSGSAWEQQDAPTREAQQGVAWTKKALDHAMVGPNNGRALKEPETAHHMKHTHTNTHHDTWPTQQQHTEHNTSHSRKTNNDTDRTQEAHNEEKRMNRETKREETDKGAQREEKRRTMTHTQRVTQEKQRETTTTRIREKRTQQKTTPVRKTKRESRDKQKEEQNRRGHTTENLPQREHTTKNNKQSKRQTHEEEEEERKTNTKKTAKDTKKTRNKTRGKQKKKRGTEPNTKETTKKTTTKEAK

SEQ ID NO: 976187 - protein, 35 aa, Homo sapiens
NQNHHHTNNHPKNHAYVLWALLLTEDERRSRERGS

SEQ ID NO: 976188 - protein, 346 aa, Homo sapiens
AISRSPDILADAVGWGPSRSYTARNDGGRKRQTNTHVLESINSRLQLDTETVRNRYVLEVTKHDSDTTDHDNGNTRQLVITAKQMAQTLTDNLKLEYMLMWAKHWMSITTVAHQSLTLGTAMRHNSLPAVVHTGYHGSKVTLTIHQKHAKNRLVTTVTLNHLTKFHLAHLQPAKHGPYQVNMGIENTTQQKTTKDNTRGGTQSHRHTDNRHNGRDETEPRETEDAHTGHNENQTEKQQKKATQVTANNNNNKKTHGVHNTRMKHNPPESPEHKGKKKQGPKKQRDKKNNKEGTKETREEKEQRTTEAKNKQPTTKRKNTNSTDNHATKKTTTTENTTETQNKKQEK

SEQ ID NO: 976189 - protein, 151 aa, Homo sapiens
MHDIDTKPTYKHLAKKYLSALGSQRFEDLHGGTTTCYTDETDIGRKTNTNVKETAVTKHNNQGIEANRGKNNKTPNCEHGEKEHQWVCNSHPPSVQRKNSHSERTEKTNDPDAGDQPELKERPREQPASRPTGDNDSEQEVREIDEEANNT

SEQ ID NO: 976190 - protein, 84 aa, Homo sapiens
SYGDSVCLRIPRSWSEVGDARFTDAVAETTATSPPQAIVRSVEDELRSVYFEETIARHTFVAYMVTQDGPLLVGKGGSAFKYHN

SEQ ID NO: 976191 - protein, 105 aa, Homo sapiens
MTDRAGVNHIIVQCTGCTEKLLALRRISQSSRHGAITEMSRRFNIHDKGNEEEIVEVELMDLKLRGRKRQSKMYDNFEKVSVNLQMLIKQMPICWLFVIHNKCLD

SEQ ID NO: 976192 - protein, 196 aa, Homo sapiens
MGRAEYGARNGSRHFIHSHFGYREVSLPCMFLAGPCIGGIFLIGNHTSGSCSFAEPMKKIGYRMGCLGQGAFEVPSGVLWAKFSMLPFRRWTLKGYGRVITDYPSRRQLISVSVQLNWSHLTALDCPIGLWTADYIVASTYMGGRPGSGVTAVRETMVRDGAYTEHSKPLTGIVVFPPTKRASGPTWGTLLLTDYQ

SEQ ID NO: 976193 - protein, 314 aa, Homo sapiens
AQFSVFRMWARQCAPKGYYGTTFIELASTTGESISMLSGTGRYVSSSHSGCLPVIPTTSDTIDHSTAWIDASWCPKQGCRLHPWRQSFKQHVSHPRPGTPAQGSPSCKGYMCATSTLDQLARWTFQSQMLPTSLLCPYTSRRNPVVLNCKVRLLFTDLDYSRTNFIPLWLNTTTWSRSRSFWRHVISHDRGPRARVAALTSERAVSFVAISAGRRSRSSFGPYVHFLLFCGQTGKVSYRSWTPSPPLLSVIASSCLTGNLRGNTQSVSHHWEYISDNDSSAVWTRYFKMISLFDSSVVIESDGDRVLHAYTQIM

SEQ ID NO: 976194 - protein, 277 aa, Homo sapiens
MGMQELSGSFNNRSCREKDSTIICRNLQSSDTSVESTEVLPAKAQELRISENQNCQQPTMTGSAKVHPSSSPMSGRSLNLYPDTEGIIQQHILKDVDSSIEQLMVANDGYLQKAKIADGGPRVRNTLVYFLDVLSSRRIEFTKNPKQQALSNMKTGTNQTVWIVWSTHEWARHHSSRKNVFQITTVSGPGVPSNSQIWTFLISARFHAINNALDRLGDGSRVIRKLDFQNPKISQPELLSPTQGFKHEPSQRTYVTRLTVDRETVSEEDTDTGWKVN

SEQ ID NO: 976195 - protein, 66 aa, Homo sapiens
SSIRLAREISVSVNMVIARYLEILVNDECLDARPYRQNALVSSRAVYMIAKNRHILEVRRGEYTGF

SEQ ID NO: 976196 - protein, 31 aa, Homo sapiens
MCNKFRTMYGYTSETSQPLVINIELVGPISG

SEQ ID NO: 976197 - protein, 98 aa, Homo sapiens
GWLMIYAGWARSVLWRLACFESLVSSSYCTYPRGCCAQRLRDGIESPNGTLRTSEAPVTFPEELFLSGCERGSMPSESIITFDYRAVNSMIMMHASYL

SEQ ID NO: 976198 - protein, 294 aa, Homo sapiens
VGQLGSMASVTLSEAEKVYIVHGSRKTSVWMAVLWGTTRCVERERLMWVSQHQWVRQGQACVTQTILVGVEQQKVAGTPKAGKKPNEGLLGVLWGELFTPVATPWKLKGTRTVIDPWATRDPAKDLSYRDILKPKKQAVFRTLKGTLLDLVPSGQPTWLGAPLNCGTWLRGYRGQVWVGTKFGLRLPIYPIGLGTQGLAFFFQSNKGITPTGVRRSRSSADHARGGPAQGTFWTCVARFDPFYGLVFRTTGVGRQLSPVLWVPPCATTGGYPAWWADATPSRREALSVGRWGGR

SEQ ID NO: 976199 - protein, 84 aa, Homo sapiens
NDARVPLGAWCKFDMGFLCDLVVLGVADHGLILTKLKDCSGGTTGAVREARCTSVQSCIERLIAAGPDPDSLFPPYGCKMSFCY

SEQ ID NO: 976200 - protein, 321 aa, Homo sapiens
GERKASGPVPPELRRARPPRMQWAVAGVGWWAALAPWLVASGVLTQVVVALGWGTAGRFVFQRVRSIRASLAARRLRWGLCAQERWPFPLRSGSWTPCAAVCNPQVASRFALSPEEGLASRWAAPVDTLPRDEHWHIGRPTWVHFPVTGHRAATELIMVRVATSGATGLFGVLSLRAKLRGAAHISCGAWQTSLRAFPKSNFVQVDTNRFCTSRGFGNNTGDNPTPKRRVDKCYSYEITPQWCVTEPESETYPQRGPHVRLEARQNPCLVLQTLLGTPKHTTCELWSADHHVARRVTYIPTPTISRQPPLGTISPRSCTTA

SEQ ID NO: 976201 - protein, 84 aa, Homo sapiens
QTLTFSRLAFQRPWWPSRKFFVGGNWNMNGWKAESGGARSGHSGDAAQGGGSARAEVVCGSATNYCTIIRFSPRGRMRSIPEDC

SEQ ID NO: 976202 - protein, 289 aa, Homo sapiens
GNFPERSVRCGGAVITPSAHIRRSFPLLSYIGLHAVPAVADGDRNNYYECFGGQTHMLLRHELREAYGYWAPKYHPDKNPNEGEKFTRFLKLTKFSLMQERDYMTKEENRQLKRVEQVAGLAPPWTSLICFWRRRKDAETNGEVPHVVHQLSVTLEDLYNGAQENWSAKNVICDKCEGQRRYKGSSRVLSQFGRGTGMANKNPSDRTLMVRQFRSVCLECQAMGTGSAKNGCYSAPQTISREQHFDVPLPRLKMPRTSARRPPVAGIYGDRHPRFRNLVTTYVATLLTR

SEQ ID NO: 976203 - protein, 117 aa, Homo sapiens
GRWRLLARPRRSLVIGWCIFGLLLLAIWAFCWIYVRKYQSRRESEVCLHHNSNFFSSNVHLSHQHFYQWIYLGFLHENSKVVHLRTGLMLSVSRQIEDTGIIAVTIVPCVPCDSVPK

SEQ ID NO: 976204 - protein, 285 aa, Homo sapiens
MCGNNIVNPVLALPSVARSAGKGPPVGGDSPVAWDRAQDSRGARALASRHAFLRGGSSRQRPTFFPIIFSGPGFWRPGVNGASGSKTFNTHYFGPAVWDLMTPYRTGLRTNHSSLAGVFHTTKEIPNSARDEHWNITARETYKPPPGAHATNTMSYLTAHGSLRASAHTNRHRLTPIWQFSPFAVSRRQSYISARTSGNSPYNGARRTPLSCLHIFTRALYNQLVGTRNTFDEGLLPAGTTSQAEGWGHVHPRLVRRDHTHLFAQHEVGSHKSRRGGRHNSTQAN

SEQ ID NO: 976205 - protein, 66 aa, Homo sapiens
MQGPSLLKAIIGLFSCLGSYVDIGRYRDVGIALKGNLSGEMSFRGSAHLTGTMKGIGGAMAGLGSR

SEQ ID NO: 976206 - protein, 296 aa, Homo sapiens
  misc_feature (296)..(296): Xaa can be any naturally occurring amino acid
DCGAGHGGEPEPGAGQRWQEAYVRVVTEKSPTDWALFTYEWHTAMTIRVVLAQERCGLAREMGGGELRAAGKVMYAFCKIEGPLTLDVPKFVLIKLDSEGVNDVRKGACASHVSSMGSVPEGGPCDHHARGDEDVERCECIMVEGGQALQVPSTAFTRGEWRFQDVGPQAPSGLCVPEEQCASEIHKGLAETLLGHKRRKEEENAVEVDGGAVRPRAGGAGRRERELRSARGERLERWRRPNRVEPQTGRTQCSSARVRRGAAPLVPEGASGPPWGLLRVWPSGVPPRVSRALSLX

SEQ ID NO: 976207 - protein, 319 aa, Homo sapiens
LRKVWAEAVHYVSGLKEDYSRLFQGTKGSNEVFLDIMLTYQKMTNTCDLSITPMKGLNEEFFTKKYSAVTVERYSEQMKYGISSEKMQQAMHNELDRKQGIHYAEGGVIDYLEAQIYVYAVLTTPWTLQKEPPMESTVRADCDEKFSENSVAHCESIYSRLENTRILQITPYKLTGTTEMGETFIVHTLCRRQDRVLKAAVAHRAVRGGNENRLLNHPKGEGSAGIKRPETTHALPAKGKTNRAVYKCRTHAAQSWSTLTRGTPRIAWPDSKRHPRWGHPQGKNSRKCRRNRHLGSKATPSATAHSQSGKRRRHKNRSK

SEQ ID NO: 976208 - protein, 73 aa, Homo sapiens
SWEVGAGRSAAVAAWDDGLSAAESGNTVGDNYLCTCIKSYKMWLGMVVHACNPSYLERLRLENHLNPGDGGGM

SEQ ID NO: 976209 - protein, 104 aa, Homo sapiens
MVRSEGLGQSGRRCPAQRLAMQYAHGGPLAQGPRFVFPLRVIRRGVGGRYNAGVNEAQGDPGYSGIEGRKKITLPLKQLYRTRYEHLFLSVFQRSKLLTLRGLH

SEQ ID NO: 976210 - protein, 109 aa, Homo sapiens
MSAVIVTHTPNLQTRPFLLTGLMGIKPTGTHCASYSTCGPCALVTLDYKDTYFPRDKLAHGSIPPPLNKATLLSGQQLVITNTGQVTFNTVTLTPMGQFLKLTRDLYTR

SEQ ID NO: 976211 - protein, 178 aa, Homo sapiens
EHSYDDLRAYTGKLKLLDSCRLMEILLHDSCFGMFIDASKQIQPGGIAEDVVEILSNFEVRAVMIVCLIPKESFEHQNHIASHRSVCGLKYPESSSVKLDLLTKYHMTGINNSSGMVDARSITSVSKMAKFHIAFKRLYFQELRRLHDVHRKIIEGFHSHPEGPNYTTINFSGISNLS

SEQ ID NO: 976212 - protein, 200 aa, Homo sapiens
MTREIPRDPFGCNTATDYIITKSTFRTCYNQKGGLPLASRNTVDRAHKEIHRGTYYTTNMPRTRAPSNSKLCVGQRRESNNNDEHYIVGKTEQQRVNDSSVQKKNIPFCNNRYHYYETALPLCARQKDNVRWPEHNTEQLDPLTRSGATPRKRTQYNAHRIDTAATTECANTHSDARAQPTLTGRTDTNKQRNTVYHQRQ

SEQ ID NO: 976213 - protein, 137 aa, Homo sapiens
ENHPGNPITAVTMNHIVQTLLSCQQRQPPNTRCSRRSRKWLCWGCPKTLSPDVHRDPHPQETSVPDHVVWPLFKHLFMNTCCLGLHSIRYSVKSRDRKMVSDVTGAQAYASTAKCLNIWALDFGHLPGPILLIIIPV

SEQ ID NO: 976214 - protein, 380 aa, Homo sapiens
GRGFWGAKSGNGVCMIFGACCIGPRAKSNTDDNQQPGQAWNLPEVDGDTETVIGANFQSSIQAETYPLIKDKDTDQTYYRMPLKRFETGDLQDATWDTNTTTRRRAAKKRPTYGDRPNPETINNLTLSVVKNRPRLRPDFLCRPTLDCKIDPPKQMMAPTATIIGEKGNSCTALTAFPGTGSSCATNLGTPTSNHKDTELERRQCPRTRTHGTKNTPGPQRSRGIPRSGDTTISMEAGNTRFRPVKYCTLGRPDAKALQGAKTVHTGYKQTGVWHIDRQRYRPRQAKGGPQHPVGSTGPSDSDAHHTNEWGLQIPTPGAPGTYSHRTAVKGGATNSSTHSDKQHKAQPTQKDDGYKREEGNKQHHTNIADTDNRSHGYHR

SEQ ID NO: 976215 - protein, 136 aa, Homo sapiens
MYKRADLEERGRMDFQVSLIPDTWCSVMCNEGDGFRACRVTSLNGPGYTRIVNMRQRRCKSPGTVAESYRCVVLKTSLTGEWHLGLMGTKFQLSTRQVLASDVRSDSNRVNHLSLSMDWWLTHVLQPQLGTSWSRT

SEQ ID NO: 976216 - protein, 235 aa, Homo sapiens
GTELRSWDFSIERLFLQSLDLRLGVLDLKALRRDSARNVADAEEHSGVIAYIKSVRCDIPRDNSNPGDLAKNKLSRTPVTTPPNEVLSPTWYQGQQVKVTDISTTFPTLQSEAIQLGPRDSNTSMWHGVWRQHAELSGQGRPGSQNGTGSTLATPYFPKSRPEHNQTNLTQKVRAIGPIALFSPHYCVSHLHSSLGQVRPFGSPHVRNKQYANPCIPLTQQEHLPVSTKWGWREK

SEQ ID NO: 976217 - protein, 254 aa, Homo sapiens
MGQDFSASAQEEIIVETWLQNIVQWTRGYVKSPGYYSAVIHSENFRHGCDVGSTHRKWLTTLDEIYGGRVSGQHSDENDGRYGRFNKIAVKRVHGQFFNKFTDRGISLMFKKQRVPFNVGHGRITGRENNRAHRVAESSTRTTMTAHIRALLARKQCNNLGWDPWTGGKWARNNSGFGIRLEAFGGTRFWGKIPEDYGGRVVHTWKATYWIGARGPPGPQGWVAVSEHAGGDVKLVQVGHGGICNRLGLIERDW

SEQ ID NO: 976218 - protein, 538 aa, Homo sapiens
  misc_feature (147)..(147): Xaa can be any naturally occurring amino acid
  misc_feature (429)..(429): Xaa can be any naturally occurring amino acid
MTSDAVRVSSCTLKETRAVRHPATTILRARLARLRCRGVLSGLGLYTKHDEILQRSLRISRIDGTRELDDSHFKGLEPTLAHIKQTPFGTGTTALMSWLISFRKEQVTRGAVMFERRHDVFTKFPVTGEISDSQAKKEECSAQTGVXKTDESEIRGITTNREQKQGPDRNKGAVERGGEAPQRGESTRHKIGDKHREQTAVDRVQASNGETTETRTAVKSREAAPQKLQCDGTDTKKSDSGHPPTEEEQPSTATHTKTESTSDHERRGDKHGATQATTTEHKERKNEEETEHENERHNTGSTASAERATPSSNISHLTNKEQEEKMTAEQHSNETTTPGKGTTTKTVRTHRRDHYRTERTRIYHDNKNDACRSKKSLHVVCIPQTKLMDCSTRKSLLDNSTTHRISVLTENFQNTENLLSQRVQNDSLXTMVLLPKIFSRYERATNEYHEHFEVARRILTSPKYCSKERESQQIRWLETKEMLRQQILSKRQRNGGSTLKTSDIKRNKSKRKNDGTRDQCTMKDDRYQSKHDEQSDDN

SEQ ID NO: 976219 - protein, 75 aa, Homo sapiens
MGIHKVVVGLVVDIWVGYASIKGDNECDFLKGHGGKIKVPLEKGEKGVNRNARVNKRLGMILKRRKLFVNFVYFC

SEQ ID NO: 976220 - protein, 135 aa, Homo sapiens
IEVDGKQVELALWDTAGQEDYDRLMPLSYPDISVPTCPSSWVGDKKDLRNDEQHKAVSLAKMKQEPVKPEEGRDYGKQDWRLWVSLRVSRRRDQSVGERGFGNGYESCLKLDVGRTKSGCLVCVNPCLQATALMR

SEQ ID NO: 976221 - protein, 54 aa, Homo sapiens
MIDLQSRYVKLLKDSTGGEKPLTYALSEKELLAVPVLDTYGGPEQGLSWRKHAV

SEQ ID NO: 976222 - protein, 90 aa, Homo sapiens
AYEVIESCDGGWIEEPVFNSCPLKVTTRSIPRVPINPQCVKIDPAKYRGVASWRGDPKGEFSYQRQLPTVVERAPSAIVVSDRDGADLCD

SEQ ID NO: 976223 - protein, 117 aa, Homo sapiens
MRDEVKYRKCSLFPEPKSPVVHVFDEYKRISQKDIDQSINLKHLVASKMLLLAYSKVALRNHICIFADKLYTSMTGLGTDDNTLIRVMPSRAEMDMWISGHPSRDSMDKSLYSFITG

SEQ ID NO: 976224 - protein, 68 aa, Homo sapiens
ILASALWLRVSDDSQAIIGPEDVGSNSYVAVGMVIAREGAITDDPGVFLLDAADDYKKESRLTCLTGR

SEQ ID NO: 976225 - protein, 190 aa, Homo sapiens
MAIHLGVPERSSDESPLCHRSCMAQRFKYTGVQKLAEFAHIQKYCCPHQITSTPVQDPHTWSSCGTVRALHFNIHVTSKHLGQLAQNLHNSYTLDTSIAFCLRITCLTSQAMQELLDKAPCRTIYEHPRTDTNLDPCNEVTSIQLGRYYSLTLLLLYLNKPLQEYQVDTLTNRAPTINSKNGQQTFAART

SEQ ID NO: 976226 - protein, 113 aa, Homo sapiens
MARSHTITPTTYRGSHPTTLTADTNSYTHRHHPVHRNYYQRITASFLTLISALNNMGSTSTYKTQTRKQTQNAISFPTHNTSIQPPTKQYYSVDKPPEERTTYDWRIHNNILH

SEQ ID NO: 976227 - protein, 82 aa, Homo sapiens
GSGEIIAHCSLYLLGSGDPPTSVSRVAGTTVATDVFNSKNLAVQGNNKKIFGRNKWCGSKNSQFGPNPNPCKGKGTGTNQKG

SEQ ID NO: 976228 - protein, 112 aa, Homo sapiens
RQIVEWRRRVKSWSAWRSTHPSETTDLSGSQPAKDPVRKYYAVDIMSGNVGIHREIKSSGRDEGRGKGFFKGYGGVRDIDLKRRLWYGGMRGSRGMQDDAVYELDEEIEFCR

SEQ ID NO: 976229 - protein, 139 aa, Homo sapiens
MNDTVTIRTRKFMTKRLLQRKQMVIDVLHPGKATVPKTEIREKLAKLYKDTPDVILVIWHSELIWVRGHANWLGPCIPCIPLASMQSTHMNANIALGKDMALRIEKDQSTTRTATERAHRKDTELAATSRADLPNGPHA

SEQ ID NO: 976230 - protein, 286 aa, Homo sapiens
APGRKPLSGAGVGLTQVQLTWVNPRIMRILVTGGSGLQANAIQKVCSSMELTSWRGLVWSPLKRPISRIQQDRRLFERSTQHVIILLHGGGPVPGYQHTLVTSGGNTGAHERQGLALGLWRWAPAGWCLPVHCIFPDKMTYPIDETMINMAPKKAIGVLVCKRIAEVQDTGLLSSKYGGTFTRVYSQTNVFAAPTKHFHHQRIGQWWLGSSQVAPWQDKAGRPWGWGQGIRGGGKYSWTGQAYQGAGGNRGEAPSSGEEKRLHKETTERGQSTGSLVKHAWVENHT

SEQ ID NO: 976231 - protein, 153 aa, Homo sapiens
SSGINAEGPLRPGGNTVRLWFGSARRGSWLSLQASTVFHLGVRTRACALQFGSRNGGTTWAFTVDACVHSASENSPKHCVTRWACQAHSPWEIHFLHETLLNTHVYPGTWQDIPGVGQLSFTPNFLYLSTGTDIARKHPLELQQSTARLPCTR

SEQ ID NO: 976232 - protein, 118 aa, Homo sapiens
MRREQGTHVAPNNGWSHKKKTPGETREQRAERRESPPHHYKNKRHGGGKPHRERRPSSENNIHPQGCGEHHRKKREHKTRGERSKKQKKGKSGPKGQTQPKSTTQHMNTARSISWGGH

SEQ ID NO: 976233 - protein, 316 aa, Homo sapiens
GRAREVPLVGGGGFLVREEKRDAHSAPGPARGGGGAGSRRAGVLEGHVSLAAPGEDGSTQRTTPWAETPRARSLPRGPCPFPLMLLLGALALGSPPRGASAPTCLDWGPQDQGAAFKGGNTTSPNYGRLGGAPPSGNNHGHMIAQSTMWEVQWHWKTGAIVGNDAAADNPRVETELGESGQRGDQSLGMGTPRGPKARQGDHKHSTRVNPSGHGGGLREQWPLSTSTKDRGAGLREAAKIVLRGQERVAPAELGVDPQRPVGQERRGGQTPIIQQQVDQSQSEILAHTDGGRGGAPYRHLNWGRGKRQRTDEQSAR

SEQ ID NO: 976234 - protein, 292 aa, Homo sapiens
RPVCSRRKLLQGQKPGVERCLCETGCSFTFSRLSPESSALQCLTPLYPFGHRTGRLIASSETCYTKTYIGSHQTGFQELTETWCAQQHTGDFWPHSHHNLGIPVSAHCKALHNCGNTGLSTSKPHRTSQGTLRAHRTQHLPCTPHGQWALSSQQCTLGGTTTQEGTTSPYSLTTARTFYSYIGQGSNGQDEGTTMVGIMANFSLTHGCTCPRTFPGLLPAYFNEPRDRILGATLNLVTKTTNHPFVRHLTNISGNACNWWSQHGTLSLWVDRARCVFQTLIFPQKYAKWLTS

SEQ ID NO: 976235 - protein, 83 aa, Homo sapiens
GCFGVQEMMAVSSRSEEFLVKLALVVRNFDRNVTAQSEKCDGSQISVGPLEDALKIDTYNGVTGMLDGPARTTYENRIYSPEM

SEQ ID NO: 976236 - protein, 318 aa, Homo sapiens
GDGVTIIVPIYEGYALPHAILRLDLVGRGPDWLTHEDPPPRRGYGSPPRLSGKSCCDNSMENGCDIVAPGTFDARDWPRCASSLLPVEKGVYELAVRARSLTIWAMQRFRCPEATSSQPFPFRGGIGGFLWASTKSYSFHAPSVNCCAVLHPPAKDVYAPTTVAGLAGTTYCTLGIAERGYGQTWRSRPWTQNNMKTHRSFVLHERMSPGGLGRHQCGPRWSTSSRMCISRQEYGEAGPSIVTASGLQRTKTSVGHPLAKPTGRNQRQRGPWDMAADAQAQGHTDGGDTWGNQKGAEGSGYATERERQRLEAHRTRKN

SEQ ID NO: 976237 - protein, 268 aa, Homo sapiens
QGLSSLNSQDSSMEMSKLTDKVQAEYRDAYREYICSDVPVEKGAPGSTTISGRSSPHSKIVTWCQKFIQGARNVIRKPESNEKGKDSEPKPDDEEESPCLMKRGDVSMYVIIRGFQQRVLPPWILSGEEDETIEISQAVGFSQARNLPKGSSLLPDRIDSLRDSGVRYQKLPSDEELNLAQKHVRYTLPLSKMHKTEKRKGTLRAECPKSPETGEETDKKLNRAKEHNSGGAPGKQGPRVTKGDHGKLPNNFCQGRAENPTCNGTLNR

SEQ ID NO: 976238 - protein, 461 aa, Homo sapiens
MGTCARLHRTLLWWELAILCLAAKYFGCYFPQWGHQSMPPKTPTSSRLRGDHYTGHRKDAWALARSLLCQHYSSSNRRTANTRLALALDATPDRPLTTTCCPHDRHRWPATPQPPHTRYITATLASHNSSNTAHAEPLAPHPRRSHAPRPHPKRHTYTPPTGTHPSLLGTYTPTATPTRRPPTHLSAHTPPARAPTTPHNLGLSRPTTWAPDRSPVEPPNSHHPRGPPATRYNTGQEPPTPSKPHNRATPAPPHPPDQPQTTAHTSHGEHRTATPPTAPDPTRQRTPNQHRPILTPRAKHPTHTHTPHHLSAEHKPTHKKSSRQRLTHIHNTRPTNIWRTPTAPTRTHERPPHNTTLHHHNRTTGGPPHTHAGLTKTTPTPSAAHAPRQRHRERQDQDRLVNRTSRTTRTNTTQSSDTTTTHFSHRTHRHQKTFSSPWSLIYLLPPPDRPTEERTTQTDRE

SEQ ID NO: 976239 - protein, 159 aa, Homo sapiens
MSNIRPHNQKVETLNQYKHGKAADDDRSQQNSTQLNGQEWTTQQGAEYKATTTENERETPTPTHKDTNRQNKQSTQYKTQHTRYGAHQRNDYREQADTTSHNSTTPQPREQKTSERWHNKHKKMSEKTHSTHKSHRHDSSNEAANRHQQGEQKKQTHSN

SEQ ID NO: 976240 - protein, 147 aa, Homo sapiens
TRATTTPRGTQNTARESEPWTNADRTIRRLGAMETQNEKEFKTQIINKMAHARGKHDRLWHATNNPRDRASHQAGPQHRRDTPYNKHKSTFQQTDSHAKIKPKSKPCPARPTWANRNTHSAQNIETIEKGQNNKKQWKNIQTTLHHT

SEQ ID NO: 976241 - protein, 69 aa, Homo sapiens
AKLLSCPNGAIIAGLGIRRISRNDEHTKGGRLAKMKQEPVNTCKIGRDMANRIGAFGYMECSAKTESME

SEQ ID NO: 976242 - protein, 289 aa, Homo sapiens
SAPVSTGSVSARSYRRMSGGPGRPRMLAEVRGRRAIVIYVRAAQTVAGVGMPRRWGPGLSGRLDTAIVARAVVYCARAPSCSLRPFQAAGGAPGVGGSLWGCSEVGDVLGVAVRAEFKRRKDAEDTTRGPQSKESGGEAGEDAAKVEPGSRRNLNNGQRGGASPWGSSGKENNRSLGVETQKTRDDSVAKGPTGRRSGAVGGDPSYTEGGDDSGERLLARRGVGHLGVRARIGTKSHRRGMVGTRRVMLARGRSMAASGENIARMENRLRMMSERRIRPWRLFQETVVS

SEQ ID NO: 976243 - protein, 221 aa, Homo sapiens
GRYRRSRRVCLIASNSVMRRNQIQVESTIQTYRPHLRYHSSAMTTLPGTIYLGHLLHNLGTCQATVQNVGSAPILPNQHIEPPKISSGTSFHQTVKRKPSTQPSSHIRYLARPIPTPYPLLCGLTIPAPPMHTDLSDTDVTHYLPAQIRPRTQTSRQQATTQPVPQERSHNNPADARPPAPTTQGHITDTHTCTHTTHTKNPPKTATSTRYPVAPRTDTTA

SEQ ID NO: 976244 - protein, 66 aa, Homo sapiens
QLAEWCLPRWSGRKRRWTNSEYRNQEAESAENQDESELLRVPDGGRNQLCPKRTIPEALLEESSLR

SEQ ID NO: 976245 - protein, 205 aa, Homo sapiens
MAGTALNLILSDIQFRIHDYRISSRNGGLGIITGGWVISPNLMSRLDGSVCEQTSYGLKNIVTFLRRTQWRIDRPARHHRATPKWDRTFLREKTTMKIEVEVTPQVVIGTRRGKLKGNNLGQPVRGNNPMLNSGPHSQTKRPKRGATHEDPTGAVNERPPTRTTGEAQTPTPHRATPTDPKPPRRGTNNSEREQIGKRTYSLDSQ

SEQ ID NO: 976246 - protein, 203 aa, Homo sapiens
QWCSEKTSLHVPTSASLHAEPASAGAPPRRGLRKIHRQSPLNLSLSCSIPCIGLNGRDTTTDQTDSPQDTSPKNNHQDTIKRQRRTVRRTEATHMRNTPPPANTRTLPEQLAEQSAPHRTTPEHHARVHRPTTAQHARDTPPTPRRQHTTGATPHDTRTTPPPPTAPYTPAHAAHASTLDTTRLPAHPVTTTPTATTPARRHT

SEQ ID NO: 976247 - protein, 104 aa, Homo sapiens
MIAPQLPPFEDPVYLNLDTEGKALNPPKLVKPAHGLRPCHNKNGHNDTPNQWPAKKLNICGGPNKMNSQNAEGLQKRPRINHMARTHAPPEAPNTHTTTPTPHR

SEQ ID NO: 976248 - protein, 116 aa, Homo sapiens
SLIISIIPLLFFNQINNNLFSCSPTFSSDRPKNPLLILTYRELLPRHNHGKPERTLIQVNHISRKKLYLSIRNLPTSLLSYNIHRHRSNHILYPLRKHTYPHLGYHHPSEATSQNA

SEQ ID NO: 976249 - protein, 192 aa, Homo sapiens
MGLFMVSYRRYLGKMIGRCKTFRHNPRIALGFRNSCCEILGTEDSTSGRLHRALSYICKFESGLVTILQHDRTPISSGQELPQFSAHPERIHNIQNTNSIYEPAEKTNCDRTHTGGHQAHLATIGHRVKLQEKDPENKTWGQTTQGDNAKKTRKPEQVSDPSITTLRLRRTTGDGQHGTHTPPGTLEVTDPR

SEQ ID NO: 976250 - protein, 293 aa, Homo sapiens
MAVGSSTSPVVTSGQVGALTHEGFQCAAPLVNTHQVNSTFAVQNEKTQMTKIQQRFVCGGPGAISKQSHKEHLGGEGRGDISRLAQDRRYWGFTERGTGGVRKTRRGWLVPPQRGKKKTSAGEKPGGRFLAEQDRDRTWSAPTEAAHERGGANLAQSRSVHWADSVQYTKSCALATRGGLDKTTISRRNFERTRQQVVVAATNDTIDALATTQTHPSTEHCISKQSSPAFQTHTQCTAPAPPRSATHLRHVPHTTLHSNHATAECPSIATFKASTINGQHGNRNRDEDDQTDN

SEQ ID NO: 976251 - protein, 49 aa, Homo sapiens
ACPLSRRAVGCVRVPGDGDMIGARVPDERVAPRLVETRACSGSRGARCN

SEQ ID NO: 976252 - protein, 290 aa, Homo sapiens
MGLQGLIAAQYRGLSVRCSPNHPIPFGQTKPHPMRLSPQNILPGTDPSMFEGDDGSCGVMRATPMCILCEHMRSCGPKFIQRQQPRVVHRGVTASAGVTDIVPPAQYTGVYPTPGPVNGGQQTKKGPTDDMHIGRQVKATTGGLRECSPPRQPGLTGGPNELTWGDTHQGGTAPRQRASNKQEDKTPSYRTGLTSTNGVSLINSQYGVLGQKNGARDGQCDKRDGPLKDPEESPEKNQPGHEREQTADQKREDNEGTARQKSNTRKKATDRARKKRQNTKAGTDPTADTC

SEQ ID NO: 976253 - protein, 113 aa, Homo sapiens
MNAQSPARAAGTTLQHYTHKNGKQAQGEHTEQQGTKSKQHMTDTNEQETPKKAKNQPDKYQNQITHSTRHTRITSKAKNRISEKQSNNKTRTQTDEKDLDDNSHPHSEPHTDI

SEQ ID NO: 976254 - protein, 322 aa, Homo sapiens
AGGALWPPGPAPQRQESHAEVQRRRYGRGARVRAGTRPQGGNPIADPGGPQVDYKVSRKPNPSLIGGFLRHNRRVLTITGQYSSFNEAGSRHTGRAFSPYRKNSSANGEKFIGKGEGILPLYSFILVHKVTLFGERQNSSTRQAWSSIRKVWGSLQINYFGSGFNSHRIEFLAEKESRVPSIGTSQGSGTAGHKVLPIYETRVVPSPGYITKEANPKVHRVDESKRAPKVSWNSTGTVFLFTKPACFQAPPLCEDWGNRDQYSGLAKHVLEEEAGYEKGRLVATEYAGSHTVAGHGDAAIRTAMIVGTSLLEKCALLTAGST

SEQ ID NO: 976255 - protein, 196 aa, Homo sapiens
MAQQYTLSIIYYIKGTPETEHTLTTTLLRQAGYHSYTNVEQQIGTNTLSVQTYQLSFPPHASRNDERANSTRVAEATLQAIPINVLNLTGLRQPLSRPYPALYSLYTQTPYEEQTPRPYDNGTHSLSDDNNVVHNCATATTREHNTGPSGFPPRHFRPTQSSWNTGLQTVSSYRDLQLGNHTQAASYTDTYISIHK

SEQ ID NO: 976256 - protein, 115 aa, Homo sapiens
MPHWSSHVGCVHTTNAPSTLNRTPRPGWRAPNPTLSNPGDNHDRPPTTVDHRRRAHLTIGRHTPSYTRHEDGGRNNYPPPHNPPDRPPPLPNNGAARATPSTCDHTPSTRDHSTS

SEQ ID NO: 976257 - protein, 58 aa, Homo sapiens
DPGELRFVHKLARKRAPYKVDKSSPETQRKMDLIPQQANTIMTRKTRQRTSFFYEEHN

SEQ ID NO: 976258 - protein, 186 aa, Homo sapiens
GRARWLTPVIPALRKAKRQENRLSLGGGGCSEPRSLHCTPGLGDSEIVHLKNISQNKSMSCHPAPMSCYPAPSTAVCISSDFQKPLNYQDEDPDVFPWVKKTNTIIAEIMKKNAVVGRRRYSATAVEELMCLYNTRIRGRGRAAPRKKDIGVALVRQKRGFGLRKGATVGAMKRPPAWEFCFAQMN

SEQ ID NO: 976259 - protein, 321 aa, Homo sapiens
SQPPEATARQQAGAGRVFLNTAALSLLRRHRAAQHPGLNSVPLGTEWKLMHLLHTVFQSSWTHQTDYQNYQQLVEEPLGLLTHSNNLDQDWMQDSPFGHSLTRTKQTPTDTTVHTLTTHAETNDTGLPYTGTMGQITRGKLPLSVTPHALSVPTAKLNTDTRCNTWWDYAHLASRSHLPPLSKAANNYRRTRTQFCATINLGSQRKKRPLRMTPQISSAPRVNLVATQTATPIRHLGTAHSPWRQLTQGKFSHSRQYAQPRPYTTKYNGAKQTHTTRHDQCLRIGGIYYPVESPYEDQTFTTNLSRVSTPTHKTHTLYSTN

SEQ ID NO: 976260 - protein, 608 aa, Homo sapiens
MNHIVQTFSPVNSGQPPNYEMLKELSRKWTMLKGDPQNLASHDVHALIHIRRRDLRCTDHVVWSLLQQPLHEHLSAMGIHSIRVFREDLEEQEDWLSDDESRAQDYALQRSNAMTQSGTMNFGPSSVTYCCRHHTSQADWSSVPSDEIRRHHEATELCRDLNSTYSILHYSACPTRQEPLDYGNVCQLLNLQFLDLSSASLISLILTAYKDNKGLVCNKNDNISAHRRAKHRRAQDTRYTEAKVIKSRAHKWLGELADEKSNQPHPSHDRPAQATTEAGQKRERRQQTSRQAATTKAERTAAKPQKTEKHSKEQTTRTKTKQTQTKAKNDKRKQTDRQTRTRTNERERGKGRERERKQQTQTDTRRRDKRESRDSGRKEKRKDKQGKDSTHKPSEEKEQQKQNREQRDEKEPAEKDTARTSQARRSRHTRKRTTQEPERENRERRADKQSRSEEANEKGDTRRQREQDEADHEAREAQEKTRRERRRGARSQRERRRADQQTKQRQPTKPANERERGTREDGRRGKERKEKQRKRPQHDKKKRADRARPRQDTGARTPQQREKGRESDRTGGATNEKQKAREEGEEAEKDETEAEDEDKDRDEDEERR

SEQ ID NO: 976261 - protein, 199 aa, Homo sapiens
MNKDRRPDTKNKKKNNNAQNKQKKSNKKHKVEDRKQTTMEKKQNMTSKKTRRIKKKKRNRARQKKEQKEEQEKRKNKRKRTRNRTKQQTERARKNRNKKKQKQNKKDEKEKEQENPEEKNTTEDQTRNRHKKHPQKQTKEHKTPNNATERKRTRSRKRQRNRTKRRNKKNKKTKRRQQKDEQKRSKNKTNEQRENNTTH

SEQ ID NO: 976262 - protein, 346 aa, Homo sapiens
MCQNYNDTCSNTEYQHNYRDTLFPKEVPSLPRTLLSNTRNPRTNAHANTATTIIERTKNQEYHLKTNNTHIRKATSQQHTLTIRLKTKRIRTTTKKHPYTEHQRRTRHRQSRHQRRRRSSHSEHPHHIIAAPPTNPNQRSTSKRTETTQHHKQGQKSKETKPKQTSSSKNTTKTKHTPTHRLKRRRRKETAMEREIGSKTRQGRQARRHRGKRRKRQPNSNQSATERPDAPRRRTEAEDNETDDTHSQRRQRERREEAESEPKCPRQTNDHRHGHHRHTTRTDTRDNGRANTNEAPRQQENEQEDNKETREDKKHERQTKRKDRDKRRTRHRERREKRKTKEDRNE

SEQ ID NO: 976263 - protein, 230 aa, Homo sapiens
GGWICVLRAIAICYYVSNEELRGKSPEAAAQGGAWVSFAEFRIYVPPTAQDTWVFPQALVHHATKKKGPLRLQRRKVRRNPGGCWYCLTKKRRGLFWLGESELTLADTYSMSAPLFVALYSRFQKPSFRQPFTNYQHAVPHLINPDPVPGCWGTRTVCQDGPVDVTRWRDQLKENTEEEGSAREQPSDGEKRLAALTGMEYRGLTRRLVSRRGKPNRHLVARVEQKSKRA

SEQ ID NO: 976264 - protein, 527 aa, Homo sapiens
MCQGSKKDYFKKFLYEPWPVESHLDHCMHDHLLMLRSSPRPIEKQAGCCGLPHLGPFCTRRMTENLADELATCRVFPIVTCRTTCQSGWSMTLSDLEQSNVHQYARTMHGDVAPPDTVVHDRRRYYYINYTTIGALQHVLNAKTKVRGACPRSSPMQQRYENSSHPATMKDIVPGQLAQEASPNRRNKPKVKDPAVWTHLSWGVPWPACVTGIAPKGDTSDAQAHRRGGLHKEETYSNKGKAPVFEQRRSVLLICLFFFPLFSSLSSLCQYTSHSKRTKKYINNTTQIQHTKIQNNHIKDINTHRRQTQITKQATTRERREGRRRVGERRTRAEAQAGNGQRQRDDSRREREHTTETTTTDTARSQTGRTRRTETTEDTKNTRTHTREEQQERGNRTTHGREKQQRKKQTTKRNAARPRQDREQARAEKKHQQDRKTREGQEHAQREETRGGKREGEDSKKQNKDGTSSRERANEDQKQKEQEHEEPREEGARPKRTASTAAGQMEGATDNKTKKRRRTAPTGDQSK

SEQ ID NO: 976265 - protein, 457 aa, Homo sapiens
SVLYWRCKGHCRGSVSSLGLAAAALARARVRQINQYREIPWERDSSSLPDESHAAMLDAHVSSAAHLDENTRDTKEIRGRQRDLWVQCIRRRRTKKLTYGTLPEDVKDNDNTAYLGGHVILGRIICIKASSPLRTCEHLTTYEGINLHDTLELFKYSGKRCCDRTQIPHGHKIGAKHWRQKGYTDEGTTDPEEAHKLETCTPSKQHADITHAEYTRIRKDQKIGQRTAATDGQMRQNNPRCSETYRMRMKRKKKTPHNNVSSKHGRESTYESFQNNNHAQLNHTNKHSLNPIHPHSRKVEEDMSVAVWSSLSPFLFADKKGTKDETRTDRRKTLKADKRGTSSPPTAKTRRNEMTGEKKETSRRGEKRRNRRQRKRREEGKSRRRKQGDRARQGNEERKREKERSRSKRERGKTEEEKSGERGEEEKAKQERGEGERSRQKKTRKRKKEKKEKKRTK

SEQ ID NO: 976266 - protein, 188 aa, Homo sapiens
MKFLLDILLLLPLLIVCSLESFVNAFYSYEENNHITGEIVLIPCELPHGTSRRTDCLMNLLNLKSNAGSLGYKYSTGLDRKQLPNARDLGAKVSYLWWYDCSNREDIYQALHRTADGRNFGRMLGIPEPTCWAQTNTLQILCAYNKTPPDPQRLLTVTWYFATISGTTTGHSFPANGRRNTPCHIAPV

SEQ ID NO: 976267 - protein, 409 aa, Homo sapiens
MIYRGAFPHKRTSRGRRCYATSPGPEIGKKLERDTRTIKAEPVKTQGTQDESGHSSNHLDTPGNHTINNIITSSSFPFSSLSILTTHQHKHKNTTRTPYNNQKTTTKKQTKTPTNYTTSTKQQTNKNKAQTKTQSDKKHNTTKQKQARKEKDKERREAKTRGPLTGNTRSTKKQNRDNTKKTHEKQGRSTEELSEGQNEENGKQERHTETNGSRESRTEPHTEEADNKAAENSSTTRATTDESGTKEAGRRQRPGRREQTRHKKTSNHRQQRVREDKHGEEQRKRRSKEERGRREEDRTRKQRRSGTANEESRKRGDRRHDSSTKDKDTKKRQKPRQDTTGDKGKDGARRPRSETESENKGKRKTKRTEKEKDQVKEKGGTEEDTERQKTPQHTRKHEATKTSKEKREP

SEQ ID NO: 976268 - protein, 418 aa, Homo sapiens
MRRSFHSCPILSGPLPSVLGARADSARVTPALPPHRPPSPNALAQHRPPPWPASFPNSLARAPTMSRSCHTPSGSAALVVWCLFRSVVPPPPPLPPPPPSPPLPPRPARALRALPGRPLRRVRRPRPALAPAPPRSRLPRPPAAARLSRGRRRWPPRAAPPQAASAGSAAPRRTRRLHPRLVRAPAPTAATPGGQLATEARARAATDVHGRAPPSTHVALLPGPGAVGVPWRARPSRCRAGRAADVGRRTRRVVGTRLRARRHGQRRPPRQPPRPAAPAPRPRPPAARRAPDSAPPPPPAPRRPASAPRAHAQRHEPVQRARYYLVPSSHSSHTPVTPPHSSPTHSLTLSSSPPHSRTTRPPPYPSPAPSSSSSPPLPPPLLSLSPISALPQPPPHHHSTLFTLHRPSAPIAHTTLIR

SEQ ID NO: 976269 - protein, 102 aa, Homo sapiens
VDQIDLRWLTVEPEITLTRNPPTTDRARKWNLIRSWLAQNTISVIASPVQNHECGIIVVALEEMIKCIEVWRWLDTCGLYRPKFPNTVDRLSVLCTCHYPVV

SEQ ID NO: 976270 - protein, 145 aa, Homo sapiens
LRRAVVPANRPSGREDKAPAVPTGHSRHCRANDPHDVADVAPVLGALGCLLRVTCPYSVYTYLYRTTLTGPCEAGPSLTQTHDPRWDLTLTGAEDPEERRSGMNDPYVTTPEGRGKTEPGGDGTTEPRGGYLRRRDTGYSLKEPD

SEQ ID NO: 976271 - protein, 230 aa, Homo sapiens
MALSPAQVLRMAILLSYCSILCNYKAIEMPSHQSYGVSWPIPDVHLIWYIQAVFPGHLCELTDLIQSSALEEVGTKEQEQAAQKLISSSEDLALLRMCAAISLVGAVPHVVSHAVHGSLNVYSTEDHLIYPESLAGTYNYHSHAPALTNPPHIATDGGYCPYIVQIPSMHATLPTTQPIPPAHVPQPHTLPCTTSPLRLMGNYYYSAWIMRGPKWYTGTCSLAPHLPGNN

SEQ ID NO: 976272 - protein, 103 aa, Homo sapiens
MAELSKRKAPLLLIPRLEKQEKTVIYSSEVAKPRNSYITGSLYAEADGGLWYVTTDKSKIWPAKTCGLTLQDSDLFDEFWALYKHIQLSQFILHAWHVIYLTY

SEQ ID NO: 976273 - protein, 113 aa, Homo sapiens
RGEAQEGGGESCEAALLTQHYGSKPVERQGAVQKRALSTPVVDKTSASPESSSSSSTDRGKQQVDHGGSSRALNKNSDHSNGSFTLEQLCQEARGLITGLGVLANRLVDIHHD

SEQ ID NO: 976274 - protein, 232 aa, Homo sapiens
MAVQLDGGVSWGRTQNKPLAYIANRVMTADTYSGPAFLLSLRLSADTQAVADAVTYQLLVPTAFELNEPQCSNTAASLLKEMCTIPEDLMGESSSQVDPQEGGQVYLSAYGGYDERQSFAMLRLGELYIYGLMWDATLTEGHAHGRVSAIHANALAVAMERDGPGEEEIGLAAIGEQGKPAGIVETDPNSVHYTADLGSVEKNAVVTLTRPGTNNKAQPVSTTNWGGPENRG

SEQ ID NO: 976275 - protein, 67 aa, Homo sapiens
AHSPEADNPYAKVDVSVATWKKTFHSQQIELRSHATHRIHRMLLAEPCCGSTEEHAMVNTPVRRIYR

SEQ ID NO: 976276 - protein, 152 aa, Homo sapiens
MSHSAVLLTKYRFLLKRVPWSMMVRSLVATCLRVAKWLCARVSTESSCVESSTIVTSHYPAKYLGQEGSVGVWQACVSRRVRAHTAQVYLERVFQTFTVNTLRLYPRKSAGKSLLAESRRDYALMQLLDAQALNYLALINGSAVIYCLHTYP

SEQ ID NO: 976277 - protein, 150 aa, Homo sapiens
GYAAQMWVYEDASSPIMEELSHLFMIMPSIIQLLICLTKSCMPFFRKTILEKNTKLNTSSFKTVMEYRRAVLKYSCPDIIASSLSPPIPRILYITEGGQRSLPYHQINVATNGNCTYEYTDYGGLNLQSYILPPLFLEPGDWDSLTLTIE

SEQ ID NO: 976278 - protein, 159 aa, Homo sapiens
ANRCSQPLRWIPAIACSCIHSPFQDPNNRSRCSQDGDPCLSCIFHLALQRLRRNNKMLLGFLTSPTPIRHLQHTQISQPNEAESASGMQQTTCHLQNSRPATRLPPCHLTTFQVKASIDGDYDAFFEARENNAVYAFYRLAQPTWFKGKPEVQAHARKH

SEQ ID NO: 976279 - protein, 104 aa, Homo sapiens
MGRDVAQQLPFSNDFIVSYSPPQQGPSKQTLKALREPAPSPTKEQNVSPNALLLYTHFSGPQRQALKHALTDASHHALLLTLHTLRIPTRAFTALQQLALPIMP

SEQ ID NO: 976280 - protein, 139 aa, Homo sapiens
MRQASERGSLLVSSVWAKKQGRGLRPTNGDHIEIRQCELHVSQIRRGVILTDGVDHPWMRCDGPIPWGSDVCKTTVWPFCKGVGSLAANRVNRREMAYTAHIVAVTGSRMKVYLQCGGETYEMRRICFATLPLQQRNRN

SEQ ID NO: 976281 - protein, 208 aa, Homo sapiens
MTGFLLPPHSQRDSGIMQQNAEKGTEKKEEPKKLVASCPTSFALSPVCLGASPTTLAFPPVVLTRSQPPMGIPFCPEVCSGVLGVLSFPSGSLISPWPLPGVEGGYPFPGLVHPCGAHPQEFIQEFRFGYQHNTNRSTHNFAGPTCSPLKEGLHKQFVVVAGPRVWLSTTVAIRALKRNCAANNSGVDYSRLKAPGGPTFGTPTRLPG

SEQ ID NO: 976282 - protein, 292 aa, Homo sapiens
WCSAADPALAAGARGRLLGQPPGLGLADSGDAGETSSRWARLCVLNLIAQIDEADEPITTCARPDRFRAQGWRTPVRTPVLGALRTKLLWQILAARGAGLIQRPLVGIGRAAQAAAPVFLPTRKVVVMGCALKPKVLGRLDMWDIRIFGNEETTHKRWLGNPMSTQLMLSSVQPLVSTKACRDTKKSVDDDAASRNQPPRQWRTIIEDSNQTPRGREELNNVDSRWVVAPAITNRAGRGCEPNRCVRGDMLKSIDTLRAADSIEWQLATEKVARETGSLTSDDARQPRVCGT

SEQ ID NO: 976283 - protein, 70 aa, Homo sapiens
DTHLYSAFLEGKRAIPKGLSMAVQLMGKQERSLPLSKENFQLVRLQGVRKEKVENRKRSWLLQGVTQCSP

SEQ ID NO: 976284 - protein, 187 aa, Homo sapiens
MAVSTGVKVPRTFSLVARILTDRDNNGEDDGNSLRLEVIDRMMNAMTPYNGGHGMNYRATKDLSLKTDIYTPDTSRMWTLTVPRRLLRQYRFCRHKINMTPAITLIPGWDGWMPGAYAGVEAKIGNNSYYALKLYFEELKTSNDANCITSCQLPTADQKDETIQQLILSWISNLSYNQQTFYSCQVS

SEQ ID NO: 976285 - protein, 275 aa, Homo sapiens
MATFSGPAWPVPVALIPARQRLSSLHKDALAQVSAQAALSHTRKKDAGNPSFYFLGSNVQIVAAKSKTKDHTFEVKRPHKEIPFAPNKFVTSPQDVWRHLWVETHGVISQCTVVPSMEIVLYTTGVHTWRTNMLRTKGGPILPQLLVIRHSYVASLRCSEHIVCGPKRELELSGHVETSPYSVGHYHNVVTPTCDLVQDVHNTERNPITVGEQRMGIPHFLVKTCCAQQPCCETNTVRLPIVTQPGNTSVYFSSTTAHLWGEQLYIFPTVYKTRP

SEQ ID NO: 976286 - protein, 68 aa, Homo sapiens
SVSRERTTKRVFDMLEPRDAMSYSQRNWVFVTRLLLGSESLTCDGLTKERLTGGKYATWLAEKRVEEE

SEQ ID NO: 976287 - protein, 161 aa, Homo sapiens
MCHVGCRLVSSSKRSQEQMGGPGIRCDMCGGLALLVFHRIIEGLHSQYEPNVSLGNKSTKKSKPVFAPHWEAFHLLNVAANCFNGRGRGPTNNHIWASSVWGRHVHEWGPCQLFTPSVIIYVGTRQIWAPRHNATSYIVTMTHVVGGKLRCHSNTPSCWGT

SEQ ID NO: 976288 - protein, 116 aa, Homo sapiens
HPICGYPGTRISRELNVHIACSAVAISVRSRYVRREPRWIERITNVIYIICSLDAQRQYLGILRREKSPLCLERKSRTFKHLIQVDFLGKRGVLPNVGCYSCVFSSECPKKLPRPE

SEQ ID NO: 976289 - protein, 69 aa, Homo sapiens
TGVTTKKVCDCVTGEYTAEEVNLCLYNSMWPLVGPVPPSDNEGGRSVPNSQVGIGESISRGIRKANRRN

SEQ ID NO: 976290 - protein, 86 aa, Homo sapiens
SFFTILKNRRRGQPSRSGPQLQIGPPPEASFNPGVYSTHGPSKLRDSDISHIDRPSSSGAIPTALTSIIRPSYNTSISLFGFQHTH

SEQ ID NO: 976291 - protein, 73 aa, Homo sapiens
GGGALPSLQGSAGRPAAGERKMNAGSDPVSSSRRRDHHRFLQWCLSCCPVQDLAPLVIKEVLKRATVGPERCV

SEQ ID NO: 976292 - protein, 137 aa, Homo sapiens
MSAANLCVIPAAHSIRAHPGVITAKVAQVAIPIGYKMTWALTSCWRFLYTLCFQPVNSMPYIKHLWVVLVRTYVLYFSTSNPVDLCRVGATELHLGGGGQRCSSIERLHRFLNGQTSLRHHLASGLCPLSEYHESAM

SEQ ID NO: 976293 - protein, 69 aa, Homo sapiens
  misc_feature (9)..(9): Xaa can be any naturally occurring amino acid
MTQKSSDLXGDTQDTWNKEKKTETTATKTRNETDIQHNSNRKTDKKTTTNTIKTKQNDEQQRDKNKKTH

SEQ ID NO: 976294 - protein, 498 aa, Homo sapiens
KEEQKHRTGSRTQATTSDTWHNELITSEDTSTLHIDEDMTTTSNKTVRQEQRKRSRTTSTMNNTERQYPWNHAHTAATKRSTTPHTITDHRTWKEHIHTEHHHHTQNTTTEDKRCTEGEENERGHRHKTPRAYLDENRRRDENLETTQTTQREIYTLDRKSRIEKKTTTDEVESVQGTVGDDVVGEAETDNAGEGRVRRTEQCKCDEATSEEARGREGTKRHADKREGGGTTHQREPGQKIRMEGHGRGIERLEAIESVSSTRHDRTKARKCKEKARDKTRGAEQKAARQRRMLGRRVREAEAATHRHSKEQRGRTQMAAEQATQTTDERETVESERNERERRSRDERSNELHQDSPQKHRNLCIDKAHKRRAHKITKSDADMTQINRTAEQDSKIDIHNNTTQPKTSRNQTKDNRETMTKHRRVRRDDVHDHKKRHEKLQTNNDEGAQEETKHGLQQTSTSQRQTEQQTTSDASQESDQDEGEHQQPTTEHSITQIV

SEQ ID NO: 976295 - protein, 183 aa, Homo sapiens
AVVGFVMQNVEKALGIWSELLKSYGKVVDLAHSNFGCRISPFYPFRQQLGQLRKLWKLWNQMYDPDTLAQDANGAHAGTDVMLHRATLWFSQGKRVWYVDTLPYYVRHAFKVAMNRAKWLISSSKSGERHLYLKGMERQNLDKNDQEVRNGDGRRILSDTGLTRMMGESVSTVSYGLTDYEVE

SEQ ID NO: 976296 - protein, 114 aa, Homo sapiens
SAKHSRSAGAAPSPLTVSSVRTPVSLPRMPGHPTEVIGYPSAELDKIPARGSQRDAATGHREFRESEVTWTRRYLVISYSSNGCRSSAEGVRLIRTVTASRHLFTKGFPYGGAD

SEQ ID NO: 976297 - protein, 241 aa, Homo sapiens
MATQKKRYTFTNHRKPNETHQLNSAIVQEEPKALTPGPAPQVETQHTSIQTTSYNIGPAGHTNTTHRHSTLPLDMRPTRNTRGTECMTHAQPKPTQSTNTKRAPQGPSRPINTPQTPHGTPPSTALTHKRQTTVPTSEADNEHDTTSARTPHERQTQNPSIGNHRAETAHPTKLHITGNNYTHNHQEKKPRKQHHPNDTTHQHQTQTHTKQTHPQQRTHNRNEHNTTPTHTPTNNNTQHNK

SEQ ID NO: 976298 - protein, 270 aa, Homo sapiens
MTQCQLPNAGRGNLKCKTHTPHSAANLGGALTTHAPPGPPPPYERRQRIQRTTTTWTSIQPHSEIATRKRPPPLKRQTQKTSMPSRRRHVAATTRKARRCNPKNNEPPSNDCKVPSPTPPSTTNAHLSHSCVRETPHSTSPPDPSDPIPRNPHTHCVVTWTTNMQRTGRPQPPRPPLAASTNSPNSPQSTTEVPHVNAATSQPVQSHTKPRHQTQEHLHRDAQPPHKRTSRNTRASHDHDRLHSTTSRPPSLHVTVTPLRPRTPRLDRHK

SEQ ID NO: 976299 - protein, 328 aa, Homo sapiens
SSVGGQGAWGSLHAESPERRKLLPVSGLEEVSSGVLPPGLSPKTPEEPGIASNTESRDHPLHVSRPIVSLRGQAVGLEEGRWEPEYLYGTVLQLPKRGVGAPQGRAGAPQKEESEDKYLADPISAERDPKLVVKTVPDRVVEMEGASKGHFFSPEATLVVHEAAGGRTFSDGGYIPNTALFSQKAGVRSKAGKQEAIHAPDRQARPDSKRHRRAEEAVTPGGLAASTECRPKVERRSSIFNKGLLQPGAPGGPAKSYKRPVPPHKSGGATNGTQGPSPKGAQHRNRRTGDPKDGGTTTGRNDPTELAQQSGGQQRPGEHRRTERARRH

SEQ ID NO: 976300 - protein, 105 aa, Homo sapiens
MEDGRIARNLIMVGAEKVAWGSVKNTVHLRNGSETHTRRSRLENDRGNVRLSVTTQGENRALIGWMGLPVQVQATFKLLGELPICQGIQLLSRWTSSKGPGCFTP

SEQ ID NO: 976301 - protein, 503 aa, Homo sapiens
MAPECTEDGGCCSDVYAPSVGFALTCECHSLGAYSATASPQCLLQCGKKRALTNFHFVVSGFPGARHKLISRHPCNLHCQLNPGWSHPDIATPTFHRGHSRVGPTWGSKVPQSHFKAIRNGNFPKGRATHPFWGGLYSIIINSLCAAFPDPYMSGCSLTPQDTIMGVGRLYRLATQQVFIAANSTKRYVACTPFVLTTGSCHEQRVHPTGWGNLSPTAFARRTLHYDPWLDLHTLNPTPNMEAQRNAWSMWRYRGSAPPNICNLPTFREHTQIRLVISNRPRIHQTLTRIHSTVFQPPVQRTINQCAVIDIGYKTQGRLPMGATNRARPINTEGGSDHIYKYTLCDNAAKTSGERLNHEEAEYMGHSRLNTADKSLPPTILVGRGTRAVKLKKAAITDIGSGTRARIPRATVYGKTHTVCARTHGTSGPPRRTHRCNTTRRELTYNIRNDRTQRYHTDERIHQRQVHLTEAGGDKTPEERLTPRWGDYQQHTDATQQEVKRKT

SEQ ID NO: 976302 - protein, 73 aa, Homo sapiens
MKHSFPIVPQCNSYPRSCVKGSDSVIPEEPITVEEPETRKEAPKEPKKIRDIAIYNFVTESTGVLRTWNPVNL

SEQ ID NO: 976303 - protein, 196 aa, Homo sapiens
MWYDQKARLCLAFISAWTFELFQPFVAMMNMFECYEHFMHKFCYGEENEDTQEEMNISIRNNYYQDVRESMIMCPEGGLLLMAQNNNTLRNVSSVMPYPDGGRSSCTSIGKMLPDIDCPRFELIQLISSPGAGNSYISCFTSKLTYDGKLVYVTRLQVLGQDIGEGKEQRWPLHSSHSLFGGHTDTLLGQESVWRQ

SEQ ID NO: 976304 - protein, 102 aa, Homo sapiens
MSTLLWSRHRRACGRCQFKVLIHIESWNIKYICLSIIMLRQSVLEISVCKEMFVKVSFMFPQSDALLVCCIIPYVVKTRHHYSMNQFYMQTYVCPLEMEVIF

SEQ ID NO: 976305 - protein, 318 aa, Homo sapiens
GRGRRTQLKLFRPHDVPEVSRAFSLLCKMQLLRKNSCAPGVGRRGNRFQTIKGSLVVGVWTKVGYGVVDNSSIWWEESSWLMNFVLCVGLLWKDKGFKGDDLDWILQASGELNFLYRNLKIVWHDNEINPVDPANFYKMVRGPHGRRLRTTKKGKQSASTLWPHGHWVLSSQFIIPSKIRHGTGLDGIILVVGSPTQVHISYGIVTLGPLWCITQKHRVHCTGGCSRGSCKNTGTLVGGKLCHSIPGSCQDGIGGNMAPQGGAGWQGGNVQGSLRMIPTALQYLTTAAAHRRQAKVNQSDHGAKRAGKQRTPPPQEGL

SEQ ID NO: 976306 - protein, 109 aa, Homo sapiens
LLPMHGVHCRAFCYMLRCVTGGTSSSPFGHDIAFDELKDDYKSPIDQCNTLNPLVLPEYLIQASSCVRCFVQQSGYTGLKYAPSCISYLQVYEYDQVMSAPGLYDVEAS

SEQ ID NO: 976307 - protein, 225 aa, Homo sapiens
MQELFNMPDDPKSSENNRDRSFLMTGILKWVTSDYNMASMKRHQNGQDAVLLSPRLSARGTISSHYNSTSGFTAILLPQFPELVGITVKPKESSSNLDNLHHYNCNKSPDEKQQPSQAVTIFCSRHSMESSDWIPPHCVGSCGTRSTGPRMTFQEIKRGKSLPRGTTLPAGTRSHADANFRKRGPPHLSNSQHPATAASWLPKTRAPHKPYAPPAHAQPGTRASS

SEQ ID NO: 976308 - protein, 108 aa, Homo sapiens
MGFPSRCLMGVFCLNIHACKGPKYWYMDLGSYKFTFWMFPGAHSSCQKYKMLRVSACEGSVTGDLQEQAAACNWCTHFEASMDRVMICGRGSPFGYFLPTLDHQKAGV

SEQ ID NO: 976309 - protein, 71 aa, Homo sapiens
AELGGAVKIRRAQSPAQFLRAPEDGGPLSLLTQPWLVGPKKHLKLGGSSKAWMLNKWTGVLLLVHPPSPQS

SEQ ID NO: 976310 - protein, 293 aa, Homo sapiens
GPSPMRRDCVWVGRHSRGSSVHELDMDDGRHSPPYGQKCYCAPRPELPLMMAKEKPPDNCSWRCGGRIAIIVHDILTMWRVGAAAEILKERGAYKIYVSGTQESCLAEVPRLIEESSVTEVVVTNNCSLMRFRSCIAQDKDCGYQLGLLKPFGESTMESPGLPFPKHHVDDYAFTRSRPLVPPERKHAKMQRHEWYRWFLAGEDSKSWSNFSFARIMRRGSHSPERQSMGILNCVMLCITGPKVTGKDGVLKGGGQVLMICARGRAEREGEKGPQLGLLSFFPLSRSYPVITT

SEQ ID NO: 976311 - protein, 115 aa, Homo sapiens
PSTFLCRVPSITVHDSVQVCNGDNAADRKVSCLGQIEGVPVVRARGHVRSSIRSFSLPEELNHASFGKCCLGALYNGWGSELQNRIWLRDGRWKEKELIAVVSVGEEGMSTKEVR

SEQ ID NO: 976312 - protein, 360 aa, Homo sapiens
RRSSPRVVGVSCFNSAWTEPGARSPPRPAAHSQPSVTSITGTLGLAPRPPPPIQRRASHQPADTHDLSLKSAAMTTASTSQVRQELPTRTQEAAINRPRSPGKLYASYRKPGPCLNNFVTGMDVGFGRTFGQILTFSKSHEGRGTHAETPCMQAAAPTPGGPNSTLQDHQATRDRAARQTPALNERQVCLTIGTHTWRTQATYGEPGQKLAKWTKVAPQSGVTSIGRHINLELSQVRGDQRMWGPTVTNGAQRGNRTEIGGAQNISLERAHLDARDNGSKARAQVPPIRGGDTPGPPGRRTAHWGTPKPSKGRATTPHKSLQCETTQINACRKQATQQAVGPREHNKWGAKNEACTHEGH

SEQ ID NO: 976313 - protein, 288 aa, Homo sapiens
LIYLWFATSTPVVLCACPLMSNRRLLEIDYDDLCLFTIIKNERMYSAPYMASIASLDGSSLNGQFLVSIRKHGVQAKSISKLGPRLVKGYASPNCQSLRFETLVGRGTLIGYLNERSSQKEGKRVSPTRPRRENSLRDIKDDSLVLGRPVNFGANEMANGFAYTAPPLGKKAKSCLEGHGSLNHCKWSGFTLPFEGTSSSFLSGGWKYLWHPRKYLNSNMMCDVTFRKNCTQQQVCLGAHILPGFAEGCRRGSLPGPSTLRSEHWPPKEEPGGSGHTARALHRICHKE

SEQ ID NO: 976314 - protein, 94 aa, Homo sapiens
MRERDLDTWSIAWFNAKNPDIKTVRNSHGTCSSEGLVQQERTWRERRTPGQGTLPPGQALEISAGQIVTKRGPHFRTSQVPVGPARWRARFSRV

SEQ ID NO: 976315 - protein, 226 aa, Homo sapiens
APRGPWGARKPGVRDPGPQPSVAAWFAAVCRALVSGMVVAEALGPPRAGEASAAVDASCYLRKLGAQNAANAISKEAQNSRGAGFLRLQTQVAGDLDFAIRNQIWLGRGAGTFPGKYAKGGLGRGARDHPNGGESNRRREDPGASYSGHRARSWWDWPGALRTPTRGHGWRERPRQWGGKKPPGISPRKEPTWPREYQGTKSNPALNKTYRDPRRDGTPARQGGTQ

SEQ ID NO: 976316 - protein, 120 aa, Homo sapiens
MIYERQSIYSNTGNFENVCISQWLPLGALIITAAVVLRLTVWFTGQCNISGQDLVAVEEDAESEDDEEEVVRLLSISESGMPLEVVARFHRTKLNLVADEECWDGDEEDVPSDAADDWFG

SEQ ID NO: 976317 - protein, 271 aa, Homo sapiens
MRHCILFNQTIALGVAAIVIQTTEAYTGAVMLIIATGLILIIFLPSKSKGTNALHSRVIILSQGRSRSIHTNSILDDVLAGLVNAAFTPDYEGYLENLSVHSNQALLIEYHVSYLQDSSYKSQALYSPLILTSNHNGAHSRRDKQGYSPHSEERSLVFIHRIPPLVVVILNPDISTEFASYQNVGHRSVDTVRSGRHRNVLAHICGGPSGSGVARGLRTARRGLPKKRGPPLNSGLGWTHGTASRGENEERELDITRESWTHKEVLACFSG

SEQ ID NO: 976318 - protein, 317 aa, Homo sapiens
MSRLCEKLERSRSVPPHGQILGYYRQIPSRLSTSSRVDEGSESGEVMRWDLEMKEEKNLEVLDGLWKNLIGRNQSGRVRTKEGLMWSRYLTFGQSEVSGDECLPILGVRTMCVDHREGGRKKGVSTKSNVWFLPDPSPTSERPKTGGFQSYLSVLTGRYPAQVSQIAFAVRTNRPCKGGGFPGAQGNEGKRKAQGGPRVGPFGYSRLAPKNFPQSEKGLTVGACEPPGGEIRRSNAGSTLAPSEGLTFERGPGHSLQDIEVLEDEETVGIFLLPSARYKLRNMFAPATSAGSHTETLKIHQACPPWGPSGEPRWSLK

SEQ ID NO: 976319 - protein, 116 aa, Homo sapiens
  misc_feature (81)..(81): Xaa can be any naturally occurring amino acid
  misc_feature (99)..(99): Xaa can be any naturally occurring amino acid
MPIGVTEQKCVVWNNAGSSPVANVCRGCPPKGRVEMQMEFGRHHGVRIYGRSQREMQVCELDAPLPCAVSTKDRLWLLGMXKCAANGKDREGGSVFVEXTHFRKEHYFLGWRLLEP

SEQ ID NO: 976320 - protein, 178 aa, Homo sapiens
MPSIKWQSLMERYLTVDVEMCQTICDYEDHVGRSGNGMMKADDDPVSSTKCVTWQQYLHKRSSQVVAPTKGMTLAPPEDDETKEKRTDDIPVWDQEFLKGVTKEHFLNSFVVQTYLDIQRLGLMLHARLCANMIKGKNPEEIRKTFKYQKIFTDEEEAQVRKETSAVKRSECCADTVT

SEQ ID NO: 976321 - protein, 43 aa, Homo sapiens
MPRRRLTRSGSSPKPNTCGLLFSHSLRQTLEKKFRTVTLHNSS

SEQ ID NO: 976322 - protein, 298 aa, Homo sapiens
MMDSVLCGCTLELRAYYTHDPHFLSYLSACRHPMEDSMDMDLEPPEAPRTYLFSVVNYQADKDYHFKRWIMMKYEHQSSCKNGSELKRAGANSDELAQELKQQATELHETASSNFTSYHLAKLLATVCNKPTGSPLWRAFEHNTTSGLYALQVVRLTGHVHYQPRQHLRLLSQPRMQHVRPMHTAPGAIVKHSYVSSATRSDPGGWLARLPQQTVTLAAAHHADELLTQQLLNSCCATATDTTHTAPEPTNPPNPTPPQPTNPTHPTHPHPNPPSPTHTPTAPAPTHRPPLAPPPTTT

SEQ ID NO: 976323 - protein, 146 aa, Homo sapiens
MNLPAETCNLCASIYSIDTVGSPCLLPLLTPLPTSGIGLLHNYYSAYNPPAPIAPLLHALSNSAKRRPPRLFALTHASMLPTLARLPLSLVIYSNNLTPHQTLAANTPPPHLWLHIHLHAPASLSPYTTPSLNCVHHNQLPHKTHH

SEQ ID NO: 976324 - protein, 269 aa, Homo sapiens
MPQLYTSSFNPPPLLYPYTPRLWPPQRSTPLFCTTHATLSLSGPRTRCFPDPYSPCPAPLSALPLQLSLPFIGPLWPRPPRSPFHLGLFASAYSRGDSTTLCAPYRVFRPMCNPSSHSLRICSPSPLHAGRVPKPHYAPAWTTPLRPPVPPLPQTSPPSPTDQLPTLPKHFPPPTSRNLLSTRGPFNKTPPNNLASSTASARHTHNALPKNPPPQLTTTDLYVSQLHPLTHSTSCMLTPPSPHHHLLYGHDVPAHCTSSKPSQATDLTS

SEQ ID NO: 976325 - protein, 332 aa, Homo sapiens
MSHYLDLQAEQRQKWMSYRFCGHMVTDDTMSSCPLKPWSAARICANKYMVHTVRAPHDGFHTPRLRLHPFSTLIRITNDVSTCCLARCHSAPTQRTADGRPLPTQPPGPTCLGPRLHTLAPPSITVLSRTHSPAAQPQAPHCLTLTRPLADTGPNASQRSSLAPRHERNSHSLRPPQLSASPPTASHCLHLQLCHDTARSAHKSGSFPRLGCRGSTLHPPFLAPSRTHFAQTSHLSSMGFQHCASPPLSTTPTHSTLPPPAHPPAVLTHHPPPAPSPSHPTPPPPPSLSPTLSTPPPPTHTPPPPHPAPLYIIPHPPPPPHPPTYHPPHTHP

SEQ ID NO: 976326 - protein, 244 aa, Homo sapiens
TSRAELPSMTGTVVSRSLAVILIRQVHPGRMRIRINHNYRPRCRTPTTPPTPPTPSTPTHTPTTPPPHPHHPPPPPTPPPTPHTTPTPRHHPTTTTPHTPPTPLTPPPPHNTPPHPPPPHPPLSNHPNAHTPPPPPTPPPRKHDTTHKPPAPPPAIATPTPTNTPNPPHHPTTQPTTTHRAPSPPYHHHPTPQPPSTKLDQTTHNSTTPHPQHSPPHNTPPTAPPTPTTTTPTPTPTPPTPPTP

SEQ ID NO: 976327 - protein, 264 aa, Homo sapiens
MVAVVAPFALREHGPERRLRAVLKLRTPACTSSHVVSSGGAERRMAGRTQSQSVKSSRPEFDIGKDPVGGGEAVDPQMKIPHKGHLSAPSARRDHCLVFLVVANSGTESFLHRRRLHSDDGGGCWVVRLAPTIQKGDYWAVVEGSVLWPIGSVGREEACTGVGHVLQRSADGCVQSSLSSLAPNFMLIGSAAKTSGKKCTLPQLAKGGPSWVFRATQEAKMDVAPGRCGTKSPLKVISKRSLPFNGPRPGFGIGYWPTLLVWVV

SEQ ID NO: 976328 - protein, 67 aa, Homo sapiens
GCDSCSCAVVLWSSVFYLRRPSLLPKCVPAPDEDSMDMVMMPPEAPRSIFFGGELKADKDYHFKVDK

SEQ ID NO: 976329 - protein, 100 aa, Homo sapiens
ADDVRGGDFGVIPVLCASALEAEFYILRVATLHTVYVRCSTMSDGRHSPGHGGGNAHESATNYLLARSVEPRKDRLKGSTRDYYVCTRSMNNDATELYSS

SEQ ID NO: 976330 - protein, 74 aa, Homo sapiens
KEMGNIISDGDEKSRKKGWSSQWKDGKTLNEELEIIEGMKFDRGYIFSIKFMNDIKGVQHNVQWPGMPYVRGCR

SEQ ID NO: 976331 - protein, 113 aa, Homo sapiens
AELSKETNPVGMRCGADGEPSRADNYGIIFKHVPRTAENFRALCTGEKGLVFKNSIFHRVIPDLVWPRRRYHRNYDGAGGQSIYGDKFEDEDFDVKHTGPGLLSMAKSRPEYQ

SEQ ID NO: 976332 - protein, 81 aa, Homo sapiens
YQMEVRHCLSAYCHQQLVILVSWQRLDLGPVQTPRGMEKRMSDEVRIYSNILGPGSNRYRVGTRDLDVTLHLVTAKLIKCD

SEQ ID NO: 976333 - protein, 218 aa, Homo sapiens
TAGTENSLLPQPWLDRAWSLQVALSPFFFPASPSNSLPSPVPQLTVSGVCTFPMFRGRESAKGRIGTTVPSSLSEVTEKKLMGSIGCGAHQGAGPGISRTPLFLARLERKGYWLIDCTLKAPSETRPETSFSKTYGPKKITGYIPRFTFLGGNVDCHAMDLCCPDSLTYELILHGRHNITDSGRGIGTPDYGANFFKKFSPWNQGYTVSKNIFDVFNN

SEQ ID NO: 976334 - protein, 208 aa, Homo sapiens
GSFLRARLPTTWTAPLSSGGGVLESGAELHVKTDIKTLSRSLCLDRDGTHGTSGTCSIWLKGRIPANKSGPELYTHRGASSTRARTILVLDQQIDQTWKKAKLAMTPWTKPRHIQRPKRPTTNTHTMSYPQTFHANRAEHDRTPINPEADTGKPTIKKNEARHTDSQTSRLTPPIWAHDGLPKRYTPVIPTGLPLGRLLTPLASWTAP

SEQ ID NO: 976335 - protein, 68 aa, Homo sapiens
DLAQGRCGRRLSAGIVRVGVCGSVEGSGGFLSFFFAVQLGTSACPSPHGSEELQKDLEEVKCVAGKGY

SEQ ID NO: 976336 - protein, 84 aa, Homo sapiens
TICQDPRSAEQSAEVAKLAPSELECNHESLDSRLSGCEIHPFPAGLMSDVGLDAICMKCVLGSLCILSPCITLPISRELGGQSK

SEQ ID NO: 976337 - protein, 265 aa, Homo sapiens
NFEANNTVGRSVSRILWETHGAFSSPTLGLYPSVHHRAWAELNSWTRICQEECQRDALSIDSVEDHLCLGARISIAYNVKEPTEKLPFSHHRMIGIGQLAILLGMLDPAEKADQGHACGTGLVCGCRHWFLIGKLKPVYPLTSLPLARNFGVDDSQEIRQSLSQLKADTHKGWQPPADVGRTATSVDCAFATTSLTTGRHQPFSPKKGSSPPNESSHLARTYLRYNPSLKSLEAAGWCCSHSDCRRALVSPAAVPTHSGGTKAKV

SEQ ID NO: 976338 - protein, 183 aa, Homo sapiens
MTNISHSIGRTDPSLTTACTRTFHRHATPETSFAHSNNPACVVVASPIFTKGAYYRVNNIPVTSLDGAHVPESQFGGKHSKAFTLTWNGQSKFPTGALVASVRFSTTQSRSICDSFVGSTEFLHLGTVVYFPMDLVHTNLFFGNALSVWHAQVPTHTVQSGYTVLILRVDTRPWEHPPRLAIT

SEQ ID NO: 976339 - protein, 274 aa, Homo sapiens
GARRRPWGPRLPAPREPPCGDTPGLSEEEEALHKKSNKLKTTTQALLALKNATVAAAQPAQGGVKRSLSEQPVHGHQPPATVAGTTQLVKSGAQSVPSKAETKKLRLQTPVLETPEGHVKGPEKGPVPTFPSRPEAAYLLDELTCNESSRLAPEDTSLVMRTLVSLGDPDFEELRTMMGRKRQRAQGGCDGSPIGKVLTWGNERTVGGCPLPSASPSPEAGSGTVACEGTGQSTEIEADRTGIVRATDGQGPESPRITRNGQAPRVTPDTRTSR

SEQ ID NO: 976340 - protein, 152 aa, Homo sapiens
EINSLMAHTKPVSWSLHTDVHEICCHDLDRGTSLWRSIPHPPALCSVRKIHLMTSGPQTDQPKKHLTISNPGLCYTCRKSGHWAKECLQPGILPKPRPICVGPHRKSDCSTHLAATPRAPGTPAQGSLTDSFPDLLGLAADRLAARLPRKPL

SEQ ID NO: 976341 - protein, 168 aa, Homo sapiens
WHRQCPGEERLTEHIQEEEGSEPPKSRDPRQGSSPCANKGPRSNPQVYMDITDWEQQPAGRIQIAPASDVVPMTAENFLLPCALMKRALGYKGQQLQRIIPSTMCRAGIHKTKWALVGKSIYGKKVDGGNPLILKHTGPEIKIMGKSGPKPMVPSFLDVTRQPVMDAW

SEQ ID NO: 976342 - protein, 345 aa, Homo sapiens
KRCSVSVERRLKQPQADFSKNRSGFILSVPGNYAPRRPGPEPGHTPSPGSQSSCCLRNPCPLETCCEGPLPEEPRTHMERSPYLVYCLGISSSSVLTVHGPCSISQRPGAPPRPLGMTSRTTLNPEATGLVPSARRRMPVHQDQAQSTWTRLSIPDADPATGKRVRDAQNHLRRKPHRHHTLPNDATHPPAPHLQARSGPADPPETLPNPSSRAASTTPGRRRDHHRTAPTHRAHDNTDQAHTLKNKLHTQPAHKPPEARRNRTSPHIPTHTPTHTTQPDTQRADTETKNEETTTKPTRTRTPPQHGNLKPLVDTRGARSTHSTLTLDEQGVKQHAQRQGATPAT

SEQ ID NO: 976343 - protein, 247 aa, Homo sapiens
MCEAAKEVVAALVLREAVRAGGCRPRGGLHSRAGMGHCVSIGSAVAISCDHLIDKDIGVQVCCHSCVLLQDVGGGSWAELGRSERVRNCSSPEFYQDSSSLVRFETVQKLRFVIYDIDNKTPELRADDFLGGAECSLGQMVSSQVLTLPVDDLKPGKPAGAGDHQGLRLQEVNRTNRVVTHGGRRPESLDKKAVLEHSDPFLQYFRRGDGHVAPGVQHLEGHQETLNLNMDASLQSRVTHYWGGTRQ

SEQ ID NO: 976344 - protein, 179 aa, Homo sapiens
MWSPNKERTLWGANRTRKGGRGSSLLTPIFKKKRARGGGPPREGLSLGNQNPPNRRGESPAERAATQGGAISILHTRARARPKTGSAPEKLIQQFKGAPGPGWSPNRTTSRRVTLQQTNLTEQETQHESKHNNKIKNTLSREKNTQTTTTNTPKQTHTTTKQQPTTNTTNTTPTHANTR

SEQ ID NO: 976345 - protein, 108 aa, Homo sapiens
MSGRGEHAGDNKRVHYKRRDTGETRAKGARGKALLPPNIKKRRRPRGGDNRERRFSSRHTQPPRREESTPGEGHHKRRGNTISKAGGAPPDEKRIGLYKNYKPPAAVR

SEQ ID NO: 976346 - protein, 129 aa, Homo sapiens
  misc_feature (109)..(109): Xaa can be any naturally occurring amino acid
MAVWGARGAPKVYTEHWGLNGGVPREKTRGQNTGGGFSPKKKAPGGEPQARFETTPTRGEFREALQKGGVSNNNRGCSQAGGAAVLKINRPRVVRLHNTSSHIHPPISXPTITNHYLSYAHQLSTPRNL

SEQ ID NO: 976347 - protein, 91 aa, Homo sapiens
DNDSGKWTFTERAQDVMKEPGDTLTQASYRQYNHKPIIESGRDITNDNCHYTRRRQRRALKRNARNPTTRTQETHRGHRHVNSPDCYTLIR

SEQ ID NO: 976348 - protein, 70 aa, Homo sapiens
EYSRITGHVVGLYTIEDHRLQNARRATVLVPVYTSTGGVDIIDDSRIQDSIYVDTRFTVFHGNTECLGAY

SEQ ID NO: 976349 - protein, 137 aa, Homo sapiens
GRARWLTPVIPALREAKRREDSLSPGVRDLPGQYSETPFSPKKKKKNKKNKQLCAAARAPAGPPEKTFLKHQSRWGGAGAPRGGESGTPVGAKKDWCAHQRREHPGANRDKGAGGVLSPPIEKEPPPGRRHTESAVL

SEQ ID NO: 976350 - protein, 174 aa, Homo sapiens
MQKKDQIKDQCELRIVLIDYMWVIMTISQAFQIDLRENSTDNEPDTWLTAEETRGPPNNSREENHTEAHTDKTPPQKHNQTKNQQNSDTQNKEEHRTETKNKNHTDKQNPQGPDPPTSQKTTKQDKEKKAKQTTRDHEAHTTQTNQQHHERTHTNTHSATTADTATTKHQRHKR

SEQ ID NO: 976351 - protein, 153 aa, Homo sapiens
STKEGPETPPRPRDQLPPHPLVPPVLRGRDSSPPPTQSGPLGTRSDDTGDLAPGGSGPGRLVTQATPASPRRTPALRQPVPETRLDRGGPGGPQEAGEGPAMLGPQTMTVGSGARASEGAGMCLLCRRDPKTGHELMGAKAAGGRWGLGQEHP

SEQ ID NO: 976352 - protein, 106 aa, Homo sapiens
MKLLEIRQVVRFDLRSSQELDRKGRYGSISFRTIVGGGKSSDDFMPWVTKCETRNSVNGPQCHGQVHTFMWTEKHFPCSLSIPKRDRTIPLDSEDFKPRETQHDAP

SEQ ID NO: 976353 - protein, 56 aa, Homo sapiens
MVEKTNILNRGGDNKREESAKTEGGRLYIHTDEEKSKKRGAPRIIYNIKAPSRGGG

SEQ ID NO: 976354 - protein, 71 aa, Homo sapiens
PENIPPKEFLFKHPKRTATLSMRNTSVMKKGGIFSAEFLKVFLPSLLLSHLLAIGLGIYIGRRLTTSTSTF

SEQ ID NO: 976355 - protein, 63 aa, Homo sapiens
MTGGPKRTTGGSGHYARGFSPKYKKTPGGTHELGLEPTSEGGPGETKRGPHNKGDQEEGPRYQ

SEQ ID NO: 976356 - protein, 100 aa, Homo sapiens
VTNMADGSTIFLSSKKEMWSGAGTLRGPNYSKTLDARSFNNSAYTISTRYRFGETSWSMSHTLDTRQTTQDANEARSPGHNSTTQSSTGLFPSNKVLKAK

SEQ ID NO: 976357 - protein, 144 aa, Homo sapiens
MSGGRISYIYDTRGESLYTREEEKHLCNNIFSKTIYTTTRAELCGWCLAPTRTRASSRRQTPQAPTHTPPSVLEPTPHHPQSTPPQQRGQSPTQTDPTDRTSTTPSTTHTRGPRPLHTNNSIKTHTLAAKHNQNVEHLKQRQQN

SEQ ID NO: 976358 - protein, 33 aa, Homo sapiens
NSDEHKDIQSCTVEVHFQKIIDKEGDDYEVIPN

SEQ ID NO: 976359 - protein, 166 aa, Homo sapiens
MADMSLLRRVSVYCGGSSVWTGALGTAPRTWGLPHSWLSEGVLRSCSTQLETMGKDYWSSDLRTSSMTGVFRRLIDDSTLHDWDSSSNLHNILVNVFMVKLNQQKVPEGYVARSTGNIISIPYQDGLPVIVYDSGVKRYMNRTRGVLQIEGERGELRVEELEDAKN

SEQ ID NO: 976360 - protein, 330 aa, Homo sapiens
  misc_feature (65)..(65): Xaa can be any naturally occurring amino acid
CAGAPTEGLNDHRPGMMSTVLGIDEDPTILKASTPSDDGDPTEHARSVGPLVRNITQRSGIHYEXMRGDQNDRKTQGLEQQQMWGETGVRRSMGQTEVLLNTQREEDVGRGTAVYSWTMPPVGNTKLSVIHYAIAGSLQHPIQRDSSLKYAFRKATQEGNFRPMLFMELATKGNGRWTMAATCTSQINQAVGPQFFNSRSQWRPGALLIHQDQSQTYTGQRQVLREPQLDNTCATRLVLRGDDVGHDDDYTMGGPYQGGRVRETTWRKTTIARTRLDENTQQQTNTGATGTYKRSETEQIQSTKGQPTYTTEPQRRKHTKQTTNDTTQNK

SEQ ID NO: 976361 - protein, 110 aa, Homo sapiens
RWLTPVIPALREAKRREDSLSPGVRDLPGQYSETPFFKKKKKKKKKNFWAGLRASRKKRFFKTPICVFGARGGAQVRVMCGHWGHISVVSLRRRTPGPMELEWSGYSSPI

SEQ ID NO: 976362 - protein, 124 aa, Homo sapiens
MQRHTDKRGNKRTQETNNRTHRTKSTNKPTQDKSNRQRTPEPATAEADQPQRATEPTRDERGRQNKRRTAQTETQEGEEAHERRDEGEDEQREKHRDGRHEEQRSTQKQGRETEARAETAGEER

SEQ ID NO: 976363 - protein, 216 aa, Homo sapiens
VGGTDARYIKQTEKLEEGSGLKHEVHSDSRLAVTMYLRLCFAAAVLVWHVPNRCSHRVNLLSTSNILERDHDTLTVCNQGPSREPHIGGTTNTLHVHKTCQQTLEDMPWATWQAATEQKTPARQAATESRAMHTHRDGATDNAGAHHRQATGTNQNRSKDTDSYTKKQTWLTTGTTEEDLNENTQKTIDNAITRGATTQPNKDYNDTATHPSKKEK

SEQ ID NO: 976364 - protein, 105 aa, Homo sapiens
STSATIIIAIPTGVKVFELTRHTPREAIIEMICCSALSPRIHLVFFTVRGLTWDGIEQSHHSDYRIYTDTYVRVYAHLSTDVAIELETLVIAPIIRKASIHWDFP

SEQ ID NO: 976365 - protein, 121 aa, Homo sapiens
MRAKMSDWASEKISQNEGREALVTVKLLKHKEKGAIRLLMRRGQDPEDLCQPLITLMMELKPTQVATVPGSGNTHADSPTSAPSKSCGHRFLNAEIDRISNQSLRMAEEIEEREKKADRQE

SEQ ID NO: 976366 - protein, 151 aa, Homo sapiens
MPSRSLPGRGAPVVCDMFSGRSGRRWGVPAGGRLGPRGVAPRAPACAASSACGIPGLCVSHQVFCFPAQLGRRGPFQGSPGTMGQPWERTFHSASKPGRGCSRDLGGHEELIQRALAGSQKGEFPALLLGQLERFPSGGPSWKENTWEAAS

SEQ ID NO: 976367 - protein, 249 aa, Homo sapiens
QTLTFSASGPAPWCPSRKLFVWGKLEYERAEAESGGAHRATRERGQRCSRQNTRVWFVPPTLTWPISDMALREKLESPSIAVAGQNCYKVTNGAFTGEISPGMIKDCGATWCGPGALREKACLGGSQMADVGRKWPMLLAEGLGVIACIGGEARGKGSWITEKVCFRADKVIADNVKDREQGRPWPMSSVWAMCTGKNGNTPKGPGKYTEKLRGWLKSKVSDAGLQSTRIIYGGSGDWGNLEGGGSSLM

SEQ ID NO: 976368 - protein, 136 aa, Homo sapiens
APVPAPRANVLRSGGAYARGVGCCRQELGGGGGGAAETAAAAAGGSLEEVVTVGKRPGVGDDGRDPWQVGFPLLPSSPKGGGAAARCQTQAGVVRTLLRAEAFFLRQGAQRDSPLEGGGPSGKPFCWGPKAQEASV

SEQ ID NO: 976369 - protein, 201 aa, Homo sapiens
  misc_feature (116)..(116): Xaa can be any naturally occurring amino acid
MSSRCLRGETKPALLLEEEKRQMTVEMSPKSCAIHLPREKHRGAILLFSLGNSDPSLYVLVCAVINLTCVGVKADWHGFDFSFLDGLIVALLLWEMPLYIFPSLTILFSGKINVMXSSMLKSPNPELPLNLLGAEDGPPEVIQQRTGGDAGPAKWNGTWEQAWAQGNRDPGGGEGSTDQRPPGGTAFVHNRRAAAHRPQEP

SEQ ID NO: 976370 - protein, 143 aa, Homo sapiens
MRRERRTHRHTDTQSRHYIDKTQQADERKYDTHTGEQTDSRREHQTEKDGKRFEESTERRPRRDNKQTKASTHTSHQEHDEDNQKSATHTHAVWHNITRPIRKNPRDGRNRDCKIDATQTSCNLDVGPVTTSRRRNITGEPTE

SEQ ID NO: 976371 - protein, 116 aa, Homo sapiens
  misc_feature (35)..(35): Xaa can be any naturally occurring amino acid
VTTISDPGKMAAALRVRVECRDAGLQAPWSSSPAXLAGNRVTGPYLRIQEVLKHGQALSGGKGKNRLLRGGRVRPRDASLVWNATQSRIPERKKGPMEDPFLITSNNTCYAEGTWP

SEQ ID NO: 976372 - protein, 263 aa, Homo sapiens
GSVSISAWEGAPRWAWTLFSGRVGPGGWGVLRVGRLASGCGTPARPGPSSARLPGVVSHQLSALPGSAAAGPLQFPGPWPTWSGLSWPSSRDGLQRALGVAGKIHQRAAFGARGEFRPSVPMEMFPRGPPGKEHFEGGHYIWALKDRDISSRGWVKVLLNLGGRVCVAMGSVGGGLELWWNTGRGDAVGGDQSRRFKGRGNIRGGDFRAFRCARKHSFMGVLRTVVKRNRLWLSLEKWLVQVCVMAGQWIRRGQRGSYAGVVA

SEQ ID NO: 976373 - protein, 194 aa, Homo sapiens
AVVSTQSGITAGGGARWLTPVIPALREAKRREDSLSPGVRDLPGQYSETPFSRKWKKKKPKDKKKKKKKKKNFGGASGPGKGLKHIGGGRGPKWCQGTRGPRGVPRETRGTEQRGGRVSPPYKKKARGGHPGRVVRPNPEKGAPESAQRGGRYQHTGGVPKGEGPDSKFTPRGVWGGNDELEDMPEQSHRGHNT

SEQ ID NO: 976374 - protein, 168 aa, Homo sapiens
  misc_feature (168)..(168): Xaa can be any naturally occurring amino acid
AGRGVTPVIPALREAKRREDSLSPGVRDLPGNIARPRSPENGKNNNNPKNTKTNNKKKNMGGGRRAWTQEKGFSHTHCRWGAGGTPRWSYSGNNGAPERRCQKKHSAPRTQGGRVFSTNNIKKARAGGHPRSGLRNKPEERSRGGHKRASHTGGPQRSQIKYAAGGRX

SEQ ID NO: 976375 - protein, 287 aa, Homo sapiens
VDVPVRWTASDTAREAFWTDPTTNRPMKSRCAALKDVYKIGFLVLFLSPECETDVLKPGMVVTFCSNSTVYNGTYHLSKLHHDSFDVTALPGDNVGASMSTNCVCHRDVTSVDTILLVTCKGMKPTQVEAAGLHCSGAYPEPSQAIEAPSYCPVLDCHTLQMCLTQFAELSTEKIAAASGKMLRYGLILESADAAIVDIAPGKNPSDVEGPKKSTWDHVNLLDSDNTAMGHQSSDRSCGNAKPTCKNKRNENPDSPTNRRNKPTGYGPADTATDEPQKCQHWQRAKP

SEQ ID NO: 976376 - protein, 73 aa, Homo sapiens
CFVSAGSKSVHECRLCCLSESHVEKRYGRQCLVPLMGKTRVDVLRYAMSKVCDYVRQVQRTEDNHATFCQITP

SEQ ID NO: 976377 - protein, 241 aa, Homo sapiens
MSIPHTYSQALLSARTRGNHNSQRQTGSVEHKELLAPRINKQAILHSENFKQSSTISHRITHTKSWPQHSNEHTSRPHPLDHTTLPKTHQHQPHAYTDTTHQPDNNPTTTTENTSASIYPDRPVTPDCPWQNIEAKEQMRRHAHADNSDHTESGTHSACEDRATIATTPHADQDEQPYRQQAHLRKPKRSTFHTDTSQSTRQDTRATCSYNRITTEPSEHYNNQPDRKLIVQRQYTDLRSA

SEQ ID NO: 976378 - protein, 142 aa, Homo sapiens
PRLVVTPVIPGLREAKRREGLSCEAQECENLPWANDTREPGSSLRLQEHTKDCVRENTVETTPGETLETEPDETNHRCEERSQRGHPQRRGNGEPVYRKEKARGPQKSEHPGAPRRHKEPRWNINHAHNCNTPPRTVTTDNG

SEQ ID NO: 976379 - protein, 229 aa, Homo sapiens
MDQDRRPTRANCTTNKSREKKEREQTTAPSCCCYFYLLCHYHTMLYTDTRHKSDPTKTRDDERTEGEPAERTGKEKGETKSEDEGETEESNETKSGKKRAVKRRGREKRNDKREEKEDKKRGGEEERGRRRGKKKEKEGERRGSGMENAGERRDTERTKNAREKARDEQRSDESKHSTSETKGRRERDSSNSSMGAAEQRHNQRGEGPEGRGQNERSDRGERRQRETHQ

SEQ ID NO: 976380 - protein, 169 aa, Homo sapiens
MSSYASRATCCRAVHWTLLNNKQCAAVPYSLLPPRHALLPRPQPAGRPCCTSVDYTSSAMRHRRLLPFLRHFLPSDYASSELGTAGDESDGAARPRRATAATLPPPAVAVAKQQDAAVHAARACVRLLDVSVNCTRRLHGRDECVRESLQRARVERERPGDPMRVGLTP

SEQ ID NO: 976381 - protein, 241 aa, Homo sapiens
MTTSRQTSTNHTTVQTSVQDTISKQRYTRVEETLMKQNHDYEQSIDGKTNSNAIALTTQRGAGEHKREEPAKRKKNRPRNKPKRQEEKTQKEKRQTERDTRKETTEEKDTQKTERRNSERSGDKEGDERKKQERRATREQNKGRQEEGQEPKNKTSSNTARPDRHSKRKKATRRGTRGEEQQTTELDTGQKATAAKRQGANVPDQDTDEAARGEPEHETTESNKTRKHTKRAGERQRRDTT

SEQ ID NO: 976382 - protein, 154 aa, Homo sapiens
GRARWLTPVIPALREAKRREDSLSPGVRDLPGQYSETPVLQKNGKTKTKNKKKTKRVCAARALGPPRRSFPKHTLRGGGARGAHRGATVNTGAPNKRVGSHKAQTPGGQARQRGRGGLHTHKYKKSAAGEKHREGASRGTQLSQKWGGPRRGTT

SEQ ID NO: 976383 - protein, 112 aa, Homo sapiens
MGVRATSGGPKGRGFLREGKLRRGPERHRGGAGNSLSPQIYKKKRARGGGSPPEAGPRGNTKIPKGEEEPSKGRHPNRGGGLSLHPGGGGSPKKERAPRNNSKYYKARGVGG

SEQ ID NO: 976384 - protein, 47 aa, Homo sapiens
  misc_feature (11)..(11): Xaa can be any naturally occurring amino acid
MQIACRAGETXRVCKGKTHIMRWCKPVDVGLDNAGKRKILYSKYIPV

SEQ ID NO: 976385 - protein, 138 aa, Homo sapiens
MQHRKTKTEGECGGPAPRGAGGGGSPIEHLWWRVGGPVRPAGRAGEEDARRLSGEQKRKRKRKNSAGGGGTYSTYEYREQSGGRSSKPGWAGYTKPRGEDELGTEATVGGVDNNKQRATAGRGAKKNKTAARGGAVGG

SEQ ID NO: 976386 - protein, 102 aa, Homo sapiens
MLNNYTKARAGGYTNGRVVEKKQTRDECVHTGPGFQRRRDTTSGEATQGEKEKKLTTYGPTHKPGGGTEWLPEKITKERKKQNPKKFGTDAKKKKKKAKPKE

SEQ ID NO: 976387 - protein, 113 aa, Homo sapiens
MGGGRGPPEKAFKNTHRGGGARGPQEGKGNRGAKAGVPREKPGARNKGRGISPHNIKNRAGGGKPRSGFGEKSPKEGRGSGGAPYGGPLYKKGEATRRRPENSQNISAPALRG

SEQ ID NO: 976388 - protein, 132 aa, Homo sapiens
MRRNSTELLPAPECVAGDQAAPPTPHTPPREPGITGRETHPTAEQHRETSRYRPPPGREGSRETNSQGRYTETGTTMSKHRGTHASRKLTSPNAATKPKAKYRPAHGAPTRASVGPPQAAQHITHTGRNTSN

SEQ ID NO: 976389 - protein, 427 aa, Homo sapiens
  misc_feature (72)..(73): Xaa can be any naturally occurring amino acid
MPKGREGERVRVDVSVIADPKAVRCKEVRSATDKLGEMPRVCETKGVYGNLVCAIWDEGTIAYAPNERIIIXXSGSAQNMRPPDLYIIGCATRGRGEAPIPRSRGRALQKVAQSRDGSVKRTICNAQRTPMGTRPKRPGVTSKAWRLHGLGPRTEATTKPKDAPKKSTNVKDKPGRNLWLRGTREPDRHGTRGLALGGQQHRGAAPIHPIAHNGTEAQALCIPSSGTPMGTALKPSRVQRERHRRLAARNSQNSRKSAFQGHRRMGVGTTGTQTGNRDGELPPKSRTDLEPGPPATQRPLGPPGTGSGQTHPRGPASHPAHPADTDSKTAETKLANTTPRAKHGSPKSSPQQQADNGKPPEATNSRGGLRRPSPTPTTGGGANTPPAQSAPPQAGTPPMGGPKKTLAADGNHPRHIHRRHHTSITQR

SEQ ID NO: 976390 - protein, 252 aa, Homo sapiens
MCVPAPDGRFDGHGHEPPEVAQNYLLGGELKVRTKIITLRSDNDENVALSYACRERYRCIGAGGRGGVRTSLNAEVIELRKGSSTLKVIIWAYLSDKLSVSAQSVYPFARDFRQVITSHQLDFESVRPCGFGDQVSIFSWDEHFSYGIVGTCNGIVTNAAQNGVATRVAQGTAETHSLKGTKTGKKPVHWSLREEWGRQGFPPRQREKPKHIARVGLNTPSSDENDSPFLPTGLHVVNHIRAPPSPLLPDVR

SEQ ID NO: 976391 - protein, 132 aa, Homo sapiens
ICEAAKEVVAAWELRGSRSGCVLVGPRGGGDSRRGDGPECVTSVFSCPFPVTSLIDQDFGSKSDPVCCPFTRIGGMGHVVMSLAGLNGCGTVNALSSLKSSTSFEVPCWRQSTKTSALEVLLYIDIAKRPEC

SEQ ID NO: 976392 - protein, 63 aa, Homo sapiens
  misc_feature (59)..(59): Xaa can be any naturally occurring amino acid
MAVAMGPTIFVPQISYALKRFVQLEDQLFYAPWCVTYYRFHAVEIICATPGITADKHIXYASL

SEQ ID NO: 976393 - protein, 186 aa, Homo sapiens
LTCSAWCIPRYRPMRPAIQLVAQALRCRDPSDGLPAAVQVAEQLHERQSRGVRVIPSPTVLQSLNFSVSFLANLYATLSGCSVLIFKGCRYRWWEYGDKVYMMRHLEPRNKGSSNGGVSSTVPHLEDTSVLITFECCQVPLEGRPNLLLPSLVQGHSPGGNNILFRLGHWIKVSARGPSHVIVTHF

SEQ ID NO: 976394 - protein, 103 aa, Homo sapiens
ERACAARQRSPRIVRGLSLSAGAGLFAPVVPQHDNHHRAGVRRVGYSGSVGSRCAWKFDPLESHDVSCIELWLKFAREIRTSNTRVTEMYAAYDHRRVSCARC

SEQ ID NO: 976395 - protein, 96 aa, Homo sapiens
MEFQYYATYAEDRSRKKKGQRIGPLGDKRAVSDIFDAFRLDTLLAVYPNYLVRKTVGYPVNQKRLSNELNRSIGRTQATASWGMNEKYETVSISYD

SEQ ID NO: 976396 - protein, 138 aa, Homo sapiens
MAVLATSIALVYSVPRLSRWLAQSYYLLSALLSAAFLAREETAVALSSDLSHPNAKTVNPCDFDWREVEILMFLSCHCDDEEPEIHVPDDSDNYPRRIYIGPLSICIATYKGVRTIDEELATGHELVAWIVEFFARLV

SEQ ID NO: 976397 - protein, 102 aa, Homo sapiens
MPDTSRRSHTESCKVELARQALLLETNYIFGTVKNTWVEGNTDKPPGFTWLTGGFKLQPSQATIFFTRSPNRQRGFEKNFNMIKFNPHTESFNLCCSRHILL

SEQ ID NO: 976398 - protein, 36 aa, Homo sapiens
MTTLVFQRHGGDLGEYNTLAAARNVHFKPCPRGSCA

SEQ ID NO: 976399 - protein, 116 aa, Homo sapiens
MDIIVLTTEYPGVCDILKPPDFMQLLCDSVHVFAKCSATQNLDVSALKTYSKSFHPKFIKDVRVIEEWTTLRQHRPWLQSFLDGRELCLDPKEKRGVQTGLVPQKFFEEVAETPYN

SEQ ID NO: 976400 - protein, 110 aa, Homo sapiens
PRAAQTEITCLINVNGYYAGLNGSAVILRGTPDTSVHISFDSVNKCMRARLLNRHADIAATGPVRTVLVAETLVATPTRSQWRIDQSQLACQSCLLGQNMDLSASQVSDN

SEQ ID NO: 976401 - protein, 40 aa, Homo sapiens
ICEGMAYLHAQHDIPLIGFILEQGASCSLLSEQKGVGSQN

SEQ ID NO: 976402 - protein, 90 aa, Homo sapiens
IAEWRRLRRRSPWAVTRLLDRCPPGSAIAGLRFLSGVPRARIGKSEGWSARMNETLASARKKRWLEITKWCNTWYGSESEAKCLPVLLLA

SEQ ID NO: 976403 - protein, 96 aa, Homo sapiens
STVTYRASRTRVLVTHYAIIDSGKVKDSIVRDVVIGDVNCGYDQRVYGASDVNSNWGGSLSSLEAMCIREFEQGDGLMKYERDGVVIGYELVGPRG

SEQ ID NO: 976404 - protein, 85 aa, Homo sapiens
LETTLYQFDTGRSGTVDPQESQKALTTMGSQAESPGCEFNSQNRYSTNGQITFDDYIACCVKLRALTDSFRSTGILLSKVCEFPI

SEQ ID NO: 976405 - protein, 144 aa, Homo sapiens
MKCNRTDLYHLKLLLQVQIRQGTNLVTIKQDQRRVHLSEDTTHGFLKLEKYGAHTSKQLGNERRSKRRLVVFVLSSVLYLVSICPVTAAVVCLYEACGKIDVLSIFFLILSNVSSLETGAEDKIEVSKYYVKVQIFEYHCEMSL

SEQ ID NO: 976406 - protein, 148 aa, Homo sapiens
KAEVTSRMRFVVFSKLESTSRPPYHTTLFSDHAGQLSRVPSIPYLKKNVDREWNRDNTPWDSSNQILQGLAAYCLCLLPPVPFSGQPVLFLLQMVSSNGVLPTTQHTLFLRRPFLLVRPSGTHYLFVASSCRVPSGPHTLCNFYATLL

SEQ ID NO: 976407 - protein, 322 aa, Homo sapiens
EHFLAEGAHRAQEARSSSRTMSSPTPGRKALGRTPRVPGRELRRRELTQTVSSRRSRAGTGGSPSDNPAPHKGRKKLRGAGGGGPKHRVLFQPPGEFQGTSFFPPKKPRGGRRPRAQRPPPDTKEARTRYQVPGRDRVWPVVAIGIAGRPGRGHQSGDHTNGGRLRATPGPRHSQRHTQREEHPAVYGGTNARGTPQQLSSCDPSSVDRPYKRLRKKETPPKPPWGVPPVKMGWNNGAGHNKRNDGGATRNSITTRQGHLWGGLPQDTRNRRLRGIIYKSTHERARKGILTTAGGRQKRGGALHGWQRGDGPGTEPSSPDTR

SEQ ID NO: 976408 - protein, 104 aa, Homo sapiens
IVHTAVIPADKETERGQSLETARAGCCESQNTSALVSSTHGRREHSLRTRIIPEINNSVAAKSTRHFHARMTDPSYRSLLTRHGAIFDKCKHHSLQEVVRFNLL

SEQ ID NO: 976409 - protein, 97 aa, Homo sapiens
MSDIIKTLNPAEQGGGNQQHRKAKTQNKEREQTSETRQTHTDNHQSHEQTNEATQRRHHKRRTEQAQTHNKHNNQSNSTTQNANQHTRTDTTINNNH

SEQ ID NO: 976410 - protein, 187 aa, Homo sapiens
RARWLTPVIPALREAKRREDSLSPGVRDLPGQYSENPVSPEKGNKENKTKGQKNKQKQKQKQTRCGAAPAGPAGKALQRKHTIAGEEARGGPTKRGHRVTNRGAHKSRGVPHKRENTRGGATGNKRGGREILLPQPHYIKKKTERARGRDTQPRRSRALAGGDTTTPSQREGGEEHTSRERGGAQQQ

SEQ ID NO: 976411 - protein, 86 aa, Homo sapiens
SRPERHFFGNLCAMRAKWRKKANAQVWKRKRHDTRLTAEVQVNPLALLAPCCEEAHMDAGNMVNGPDAWGNAWGTRFVRGEPGMLS

SEQ ID NO: 976412 - protein, 249 aa, Homo sapiens
QVSALRPTLAVAQPETQRTCDVQASSCLTTGPLRRWSHNRSVSSEKSRREAASGQRSVPMLLPTIILCEEFTPKWAPFIPLDSCHHPTFRTGCRTLMERSHHPTGSRSCNASPTRPFNAKNLRAPIGSSYSPPVGKSGGHRSPRKHCSPIGQQREDRIATTKQTFVLFHNADIRSNTHIYTHIRSPPTYTASNHCWTQNIRGGTSTPNPIYTKETADTRMSIAGLETMAKSYSGDAPKHIEDRMTVYTH

SEQ ID NO: 976413 - protein, 238 aa, Homo sapiens
RCRKSGGLLAASRKMARRGGERGGRLLEAPGPRQPRALSCRAATGHVTDANSRREWDTVKKAPIFRPRSRRHTAARPTQAKCLPGSSTSLAQHTGDPSLTQTSSINFLAPLAHIPGTTRGAPKFGRQYLNDKDNHSPAIPCTEGRPTTGGPQAIQTVDNTNLLSHLQPTTGKTKTIPPRAKVFRAAPAVKLPKRKALFRFWRGPRFNNRKFHDPIIPSWSDWLTRTYDKNHRRELAPW

SEQ ID NO: 976414 - protein, 271 aa, Homo sapiens
FPLGCFPAQEPQAVGSHGPSRNGMVLKPHFHKDWQRRVPRGFNQPAGKIRRRKARASQGAPIARAPGRGPIGAHRALPPGLRLPQRKWLRAEAGGFQAVRGEAQGGGRAISTRACGPDTIARIFRGRELPGGRGGKQMSSGGSPWRGPNWLPRRCLEREVTGFHQNFNPFSPPREIGPCGAPPKGGGTDRGVLGLEEDRWKSGAQPQGWNAGAGVTMGPGSEGKTVLHIEKGRDNGSRRSNHIGGGRAEPNFPKRAFRVRLSEVVGPGWPN

SEQ ID NO: 976415 - protein, 136 aa, Homo sapiens
MINESRMHELSNFWGGVDVSPENSVYQSDLADDRGGDEEPPRQVGRRRPVPQRGQCPAGGEDLRGLGHLRVLGVCLPRQKYIKTQVGGVKQTRAVGLRKAKTTQLERTRSRRGENFDSRGTRHANNWGLAPEWVHR

SEQ ID NO: 976416 - protein, 103 aa, Homo sapiens
  misc_feature (93)..(93): Xaa can be any naturally occurring amino acid
MCLPYWAHFKTSKNHRNINSYTVFFSPTNIQTDYIHHVSPCAHNFITNTRERPLSYMGPSFGGRPPQIPQKEGDLTKRGQEVFQIIKALKREXPREKPYFAGG

SEQ ID NO: 976417 - protein, 321 aa, Homo sapiens
MPQYQTWEEFSRAAEKLYLADPMQGTCGSQIIRHSCLGTCRAPQLPSTDSRSGSAATNTQTHMLQPLLPRHALGPNNFPQGSNLKLADLYWVSPNGKAPATWLTHWRHHLGACTLAHHLHTLRPLTLSGPRRLPLYSATPATPLHSFSPAPTYHARTTPLCLRGRTPVNTPRLTLIPPFGLNPLKTVLDNPLASPQETRAYYTANASTQLLNLSVAHTRSTPPFLSPLNTLFKTLYSRQAHKGNQPLINAAHNFGPQQIRRSVLYSSYPNAHLLQAGHINMVPPLLFLSNIFSPTPPPILSLTVSDTNTTSLFVAHTHSQH

SEQ ID NO: 976418 - protein, 207 aa, Homo sapiens
DTRRRSGTPKEKKAKTPRRRSAPRPRRSERVPVPTSQLTQGTQYCLCNQVSYGDDESVRHTDECPIEVSHFSCVGLIIKPQGKWYCPKCARAGETEKNMGTKPRGRKSNKKEKGLTKQGKVCGHQAPGVDARTKLTPGVITINHWPALVLEGGQREVVTKVSIAKQTVFTTKRDTHLLFNREWAGELRVAPLSFIEATRLSPRTGVL

SEQ ID NO: 976419 - protein, 112 aa, Homo sapiens
AVACENRGTRLVYPCINMMFTAWYRGMSVVYGIGTWSGVGLTCLTIAGPMAKSSVDQRDGSAGECTQLNLSERPKGFHVETVVTYNEDLVPNTEKILNYVEIMDLVGPGTEP

SEQ ID NO: 976420 - protein, 318 aa, Homo sapiens
  misc_feature (54)..(54): Xaa can be any naturally occurring amino acid
EAQARVSKGTCAAPWGGGGPRSVASAVRLTEVGAQRGPGEGCCPKGGGVRMCPXQTLRRGLEYRAGFRRGGGRDPKYSKAKEGRPARGLSFFNPRRGGGPVGELGKGRWQDGGNNPPSCGRGNHRELSVVEPRGGGHNLAKAPAQRNRAGVPPSIIPQPEKGGSSTSKVYKHRSALGARNLARRGAPLVTWPTLKCPALQRPRGWPKTSGVLNQLTWGAPGEDLWRKGVADCPLLEGVWAMNLALCYLEAPPLLVGHPALGEFVASWHRVFPVHAAWYSRTGRGIYRCQCGSPAGRLACVRHAGDILWTLWRPHWRQG

SEQ ID NO: 976421 - protein, 254 aa, Homo sapiens
AGELQPELRDLRPPAPTAWAARCAPEPAQPSTLRPRGGGVLPRRLIMRVRLAGSRVCRGVTGLHARDPPGGTFLRLGPKGHFKPPRSFQRETNRGTKGTHGVGSCARDGVDVGPGFTGPKQKHLRHKVVDGIPVATAQEQNFRGIPFVGARKACTEAKSGNEGAQGGQQATERQWGGHTLSITGGDNGNAIARVNACGRPGDSGVGTPGCNIAISGKEKRHRRIRRVGYTRRRTSGHPRATIQVAAIRGEEHCA

SEQ ID NO: 976422 - protein, 73 aa, Homo sapiens
  misc_feature (52)..(52): Xaa can be any naturally occurring amino acid
ALSQGVVPPRTRGVCERYALKAKMAKGKRLIINIVVMWTVRFGQVHTLVAIXIYQMRWHRQKNHLKTFENGGC

SEQ ID NO: 976423 - protein, 290 aa, Homo sapiens
GCDRGLTRVNPGAQDVYQRGEDTLIPELVKLPDEYCESHALDPVSAPDTYVYGCELKARQRLSVSKVDNDDNEHQLSFEERQFEGQVADRDEFAHGWTAEAMRLRRCQSKYKVTVETVVNSCLNKPEGFPWGGFEENTTQGGLKVDSVESRGHVHCELEQHLVAVEEDAESEDDEEEDVKLLSNIWKPVLPLEVVARFHGKPVPLGADDIMMTIMMTEDYDDDDDDDRSMMRTLRQAPGRTHIEIPSQQAQGQLHERSTSSPDQGRTSNEHLNQRHLQHKDIDKSVQGNT

SEQ ID NO: 976424 - protein, 196 aa, Homo sapiens
RWLTPVIPALREAKRREDSLSPGVRDLPGQYSETPFSPGNTGNKQTKQNTKGTKQKTKNTQKKNLCGARAPGVSKKGAPPEKFFKNTLAGGRAGAPKRGKADTGEQTGVTKREPGAKSTRAGEFPHSNKKHRGGDHTGTGFRGTKRPRRGDTGGAKKRGETKPKGEAPTQGSPRKNNKLQPPAASRGGTRQERQPT

SEQ ID NO: 976425 - protein, 210 aa, Homo sapiens
  misc_feature (109)..(109): Xaa can be any naturally occurring amino acid
MRYGDRGDVELEWESETSGPERAPEKPGKYDHAVSGGLVSGVSDYAEEKEIQSSNAERAMCVIGDRRSREQKAKQEREKELQKVTIKKEDLELIMMRWRYLEQQQNAVXGNTWANVVEALMCRNNWLRAFPKKREREKKKFLGGMGPREEGLNTHPVGGEGPMKQVNGHTRPEDAGSKRGGSPKKKGGTRGLNNPEVEDEATGAKDDNSG

SEQ ID NO: 976426 - protein, 132 aa, Homo sapiens
  misc_feature (132)..(132): Xaa can be any naturally occurring amino acid
MVQRLEIQDLGAIISGSVDDPLPVSEEIITYGNWKHSPIQMLSYHVLIMQVTMFNRVNSVKWQKQKTPETIPWDEDVLITLGTEEFQKSETRSLKGYVSTRGSQRNDTVKGNDLEVGTTGGGMNRQQIMESX

SEQ ID NO: 976427 - protein, 120 aa, Homo sapiens
  misc_feature (40)..(40): Xaa can be any naturally occurring amino acid
MCGGRACGPEKSFQKPLLWGAAGPPERCKREQRGHHKRVXPEDKHRGATTRTRGRRVHFLQPKIYKNERGGAKQPRRLFGAQQQPPRRGGRCGEGQNRGGPYQHQAAALTRGDGADYIKI

SEQ ID NO: 976428 - protein, 163 aa, Homo sapiens
GAATHPIDKVQLAKVEDGKRMELSQLLNEIRANYEKILTRNQIETVLSTRIQLEEDISKKWGQGSRRGLRGLIKQNSRRPDASGTTCKWKWNLSMLWKGALKIPTCQRAALPDASEGPRDCDGPGLEKELQEVRRGSKSSSRARDASQHEDEVEQEIAIIATS

SEQ ID NO: 976429 - protein, 408 aa, Homo sapiens
VTRSVFMAVNFRDLPMPDMSSFSAFLCCLSPCDATVTIAHQHHHPHKQPHCKHSITASWPASFIHQLLAGHSDSGIHCLHHRFNMHRLLACQIGMSGHPHSMVPTASHSRTKGTQPPQQSQLGAAMLEHFLHSLVSTQMNTLGLLLNFHVSRDGCRGPHWTRWHIGFLECNTPFPGRLHKTLHLQRTDIHAFDTRGLTQDTTLDTVHWTTSVYNLVDHTRVYTHPFLLLVELHLTHTFNFVLSIGAIDELYDVTNVRMHTFDLWAGTFKVVQYSAFKDEIIGKYIHVELQVYHLVGQFYQRQKGMRHRDTIFAHNLDNKHICTVHPTAVGSDHILWDAVSHYGAVHLQPHISPTHRQRHTAWGITLSRYYSLDTYLLSCRVSPTLYVNILNQHLADRATDSTTTPTVL

SEQ ID NO: 976430 - protein, 138 aa, Homo sapiens
RWITPVIPALREAKRREDSLSPGVREPAWVKYSEDPGFSKKEKKKTKKKRKLSVGGAARTWPLAEKEFSMKNTPEVQGGARGGPPRKRVGRRVPHNGGDTRTGYHEEGKNPEGQQQQAEGEGCTTPASEKKGPRGLPH

SEQ ID NO: 976431 - protein, 161 aa, Homo sapiens
RRATSCVTASVNHHGHLSGSAALKHSSSLPSWAWSPVASTETTFNSIMKCDVDIRQRPCTPTQCCLAAPTNVPVALADQDATKEITCPGEPRNNEGSRSFAPPERKYSVVTSGAHSWASVSIFPARLWDPASRSNERRSRPFLCVPNSQKLLYLRAGLMEL

SEQ ID NO: 976432 - protein, 313 aa, Homo sapiens
ARLHAPPLPRLNRLRSSRNAPEKGSMVTESRVLSFESTSPGPPASCRPEPCHTRPTLTVPGNLATYRAPNGPYQIIPGTWNPCVASTDTGSWYWTILLNRQFCGTPCGKGCQSLRPGQHVLLPNCGWNANLGPKALEICSVVHTLEPTPEAHTPRAGHGHPGADHSHITRDPVNVAWTMETPRCVEHCKRGLCCKNPPHVDPLWARAGLASTIRPFIMSAQLDMNTERIYYAPAKHGAREITDIMGGQIPHILSADHTVERVTTFPTCMCFPQTGERPQSAWVSFGMWRRAYSTQQCGVLQETTNNQRGGATG

SEQ ID NO: 976433 - protein, 112 aa, Homo sapiens
TLDLCAPLLPDLPPLPFHSSSALNLLLYIWCRSLFSYTVAALMSSHMALTEIQSLTVQSQRGRLRVSRRRIVRHEELKASLRYLGAQAYSGKPQIIATRARKNEEKTEGHNQ

SEQ ID NO: 976434 - protein, 202 aa, Homo sapiens
MGISNEKIDVNAAAFGSLKKEMCVSEAFKKTDLGQKCPNIKAETWSHTFYLVILHITYRGQRENTFMCRKNFTLKTVPATNYNHHLCWVLPHVLKNSNPSSFCEHSYSCNGQSKENLKHKLDHVIGELGGYNGTVYGNVLDRGKRFQNSIGEDTQGLKGYCLIRKNRKGWPSRGPVAGSIDRYFRDICVVPKWLATFKSSPI

SEQ ID NO: 976435 - protein, 83 aa, Homo sapiens
GTKLLLSHAELPFRLASHEVLARVVSSIPSAVSGRAGVDETILPGAGITQEFWPDLVSIHRESEEPDDKHNTNGAETGLIREP

SEQ ID NO: 976436 - protein, 77 aa, Homo sapiens
DLSRGEVFGQTCVRMPGDINRYREEYNSSGSAVSMILHYENTRGSQNHFVENVALYDVTNGELELPWIVINARISIA

SEQ ID NO: 976437 - protein, 306 aa, Homo sapiens
ETLTFSASVQRHGASRKFFVGGNWKMNGRKQELGELIGTLNAAKVPADTEVLVLPLCLYDFALKKLDPKMCCGCAGKCYKVTNGALTGEISPGMIKRLGANVVGPGPLQRDGGVFLGEADELDWATTRVAHMAPDSRGTREITSPCMGGEHRLHSRRNAGNHRENGLVRPQDKGSSQIHVKDVEAKGPPANMDAFGGHGYRARCDTSQRGLGIVQEKLRECGKYSASDAGIKRPRIIMEALCLGTLHEVARTCGMLLGGAPQAELGLYPKSHTFPPCTGEAERMPRIGGSLGHHDFGIPGGRPMGE

SEQ ID NO: 976438 - protein, 176 aa, Homo sapiens
RVAHAVIPALREAKRREDSLSPGVRDLPGQYSETPFSRKRKNKKPKGKNNKHKKTQKKCGGGRGLGAREKKASKHHSAVGPPARPPRSGKVNPWCTEAGAPKKKTRRTRQSGRWWVPPQKKKRRGGRNRAAVCDKHSRGRGEERATRGPLTNQEAGPSRERRITKYRHDRGRKKTK

SEQ ID NO: 976439 - protein, 198 aa, Homo sapiens
MDFSMMLRSTVVAKARAGTRNTSLQIFSDTTFEDLTKCLCWLTTILLNHVVGDLKNRAKAENGGLPGNVDFSIRVNTKNEATLSSSLQKYFNLAKLILKGKAKHVTRLAVYEENTLTVGTLHKNLRVDLYTPSGASANVWKFLPLRFSPLIFVWTLIFSRQFWPTGGRGKEESLSYDGEHNSFRPPACRAHKHWGWDT

SEQ ID NO: 976440 - protein, 38 aa, Homo sapiens
TTQHKQTQQNEKKDVIAIYGPSCSAEGRAPGAYRARKR

SEQ ID NO: 976441 - protein, 175 aa, Homo sapiens
ANMAAERGAGAATVAGDDGRLTGGSSLKNPAMKKGRNTAVAICADLSEQSLKDGRGAGGGGPQKKNMSCLVDMEPHPTWTEMQEACGCESLSPEGNDCPELETLCLRKNLIKCMRIGEELQSLRRAGSLANQIKKMENLEALTESGDPRYFFKSVRNIDGVDKVTPIEKIFLVNN

SEQ ID NO: 976442 - protein, 225 aa, Homo sapiens
MPLHSKPWGTRSKNSVSEKKKKTKQTKNTFLGRGHGASEKKVFTTQFCLWGARGGPSEVHRGPRVQKRGWVHKGRTFGDKNKWRGGFSPPILKKTGPGAEPPRGGSYNKTSKKGGIREGTLNAESHNKGGVPKGRPANKENKPGGGEKTEQHTKQRQQRLTTDDEDTIETRPQDTEDIRTHNTQAAENESEHDTDNRDNKKTTRQQMRPKTKATKSTADTHDATR

SEQ ID NO: 976443 - protein, 137 aa, Homo sapiens
MTTRKKQEYLKALAHEELFENNSKMISTNTNDSVLTPPRHWRSLLHQADDYVKKVNPKKQIRADEKPQEVNIYTTLNEGCQQGLRTLRRDKISELHSGVIPGASQPEQACVFFVTTQTRGKLPSLDVRNSLGKRARS

SEQ ID NO: 976444 - protein, 197 aa, Homo sapiens
MDIQTQRRSRHSTDHHSPSSCTDTFERHQRDNDLVVTNKKPPGDRDTLLLIRGKNPPRAPLCCPAHLSTITATGSPTSPHNPHYLTPPRHNTANTHTTPFLLDRRTDPLYHQQRADLVRHAEHQLQAYHTTAGSHTMQARHHIHPAESSPNSNVDGCITMRNTRTSHSSLVVRFLFVSALLLLTYYFSAMVSIDKST

SEQ ID NO: 976445 - protein, 87 aa, Homo sapiens
CRRGKRCDGGNQEEPGDGFAVSGLKEVHERSEIDAEPPDIKAGTRKQPGGGWKKERNRDSQAPVLCNRNQREQLSRTRHSLLFCHEH

SEQ ID NO: 976446 - protein, 131 aa, Homo sapiens
MSHQNKFTNSDKYDDEGSVSTRHVSIAGPKGTYDQAWSPKKPILDGLNLEIGRDILGRFKRRTSRGHWGSHLPFWIPICKPRKRLSHNFFGLCLPGGGPPSIITPNEELKANNGNHLVTGLGDDSAYTVCC

SEQ ID NO: 976447 - protein, 318 aa, Homo sapiens
SEQELVDRRSASEGAEPPPRAPLPSGTGARAGPRRRPAVPRRQAGVLARAEETRGRKTRASAGEGAEPRGRRRGCAVEGTRPCWRGTSRQSNVTPPPDKGWRGNKNTFSNRDGPNTKTASRSTTTRRMSGCTGHRKRQTQKQESNPHTNKKRQHQQTPKETRTTQKKKRRRKEPRETKTTKRHKHTKSSTARRTTKEHHRAQKAGQTKTGTQTSDGAPESSDKEADSTQDILDKTHRHIAEVKRGKRQSSRVEKQVENTPRRRNEDGERNKEQQIRRRKERREQSEGKNRISRRGRQRKGQQHEASTTTRPHTGASPA

SEQ ID NO: 976448 - protein, 136 aa, Homo sapiens
MCWLQGQAIPGRNRRAPSQVRLRRPQSSSLRPRQLDLWQEGATTQGLARAQDLSTQTVRSPWRARKVGRIADRAGNPFRGKQLFHMSQKQVRFMKPKCLCVPKVPGDQAHRICGRGIKIPRMAGRQLPVNTVPQTN

SEQ ID NO: 976449 - protein, 135 aa, Homo sapiens
EEWQRQGSQFREGCRRAGARGTRTRFPEHPDAPSPRRCPRRKVSSAKGRREEAQEEIGRLVQYTLLQKVEAKRKKGAARERDRLLQTKQSATHSSDSGGPRGTRPSGLYQGNLEDDLPGGNAGNTKALEEEPRPS

SEQ ID NO: 976450 - protein, 114 aa, Homo sapiens
LWLHYLTDKMLKQMTFKTKCNTPAMKQIKRKIQEFHRTMLNFSSATDLLCSTVCLSKLNVSYCPEMRGDCLEASVLFQPPSPQEGGTPILTGFQSAFQTRICFQMEMKYFVESV

SEQ ID NO: 976451 - protein, 288 aa, Homo sapiens
  misc_feature (88)..(88): Xaa can be any naturally occurring amino acid
NQSAVSGPSQPRERRCVRRAQELGMSYKPIALFPEHPWLQHPWAGPPVPYRKRPVGRRGSVPGAALLSDRCLTTCDRFHGYVQAMKPXGGPGFPEQTEGTLLSVIEEDGAKRNRRLPLLLARKGAAYERLEEEEVIIPMPGAPSQESCLGKKEEAEGPDVNRKGARAQAFGPYSGNWRRPRFLLAFISDWLNPFRGLRVRVSPCVWVPPRTQGEVASQVAALGNPPKTGVSSEVPMIPPMNLRSCCPRTFGGPTVQAFQILHWSELFPRGRAGPLAVLAKASSGAANA

SEQ ID NO: 976452 - protein, 163 aa, Homo sapiens
AKHYANGMVPRSCLAVPAEGARNQFIPARLGQDALSRELGPCVAGPRLETCEMEKESTRRHKGKPQEQESCPSLPLEHLRTWGLDVFRHWKTSDCRGCGKSHHLEKLEDSSGEPGAGAVPHNQDPRILTMLSPGPVRYRGEERQRLPFLFNFQRETLSGWELI

SEQ ID NO: 976453 - protein, 118 aa, Homo sapiens
SKIERGAQERARRNEARAASGATPLRRRRCAGRSRRAPRRRRARAGAETTAGINVARQTATEAPGAENAEEEGSHEVKAAEANKKQQTTTFPGKGSRTGGGPAGSPKGTPGAKKNPGG

SEQ ID NO: 976454 - protein, 274 aa, Homo sapiens
MLETFNTPAMYVAIQAVLPLYASGRTTGIVMDSGDGVTHTVPIYEGYALPHAILRLDLVGRTLIDYLMKILTERGYRFHHQAERGKSLRDIKEESLCKRARDFEHEMATGAFQFLPGRRATETCLDGQVTQPLQLRRFRLALRTLFSSLPFRGHGSLCGIHENYLQNSIMKVLTVHITAKDLVAPNNRCRRGHHHVPLEFADEFARREITLALDPSNNGGSRIIGPFWSASTSGWIGGLHPGLRATFHNVVPQQDFESRPQCHTEWFRRIYIVA

SEQ ID NO: 976455 - protein, 218 aa, Homo sapiens
MPLELELCPVALGGLGNNSCFIIAEIGRTTRRPDVAKRMIRWPKEVWALIVARFQKSELEFTFNRKALERPYTSKHSRGKTYGEHNNDNPEFSHDQYRELQRYAEEGGIFFTCLCMAGDGTLNSLHELNVPFFKSWVLEHPNNFPYLKKTVQKNGRPNGDLPSGNGSHGDPMKPVYPDRDSPFNPIFCSCQCPSEYPFQPEDVTLRHSDIELFCFQRI

SEQ ID NO: 976456 - protein, 252 aa, Homo sapiens
GRIERVLLSGGAIIGGEQNSGDQRSDTKLNPVDPFCSPSASKGRDVVPKKDYLEIDESRLPSGTLAETRSPGEKLREDWDPCQCGSTWQRVNSLYETKHEVQVENLLLMKCCKRNTKLNAWSWYGCTGRQNVGHYLFKKTEELYFINRTLWGEMICRYLDSKGGSHGVATTRPPTNLFVCTLWTRPTFYLNKQAFGTNARPKREASQMSRQFIPHIISPPLNCALAKVGSGMPSIHHTCGHKAFLASLKDYY

SEQ ID NO: 976457 - protein, 301 aa, Homo sapiens
GPTGCSETIFALFLIRLLARRSRLRRALPPAGRGTRGRLNRPEGPLKLSHSYLNSPCNRDSPGSCPNHCQEGSPVDTQLREITHSQWDFYTAPTPPGPVCGTRRARTHVERTTAPGINRGTLVTLTGQLGGNTVSWFAPTLENGVTNREENTKGEHDTVAWEAKATHTVHRDPRPRHRTPGRQLGLDRDTNSEHRHNLDRNWQGQNTRCETFHSAYNGGRTKGPGAHNCTVRTRGNCAYRDTGPIRHANNVVHEKYTPTELRHNGQKKKQQTPENKRNGETCEHLTRHRRRPEQTTTAATQ

SEQ ID NO: 976458 - protein, 340 aa, Homo sapiens
MNQTVQTFFSPVNSWQPPNYEMLNGGSTECALSLGGCPNNPAPPMSTVIHILQLRPSCALTMSYWVPVQQPLHEPLLPGLHSIRLLRCSLGTRNDGLATVDRGPGHMPPPPKLPEHLWPLIPGQSSLTILATSSSQVLIFPVPIGYDQGGHPLEDPRSSWPMTVYPKYSNVPFLRPLPRSRESCIKPLILNTAFSYQLCIPIKGATVVLEKPTTHTTNNTKPKHHTTHNKHNTKETLHTSTTTPHPHNLRAHYSSHIYIPTRKQHEDNECDNRQEKVAMSLHGVTHTKQHVPTHHTQVWMCTHPAGKRNELEKCPEATHAASDKRRSRKSVDGRQREDGT

SEQ ID NO: 976459 - protein, 151 aa, Homo sapiens
RLREKMAALGEPVRWREIFVEQLNLEKYKGVEKYHKKLQALQRVLQSEFCNAVAERSLTHVYETVDISSSPEVRANATAKGLLLLHFAASDRTSSSSSGELPKTERGLGFKYYGRQRTKSPIYIIPNNSRWNGDRQWGPQNVEINLLSVME

SEQ ID NO: 976460 - protein, 152 aa, Homo sapiens
ARVVFSGIVGGACDALQHLSSGAEQDDCCGCCAHENCGKRCAIVLLYRAALMEWQDRATVSLWQPLVSRRTIYVLIPWAVNYTFCQHRGPVPSDTSTWSECIEPKHIVDCTVSLFQSSVALGELNSSGVFIHVTNMAVLGGICGFVLSPTAI

SEQ ID NO: 976461 - protein, 81 aa, Homo sapiens
NPLGQTVIYSTIFAGTAPSQRYARTDFYLSRPRNKHASFIQFYQKNKPSSTEAAIKYFLTKQPIHNPSNSYPLQQYTLRHN

SEQ ID NO: 976462 - protein, 73 aa, Homo sapiens
GDGVGVGAQAATWRITASLCLSVMSVSGARPVLGACFIPKGPNRGVIITMLLTCQFVLSLLLMCNSGPNQPSL

SEQ ID NO: 976463 - protein, 72 aa, Homo sapiens
MIRNTVSEGLTTCALSYTARRIRDSRRRPLVHWLVYPPWVARIPTATMGGGAPKRRYSERGSSGEKGSLLNC

SEQ ID NO: 976464 - protein, 88 aa, Homo sapiens
MAPPGSSSWGKLEDERAEAESGGAHRILNAAKVLADNRGGLCSPYAISDFARKKLDPKMGCGCAELLQQWLSGAFTGEISPGMIKRCG

SEQ ID NO: 976465 - protein, 75 aa, Homo sapiens
ETCALAHACESQLSGMLESAGGYVDAQGVVDLPDAYTRYPVLHEEQERDTHPLDEMQDITIGPGKIFVGTQGPFK

SEQ ID NO: 976466 - protein, 110 aa, Homo sapiens
MAYGCVGFPPNKKSAGGHTTSVFLAHTPKWGVQGDTNTGATYTQGGVTKGKSVQRYNKKLKRPRPVGDKERQQLKSRKGQQQTDRAKTNRREDKSTHQTTEHSNTGNKKQ

SEQ ID NO: 976467 - protein, 113 aa, Homo sapiens
MWEFDLRAANLPASSCARRPPPPPPARHMGSRDLDDEGNTGKRLLMDGGWRGLEMTRENYSGYEGVPINVGGKPLAPRERRGNNKAKYQRVWLEHGWVLNWWIFPRGGQKTFN

SEQ ID NO: 976468 - protein, 256 aa, Homo sapiens
GSCSRKFAASRGRNGSRLLRGVERWRAGLRARAPVRGREWPPWHREGGVPPLIERAGAECVWAEGRSMAGRPKKGDGDPITNGRGPQKGEGSQGHPAEKEPLKFEGSPCQFFPKQREEIKKGGWPSWVTHERGPIYPKAVRPGGIMRPLGTKRARQEGAQRGGNAPPSAGGGTPQVQHKGVGCGPPQGSVWGTPSLVGHTRRSVKFYPSNNVGGRRQKGALFFAQGKEELKANGVVGSSLCLPILKKQEGRAEKRE

SEQ ID NO: 976469 - protein, 221 aa, Homo sapiens
MGGGGGGPEGIREKRRNRQCPQRKNLMGENNRRGDFSHPKKKNGGGETPGTSLLDTPPKWRARGSNTGNITHRRAKDGGRFKLGPTWEDRVDIKTRKQEQKQVCVTETTEQGRSERGSRERSEAERARAERGRGRGREQRGGEGSRAQPERTGDEEEGEKKGGGEEREDGREVSQVGDETKSQKGERQEVKDDTEEQARQEHANRAAEATREEQAKAGSTR

SEQ ID NO: 976470 - protein, 106 aa, Homo sapiens
MGFKWGSNPMYLFLKYLGSSSGGSSWPSPLSPPNHHPARTREWPLPPRGKGCRGSTVVAIPVPLQKPNRHCCDSNLTVWRVELIEIPGAEFDSGFQCSCHRYESCI

SEQ ID NO: 976471 - protein, 129 aa, Homo sapiens
NEADEGHSNSSPRHSEAATAQREEWQNVIGGLSWDTTKKDLQGTTFPNLVQVVDCTLKLDPIHRAIHRGFGFVLFKESESVSIRVMDPLKNINLNGKVMAFRKQGPKPWKNKKKAVKQNFGGGLSPDTP

SEQ ID NO: 976472 - protein, 249 aa, Homo sapiens
ETLGVWTQRRRERERPSSLRVVWLFEGEKKITINKDTKVPSACYIHHQQRRPHMGNIIEITVVDLKDPQVLLLATKPPTPVEHKIIIRVQTRRTYSPQEAFTNAITDLISELSLLEERFRTCHASPSPSAVMVSFPEALPSHTFCTAVRTVSQLNLFSSKKDTNDTTQTTSGCGERHSTPRKKAYNTPPVDAAAPREGRRNVGHAGAQREHPRQHTGGSPPNKKPAGNGRLEQTRRARRHTGTHRARKQ

SEQ ID NO: 976473 - protein, 88 aa, Homo sapiens
FREARGLEAEERPCATKWRLCTVSRSSARMSQLKLKKPPLLHMPSPCMCMLWWCVKLPHTPETILNDVIVDPPSVGSMMMNNWAIRGQ

SEQ ID NO: 976474 - protein, 169 aa, Homo sapiens
APLAALKSHLCIVPHPPPCSPAAGLRRAPPPPAGNSGQLYRPESLKLSAFFLIPCIGITGRAPTNVRRSRRHQAPKSPTKGLKGEEGSGGRGRNMEEMPLLTGMLMRKMWEQEVDNDGRPKKRNERLGRTTEEDRRTVMVRKRIGDGRLRNAESATGKRRKLTMTEDDD

SEQ ID NO: 976475 - protein, 134 aa, Homo sapiens
MGAARACAAQRGASAGQFEPCVLQRHWNLPRHYSSSTLTLQVLTFRGLCADLQGRWRTRSCGPSLSLEGVRAGSGHPDLFREDSGLTISGQPNLGRRGTFLPTLQRNLFSNVLSTGRKQPQPQGASTITGRTTR

SEQ ID NO: 976476 - protein, 78 aa, Homo sapiens
GLAAGSPRADPGCGIDRGPWPALPDPPGLGAPGAVYGSGSSGAFAFGLGDVKIKTSLGWEAEDTPRGYPQNHQCLIYS

SEQ ID NO: 976477 - protein, 332 aa, Homo sapiens
GLRPPPSCLGKPGPEGRPNRGGAGEGGVRGAMPLGPSLVAPFLLGDLSWAGAGNRPAFLLRTWAPDLWGPPVKDMRFERASIPCGAGSFVGLAPVGPLASLALAVLQAWASAGALDTCSALGRGYRKPPESREDRGGERDNPPVQAGEYRWDPGGRSKARWGEQGAIAGVVASKEGRAYVKWECGPKAPGYRMGPGTLQHLRAAPRKRVLGHRDPKKATRWGQGPTILQTKWDGLKYIPGKTGPTCGHHRGGLYLLNHRGWDSWHIPSWDFAWEPGRNYTRGLGTCIPYKAARARAPRTTSWDLLWWADLGGPVSALPIGTPEREKAVVGNT

SEQ ID NO: 976478 - protein, 468 aa, Homo sapiens
MPILNQDFFFLTGERDLSLFLLRRRGQRVTLLPYIPTLCYFFDTQTTRPLHTTFGHHCQPCATRDHLDVTHVTRVVLQTMGLTDTPCGSTSLYQRAPGTHSNDTLPGPPVYYTGKTYHATPMGLLDLSAPYKPHRLFLKPQHYILSPLVTTVLADALAPGPIFSQQTALYDTRRTTVVQRTGPFLGYTDRVAPTPDCCTLGALNGTRTLVTEGSRTVLGHWYPFDRHNFTTLDTRWWLPPQLPTRYTSFFHLLPFNTVPLYPALAPSLTPVPLRLCGPTVTTRRSLRCYAFQLLLCYPFFPLFPTGFGVTYVLSLLVFFGAHPILYVHRLVSTPVLGIGLTYPFSRDTPLPQSVVGPSMPLLGHHPCRRPPTISLAINYFWRASSHIYLAGTNSTNNHHSHIGVAPMTSADSRHCHRFVVNEHLTDSLSSPLSHFGIIPTGNHKYYYTVLDTHLIASDVLVQRHTRVH

SEQ ID NO: 976479 - protein, 193 aa, Homo sapiens
KGESAKGRCRALFLVTSYRQNSPGAKMVNVPKTPKKPSVRSCGQNQTHTRRHKSTEGQRILIDMPREGGRSMIRTPRDGILGGARQTDKILPADPNGPLKNSTIEKPHCGALTGALTTSGWLEAPYTLCHRIPTKRRQLPVLSPTLNGHALATAQFLVVKQVLRQRHDTYEQQTVNKSVSPNSFCIFHNVLLL

SEQ ID NO: 976480 - protein, 150 aa, Homo sapiens
  misc_feature (124)..(124): Xaa can be any naturally occurring amino acid
GRRRRGANLNAVRRHGRLLEIQDILNTAEIWNLCLFVYGFVNKAITPEASYIGYKRSFARLPAQPLKACCTINDKLTFLENSLMPHSVTLCNQAPDRLAFARLNELYHVENSLALPRQLYPPNXSTFFKHTELIKTLIGFYKHSGGKRCA

SEQ ID NO: 976481 - protein, 144 aa, Homo sapiens
MTILQPNTNLNFNKVLQLRPPCAHGLHLPPPSYHRDTFIRVGTDLDRAGTTTSDLPLNEHDNHNTTNTPSPARLPHQKTPDPSPQGPAPHLDKPRTRHKRHPKKTRRTTKRSDPPHKKPRANHRGCQHAVTHRGTGHHTSGTDK

SEQ ID NO: 976482 - protein, 133 aa, Homo sapiens
LSPGVLVEVTSSLNPAWQSLTHRRDAQGTTRATWKSNYFLNDHPTIGMIIRTCFIVGRRQLWASNARCQQDPQCPFRWASACACLHGAKNTHDACKAHPRRTWLQTNPSSGRQLLPHIRGTCGPLVFTTGGPH

SEQ ID NO: 976483 - protein, 128 aa, Homo sapiens
AGLRTVIASGCEGTLATVPGNNRACLSRYPILSTPLPLPPCKGRTPDTSKGTLTGRDSRCTSIRKSIIVHYEVKLPFLENMGDPMLGDRQRMSTQIIRLKSLNATTDYNFPGKARWLPRHVKLIHPSK

SEQ ID NO: 976484 - protein, 105 aa, Homo sapiens
RGWGKRGPITDPGSYRCRRDVASLVPSSLPGLETSSGGGGAPTRCPRSTLPVLACLCLCPEPCVGEDGGHPETGEETGVCLGWREKPLNGVVVGPDTFVLQGGWA

SEQ ID NO: 976485 - protein, 99 aa, Homo sapiens
MCLVHMGVKEGVPERKPRRHNGQLGGVGFLPQLKKKAAGRDSTGGGSPDTNSNKGGPEGGPTAGRLYPTHRRRPQGEARGEYNKLNLPPPREARTNIDR

SEQ ID NO: 976486 - protein, 112 aa, Homo sapiens
MFVRCAPSSRTAVFSHGNAVTWARCAVLHWLGSRIIARIFSYDTRDRASVRAKPLEKELLGGIERRVQGGWGNPGYGVRSGELYLSNGQSFGETVPKGYNLGLPKGMKLWQG

SEQ ID NO: 976487 - protein, 73 aa, Homo sapiens
DHLLGHQEEMLIKRIESVLSGESSICVLIYQALVVYGFIEGCHIRTFCERYRIEELGYKKNHQAEQQGLEITV

SEQ ID NO: 976488 - protein, 74 aa, Homo sapiens
GALYSRAACCRGCILKWRRRPGQVCGNSAVCKYLPENELKRYVTVCDLLLEESTVRPVSNTSNQCVEISSGQVL

SEQ ID NO: 976489 - protein, 237 aa, Homo sapiens
MKGATQREHRGQQSKDGRGNFHTQYKKKAGGEHPEKVFREQKLPRRRSSESGQSGGEQKAHEENSTEEGAAKYSKLKPPRPWGKKTKEKRRRGTERRSEREREERGGEAGGEEGEGEKRGGRRGERGRGRRGKEGRGEKTVHGAGGERRERRTRAQGKGESGRDSGGKRQKEENPKRRTERGQGNKDGEEGGETREREEGEGKRERQGERSREGAEGGEQDGERKNGGGEKERAEKK

SEQ ID NO: 976490 - protein, 133 aa, Homo sapiens
MPKKGRGEISICISKPLAIVGVSCAISIMQKFMDDECVEREDFVKKIRKNWEWFMKGELFLRDLHYKDHLKPMGEVYFGRKLLDRLGRWAGWGLIKTAKKDDWMRKFQYTNGRVGTCEELKEKPRYRVDRGLL

SEQ ID NO: 976491 - protein, 102 aa, Homo sapiens
  misc_feature (48)..(48): Xaa can be any naturally occurring amino acid
MTKNREEREAEPERKIQKQRIEAETRSETEDKHTENKETRQYDREPQXRRKTQGETRRIVHRQTHIDDRYRSTRRQVDSRIIDADIDAKQESDNIKKTQINN

SEQ ID NO: 976492 - protein, 308 aa, Homo sapiens
MSLIENKRKQIIQALVITILRGLYFTLLQASEYFESPFTISGGHLNGLNIYVVATGFPRDFTSIMGSLFLTIWFNPQVIFHFTSKHHLGFEADAGYWAFWYDVVGLISGMSPIYWMRVQRNYKLKQNFWAVLAHKNFIAQLSGAPGATQKSIEQCGQQVDQKRIGHRKCRGSTINKTPGEPACLENPRGVTEHKGHNKGSTEEDKIKQDGPRGGEYPTEADTANKYKQHKNMEIAYTAETAYKKATAKKSADTRLSNAHDGTEGEAKQESGKLARDQSRLTADTQHYATNSTTEQRTKDGRKNHNKET

SEQ ID NO: 976493 - protein, 305 aa, Homo sapiens
MQGEEMKCINHYGGYLCLPVRAVINDYMARDPRHQCLPFKPQPCPPGMSPKIRTAVVDVDECAQALQRVSPQPRTAITCLVPISAPAPDGLPTRIGPEVVWTETECPLPVSAKAPLAVDTLPGSFRWQCDPGLPAGALKPLLCDVNECDMGGPQCEQALFNSYGTLPCVGATVGMSCTRDGSPAGILDECKILQATTVSYRCVHEAAPVNSGNCPQELYQAAGQTPLQELGECESVRPVSRAKLCNYHGVPVRDTTVVGPSPGSQNRFAATYGEATWRIHLRGRIHRPRERTGGIDRAAPEEKRG

SEQ ID NO: 976494 - protein, 190 aa, Homo sapiens
RPAVLRRGVPGTFQESASRDRGPRMLKRLVAIHRLQGRRSCAICYQHQPPTSTLKTPCDPGMHSTKMCVGPGIGIGNATREAGSSPSEMMGDTLTIQVNFSHPTLGGSLVKRTRATRRREAELEVGVKKGEIPEVLESKMRKPNQHFGLLNNRKHSARHYVGGLQLRFLCRKVSRCTRFGGCDVKTEPSL

SEQ ID NO: 976495 - protein, 70 aa, Homo sapiens
MFGTNPQDGGPGEGTHNGVSTPPGGLPEQEAHDQNLRPPRGEKRTEQDYTDHNEQQEKHKDNTTTTTTHN

SEQ ID NO: 976496 - protein, 140 aa, Homo sapiens
AYGEAGSVASGAQGELCPVQDGGRGKLIAVIGDETRGLFPGCGIGELNKNGHPNFPGGVEKDTTINEIEDTFRQFLNRDDIGFNPHQPVPSQRWCGMPRDAHQQSIPCVREIPSKEHPYDAAKDSILRRARGIVHAEDLR

SEQ ID NO: 976497 - protein, 113 aa, Homo sapiens
DGGWSLSESSALPSPGDEGNSLCLQKRFCGLIQKHQQHQRGGDSFLSRFYSLALSPVKQLPSTASAGSSLDKGRKPARVGAIGSAGMSHCWRSLVFCGKVGSWFLETGSRSVA

SEQ ID NO: 976498 - protein, 242 aa, Homo sapiens
MTTTTENNNVVGGRQATRRKSFFDTLWLGGRGRRMSVVEQWATRGCRENPWVRAEGVGLPPNKKTAGPQAGVKNPKGGFEDNGAPYNGGQRRTDKNNARAGERATQTRKTPGNSTIRERKQQHSNRKKEETQNRKQPQAKQSSIGQEQEKKPDKTEENTDDKNKRTAQHQTEQKKETMKDKTTAQKKQHKTKRDKKQKEKTQTNRRGKNIPKEPTNAQTDNRRHQTNTNYEQSEIHAKDTPD

SEQ ID NO: 976499 - protein, 191 aa, Homo sapiens
EGQSSQSQRCSKRIQLHSKQAAAPPQQSPYTSISKVWHSAHRSVSTDQSNSSSQPYHPIKHCGSKSSSNSKLVPNLCAPTNTSFSKASKLFYMHSMHSIVETKKRNCRPKTANSMQGLQRIIRAKGIQQTILAWNQKLPFSDFTRRKPGHGRSPVDSHPSHSLGWRSRKPLQPILFSFQSCSWGTTVPMHH

SEQ ID NO: 976500 - protein, 96 aa, Homo sapiens
DTLFICPAACFLLIGNSCFSLARNGPQCSCRLWLLCLCGSCKCKECKCTSCKKSCCSCCPVGLVPCVPRLHLQGDVRHCAACLCLLPGQLWLSRCK

SEQ ID NO: 976501 - protein, 81 aa, Homo sapiens
MTGGGGREAEAALLYFINTDTRDTAHPSTQQNNIRHPTLRSHDQSHNHYKHRSSPPQRSTRSSATSVPKSYDGPANTKTQT

SEQ ID NO: 976502 - protein, 260 aa, Homo sapiens
GRRIGQRDGKLACPSDTGLEAVSDRCSQAGGDASARGTRQLRALGRGYCHGQAVAGIECIILQRVPPQGWDPKDHLIRSREDFHLPEELVWDDTTQGVPRLSPFFPNFFPKNAPHTQTTHVGWGPPTRAQQQSQGGRNTNQQEGAVPSPHIHHSRFVGVGGAPPTSITQPHHSRACPSPPTQHHTIINKHPILLNPPHKHNTNNTSLTLNTRVMACRIDQPSTTHSSLLSSSSFSSPHLLTPQNNNSPHSSLLLPFSSTP

SEQ ID NO: 976503 - protein, 313 aa, Homo sapiens
CALKKGNWVQTHCVAAYLLSVKDNPVQSSSVTDCGSRGFTSYWRNSCVVRFRNTCWMNRLRVKFGGHRSRVDKMYAKGVLEALGEEFFTVGNVKARWVVCREELGFDSGFIDRVSEDIYEWKSIKMLVYTLYCLVFTWPMFVSVCPGGLNIKLGSFVLLKSKQGIPTFFEWVQTLIFLEKPFCVFGTQQHNAGGGGSTKTNTFFFAFFCSQHTPIQTHAVFFFSHNRGRGGGGNNPTYNQKTTSLLLFSFLVPAHSTRRGTGGGPLPFHHSNLKPAHATRIQRYDRSVGPTPTDRHDGRTQFIAGEAHTTTHQ

SEQ ID NO: 976504 - protein, 183 aa, Homo sapiens
MVNPTVFIADYCRSTASPLAESPCGAVCRSGPRDGRKFSCSEQLEENGIWLIRVPAFITNNSKVHCVRVVIVHNAISVDWWQRSIYGEKFGTDENFIQSIRVLHLVHGQYVGPNSRMVPSSPIVHCKDMSGGWPAVWVLGKVIEGMRIVEAWALVGPWNGNEQQEDHHVLTVALDLSGLCVES

SEQ ID NO: 976505 - protein, 82 aa, Homo sapiens
CRDMMVDVDTILGCPSPVNVTFWHKCNIHTLVMSTGNANSCYLLRFAIQIDSRLMSLQWAHTSETDSLYVQRGICGPTGAIG

SEQ ID NO: 976506 - protein, 108 aa, Homo sapiens
MGEENARVAPWMSLTLHDQANFPRGGSPKQPVRGYYRGAVGGTFDRLHNAHKVLLSCRVHPGQEQLVVGVADKDLLKSNVAALSCSNLIQNVWNHLSEFLVDIRKSPP

SEQ ID NO: 976507 - protein, 179 aa, Homo sapiens
MHRSATTDKQKRSKTKKKAPETKRPQYRRGSSPIKTRAKVAEDARTTSKDNASVMYDNNTGGEETRDQLVYEARDCRYTHKTRGGERSQSNKSTARENGSGSEHMRPTLTEIARQTNQTSASRVKSRARWWVSRKKEKHRETNTDREEDVWCGKVDALLVASNGSSRRDRTARVGGQDT

SEQ ID NO: 976508 - protein, 283 aa, Homo sapiens
RWLTPVIPALREAKRREDSLSPGVRDLPGQYSETPFSMKKGNKKTQKDKKKNKKKKKKFLCAAALGLPEKCFKNLLRCGRRGGAHKEVERSTRVAPQRVAPQRENTVVAKEKRGARGLLTHTIKKSAAAGGRPTRERGSLARQNLPEKGESTEEEGATNRGDASKQQQRGGSKKRETAQDYPQNLTPAKHPHTCGGGGEKREKKQIKKKERTGHGQAEKEDRETRDTNTDHQNERKDGESRDDGSDSAETTKTKRKRDNGAQHPNATQTPTEKDKRKPQQKRN

SEQ ID NO: 976509 - protein, 133 aa, Homo sapiens
MRGLGGERETTYTKKATRDKRKQKKKRARVPPPPVGVRGGVTKKKHKSRDPQAEKKERAGGGGAPRNLMCYFSMKRRQQKDSKDDETAQGGPATRQRDEKQRRQGGRRESEETTKPSTYINSNSLEHDIRATQ

SEQ ID NO: 976510 - protein, 82 aa, Homo sapiens
CCTAAKNKLNQVVMIEDLSKKMRGRGKWNEIEDNTPEPVAESSENSLKDPNATDTKCNSADGPCDDNKDEYQSQMSLEWAHI

SEQ ID NO: 976511 - protein, 269 aa, Homo sapiens
MSRVDPQPALERGLGAAGRRPQMGSEGKAAGPLSGGGPGFDGPGGAEENLGGPHSPGVARVTRPGGFPGGRAAAIFARGHLLGGPALAFLGAGPRGDTPLGLGVGVVAPRRTCLGDPGGGLEFPAGIRRGGPPFCHRGRLSRAQGRGAHLWMALGPPWVPYCAGGLFVALYVYTGAPGHPTMVLIRGKKASLKWELRPTGGAGFRAREMTKGPGTLGGAERGWALRGDRTRRLRALEGLMGPFPKTDILTGRIRMWATGGPRRPLDRHM

SEQ ID NO: 976512 - protein, 152 aa, Homo sapiens
LRATYHRLLDKVELMLPEKLRALYNHPAGPRTVFFWAPIMQMGRAVCCMLNGQICRTHLAQLTLLSDGYRVYPSRYSLVIIPKNGVCRCQLSCGGSRSLSASRIGDITKNYTAKATPNTTSSLIHPEPTLDGWDKTHVDPSSIIRPMITRTR

SEQ ID NO: 976513 - protein, 241 aa, Homo sapiens
TPAQHGCFRDCSLHRCPEAALQRSRCGRPPSADYSSDCLPAPIGYGPFTELPDCQYADGALFPPMKGQFRKKRSDRGRLVVAKKGVGIWGVHRGNVGTVVLFTKAWGRLQGPGKKMFGRGKNPRGKAGGTNWLFKTPKRGVSPSGKGSTPNFFPRGFQFKRTGPNRCACTFPFFSLSKEELHQYRTALINNITQQCCVGVGGRADLVTPRGGEKSFFDEEHTMLVVVWGARKPGPPIVCGV

SEQ ID NO: 976514 - protein, 254 aa, Homo sapiens
MTYTYRTTQVPTIQPHYLNTYRIKHSPLHHTHIHNINHHTLLNKPHFPQLNSKPQLKTTIDKNYITINKTTHKISINIQLSDDFTLNLSNTNTPYQPETQPNINNHTNPNERNIINDITKNKTQIQTYQHNQLKSNHKNIHINKSTQHTNTIKLLLEHSIQPIYTIYLTEQATPPEPPSGPTPIHNNIRSSRPRPRYQRRSRVKQHTLQVRVTPTRTAYQSDYAIRRYHVIRPSLSTAHSPLVLPLGCTAGAIK

SEQ ID NO: 976515 - protein, 123 aa, Homo sapiens
AVFVFPRLFPPGRSAEDACSMPMEIKPEDAEQKWLVTGAGGGLGPGAQGVGPAFREWRTVGMWGAAWAKRKREGSSGEAFRVGPKSASVPIWTDPTCGLLAYVGTGVSYFTPPLFTNRVAPHP

SEQ ID NO: 976516 - protein, 113 aa, Homo sapiens
GGAEVAVSQNHATVLQPGNKSENFKKKKKKRRTDEGEDTNRKKKNEEEEDTKKKKNEEDRTNERRTTGERKHERRRRTDDGTNETGRKKQASTQHKQQKQQKHTKVWGGAHPP

SEQ ID NO: 976517 - protein, 72 aa, Homo sapiens
MFCLVRCWVPSVKCQGTLRGNNLKGAQGRIKLVGVWETLGLKLGLQKDGDFDPGSNLVSLKGLVQEQRLVDD

SEQ ID NO: 976518 - protein, 281 aa, Homo sapiens
SARCAPLSPEQRPLALPTQPLADLRYPLLPASLAASTCSQTCTACNERPAPCLCTTARPPPPPPARTGPPWLAHGAAPHPLPSTSPAHPNLNLPTELPTLRPHTPPKPPPRPPHRPPDPPPLAPPPTPAPHAPPPPPAPPPPPAPPRPHTHLLTRHPRTLAPSPALPPTSPPPPPPPPPPAPPPTTSPRHPQHSHPLDPPTHPTSPHPPPPHPHPPPPPPLPLSHPPRPPPAPPAAPPPPPPPPPPPPAAHPPPPPPPAPPPPPPPPPAPPPPPPRPPPPP

SEQ ID NO: 976519 - protein, 123 aa, Homo sapiens
HINRQDVGGAAATVRAPGRLWSGVGASGGPDPCDPQRWCHRVINNSFYYQTNTFSASASDSLSPVILVHAFVCACDNFKEPRLSTQDRRAFGLKAGRPICALAYIKTRSSGHKASHGKCLGIP

SEQ ID NO: 976520 - protein, 148 aa, Homo sapiens
  misc_feature (44)..(44): Xaa can be any naturally occurring amino acid
  misc_feature (51)..(51): Xaa can be any naturally occurring amino acid
  misc_feature (58)..(58): Xaa can be any naturally occurring amino acid
GSSHGGHEFVAAGFRLPAVASSCLGLAPFGHFCLGILRGFPNSXAFLKAAXCSLFPGXQTKRVWGAPQGGKNPPQKSLCGGAGRGTHTHPHQKQHQGGTKKPVFLQNTFFQQQREGGDTLSNAPQLSFFSHPQNKRRGGEKKKTYHTM

SEQ ID NO: 976521 - protein, 124 aa, Homo sapiens
  misc_feature (41)..(41): Xaa can be any naturally occurring amino acid
ETFFCRDVVGVSCFNMCLDGTLALCSPTPVPGRPKPCPPVXLFTCTLGLAPEAPAGRFQRRAADHLAGLAAGHSPFRSPCHLTGEIRVYNLFGKVLPAQREILTPDPKGAPFHKGKWGGHLWPT

SEQ ID NO: 976522 - protein, 240 aa, Homo sapiens
  misc_feature (86)..(86): Xaa can be any naturally occurring amino acid
MSTAISRSPGHRVTQRCKGLGSLLQPLFGPSVLLILGPCSIGRCDKSCPGLGQAQCAGGKTLFMAPEYWQVGPNISPCVPVVTLWXIPHPVVTKSSGPFFLCRTKVVYHQKNLHTKSVFNNPRWGEVCVAPNPKFAGEKNGGGADTNNVVGSPPPVVGIDKKKQRGPPPPRKILWWEGDNQKEERTKDNGQAESLYFFWWRQHHQKVIVTCTHKIPCMDSFLVAEKKPKRQSPPSDDTAL

SEQ ID NO: 976523 - protein, 111 aa, Homo sapiens
  misc_feature (92)..(92): Xaa can be any naturally occurring amino acid
MRLERGERNNTPQGMSRCIGVGYPERSQFWFDYRSGTWLCVPHIGKKASYPWPGSCDNLIGLIVHHGGHQRLSWTTVATPHKDFGDDTRLVXFSPKVRLRNIALRGQTRNI

SEQ ID NO: 976524 - protein, 129 aa, Homo sapiens
  misc_feature (111)..(111): Xaa can be any naturally occurring amino acid
VDPAAVQMSCSWFSGVYGKGLLAPHRYKGLACGSPLIGYVVDLIDWRCKGGQKHVAQTRWADLKSALVFITFTYGFSPVLKTLTESVSTDTIYAMSVFMLLGHLIFFDYGXPMLCPNWWVNFPKEQNNL

SEQ ID NO: 976525 - protein, 105 aa, Homo sapiens
FSQRIRLQQQVDLGFSRALETPGSQVSEGHLPFPLVTLFGEETPSKALSRTPKVLGPFSGSSFTSTLYFSVIPWALNQRKTGRIQHYFCTHLQIFYLKTQKNKKH

SEQ ID NO: 976526 - protein, 69 aa, Homo sapiens
ELITFHSTFQCCGPRKLREQVQLHAQRSLSKRKPTQKRATNFVAPNFSRENFGETTPNFFSGQQGENPQ

SEQ ID NO: 976527 - protein, 165 aa, Homo sapiens
SVWKAAVQTFNGYYYENKKNKKKKTFVGLLRRKKFSNPFCGGAGPKGKETSGHNGVPQRTPGAQSTKWGGEFSHTNDKNNTAGRDNPERGFLTTISQLGLLRRRQTGGTLTQQERGTRGRPSIQKINGPSYSGKKHDDTKQQRRAKSNHTATDSRRMRINNRTDQ

SEQ ID NO: 976528 - protein, 135 aa, Homo sapiens
GENGSDGGWAEWVSGAGVGLRLCGDCASSGVCFGAEFSSEACRELGFSSKLCLCSSGDLLGQFNPASVWILMCRGCLSGGSTIVKPKKLYAGAILEVVDEQWGRFPQVQALLGVINQMFRGLQNQCNVRGLRPVY

SEQ ID NO: 976529 - protein, 105 aa, Homo sapiens
MTSLQGAGEPVAAFGGLPGYQKWLWSDFYLRYFRRAQGHVGHEFLESNFGRTESLDMPNNSNYKHDVMIRTQRLMCKECIGRLTADLWIDGDITKQKMMLVGPPP

SEQ ID NO: 976530 - protein, 287 aa, Homo sapiens
GFLPPLSEPDCNLGRIPDSLLYGVAPVLLGRKLARCEHRSISSLGRGSCAIHGLEHSCSQSWSNYADVVIALVTEHVPLITGRHTSFGRHMGHPQDTIHTHPFITDGTMCEIEQNVGNTHSLLGRGPVCEHCPFPSGQGPFICFTLGPKGSRGCKLTRCTREKLHPFVSGQHKGGPPRAGVTKSRPSLHTGPPTLRYATTGSCTRRNPGWPPPRRAASSPKHDGPGRTTLVDGKTWEITPRGRRKTGHEEHSPMSIPQIRKWNQTRDTPRMDKKGTMNETWTGTVNT

SEQ ID NO: 976531 - protein, 283 aa, Homo sapiens
GRPHPLISKQGRCGVHHAFHLPQCFLRFSLEKSSLSSVAMDPKCPATVVSPATALVLQVERLQLQPLARRAVAPVAPWVGTQVCPGGCVRKGASAMCSDADDARTTFTHPDVNRGELVQTRGFYMIYNYPTWTHCANITYSLVNILVHLEYVQPSCSTVKKSNIYMIEQTPVMATMRRRQTMFRHQTNGARAPNVRTNGKLATSWCTRRTAWRRQHKGDGLLDHNKNAPWAHPAVLETQHTGDELRHKTCINDAAIQRSDKNPASGCRDDTQRHERRSRQPGQ

SEQ ID NO: 976532 - protein, 175 aa, Homo sapiens
MRVKQNESRQKDRAKKNPASWVGGKKSTTQQRKPQKSTQQKKKQQRNTNTSKRRNNKTTEEERKQRATGADEERGGGTGRRKGQRHEKRRRASAGKRERSANEESTERVKRGDKRTERNQYYGQRKRKRSKREQQASPSRRDERPERQGEPTGQDGQKETKTEREATRQEESRSA

SEQ ID NO: 976533 - protein, 123 aa, Homo sapiens
QTICEHLQYLCTLCKTVIGDTLIHQDLLKPWAWTTGQQEDAQECSTALYVSIGQILVSKQKNPDVRNMSQQQFCGRICLCNCCATSVAESLSFRQNFYELELNIQGHKQLTDGISEFSTAEQV

SEQ ID NO: 976534 - protein, 146 aa, Homo sapiens
RSLPSPRSQRGLWTGDPAAGRSMGRFRGGPAGASSTLLVGFNLALLAGWIGRHCFWDYGPVRRCIQAVLHQEDNVPRVFPMWGCMSWFEPGPDDWPGGGFLRNCCGAHCRKVANCVAWGLTLLTLPSWVNICVADRYPLEGYCAIN

SEQ ID NO: 976535 - protein, 169 aa, Homo sapiens
CSRCAEKNPGPSTRVWVRGPRSARGLPAEVSARAGHRNHVVGPPAPAVFTFEADENENITVLTGHPVFGKHVIDRLRNPLHLFEVSVVSWCLWCLKFLNDRLDTKQEYAEELALDASQERIQKIRKRLKQGQKSLDRERACCPIEQLNPGANPFRRAGLIVRRGGEKGA

SEQ ID NO: 976536 - protein, 70 aa, Homo sapiens
AVSRIAGVLAIRPESSVFATAWWPTETGCLSYIRYSQICAKAVERCTEDQNSKQMLRRLLGSNRNTLVTT

SEQ ID NO: 976537 - protein, 73 aa, Homo sapiens
SLLSSGARVARAGSGKGRGVYREQCSIVPRGPDSGEAASGLLPFTFLSWEDTAAGRVTAANPLGKGNLADYKD

SEQ ID NO: 976538 - protein, 67 aa, Homo sapiens
GSRRLPSSPRILRSEPVRTPPIPSVLSFENTRRSKCHCDLVFTYGAKSPCQCLARRGFCTQIALESQ

SEQ ID NO: 976539 - protein, 117 aa, Homo sapiens
GRRLLAARRRRVLSSAEGTMFLTALLWRVTFSRPSVDSGSTGGRVRVVAAQAETSSGAWEIEAENHYLLSIALIDPGEQGCGGQPAGGCAKRARPFGEKVFLRTQFLFGVPRCPRYG

SEQ ID NO: 976540 - protein, 111 aa, Homo sapiens
MCQVSLVGKLMCALAQDAHSSRTRKRTKVKILARTSGTTCALLSNLLPTTQETTLCKLTIFIVDLVAGKYTSNKPSSDRGEELANTSHSIVQAAFKILLKWHLVRLLRPGS

SEQ ID NO: 976541 - protein, 120 aa, Homo sapiens
EEGPSAQQSAILHCYPGSPAGYRAAPCIFPPRRQELRLMAEVTGEGAAADANPVEIETQRTPVRLRFGLHQAPSHLGQWTPSPGSPWEWPGTGVRIHRIMSPVPSWNHRPKYFQNEWPHY

SEQ ID NO: 976542 - protein, 85 aa, Homo sapiens
VDRRKLAWAGALVGPLIVYLPCAEYQHSLIMTYVDHGFCPKLINALRVITSCSLEKVHDLVVSLAGRAYIALESVEPKSPTRSML

SEQ ID NO: 976543 - protein, 170 aa, Homo sapiens
MAGRDHKEREQLEQLVIHRVPQEETPLWQHQQLWLELHHPHYNKKRAEGDHTNRSMRTKDHNRWSNGADTRAPPEAHTNTPENQKYPPPGEQMPHTGRHDIQRRNHRRTQQNPKTLSARPEGMTEKSHVRNSKTTKHEVRNYDTETVTQESDEREATNTTHTDETQRTRR

SEQ ID NO: 976544 - protein, 155 aa, Homo sapiens
MRSGALLATQREVEQRRAGTQKSACRPTKKAAREREERRRRERRSDKTVRRAKNKESKTERNAHAHDRRNSTERQRRRTNSATHTTPHPYDQANRRSSQHTATNADTSRSRPHQHTTQSEISASDHVHIRLLHGATRPTPKTRYDRTHRPTLPVS

SEQ ID NO: 976545 - protein, 302 aa, Homo sapiens
DTEPRWDPHRSARPGAQEAHEEPGSAGTSGGPPRRRRSRDPWGHISRVAVTRPGHSGVGAQFAMGDFLDARPWLLSGLQGTPDWLALVPFAGRPGAAEGGEGSRPEFGPGPGALFAPTPVWHWLGGPGVSRGPNFGDAFGPPVVPLKVARRAVRLPLLFVLRWGLVPFRPSGWLVPWYKRAILHWEVPLCPPRVGPFWLFVAPRELLPQRALGAPSGVFSGPGLAGLLTMLAREARASCGGVPGARGLGSVVPLFLKRSGNHALTGGRDNAAEVVGGPLAGLSRGGLPSSRVLSLSGREAFA

SEQ ID NO: 976546 - protein, 109 aa, Homo sapiens
MHTHQTPQTAFSSIAHITRDVNYGCIIRYFTPMAPQYSLSASSYTSGEAYITDHFSTQKPETSDFLLLANYNNSLHRLCPPVRPNIILRGHSITNYYQHPIHWDKDLVT

SEQ ID NO: 976547 - protein, 362 aa, Homo sapiens
IKIRRKRLRRNLQTCMHACGSIKQAVVQVMNLEFSTKCRQHTVSIRACIAHCKAHLRSETHIKPVPRCEFSRSLASRWASKQEVMHSIMLHRTGKSTSDIMYPQKVATAIKCLFTIFHGYSSGQVRRNLIQPPIIDYQSLFSNQSPPTKNTIAHSTHASGYSREEPEQHCRASPLWALDGDYWVIGLHNFHAHGLRNWCCYNCTATQLRSVLHVLRPVMELASMNLGTLLPVTTTTRWPMPVKHGWPLLMPWHSQYWSNLGQGHRTFHGANNVPKHRVSPMSGHIRTTPARNTPSAQGRPPRQQRRTRERVAPKSDEGHPVTIPPRGEITLPKAKRASTKWPSGQHATIHPHNHNNQAGACH

SEQ ID NO: 976548 - protein, 54 aa, Homo sapiens
MLDNKEDRPQGVKHTRLLLLDDTCNTQHNTCGRAQRFTPGGATETARPTRTQGP

SEQ ID NO: 976549 - protein, 120 aa, Homo sapiens
MISLGPILWRCHVPFTFGESRLMCLGGLDRTWLLGFCEGFISPPFGRGFSISCRSGVHVGSAKLVCAGIDITRNRVLKVRDWVASAGGFALKQVWPHGGHNGEPRRLGCKGGKLFTNVPS

SEQ ID NO: 976550 - protein, 266 aa, Homo sapiens
AQHGGRSQSRRTAQFLQNVKCHEILCKLSWEGDQSTPPSAYGAVKAYTNFDAERDAWNMKLAIKTKVWMRSPLSAFGPTAVMLRGTGYGLSATREGSKREVASGPEVSLIWHAGDVILGYEGHLLEYDASELKASHDGAVNREHSLIGIICSRTNQELRNLQHESTGLYKTDPETGRPLRTHLVTSAQLVVALQPGEPAEDGPAVVTDGMARRPGLMTRSAEEAWFPRWSDSDRGVPLKSLRTNERKWGPGQLGRTLTRGKTVGGS

SEQ ID NO: 976551 - protein, 211 aa, Homo sapiens
GKWIRVERSREMQMIDLQTGTPWESVTFTALGTDRKVFFNILEEARELALQQEEGKTVMYTAVGSEWRPLCYPRRGDHLNSVVYNQGLADRMCQRRPGIHRSPQVVTLTEAFLTECGYLLNGPPGLRKEQFYHSPGLGRTGSTASACGASTDSSLLLMTVINHLCGGARSKSLYSWRMWMLFLSRDLVVENQYSTKARSLTFRWTVNALDG

SEQ ID NO: 976552 - protein, 278 aa, Homo sapiens
MGKVDLVPKGVSPKERPGRPRDKAWLGFPPQDIKTRRRGNTRTRFCRNNLPEMGALGRHITGEPIHNRESTQRAAPTILQTLTPLPSSRTHTQHTTQQHPHTQNSPTLHPTHQPHTHTHITTITDTRHTNPTNTHTDSNQEHTTAATATKHNSHNTNDPQTTHHTTTKTPITINRQQPPTPRALTSRPPALPPTASQPLPPRRQPHHRTTPRQSHKYSTHTGYSERHGEASRRTPDQPTARKMGGTHQCKRAHRNNKEADTGEAPHDDKNRRPNTQRT

SEQ ID NO: 976553 - protein, 128 aa, Homo sapiens
AVLRPEWPSPPPPGRWPRRRLDPDPAKWRCDVVQRACAGPALNLRGVPVTRPEPCPLRPWTRSGVWAPSRYGCRSDPLCSRCVNSTEKTPMWVHPPKMGIGQPAGDTSRQLFVHPATPLGQRLVGPPG

SEQ ID NO: 976554 - protein, 165 aa, Homo sapiens
GPGAAAVLRASSPPQRIMLQFLLGFTLGNVWEGIWLRTMIYQTVVKKKKKKKKKKYFFGRGLGAQRKKVFKTQFVFGGRGAQCWYRCQTGATHGGGPKEGDTGGSTGTRGCVGTSHHPKLKKRARGNTPPRRCFDENNHRKMGLREATQRGTSHKGGVTREGTNL

SEQ ID NO: 976555 - protein, 168 aa, Homo sapiens
MCLRFGCCAINEADEKNIPGCVCITDGSDQQDMVRVSTNAAQERHAMGANAVSHQPWRCNMDIMPGIIHKKGRMHCGQICTLTNEQFPQTTQLDRAACGGGMEVTFMHPIYGCPNHWKIWPKAYMVGLRYATQGRFEPIRQPGVPGKPRKGAAQGGKNSKGVSRPTVG

SEQ ID NO: 976556 - protein, 231 aa, Homo sapiens
EKARRGSAVCSGAVGPVRIVSCWFAAGKSGERVGIFVGIPAKDVVRAMRVVTRMVLKRFMPPSETIWDLAIGQAARLWVMKRANTKSSSDLCGARDRKEHTGRLVIGRSEIKISLPNRGKKDKNITEELSLQYQQSMDQYIITEDIGILWTWFSEVEDHDGEGDVVEMMMMTMIDSRDPERFQMIPEREFRSQEEAKSLVEETPCLLRPLIEVEGSKNNTAVKSDYKMDVW

SEQ ID NO: 976557 - protein, 113 aa, Homo sapiens
MGTNDRMYRRLECWSSVRRIYSESDLEDESRVSCKEYVVQAEKPCEVLKQKRLYEAALRNEIVCSQRSHVNQWCQAIVYHPVFERKSMTSVDAMKLGVKGNDEGHTSKVRIDQ

SEQ ID NO: 976558 - protein, 89 aa, Homo sapiens
ISPVSEPVIYSSICAGALITALKTRDDPVSEEGLRTITMLGASSTCWASSYTFVPRKLHHRVSSLHSIQIYNPSNSYPLQQYTLRTNEP

SEQ ID NO: 976559 - protein, 148 aa, Homo sapiens
  misc_feature (97)..(97): Xaa can be any naturally occurring amino acid
LCGVVKRGLGRRAGAEGLPWGGGRSRAPGPSSRRSSQGLCTTGSRAGPSAGAAQVTASSFGGRGLGQPCAAFGDLNSESRGSSSCCGKRNDFNRLFXRPECTLFENPKSKVSFKESQCWITSVVPGDYDGDSQMDVLLTYLPKIYGQE

SEQ ID NO: 976560 - protein, 145 aa, Homo sapiens
MVQKALFLGGWNPGASKRNRRGPEPCGSQLSRRHPGHKNGPNMWEAFGKKTQGFVGIGEYIWPFNRVAGLFRSHPSLHLHAHPVAHPVFWTRGSGALPIPFIIRISFKQLRGNSQFTHCAPSRLHGRPGRHSGAIHGVNGVGTCR

SEQ ID NO: 976561 - protein, 250 aa, Homo sapiens
AGEEGTAAQEDCADEEVAESWDEAADSGQEIQISSQSAHCDFRTIRLPAGPPSKDPAYLKRPTQQTDVVTQDPNPHQTGPTPIPGQRPIDNKRKKRQKLHAQKGPRKAQDSIGSQASPKTPRKTGAPRGEKPTNPLPNRRPKTPRATIRTKSTRTSTQAEVERPPNTKLAQPPRNTSTITGRIPSALQAYIKKGPLCRKNHSQDLATYTPPAKETTTQTHTNNARDRRKLRIRRRNQTTDHIRLRRIRIR

SEQ ID NO: 976562 - protein, 326 aa, Homo sapiens
TARPRPPRSTELAFADPPPSTPAAVTMDDDIAALVVERLRHVQRPVRGRDAPRAVFPLHRGRAPGHQAVMAGHGSQRILCGDERPRAQTRHPHPESYRNSEHGSFNPTWGRHGSKHLAPQHFLTMRLLVVAYPKERNHRWLIDTGGPTLNPKGQPGEHDDPRSLFGTFNNPKPCTFSYYNGQSISPVRPSGRHPPGIVDATSRREREAPKQRCQYYKGNASPNANHAAWDVVARTLTDPSGRSHRSGTGQHTDERKMGVTEQSGDRPHFRNMQEVSTRKAAAEQHPCRRRARPSPRSEGTTHMRSTKPSGPLTENTQHTAHNPHAW

SEQ ID NO: 976563 - protein, 413 aa, Homo sapiens
MMTDWLLEAKTISGQKRPSRSTKTGRIDRARYTTIDSGFRDVMAHNITLPAIVTPKRSILATQGTITHHSTSGTRGTYAQWVEHQQRTAHGTQPYRVRHFRVQHVEPQQDRHTENNNRPHPMRYNPPDQHNRPPKKMGTQRTPWNCWSTGHRTNSNQRALEATKTETTQHAPPATLNPTRRTNQQRGPKGQAKTRPTGGSTTPTPTCPTKKGVPQHKSITKEPGRTLSSNPNQTPTTHNKSTPAQMGHRSKQKHKEKHQFHTHSSTYEKEHNMNPKVRGAKRAQNDNPKTRQKQNPPTPVSYKCNIRTPTQLLPTTHINIGTTLTDKHYNNPMKIAYNKQPRKDMMNVDPRTLCENPTEPHKNNKKSLNHSTITERIHHTQRNKRTTIVHTLREQYDMHKIHRTISNIGTKTT

SEQ ID NO: 976564 - protein, 179 aa, Homo sapiens
RRDVRRPVLLTCSETGAASLLRAGPGSSGSDPTVIQSVRERRGALYRSPMNQREPFQHIQWALCPTGPNTHLIHHNKWCPGTYGGDHYPTPQWCNPLPRDTHKYGWRRGWPSGKPPKTTSVFVVEDQKKGDDARDPSHVPTKACWTGSLLLRGLVGEHAHLNQTAPRRSLSCKLLVANL

SEQ ID NO: 976565 - protein, 127 aa, Homo sapiens
MGESPYKFGHAQTFEPGRKFFSLIFGTMPKLNKSPEDRRPFINSGWTCVRYFQQDCRTGTPWGGDLGHVHYQGRDGLAPQRKYLREEGQFPQAIPKARNWTAHGLGTGRKRGHVGGRTSWLSPSVRV

SEQ ID NO: 976566 - protein, 291 aa, Homo sapiens
GGRDRGPVTPHAELCDVAACGRTARQPGRPGLPLPCRRGNGNICPSAGRPMCVRQTWAPFRGLPGQDPSRCVPREDKGSREYGRGPTSRGQTLGGAHLGVTWNLCGNFWLREARHGWGVKGVHGARNFLGPFQGKKRVITAVAPPRLVPIGEGWSTGDWGGTGVITLLPRKCVGEKVGGWQTRLWWRTAGNFLSLSRLCKPNNGVTFPKVGRCQAEVGPERDLLKAKSATRSNAWKIRERSIKNTLRERQEPTLEERGAHCGDTTRLVLRYLGGLHGEAFPAWDGLPKEDD

SEQ ID NO: 976567 - protein, 209 aa, Homo sapiens
ERKTVKDTRLGGTVRTPARQDPTWAWRMERGLQDSGAGRHGARRPARPRLTTIYHIATRQQPGNSYNSLLDMSNTMDTLVLSHYSTRVGLPKEALPTLSTAAPFRPSTRPALRRRSWLWAPEALRSVHTEQRQLACALLPRELLFQVRWYPNDLQKMAWPLALPPCATDELHRWYETVIFGNRPIWPFRERNNIWVTPPKGKHLFWRHA

SEQ ID NO: 976568 - protein, 343 aa, Homo sapiens
AEGESAGRAGESEEGAGQRDARETQARAARKGSGRGHFDRCRQRQTSCGCAYSDPASKDNRQVVSAGGWSQQKNVHHKTVQGLAKTTGKSYHHGGAGMIRGVNIQKRGPPHKVQANWPGEGSTPGVIFGPARTVTYVAKADTSWQTGMDKSQDEAYQPQERDRVHNTEQQSVRLGAQAAGTKVDITPGQTAEHTNKHKGGEHVIHPKQVHTPEVRRRTARGDLTTQRLASPTLTTAHHQRPKHWQSYHTRRQKRLLSKQQAGRSDTGTRQLHARALAGRNDSQGGRQTVGDTRPNATTAVRTRRLFQAQRRRYTVTQNSADRGERIQPNSDCLERLNANTATS

SEQ ID NO: 976569 - protein, 299 aa, Homo sapiens
MVRSEASDKSGRVPHAGDLPDAETPRAPACYTVQKCGVSRDGYIRAELLGESYTAGLTTPPGDHHRNKSHIARKHQHSAIPHQNTKLIYDPKHFSHSISRVYKVHYHTLQLPSNTRRLTHHLFVLGPTRDTTLSVSFTFFVPIAHRSLPSSTTPGDHGGSGPQLQTNSHRGSHCAHFVLETADLTLPLGKHNKVHSWPRNPHGCVNLFPNQSGVGIFLHRINTFPTPLDLDHPLGPVRDINRLLGQFLWGSNSCQQSTLWHNTHLWITKTSLLHQSAHWNRLHIGRHMAPSTSHNHMRI

SEQ ID NO: 976570 - protein, 83 aa, Homo sapiens
VAEEPEEEGGEVVVTERSLVTGWWAQMGVVEEICNPNGAKFVPAKFKKLRGARKNSAHSLHEETLAPKESYDYLKTLVVMSYV

SEQ ID NO: 976571 - protein, 69 aa, Homo sapiens
QATVAAPEQRKGFNVFSSDDKSSDMKSKQLLIIVVIRVGCNSVMSLKQVGFYETGCVFFSTSLLELLLT

SEQ ID NO: 976572 - protein, 258 aa, Homo sapiens
ASTGTRDLRREFPLCRFLITITFQTINIAAVVFTGHSMCSSPVALSDADVHKARSQQYAWLSMATKKPNGEKQEANEMHKAEASSSNKQQQGRASWHTPPKGINSIQWGQSSMASNSHPAAATAAFGRPARQGTTPKYAPKLGTARPSGAIHTDSSLSAGHTTYWTSVTSHARTPLRPNLAECQKHPRTTFPGHTAASGVTQRIHHTQGSHKVAWDWGNGELGVYLTRRDYRDQPRIWACGRTLESGIWDQDWTGNNQ

SEQ ID NO: 976573 - protein, 455 aa, Homo sapiens
IPHLAGFSFTGGSTAQPSGFTIGSAGQFSPAHGTCHVALHSGQASQPTTAVCHKASWHPNTHSPPYNSTGPSLLASNSNWLTTYIWPPLGSSETPFTLHSRFHTPDPTRTYPQQCSHFARQFLTTDAQIAHRTLQPARQLSRLSIYHPSAHYTHTCGTSRPPSLLIFTLYIQHTTRRNVHYTIVHTDPRQAHSPLTHPHFTHHHYTPTLCAPTLVRTTTPLTLSHYQLTTSNVPTHIPTPPPTPRLSTNSWTTTPKTTTLPLRTAPNNKCYQYHQIPPPILYPRHTHNPHHLDDHLPTYNTHNQHTIAAPPAASPHTQSTDTHTFSTSSTPFNTSTRPSEQITTERDNTSHNTSLVYPLPQLHHSNHDDDFTLNSPTVCNTHRINPIYATPHAHTRLPHIVHHSQHKNLYHTTHHTTGAPIPTHITLLYYTPTQPARTTSHTEHQDDDHTQYNYI

SEQ ID NO: 976574 - protein, 215 aa, Homo sapiens
VVYGICLDSLLVVEMPRSAGSCIIRELTEKAREESSPLHRVRGDAAREWPSGTQCRAGIRTSSTVPRSWLTESDGWLGRHDKARDQGICDFERQWLYTSPGRNGVFLIECSEMPCTTNVIADELGHLQTSHGVGSRHASAMRERHYTQQTHLTSPNARLSTRSKAYLMAPYLLPSEDHTLRDYCGPVYDDTDFAPTVDHHGTTPWSRNGIQNGDL

SEQ ID NO: 976575 - protein, 294 aa, Homo sapiens
MDYKRLQAMTRVDWFRDDGRQDETTRTNINTLKDKTATCHRTHHPKQYTTEDTDDAVRHMTLNTSSQNNQDYKARQSRTNQNNTYQDIEPEDTPQRSATNGHHTTPTRTNQTTTHIGTNTIPTEHPDTAGPHAPPDEPQQHDRNNGNKRQPNTNHLHTPQPKHEHNKQRKGPSTTTERNTQHKHPRPEPHYPQHTEAKNNKTQLRLAHQTSPPQKGKKPRHETHTEQLQNKNTRRTRDTETQPTPTRNNNTRGTKKEKEKKYTHRDTQNKHKTNNTKRTNKTNPRTNRKHTPTT

SEQ ID NO: 976576 - protein, 313 aa, Homo sapiens
ASKRAPSSPVAKPGPVKTLTREEKQEEKTEFLEKLRLREVSNEASQAGPWCCVCCPPTGTSKTFLKHWNGCCNEWLLKQQTLMAPEKPLVISQTGFQQRSPKLSSTNKNTRPRLTLKGRGDAGRKRPGGQHGRSVPSGFQDGQEGASTSHQGQWTHAHNKKGTKDRTNADIDPERTGHRSITQAAKLKDAPPPAPTHRATRHLRSDRPLRTHPRILPTTATTRPTHAANNSRANTPGPPATRTPYTPHPRDQTPPSAGPYTSPTPCPVSLLAGPPHEPPPPPPLSPRVPPPHLALPLSAPPPPPSPPPRPSSP

SEQ ID NO: 976577 - protein, 290 aa, Homo sapiens
MQERQQRRRQRRTGRTARRAQTQHIAREVGKHAQNSKLTRGSKNDRSGKKQGNTTQTQHDQQDEKRKTRRQKSTTNERRHNARHQKGKRTNTNTHSNQHNDNTSHQREPHQWRKQNTPNDRTMRTTLEEKDKKKQKRHSDRNTNIKLTHDTLNDHENIDNRIYSKQQTYTNKTTNIPEQHNLEHYRRQDGPHPHDTTQNYTVRIRWTQKSYARERPDDAEKKRQQTEPWKTARKERQTYQSESTKTETISETQNKNNNQRRQSLVVQSQTHTEETDRHTQRPLHEKEQTR

SEQ ID NO: 976578 - protein, 511 aa, Homo sapiens
  misc_feature (48)..(48): Xaa can be any naturally occurring amino acid
  misc_feature (387)..(388): Xaa can be any naturally occurring amino acid
MAIRAQVKRAGISFKASPSNTKGPSSADAKRPGRHSSLHIPLGRPGDXLPPGGCTGATHVLVGRVAWGRKRMWINDMRYHKLTLFGGANTGQHKEADLYGCPGDQKCHVRNMCPRGVQHASGRRHRRGWRQHCAPLKGPVRDKFSLEKQGSPLTKAPFTLGGQPYVVGRLFLSIRAWGATKQGSKRGGRAQCHNTNLRVRDSAGKNKNNSHNNMRHFQKPPRDIFSPHMISKHTRSNSLCRLLHQQRCYQVRAGAHTQGVHQQKNIIYAGTHIFLTTTRCRQTGIGKICEGPPRYILPRPLLTIRTPREGHPPLSSKEGQYIMTYTHKTKQRQIKRRELTNGGSPQETSDIKVAPKKAHKEGGVEDKILALHETTSSFGGEEDVSTXXSNLEDHTTTHTDQTKNAETSGKHQGVHNSTPPKRTTQKPTNNGASHNHHSREKRRDKDPHLLNDTESKKPQQYEEHTYYGTEGERPKEATLANVKPQNDQTGAHDLKNNTKCRTKNTTTYEGL

SEQ ID NO: 976579 - protein, 427 aa, Homo sapiens
MTDDSALVVVVTAWLLTGLRACLVMSVRVVVDNGSWCHDHQWWSGARSSCRVAEERSWGGTIGMARGGLDGQRETEVALDVLGWSSDCCRKRRELWFRVGVAVLCEPFGAYREHGLDITDLAELNPLVSPDGTPVPGRTRESGSHGDSFRRKNPGLCQPRRVQRSTPFTSARPSRAHNVHDGTNPGTGSATHPKNTIQGQTVHIQLGLSTKFYTAWSLKDFQPNTKLLPIGCPDGTIPAVATRFSQFHNNTGRQLATRPLTAKLHRHPRDPPLGTTHPRWPARPHSREQRRRTNDAGQHDTTNTNEPRAQHNQTPNTAQQRKQNTETRHTSGQTQQEDTDKRTPPQRPKKQRNTRRENRDRKPRQTAPGRDETAGQTGQPQRTDGPHKGAQHNREKSRTDAEQHTEREQPPHTRTTPTRPDDARDHA

SEQ ID NO: 976580 - protein, 147 aa, Homo sapiens
CDGVPRRMWRKPSTTSSIWHGVIIARLTWWTVRRLVVYMKSPGDEEATGPSRVLVWMRDATWSGRQYDEKGSVNYEQLHEGMFPCLWGSMVGSLMNPSSWGPEHRVMIIDEYETFVARPCIDPESEPQAIGSVFKSDTMWVDPPINS

SEQ ID NO: 976581 - protein, 314 aa, Homo sapiens
GAVSLEQKLSRLEATAEAGEPGRPGGGSTSTWISCPQRAQCPPCRVPGVTTDVGQTRRHPQRARPKENTKETTSTGHSHNAGSVTQIKHVISNPSRLEQHLRFEEKLQAESMKQAQGIRDQSEGPAPNHVATDTFTTDTLGRNYATQTDCAQHRQQPREPMDCRTRMHANHRTTPSTHQIQIGQKRAKQLAEATSRRANQRAAKDTKERPIPPIATMAMIATAATRRANELGHTQQSEDTDQHGTAARVTPKETREQTKTSPGTLRAKDQQRPHPWDTRNNRHNSNEPRTRQGGPPKPPTTHQFLGGQADTPQR

SEQ ID NO: 976582 - protein, 104 aa, Homo sapiens
EGTVAACGGVPGYLASWRSELRFENNCEIGCFARLSKTYCLVAIGGSEKLLQCVRWASSPIPSPWMQRVVSSDAASSGACVWGTGHASPWYPSNTTDQELQEIT

SEQ ID NO: 976583 - protein, 199 aa, Homo sapiens
ATDDFYDDPCFDSPWLRFFEDLDPRLMHVGALLKPEEHSHFSRWLVHPGPGLHVSDEHVLLLPMRAPPVRASAYCWACKACKRKEHQLPTCRKGATMRERCRLSKVNEAFETLNALHCEQSKTSGLPKVGDPAQKPSAYIDGPAGSAALTGLPVPPVRRQNALLLRRARVTPVLWMASTTAGDSDASRPRSNWSDGMMD

SEQ ID NO: 976584 - protein, 265 aa, Homo sapiens
GPDPRMAWSLDLEYYHSHDAKVQVLPKSALLERLTRSPILVATSSTDRVWGVFRSLGGARTICAARDASLRSPKAACPWRPPPVRPLPAVSWVTGAHVSYDRLLQELNATRGRNDRQMRIIVVSSLRSDANGGFEERHEGRTSRERIHEKESMTLLSSLLSPGLPEGFVRLRPLWRLDETDESHSLTSAFKIDLPALVGQSQPPVCELHEMRARPSATQELDWQGQLDTMLWAAASADLSRGVFPPGKGLCGSAISYCVHLVTVW

SEQ ID NO: 976585 - protein, 170 aa, Homo sapiens
ACSAEERRPARRAMNLLPVTLTDNGLLYAGFNPGPRMLACGMENGFRRHEPPCRVTLTARGCIYAGFNQEHGCFACGMENGFRVYNTDPLKEKEKQEFLEGGDGMFEMLFRCNYLALDGWWKKGEIPPKKVMIWDDLKKKTCYGNRIFYRSRRQSQVREDRTGGGRGLQD

SEQ ID NO: 976586 - protein, 122 aa, Homo sapiens
ALGAGMWNLTPMNSGRVLAACEIAAMFLVNSFLNGGWVAWCAGGGGWGPGWGAWEMCLDVPDHAVGLGCVVVRRMGWRAVQGGGRAWRVWLRCDLCRLLHPLGSQVIMRHQDRRLACASTNA

SEQ ID NO: 976587 - protein, 105 aa, Homo sapiens
MANMGYIFASVPLGMGPIFPGSYRINCPLPPIPERDKFPGNNCFGGFPTKDPSFPPRPDNSGARQEMASWNLRHGFTKLTGLWGWTSVKSASPNGVQGTIVPCGP

SEQ ID NO: 976588 - protein, 487 aa, Homo sapiens
AVNLHHCAPTSTPLRCLPASDVPPVMVVLLPVSVLSTMCLTCECVPTCALATLCRHDLLCYNGATCEICPAYHCLDAWAAHVLNLCCMLPNGAKQLCHFNELADLEILCMLCDDSPWQACLALCVLQWGPAMGNLLTCGVPVPLEHSLALPSWLCRMAGGPSVAPTPPQTPLLAECTPYKFQWGRQCHPCAATVNATCGTCNGGCELNVSFPVDDQYVDAHLDVSRLVPGHSENPAPGTTKRADVGDHRVGGGLGFMAMSLKRAAQFRIVCGRMTHFPHGIWRIYGAECGAIPPIYPTPAKWENWVGHTRPQGRFGKSHPCWLGGKQTFSALFNPTDITTLRRVRALLGLPSHRSPPTLRTTSGTWDQTGPCCDHMRYWEGNTNLAPTSLLEQATNQFTLRRIRGGGKCASYIPPRPVNRFGSLVGHSFSHTSTNRADDERLQTFHFLPDVISRLTDRSSQHSSHKQLSIRQLLLVRDQRRRPDPAG

SEQ ID NO: 976589 - protein, 225 aa, Homo sapiens
MSREGARSQGKGGRIATQGPGRQYRGHPFTSPSLSATSPRYASWESNSSTKNSWAHGGSVHTRGTKGGILKRHPRRDTGAHQGVTHGETPERPTTCERRHHHVMLARPTRVTTSPTEPTPIKPGGHNPQRKRGSRAKAYFPSRSSDGVNPPGRRAATPTRRNAQVRKKQHPHRRGAPHHPQAATRTHRRSKTRDDRPRATDAIGPIRHQPTQQATSRTNIRPAKT

SEQ ID NO: 976590 - protein, 546 aa, Homo sapiens
  misc_feature (373)..(373): Xaa can be any naturally occurring amino acid
TKTTNLLSPRGLLLSVTILISMTATLKCYGDYGTVADAATGNLGPSEPLTLDVLTLTTASVASLDQVSYYDWDPSYLTLRCCQGTLLLGYEPAHTLTAPSSTQLTHYDGRPVSLPKRAGATLQEPHRAATHTRANARLLTRADRHTSLAPPTNCLTPPAHNPHPPRTPPSTPTTRHHHLRHTPTPTTKTGKHAHSHTPTNKLRTPRNSNTTTRPHTQRIAAHPTDQPKRPPQRKEGTQPPQAAVPTNEPQQKHHRLDKHTHGTRRSRSTYHPRNDRDTKNDSKQTNSELRGTQPTPYTTTTPPDHHTRAKRATWARPDKTHTNNQGEPAKARAHPHPTTTMTELRAEHNTTATAHKTHAATTNTKYKQTPAPXTTADSPNTTSNDTGPTLKRQRTNDSTPAQARTHTQNPRGDRAVVGDRLRHNERTTTTQKAQTTLQPTNNAKTEGRDAHIPGSDRLEATGGDTQRIRLAREATEMTQQTEENNSTTTPTAAARSTDADRTRRNSDAPQRNRTTRRTNTQPTDREERNSRERARGDRREWCGITT

SEQ ID NO: 976591 - protein, 270 aa, Homo sapiens
MPLHSSLGNRVRSCLTKKIKGMWKRGTGEKGHEWRREAKQTRLDARQELATASRRTGYPKHFGTRTGPRFPTGVFDQAKAIYRRQYPRDNSRSPDREKWQGIHEMARGGRVSTNWQRKSQKPTTKKSQLTMEETQQNWGAGIQDSTWSPLDLNPPWRPYTDTQRGDKLKPKNTPLRRQTTTGVPKLHTTGPSGDITQGKRTGTGPITHTGNKEATDSSNSTPTERTNKRDTPTASRRQTQNKRQHTKTTRNTHSKAKNAQPRPDAETPQT

SEQ ID NO: 976592 - protein, 469 aa, Homo sapiens
SRVPERVEPDDWTSTLMSRGRNRPPLVLGDKFFADLVVQLARLARTGEVVGRRVRLGGGTVNPKDEKWPCPGCWAAGYALTANIFNERSCVVVRADRDRLLDTEKPGWVTPMVPEIPNLAASQKVKKRSLSKGSGHLPHSQAPGSHRRGENPPTSLPKDLEALTLSDSILTQLFGSRHPRDRTLTEPERARAQLLGPAARRHALRRPALHTHPPPPHDTRTPQPRPRTRTPPPRPRPPPPDDTHATPPTHQPPPHRHTPRPNTSAPTPHPTLMPRRTPTPTHPHKRQHTHTPGTQAPSPHAAVATNATTPPHNAAGGATRARRTARRAAGAQKRQAGGADGTDRESETRRGQPSKRARQRTRPETRGDGGSAGDQRRGAGAESATARGGGDGRVGGGQRPRGGPGAIAADRQEPGPQTAGGRGEKGTRRPRARRRRKSERPRRRRRGAEQGRTPAPRTARQSGRSARAP

SEQ ID NO: 976593 - protein, 500 aa, Homo sapiens
MGNGVKGRPVDLATEGSRDCEVKSKSLSRPLWHKAEECLRECAIGAGGWTTWLVIDTVYDLEEEQCSCDNHLHGCDELTMSSTEGGIDAVDEWQRPRSASSERRVIGSDRGSSETSRVQCMMKSYAQNSRYRIFMNALQVEPFYSLYNGRTQWQVLGYSSGKVGGIKLNVTDNHRGNSKGESLPRVGSKGPKIDPWLNAKRMGLDLFPKLTRPHGTIHWGPLEKHGDARHETYGTAQFLTQYTRLFRPQTCKKRRRRGMILHSRDRIPPHTGLPDTKQPSWVGTIAGRVGAGPRRGQTEPTEAWMDTAEISAPACTQHRLPPGRTRTHDDVKKNQYQKDRNNPISNTLSNKPTTLCHHHPTVNIKPPKIYAYNNHYYTKIKKSTNTIYITLFISKSHSAQRGSRERETTATRHMTKQERRKEHTQHQYNDQRQPTDKKREKREYGRRMHEIEQERRVAETQRKRQHERGAHGRQQECGEEARIVTRTREQDPNGEDIAGN

SEQ ID NO: 976594 - protein, 169 aa, Homo sapiens
MTRDGHGSARPAINPNQRRRRKGGINTQRRDDKRPQSRYDTRLKRRAHHPQHVLSSPRPLNGKCRNNSAARDTQKATRRKEQKAGRIENKTVHTKKQEQHDLATSEHSPGKQTSRHTAAAAPQIVSTNKQSRPMPLREHSIRRGNNGFRSPPPAIPPAQLNDETTEHSR

SEQ ID NO: 976595 - protein, 261 aa, Homo sapiens
MYLVTSRWFTIPLEPCAIFLKDRGASGALSATAGRRSLENRGKSTSALCPAGGVHPGPRGAREDVAVCRAPSGAAPGGTACIMWACKACKRKNIRADRRQGRTTDAASWSQLEQSKVRPEDDSQAAALSSESDQAVAKVGDLAKGIRKSRACRSAERPGGEDLRGALYRRGVPGPEGQKGDYRPTRAKGLRRGHRARKVRGGALKGQKTEQDNSDKGRDKRVSEGLEERHVKIITQDADRPTAATIVASFSQLSLAYTGEE

SEQ ID NO: 976596 - protein, 541 aa, Homo sapiens
MQGTNRRGSFDIRKHVAELTEDKRNSGREQQNRNENILLETTDQTLLGSTRDTSIKKSLTKRRMTWTLFLTRSTSPGFQQALGASSQAAMAKYRQREAETMHVNTNMLLARPIADLHHRGNRYRPIIRAMTHARQWALSSSSMCRNSSVNTSSCTQRAKRIIPTRNNGLNSVSEITNWCMQHHHRDRCQLLVFEGWAWHETYTRLQLQNTMCTLDIAIGWNTNKLSILQLEPITGPKIHERGEKQKGEKHELDTNPKEQEISHQYDGNVNENSTRHEAGPGRSLTKLSHRRNRLNQKHMAIQQWKNPRSDTQTRRATSRRHQHEHHSLLLSAPTDAKEKPDNTKDNERRKESKKRKARKRTTHTKRRQKQHENEQHTGTRTKRKKPTTQNTNGNRTGRQATKKREQAERQEKERRKKKRESTKEDEDATHRQRTTTSKRKTTKEEKEKEAEEKEKRERNAEQERGKSGEAAGRRQRRDKAKEKRTEKRTRRRRAGGARGAREEATAHSGTGKMQETGLRGSGTDGEKGAGARKSTARQRDR

SEQ ID NO: 976597 - protein, 117 aa, Homo sapiens
MAYLTRYEPVARTLRVGAYEDSVQWPVIPTDGHIRVALKSVRVPNGGGGGGGHTHNQHRFVRAGFTESELAENNEASHKCYDRRDWTSVHTLPDTDRERSTDNPGCLSTAHCTDQRP

SEQ ID NO: 976598 - protein, 662 aa, Homo sapiens
RLAQEGTPGLCDPARPAMLLCAAAWWLGLPVAAALLCGLVKLACDALLPHVPLGLRRVQLPRACALPATTEHRDKPSDTTSVTLCRVALLCTWEDDMPGITISNAERRPQVLTEPVSTWHEMSCGHNPLVPDCTTMPLAGVLLLQTYVQLTMLDMAYYVLRCHTVRLMERSIHSAMIHFVENLYRSGKMPEVDYVVHEGNGLKRNERGTSTREMLHTLISLPTTYLNTLKPACYILHTTQPRENGTRRRQLGHNPQSARAITNNDRHTQTLIGLSLHPIARSTHEPHAHPKTLNHQSNRQPRLNALSTNGYTSPKSLITYSFLLLPLLLIHYRLKRKPHNDHSSKHTPHKPNHRTNNKYTKQTHITPETKPNDNSTYYYTSAQTDHPHTTIRTIKYNNQASRIPATPTTTKLATDNQNRYTQRLQTTTKTSTPQSHTDKPAIIIDTEHERHTPQQLQNTHTVHSKTPHISDQRKPDDTTHGDTRTTDERQSRRKKGEHRHRDTHEQTRDVAGATARTMDSSKKDNERRQQDTTQEMLDDTQQNMMAADNGRPTTNTGQSRASASRCEGASTEQAATQEMPEAETDRQGARKREYAAQTSTPDDERLEPIKTRRHSTETSTVERAWDTERSTAARAVIWQQLGQERQSAEHTRELEVIETKRG

SEQ ID NO: 976599 - protein, 71 aa, Homo sapiens
MFIVGADNVGSSRCSRSACSLRLAKALWVARMVAHERPIGLRAKWPIPGWVAPLVEKTKPNGFLADEKPVA

SEQ ID NO: 976600 - protein, 313 aa, Homo sapiens
GAGKFPFSAGQKCCQMRGSPDSQCLSGTEQSLVKSGRFGNRAVVCCTTRVMPCIAMPLAGSCPSMTLVCQLSTGECTKVLVEKRRGPLQVPHGTDMQCIAGGQNLVQIGSRRQDSGPGLEKGLVHLGERPPRFLSSNMGLNLDVALVGRLSGFPPSGVPTLWVEVEKPLWGGFYPKAPATNRANPNWVTQSMVKQLFRSPFQKTPGRKGSPKNLSKPYELLGSKAEFVPRGLNPVTLRGNIRDDFTPTSRVVLRTFPPWKKPGATSLKWTNCCALLRKRDSKPTFQVSPLGQQLGSRAPHTTGKPTTPTGPFG

SEQ ID NO: 976601 - protein, 196 aa, Homo sapiens
AEDYDAGANCLGRSGGRQLRECGRLRGRLAWGSGLASSDRITVLSPVRGCRYRLAVGAGAVGLRLSVLVVGLLGWLSPRGASPEACPRAMICSVKLRRDSAGTSSPTTEYLCALQNSVPAALPVLRLLREGVLDFNADRLRGVDCGASAETPSRSTKDLTLGLHQELLPGPGWGNTGSDSDYILQNVVSLRYDTKM

SEQ ID NO: 976602 - protein, 460 aa, Homo sapiens
  misc_feature (22)..(22): Xaa can be any naturally occurring amino acid
VRRRRRHTRTHDDTHWDVTTEXDATTTTHDGHDDLTCELDDDGPQGTDLDDDHDDDDDDDDDDTDDHDDLNGHDDPDDALTKITTTVGPRQPRHTTWDDDDDDDGTTTLSDDDDDLGTTTKTTHDVDDQQTPLTTSEADDRYVDTTENDDDDDDDRPANDDQGRRKRRTDPTVGDVNHRADRKTDAHTDLTNITRTEDTQTRHTPDDQDTRQAGARTIAPSRHAQAKTKHKEHRNRNACKPHTQNRPMTNSPEETQIGPTERTEEETNERPSTLPQDPRTMTDTIRHQEKTVHPNKTKPKGIQPTAHGRTPKRKPHTPQARAQKNETHAAPRGNNENQQQSKRQQPRHTPNTQSTANNNTQDTHEQHQTPREHATQKPPNHTGQQAKTGKRTHTPEANAGNKKKTQTETAETQETSAPTKTHDQDPRKEPKDTPKKERAKLPEKERSSTTHQTDNTENRE

SEQ ID NO: 976603 - protein, 248 aa, Homo sapiens
GAAVAVAGGAGSWVPSSVPAGSLTHPPADARGVWLLTCCGTLLCVCRWADVFVTGDVAEELVEPLVHCVGCLAGCPRADVLVLASSPSCRPVAALCILIWLLQSPPHETKGRNSAVHFPSQTQILHLSASGTAHPTAPDASSFCTAMPCFFPELGSRALTGEPLLCWVREWRRVRVKINQYAEDSVLHSVSCYGQLDRITARWKHATHQQATHTALREACFRLQPYQALTRPATPISTCPHIPIAYRT

SEQ ID NO: 976604 - protein, 342 aa, Homo sapiens
VVLGSSGVLSELDGHSGVLSELDLRGPRVSITVVLTSVQEQTEKTLTPSELTKLEALLCNGYWAFECLTCTETTIDMICGICACGTPKWKWLRASDENVASTEEQWRSTWALSFLGVKMSVKVRGKPECTQKRDKKFTTEATAAAQHNKRKNIPESNTEDRSSRKEQQQTPQELRHNEANEAGRTQGREATRDATTPHRTGLRRTRHEEPRQQHEKTPKRRNKKHNTERATQDNTEIDKKADPAGESTHQATNRAAAAGEAQPHKHRTHKKNEATGSKAQSQTKPDDSAATEQTHTETTDEQNNKTQEHTEYDEPKRRNNRENQREHYRQHRREHKPGDSST

SEQ ID NO: 976605 - protein, 309 aa, Homo sapiens
ALGPGKTAAFALACLERLIYKPRQAPVTRVLVLVPTRELGIQVHSVTRQLAQFCNITTCLAVGELDVRSQEARLCGQRDDHSSVATRGPDRWITSMTALPSTWADIEVLILDEADRMLDEYFEEQMKEVIRMCPTPQTMLFSATMTDEVKDLASVSLKNPVRILGTEHRCGSLSGQEFIRIRLIVKEIREDIVAVVDEDLQLTCDAVSRKTKKQDHDAILPGAHGAARWVSSIGSCHRRRVEASGFQDDRLNLGGMMWSRGLDMRGRTGQSNAIHQAMSRGARRVEEAHLVDNNEYQTQGAESGPTATD

SEQ ID NO: 976606 - protein, 112 aa, Homo sapiens
MATNNRHDNNDTNCYTLPKTDGLTTTYDETRLTRSTTRLNDQPTKRLTEYLNISNSDQALAWRRLQTRDYHIRRTLLNRVFNHHRGNTDSSIWIAGRDNGTSVHETLHKSSE

SEQ ID NO: 976607 - protein, 266 aa, Homo sapiens
MRTTNKTKHTLQQNTKHKKKFVNTTTGTDRRAQEQSKVLRERKRNKGKPKMTERKTQQTQKRQTNKNGNNGKKKTYPTNSQSINNENNTRKIPITKHNTLYLTEIHKVKITATRSNKTNNKFQHATLKSKQHTKTLTTYLNQVFVDRPAENQRHNPNRNGKQGTRKTNEKKEEQKGQKNKSKNRRTHNMEMRARPMIAKQIGGERAEHGAQTGEQRQIAGKKTQTTRNRKSKREISKSRKRQERTQDRQGRDSARTTQPADQLTSI

SEQ ID NO: 976608 - protein, 172 aa, Homo sapiens
GLVVAAVAAGRVAVQDATVQMVMLQFISSGLSKVAVPSTIQCDHLIEAQCVSGEKELRRAKDIKQEVGKLVAVQTSRCHSTGRGASVEGLWIWNHSPGLFWKYYAYPGVASDWHLSSQTPNGGVALGGICIGVGGADAVDGHGGDPRDDLERGRHGDFDVTDVDWGLLRHRE

SEQ ID NO: 976609 - protein, 62 aa, Homo sapiens
  misc_feature (59)..(59): Xaa can be any naturally occurring amino acid
GLTKGGEEAEPRRVVCSDPFSSKDWYDVKAAAYSLSISKESDLEKYCVRSGRGAHRKPXKWH

SEQ ID NO: 976610 - protein, 321 aa, Homo sapiens
TIIQMVNPNKATIGVGLGLPSFKPGFAEQSLMKNAIKTSAGVMDLNTADASKTPVNGPQTGRPPMKPSEEQVVVGNPTCEWLRDQEKTGSAGPRAQAGPESQSPHAVRQSRSSSGLEEWTRRSPWERSSVLVTLSHPELHAEMWRMNAPFPRLCVSSWQTPSPVRQVQAVSSRQGPTGQLPPLCPSTCFGVPGLIQQMSPFCFGLNDWDDDEILSFGVAVSQQEYLDSMKTNKCTENRPRQELVGPGIETFQPSILLSGPLTIGLPLLLVFCSLFSLSFVHLVFLAAYPFSVCGPLNTSGAGKNKMPPEKMPNQRGPFICV

SEQ ID NO: 976611 - protein, 253 aa, Homo sapiens
MCETHDLRLHHSTKGILLSPLGTFSASEGEVTIAAVSQYPLEGTASAANTFTPFSSFRKIPIPTMLPTPDIYHGHDLRLLYHHESFRFFCRMAATYNCITARRHALPCVALSPNDNISLENHESKDLTIGEAGFPPETLTAFSVPLTNPYLLKAAELREQNLPTVSNHTWARQHTGARNPGETQHKPNVTAARDNSDPPGSGLDREPQEQTKNPKRYIDARIAITARPGTCRQGTLIYHDQGNTTRSTKTHQA

SEQ ID NO: 976612 - protein, 320 aa, Homo sapiens
MTWCGCWEKLVEPGGPAWTEHALGMIPRRLMEVCLVLVLKKWGTPEEASRRGRGTQDVSGQGRLYLALVHASDGAACEQDDRTVPSYMDIRADVQDQLAHGTGTLQHALERHDGVMPGRELRLSRNWDPTEALRGSAFDGTRRRNSWNRSIHGFDARARVPRSAHCDLQNIPLKTQRKGGPVPLLGLGPWAIASRGELGQRGLGHGREMGAPFGFGRELMRHNAGRSNTQSPPIQIADQTDIRSTHTGHTAESHKGPNQRQLGPQWHNVKPKDNMNTNRYNHTTMHTHTRPRTSTRHPDTLKRTRDTTVYTADSSEQQHP

SEQ ID NO: 976613 - protein, 326 aa, Homo sapiens
MAEVEQKNDADLPAMFTYRGCGPRPAAGHVLRSSMTACMYMCCASCVCWHEPGGPAAQESQATHLLERRLLHTATRSEESTPMRRSPERRVQTAHIARTHDHSVHRSMGGAKNCDEAPLYPPLQDLSNHGGTIRAAQMTRATYPGATISPITLHNARSSNGRPGPSGAHHHMPSATKDPYLQVTRPTAYHTQRGTLHVPDNNNTNNKHHAERHHHRPRRATAHTTTEKTIANYRAPNRAPNTNTTHLDPPRTHTGTHNGDTTQDRHPPPITEHRPTTHTRHRKKRPECKTPGPNTATRGDTNTKHRTNAARTQCSQPMADTANTAT

SEQ ID NO: 976614 - protein, 129 aa, Homo sapiens
MTNANREPTSFRDTLTQQSTDARCSSPDTANTHGPSLGLRQGRSDGILIPQRLPIHDHPTDGTHHTDPETHDRTQNPAKRTLQQTKTPGNPGKSYTPKTKQTSGDGTHGSARTGPSNSPPDTPIDTEQE

SEQ ID NO: 976615 - protein, 139 aa, Homo sapiens
MYRDVFSIQSDFYPSERARNLYWYRALNPSYEHQYLLDKIATKKTNSDSNVNNAYFTIGAAGESLEVPKGEQRLLKGPHPFNVRKSADALGGQTQRARPRSHTGLKSEAEQVRYPNPALSSGRTTDPQVAISGKIKFMS

SEQ ID NO: 976616 - protein, 164 aa, Homo sapiens
MSVLRLVTFHGATRLGGVGWRCVHACSISCCEYVSWGTVVRRGVGRSLDIAQMQTHVMVAKDACVDEGMHLRMYTAAMILHAPARHVSIFQPRIHETNEWPRVDGKGMVGPGERVYYRVGGEHTHDPSLLPSTRPNRGDRNTVERVGRDSDGPPQTFSRNKRRV

SEQ ID NO: 976617 - protein, 174 aa, Homo sapiens
MASVLNLSYCKIFYIFALILFNLVINLELMTPCGAPPFPLFGPPHCEMYDGLVGFPGELGGRQPGVNLVHCDFETSCEINNVHHLLKQQNKKNPAQETEFPGEQLICRRERRKTKRAMGKGATVQHKQRLHGERQVSLGYHEGGNNYGAGIPPVMGTATNHTTRKDRVTTGIRT

SEQ ID NO: 976618 - protein, 338 aa, Homo sapiens
MAPRTRTSSRGDLERETRPNPTVHPVRVQTSATCRRTPRDTRIAQGFRPTDHYTPFHLDSHEILAHNDNLDTDFGTKTNDHTLSVPTTSEHRNTTITYRKDINSTTTIDANTHTHTSKLARTAPKKHRPPYKHNYKRNTTNKRQGPANRNTDNTQTQHNRDTTHRQQPTPNHTDAREHITAARTNNTYTPDNTQTRRHTDSITLTTTLTINNTTHHSTHTNRPPNNGPHTPPARYTHNINQDRHTKHRQDCTTTNESNSRPHIQTLNIQTATYQRTTDQTHNNLTDYHKQERRNAMTRSPTHNNQKVKQNRTYNQQTQNTPPQNCTRSNNNPNLNKTT

SEQ ID NO: 976619 - protein, 119 aa, Homo sapiens
AVCTKPLAGESLAEGPCTRRCGTRPVTGNPAASRRTGSLDARWQACEESRLAHQRSDSAQERSKARSSGHRVQALHGPASHRRLIVRADADVLAGTHGSYLVTDGGNGQWSISHSMGHS

SEQ ID NO: 976620 - protein, 305 aa, Homo sapiens
TPNPVILQDCMWSGFSAREKLELRLERECCSTAAGRQPPVPPAQSPGSRRLPALRVAGHWLGLREPGLRLVAALPCLSSAHPGLAECVDPCLWSSPFPVNKLRASARALQPLASAPCGWARAVCLVGAVVFACTSLVAPGGVCPSCCPSAVLPLTSGWRPHRPLSTLRTRTPSSDSDDEDDEEDDEEDTTLDVEPRRNTASDHPSPPPTDRHQEYSQHLEVANNKRPRSREEEPHPPEQMPTDECHAELHTSDANHIRRTVTTDMRALKDAHKQTTIKQAEEKDQTTSAHPPQLTALSAHNHPPP

SEQ ID NO: 976621 - protein, 408 aa, Homo sapiens
ALRTYLRLRALQTAPHAQSTDALMPCALQCSACSLPCLVALSACCESSEDVCGQLKDDKDSAKKNKGKEAVDCDDSSTDGGYEQSKDVSEKRSCREYTLTDCVQGFDPAAQPRRSRAPGLRPKTHIDDIRRTRPESRVTVLAVTVSFDGASSHSLLVDFAAYITLVFPGTYRAIPREGTRATTPLLADPPLYPWGLCAWLAVGRSITWPAVLPNLPRESPKTAPETQWELISRIPCVEPQDRPLSESRDTVTHTARVKRQTEARCAADPLHETPTRVAPPPPRPHYPCATNRRANDLANVAQHTPNNRPPTNKPEPNSPQPTLNHHQHRHTSHPPPRIQNPPPPTYFNPLYTYTHKPTPNKSTEHNQHPKSHTLLIHHKLHLPNLSDSTVLRHHSSPHNPNTSRQTDP

SEQ ID NO: 976622 - protein, 169 aa, Homo sapiens
MFPWCRRPGRGTLPALFNPGAEDSGKSGLIRDSEAKNASYSWASLLDQFLNHYVRVYSKTPRCPCGGIIHGLSLVHSCCEAPRGHTQKKLQGRGTRTYKPDTGPKSAESSRGITSHSQADMKPPTASRKLGGNRAGPEPDYPDTARTGVRRRNIAGQGPQQSKGMTGPS

SEQ ID NO: 976623 - protein, 324 aa, Homo sapiens
MADRGERRGKEQWLPVDATNRCSTAKPRSAWSAKPEAQGAAAERASPGSVTSSGSQRRCPMTVPSSGTNGGQAIPCMTCNGGACALHASPDTAAWRSPSEAADEENEPQKHESSNASDEEACEKRDPGTQQAFVFGAELERDHELTPDKLRAWTEATMADCWTPPAQTLRNRNELSLQYISDSYRTNSSNSADASATNRIWQNMSERVWMTPKNYTRSVQSCNTQTNAAASQGLKSSSRRPPHEKSPGCTSRPNQETDGSARGKHLTVLPRIAAQSHVFTLPVPHASRPPTPWVQKPRRSHHHVNHYSIRHNNAPVRPDHAPTH

SEQ ID NO: 976624 - protein, 182 aa, Homo sapiens
MWKKAIVRAWVSWGTVLVSQECPDGRTGGVRQGLPSVSERGAREATEEGGPVGVNLRVLAEGAAGYTSGGVHTRRVPSGGGKGGTPLRTTLRKPSLSLRGNFGHAPLRNPVTWVLTGGSEPRGGTPCGNGWGSSRKKEKQGRIEPKKEESSRFAITQFVWARDQGLECIKHKGGKGERNGRK

SEQ ID NO: 976625 - protein, 342 aa, Homo sapiens
WAVARVVGLPGGRMCAPVSLPSLLQMVRLRSVGAPGGGSHPSTVVPSAPRNHCEGPCQGVGQPVPAPSSGLHAAVRLKDCSWRSEGLSSAQPNWTPEGEPRLPSPLPQLCSFIFSKGSEEAELERPCPLRPQVNLQTESWCARTPEALFRRMRANPGAQEECSPKGLHPHCGPKSSTVQRSAPRRSYHPSKAFELRPLYGSTKATGGSIQLDERTRRERWRENWAVDIEKIGAQMDHNMYSLDSLPGKDGYEERTDMTRAEVKRSQRGQSANRQLGTSRVNSARTKENEQKKRLSTDSHDRHEAQEKNGKRQVARPHDGAMRQWTRGSRTQATDEENDNLPE

SEQ ID NO: 976626 - protein, 156 aa, Homo sapiens
  misc_feature (128)..(128): Xaa can be any naturally occurring amino acid
MCPPVVGRIRKHDYPNNDSLVIDSAVNWHLAQSQQFCGKDMLSTMIWKYARDFEATLLTMPCVTMRYANSRNGAQKWHSGVDNGPFRGGGYDSYSPIQSNSVRDLKLSDHVVETFCAKVHLSASTGAXLISCEAPFVKPPHHEFHIAIDIRSRAKP

SEQ ID NO: 976627 - protein, 348 aa, Homo sapiens
MRGHIDFSLTGPAAKCGKYVCRAGPGVCTSELLNIFPKEVFRASIRSSRRDLSHHYPRQPGVWDSLSWTHDGEPPDVTAQSKETGRSSLIQYLRSAKATPCYNVGSRHEDCRYPSHSYELSNPFPVAPGPAPGACGSCAIVLGLLGMRALTLGARVTIYQSPFAQRLNRCQTESAASCTSVGNVREHVGTAKSLSLPRPCQGSRLGLGWDSLGLWARVPVQGTKGMYSFHNTGIQKPDPHGCLGLHNIQPDKPMQQDPFPVVSPNNVGCFNNIHQKGNMNSPRGRTAPTGDTNPDKDEGSHFTTTVDVTWPTQTRVGPQNNGTQRQGANDRGHKPQEETNTGTTSETA

SEQ ID NO: 976628 - protein, 312 aa, Homo sapiens
AQVSCYTYPYQPTRDTGKRLISTIVRSYHTYDSWQVHHIAGHSDSITLRWHRSKLNQFETSLRTEAAEMGKAAPIKIWPGSRDKTCRNLRRDNVVITNLILVAMKDTFENQSRYYCEISIECRQEDKRPCITKKDELARGPIYTGVTMMPDLYTSLGRAGVDSDSNISTSLGYFIRTTLEPDRQTDAEMTAYPRAYSNTHRDIDRKRKTFTLRLRESYKTENDKGAVHTKPMACDDTPKHNGTTERPQANNCTGAHHTTALSTGDNEISNAHRATQPNRNSQDGALPEKAPCNNTGKTHISLNGPSNLINSA

SEQ ID NO: 976629 - protein, 320 aa, Homo sapiens
ERLLGQRTSLERDPVAWKRGGSTRRCSYRRQDLGIQAGHDPSEALLGVAAGCEEPKGVNDGDHAAGRMGAATNRGARVEIFYSRPVVALCVTTCVDSDLMPASALTGPGSSENADPRLWAELSSGKDQAPSCCDEVQCTGHRGLTGRLPSPCGCADMSNCRADERDAGVVCTNETRSTHTLDLSRSSREALGKIFDSQRGCDLSISVNVQAEDALGFCVATRSVLECKLEGQALWKELAECPHEVWMPVCLPWSGAFRTLIRRIGFPVLVNASQAALHWPGVRDWRPLAPPRAVNPAFFSGGRRGISRGGTDARGPLFAP

SEQ ID NO: 976630 - protein, 192 aa, Homo sapiens
WQTELFIRYSQLEATIRGVKSYTIDTYKEIKNQNTQSEMLVGGRGRGWARQWGAPGCSPQGSPGGGDAGFLPPGRPRSTNHSKGLWPSVSAAQAQGWWLDGKDGTEGARDCTPPGWSGRVKMAPAGTRLTCVILPAQANRHRGRPSNDNENYVSYCQTKRYQDMADMTGVSQRKRKRGEEGKEDHARQSRDD

SEQ ID NO: 976631 - protein, 142 aa, Homo sapiens
  misc_feature (73)..(73): Xaa can be any naturally occurring amino acid
  misc_feature (135)..(135): Xaa can be any naturally occurring amino acid
VPVFPGLCPCFPVTDSVHSCTWTPVSLAAAGCVALLPIPAAAAVCAAVVSGVCVLCLVPVLCVTMCCVCDLCXILMCRNLMCFTLCRIALQSCSLPCVLCEIHLTYTTVRVPKSSTVHNMKLCKAQCARKFVASXHSASASE

SEQ ID NO: 976632 - protein, 230 aa, Homo sapiens
MHDVCLKTQPQRIVVRAPISGRFCARRTPPRGIVAPCGGENTRCCEGGVTQSQSDTDDPPPPPHVVLHWIHTHPIQQEGQRAVRTRLVETPPASRRLTNLTQVDTGRAPQLSESRRPYKQSHNAHYVGPHYDAPKCDTPLWHQVYSPPLIKTVGCHLQKISTGGVYAPSSYINLPNGLPLINERAYTQGVGNTKTSGLLDELTEKTDNWLPRYITRGSAIITHLRYYPPP

SEQ ID NO: 976633 - protein, 195 aa, Homo sapiens
SRQLRDWEVLVLGEAQVGPGCCDLHMISWPSFCSRLSLPRDRQALVKKLPQTFLALCATDYTLAMYPPSMIATGRIGAASSKAVGACFLCGDELTEAAGRGITGTERGLAAGLSGADLKLQSSRESLREAVYRASSSPAAPKPPGAPAGKGPADQHSYRCHSHTPVALERPSGVATEAEEGPCNQLPGSRKPDQI

SEQ ID NO: 976634 - protein, 181 aa, Homo sapiens
MLRGCGDASGGAHLAPLVAPLGRMFRRGMWATRGIGPGLGLSGEHQGVGSPQQGSRGGAGGGGWGEGLSRGWFRGRVVCGEAPTREGAPRGVDRERCDRGSGTERVLTRLGVHHEGGSPIRGRGPRGGRVSFAKTFVEETLSPFPLGGNHLVPGPLENPDLCLPGGFRSSGGEPLGGTGGF

SEQ ID NO: 976635 - protein, 350 aa, Homo sapiens
MVQRSRPGRSADVRPGNANGAAGIARAPLSGPIRASSVRCLQRFGYHHERCAPDAASSLDGAQGVPAIQQERCARSIVTFLWIRGGVNKVHGSPCRPTCRRLKEYRSNSSSSSRQEALAPKKGDSSAEELNIGHPGDRTGSCPSGNVYKQGRKLESSLRKQHRISKPSLVSDMARANARLFGYGQTRAKEAAEQDVEQDKIKPSWGLGISQAVMLGLHVSVITRWEQLGPGMGLHCCDFSWHATRELLDKTVKPWINALPICVETLMRGRISTECTRATIQRAPVTDRRTSQTRPLRPHYKAEQLDRMPQHNPTLEEPPYNTHATVPPHKHNNAELFYHNTEHSKRSPLF

SEQ ID NO: 976636 - protein, 179 aa, Homo sapiens
MLNVVNNLSRAAITPAGASQSGQRLHHTLPRDYTTTPPKYRHETPYRPTPRRKAAVETTTRVGPPPPPNNARETNNIKRSRLLKSNKTSGGIRHTVKYYPQEEGLLKPHRDTQYKRHRRSGNHPTSSGANNKAELTTASEAHLKNTCSNTIAVANNPNKQRGHIEAGTPDKQPNDSYTH

SEQ ID NO: 976637 - protein, 75 aa, Homo sapiens
MCQPPVPVVLVITIIHCGQAAWLPLTVLQVVSSSSGFFSECGPQCEGHNSSVHVEVYVEQLMQGASQVSCGMAGR

SEQ ID NO: 976638 - protein, 95 aa, Homo sapiens
MCRKANVHNYAIRLRYIEYGTRETSSQRNFWEETRAPFPFGDSHYSKEDLWQTSASDNASPPETQTRCHTSVQNRNDIVVRPHPAVDYDTLGIDA

SEQ ID NO: 976639 - protein, 214 aa, Homo sapiens
CLGCAAGVGPWSCLRRLRLPGASCCCCLLRMIILPAGGVQLDLCWLPAMPGPLCCCSVPSGAACGCCVIFPCVIHCLLVLSVLLCDVGACAARAHCMPGAACHPACLSTCPPVVDALRCMLPENMPPSNGGALIQFLGSWRGNIFPSNLGVSSLSLILYHTMQARRQYHLEPGLTVCPVCGTRGWSGDAPSWRLRAIVCPRLRLLDRIARHILR

SEQ ID NO: 976640 - protein, 218 aa, Homo sapiens
AGYYGRRVLPGRTPPLHAGADVAERECTSLLNNLRSRRGTGHRYLNTTVTNGTGPHPMNAVWVHHRPRLVLGDLLVELTDGGSTRSLVSRTPTIEGLNRENLEGDGDLREGRIACWADCRKPSFPVVSPAGKRGGLPVHNTGPTVMSFEQMGPGINQRVYRFQKLAMRLLSMPGAQGKLQQQGLKPLQTHEPRGTAKVHEPENMSNRKWTAPVPEKRP

SEQ ID NO: 976641 - protein, 499 aa, Homo sapiens
GCEDLVRLLAEAGLSWSVPASEELLRGEPMLLNVMLCLGCCVRRMVCPLLAVPHAVLPGVISEPGASTLSLPCPLVLGPADLVQMRMLQHWHALVHVLDQLPLVPVPPDDLNVHCFPHTPDCPALCLCSPMPLVTCCVTSWDRGLPVLGCWHVRVCLLGTWTNGQSLSTNDSAPSATLLGHVAGMWGTLTCARMAVTVTMTRGRSGLWEGYTKSPAETRGHGLRTHDNTHAHAKRASQTPSPAKRTQEDTPDHERATTTKNRRTRHTTHHPHTHTIHHADTGAKAARTSKAAETRQHEEEKKETERQRASERAEDGATQEETQARQHTRQQTTAAANTGRAQQRIQPASSEQPERKGEKPTRPPTPASTTEAEATQTQKTPPEIDEKDDTDEIGSPTSTRRDRSARESQKTRSNIDSDPTHLTPNQHHHKDEANNRQNPSKHNVRDDDATHAAHQTEDDTRHDSKAPTHTPHSLTATRPDDSALGRPQHGEDGAKRTDD

SEQ ID NO: 976642 - protein, 312 aa, Homo sapiens
DYKRLGAGLDGASSIRVGRGEWYDENMNTIRQYQVCTCLSQARTMVRTKFIRRRGPTDHVEMKFSVRDLSSIPSCAWLLQRELQLYYYEADFDSAPKNFPNWMENPWVKVDTLAATRDFSQVDLGGASSHINHRGAAASGPVSRPPALYLTSTTYWPACMSLISVRVFYRQWHPGFIPRIGRPLLRKHLSRGPEQPPSLCVHAPARHASLVPLRDTPMLTCYPLLKPSSPCHPGGPPGHRGLVSSPIARPPCPMLPTPTWDFKGPLPTHRPPPLCAPLVPPLGTASHGAPTQWLKSRVPRSSPTDPSPSSRS

SEQ ID NO: 976643 - protein, 331 aa, Homo sapiens
MGLLLQLQCVLDGVESRQGSIKGLVVSSNFQNVKQLYALVCETQRYSAVLDAVICQRRPPPCVRRSCVPAPGQGAQLYELFVWGKGFLSGCGGPMERALFGPGTYVRMLKAELDLAQWFIGGVSLGMSDLLGSWAPVPGPASQLPRFVLCEPTLKTCSDDVVDLFHGEKVSPITGRASSLDDLTSPQGERTFSPGPPVMPELLVFPPKNDLNEHPLYRADTSFLGGSSAGCLPACGGAPARSHVIMLLLPRIKKQQLGWSLKTTDCALTEQAGLHGSVAAVLWTARGRGPLSVRAKMGTELIRKWTGTTRMVERLALGSTGGGRTLCALVG

SEQ ID NO: 976644 - protein, 179 aa, Homo sapiens
CTEAVITRKQYYALQALQRMAFLPLAVLATALSRSHCYQRPSMSTGSNIALSSSTTVMDNRPDEPIADIQPKRLKYTSNVKTCHPYNTFGRNNRHLTDKRKTARCIPFLDNQSANCAGHFVEHDIDTFDRIVHRDNSPITTLSMQNHMPPREHDTLYISVAKAPYITNSITCARVSWNT

SEQ ID NO: 976645 - protein, 201 aa, Homo sapiens
MCWATNSLPSWSHVLLGVQIHDSRLGAPSRLDAISCCAIQGGNAYIGRQATGPGVQAEVAPLEGSGIHCRSHLGAWRGPPPLTVRPSLDSSRPRAYGVLEECRSCSKLACSSGPWTIALKGISQGGPGGPLDRGTHFDLVELAAVHVASSMEGCTCVVSWRRELLMKLAGGRMGVRLAHCCTVSSRCSLSCGGSSFGQGLV

SEQ ID NO: 976646 - protein, 332 aa, Homo sapiens
  misc_feature (86)..(86): Xaa can be any naturally occurring amino acid
DTARRLEALDQSWWLDLLLTSELRCCTSLCFGADSASAETVGRRGSGMGTIAHQASEERQGQALSTGVKAKQGAVDHGQESLSEQXSPDHVARLLTEGRSGPGYDVSEPGGSETSDEASACLILAAWKARGGPEREATRDLGGVILARDTYWGSQDGGRDQMATVAAGDGQGLEETVDTGLTRSRRMQSTVTSSTTGPREQTGRGDQAPSQPHNGASGDVGRAQRGLELEHLNPVCPGAGIRHGHCAKIALEGRLKRLLSRCLAAARLPGGTLEVDSSSSPSTKKSQNHAPPSHTCCHRRLHTAQPYTAVAALPLALATTLTQQTKHKQHAK

SEQ ID NO: 976647 - protein, 62 aa, Homo sapiens
MIPPMGKFHGTVKAEKREAVINGKIPYTIFQERDPSKIISGAMAGLLEYVVESTGVFSTMEK

SEQ ID NO: 976648 - protein, 140 aa, Homo sapiens
CECCGLCCVTAWWCLALVCGCPRASPSAAAALNVPCCLLLLLLLCPVLPMWLCAVWMACLLHVLPALAYNLPVLACLFLLFPAFPVPPAVLPNSFVYCCWNAAWLVMWLWNPNAGHDACCGIFAVPWPEPLPGPVPLPRL

SEQ ID NO: 976649 - protein, 306 aa, Homo sapiens
APRRRGVQGRCRCGSGVELAGGRVKPMQIAVDPQEEPHNAPDVNYVVENPELDLEQYAAATGLLMRIERVQFIADQLSHAAGVMALKMALSFVHENLYPWTCTEEDPPQCSQRHQGAAECTLTPSLRAGVEPPAWTQLGGGHCGQKAAAEAGEAGATDLNELQGAKSIKESIRLRHETCGDHYLECGDLSNALKCYFPGRDYWTSAKHVINMLPQLSFHGQASTLQTLVSCWSDYRTGKALVNPKKIAELTESVTGKARAYFTGSVVRSLGKLPPGIQGGCQSPRGSLSPWTPECVPKVASGAAPG

SEQ ID NO: 976650 - protein, 693 aa, Homo sapiens
  misc_feature (279)..(279): Xaa can be any naturally occurring amino acid
  misc_feature (405)..(405): Xaa can be any naturally occurring amino acid
SPLPPFTISPGRRLPRAGAERVYTRRDSPRGPTYVQRAETERPNTHSGASASERGPTSASRSTAQRNSVRMPRGTHKGRSAVGREHPRALRKGQRRPEAAVERPGRIPRRAHHLIITIQGDGRPDVIAPSRRNASASRSTPDRNTRERRKREGPPTRLQHRREWHNRECRAPKQHPRPREGQEQYEADNRRQPTEQRNHDEHEKNQGTDTTRPRSTTADTRAPVEKPGPKRGRPPCERQQRATTAREHTQSAAQQHQSPPTRAPTTHTHPDECNEQLQXIQRPDDTHEDSIFSLTPCSTLRTHQHAKAIGHSSDESTSSEWTATTPSDPSREIHIAHPLAPDKECQLAPHPLALPCVCSSLVCHTQKHGTTAHIAPPATHATLHVAPKQRLTDRHTPDNQHARDXHTTNNHGPTNCSQQHQTLTRGTRADTRARAADAQKRPQHAQRTRHEKPPGALARALGTSERKQAARTRRKRHPTVGHNNVPSETGKPGTDAASAQESKARTTGSRRRDMGTRLAASVGSRHSDSDARRSAQRRGNEAEKQQTEAATRTQHRARTKKPEDMPRHDRHSDTTRSKREDGRNITGETTGRGGDAWERRGVAMGRDDRTSKAKRQGVIDRDEITDEKAESEPSTRANSAGRRRRERKAEKRGRAQEREPQAQQAELVRAGDDRTYRRRVKTSPSRSSSRHRC

SEQ ID NO: 976651 - protein, 128 aa, Homo sapiens
MNVRVSTSAPLSPNSCTSVWQCLPFSIMDYVVFVLLLVLSLAIGLYQLVVGWGRAILFGELLDGGSQNVCCHSGVHCALTGHPYQISQEAILGVSVRDLQIMGPNIWFLWLLLLIWRLHDTCKIFIPD

SEQ ID NO: 976652 - protein, 262 aa, Homo sapiens
MGLTSCELSRLSKWLQAEEPGKWSNDLLCNAQPRTLDKKHDANERLQHKRVESTVHNWPIVLTRSCTLHRRRSAFLALFAPTRHSAPVLTTMARAPACALRRRACAPPAASGAPAPTPKRVSTRHTELGTPPCPSPPKAHRQHTARVHGARPNTPSPTHPRAPLRPTAQSTQTGDMPTRLRPGRINRRRSPPGTANTRRRTAPGAEERDPPRRTEEEVHPHAHRRDRREGGSRMSRRAILLRRYTEGYSSVSKAQGAGAADR

SEQ ID NO: 976653 - protein, 240 aa, Homo sapiens
MMLWQPCRLMPVNLAPCAPVVRGCPWLLRTPSCMGSLWTLLVSWDVRLLQGPFSLHVDVLPVLAILKCPLQEPPVIGANTMHVKRSLLLGRWHCVCHNDLPQDGDMLWGVHQMDWGHGPNDSLMVTCPEERLTSSTPEEINGTMRRTEFLVLACMIQEGRMIKCSRPVLGQRRWYRCDGGPDKDTFTYLGPSSNWSKLPHHQKPQVTFVAILDLPAQDEHQDQSFCGVGQWTQRTLPSPK

SEQ ID NO: 976654 - protein, 117 aa, Homo sapiens
GPSKGTFQYTYQVTTGLLYIKCVGVISQSVLGSILEEGEGRVCTRYRARVPTKHSTLSYTVRKLPPIQTLISSNKGLYSRIELPVGIRTYVSPIFRVRTSQVGIHSCDPKGCLNRWG

SEQ ID NO: 976655 - protein, 265 aa, Homo sapiens
MFPFVLNWAGLPTAPLWIVIDDVMRMGAINITCPLDWGSPQDLFNGSPREFSGKGDLVPHLVEQWFDNLIKKVDISHWCKWFSLVSYRGLLGWVPYEERSMVTWITGQDVHRYVRPTLQSWGPSYLYHRMVSMYLTCVNAYRALFQCPPCFALVVNVLYTQTLFSCGDRTGNPGERQNLRRGAQGGRAHVRDRWTLHLSRCVATPYKCIYRTFVEFYDVAVLQTLIGTRYRRSQRLLIWICRVQKTLGNYPGDSEPRKGDMSRPL

SEQ ID NO: 976656 - protein, 77 aa, Homo sapiens
MTLVVTVASLYKGCLVVETCGFVEFYSVDLNKTDGIYRLTGTRIGAENLKACTSAMGHGNRPPGSWEPPGVADHNHH

SEQ ID NO: 976657 - protein, 30 aa, Homo sapiens
MLMKTLSRHTLCGQGDAQAWVSLSRSSDTV

SEQ ID NO: 976658 - protein, 102 aa, Homo sapiens
HGGPSLGGSWARRAPGESGLIYPANTLFGLTWSYRGFSVTPVVVLRHPSHNILPGTEGGCGKNSVGLEAPPRGSLRDKCIATGGGEHPFRRVARMRGAERMR

SEQ ID NO: 976659 - protein, 106 aa, Homo sapiens
MPPNATRPHRPTRHTPLHGTPHTQLLTAPAHTALSDLQPPPHPQTTTPPTTATYNPVRHRAPNTHVLHNTTTQAPHTEPRQQANHHHNTDPKPRCSDEHATPLHDI

SEQ ID NO: 976660 - protein, 570 aa, Homo sapiens
MTTRRLTGTTTRCDVLTYKHDLLGPRQARPTTCDDDDDDDERRRTLTVTTTTHSEKTTTTNSDEDAPADNGDDVRRQNDRVTLANTQGHRRPTERPTERTAEQRPTIGERHHTDEPRHTIDRYLTRTDDDNDRTDRTYEQNKIKIEKRTPAKKQRTIQRHRKPIPEDQQTRRGDNTDRQPTRGISTPEQTRHTPNTKRTARNVAVEDHHPPRPKDRSYETNKTQTNTTTRRGATTKKNNRSKTEAAYSPKPIRIAKTNEADTYLRSDTASHSGQTNKQRGQSPLHQTNQSHTNTNTRPYSNKRQSQIEKRDAQNTKKPPTRTENTRKTPQQRRTRTATIYKERQITAQRAQNNSKLSKDDTKKKYTPNTPYLRAKSSHSVSLGTESQRHSTYNLTKATQRDKNSARKVCYVSQRRRRSGLSTQRNNYTKYNTNKHTNLRGVRCKRKTLTHDNECQDKIRIFDNYSATEMTVHTAGRRQTQKRTEKKTENEDEHDGIQREQCRSERVKLRGDADETSALSPAQLSRVRCKRYVKHIELQVETRYDTTTRRHHRRRAGAQRRHTSGRRHTLE

SEQ ID NO: 976661 - protein, 198 aa, Homo sapiens
  misc_feature (113)..(113): Xaa can be any naturally occurring amino acid
NPSLAFSALEKTKFKPPPRVCNGGARAQESREHARKSRAGETTEVRGPRAIISPCECGFVGFHSLCSLCVAVGVEVLRGVWSALRGGSRGPRVAPPLCVREFSQRGEWERRGXSVSRGAWDSRGRHRGVGSPQKDLREKRAEEGGELEDKEDSSLRECVSERGVLTERAAQEREGGPPGAGARWRAVRRGEGQEARYN

SEQ ID NO: 976662 - protein, 152 aa, Homo sapiens
EDGRLGNLAEDAGKIVSELVWNQTRMKKGRTGKQTRRKRNKEKPKSDTTEEIAEEADTVFPKAKQVTKKAEPSEVDMTSPKSKKANTNEEPSHNDISPKTKRLRQNKEPIDTASGSSKTKKVKNNEEPSEEDIDAPKPKKMKNRHRTLTGDT

SEQ ID NO: 976663 - protein, 279 aa, Homo sapiens
MLGERENNTRGRPGGQKGRGHKKVLQHNTGENHTHQWGATWGGGEHHPPPKREEPLGGTKKEGGARGREHKGGAGGERGGGTKGRGLVTKKRVEGPQKKTGGHQMRTPTRAKALKKTQTEATQKSYLFQQTGGAQKGSKKRNTQKLASNPRGENPIFPKRETYVRHTQNGGHHRVGHTTVGVNPIKTSDPPGGYVQETKKCKQRLTNNTVRKRETETRAGGTKKNNRLIQPKRGAKLETPVTKSNCHETQRKNKVPWGGHKPEENSSYKHDKKIHNNRR

SEQ ID NO: 976664 - protein, 102 aa, Homo sapiens
MLVVHEVVPDVGRPLHLAPRPLKRRRVGRQGEGESHALGDMNREVLPGDLWCFGFLDRLHEAWTRTLWGSQGVGCAPRSPSGFPIIVDVQIGVGTERPVHLE

SEQ ID NO: 976665 - protein, 216 aa, Homo sapiens
MYAFVRSWRTSLLRAAVCACAIQPRSRLDFDNQKVYAVYRGPGGIGRRAESPPAPPATGRAVAPQGPDPLALEKTKSDLKTVVMPEENKNAQAFLLNSCRTNEWTRLTDLLGTTHEFNKLRPHFKENLTGGKSEAESVAQQKHSKGSGVTRSEKNVGNGLSLGAYTRCPEREFRGTASPRITTGHGAGSKDAVCVTRDPVLTAAGVQHYQESNRKR

SEQ ID NO: 976666 - protein, 300 aa, Homo sapiens
IKMEFRHVAQVVCELLSFSDPPASAFRSADHRCESLPPGLQGFLIPRDAIWFESLIWVTLILMTRMVQGFWTGIHTGGNVTALAWGTEGFLFLGFLNQKLQDPEGLPLEGMEAQLLGLINKKNMDFQHLWEALDADKIFEYKTSYLEKRLNRPNWATGHNDLIIQLGSAMGPRRIGQVPHYLAILIYKRRGAFDKRPHENNFAETDAAEQVGKGLLTVVPGLGINWTLRVNRWISPVESSPWGEIGTPGRYIGKSLGPQDRNFINTMSPGTLGDGRPNCTMCKSRSPKGTDILGKGHTWR

SEQ ID NO: 976667 - protein, 145 aa, Homo sapiens
MHRGHAPPRHCTPTTEQQHEQRHPRQTQTTSPDCTNTGVAHTRTRRRSTNHARRTNTNERPATDHEHSNELTTAEPPQEHTPPHKPQHATQQDRDETPQHDTEPTKQHTLAKQQRHTQHQAPTPQHTTNTRAHAPPEQNRNTVDN

SEQ ID NO: 976668 - protein, 289 aa, Homo sapiens
MDAEGLALLLPPVYPGQPWWTGGSERICSRAQLLHVRWSGGAGPIACVGCCAKSSLGLTWRGAWTFLPNAEYLAPRLISAIRLPVFAPATAIGTLCAAGAARAWPDGRGVLDLTAVSGWRDTGVWRCEGRGWVRCVVCPFAQLSDSARSAPVDVARPGGAPGVSTGSIRWLRHRRKDATPRDSGVCVVQVVGFAGGQGSAFSTAQELGRASVMVKDDSLFGGPAGWGGVPCRLPVGRGIGWVGGSVWWGSGVECPVAVGFVGSLLLVPLSWVLGRAGELPPGPVLRPPP

SEQ ID NO: 976669 - protein, 271 aa, Homo sapiens
LSHGCLSADPASRISAGRKWKKRSPRVVIDDGSGMCKGWFGWWTTSPRGRVSLPVGLGRPRHQGVMVGMGQEGLAYVGEEAAMSKRGILVLREGTPLSMDIVNQLGTDMDEDLEPQLLATRLRVGPAQGASQCLLPEDPSEPQGLTDQKMTAGSVPLPAMFLPEGIQIMFESFKSTGHVRGIQSVLSLYASGRTTGIVMDSGDGVTHTVPIYEGYALPQAILRLDLGGEELTDTHEDPPLSEGKVHTGRGGEIVRDIKEKCATSPWISGQG

SEQ ID NO: 976670 - protein, 309 aa, Homo sapiens
ARTSVVPPRSAGRVLCRSQLEEEIAALVMTMGPACARLVCWGRRSPSRFLPSSGAPDTRRLGGHGPEGPPTWWTRTRASCGILTLKYPIEHGIVNMWDDMDEDLAPYFYNELRVARRSTSAARRGPLNPNGNQREDDSDYRLRPSRPPVMYVASRLVAVPLRLWAQQGIVMDSGDGVTHDGAHLRGYALPHAICVWTWWAGLNDSSWKILTERCLHAFTTKAEREIVRDIHGEAVATSPGTSEQEMATAISFSLEKELQRLADGHVSPWPRTARVKGASLLLDDFRSRTPYSLKWRGPHLPMVVATPLS

SEQ ID NO: 976671 - protein, 111 aa, Homo sapiens
LLYACRLPLTCRPSASSSVLPPLWPGCLPVLGCGASAARLCAAGVVCWPELLHAVLCDLSAPGSLLSSHMVAWTMPEKPLEHAREDFVNLTCSHMCANTCTNASTLLANSR

SEQ ID NO: 976672 - protein, 63 aa, Homo sapiens
MESEPISRVISFGAGCLESSAVVTMISTSFGVGGKRVPFPLDEGVRHHFGYSHRRCQRCSLKS

SEQ ID NO: 976673 - protein, 256 aa, Homo sapiens
MLIFCGGTDEEPPRGRPESLWRAKGAQTGGPPKISPLSRGLAPLTGLFNRIFGDPCVRAAPAHLREPRPIVMATRADLELSAYIETRGNSGGTRTQKAEQFCPPCEAFPPRSPRDYTFNQPSGPKSPKRVSPFKIPLRELSSLMTLTWLDSDIAGEVPAKHQRHCTKGNNERPLGAKPSERTTQARSPGSTRETTNRRRYHPIQEPGQNPPRRRPKAQQRHKREQKERQHTPLNRANSPTSTPTQPHHVHEREEPH

SEQ ID NO: 976674 - protein, 355 aa, Homo sapiens
MYFRGESEASSPIGGAHAGEGGGGGAKKGARRRKNTGGSTRRRHTQAGGAPRRGRENHREKTHTREKRPRASDCGGRESASGERRGKRRGVRPLERRREGRPHSPERAEQHTTTHHARGGPPLPRRAARKKERETTACANTARVWAQKESESAARREREHTTKRDHDQQHTEKDTESEEGADPTQRGGDNKEPAKSGAAPPQRETTEQHTEQKLLSAKEETLLCCETKHHHNHSLSSQRRGEKSPLRGESRTTQREERGEAEKKPVHSKVSGDAHHAQEKTQPRAQAWIDEDCRDNTPPRRRNRSPDTAGHNTTREGDESETTTTPQEQRERGATPHTKQTRPGNEIKQEQRCAA

SEQ ID NO: 976675 - protein, 140 aa, Homo sapiens
MTHYMMHATASMTELPRHPELPGVSLLESTKMTLGVSSAAPTETTVVWYMSRPAKGCPVQRFPWLLGLSCCGLVPQRKLDRDVTVLRFTFPGLCCRPPHWLVGSSPSPPPRPPSFIVSWGAVPLAWFLFGFLGTVRSRLV

SEQ ID NO: 976676 - protein, 328 aa, Homo sapiens
SCSADRRSAVACSAGRDGTSEIYELIIDNGLRMCDADEAGRHSASPSRVTFHRRRPQKPGVLLCMSADGVLRGLTEANRHSSVVLSLKYPIEHGIVDSTGTTSGEDLAPHLLQRAARGPEEHPVLADRRPPECPHGLDSREDDSALWFETVQTPPATCIVGQSRPVLSLYRLLVRTLDIVIGTLDDGVTHHGAHLMMGYGSPPAILSLKLVAGLSEYLMKILTERGNKLFDTRAAEVVRAQRSCAGRLDFDRDARDSPSWETLRLHGRLTWDDRRSGGRLSGELRAEPILRGGSKLPGVRPIRCGERRLKSPWWGRRMPLLSCFVVPS

SEQ ID NO: 976677 - protein, 313 aa, Homo sapiens
WLCVSSWVWARRFTGGREAERWDCMALSAGCRAWLGSWRFDLAPEPASRLASSRQLWGPAPCCSAQCSLCSCACPSPPHLAVPGPLGPVTCGLGLWLPKPGLQPWLTPEASLPLGPRPLTMTGAALQPGGLITEHPVEHASVVGQCPHHALLLQTVLASVLGALLLVFLLMDDAPVVHVLGEVGSLSKLEDLRRLAFHAYGKAGKMLVETSIDVLNACATLHPAFYVRDRRLAGPTFFGPGCSAFHVGWPPFRMFLVGRRGRVCIVAPGQLRDMMAPSNLQSMAPFYTRVVGPAPLQQAYVGRRRAHTLGVRP

SEQ ID NO: 976678 - protein, 209 aa, Homo sapiens
MNRQAHGVPHRYPRPRYVLSPPTVRRICPMKDIMKDVNDETILLLCVERLETLYSLQNTIQQKRALYKMRNGYDLSPTATANFTRRNLADCLLESDPISCEPPPGLAMMSMKGQALVLHGLPGSLGHRPLIAANEYGAFLTSQYPRTDTTQRAISRERAVKTPEDNCLEGAPENRFIHEICQPSVCESSTQLGHHGTCITFFFSQNKGS

SEQ ID NO: 976679 - protein, 389 aa, Homo sapiens
QGFLLFLFLATQILRVVNSHTLIKASVVGGLSAVVNPENLGKAVRQTRDSLGASRIVRKPAVGTHVGETLWSLLPKHHKENFSGAKWVACEIVVPRLLGEGCEGLEAPRGAPRRGCARGTRKNRVPIITPPHAWVVNVGWRTPNPQKKTTKQKNTQRRTKSAGVRASNKGGHRNRAPTGATNAVFPVHTQTSPSGPPQRGGKTTRAGASPPLYKREKTREIYKILRETKPPRVNPRGQKRNRERTQQQKNHNTQQTTTPDQPTEPTDQHEGHTQTTNHRISPRQDRSPKRHNTKETKIYTNQNTQTLNQLQPINTGAHGLKKETGGPERTQTERGEQQCKEALSTMETYTPPAEPPTTKARKHNSVRRKYCVHTIENRCLEQAENTRGH

SEQ ID NO: 976680 - protein, 109 aa, Homo sapiens
  misc_feature (60)..(60): Xaa can be any naturally occurring amino acid
  misc_feature (73)..(73): Xaa can be any naturally occurring amino acid
  misc_feature (99)..(99): Xaa can be any naturally occurring amino acid
AGTEESERDPSFQRRPATPGARAGSDLSSGRLMESIAGEQARTEGDGGHWTAGQTALEFXETRLVGESGSLVXGVAVLDGCRVKMRRSAASRIWGRVRXAGEKEVLDTD

SEQ ID NO: 976681 - protein, 285 aa, Homo sapiens
MDCGANENHIAGCCEMTLESVELVVSSMKEYQFHVASHMMEWAENVMQILASSGKSDAGGCKFCRRMKELDLGPYYESSYALGGSMQIPSMELYLVSLSMSMIHLIPDDESRRVVVSCEVDRKPSVDIMCQKVMVALVHKTSNFSQDYVIEAVRTDHRTSVTLSLDIFLGPKCISMNQIKDYVDVNLKSKTFIERLNVVIGRDHSKKAPHCRKNLALEVQSSERLKTDELTPWDLEGDRPGSIRTQERVHRSPPPVGKSPTRPPDPDLNWMRLKKPRGWNNGTAR

SEQ ID NO: 976682 - protein, 119 aa, Homo sapiens
RTQGERHGGHYGAIRLPRDGSGWTLETPGAFNVHIPGDHTCLLLLILACQVSPYSLVLNLTMVGLEKKTMVSGRVDRRDGASHATPVDQQDPREAIDQSLDHHRPWELGPPGLGQRDLL

SEQ ID NO: 976683 - protein, 480 aa, Homo sapiens
GGGEKKGGRGERERGERAGIVPPPPARGGATPRGRGKNPEGGGDGGKGNCGTLGGKRCAEWWGGRGGEREERGVGRRHAQSGRVGWVAERVVVAYIYSCVECVILVFLKRGGDLSKERGSRRGERGCAREGERWGCIYTPARRTHRRGPTERGTTRGRPRGTRAVVGACRPLSTKIYLIPPWREGGGCVEKKKVGGETETPKREERRTQREMKRKRGGGEHMGTGAREERETRKRRVRVQQCRPLGEERDNHLQKTPRRKEVCHPQDMTQKSSCLEHKPRRAEAKRAVVVEEATTTEKTESSRESHRTNVSSQRHHCGEEHNTNAAGDEMKSWEQRRRRSMGKTRGVIAPSAPHRCRERARETHTTTEKYSTSQRRRAEHKPRGDTNVKERAVSWENKATQAGGNTRGHRRTSLTRRRTSVCATTLLRRTVLHPRGRTHIKCGGDNPYRRATRRGRTQRRLMRGRSNTRASEANHKRKQA

SEQ ID NO: 976684 - protein, 146 aa, Homo sapiens
GQSTNTFISQRGVKVQLVGEKEGPPPFPSRGDHVPLSQRGQVQRGKLRRNPEGLCKRQGCEKSQRTHKGDLRVSPGIPHCDSVPGHMCERSRLIYSHFQREAAVRTVGEREVDRHAEGERITKRAAMASGRLKEETRENHICGAPP

SEQ ID NO: 976685 - protein, 328 aa, Homo sapiens
IPFRASENRHGTRPVYSMKGCDDGFIALLPMKPRRNRAAREESCPLAGSAIRCLRVDKASLHSSALNEQYETFIGKMIILEPRAPDGSAKLIHVAGLSRVNVSFRTKSRPEERLLRSVASLVENLSVRTRAELAKIDVNCFIEGMSPMSTGSSYTHNARFLTEPLKWSQFPFYECQRSVVESFIHMQQVRQINYKERSSGMKKKNDEAGSSCKRSGQEVEGKSPCPQSELLRIRAETSEAVSQKVGGCEPEVEVVSQNWEVGPNREVEGRGNAVHPLGRLARLGQPAPSGQGGPWPLGTREKFTRGPLPPRITNWGGQPKGNTGTHTR

SEQ ID NO: 976686 - protein, 232 aa, Homo sapiens
CFPAQEPQGRRQHGASRNGMVLKPQFHQGLAAARGTWFKQPVRKIQLDSKVRRSQEARRIVPRPESGPIRAIVRCPYRFEYHYEGARQVAVVRPGGALVVAGIHKEGGPVASAFLCDPERWAVNKSTGVPAGSDTVQRLEGVPISETHPLPQEALGPQEGRQFCMKNWIRGHPDDLDRSCPSGDVYKKEKARVITEEETEFPKLRIVVRYGRAKPGSSAYGQKEQGSRRTGC

SEQ ID NO: 976687 - protein, 168 aa, Homo sapiens
MEISGGGGHPPGVPRVAHSGGTPHLRTSPRRAAQKCVSHQEKRVPPPGSPKNSWGCPLGVSLWPSGKSRNEDGHAGGARGRKKSPPKEVDPGPQRVPLLKKDFVGEKRGGVSPHSGGGTQQGGDHGDPKEGGRQSSHLEKTPPTWSGLEQRMRKPQEHGRQQSWGTTE

SEQ ID NO: 976688 - protein, 104 aa, Homo sapiens
MLSDSGLGPSKFQKDFCSPIGKHAWNPVSRTHFSTQVEPPLRPVVTVFTWLWGQLLTTDSLYARTPARNALRSLRVGTTTTTLVRFGRVTPAPVWGTQRVHHIY

SEQ ID NO: 976689 - protein, 397 aa, Homo sapiens
  misc_feature (62)..(62): Xaa can be any naturally occurring amino acid
  misc_feature (77)..(77): Xaa can be any naturally occurring amino acid
MRCARAVNLLGSWVEAVWTKQCQECGQCIHGGMADAQEEARTSCIACLAQPSTRPKECATRXDSRDASWTNYSNSLXKPLAGLSACRRQCMCSARDRIVTHSNVYWAPARHCNAHEVTEPHFLRESRGPQQHLAAGETLRQLNDSVFETAGLTDDSCLWWVGHVMIHTALPACKPFHVLGGQVTRRTHKPCFPQASSRVQVRYSPDGAMLVSGTHDTGSVLKPKEAPIDRVKRWLPGTCPWLCYGSVDDDGKFLVDGLSLLLTFAPQKPDPHFDPRYGWATGVPALGWVAVSASSCWGPSGCGFGDRLKLWRNSGHHELPHKVSTRYTGLQPLNCQGAPERRGSPTNPLLSLSKICQGATAGVRTKTRQKKPSQQATNAFRILTGIFPKYSLKTTLL

SEQ ID NO: 976690 - protein, 126 aa, Homo sapiens
MSLAPAQWQAPSSASIPLPHVMRILGGRPPDFHPETDPRAMALTTLTTPPAARPGRYSLMAPHWGERQTGTNHSLGHGTNSTSQDDNTRPDRNSTLHKRTATTNPSHIGHHTPTTHHTQAPTDHTT

SEQ ID NO: 976691 - protein, 335 aa, Homo sapiens
GCPCPAGACCLLLPAAPCRSLHACPCLPALEPRVPSAWLPPALRPAQPAPAQPAREDACCSRNGSSCSLALWLLSEVPSVPMIPESCEWPHVPSGLLPQTAGLDAGCPRPCMLPDAKVFVTGHRLWCLLTCDARGLSLTRPHRGLLGPWGRGASLWAVSPAGSDTKEWSRTIKVVLRAKKIFGCGGPSTLRVPYPQVILLLVTGKIVDHVEQVPSAVYYRHNSSSWATQCQHRAASKRVESHESGCPGHGPQASARLRSPLRPCWILALGVPRCGLHPHLRGSVAWGLTLVANAVAVIVLPCLGQPAALTRPLPGTQRAETDVRYTSTTHAHNQT

SEQ ID NO: 976692 - protein, 321 aa, Homo sapiens
EPQDVGSHGCQPEWMVLKPHFHKDWQRRVATWFNQPARKILRRKAREWPRRAIATRPLSVSHPGHRALPQVRYHTKVRAGRGFSLEELRVGRHSQEGVPGPSVVSVDPEEAEQVHGRSLNAKCRGVEGVTVPNHPLPQEALGPKKGDMFCEELENWHPGDRTRSWPVRNVYRQEKARVITEEEKTFKAFASLRMAVQRPVFGIRAKRGKEAAEQDGCSTTEALLGTWNQSAACLGLHVLCSGEQLGLDWGLLCGIPSDEGLGLLENSKRRNGYSWVKPWCRLRRATVLCRHRQKTTHTSPHSPHYITNTTPTPTAKTKSLN

SEQ ID NO: 976693 - protein, 252 aa, Homo sapiens
ARPPGPDTWRVPRRTRSSTCGPPAFLGVFRRVCGTSGELGRGGGGVGRTCRGAHLVPPWHGGKVDLRLHDEKEAKSFLKGLSDKQREEHYFCKDFVRLKKIPTCEGDVERGGCEGGGAQVITQDKQLNEKISLLRADITKLEVDAIVNAANSPCSEAVAVDLACIHRADGPCYRRVRTLKSCKTGKAKITGGIGSGKYVSNTVGAIATGARQQVRARSVLSSLTAVENGSSGGPWFTGVGTLKRRERVATGM

SEQ ID NO: 976694 - protein, 377 aa, Homo sapiens
MHHPSQHSSPHMAGRTTASAQWQHQPAHHQAAENPQCNASGHQSLKHMGQTANTDHAPGHWRNRQFVPSHFKRGDGTITHISGTNTLLRSHKDPLPLVRQQAVNKNTQHRGNHSGGLTLHARRQHWSTNGKYPDKRCLADTAVRSQQRTQPTTRAPNVATGGRPSPLARGDDTGTPCSEPSTHERTAPHPPDTPHGHEEHATPPGPPPTLNTEAQQPTTSTSLPQSRTGGPHRATRTRDSRNSGARKGRIAAHTWSQAGSDDNNNREKNKRTREHLTQRNQGHELTRGRTPSRQRSTTSHKTTTTHMRHRTPPARRQKRRREDKRDTTERKNTGDNEEQQKRDSTELRAKHPRPATPRTHQQTPNPTDAPTSSSAPS

SEQ ID NO: 976695 - protein, 313 aa, Homo sapiens
EGAPLFIKAGPNPCLGERPPETKSGVPGGAGHKPVLGGVAPSRRLENETSTTVGAPGAQVSVASPQGQARSATISVHERKCGTDAFRGPKKRHRCKTLANRGAAILALVGSPEGPKVPHADQHSQKGVLRGWIWELMPLSTTANPSGWELSHGAWKPIYNTLSRKEITCGIMVPQRGRWFPPRGTTGGIKTWGAVNAPLLPKLVVPGKKSPLWTEIFDSLGPCENPSYGRRPPHLESRKAGGYHQQPVKKRDRNPGAPAVVGQVGDPKCLARIENSTASSTIGSDPAKPWLENCRAMDCPANGPHKCTRGTDK

SEQ ID NO: 976696 - protein, 197 aa, Homo sapiens
MYPLLPAVLDGLAACLLVPPQQWDLYVENGIVRRWKWYPSRKCGDEYMRALERLVDVVSRVTTKRGGAMYRTSCVTCEVARMVGDENLECVPVETEMNMPASYRIRSVGPDIPTLELTFFSRKIGAQLPALRRRRRCQQETTGQGEKGKHKVHSMHVEAYVPQTEPDDSTDRRINDNTSPGTAHTHHKNPKRAPHAT

SEQ ID NO: 976697 - protein, 276 aa, Homo sapiens
VLSRLLCCAASVILDLRSMMRPAVVIRYVHAEAVDTDGSSGASRLPCLPACTGGVLKAQSFLFGVYVVGKYLVDPRLYYGARGLFVVLARCPSGRVLLAVLELTARLACIPATRIALGFEQLALPVPEPGSRILNVVGSVGQVTLTMHRSGPSCFRKVYRARMPGAAATGRSPIGDACANWRRLLPLFLLGGEGPCDADPLPVEHPTFPGLTNLWTRPVLYGRSLQGCRREDQDGSRRLQILVPQVKRRRCVAGDLSPVLVPRLLVVPLKGWSINL

SEQ ID NO: 976698 - protein, 186 aa, Homo sapiens
MQCYPRQSMGEREGIEPMTHAEYQDNSRVPDHTRDQKDRVTSGNKPPLDGVGPSREHQATEGPQEPNQDSKMGEPHKFGHENHNNRIRKDNAKNKLTTFGGVTPRANQVLINPGIDGRGMFPRGELRTQTPCDSRGRRSSQAHNNSARKGAEDTEQRGTHIDDRKAHKIKRGAQRAHEKEDQPDIE

SEQ ID NO: 976699 - protein, 290 aa, Homo sapiens
  misc_feature (146)..(146): Xaa can be any naturally occurring amino acid
  misc_feature (220)..(220): Xaa can be any naturally occurring amino acid
  misc_feature (255)..(255): Xaa can be any naturally occurring amino acid
KQMADDAESNALRPEGPWVALVLMIDTASEVPQDRLSSSVHPGEPAIIDAGEGDLMRMHAKHLRESESAERIKRRGMPGRSEVCASDMVKEHIVEIESNPIVGTIAIHRMLPLAPHCTRESRTMRYGIFVSHSVALRTFHQIGHSXVIAQGLYYCTTVGEHHVKKPTGRRRDTKSGKPTQLQKVPNLYAYSVEETNRGGHRRSGFMDAVLDVDVSNVQVXGPSRSSHVVGAQVKSLGPNGFSQSGPLSCLAGNVXTCARGYRHASGVNVPRPTLCPVGRSVDECRSAWRS

SEQ ID NO: 976700 - protein, 176 aa, Homo sapiens
MTAEETAFLLEAPLPRLCPGGGAYPGGVAVEVSCAGACWVCVSPLGCLWPHEPRAVDSLVLTGLWVHRLPNEGQTECDGLLVANCRRLVTPCGHVGLCVDPELRVHLRFLLPNTFEEDCIMSLVGIIVGTPCQDDSIEAYGICRGASPGYVNSGHTTCRSLGRFPLQQRLGPNGEA

SEQ ID NO: 976701 - protein, 274 aa, Homo sapiens
MQLEIPYKFYICKLQLVWLVLGNKNPGSLRKKKKQKKKQKKKKHQQPAPNNVWAGTGTRRRKRNGAPREQAAVSSRRPTILWCNQGCETTSAGHPTYREEQRTITIDDNTRRRLTPPEAKYNRGQRGDNHKHTNNKHTTNAQHNSTSTDLKTSEIKVNHKNKESKLHYTSNIALKTTRLHYKTETTKNDKQLTRRETTQTNHSNHTPTHHHDDRQKHTTSANTKKRNYNDNGQKAGRRDKKRENKRPRAAKDSKSEEKTSTEDHTRTDRDRSER

SEQ ID NO: 976702 - protein, 294 aa, Homo sapiens
RDSQYETTDTMCKIFRKGVVSVLGPSSSPASASTVSHICGEKEIPHIKVGAPRRHPCLQYLRFALSDLYPSNEDVRCGGLPNPSSPSTTPRAVSSAAKAECLCDWRNWCVASSSPRRGCRVEDVDEHAGTQTDCVKEALPDDKVSPVIIDAKRLLSQLMLRKVSEWGMTSRFYRYISHPWHFPILRLGRSLLEDSSNILGVLHVQDVPTLYPEETRAPRVLEGELRKVRLLCPALSAGLMWRRDLCELCHNGTRQGLGELELSSTNLARTQPLLLGSHKLRDTGPSTRADPHFH

SEQ ID NO: 976703 - protein, 88 aa, Homo sapiens
MPQKTIRCITSSQNTAYRRPQIPIAPPQVGTLLGGEHTHRFFADPRQQEINGRGDTLSLEMPFPGHYRRFVRPLPQGGDIASFHKIAL

SEQ ID NO: 976704 - protein, 114 aa, Homo sapiens
MVVPARVWRSTEGAIGVLADTEGQAWQGGGNAEPGTWCGGEPASGGTEGGSAESEGAKIDRQKNRVRNEGHSKSSPTTTLKQTKGNSGKRMDTLFIRKALSWGTLQQKQNLERT

SEQ ID NO: 976705 - protein, 139 aa, Homo sapiens
  misc_feature (31)..(31): Xaa can be any naturally occurring amino acid
  misc_feature (89)..(89): Xaa can be any naturally occurring amino acid
  misc_feature (120)..(120): Xaa can be any naturally occurring amino acid
GCGEVSRGSSPGGAVGELCWIPTIRGPQGQXNLVVVPHLGHHAPQQTGPLRTANGGSEANSGGLAGIALPWKTRTFLVGERVTLADITXCPCNPWLVGLYKQVLEPSFRQGLSLNTNSLXFLTCINQPQFRAVLGEVKP

SEQ ID NO: 976706 - protein, 349 aa, Homo sapiens
DTRGLVCLKYMTMCPECGNVPTLEDVLELMKLHTECKTPEPHTDWPAPDLWPDDSEMHVASTCGVLLVRTATLSGSGHDLPESELVPPVCACAVHTCPCNDTTLLRRHLNCFVQLTRNVTLCLRVVPQMPHEIKSQGSVYSTHDEITGYFITNFFPRDTTRMWDPDTTYALIYDTLRTIIRRYEEQGTQQGENSTFPFNHRATFITLINLGNWLLTATRGHARHDKHVQPRMVGTHCDWEPPCARQYLTEDTYPISPVGFQPKSSDKHFTSADVDLPQDQGRTAHHLCSWSHSSNVPSDQTRSTQWRPPHSITHSRSIGISADPTYQYHRFDLQQPEHAQISYGAHNTT

SEQ ID NO: 976707 - protein, 90 aa, Homo sapiens
MTNPRPVPEVWQLAENGLLTLAGKQHAYSTAELHQQKERFPTQHQCLSLGCRCLDALSVVAALDGITELADAARQGRPSWRCMSAGVQFP

SEQ ID NO: 976708 - protein, 280 aa, Homo sapiens
SERACRQLPASRPVSPLFPASCDPPPWPVRSWLCKLELPAACARTADGEWPPAVLPSCCPSPCEPKPRALSLPARAAHWPSCLTAELELPRLSLAGLDHQLRELLLLSPALAGSSNALHGGSLEFSLPHSSQDPGEHVQTCMTAGRGCVHRTLMELKLLMDASWGDPTKNRPWRLTQHCSKAGGNEGLSSGHGSSIPGELPASNHTTQGKMNGYVDRHAQDHHAGRNGDLGKKQYQENLDDGPRPGLYTSRSSTLLLTDPGHHAPCTNGTATALQHRVVH

SEQ ID NO: 976709 - protein, 225 aa, Homo sapiens
MLTQKAANSVREKPSPKGAERRTHGALGATGGRPHRGFVCMRKELSPPRENIFHNSGSFATEATVGFPREKRRMTDPSTTLCTRGTKCDPVFIVGKKPPPKAPHRITIMVDRRPGKPGWSSSKMTNAAALHPQIEAPRVCGPYNNTTRGPPPRRDNHPHRRSISPNTTGPKGLDKQYTPRGTEEYASSPARFPVCPKEASHERVSSAPIPPPPGDHRGMPQQADS

SEQ ID NO: 976710 - protein, 96 aa, Homo sapiens
  misc_feature (53)..(53): Xaa can be any naturally occurring amino acid
MKGRRPERGEKGGRLTAACACVNHQEGFHIQRSGRQGGAPRLSGPLVEENPSXIFLSGRIFGPGPLKTSAFVLRDGLKSPGDPSGGQVGFDRRDIR

SEQ ID NO: 976711 - protein, 103 aa, Homo sapiens
SLPPMPSCLSSESPKEPEQLRQLIHCRVRAFETSMSDGASRSHFETMGNAHWTVCVIEMIQDTNATPGGYRAVLITTTAHCVTAVDCRIMNCNGHNNGGLRHE

SEQ ID NO: 976712 - protein, 276 aa, Homo sapiens
EQCGARCGLWLFPLDEGTAKMEANRNACYTEHPGRPVTIFYKTFHGDMQCGVHAPVLQARCFPCGSEHLPYPLWSAADGLRGTAVLHLWRPEPHGVTVARREQSQLLLFWAPLMAGSSKVYLTSKMAPPQNVTDSILVEINKRVNALTWYLSWRAGQSVRHDQEKVFRLPVQECLSYPNCPSARDPRTPTAAWCVVEGRCTLEGQSVRGPDVGHATGLWKPDSKVLAWASAAPVTEDDAGGPREVPLTVRPLLSDEGDDLWSLLGVRGNPAFKAAD

SEQ ID NO: 976713 - protein, 248 aa, Homo sapiens
TESAQNGSESPLCDGKMGTRSQLQRRGRNMHEAKLGSPRVCGLSEEHQNASIQLVMPRIPTGLHMSARAHPEMWVKDSCCANGGSATGWLSVPFLAMAEPEFVEVIGGLAADRVAETSIKEARARAPCIVYIDEIDAVGKKRSTNMSGFSNTEEEQTLNQLTGSTWMEWVPGTMFIVLAVHETEADILDGALMRPGRLHRHVYIDLPTLREKGERSQHMLDSRPGKHSRRLHIRDTAQQRHRREATKR

SEQ ID NO: 976714 - protein, 155 aa, Homo sapiens
KEAKEVKYSGPCILTSDGVAPPPTPMVDHLVASNPFEDDFGAPKVGVAAPPFLGSPVPFGGFRVQGGMAGQVPPGYSTGGGGGRPATPSTAERPSLPKSYGPWVQHAAHRVRGEPTAGKSELFRSRAIQTSLWVKTFGSVPGGQMMPGPVGGLVP

SEQ ID NO: 976715 - protein, 196 aa, Homo sapiens
MSSKVSRDTLYEVVRLSPDWEPGKLRKFLDDGGVADAALNDTYDPRRRRRRFSGHRSGYTGSVPALMFSVEWILGGYSSHCDEANGRVVYPPHGTIEALKKAQHRDTEDTWSRKLGHKKYDRCFWPQSRLDHSTTSRNSRPTGINYRQDPVPISLLHHKRTTWLEQHVDEVKFTKSRFQLTEGVLSGMYAVGSRDD

SEQ ID NO: 976716 - protein, 169 aa, Homo sapiens
EALEEPSFFTTGVMWSIGAGALGGLVPWRMRACANTDVLLSKPQKAVPVSTWTDIDLRNHWTNGTNGAFKAKELWEENMDAVTEWLVRRARLVPLSRWKLRTLSSLSRAVLDQLGVPLYAVVREHIRTEGEWISAALICKRRNLPVMKRKKFYGATKAEDDVYGIYSVW

SEQ ID NO: 976717 - protein, 102 aa, Homo sapiens
  misc_feature (82)..(82): Xaa can be any naturally occurring amino acid
MWEKKLRGLLPFLLQIDVEFLCVREFSAQFIVDRGSRGQKVSPTGPRRRVFSQTSGLQCGVHNSKSHLLRSVVSHKPKHRGXPCGLIVERNISEGKPHYRGC

SEQ ID NO: 976718 - protein, 172 aa, Homo sapiens
ISTPRHSSAAAAPRKAQCRAHAGVAVCCPARRRLRGLWAAGCAPAAGQSARCGLCGARVLCNAAAGWHGITAGMVRRDRLREDEGVAGPGGAVAVPLLAAVPATYTPLQGSPLPFIHGTSSGKFITYQGTAVSSTKTLWVWFGSPRDKLCLNHGLPKSKLQMVQRLGNGSDP

SEQ ID NO: 976719 - protein, 257 aa, Homo sapiens
MAYKENRLHNLRIGITFTGRKLQTRLPTQSKYTAQGVLGQGHQLRREIGVLGSGTFQPGQTRKTNTRGSGQPLEKSQKLSPDTFKYQGEQLTSIQVKISNKFYNPVLISDTSFRDNFFSEGLSQFREASMRGVHLARGKISILNKPRQKGYASAESVRSMAGDDGGARSSNSWVVNPHLLQGGQVRQDGAPIHTEYWGSGGAEDLGPPGGRRWGETLGSGGKPERGGRERPGGDRLAEARPSKGRARGRQTTGEREG

SEQ ID NO: 976720 - protein, 234 aa, Homo sapiens
GQSTNTFISKGSKCAGEKEGLLLPLKGITAPSQGAGQQGTRGPRGCKQAGTQTKGDPGSGKHGPARHGAPQYHPEPPWNGAGCEATRYTARARASETPDTWAPVRPVQGAGANTHIGGSRESSAVCPLGLLEESPWTSPYSRRASCHIFVSPPYPPFSDVPEQGKGAGEATRGPGQTYGGHPNKPKTLAYISTYAAVMYQPEIWPKGEYSPNMAMYRLKSFMSRVQREGLPLGG

SEQ ID NO: 976721 - protein, 195 aa, Homo sapiens
MEDILSESEIKMWMVFATKTDIPGSAKGAIRGRYASDCHRRPLLQERTGIMWKLVSVQDFHQKTIKELVWMKLMNKVIYMTEDLGLIINRFSDGQDYAVGTVRDCESRPVGYLLGVAGPPGGTCGWVISRAEKGDIEPPDEEREQSVRLPVDALGTGLRRSAPGPQQTGAWHKCSPQFPVIPHLGSCTTGEQKGK

SEQ ID NO: 976722 - protein, 218 aa, Homo sapiens
MSPTKAKPQNQGAPPAQKTPRGTQEHRRRTGGKHLHMGPRRKKVCAKHHNIGIFGHTDKPCVVHNKNFGGFSPGNSGLFGRHPADPFHQHQGGLGPKSLNIKSPSPHVERAPPRVRQHTMAQHLRAATETPQTCLRTSRGHTGPTVEGYPGGRKGAQQRPSGHKGPSGGAPGEHGGDQTRSVNTQRVVRVIYLYTPQRLATRNTAAVTTGANTHSTHM

SEQ ID NO: 976723 - protein, 118 aa, Homo sapiens
GWDCPKGQRVIGAPPGTNQRWDLANAPASSFYLKGKEFEEPLGSIDELICQALRQGSKCPGRQPHKRLCTEAKMACVHTGSRGGTTFQEAGSSHQKSLRSAQMGCGGMSSRVETIGFD

SEQ ID NO: 976724 - protein, 308 aa, Homo sapiens
NPSLFMALKNQFKPPPHCNGGAGQKQKPRNPLGNPSSCPPNFWPVSGVWVSICPVLLGLRVGGVDPSWGGLCTCEPPWRHFRGGGGTRAIVPHVVFWAQVGVVPQKVSEARGGGGATGLLRVPGGVLEGAPREGGSWVCSLSVCPQRHNGGHPGWLSTKGVSIQGGGRRGGRHSGHFERTLPFFPPETVFAPPLRTYALVPQNVRDRFCGTLWGARLGLCAGNNGSTGQVLIPQKHENLPGWPMAHVGCAPADPKGLALEHNHHTGGIRLGGLAGRVTSPVGPVNPLSADNRARHGWDGGTRLVPIEV

SEQ ID NO: 976725 - protein, 351 aa, Homo sapiens
ASPRADAAGLVSLFLIFPPFPLSFFFFLSFLPSPLSPFPLRKGFPGQGQSRLTPAHSSRAPDAQGASRTPRSHPAHSDRRTGTQAPESHPRGSKIRVHTTAHGSKHCHHTGRTHSRLALADAHTAIMLPPGFVPNKKASEPPVRHPTGDTETDPGRHHRPNNPMANEDTAGSVHHCAPMREPGAHKHGDTPRRDEHPNKHHTPPHNRPATVSPPMHGPVHWPSNAHKHAQQRCQNQPSTDPRASIPSPIVESQSEKPELATPSTKASNTSLTLHTSTVVLPPSMSVSRRTPRLRPDRSHTNRTHTQPEHEAYRGMSTTDTYRASHPRPKVVPTARYSLRVPAATQYDQQMT

SEQ ID NO: 976726 - protein, 71 aa, Homo sapiens
PLEPSSSSSLRFSARARFEASREEDRRFAIRTPSFDLCDASKVMTASCCTEDISIKINRERQGPYYWSKDR

SEQ ID NO: 976727 - protein, 257 aa, Homo sapiens
LLSDGRGCYSSLSQSCNEVIPRIYVGNCVCGSGPSPEAAETRASAMCWNAGEGRSFMHVNSKANFYKDSGVTYLGIKANDTQECKPQRSTLERAADFMTRLGSKDLAGCSSTAGKVIRRSPTLVIAYLMMRHEDGRQVCLSIVRQNREIGPDGFLGQFCQLNEQTKPTEGKLTTLGEPPTALLDEVRGGGVGKGVPSCHVSGNDTVTLLPKMHKRHLSTSGVPKQAWALCPTLGEPIKKLATAGVLDSQVAGSEITT

SEQ ID NO: 976728 - protein, 281 aa, Homo sapiens
LRSSQRLVRSISTNVRRNLAFHTLSHGSPAQGVLHYLLGQRLPEQRSDCPYPMTDHGAGRVDRDGRRRGLPPTVRTTTQQIAKVLLWVTDPQLSTETLWGTRRGAGDAVNGSSGNYSLPYTSIVRERRTLEGIEGQQMDWCAARNAFAFHNEEDNIDFEKRHPLIPTNDRLAYPPLTKQGTPLSNTTLPSPHRSPFRTTALTSKPAYELTMLPLSTPTIFGYLSRTAFVLTEANRHVHEVRYTEPNDDHHLTPALAVVPTFVDRRQSLGHQPLTSSVTPRL

SEQ ID NO: 976729 - protein, 178 aa, Homo sapiens
DPTSYSPGNPSQLASCSLMLDMLVGNVPWKNPWHTRDYVHAPNSTVHTWIHLLGATASDWPRHTDLRQDHGRHSVDSIESSGGQLKTFELARSAHWALPGSRGKFLDSPHEAKLRATNNTNMSHAHYSHSGVCLRTGDDIRVVDLTLELMYMSIALPMAALLERAHCTNTGTQCNNLP

SEQ ID NO: 976730 - protein, 168 aa, Homo sapiens
MRLTPAAGALTTNNSYQVNSNDPKGRREPERIGGPEVTKCGIYLGINTETAPVCPIPLECEDMTSSALLKPDGGLAQAQERRCVRKHSVLLAAEREVRRARARSHSKWRFAVVQTRLGGILFSGLVGPPGFENCDTISKTYEIEAKARAYILSWDTLRGRAEGFPIIP

SEQ ID NO: 976731 - protein, 39 aa, Homo sapiens
MNLDYCFLLECTGQVQRLLLRWQLGDASWAQGQITETHC

SEQ ID NO: 976732 - protein, 118 aa, Homo sapiens
MGQNTGGMTSPRETGEHCEHVSSVVRGPHLSPVLIKWTSVRIQGLPREIITGDTLKAGEREVSQGAENNCLGDSDSHGAGPTREEAALLAASGLSKERLGPKQSRIGSPRGPSEGGRS

SEQ ID NO: 976733 - protein, 265 aa, Homo sapiens
RDLGGPAATHLVRGGAPPLHAAAPPTRRVPGRPSSRVSRPEVARLAQENEPAAEDGACWAQTRSSDDLLDFSMMFPLPVTNGKGRPASLAAAHASEVHGSLRTGPAQAPGRSGDQSSSSFDPSRTFSEGTHFTGARTAASLHPHSWDRDSEASSGERGAYASFARAPHACPAALRRLLLQAELALTAPGPLFPFGHDGDPPEYYPSLLRQLPAGTAADRQPKTTQAQQGPEGPRGLSRIRVPSQASVSTYGRTAPTTRSQRPQHP

SEQ ID NO: 976734 - protein, 170 aa, Homo sapiens
MTDPGTCNGPSGYGSTIEGGQNNMRTMNHHERGDTNGRQDSKNQRGTQHNERDRTQVEEEEKTQGRKRLTRKTTEEGTCNGRLERRGPRGPKSPGKTGEQGPKSFKGRNGNVKVGEERYRENRTGWETSRERQSTNGNQRRRGEGHRWGVHQQERNGSTNQNETENSRHL

SEQ ID NO: 976735 - protein, 236 aa, Homo sapiens
VDIPKMVDAEDGRGNVPDLDEKAIMSVTCLDFYHAVLWSPEGGDSELNRICEGVGRQPGRTSRRYGETSERAGQWICRKVGSAGTDPVAGGTGVAEEQPCMPCKQRAGGLPGRYRAPARAAQGAGEVAAGSINFKHACQTNAAAHVNRACLHAHLRAGWSRDINQCLGLAMEQVEKGYEAVVLLSAILARLWRLDHLTGNMDREKRIPVPTKVRGLSGDEGLNGLGMDGTMKIADW

SEQ ID NO: 976736 - protein, 288 aa, Homo sapiens
MHACMHACMHPHVLRNVPTTNVHISVHGMTMTAKDHAMMAACLESMLMMSQPDGSLLLPCSLREPVAETMQTERWTMRHEVATAWTVACKRPGGAAATSLWSKTKQALEELKNSMLPPSHLPSHPQHPAKHTDDHQADSDQLRRDLDIDKRTDTLADQCPMRDLTIQPPHAHAPPAHQRRDGTLNAHPARPCSKSPHHGLARPHTTYSRTPPQPAPQPCLRPSPATNSLHHHYPPPPSFLTPPDLRSVEPELAPPSSHCPHNSPTSDNHRPPHHPQALPRPPSAPNTI

SEQ ID NO: 976737 - protein, 161 aa, Homo sapiens
MARVSLTLCHNLETAGPGGPRFQGVSVGPPTCVLPNLWMALELFLYKHTGVVHTLPGVLWTQVSRSIVPLAHGKRQEKALQVGAPGGVCPRAPRPCGRGQRGFPPRGEYSVWPPRGEISVVSPSSREEREEEEGSPLQSERVWARQSLSHALRESRVVPPV

SEQ ID NO: 976738 - protein, 346 aa, Homo sapiens
  misc_feature (202)..(202): Xaa can be any naturally occurring amino acid
MKRRKSYVGHYLTGGSQKSGHKVVRDLNTIPLYTVALATVSHSVPLTLSEGNYILSWHSPVQCSETEREECSRKKKPRLTKRGARQDISAHVMMCASLSHTSVTVPMSHRVQQVAEKSVVVVFVPRSNIFPRRQIVLYKGSIHPHRLESCAYTSEGPKGGSAPIFVLGRRETTGGLITKRGGGDHRSETNIRHIISVRRTVXAKCTSKTTVPCRNEMMSTGSPKILPERWIRTPTELMYGGATETRGVASEAAYLQRATVILRHDKRIKGKDSAGVQSKSRRNKRTLRSMGQHKDIIHGAKTHMVANHVFSQQRVLITAQTNCLRGPRCCKEHNNLLTGRQDSCGA

SEQ ID NO: 976739 - protein, 398 aa, Homo sapiens
MTTQQHKRHLASDISQQQPHQVRTATDEQHTHKSRSKAEETQRRTRPIDDAEEQAMSATRRGKPTATAGHPAETDERERERPTVTSQTSETRTHRQRIIDVSEATQSGTPRHKGRERATHNQPERGQHRPTRPQRTASPDTHTSSQRGGPRQQTERPRTGPVHRRTRGEAIHVSTRAKPRPRSTTSTGEASLDDSKLTAALTTAGAHTKALEDHPIPRTSHTANLTTIAEREGKSSGSINTRKRTRQITQQRSNDNTNIRVAASSIKIDDAPTRITSRRTHDTQSLTRTQPQSKGIAEPDAPVRRASSQQQLMNSQRQTTKLDEARQHSTETERKTRPENHSPRAEAHQTTSKTLRRTAVSLDRQARLTEMNYSDQLSTVSSSRSERYSGSHSSPRSM

SEQ ID NO: 976740 - protein, 316 aa, Homo sapiens
DAPLLTVPGLGPCPSTCPVLNDHRAALWVRPPLATEPDSLRAPGDGRATRACARLEQLKSSRPGDREVSQAWSEKPRVEARYPRLKTWRQMAGDRVQVVDMAGATGSMGHGTAEGRGPAPLQRAPIRCSIWETGKRWAGRASPRGRNSGTHLQPAMPLDPVVGAQRPLYPGSSDLSPDRSLTSHVKATKMTGSQGPEFLSHVRRALTRNPGNFNTGMIYDSSQCWTHQWIMRGKRGREHGAKHGREFEEHWVPDGRHEAYRNRGQTQRTKEATGKADLGSERDGTNRDKPYRDMRNGSEDWPGVSLLLSGDETKSR

SEQ ID NO: 976741 - protein, 135 aa, Homo sapiens
GSLVIQRHPGPTCCLTFRDGQVVSRGWVLTALKVAELTVSSELVNATMTRAGIVGEHAQDLLMVPPESHVQCSLGRMKLGGERVSWQFLRATLSPVAGSSVSSEPSTWHKSAVGHPLSVSTASKSQDAGARGDLI

SEQ ID NO: 976742 - protein, 95 aa, Homo sapiens
MYQEAPNKKRPSRGTPAHQTKGDAHEEHTNNRDKRPKHPWSETTPLEVNKWRQLSQPVHQKKGNNDDTARGGAQKAHDTQRESGETTRTTSIQAS

SEQ ID NO: 976743 - protein, 55 aa, Homo sapiens
ERENKSRVLYLFRPERESPRAPRGGGGGAGAGTRDRVGKPRRGTEDNGEKPIREE

SEQ ID NO: 976744 - protein, 155 aa, Homo sapiens
LVGQGGGDTELEQPPCGYDWWLRPQQRELELLAEPVAPSPAGGDELGPAASSAARSRWPRPSMSEAGEEHAMETTGLATCELDIEGRPLKARSPGWGLGLGGLLGGGLDGALWVAPGAGNHEWAPRGDQIPTAMQERGRDRGEQHVRLVAWRWGY

SEQ ID NO: 976745 - protein, 314 aa, Homo sapiens
MLMPHAAMLPCAMRGADALRELNGMTPWLRHACRWLRSPSCLPKCSLTLLGQMTTEASVCCPNGLWNVACMRGNLSACACFCPCPDGPSELRQMMLWLLPDETLPEVMLPDGQPCSAAVSGPALPVPSVLLCLHLGSGCRRVSRHSSAEGGTVPCTSPSGVSRQGSRTLEVEEEELSYALSREGSHQAKAVELRAPRELRAELGGLSASTHAPGSCPKSTGALSSELENSLVPRFPPDLISLCLRMVGVFLFLRAPELGGRLYFGAQDCFMARYSWRVVDEHPRVKEAIFKPRGIPGPYISTIEESQGRETRGF

SEQ ID NO: 976746 - protein, 78 aa, Homo sapiens
EEGVRAGSEMMLSTLLPHINVLAAKLIGVVDDRKFRMFYEKRMDMEVVVDALVDEWKGYVRCEIKVGVDTDQSKGYHP

SEQ ID NO: 976747 - protein, 313 aa, Homo sapiens
EESITRSFQRKTFVVFKLPVHHLKAVLGEARMLNASIVASVRGATRWCSDSLTFEMRSQTAVVGVQTSRAHRVHDTPPKDTCDSPELLYGVLESMRQSCACPTPSDSVVLEGNELDSAMEKVHQSREPDHFWGPHGCEGTRDHGVDRRFRYFAAVAVSVQSSGGDRQVSKKSMDQHTEAAVRDIRVELIDPQAEEQVQLASRLDQSLFPAGASNSRPKFLPGVSETQQEEPEDREHPENPMGPQAEMAYSPGPPCWRAREMHSGNGGLVWTNLRTRPSMNQMSLTRANLRYGRSLGIRRRGTWALPKLARADV

SEQ ID NO: 976748 - protein, 239 aa, Homo sapiens
ARIPCLCDRLGHSDSTVAGLTLLAVGVYSAKNATLVAGRFIEARLGKPSLVTGDAPASRCLIVCCATPSRSRRRLLTSTPGPRWRVLCSVPAWNATWVRDIAISNNGTPKIEPQPVQEPNPDVLGHQCTGKTLFAKKLAPATQAWTYAIMTGGAVRPMGAREGVTAMHKLFDWATTAGAGLLLFVDERQTAFHSRTRATARSSRRRHIQAPPLNALPVTDRTTHSNNPSHVSHGRINVL

SEQ ID NO: 976749 - protein, 311 aa, Homo sapiens
MGKNFQNGDPRGPPETPPAGERGQGPLGERRCGGRPKKRWTPSLRRRRGIGGEEGAEGKDHIFGAALGGANELLSGACRQKGHALKEGGQEKYEETNSESARTSISSPRRVRWWSPPGDNAAHLTREGGAATSARGAAPTGSEETALGGEGSEPLWGEEKAPVDPHALRGLGRTSPGSRAGGQLVPQGQHSSGKKTARLEPVGNGRLGDEKDSPPLEGDQAKSSKSATVTEPPGERQFGVSRGGAVHHERDLREKGRPRHLAKGVDAMVGTGTGRGAEGGRTEKDGKPRNKREMNCSPPGVRAPTGGNTRG

SEQ ID NO: 976750 - protein, 254 aa, Homo sapiens
MVSGEGVITNTCRVSGMTEEAEGPAAYRCAKAASTSTDLPFRHKVEGGPGGLSAKWWEINIHNIMAKGHEWQGVTHEVLLVSSHNGFRRGLTDPPILTRIVDNVQMIGHPCHSISRSRVRSQLAPARRTRIPGRKLPAANAQHGPHGHELPRHDRSGMNKTTESSMAARSSTSVGLAQRAHNSTEARNRRLQGTLHSDGQRRDHEPPEMTHARKDPTPPAHPATAPDTPQVQDKTRRQRTPDACTTPICVHTRT

SEQ ID NO: 976751 - protein, 150 aa, Homo sapiens
  misc_feature (58)..(58): Xaa can be any naturally occurring amino acid
MRSQTRGSPHNKVPRGDRGQHAGVRFATRDPPKKQIPAVQEYSERTPPLLPVRAADDXTIKAVFVASCAETPTGGYYMHLSDGDPSNEGAVIHEEGTNVKKECEHKTMITHQDDGLITSRYNHTVVGVEIVSTQNSHTVMKKATRRLHTC

SEQ ID NO: 976752 - protein, 156 aa, Homo sapiens
MRASLFKSNLRIRRSEAQILPGLCCIEHCDLYGRTRRENTMTKATVLLLAWTPRELSLRTRAECSSVRALKHYVTNGLCEDSPVPALKLQERVPWHPPLDVLPLAADPTYQTAAMTVDGPQALSMMTSGNSCSDVYRNSSRTDLAVYTTRPHSPLR

SEQ ID NO: 976753 - protein, 142 aa, Homo sapiens
MAPVTREVSVELCGALLEGTLPTVLPPGFIDRRASRKRENPHDAVVVSPNGLFVEDPRNLPEKSVVGTRGPCEDAGQLEKVPASGVEEYSGKLETRFWKLEEQQEFSAIILATAGWRQWVGTPRGGDPGPEELMVSVARAGV

SEQ ID NO: 976754 - protein, 72 aa, Homo sapiens
AVVKVQAVGAAQRSGDYERLIFRNRVPHDEEITFVVVRERGEDHSLFDTQEETSVKAFTVETSLCRHEAYDR

SEQ ID NO: 976755 - protein, 414 aa, Homo sapiens
GQRQLPDPARRCSPCPSPALWTREPCTPCPACSAALSIGACCSLLNVHPVHCCPWCLVPVTLLACCGGPCCCPCKTPCSCHGGAATGTPAALLASMCCACGQIKACTLLERCLCLLGLRGRYLLTRLQIADELTRTSFHPCADDTLPWHLATQIFAVAHPEQGCRFASLPGCCCVIALPAWPSTACCADHAHLTHLTNLVHSTADHAVISTDQFSGTVEVLVHRDSSRWDLRCCDSTLILMRLHICTGSLCPVNRQGLAVHKGIAQDTFCGPLVATGIIPFATVPGMSLTRHRPRIEGLTWQGLRCLSNVQRMIYQTFLPAIPSARHVALSCGLSEPNLHRLPDKPQGSSQTTETRCRQPEPYLRAVHRKQRETHTSTQTTGDSRRVASRPAKSNKQRWMHTGRPRGVPLVEHP

SEQ ID NO: 976756 - protein, 260 aa, Homo sapiens
SILSFSPIPGCVEPGPPHSSYGALSNSNAHPGPFPPSTGAQSTATHQSQHITITTSNSNSSSSSSSSSSSSSSSSSSSSSSITETLGPLLLEHFPTHWRAVAPTTHTFAMSPSLGSLEGPNHARAQHTLPPPHSARCTTDNARPPEWSSSLFLFQILPLPLLKGSYPMFTPPPLTRVLKGRTYPFTSRCLLVTTSFRLPLPRSSRTVCFLAQPGTKTAFPMLGPPPYRHPRAPSPRGALQRPGTQPGYQPRGSASPSFRT

SEQ ID NO: 976757 - protein, 238 aa, Homo sapiens
MSGNSLSRLIDGIPRYDTTRAGEDDTVNCTKREEVEQRLGSYFTQVIKTQRARLFVKTIYLLKHRWPGNRWPDDCNVSVSSYVDCLNTTGILEQDVSTQALWKKTSHRVHKRQQALFTACLAYDHTRVCILPPCGLGMGLKLLQAVLMHLNVKAHKEEAWARHGSPMRHYVREERARKPQAGRRPAHPNCAWRRVKRAHAGENLTVVGAPKEDIPTPRVGLPHQAHAPQRGHPLHLDN

SEQ ID NO: 976758 - protein, 100 aa, Homo sapiens
MTSDWNAWAIQKAQIYDEDYLKDTCCDITDATTRVWGHNQYSGTDATIYLHGRRTTTTDEHIATRTTAEHIDDERTNTYDMTTLTEEGTSADRVTEINEE

SEQ ID NO: 976759 - protein, 161 aa, Homo sapiens
GRCAAVMSLVIPEKCQHIGRVLNTNIDGRRKISLAITAIKGVGRRYAHVVSRKAEIDLSKRAEENSLRDEVERVISIMHESSQYKIPDMVLEQKQKDVERMENTARSVANGLERKLREDLELTEEDSEVHRGLCHFVGPSCTRAALTKTSGRRGRQRWVCP

SEQ ID NO: 976760 - protein, 233 aa, Homo sapiens
MSYERPTLAETRTLKPEMWGKCLDCINEHEWIVLCGKSQAVSWERRYSGRRGEKPGTEAEAGTVWSVGWILTLVERMDEEFTKIMQTYCPSLPRVRGALERMMAQVCAIIERVQANWRRRALTEEVCRICCCAYCTTTYQVDYEGPSATGDPAEAPQSLDKNRAKMRAKESDEADGRRLVQGKFKPKERITRESDTWSTLWHNLPTRPVTRAWYSAGNQAITTEWNSKIEART

SEQ ID NO: 976761 - protein, 118 aa, Homo sapiens
GQVVQATDPDAAASCSFRLSATAAASPAFPPALPQLARTYSGGLRPLPSVSAGVCMPLSLRCEVSRWLDGWRLAPSTLVATHLYCCLLPPARSCLAPFPGRPDRLRELDAGHSGLPWL

SEQ ID NO: 976762 - protein, 378 aa, Homo sapiens
KAELQLPPPPPPGHYGAWAAQELQAKVAEIGAPIQGNREELVERLQSYTRQTGIVLNRPVLRGEDGDKACPPPIVGHSSRGIPMPPTTFGTPPSAVSSDSPSNYSRTWPRLCLMDPATQDRGPRTTSYACWVEPDGTEQRRQRLNVGSDSRRHSCCSQEERAKQQGDHSLKDHERLEQQKRAAVLLEQEDKQETATMGTPDTSSPHKTWARLGETQLLWEPRASCISGAQRGPQVIQVEAQRRSHHDDKGTEKQQQDNQETRNEQDSKLKDPTKPTEKRKTQHGGKKQQLKGNHTAQHEGNRPNTTEDTEKKKGTRRNRERATKPTKQEKHRGPNSETNRATTHEPQTTHQRKHTLARQHQRDDQAPSRENTRHEATV

SEQ ID NO: 976763 - protein, 128 aa, Homo sapiens
GNFCKERGWVIAILGNRCSRPGRTLGAGEAPCEMNATVWRVGARVVLGDARASSFTRRAQRGQHRVRASRFMVRPSGRWKEVQMCGTYGLPSRAIEWQLLLSLLAGGLTVGGRDGHMTDGCATWVLCT

SEQ ID NO: 976764 - protein, 239 aa, Homo sapiens
NTLRLQQRHQLESYKQQKKELLQKGSTCITNTEGWVGHPLDPIGCLCRALLEACRLEEETLTLYPDSGPEKRKVGYTSTCAVVPGDPLWEILISGVLLARGNVASCVGLGQQRVLPEGLYAQDKVVRNEEQLLALLEEVELDERLVQVLRKQAGLLLEGGPFSGFGEVLFRESVPLHTLLTDTCITATDASMTGPGYRPRAESYEAANTATDISNAGTNSITGPVDSTDEATRYPRGSY

SEQ ID NO: 976765 - protein, 226 aa, Homo sapiens
  misc_feature (119)..(119): Xaa can be any naturally occurring amino acid
GISEEAEVRIPLESSRNPGASRTSVVVEPSGGEGSTHKGSLKRGQYTEDADRKGGQLRVARFVTQDAGKTASAAWGLCAPRNTELWAGIVSIGPGGREGVEHVRWALGRGIDEVEIAVXRECAMKTRSMARMDVTAMVRPFSLSPIWTHGELDFYDKASFKGGRTPTRTEGIQGDTVYTRGHTKHFTTAAQCGKVVQRLCALKNSESTECDNRDEKIAGQARECAC

SEQ ID NO: 976766 - protein, 316 aa, Homo sapiens
MRPPGTLHHTSGGQKSSQRCGTHVGSNNKRDHQEATQGVGTTPHIGEGKGPNIIKQNQRGSPPSTLYSEEHHTGVDHSTFDSKPRVGDSGGQKRDNPRDAPPGSNTPLSRFAHPRESTQRAGGSDPTHIIKQRGARATRSRESENKAVIVRRTTNKRRADKKQQLSTGEATHSRQLETQQTPLPLYREHGPGNDGDSHQQRANTQKKAEANTATKTNRGPSTTTEPTAHNCRQQQRAAKRDTQKDDRQRCHTKTHTETPENLGARRQTTSVAHQRTTPPRVRHSTRRQRETPPPLRRRKDTQPVSTHHNRQREHSR

SEQ ID NO: 976767 - protein, 383 aa, Homo sapiens
  misc_feature (34)..(34): Xaa can be any naturally occurring amino acid
  misc_feature (102)..(102): Xaa can be any naturally occurring amino acid
  misc_feature (156)..(156): Xaa can be any naturally occurring amino acid
  misc_feature (198)..(198): Xaa can be any naturally occurring amino acid
MRASSGQAETHSSSAGGALWYVGGIEDRMCGADXWQRLMCTHYSQERVCNSLTFIKMYGVASTWRKKSRGNQEHGAREHLRMDTTRGGLHTRRGPGAKSPGXDEVFARNSEYTWGGVHTKGTGTREASRTDGISTLADDAGDSGERIACEMAGDTXRRGGGNTRGFWRESRGGQLLGTGAGETTGRTCGLVRHKGEGXRGKCDSLGREPPRAGNFGAEWGIPRFGFFLGLWSWGPNEVYKHFTTAQRSPSGERSHPWGGGKTPKSGPWGGYHEAATTSYMGGRHLDMNPFREPGEPCGNRKDCKKTGQRTGHGPETGVPTPTDWRLRDTAGPHVVPIVPGAPGGGGGGNSHPGAQNDSERAEQNRPAANTGDTRGENTTNWGG

SEQ ID NO: 976768 - protein, 114 aa, Homo sapiens
PGGRSSHQASSPSPTATAKLQPESDAPQQPGSSPRGKSRSPAPPADKEAEKPVFFPAFAAEAQKLPGDPPVLDFRAALARALLREVIKCSPHVRGPLSLLLRSIWSPTDPWGSM

SEQ ID NO: 976769 - protein, 287 aa, Homo sapiens
DRSGRFCADWTRVLREPRGGVGASRSRRSLSLNRLLLVPCPPLRRVAVWPVLRERAGAPVPGIQPAVLEVAQGAADETDDLPRATVVVCSARRSLACVAALHIVGGSPVPDSLLGLVTPSYPRSALRRGGLLSEAQPHALECAPGRSSASAGRLAGGSSFRLPLCYPGALTGGWAYAGASRWCSWRGPRSGQDPSGCGAVGAARRARTLACKSGPGLQVPGLGDRGQRAGVSRAPGSASRGQPLFLYEMTLVPRGSDTEAECHGALEAQGPRGGAYGGSTRVAVPRL

SEQ ID NO: 976770 - protein, 52 aa, Homo sapiens
MDWSFLHPPGRKAHDQACRKNQENSPGKKPYGKILYQRPSGVGHLFGLGIKN

SEQ ID NO: 976771 - protein, 259 aa, Homo sapiens
QRIACYQELAANWRAGVSPPFKQAPTGDPTPLCGWTSAPHNCHINLMEVSYPKTTPQMVLRSFSIRFGRKPIPHRHLTLEKATEPHVVHRSTASPPWLLPPGSACLLQRVIPRGQGLHDGKFGPDQWDPVVRTTGASDFLLKQEDRDDPGCTTCTLFSHAGCGPAQEMKQYVTHDQQCCCPASQRPTTGGSCDASLAEEASFPAPWSVTESEMDMELTMCGITRRCGFKEAQRRTTGGLRQSNHEIIEEYYKSVYQANG

SEQ ID NO: 976772 - protein, 66 aa, Homo sapiens
LGLEQPRMTGCMTFCEPPARGGPAPERPGTLLQPGPQGFPRMSSRHTTRYHNESLGFWGGPNFTHA

SEQ ID NO: 976773 - protein, 135 aa, Homo sapiens
VNCVAREAKRRQNGVKIPVDASKPNPNDVEWIICIGIMNGIIHPCTHPEDKPAPKNEDEMMVATFEYIDRLFSMKTTKTSLHGNRWSGDHVLNIMNHAAFKEVQGINRTEWNAAVEKQRVREEIWQKVAVFLQKK

SEQ ID NO: 976774 - protein, 115 aa, Homo sapiens
  misc_feature (73)..(73): Xaa can be any naturally occurring amino acid
SSSSSSSWAGLIPSPLPPPPVAGPAVVSVPSAEPFLLAAGARLLQSSVVHHKAAQGTKMYQREWSCREASHAXELGTQPQDTQLKCTARRVGLSQSTSLQQRPAKSHYVPPDAEI

SEQ ID NO: 976775 - protein, 151 aa, Homo sapiens
MGAAQTAEVSCGAASEDTAGVVLVVGHGPNTWIRGGTVLRARRGTHSTAALQLAGDGLTYKWRGLGGSPGAEERGGPGGKRAEGGFREPPGAGRAGDSVSGNGHPPRGAHFETSGRGCWGYRKKRISGSAETSGRRSMVPEHWNLAGGRKP

SEQ ID NO: 976776 - protein, 327 aa, Homo sapiens
RERGAPVRCVLLSSSETRLLQEHAVDSQAYSTEKQDGELNTHVNVKEKIYAVRSVVPNAKQNEIVLVLQQFAFSNVDKAVQAFVDGRCNSSSKLNGNMTGTPSTHNKQTKEASPSSIKATKMLKTRWRGLRQGPCSAATTRFKTAHEMAARRTARDENRSRYLRTLQRHFVVVTTAQILRTSVTGFATAAAFLYLDIASLIYGKQVASPVNDDHRLLLVNLPKLAFICTTDSFLNWAALGYLFTATTALAILDWFVTKQSRQLKKHHCLASQMAQCTWRTQAANSLLPDRQFDAQPPQCRSWHCSEATFSGDTFQTIQIPTPVGRHA

SEQ ID NO: 976777 - protein, 118 aa, Homo sapiens
MACPIWRGAVITGADPQCGCFGAFESDIVLGSVSVHSDSIVRTSPPGGSHWSWLVFDYEDPTKRDSLHITCNSETRLVHTIEYNRLREPELCKLLTTRVRSTSLTSFRHSNNTCKKQY

SEQ ID NO: 976778 - protein, 389 aa, Homo sapiens
QEAPQARAGHCLLSACRGGRVSCLRTAVYCDVDTSSPFPSSSQLPQTLWKGMKEVIHSIQATWGLDHGGAEPGGGSGPQLCPLDAVDVHDRVRLFPLAPHHLLCAMPETVPACLAGSVGAWRHVLPAVGRAGYGASRTVGVWRRGHEVRGILDRGREADGRSPYRDYLRDAERLQGIQGEALGTELKAQRTSRLASLIITLAITNGARLLATNHVVTFNDARHPRPPHGQHITRDRSTTRDYQSGTSWHQRAASTQRSWSQREKPAGPPKSTIHITLENPCNRHSTPKNPPPTAALTWCVNRYPTPNATSIVPPSAAHPPHPLTPACPAPQTPTHIRPLDLFPITEELTTTPPALDPNLTHRAIHVPNTRAQRDTPPYPTTPAPYEYPH

SEQ ID NO: 976779 - protein, 369 aa, Homo sapiens
GRALVSAWCLGSWVPPLWVPWAMDVLPSEGELNFCDGAAVLPLAWTLDGLNGLSLLSGCSAALEAEEPELTSWELDADENLWADPVAHQRWQVDDRAVGSEAGGDRCSHLPPWSLQALHCVSPGWLTLGPGRGTLLPWTNYLPGQNQFYGYPRSSNNDKTDVQATEETTWTTGTQPAGPYRPDLPTEMTHGGTTRFLPAESFSSQARQAANSRVAKRLMTKTGDGGSFGAPRGTGSGRSPSLRLKRMQMTLMIPWSLLTPINATLHSGGPGHPGASGYPVKPISGRLELPVRTEAPVARVKGGPNGGVVFLRKEDLTPGISRKNLSGEKATPQRGGIQVSPEPGDPLGETSPMGRRESITQADTTRGAT

SEQ ID NO: 976780 - protein, 291 aa, Homo sapiens
MRSPAQRYQAQGLGAWTIQEGLLQGEDGEDQGAYPREPGEDAPQDQGKTWRRRGHPWRRRMNKLGTRVVPAERREKLNDVAGQPLRKILQARHVVVRALQDRGLQGATFNLHGQEDPRGPGGMWLRPPRWCTVGAEDVEGRPRNLREGRCPGRGGTTRGATPAGDTRGFGTRVVEHERQRLTRPVAPYPISWVFGLPRFDSFWLDLMDVLYLGNPAPFQLLESIQLEVYARWSAPVRHPVQRREWCMSPAVQLFTDAARAWVFYFPTCPVFSVVRQSGASSVPQGLCVVLC

SEQ ID NO: 976781 - protein, 496 aa, Homo sapiens
  misc_feature (374)..(374): Xaa can be any naturally occurring amino acid
SGFRVLNGGGGWGQFIQSCVPKLEVNLWGWASAGQREMVTRPVRLGEILKRLECEEPHVVGSHSLKESERKKSSSGPKSPEKSFKPRGEASGAPKAKKLGIGPLWCGRLSWAEGGGVPPGVAPEDPQGRLGWGPHFWVILWPQPLGAGRLRETLLGVTAPGLNSQGGSYTQRALRLRLSDTREIWEILLGPCVCGSQSTSFSPHNTRYSALEAYSPKCSVAPGGLSPPHDGVPKPCVPRVVPVSPSFRGPNHILWSPGKERPGRSHFGRLETPGLVSTHEVILGARWVYARLPSVTIAPTTNQSLAATAKGSCRRRCRQSVVGPSKVNFAKRDLRGTAVLRHGFTPPMSVVTRCGPPCSKRKPPRVCGKTRLNXVQQRTFGIGEPQKTTTVQQTRVRHEDSGVDNKTGAQFHHSVREAPIKFSTTKARRGALTNHLQETSHSWANMILTQATIRRSGESQITAADNLISFVDTHFIKSVSRNGHYASSMATCLVLS

SEQ ID NO: 976782 - protein, 194 aa, Homo sapiens
KGENRFYGYKGGPHQAGSVTPKEVTRETSKGHDGRRGDGNGIDMIQGRPATKCSNIDQEWAGGAGSGHSCEGQNGPLHSWPSVIGLQVCQDPARWQEEGHEAGGKPKGQFHDPKFPLGGATKGSGPRGTGEPPGRAWSSPEDSSGVQDGHDGPGGTRTSVTTITHKTLRGARSGLIFYRNTVVKAGDPKTAGRS

SEQ ID NO: 976783 - protein, 243 aa, Homo sapiens
MVPSGSLLRPVSLGAGERGRDRHAYPSMLLLFRLCVLRYKRLVDNIFPEDPKDGLVKTDMEKLTFYQYLLQRNLDRIGSYLAERLSRHVSDIVLGMWMLWRHLDQLLMACHSHSISHCRKLLHMVAQLLESGEQSFKFWNKSLSKFATIEEDTPSYHRRMILVSRSSACAIPVIVIQTTNRDRIVDLHVSTVGSNTSHHDFGHHGLSQGTCPSSVNCTLHCIMPFFLMEKNRAGRQTWALEKG

SEQ ID NO: 976784 - protein, 203 aa, Homo sapiens
MGRAPSVKQMTIIHEEWLLRAREVPAVPVPVVYRNTIPVLINGHLSKAMGNVQIDFARSPPGSWYDAYGMLFCTVLATAEEQGVLPDELSVVVRRLWVTWCAGLLWASMEYQLNDSVLLPELTCAYWQSDRSPQRKMCTDRVGHGDRGDAASASRNVTSDVGGVPAAGEEVEPWYGGRGIRLWVAERVYWEREGEVDRSEDNV

SEQ ID NO: 976785 - protein, 141 aa, Homo sapiens
MALSLCLLDNYVKEDRRHRGVHQAPYFGAEDYRVCMDFTHYSDKTHSHGICPVECFRLLHYTEVTDFAGQSCDRMLEHTVSSRHFDRTPQARRSEYATRIHSHATRFCLRDQETPSKFTKKRTLAQDLDYVANVADTIAWE

SEQ ID NO: 976786 - protein, 145 aa, Homo sapiens
MTSLTSGSEWESDRAAASFVCCPVLYLVVQGKKGEDVLGSVPEKPCINIDQSLSRQELSFPALGETESLADIVLWGALYPLLKITALTTLRSLSWPEQAWFQETEYQEPCTGELLRLVLGNQPGVLGTSGLTSKRSQPAPKKGKS

SEQ ID NO: 976787 - protein, 106 aa, Homo sapiens
  misc_feature (63)..(63): Xaa can be any naturally occurring amino acid
MSQWRNGVGAYGTVYKAVIPTVAICGLKSVRVPNGGGGGGVLPISTVREVALLRRLGGFGASXMLSWLTGPSCANIPELTWEINGNPGCLTHVAPGPKGHIWTRDP

SEQ ID NO: 976788 - protein, 178 aa, Homo sapiens
KIPQKRFIIQVSLESRGAYRYGFRVASAGTRASKSFGTRSDEGQLPAGSGSYWGWRMSWISFWEASSTYFWVIGHQGLGDGTGRKHKSGGHVTTTLYTDTDVYTSKSLLAEKQNGLQQLVLVSVGAVQSSPGGRPFTWMKTMAAFGSGATVGAGLLASRKPDRLAADPGTGMGSEAVD

SEQ ID NO: 976789 - protein, 89 aa, Homo sapiens
GEMRLFVSDGVPGCLPVVAGDGRAPGSEQRVLIRTVGPEDCVVPFLTRPEVPVLQLDRRADYLCLPAQCKSCRIFFIVVILAGSKDDSH

SEQ ID NO: 976790 - protein, 301 aa, Homo sapiens
  misc_feature (89)..(89): Xaa can be any naturally occurring amino acid
IRSHFQDVFRVVRGTHTLHATRSDPYRVAREPQPGHPCLRASSACWRRPRSQASALTSGSLPCRGRKALKWLQPGGAGTRAQCPTAMVXRLPPRLAGHHVQSSWPNRPKVHHVRSSWHSELRQTIEACPPMVWEAHGRHPRGPTAPSCKGSGLTGVGSARGARGAGRRRGSGERPEGIEVPCLLGISARLWCWWRRRRRVCSNCACRDVLALDPSPEQQLDLYHGAGRRSRCASTGPPGKAVGEVVARLQLVSRGAETRKLGAPRKVRTAGFEVDREGFDARGRVPIRRKGALGPGDPPGV

SEQ ID NO: 976791 - protein, 218 aa, Homo sapiens
GRFSEVESSLNQSFCSRRLCACLVATKAKGDLSKYPQTSRTHCASRIRGAAPPYVYAVGRGSEAMAEGSVLVSAILKVNGSKRDEAMVPLRSWSTIPGIPESVLIEARGPVASGSSRHPVEDAQEHDASQEASTEEPSGEQAQEEDPELIQPFPLLSLGPRREPCVSDSTQLVDPVLWTMVHLEHGVVYEYVITEASGGMCWRRSSPAPVAVFGVHRQ

SEQ ID NO: 976792 - protein, 74 aa, Homo sapiens
STFQGSGRVIAILVEQMSRPWSQLARSNPFNSCHICSVVHDGLGDLRSSSPGPTGQPRPPLATWQPPPVEEYSL

SEQ ID NO: 976793 - protein, 285 aa, Homo sapiens
GDGVLRCHPGWSAGAQSRLTCNLQPLPGFKQFFRGLSSSRAAWDYRVPATSAQHNFVYFNVKRGFSTQVVAEAVVLVKLSCGPLEGALCGPHTSVPLCYFYKFNGSFFNRKRCSVLISPWCVSTVCGNISAFCEYVFQGCGGPRVFTRIVLSPGCGARGFSQFHVRAPSQSSSGIKVKTRARTPPLKFESAQHGPRGGTNKRVKKGNTREEEGRQEVPKRPDKVGDPGENQCSIPEQYGRPHQKCFRAAITKWDPLRLWRGTQESRAHSLKKAAPQWWPTHKNSV

SEQ ID NO: 976794 - protein, 251 aa, Homo sapiens
MQVLSFPASQIDRQMGKAGAAYRGQKSLDVNRGSTVIINLTNLFASYKVHQLTDVPLRQALLVECTVHLGGARLINRFAGSALSGSIVSLGRQWIIPLEVSVFYQLSPYRIHRYSAYRVLSDMVCGGNSEARRTSTSESGLRRGCRTGQTARERRWPAPGCRDKPGRYRTGESPVGDRAHNSAMGQDMQPKEPPTASDEADITVHGAKPPQTMKAREYSHQPDGKTRCNARGPPRKQRPHTGTAQHCADAG

SEQ ID NO: 976795 - protein, 236 aa, Homo sapiens
  misc_feature (100)..(100): Xaa can be any naturally occurring amino acid
MCNGGAGTKAKRQKAGWETTRFGPRAIFGLVGIWVFQSWSLVGLGVRVRGCGDASGGEHCAIGRPLGRISRGGWGAEGPLVRAWASGETVVLAPQNVSEXREGGFRGTGALSHGLSERGSLREAQERGRPLSVGPKRLSAEKVERGAQQVGCTHEGGSHKGRGTGGTDYSTPHWRGNPLVFSPWGDILAPPLKKPGLGFSQEGSENPCGNLWRAKAAVAEPDYKKDDTGASDPKDH

SEQ ID NO: 976796 - protein, 399 aa, Homo sapiens
PLSLACANLKLPRLLLCPDMLRLRLLCLACGLPCVLLPDCPRWTDGPLSWCLSENATSAVSALCWATNAPCVVCHLAEGLLAPLTYCQMPAGEGLKGADIVFLRIMCLANVWTAMEGRLDLGPSRYCAVLLASPHQSDVLHVNCDGQRVFLPKGQYSMLGMTMAGVTFGELGLNEWRTVAPVLPPTLPWTGCSLAEVLGWMSTRRLAWSSGLLHRTVELGPLTKADFLQCSQEAHRIEHTNLRITFPDRLTVFSKIPGSTKMGVGPLSRSLIEGRNNFCKGQGHQMENLLEVYQKKPVGPFVSCRPTEGDKSLKQFRALTSRTSHSLAGLLPPQMCSLELIQPATLDHLSQSRGREVPVGSSLGHLTQRGALLEHTGTPQFARNKRCPEGQHPGAGDDN

SEQ ID NO: 976797 - protein, 258 aa, Homo sapiens
ESSVSHVGHPLHVILNAAAWSSFVGREAKYSGVLSSMGRFAKEERAGWDSSVGLNPLTLLVRVVGVAWWGCYPVWGHFIECLRVVDDSAVSDTPRGGWGKRPESMVSHVQPGPGSSGAIPKFVMGIASEHAVTYPLAVYVGRSSWLVEQSAGCTAGFPPYSPVFKFRDFTCWKYLSVQGQVFRGSRLSLCDGCHPRIIACALGVTPESIVDTHILVVNTWSTVGEADHLGTRCQEDYNQKERDVAPGPDGGSSGVLPC

SEQ ID NO: 976798 - protein, 248 aa, Homo sapiens
  misc_feature (45)..(45): Xaa can be any naturally occurring amino acid
  misc_feature (93)..(93): Xaa can be any naturally occurring amino acid
  misc_feature (95)..(95): Xaa can be any naturally occurring amino acid
GSSSFSPNAANMVFRRFVEVAVVAYVSFGPHAGKLVAIVDVIDQXHGALVRVDLCTQVTDDRPEPFNVRCSVTRFHSSQFPAQVPTQKYVQTXPXQKADINTRMGSPHDGPQKIEATRKESQDDTILIVFNSYEGKRKVRTQNNQELKLRTLQEGSSPRKLLPKKHLVLRVLLLLLLLLLLLLLLKFQQKRSPRSKKVQPEGSCPEKPQGQKAAAAPRSSEGSKKLQPESTCSKGIWQESISGYSIKK

SEQ ID NO: 976799 - protein, 169 aa, Homo sapiens
ADLDTESTVPNEENTWFSYLKKGYLTLSDSVVTGGLWNGDKDHGVLRVPTGCEKWESAWSYPDLLVFNCVKLYSVDDLDWAVRLPDRSAANAVPWCDSCPDGLTVHLWQQTCFNVPDMWLSRCRTELSVTCVLALVPRSVTTTTGDVVNRRTRKWLDTLGVRHTKGMHS

SEQ ID NO: 976800 - protein, 329 aa, Homo sapiens
MMTILSNLTVDIPEDVDISLSGTHSYREEAPVGTLRRDFASHQCTNSVLLGPLKRVGSGLDPKMGGGRLGIGNWGFTVLWALIFSAYNVHGDMIEWRVTTGASVNHTNEVLVYAHFPIKCCNPGQWGLLWNIAENFLRVELHISVERIRKCTNPGCVRVVFEYYYKATSPKIDSLTYPFVQVHTLTTLVGLVFHNFTWAFWISRNATNKVNKINGISRNIFRTGNLMSLKKRNCSSSADELTILKEVTAGLTGNRKGWPRMTTEEAYVGEYFKLIAVKRTYGLGPRTHKTSGGPLRAGEQDGCTAPVPTRPNPVCKRETAGPKAAKSKR

SEQ ID NO: 976801 - protein, 346 aa, Homo sapiens
IALQSVAQPLPTLALPPLMVPRQRCGQLVRMAIRCSGQQRSPVLRLGKPTGAGHGQESRVWTADPEMWELLQREKDRQCRGLELIASENFCSWAALAGLGSCLNNKYSEGYPGKRILLGEQRRWLKVDPGVPTGRRTSGRRRPRNPATGGRTDPRAPTPARPRPTVARPTDRPSCDLTDGETLGKAPQQNKRANHTHGDNVPDGQAEYSNPRTIVQPTITHLVRSPGPAARRLASLTLPLVDSSQAQKAAQTGQGPIHPEPRTQDASSPRQPPPQAAEHRQRRGQTQRQTSPRPTARRDRRPTPEGPESPKGAKRAMSETERQARVNTTPDPQNKALKARTPEDIS

SEQ ID NO: 976802 - protein, 271 aa, Homo sapiens
MNVSQPINHYNWYINSDKGPRPGNTLSPLSKRTSHVNFTAPGQCLQKQLLDTRLPGRATLHDNRSSGNYTQRRRAELRHLNRTSLTTLFNRNRGNLSQEEPMWCTRRPTEYTRRPLITYPHVTELHDPRTTKGPMRTPTTYNFDMRETNSPCPGALPQYPAGRPTEAGTAQPPLAKRIPMTENHKPPHRIATSTKAHPRHMRRSTAAPTQQSQPTCLHRATHEDNTKGRSQTTTKTITRRPSHRRTHTRYDTQQRPNHTITHPDTGTCRQQ

SEQ ID NO: 976803 - protein, 123 aa, Homo sapiens
GATLGLKNLRLEDSVQIHLPRVEPARAPSTATYKVDVIHAGPCSNALLLTWHCTPVNTDCVDFGGDHCPSSAIVLQLTVKPVIQWLNAAVEYCAADVCRSQLHHLMLVAVPGHVSLCCFAPLG

SEQ ID NO: 976804 - protein, 344 aa, Homo sapiens
VKQPSSLICAQGRRGGKHVRPQEFPEREGEEGQSTWCLPGCCRAPSVLPCRRVGQGEKSGHSAPSSYFPRGFTATIILSVVGGGTRGGHNAIPPRGLHTVHRFQRRYNLYITFPFNLLTPETESERDKTAVGKGLQGSPIVGGRGGSRGHRPQAEGAQEAIGAWGDSQRSGHGAMERKPHVNETEQEERNSDNHKQRDTPRRRRYPTPRTKSRRGESTRPRTPRTKRDTTTRGTPLGSARKKPLPHPLGRQDGRGPSLSKQHPGLTHHYPPHSNNAEAPGAIRARPMDTEEHHQLDKTAEHGPTEMTRQAASEHPRAHKSPPPYNPAGPIWEGRPPPHTTRRAN

SEQ ID NO: 976805 - protein, 84 aa, Homo sapiens
IKLGFRQCLPRGALETPVELQVIRPPRPFRRCRSRGGEYTAARISTWFLILQGRVRTLWYKKPQSWVNLLIPYSEPESVCRDNS

SEQ ID NO: 976806 - protein, 299 aa, Homo sapiens
MIGTISCKAKSFERAPESVKASDLDEENESGTAQLHFTDGKTDRTDCLAAKMRVQMRRNQKASRSSRGVSALSLGIPPTLVSGCRRSPTTRVHSRPSLREGEVSSVVPQDRFKMTMVKKTKRPRAAPPRVLWSQIPLGCAGRELWGACGMPSGAMWAVGGGRPATPGPPSGARGLLSQGPFPVGGNESAEPCQVFLDDWACSLKESSSRREYRWCVEAPKAGETQDIREPGVRRWVSVLKQGTQFPSVYGYENRRIAWVKSQSVGELSLCIYGIYIFRLTFPLCGVSPALEFRERTHGG

SEQ ID NO: 976807 - protein, 78 aa, Homo sapiens
TKELNSESSESNARKQNQAAPPPGSRTSLAATANGRDKAGGMPGLSWVPVAPVLFPVTFRLALWRDTQGQGTGNVRCC

SEQ ID NO: 976808 - protein, 228 aa, Homo sapiens
MGGGRSVIITRTWLEVQEAPRMPKIHDIYLRLSVTVILGYLVRRTSMHYTTRVLCVEAELFTDIALNRVRVTVRSLTPRMDSGSMESVAWSEENKTGREFRRLTYNYDDRSRGSGGIAKLKVCRIETCSNLGPVAGILKVTPGRQGFLTFRTTLGSLVAPPEKECVVTWYVGSSGSIDRSPRRCHRRIVGKRPQEPRTVNQTLRPLQGGRKVRNVPEVRRGQFEGYKN

SEQ ID NO: 976809 - protein, 241 aa, Homo sapiens
MGSAAEQHSTGAEQKQRNRRERRAQVPYAGGGSPEDRGDEVPRDAGALVSRTQKRGVDREGERRMRRGRKEGIITSLERGQPRARRGERETRRDRKIWTKKTSGPTLYKSIGLVHEQIYPRASLPIDRHPCSREGAQENMITAPHKEGDRPPGPTSVPRIRLMRKTPTISAVPQQVELGPPLYQKEQAQKRTKWVVTITQTTWCDVGITHLRGWHHKRRGGALQTKSVSSPQQGRGGNQQT

SEQ ID NO: 976810 - protein, 270 aa, Homo sapiens
CAMVVVCGSGGRVLRPPWALLETHALHASLPPAQILLRAAPTAVPSCQALCGQTSPSPKAGAVIGRIVAVGLAQWCDCPVMMQGLPPSSKCRWKVQGEGDQTGFRRCAQRLGVRATGEGLLAMDGTEGLVRGPRRVTGCWLHQSKGFLLDPVDLWAGITVNDDLENLLMTDVPSETKECDPIHAEASEVHGRVSVGARTVLVTGITVVDLVATHMQGWEQWGEGGAGGGRLSGAGVNQPMDAKTMVDSCEGGGAATGKALYYLNGDQRSS

SEQ ID NO: 976811 - protein, 236 aa, Homo sapiens
ACTWLYWRKMSSALRVDPGTAPDPRYCQSLLHRHRVDTDTATSMTRHDATKESKDIGNAILPEDADRAIRRLRAGLYPKRCRRQLPEKKTTTIGPCSAVSRVAIGSGGLASGQGTCAAMVSLSAQPRVLPVIVRREDRLASRSDGDASLESIGRPQRGQKRDHINLLRGRELSPPLVESMTYAWATGIDGPSFMFPLLNGCLVALLSLSTFLPSLAPQFLQGTGCSFRSNIRNGKN

SEQ ID NO: 976812 - protein, 151 aa, Homo sapiens
MLKTEEQKMRRNTNWYRERVTLIGTEDDDCGGGSGMMIEIRLLEIIERDGEEEEERGGSQNGVMAECRIMIPVIILVNAYHNYEGKEWRHKVILEENTKSRSMEVRRTKQKLNALQGARGVRGTLSARPVGNLLLEAAWVDKPNSEFARTR

SEQ ID NO: 976813 - protein, 637 aa, Homo sapiens
  misc_feature (114)..(114): Xaa can be any naturally occurring amino acid
  misc_feature (204)..(204): Xaa can be any naturally occurring amino acid
YLIDAVYGGLTGSELCGLAFTSPGMPVIDGGVRDWDLRMDAVGVPLSVRTECSLSGACVPYDWLHATLIHGLQGHDSTDHAVLTLPWYGGPISSHDRTCSHMWAWGTDVCAGPXPRRPRGRAITSALSCWRFSLLSLAHFGRTLHVPNRDWNLEESEVMLSQALSKLLQDMQPNSPREPRRGGIGRGGGIATVTRGGPREYVDXGRIFLGGRYRDEESVGFPPAGEACWETSAQIRGVTLKGRHLESERTTQMERRLRKPERRKFPQWGPQHSTENALCSQFHFVPVPVCGVPQPLKPTAAGGTALTGSGRGAFTPPRITSVVGPPTVYPLAYGGAFSWTDPTTGPRWGATGTRTGGHPPYVGHEGTVVGGATHVVTILPPPLGWRTLRPALGRLLGDHSCAFIPRCSQVYTHGAAGGGVFPPAETLLETTHVLCRHSVAVCSHTAPHVVFAGEPHPVTVSLRQPPAGRDPAGGGGCLTPNQADTADGHKDCGHPAGGNPLHRANRCTCATPPSARTGGTQHSVGVDESHPLTTSAHARATTDHYSSTTHPTHPGRHRRPHAAHELTHLQTRPDTPPLTANADHSLSTALSAPHATAPTTSTTTYSRGARADIILTRRTALHKRRRDQRRSRPATDD

SEQ ID NO: 976814 - protein, 222 aa, Homo sapiens
  misc_feature (52)..(52): Xaa can be any naturally occurring amino acid
LKNALEKPSSQKKRSKRTVSSCKLKHLQDDNNLLKQQLKDFQNHLNHVVDGXVRPEEVAARVDELRRKLKLGTGEMNIHSPSDVLGKSLADLQKQFSEILAAPSGKEMKHKLERENSKKKCGSGKGRRKTWGENCGGPTKEFRQACERALEAKNEFDKRQHEGKKSGKLENEIHYLPGKSKKYGGKSKGLTDLQVQEADDREGREFWANSEELEKKKKLEDA

SEQ ID NO: 976815 - protein, 248 aa, Homo sapiens
MLTGVTEVFSVACWCTAPRSCVVPLESWSKSSDGYTFVECQARRCAAGEACRTRPSCAPPPPSSDPPDAARGPLRLGPLSAPGSPVYPNGRLLVENLGRAPEPDSYTGRMVWGAAGRLEVELGRSGGQLIGRFGPRQAQAGGAAQWQVVGGGGEQAPKRTIILTGRRASLSCKGPRLTVVSCHPWCRGVPGIWKDPWLLVGYMRGGLTGGGPVAPGRGNLWAVGWAFGCREWPARGLGRRPPRVRGTS

SEQ ID NO: 976816 - protein, 183 aa, Homo sapiens
CLKPFGGPPGTELTYACEPFHSTELEDDAIYSVHVPAGLYLDPESGCLASDVPFTPSSPDAVTAPSEGMPVHTEQAFPPLEVGADSDYENTQSVGPTAVGLDTWKRFLELGKEEDFRPRAGKGPGMGGPRSWAIPTKQRDVILKEHEQGHTNENFRKLFAGKPGVQEMTTSLPAQETRSPFGL

SEQ ID NO: 976817 - protein, 249 aa, Homo sapiens
MGRGLQRRAVDAHRLGPWWPVQQWRQISQMSAAESPGTTTRSGSKAGVEGAQMRRGRRLGGCHKVAEAQGEARAVSPKALQTHAQKDSHEGEELDLGTGASQGVAGVGPRKATKPRTPALGRIRGEAEQGLGDERTGKARVADDAAHAQSGHQQRGSCTPGPGGAEDTPGEDSPRLNKNTLREIRPFKKRRRHVRGKKREARVEQGTNGRAQGKQGGADAPKQKPDKQGSGRKGAQGIGAPNTAGQLAG

SEQ ID NO: 976818 - protein, 156 aa, Homo sapiens
MDWKQTRIPPGGHSGDPKATRRDKNPRRKYKKTRRTENRGVPRRQDRPKYRGPPNTHDGRAAKRPHKKLKKSGRNSTRTRHQTPLRPQRAPTAETKRGTESPRTRGLYKRARENTLRGQEPTKGLSGNNLPTKFTKAGRTSQILSPDISESQYDDL

SEQ ID NO: 976819 - protein, 184 aa, Homo sapiens
MLVGEVVSREEIFLRPGSCDGSPLTSGGGDEPVRVLSSLLESMKAEIRDSLCMRIVVREVTIYPDLHRVRASWRSLEVPRTVHHPACSEGALTGAFKVLGAGGLLSRTQGGCNPDWGRSIQRMLATAWVPRGEARSEAKKGAGKVEQTQTRRTGPVVGTGPQGAPLKGARGLRTLGGWPRPHTK

SEQ ID NO: 976820 - protein, 492 aa, Homo sapiens
GERERTPESPEQPHSRRRASYHHTPWREPQRAAGRARVTITETMSSEAETQQTTGDTRPARRRNYSAEQNTKRPAPTGAAGSGGSGRPWAGPHNRERARPSRGNRPQVHPHTDSRPQRNTRETHCPAPTATRATRAQTRPPNPTPRGTRRPPIAQRDASCTIPTPNTQHHTTHRQVAPPNEKTGPVAARATKKNTEKARTIGKDSTTPTQQRQPAGTENTVERRPPPRKTTSKNRTDEHKGTRPLENHDHQNKSPNTKKQTNNAHHKNATYYTDRIKPEHNTQKRENHTEQANKAKRTHTPPAGTQPTKWKENRQEAEAKNHTIEAREQQHEPHKQHHRPQTNAQPKRDKPPHQAKHAATATNKERDNDGATHREAHKQTMQRKTNRNQPENQRGHKRATEPHQGRDNDQKQTNATTRQHSTRKHRRTGQPAAKQTDKDTTPAEATHTTTANSEHNETQRRQEKKQQQQSPTNNPPTPQETQNKTTARAHHT

SEQ ID NO: 976821 - protein, 205 aa, Homo sapiens
MRSKNQFKPPPNVTGGAGKGKNGENRWETTSSGPRQLIGPEWNWGIQLVHPGGMGIALAGGGRRSAGGDTVATGSPSVGRMSHEGESRTSANVSGDVSILGGHQGVGPHKKIMWRGEEEEGGIEPTRDSTLYEGAPGEGMHSRERPKSERGGHSRGERPLEGKCPRTEDNERGLKHRGSVTTHKGVPQHSALVTMRKYRTSRKPH

SEQ ID NO: 976822 - protein, 303 aa, Homo sapiens
MAENSAGTPSGLLGPRFRQNLFAFSASSTTRYQCGGASGGITRDFPDFVKQSLSAKWVDWMEETLSGDDGTQVIKVLKAYPFHGCGPGAIGTAGGSKYEPLGGNPMGHRRGYRWMEKSFLRFMVGHGWVVAYGKPLRGATGVHGGITGAQALGLQKKSWGDKQASGKDKTGGPATSSRTACIAVPDQPDMSPVSLTTGVVQIGQCVPQKRVARTHGGPCVLHAEEHHVCVFVASHLISRGVWDVEQPEWLFPQQVDWAPYSTFGDTGAEYKMKHSFGTANNFPNRLQNIYNRQTTQHASSSSA

SEQ ID NO: 976823 - protein, 488 aa, Homo sapiens
NFFTKKQLEITKGSCLLRGVSNPLKPTTETINNNREEEEKRKEEHKRPTIGSIGYITPRGYPRELPSCGIVRRHNIIIVDKTPVVSLNYNSSDREKPSVCASLCANKEAGLSVVPKSRRTVVRSVQPRQDSLLEGRWREFTAWAPLFRNSQISTRLSERQNSQTETLYQETQRGGPLVRRGSVTPYNSPTRGATKGGTLGGLILKYPEGQHACGEAPERANINPRGVGQFPYTLCLYQTLFWGGCGDQKRAAPILSPKSGILLGWPNHTHTTYKRWPPSSVDNPLILITMRAFPGQLARWWSQPNLRVLKASKNVIFVPKRHSPAIYSFGNRATIRIPNWHKNRLLTHNHTDGGSLHIHAVGSRATQERRSIKTNIFVSPPNSKPLAPKERTRGAQRPDTPCSNHPCGANKSAADDEKNTPRGTRHTHKHPYIILLQPNQQSHSATSHRRPQGHPTEMYDHLTTRTHTHGATDPYYGAQPHKRLERAN

SEQ ID NO: 976824 - protein, 102 aa, Homo sapiens
MRVLLALLGVLLSVPGPPVLSLEASEEVGAGALPGPSWSQEEQELTVALVAACAVCAVGGLSGGGHWVQGGQVDWHLLAVYGAWRGALEIASFLPEDAGANS

SEQ ID NO: 976825 - protein, 201 aa, Homo sapiens
MGLTNMGQTDTDFKTQRRIVQDLTRLDYSSFSTSFYVLRVVTYTKTRNQISITRQTLLYASRQPNKVTANNPGQNDSHRDHSIGPPKKGSPRTTLTLAQRNAGPTQTQNLPTPSTTGTHNHSTHELSPTPNHTYPTFQSTGLFTVHENTFTHTALHPTSPHSFAHRRKQLNRLTINVRTRHTKSRAHNPHRTTTNSVATRT

SEQ ID NO: 976826 - protein, 179 aa, Homo sapiens
MVERTSWKINVRWTESRIVCLPVAIKGIRGSLSFFLGGASSRRHRGSLKHYAIVREARTRARSSAPRLKAICRVIGDYEWPRSVWVLSCSNGGGHLPSVGAIILCQALHRPRAQRLLWGTRSASPTLVPCKVDMAAAALVLVRLIPGPRVHWNRHRTLCLKKLLIDAWYPMTATPSGRG

SEQ ID NO: 976827 - protein, 178 aa, Homo sapiens
MRAPNSRNTATTRKRDDAMNNTPTLYSNDTADLTVICCDSRTRRRTTAGTSSFENTAGTSNERSLAPSKHSPTQRKHERTVGANPNYTRPNVSVIEQERRRETRGSQWVAATPSRSVVRPTQRSTKQERARLPQARRRTSRARNDVARHTQPHAPGPVTVHCKKTDGQRVQQHGQVSR

SEQ ID NO: 976828 - protein, 336 aa, Homo sapiens
GDDDLHIAYVDLEKDFAAEVVHPGDLKNSVEVALTQKLLDLNPGAKSLIPAALKGTGHALLPRSLNSRSECDIKVAVPDAIPEPEEVIPSRLDIRVGKVITVEKHPDADCLYVQKIDVGECLTPRGCGERCWYSMSPNCIGTRRDKSIGAGEKLVAIPEYTPEDEEGGRTPDGTVRFMLLLLIGNGKNAGVVSVPCCDPSLGWLLIPGEHVFVNGFELGRPDEELNAQRRNVLRSQSWGLTFKDVRGGASAAAYSQRHLLIPGWAPVPVTSLDTGGGLLAAQNFPCFRAWVSGALRLGRPPRVPCPTGGAIGLTGRSGGSPPRHSVVGAPGARGPS

SEQ ID NO: 976829 - protein, 116 aa, Homo sapiens
ERLWAGPRKKAAGKGDVPTERPPVLRAGVERCVQHLGGRTRTAQLVVIDHDVDPIELVVFLSGPVVSENGGALYLYDHTERQDWDVIDATVATVPPGVAFTSGDIRQYIRLHLANA

SEQ ID NO: 976830 - protein, 71 aa, Homo sapiens
GASLTLSESSLRFRTRALEAFTRRSSCRSELIFDPLLCSKVMTCFLLHEDYPYRFKENGRKTLNYCPRDSA

SEQ ID NO: 976831 - protein, 336 aa, Homo sapiens
MGGGHRMKWLEMWQKLFSPAKGAPWQALGHLSGRGPSPRSDDEQQCSGTWVLAAAASGMTLLASSWCPRPMPCALGPVGCQSIVAACAMFILTRLARLGQALLLYLFTLRSGLLQFSHAHAARCALTYYLGLSRRLSATAAGATYYVSTYARWWLPPRSSRVCRCRLRTAVPGTRAGSRLARCYRRTECCYTSALSPGLAQCLGPFLCLEDLLRHRSALDFGQWRAFDGCLLQGWTNGKPTTTEQEQTQGAIIAMEPRRLNRQDAAREPRPNNNRARGPPRHYSHILSANTLLPHPTRYAQQQNAKRQAPSERQPTTNSGQRGDKRRRHSTCGIDK

SEQ ID NO: 976832 - protein, 221 aa, Homo sapiens
MPSCAVVLWSTRTFISVRLLSYLSACRQPMEDSMDMDMSPLRPQNYLSGCELIGPDNRLVDFKVARLSEHMSTRLSFEEAVSLAGWCTRMSCTLLNAEAMNYDVQSILKVNTGRTLKNRLVQTNGFPLGRFEIAPPVVLRSEVVVQGQCDELVGQHLVAVEERCRVMKMNEEEDVKLLKYHLERRAAPGGGERGYLEKNRKEYACVMEESMTDDDGRRDRW

SEQ ID NO: 976833 - protein, 137 aa, Homo sapiens
GYRLCSMYVEMSIPSGSSATLTSNRPRDVMEDLGIILVRHKSDGKALGAKATRPGHPVQVGVRVLRHVVVKTDVTRSMSIPRPNRWVGHQDPPWEILELADSVTGAPPGPCPGGWQMAGKFWLHEELGPGHAALPLT

SEQ ID NO: 976834 - protein, 324 aa, Homo sapiens
MVSDRLTRKMRAVDKSEWSMPVGGTNNMSGERRNNVAAREVGGEKGQTPRGDSERAFIMSRAKSHSKPRGKHVVAEQTCGRWNFCIGVITAWVSPVLNHIEGGPGPSLGLEMHRLEGRSKPSGEWGLTRNGGHLSQGAKLMTGGERKAREERERPKETPLHTNRGEGAQADIGPETSDHNKSGHREKETPPNDKRTKHRTTREEVIHKTKDLNHETTREKRTQVSNTAEDEMTRRTHGLIHSPPRKENQHAHTTNKDKSREHNEEKEKQQRTKNEQAHHTDKGRTQQTTKADNGSRAPKPRQQHERKEPSRKSRPHRPQQTRTK

SEQ ID NO: 976835 - protein, 154 aa, Homo sapiens
MTMQPETTRLRPTPHCTKRQTRRTPKKAQKNHSNNPRQPAQSNTRTPQQKTTQQTHNKHKDTTKPTTQHKSKAPHQATTERRKRSGEAPAHGRGETRPQATPLERRTPVASPRRRDGRQTIRDTRNSHRGEKKGRGGARRPADEREKRKQNDRE

SEQ ID NO: 976836 - protein, 589 aa, Homo sapiens
  misc_feature (125)..(125): Xaa can be any naturally occurring amino acid
  misc_feature (163)..(163): Xaa can be any naturally occurring amino acid
KRSSFFWNLFIKERFSQKEPRAPCSIYQNSLRNSFFSWSPIFSFSLSSGSQQPRGRWGEDTSPVAWCAATEVWRGQPRSLPRGPLLCAEVEVLPRVCVHVVGRGALVLQKQEPREPPKREGLSTXLFITAPCVWAYNRSEERGNLMRSLYNLFLAGESCVAPXLSICALACWQDNVEGGPRRRLRIVSRERESPREEENTERSGPEVVATRARQTSHRLRAASRSSDYTATGENNAPRVAIKALRRPEESSRQGCGGGALFNNPPKEGTTTTLIIKSNHPHTESNREHPEEQTHPVVVGEAPQSTLKGVVSSKSISHNLPQTSGVRIEARGTNKEQHNTTRKNAGISPTRSDKAANTTQHPQRKKSPPPRGCSRPRKKKNTDFPPRAGSNTHKSERHTFLTLGDGEHPTRDKNTTVVWTHSTAGGTQQAGSVGETEHNLRLKYCGYENHTQEQAWGSDKTSDETTHERTRTPRGRPRCDDHPLPKEDRLSHKTVVWATQKNTQRLIHTLAENTKTPLSDPLTPTDIPARMWENPNKAKWWDDNGTNRPPPNQGETKRADGLQHTNNHQRDNALKRERFVTNENPTKEIG

SEQ ID NO: 976837 - protein, 201 aa, Homo sapiens
ARVGRRAERCGAVLRSPLLSLNLALAVYLYPPGCSVTRTASTMTTSAKFPLETREASSTLYMSRVSRGEKVQAMYIWIDGTWEKDCAAEDPDGVVRGEPKCCGKSCLSGHFAEWPHSSRMYSSGGCPTGDMYLVTLRASVCPGNPFRVHGSPYSKSWLVNVVEYSQSDTCKGLARMSNPESSTCLRLMDMVSKSRTPGCGM

SEQ ID NO: 976838 - protein, 104 aa, Homo sapiens
  misc_feature (64)..(64): Xaa can be any naturally occurring amino acid
MWALGSLHTHVEHVLRTRGCCITVLWGSCHPMCAGDGTLPAWRYPLHLFLPRLMGETMPRAESXRGERVVRDTGTPECHQEREALPFMSVRDNTRPLRAEIPYK

SEQ ID NO: 976839 - protein, 166 aa, Homo sapiens
WKWPRRRKGRPSVAEPPALPELLFTLRCAVLYPGGCGGVLGVPWGPVSIRYLPLGRKLRGHRRRSRGIETSGATEHNGEVEAPGIWAFQAACANRECPKALNDLKIKTPGVVVAREEESHGRGEEAGRIDDLREHDRPTGMRGDRELTERVGKSDGKRHTDPQGGE

SEQ ID NO: 976840 - protein, 319 aa, Homo sapiens
YTRVGGWTSCDFRVAMLYFSYVFGRLGLCRVDVGSWSGWPFGAQHSNADPDSDWGSKTSGTGQARRAVSDSDPEMWDVAAEGERTGMCRGLELIALVETSAAELLLGGPGVLSEQQVLGGLSWQEILLGEQMVVDEIDLLCQRRRPLEAFELVNPRTSGEHVSQSYSGSPSLAVAVYTALLQGSRRIMGLELAVGGISPTVLSDVKRISATSIFFESMPLVRLNPQDWLIDYTSGTDWSTFSGHGSLLGWDQAMSLIDKPGERVAVRPSPWRRMAPPGLAQGPPLTGLHTTNRAGLTQGGPAATARFPGHTLGPRRGSS

SEQ ID NO: 976841 - protein, 295 aa, Homo sapiens
AEWSQWWPVSSPCSAPSHQGCGPVPHPATAAAIDLLVTVTVRLMTLRRSEPRLAVLSSRSSSNAVHEQLAALSQTPDRTEPQKKEKDKKENEQKKEHKKEEEVEENEKKAEPMEPPPKEDEENYIAADSDVSREGASAHEGASPLPLYESEEEDKCKPMSYEENAVRLKLGHQQAPRAEKLGRVVHIIQSRGALPEEFQALTRCEIDLRTLNPVPHLRGGWSAMSTSLFAGDQGNLKLEKVDVIAGSSNNERCLTLKSATTPVSQFLCNEARTVLLILDRSKTRLIRSPPGTNPL

SEQ ID NO: 976842 - protein, 191 aa, Homo sapiens
NPSLAFALKNQIKPPPPCKGGAGKKQKRTNPPGNHQVRPPAINRPGVGLGFDIVPRVGWGWRGGGSTRGGKGHLSPPWEKLRGKCEKGHVAARAPGRQWSGPQKSVRPKGGVGAGYLPTGAHERVTLEEANREGSNRRKRLKRCPEGKGRKTRVYYNRRGYQTGQGTGMHRHTENIERNPPPTPNGEHLCQ

SEQ ID NO: 976843 - protein, 192 aa, Homo sapiens
  misc_feature (5)..(5): Xaa can be any naturally occurring amino acid
GLDVXLEWPEPGAARGVRSAAVLCVLCVLCVLCVREQMKKLMCPVIEVTCPPATHAGPFWLLSGQEVVGGDVVECLVKPTWMATTLVYIFLVDPNFSAAHCLLVTGVLAVKQCAAPSTCENCSECRSQCLLDVGLVGRFGAVTAHCGPSLGLVLGSVSRSCCAPRCTLCPFGPPPHSTPMPLPRALAFGLFP

SEQ ID NO: 976844 - protein, 100 aa, Homo sapiens
RERGQQEPGDSRSGNRTNATRLRMEELKLSSTTYALTEETQQTNKPWSTCDLVTTVIAVILIETNVSYVSYKPGESFTRRARRLERGQGVIMETDHNEKD

SEQ ID NO: 976845 - protein, 103 aa, Homo sapiens
MRKFKQNEIGREMTRYLTWSQRGNRLTEFNWNKKHENVAESAGFKCKQYRLCAPWPKVEVNLCSEFLKGNFRANLIVDRKFKFCHGLTSRFDPTSGPPLKNIN

SEQ ID NO: 976846 - protein, 92 aa, Homo sapiens
ISLILMTLESSITSLCWEKERFLLGLNIETGLLSDRKKVTLGTQPTYEELSSLHTVFACPDAMSSKAAQNVFNVNLKEVNYMCPLINGILKL

SEQ ID NO: 976847 - protein, 104 aa, Homo sapiens
MSKSESPKEPEQLRKLFIATGWSFEINVTESLRSHFEHIGERYGDMCGNAEIHKTKRVQGLRALVTSCHWGGGGMQLMQCKVMTKVGWKSCGTQRRAVSQEKES

SEQ ID NO: 976848 - protein, 263 aa, Homo sapiens
PGPGSPSPSSGAPPVTSAAGHQPCIAQVDGRLRPEGRAPQAPPGPGPGSRQHHQGLRDEDFENEAGDLELRNEQNSQVPGAWTQVKQARQSSLMALLLHVASLQFEARTPWFSGCRSLPTSALNLTVLGLDLISDEMSSAARSVARVGGAQALQVAVWPCMLGGLPVPSGSLGVDCPGDASELAQLEACGLGWDRRHGTEARGAARARSGAHAPGGDATYHLYRRRQECCRWSTPLAVPAPPWGADQEWRPRSRGKEFFRKKG

SEQ ID NO: 976849 - protein, 217 aa, Homo sapiens
MSPRASAHATIARALAPPLRPHLGVAVCACEILPRASPMSEPRAAAITSRSNRSDQAASSEVLPDAEEHEGRTAGLVEVEVAGDGPIPGYSIETYYSIRRDGSEREGEVPVWSDPHLLYSRVSHITTLIESSLFGPRVFSRSVLAAVSYPTGSVGSPPELVAPLGPRVETSQAPGLLSCLLFCATPLPLVIPNRAASTQVFKVFSSIQGVLWAAIVR

SEQ ID NO: 976850 - protein, 333 aa, Homo sapiens
VDTLMPVSSIHRPVIQSCGCAGADVRLALFPNGDRYVEQLHHRELLMGRNLLCHPCPCVLLVRDYSNARIGYTCNQSRTQVRTRGLLGRVYLRSRLGGPKFRCASGIRKGKATLNPNTGRVHPCGVVISRSHALMSRLSHVQEHYVGEPHAVCYLRHTGQKYLLSLLVPARMLEIVLRVHGKEHDNEAEEVWEEGEDRLLLVDTYCTGETIMAPISGKRKVYGEEGLGMGLTVVRLYDGGRSRLRACVLNLHMETSTASHSSCIPRWTVDGSLPRYVVPLGTAQVGHSTRRTVAGPGRKNVNPQNAPARGRSSPCLSPGGATRTPSTVIHATG

SEQ ID NO: 976851 - protein, 575 aa, Homo sapiens
  misc_feature (529)..(529): Xaa can be any naturally occurring amino acid
FLRGREREKNLSFSTRGGGGRARGPPPPKPAGDAGFAGGRARDPGATSGGARVRDSPRVAGERERARGRSRRAGRERECIATEQRAARPAREAAEGEEGVSNTQVCDARASASLSRERERGVTRAAREQREREREPQYDHSRASDEPKKERGRPRERLSLLARGSAPPRARREEERDDDHAPPQRERAEATITAPPSGESALRYPAGAERERERARACRKHHSRVRARVSAERRPPPTRRDGEKMLKCGEGAALPPRRRRGSSTYPHVVMEDENEEGYSTKQEEEEQHHSSSYSRVEDEDEDDKKKRGAREATKKITSGDETRQPNTITPTLREREDDAATTEEQHELRITRRPQTKRDKRPPTQTKTTLRTYEADAANKTYKKEEKNTGRARQRKDKHHMSEPPPEREMEITRSSTQNTLQTRTQRRTTHIRQQRAANTTRPAERTNPTSGNALREAVRPQTKNTNSSWRTRRQRQDNISKKTTPREWVGGKSCRQTQQTKQSYSRTNHPRVYKLRYLAWLARLALSXDGRPRQHRYTHQAWTQLEQATNTHNKICDLNLVRVIGGKYSTARAE

SEQ ID NO: 976852 - protein, 340 aa, Homo sapiens
  misc_feature (73)..(73): Xaa can be any naturally occurring amino acid
DRALGGRAGLGGQPGGPGPWMCADLRGELNVSLRMLQSPRGCDTRGRVKAWSYALMAGVTGCADLEGLEAVAXTEEDGQRRLPDELNRGGPGRINEEMRMDKYYRGSNQFYDSQVIKPRKSESGYETETLEVEQQQAYRPEMKTEMKQGGDPAASSRLQASQLEPDRQEFHESKRGLMRENRGRGYFEHREERRGRSPQPPAEEDEDDFDDSLVAIDTYNCDLRLQGGPEIGVVAMRHALRALRTCGQEAVPGMGSEGPGMRRDEDPRGAAPGEEPPGQRSREPQGGPDTRGPRPVWTRIGEETLSKGQQARGTQSHTRGGNTGKQGEHARTGRTLNGKR

SEQ ID NO: 976853 - protein, 342 aa, Homo sapiens
GLGPKFYKGSLEEQHLQTLQKLQRARGDPVLVRGGDVAWGMWQGALGLSHPFVSVKDGGWGAVYLSHSCGVLHKCLRGGLGARGPSHIGGPISYHRVCGSPEGPADVISIQRCGEWPQEKHPRGAVEHTTSGWGGQTRDECVPTRRDRDSVINAGAGSLRRTCVRNYHLRRAHISRNEEPVLRGGGMLMKTPRCCVAPAAGEVLLPQREQHAQRTRRARRAPCGVAPPEMLLLAERDVKQRGGRPKPPQYKKRRGLSLRVPNEEKRGALSLIGEKLWWGHTRTEEREPLRWAAVGGPTVGATPTKRNPSFLCRCGGHHPLFFSTGTYIKEGLHKPGGARLCA

SEQ ID NO: 976854 - protein, 174 aa, Homo sapiens
PPAQRPPRCEQILDGCAGVLPAEDPCVHHPGPWKIPQFPSVMMDVMLCWAPGEMQLYHANAWCLLWLANHVACSSAGATVAELQEVVMLPAADACASDPVMLATRVPQHERMCQPLPGTPDGFASLRLTISCGLAGFGAPLPPMVGLAPRAFPAVVLSEPMTGIHWGPHATVGV

SEQ ID NO: 976855 - protein, 256 aa, Homo sapiens
GPYTRFYRRSGWVADLRTAGLFIPSPSPRTLPFSPSLPPLTSPSGPSAPARLVFLDVACCCRRTAHCLDGLTFDDADLTTVHRPPSPPLRVLTYNFHPRRTDPDDVFGTTLTPDWHRFCGYDSVAFGLHPPYCDLRPGLTLRTTDLPFHTVHFPTHVLRVFRPFTPYHNAFTEPFDACTHLGDYPVISSDHTSYLYLVGHTPLLAPHERTPLFNDGNPPLLGHTTFPPPPYGDGPAFYQTSTGPTRHPTPTCFSPH

SEQ ID NO: 976856 - protein, 359 aa, Homo sapiens
MYYNWYYSVAECLVWLAVLMWGVLGCAVLCWALAAGPDVSLGCNGAGRALSWEECSCSNACMPVLLHTLCAVLQCDHDSTVLTFLHCGNDCLTDATMNTRCRQRCALRLLPTIGQWRNALDLNTCAALCCHDWLSSLQKHAWLTNDYQPPQQQGQERPARRRVDQPRQLFCGDTKLSGLNAFDIAEELVKTMDLPKGLHGGRWDLACTDETLLSAIAKTPCNTSTMPITGQLSAAVEKNPGVWLNTTQPCAKPSWLTDEDLRKHGKSLVQQVRNPLSEAPDGRQCWPTLDELALKRKSSGQACDEDENHEPQAPTSNTQPHPAPGTQKHTETTPPRHPRAPQRPQTQPPPPKTHNERKP

SEQ ID NO: 976857 - protein, 230 aa, Homo sapiens
HPHLITQPLYKVVLEAMAGTPKQSSPHHSGHPRAPQLPADVARATLTLLLDHLRLVSSFHAYNDDPRIGCASGLCVLPARQAPTRLVPAAPARPCQCSGLQAPHRGAGLPAESRPDPRCPTISRCRALLRPKTGTLHLPWQTRSGDSASGRGGPKAPRATLRRRLERCGRTSWPVGGIPVGPDNEHVTRRARRTRRGGGTRSRGFQENGGYPPNQELSAPVEEPDTGAHP

SEQ ID NO: 976858 - protein, 289 aa, Homo sapiens
FNRVSPSALRSNPFPFEGDDGFYVFESNAIAYYVSNEELREVLQQADRQVVQEVSLVDSDILPPASTWVCPTLGIMRPHTETWPLRMQRRDREGDFLGLLDAYSEDEDFSGGVNGVSIGCHHQYVCTLYAGSIKQVLEPSFRLAFPQYQPTWFLHLDINQVPVSRAGYGRKCTLCEKMAQFDGLTSIGRRRKLIKDTPPDKEQGHVKEKQKPKDELERSSKGRLPLGLRQRMLSVTRGRLQNPGYDPSHCPEFFGWMHKDVHDATLGGQLGINGAPAQKVLKYQRTRTI

SEQ ID NO: 976859 - protein, 107 aa, Homo sapiens
MIKLEFDAELEELTKHKCGTIIVNPNAAYDKCKDKKCGRKGLDFSDRMEKPRGQDMNLENMRCWRGSREMNGGTDYVKEYASVVAELRDHRGGPGLASGKSLRSDVR

SEQ ID NO: 976860 - protein, 145 aa, Homo sapiens
VRRIFFASPAEPDRSDSMGKVKVGVNGLWSYGRRVTRGLLLTSGKVDMLPSMTPSLNSTTWFTCSNMIPSMANSMGTVNGLKNGKLVHHREMPIHHLSRSEIPAKNQVGRCMALEYVVESSWASSPPWQNGWGSFAGGSQKGHHL

SEQ ID NO: 976861 - protein, 61 aa, Homo sapiens
MWIREAGRALDLESGNENVITHVSWYRTAKLAEQAERYDASWLQPLTGSHQRQGHELSNEA

SEQ ID NO: 976862 - protein, 132 aa, Homo sapiens
MPEMLVCRRPMKDLRLKHPMYGGRATHTGGTGPGDCKLMRVEPPEEGPSVMRLRVPAQATPHSGGGLGEDPSSRPDWEQGWMLARMAGRDLKEGRGREPQGKSEPTPGHRGGPERERNTEDAENTQPRHHKR

SEQ ID NO: 976863 - protein, 148 aa, Homo sapiens
ARAPQPLFLEVCNLAPVVDLHIGSVQDLAYVLGCGLDAAVPQWTHCASPHDGRKWAPPGQAAQCACGARGRGGGSREHGGAVEGVTGFGVCKRFSCLSLAAGFGSGVSAGYALSVLPVWPRVGWHCCDPILNLLKDDPDLSPIVHIEE

SEQ ID NO: 976864 - protein, 351 aa, Homo sapiens
AAGTLYTYPETLEGLQGSHRCSVQRGSGPRALRSTPLPFRPNQPHPWNFIREISVPAKGHQTIMQGVHSMCIRSDDVCQQHNCPICAHIIVQPHCRQLAGHSQSKQASKPQSGSQLGAALCCIPDLVPPDQYLGVPHLGHHATQQTGQLSTAQEEVRRILGLLDAYYEDEDINWMGERVKIGLTSQIVWPLYVDLISKVLEPSFRQAFPNNNAGFLTCINKPSSGRLGGTWNCVRQLDSKTLQTMQKTQTTPDNTTDRDGTRQENQNARANATRKQGADTETRTRNGRKATGESEDTRARNHGPVQQQQAENTRTTTRARRGQAPGNSKTRTRQQKPTKQIREREQQTRTH

SEQ ID NO: 976865 - protein, 300 aa, Homo sapiens
MAQKMDCGAGLLRGSRLRPPYKTKRLVICRRLMEAIQISEGPPTNQAHRRCCPQSSQCPTANEMADIQVFMQLPLGAKSAFKVQNAISKMAHVVSMITLRLINAKDVPNTQRKVALSAKMLPKGSKCCYDFFPGQQSLGELAAKKSEMCFNGPECHYVKCAHIATYNFSQSLNANDLVNQEGKGPLITVGMIPLKARAVDNPEPECQFRGKWDFQGDLENDHVFLAGGELSDLGDGPGQNWGPDMIVQNRRLYLMWDSEGTKGHCSGRDGMSPPNRVAKCDTKVDRREKRAQYLFPELGV

SEQ ID NO: 976866 - protein, 133 aa, Homo sapiens
MKSTMQPKAWWIGKAIAVLTSGGDAQGMNAAVRAVVRVGIFTVPVSSYVHEGYQGLVDGGDHIKEATWAQRNDDASDWAGTDDWKCPVQGHFGNEQGRIRACYNLCERVGSPISVVIWRSDGSLTGVLTPYQF

SEQ ID NO: 976867 - protein, 43 aa, Homo sapiens
MGGPSGDGTTNGLAPGTRVYAHRRGRRNPNESTVHVFSFGTPW

SEQ ID NO: 976868 - protein, 428 aa, Homo sapiens
AWQQGPRHGAMGSSSQAGCCPRLLPVVTPCPVVPSHNHPGFMPRVLLWLPVWHASWVCSLVLGLLLVCAGDGKLCLVPSGPHVAWQVLAWCDAKCPSNCAVPKPGDRLKHGPWVPLAGPMGPTEHGLGLKVLGALLLAISLAFCWAHVTGPCSLGGCLSVACPDVQCLQGATRRTIPDGNGTIPCDYMPPFNGPVVGDLGLNPCLDRVILTTGMSSKHHKLRDWPFHLASNADDPDRTGPLPWLNLQLLAYWHLDHTCMGLEEWGPSNPVEPSIVHSVGGAFLPFKIYRRPPVNGQNWPKQQGTRRSKATTRAPELRPDHSVTITSGTGFPSSEHWLVRDIPHFDLAYTACQGGQTPEKHLDRPSAEHFRPPSTAFDATIKRRNLGSRTKRHAPSLECLCLSHEAHSPTGPDYASHWHYDSTGLTIVA

SEQ ID NO: 976869 - protein, 165 aa, Homo sapiens
ESAGLMHRSSPVTLTSDLEKKRRGVNWELGGYACLCCAGDAGTPGLRTFTSQEASRATGRAAEPIRQCECWHPACSCILSELAFASLSLYGISCGTMSIWPSTIRTPLEMLCHDPCACHGIKPRQRQGSQRSNPRDTFKLQNTQLDEGPGRIEDPLSHTCIKVEL

SEQ ID NO: 976870 - protein, 168 aa, Homo sapiens
GDSLQQRRGSCAEPCGLTVLEPGVPCRMEHALCPFPKTSPAVGTVGLRYVAYNIHVNGVLTVWVSYSQFLGLYEQVGLASLTLRQLQVPSLARVTSVSPFTLLYLVPVGCSSPLITARGSARPIAWEQETFNSIPASGTNMETQQVPTEGTCPWKVCSAKGRKFWSKC

SEQ ID NO: 976871 - protein, 257 aa, Homo sapiens
CHGKIQGLKVALPVSLTVSGVLKSHQANSNYAERCKVKYFFMGILLWSSLEPVLCPDDLKANCAHEKQEPSGSCIAFLTNGVYSSVYVTYVCCWWVVKPFGTGKSFNPSDGLTNTVAVINQCKENMRITIVAKPIPGESKNLSESDNGASGTYPRESIMADIWFRADIAKNKHRRPTVSQNNPARFMQGPIKPKHHEEGKTVRHMCAHARRMASRREIEDNQHREQRPYRYQLLNTSQVPDKNLVQTKKRIRTTASE

SEQ ID NO: 976872 - protein, 79 aa, Homo sapiens
HSSVRYGRGDASGKNAADGCAGRAPGPCSNLYWVGDGGPWNSPTFVEIVIRLVNLRREYVSHPLWVLREFNPLMCFHSS

SEQ ID NO: 976873 - protein, 231 aa, Homo sapiens
LTRVWRRRRVWVPYGASCTILSWVSKRAPLTRWLQMWKSGNYTGYELWKGLGSSLENPEPRTRARRNPALSTGATPLVAPCSMEKGWYWRVTNYDCRSLDCWAQWKTCFVFYENRRGRTIVCDSPSVLRGLTGLQPVCGLPQGWLLTVAYKAIFQGSCMLQSLPRVDRHLQFYNIITEFYAEPGKKSKNELRSLTSALRVIQVMDGDAGCPVSSGGLPPRPDLITAHYIRN

SEQ ID NO: 976874 - protein, 123 aa, Homo sapiens
MSAEAINDSSSTLAETNRAPFDLAEGESELVSGFTIEYAAGPVLLLCFIANTLNIDYNKLALTITNLPSEQSCDSMSPPENLASTLYCQAKEAYVCVTVPVLYEFEAGVYPDVRIPMQVIELL

SEQ ID NO: 976875 - protein, 189 aa, Homo sapiens
LLWWASIFLRSAWARLLGLEEASLFSLGGSIAHVTRGCPGRRGWACCCPASVGRCVYVLSPYRWKAGFPARKSLASPWYFKIADVERKNKARLPDEMRSCRPWVVRAVVSSCLALVKRLPGLQAPEQCVLATMASVAWVAVASVLDVLRSGVRSAASICFSAFVRLSIDQSLCVVTVSLWTRFTVEGFG

SEQ ID NO: 976876 - protein, 242 aa, Homo sapiens
MQWAVGRRCGRGPLLLLAVAGGADPEWSSGSGWVIAELLSSSAEDDSAAGCGRYAGSWTTSWAFSRLIVELRRLHPGHVLPDEELQCGVREMRGGCGWAPLCLLHASACPEVATGGCRISDIHLISGTRSTMWREGTIKSEVFYPGGDWKYNVRPGEAKRLCECGGQTHGWCNNGRGINRNTIQVFDDAPMMVITEPKENPSNPALEYSLDNRNDLGSAPHALVETATQASSLDCYDKGNSY

SEQ ID NO: 976877 - protein, 251 aa, Homo sapiens
GGLVVGAEWCRAGPSLGRCGRVVVPGGVRCLGWTCGDGLHRERRVTMAGGERSKMICKNLREDGEKAARECAGESGKSTIVYADEDHPRRDVSISEEECRRYRAVVYINSIQSIMAIVKAMGTADRLCRALQSGRRQASYLHCPAPRGAMACSLMTCPASSGGSGLDHGVQACFGRSREYQLNDSAATPERLERIAQSDYIPTQKMCYGPGEDTGIVETHFSFMTYTSRCLMWVVTRSEAERSGSKVMEGR

SEQ ID NO: 976878 - protein, 175 aa, Homo sapiens
  misc_feature (28)..(28): Xaa can be any naturally occurring amino acid
  misc_feature (46)..(46): Xaa can be any naturally occurring amino acid
YPPTSGTEQESVSGNRMNGDQNSDVYAXEKAKDFPVHKRSLPPTGXSRLRGDGAWNPWNGATLERNLGGWPNTPKGNRKLNRRNGNLGRPYKFFAAPHPVVALSPKNGGHKGRIHPHVWGPKDFIRPNNIGRPPNSCGGQRAAAKNGLSNSKKPSRWERGLYSHQGKNNRGGEIV

SEQ ID NO: 976879 - protein, 92 aa, Homo sapiens
APMYLVSCLLLALKPVAPLRCRANHSSLMDPDETKTTYVKHVELICLMQQVNARDLPPERQSDTDIVDEAIYNVSRTEVVFIQGTMKFKNES

SEQ ID NO: 976880 - protein, 337 aa, Homo sapiens
MCNRDPVVLLLSPSTPNPLAHYAVMCISHRTWARAGVQHWQCLRGAQVAGNTASSPMVRCQGEKDSLGEEMHALQQTFFERDWAAWQCNCVPVGVCMVTTSGTSQGPFDEGSATGPYPPAASIPLETGVITRQRTDACRVHRMPDGRLAAMGPGASVALVSAPQVLPLSGPVPRSPRASRFTTRLRWREPVLGFSSLPPAGRLSGWTYGYAVPRLELLHYPCRPGFHSCTCAYNSMRNTQQAMEHSACASGRQRSHYEIGAEPEMSANLTNLTPSSQTGPHRLRIETSCDRRSTTAPPAHPDNALLLHPTPSDPPVPRSPDRGGGPPPNSCVHPGRT

SEQ ID NO: 976881 - protein, 315 aa, Homo sapiens
MLQPLHPHLLLHTQALTHPHTAPKRKRASTSLATINTPTPPHHRREHSARALPAGPQLHNARTNTTPHPPRPNPSPTPPSASPPSPAPPPPPTHLTPHQPRAHPPPRPPPPHHPAPSRHSPAQHTRRPPHPPPPPCTTPNTPNHNPHIPHTATRPPPPTHPPPPRPPPHPPPPPPPPPPHRPPVHTPPPTPNSRPQLRPTLTAHHATPPLPTPPLNTTTPPHSPPPPPQTPPLPTPPPHAPPHPSPPPSTLSHTIQPPPPSPPLPPPPSSPSFHTPPLLTTTTTTSINTLHPSSTPSSQQLTFYAPSTHHTPPHP

SEQ ID NO: 976882 - protein, 429 aa, Homo sapiens
  misc_feature (254)..(254): Xaa can be any naturally occurring amino acid
  misc_feature (410)..(410): Xaa can be any naturally occurring amino acid
MTDVTGQPTRATAWRTLDRGKVLVGRAEAFGLSRHAITDHATRDYVTTTPLTFFSGERRLRFTLNGPKCTGVPWRASPWELPRWGLCAGRHPAFGPEPSTKLGRTNGPRAKPYPTLAGTAAPASMRALGARRKRNLRSVCPTLPLAPRGRTAPFTFAHLARGKQAFAHWEGPRHCTYSRSPQGTTLGRVAAGGTRPGGLNHGCAPAHRTVAWCSSLQPYWAVPWEEPLARPQTANTGYPRRLQAGHPAHSPSFXSPVRTDTTSGPPTRTGGIRAVTPAAARDTIPLYAQPDISSAVTHSHRLTTQIPLNLISPPHYPTLHHSPLPHLQPTTVPRPYTNSAHPPLPAQLHPINPPSLHHYYTFPTRLITLNPESYPLHYPSSTTTAVIMLPPSPTNLCPITSARHPFTRIXHTLHYRRRTITLICRLLYS

SEQ ID NO: 976883 - protein, 512 aa, Homo sapiens
VKEPQCNFNDLRPVTKGRTDQWAVVGDSQSNPQGRPVVCFTTVEQRGEVVVGETPWVDLSVDSLLHVQSPLQASTAHSRRRPTRAAHSVGAAPRSAQHTAPVHDTTHTRHALTRSGDALAQLTRALTCRRYPSSADSPPTPTPPWRPTNSTRPPIATPKPRDHAPHGDPTTGSPHTLRTRRKCNLTASANNTPHSHKMPPLLTEPQRRHNATAQRQPTTQHPPALANITTRTRPASTPPPPPPNRHPHPTTPPLTTCAPTPTRPTRPPRHPQTPRPPRTPHTRHAEPSDTPPPTHQRGTLRPQPTTAHLDPPHHPAPTTLPPSPQHPSLKHTTTVPTHHTPNGTHLYTTHSLSTHTHTPHHTHITHPQPSTHHPPHPTTPSPTPHPRYPPQKPPTTHHQTLSIPPPHPPTPTTSPHTPHTLPPNPPTTNPHHPRFPHLSASHPTHTPFPDPQISQHHLPPTTSTTLIPPYSDHAFTSSQPIPSIYNILHTIPTHPSPHHVSTLLHTPDLPST

SEQ ID NO: 976884 - protein, 354 aa, Homo sapiens
ARYPMDSLYVGDCDSDVSDAEQSEKFNPAEVCCCAIRVLAADVITPRDSLGYAYVNCPGDGRRLSRSLDSHELLTVIKGTGQMPSLMWVSDGIPSWRRTLDVGNVLHHRNPGYIYKIHTAPYIDTRCASGPILSWKVVCDENGLRVDASCPRSRAPVTGCRMRTIDERTHMGECSVNDPGSQFEAQESTSVVHMAGIADAWYPKGIGYSAQLLNTRERLGLTEVTADQCGACTSAGKSGNTPVALASDWGKPNRDQLTGEQDMLRSATVAAGTVRCQSCGHNSKVERMVGVALTDCNARLTLSQTTRHTTNLSIERTNFFQNFSLVRDCHNSIHATTILDSCLHHSYNFPPRFP

SEQ ID NO: 976885 - protein, 208 aa, Homo sapiens
MDIVAINDPFIDLNYMVYMFQYDSTHGKFHGTVQAELTGSLSSVEIPFIIFQERDPSKIKWGDAGRCRYVVEVHWTSSAAWRRVGLIRRGGAMKGLSSLPPLCDAPMFVDGVCTMRSMTNRLKISQECLLEAINMSLATPEQWSVHDNFGIVEGLMSTVHGISDIQKTVDGPSGKLWRDGAGLSRTSSLSSTGAARSVGKVIPELTGR

SEQ ID NO: 976886 - protein, 215 aa, Homo sapiens
MPNEDQNENNEAKCLGAQRRPLGAPVAPGSTCEEPESILAAWRMRRLAPELFFVVQDSANFSLGTDLRKSQVGYSVKQLSCYRALNGDTNGLFTDTFGCTVGNSCWKSPCRESSHCHYWNMSPGQADWGSDCTRKTRGQNSGIRNCSTYPMQVKTLFEASFRNSVSPVRLRKEPLIGTHHIITSIQGIRPKYQLPGGLTANSDLPNPYKGIEPAK

SEQ ID NO: 976887 - protein, 376 aa, Homo sapiens
WVLMCLCAVLSELLDPCAARAPCAAHADVCVLCVVPAVLCACVLLPCLCVCEPTSLPPWATLQWLPDTYPSADCLDDEMSSNKEQLVSSVRDPLFALITILILYSSNSANECLPLLCSLLGPCLPDLVNLNEVEHHCLAMSPFSGNNDTAPLGATMCVIVSSSSHLLGTKLGPEIERAECTIRMNDAPTTGYSAGLWATMTTYRVVDHSSVYRVLSEAQEFVKRTLKRCHLLGAPEQRCRSARASSYSVIQRAGPGVPRNWKHIPVFSPDACCNWRPLPGVETGHDHATKFHTVVEHHVVVTMMIQWKLEVPRCKVIGVGPPKKGSQDGPLHVGRTSAPTVLSNVPFRMSTQDNAEYEVLSGTGRVHTLVTAVSPM

SEQ ID NO: 976888 - protein, 135 aa, Homo sapiens
MSSRPFQSRGFQEHPKEAPERAHVSHATFKTGQQRASTTRHTENTHNKPTNTPQDERHPTDQKPSEEARGHNNTRVVNQRTRGAPLVAPTHRAAIPDRTDTPPRPCGTTNAPATNYERTDTSHHKATARHIHTAR

SEQ ID NO: 976889 - protein, 66 aa, Homo sapiens
MRTNHRSKTDRQRQAKYRPPTKRGYYVTPHRTPRQHHTQVQLTAKEPPQPSAKLYTDSGTAYERKR

SEQ ID NO: 976890 - protein, 456 aa, Homo sapiens
MADFESYDDRAYEELSACGRGSRRLVRGGLVVPDSPEKDVGPHEPPVHSIRTEIYLSIRFRATLSMRIFEGSLSHYRECYGLGQSSNRTQINVKGLLLMIELRLKVAFRVNGRPCTVADGALVGADSVYYRWWTSCTIGEENHSTTTVRFCEFTKQVRPTIAQKEIAVDSSDEFYGRVDSWHSPQWDRTYKLLAVHERISTLPCTGRAAHGAKVYRYGANRRMPQRKTQGAPPPTSATPALPPHSNPAHTPRSQVGRHPHTNCDFPPTEHPKTTTERDTHEGPQGTTRPTHPHGSHTPRKQVRRNAPHQTQRVPHSNPNIRGTHQPGAVAPPGHTTQGTTPGTNHTDRTRTMTAPVPAKDARATWRPRRRAQPKPSTPHNTTEAQSQRARRNQDPPRNYAAPPAQPNNRPGTNRIRQNSKNGYTHAAQPHIETKAQTKDARHEPTATHTPPPNSTL

SEQ ID NO: 976891 - protein, 453 aa, Homo sapiens
GTPSLRFQSFFPLPVSPCTCQLLECVLDASRPCQLCCLRPVLGRQGRRSARASSTGQTPIVRLTGRGGEELSVLSLILVLLLHISLHPKYRLRMYGDIGGERMLDNAVLVMCQMRSDGHSLNVPRILSLVHHKMKSTTAVSFTPPPENECDMLHLAWTLRLQAGLDVQARRTRQETTRGTRRTDALEQPACAGTRAPTPRSAERASTAQAARQRPHKPHFARHAHERHATHAQRTQHGTLQAPGRTPAAVHTLWRTCAKRQGAEKGADTTGTADDRQRTPRDAAAHRSTVPEALKRAPLGQTAERHNYMQTRTPRYRDPGTRSGHNTRAHTATLPGLLLITRTRSPHGNNSELTRTQRGHSAVTPLQGDRPGPPGDRRTTTHARPQPRALPARRTTRHVSRGTPVSRSTKQCAEHSHHSYRLRYSEHHQSATTRMTPQQKRTKPPNPATNNSR

SEQ ID NO: 976892 - protein, 98 aa, Homo sapiens
  misc_feature (98)..(98): Xaa can be any naturally occurring amino acid
METPSAPKTRSGTKLSLRNFDPETSRKGQEADPNQAWRKHAAGAPPKSQGDRRTTPGAGGEDRPARRDPRAGPLGTKQSDPRAGKENIGADSTMQPVX

SEQ ID NO: 976893 - protein, 193 aa, Homo sapiens
GFGSYPSWCMLRKIKMMLTEHKRLLKTVDKGLQVATGSRSLKKEGPGCDSGRIRIREDTTVKERNRKQLEKEGKGYKLYEEDDPERVQSKLYLNRQVKLLAELEIDEERARSRRDALTGPDQGQTEIEAHETARWDKREWPDKQLVRNSRNGRVVQLAKLRRSITERGAKDEDTLGNFLIARRVNMEQCEVTA

SEQ ID NO: 976894 - protein, 139 aa, Homo sapiens
  misc_feature (93)..(93): Xaa can be any naturally occurring amino acid
RIKRVEPEKLNAGRRCQQGNFAEWSRVLWGLMTNVCFPFERKIRGLFPREEAVRVLQHRMTDHGFALGQLAFLGGRRREDCAEHMNEQQRFSXQDLSYYWHRYLSGQAECNGELSRLTNRLAFKHNQKRNIVYDATHRC

SEQ ID NO: 976895 - protein, 281 aa, Homo sapiens
AHGLGDLSEPAADGHARPTPASIMRATLLCPCMAMHHRQSDWRRSGITDMTQRFTSIRSDPDRDVGGSVEDLIAKGTLSHEVTHQGEVTITDEPMEAQFSRRVSSMNYRWTAQYNGEIWHRGRLSYSVFNSRLLIRGSPANLMGSPTNPSDKASVEHEALLGIRLTKLQTVDNVQSPTCNEWYLRYDIQLWLGQASPGTVSQDTVSGAPASQRRQASAPGDGVKRGTRHGLCTQGQPSTQGITFTRNHSSTTILGTEQPTSIYAQQTCWPGLRRTLMNARR

SEQ ID NO: 976896 - protein, 158 aa, Homo sapiens
MGESEEMYALKRVLRVLHAACACCVLAKCPSKKDHRREEKGSSPEGSLAQKARAKKEQAWPPKAQRGQKAPAQKSTCSKGLLGRSIGGAHNKVLGVFWAGLKTTKHKKTRGHTNAGGGTQRVIANRPMVHSVFLAPVFFVPGGNRGPLKGDRKSKAGT

SEQ ID NO: 976897 - protein, 265 aa, Homo sapiens
RAQWSLERRLLGCEVREVREAGGNLDPARTHGCPVCLSGPVLACLDWMLCVLLCALPLPAQANMQNVFCTKTSDTVCDSCEDSTYTQLWNWVPECLSCGSRCSSDQVETQACTREQNLHLHLQCPGWYCALSKQEGCLVCAPVAQVPAGLRRWPDQELKHQTWCAKPLCPGDCSPTRVHPRIFAVATDLNVVDIPGNCKHWDAVCTSTYHHLEYGPVVQYTYAVSVTRSQHTQTVQKPAVVQELLLLQWAQTPAEGAWGIDLQLD

SEQ ID NO: 976898 - protein, 139 aa, Homo sapiens
  misc_feature (137)..(137): Xaa can be any naturally occurring amino acid
MLTAATPRMVYRHRWRTHHTAGCQPKARTRGGGDSQPCTHWSTKNANEGQTHQRDHHEKTPARNHRSTQKAHTKHDEAHISGHRERGHHTKANPHRRVYCVEEDTTSRNKPQMRQSHQRNLISRGADNETKEQPAKXIH

SEQ ID NO: 976899 - protein, 326 aa, Homo sapiens
VRDGGGVRGRFWSGGARGSRTVWRTTSRELCGVEDDFHKQFAAELEVLAELEVWLSTPSPSGGPPVHLLGLTPVDCSEDGPCQEGDAGRPSPAPACILCGKHASGWLPCGMTGLLCDCLTLHAVLGPCPHAAHVIKTVLSVACCWSKMCLNLQVSEEIGWSPPLPCFLRRRDINRAQSLKDSQSFWGPPESQNACCCRGSHTGLKQLPESQSDGVPPSLEDYSTVTFNGRTSGAYLGACGDGPYVSPGVAGTLSYTSIARLVPRLNWLGWVFSLPEEEVDGKTAEPRVKEARRLRHVNSSGVDEEAHLGAYENDDAEDTTGVVSDA

SEQ ID NO: 976900 - protein, 138 aa, Homo sapiens
NPSLDLLRSKPNLNPPPMYTGGQGKKEKCPESQSWKPPVLAPPQLIARDWVLVFTIWSLVGWGVRDVETLCRRLLGGARSHLTPLGKMSQRESGEKGHLSGHGVLEDSWLVPKDTHRGQQAGVTTSIPKVNTAVQSQG

SEQ ID NO: 976901 - protein, 310 aa, Homo sapiens
ADLQAASVTGLYWKLLPGAGCCPRGAGDPWGGVAVGWRWWGDAELVLLAEKLTGAQAEACWSSRLVPGPASLRHHNRTMFPVPPTCTAPTPGQPARCCWGWFFEEFRPRVKLLLRRKLAWSTKGRCLVVGTPCLPRRRLPWYARFGYATDAPRAVQAGALWSPCEALADTVLVLCGLCPCPRGSTRGPYPAAVEQSCCCLPFKHACTSGKLVRTAVGVLAAVDSRGLDFQCGQFTASSVLSPISWLAFPWNRGRTRGRTSHVYHDGPGLLRPAPLRQCGTRRPRNREQKVYDLTPGLQHSDQSAMLLNRP

SEQ ID NO: 976902 - protein, 424 aa, Homo sapiens
MACCLPEFCLCPAGVPARSLAVLCAVRLTCWACGPLCLWPHWIYCHSVICPPASPWQTLGVLLTMLATTPNDPICPAADAATTACSCRHNLEATLDLPSGLAALGIVRSSPKTSISTKHALGPRSHTTHRANSHVNIDYTPTARLTTTLLPSGPTRTFTPLTPSVIQVGTTRYGACRTSTIHTGRWPAPTRFSPGASAALDRSTAPPATHCHLLTPVLRPGSAFGPRIRCLPISRPPWTPPPARPNSSRCVPLPPPLSLGRFAHHLDLHCGSQGTLPVGIPQQNRNSTVDVSKSAHTVGNALARTRAFPPRQFWHPASHALARHEGPQEPSPAFKQDRADHTVYTPARREATPPTREHTDTAHPTRTDTHHTAAPQDADPTRDHSTPTRNTRTHPRSSPPHAPPPHSATGPPTPHLLLPQHPPP

SEQ ID NO: 976903 - protein, 344 aa, Homo sapiens
GGALPPAKRAKKPEEASESSVRRDLESEDGGPMQGHEAMVNVPLKKFSSVMSCLMPTANGDPCGNGGYPEHPTAECAGACKPHHDTMCSGEPAARTHDDARHARDVIIDKVRDGELPTLPNWPLAFQGLEWASSEKNPSSSVSDACASMTTPWHKSGQVPRTSVENLGHALPPDAAHPLLGDTTTGGPLAKVRPHLGPKAVRTPPGAGARGPIGTRKALGPSRERSTPRRATGDSERRQGTGPMRTNVTATPPIRPRTTRGPTPRKGFPTKRRGPHRGAARCATTTGRSRPPHGGTPGSAVRPTANALHTITNDTQGGAIGNHGATKETPQGRRKETSEEHGGE

SEQ ID NO: 976904 - protein, 507 aa, Homo sapiens
MGHTLYGTAVANAAASQTPKRSSGHLGLSHHATVRRQVACQPHANAKANPKARMAQQLVRHPNSSSMSSQQQAFIKSTQAAPHFTCCTNKHHISIACAHLHKPSTTAKHTSNPQAAFIFVNQLMRPHLSKVATAPSMYPGNQTAPDGAKTTKDGAKQAQKRLTHKQNRKHMKYTLKEHLKDKLDHIRRQTNHTTPLGSHTYGPTQHLDITPRTAPPPPRPRAQHTTQHNSLTHYVGLSHTHTDHTKTRSRQAMDNHSNTHHQGPTDGNPAMLQHRETPQALDYTPHKLTQLKSRQQPPKQTKQTNDSEHTPNQEEHAYPPRQQPYATALYTHTTPLDGTTTTNTINTARHSRTHKEQEKHSAHKRHTTTTRYTTIDTTQRKPKQRKNFNLPIRSHHTTSHSNSSTYYSHYSLLLIERPFTTDTYYLKLSTLTHITYTSLPSILCKYSIYIIQTKYKLNTIKKTTLSIYSLHSTSSFNIYNVNHYTTAVYNTHTNKYTTCISSNKSTQ

SEQ ID NO: 976905 - protein, 334 aa, Homo sapiens
AGCEPPPSRAARNGNGVNGRPCRPVPRGSAMLIKRNSLSTHLEAEKPLSALWGGGGRRLGKRRDWGEITLDIISMAETTMTARRRLELEMAHKLQRLREVSVRRESELRFMLCNLAQTILPSLSLGGLICENSHASTYLAGLVMRSKQEIKRITVLSPVPATTMDDIQLCQDIMDLKQELQNLRRHPKTKRNHHTAEADETDELNPARLTTLVQTTRLPGGRLRQVERTREQAEHQDKADTLRHSQHPKTTPIPARPAAQPNPTSNPRATGRHAKDCGGTPRGPSRRNRSLPRERARTEQTQRGRNPERKKNKHKEARQQKDKNTGKAQRQKTE

SEQ ID NO: 976906 - protein, 460 aa, Homo sapiens
MPCAPSRNGMVLKPHFHNGLAAGAVATWFNQPGPEDPADCKALAMPMARRICPAPHAYGVPITVPIVAACPTGSVYQTLNVLLLPGAAWHSSPVMDAQGLCLAYHNECVGTCDPSAHITMCDPDVMCCETNVTNCEVHLAMCQTSAKRCSEQGMYPATQYLQYHHIHTNVKWPLRYRQSNGEHMFLCFECNLENIVPTPSLTRAPVFHDTGPVNTALLHDRTKRIDVIHLDGKKNATFKRLQLDLTYGPVAKRPGSIGHNGPQMTQWTAAGPKDCLHPDSNKRPSLLDLANSRPATQCLGITPRRCSYRRTQLGPGDSAPTMMLTYSYQEHKATILDTNSPGPGTTANHPCVHHDSMAPKQRSTRATQETAHPQGGPHTDTTLLTTKRTGAQMVQHANTPTTVVAPNSANPSNHTMTRPCNPTQLCTATTRSQEPSTTTKYHISIITRHNPSHKQPTQHH

SEQ ID NO: 976907 - protein, 425 aa, Homo sapiens
GRFSRLENRYEALAKQVASEMRFCAWTSVLLPCEHGECLQWLWMLLVLLLSAACCGVWPCAPCDMPGALALLCVCVLLPCVTACCPPICPGVPCPLPSCHHGLECWMLGWMPWSHVPCQGSAVHRVLALSGLGGLLSLHMPLPLAFNLHPCIRRVTLVDPPVHAVACGTVRVGTHRWRRARCRMQPWFRPWSEGFAGSCTDQFGGVLPVGCHSAPCGRSWDGRRGGDWTGGTLGRPPRCCGGAAASGGRIYNRLSPFIARGPGPPEVIEVALAAGPSYGEPTSVTALRRLRQGAGLLESMRTQILASSEISIYHDTPLRTLNYAGSATGSHILSGTCDIWGLRAPTTDNERGDCRDPQKSGTKLDRAGKLRKDEKRAEAYDRTTGTPTDRTPERSPNDAKAHTMTQQIPTTHSSMRHNIQKKNDE

SEQ ID NO: 976908 - protein, 54 aa, Homo sapiens
  misc_feature (48)..(48): Xaa can be any naturally occurring amino acid
MITNVRQPGQNHYGSIGTRAHHTKEYAPNGPRSTTGGAALETETRSRXSTTRRA

SEQ ID NO: 976909 - protein, 71 aa, Homo sapiens
MSKSAAQNHSPPNELLQRYRTILRQVAKRESLPGAPEDKRPTHGASKTDTHETPEEPLDARHHTHRFTRRN

SEQ ID NO: 976910 - protein, 162 aa, Homo sapiens
YRGVPEFIGGTPDEGPAPRKKVCWGLWVGEAVVLWLTAQDPGGQRELDLGVVELLDSRPGALCVAGISFHLSVTLKWSVGLGRGCRDTHVFLDSTWVSPGALWRVVSGLRGVFPRCHLCVVWVCRLSRGVSIGAEPRFRESFFHRGEGGEILLKNTPVAPRV

SEQ ID NO: 976911 - protein, 112 aa, Homo sapiens
MARSTTFVTIKGTPYNPLESPVLVSYRKAISAYSLQAKLALGPYCLNLVTFTGRANLTSLHPKLGKRHPKQVSNQLNLPLYHCDSSSQIPNSTEYSKKSLVALNPSPRFPTF

SEQ ID NO: 976912 - protein, 237 aa, Homo sapiens
  misc_feature (32)..(32): Xaa can be any naturally occurring amino acid
  misc_feature (90)..(90): Xaa can be any naturally occurring amino acid
  misc_feature (93)..(93): Xaa can be any naturally occurring amino acid
  misc_feature (190)..(190): Xaa can be any naturally occurring amino acid
  misc_feature (232)..(232): Xaa can be any naturally occurring amino acid
MAGQPLRTGRLCRQHGSHVSYRTGRCTRVLLXTTRQSSAITKGTTSETGASGVPRGTSDVLRRVLCDIGPLPKGFPVLSARRHGSRSCQXAFXSGFVPRNPSGFRGSKIPGVLLGPNGGFIPPSWCEAVCIPHIPGCRTREKVSPGFPGKEEQRLVLLQQTECFGGRLYHAESASRHSTSSLESHSYNCXIRLGESSVYSSTVTTISSLLTSRGGSSLIRLHYQSSVSQSEXLLDLG

SEQ ID NO: 976913 - protein, 395 aa, Homo sapiens
RLRRRRPQTFVPGPSSPPFATTARRESLQVAPVRQCPRSKSEARRMLRYFAVHGRLGRHGLQPPWAHRHIGTAKSGTEHLRPCLSCGRSRSLNVHYPSGHGWHHQTIYGLVVGSTVIANSLTDDISLYKSFLQLGAGLRRGPDADLAARLCHRPSWRDRWRAGHLHHKPRLLRAAMILILIFSESARAYYGLIRSDLTLYHTAGPSSEPPANRNIMYRPPHSSVQNEQSCHIRHGAADPSKVALAPLRQCTKLASRLGTQEQGHRPGEETETHGSTKATQEHRRTKNERENRATTLSNETQQKIQKNRTTNTHQRPPPPLTTPTQNTDPTTHTQIPNPINTKNKHSTNPATTYDNITQQPQLTLHHIRSRTELSLLFSTTRTPDKPTHADRTRTT

SEQ ID NO: 976914 - protein, 302 aa, Homo sapiens
DRRGFMHRKSPGTLTADLEKKSPRRNGSKGVSSLCAAGCRSPPVLRDFTSHEASLATGSAASLLEGEAGPACLLWARIAGRLYGIHGQCLLHSPRGILGMLAGSGCLVVERRVPEIPASLRPTVVRGESCNVKCFARGAHFRMEIGRPGQFSEPYHYGANGSACSAMVSGRFLALFCLLLGSLGSLCFLFTIYWVPYRGRGGFAWNWLHLLVLWLPGLLACGLGQSHGLCVHGWNRSAADLGRGPNVRKGFDDMLHDFARGGACPVSHLRGRSLLLLRFLVLASRPRATPGRARNSLPPFRC

SEQ ID NO: 976915 - protein, 65 aa, Homo sapiens
MTTDICQIGWKHRIARRAAVWRICTGVSTNRTAQEATISPHALSADEPAEHIGGTRNLTIASEQD

SEQ ID NO: 976916 - protein, 133 aa, Homo sapiens
APRRRPAAVEAGPEDRRLRARRNPEGWFRETCSCGRQALSLRWTGVHHGARSYQDNPRSSGVWTYGKRACVLDRVSSSARRETSSPTMEMIAQPASLQQPKPRKVLESSGAEMEVSWGGGEAPLTVEMRESTC

SEQ ID NO: 976917 - protein, 101 aa, Homo sapiens
ASFGEMSLKASEGESGGSMQQRGSPSLYRWSDCCRKRVGPEAVSHPFEYCDRWTCITNWVSVPQVARCQGHRDRRCGKCDSYSSEKVTEEAMGITLKLNEK

SEQ ID NO: 976918 - protein, 328 aa, Homo sapiens
  misc_feature (18)..(18): Xaa can be any naturally occurring amino acid
  misc_feature (30)..(30): Xaa can be any naturally occurring amino acid
  misc_feature (39)..(39): Xaa can be any naturally occurring amino acid
  misc_feature (46)..(46): Xaa can be any naturally occurring amino acid
MQALRIRPREASTGAAEXCAQVEVVRPGTXVDGFLPGEXWSLSYGXERYTCVFITVARNSREHDQDRDAHIWGGSNELYVLKGSMQMTRRECDPKQQQDQIEHGLLMYPENCIRRKMVIQNRLPYEMYFRMVMAIIWIEYSLAKQQFLSMGLSQGPRNDHVVEDVGPEVTPYRYSTQDVINCRMNLCATAERKSPFKGFGDDTSKDPKEDYQDQNGKSGPNVGISKGELESEPGISELEGDMRDISEGPRSKRGPGQKIRGKEDPENKTGRLDTMGKKGGTMRNNDRTNTQNKGTQGVTTLNSMRQKARAYTREQRGKEKSDIVPLLA

SEQ ID NO: 976919 - protein, 261 aa, Homo sapiens
GYGSTLIFPYTRTCGWGLRFSHNSKNTKIGGHLFKEFENGSTKKTLHNIKKWNTFTGVKCKPLLQLQASNSPTGVRAKDISYERKRGSYGWDFSNHVTDPQDKTTGFWPASREIPEHSALTRKYPATDQRLAGPHRLTKPQILSSTSTFLPLATKVTKPHVLRVDLKDLSGAIKQIPGGTSLHFNTGVKHQQPSSTTQLLISDTSLQGQISSSKAYPSFREASMRVCAIGQREILFSITMRNANASENGKNIAGREGANWN

SEQ ID NO: 976920 - protein, 105 aa, Homo sapiens
MGRDAISSCYPKSVKLRKRGQATRVRPPGNGASAGSSRPEMNDRLMKHRITAPASSRTEASQLIVRRPEAVIPRMSKEALCTENRGRWYFEHREDGGALCSVSLL

SEQ ID NO: 976921 - protein, 168 aa, Homo sapiens
  misc_feature (151)..(151): Xaa can be any naturally occurring amino acid
GVCPSMGALLSRCRSYGERLSRDVMRSHSEGLSCVAVTVKLFCSSHKGSPPLARTDNAQLRLGLHRAKGQHGFNSSFIVRDYRWFSAVSVTKTASSNHVKGCTSLQANVLSIMARKATLIRYGFRYAGSLRCDIAQRDAYATGGALIISLXTSYSVSAIDTIAKYKYV

SEQ ID NO: 976922 - protein, 430 aa, Homo sapiens
LGPSARPEAGQSCEPSRPVSPAVAAFASETAAAEPGAGERARTRQAQSQPQPQAYVPHPRTGQVAVAQTRKGGGLKSRSLATARLASLCDAVSEFFEGTYLNIAFTVTAKIGATCVDLVELDPLAAGASCGVDASHYGHTQHCDGPLGSEASPTRLCRTAGGTTMDLRRAILDEGTVAWALGPRSRHVVSAWEGHRAGCNALCQDQRGGKMRVQGMILPKRPREVPRDVHDGMTHRRAYLVSIVSSREGRRMRMVARCRLGIDSVTPLLLAVLCAIPMEKFSRRDPDVDARAAPGRRTGGGRSREYEEDNLEHTMCDFPANFGLNGEKGNGSGDTGGSEWSQKGVIGKGVGDMGTIWVEERGSDREGWKQRLVDRGRRKIGGEHQCGDIGNNIRPNGDGVGEEDIRVTDIGKCGTEGKRTHHRDVDRERG

SEQ ID NO: 976923 - protein, 131 aa, Homo sapiens
MLITPSYGLPYPLTTFAAESEAYGKQALGSPNPIRTTPLYTLSKDVFKTALQPQQFKLMDQLYHRYASNKLRGIASLNGTCHVIELLERPMCRTTPHKLGSNSNLGREYFFTTTAGHGKNNGPNTPSPPLE

SEQ ID NO: 976924 - protein, 310 aa, Homo sapiens
VFGFFFPFFGKRGSRFLARAGPNPGGPTFPPAFYPPVKEAGDLQCCRPPHCRDKKEMFTGVTAFLIISNRICCDRGGGHRRHGAGGRHDTSSRLSQWFSKTLSDLTIYTLIERTRRVGYQQYDSQRGGDSEEQPLKKSGNRVDSPAPQTIEAVNLEALAETPYAGPCDLAVKVQRRVRGHFLATVDTLSGTGKQLARETPGSGCPQQGGTTKWETAVGTHGRVDLSRQAISPPPTKHDRSKLLTHRRARGSESDITPPPTFYRISQRTITPPGRTQLWLLPPRRRRLQEKLAPLEISRRVFPRYYETPKL

SEQ ID NO: 976925 - protein, 199 aa, Homo sapiens
EGASGSAPSYGLNGYWGRPLQAVGRGGAGIGDVGSLWGLCEASRWGIAAVWGYRGGSSWRPVGSKTIGDFHAVRLMTITRCEEPGEEAQCRRNTATKRVPTEIVGRDILFTGPAVINHTDETNGTSATSGASTEYSRDVRWDPIYACMTLGLIMLHGEQRVMAVVTEQRGAGVSARRPLCRRMQPIWCLDELPVSEIRS

SEQ ID NO: 976926 - protein, 181 aa, Homo sapiens
MRPRGDRSPWRRRWLVPRLGPWIPGPGLAAGALPPSLAARSRPGLPVCWCSFTWPGCVRIRMPAVQVWSGHVSRWSRIGPGVLRDVRRGCYGVWHVAACVIVTGLSDGGPGLPGAGAEFRELRSVALGGCGQLSRRAAGALAEGVPTPAVPVVAHCDWVDGWRWRLADRCRPEELGLTAAQ

SEQ ID NO: 976927 - protein, 285 aa, Homo sapiens
MANGDGRHSMDLVVIGRLFHHGLLVYTRGKVNIVCHHTEPFVDSSTTLVYMFQLLISQPSGKVSTEHRSKGMRNGKCCSVTLDNPQSGISPVSEISSNTSMCAATAGAEYVVQSTGVYHAPHGRRLGLNLHGGMPTRGQSSCVHPLCCCSRIVTSLGCETNEKYDNSSRSSDNASWAPTCLAPWQCQSMTNFGIVEGLMTQSMPSLHPKRLVGLALRETVGVMVCRAFQNIIPALLAMQGCGKCLPLSEREAHGLLPCPMQRFMVTDWQKLLLANRRGKLKPKNR

SEQ ID NO: 976928 - protein, 258 aa, Homo sapiens
  misc_feature (121)..(121): Xaa can be any naturally occurring amino acid
MENGTVAYGHERPALIRSRMTESQRGGWQNRLSQLPRAQGYFLLTRLQEFNRDLTCAVITGSLPRFSLGGQRNPDRRFQERKDTQKVVVDLSEQEEEKVALSDYVVLLGLTVRALALIDQXAGGGYGSRVSAQGLPCVLGRRLGVFRALRLPLRPRAAAGCLCCCIGAVCGGMPPPVGCWLFMRACCPDGAKDRGPAGGKTESRQSVPEWLMLASTQRVVWGKSRAYPSLDPWLQAQPTFLAMTVVRCDLKNGLRAYT

SEQ ID NO: 976929 - protein, 285 aa, Homo sapiens
  misc_feature (71)..(71): Xaa can be any naturally occurring amino acid
MACEKRALISCRAREDRVPKSYQRIEWQNHSRVVSPNDARIADDGCLLSNGLGEKARRSALHVGIASQVKXCIKEQRHLYYQQSRFIHRVLHYRIDGLVSYDPHARPRSWCDIVRVNDEELGSFRAIVWCWNRYCGLPLQVVLAKKPNREGEPILSIVTMVVSLSTHTFITSTHNFFLLGSPQKGMSTILGATSSGECHGSSDLCFRTILGACRSVSVVCSNFVLRVLCPLPAGKAFSCLLGEPDLVLEGLSWYPTWCNPFQDLGGLASSAVPDGTSFMAGLPGT

SEQ ID NO: 976930 - protein, 360 aa, Homo sapiens
PPVPPPPYVSPRVYLQAHKTDAREHHVQGLHWTAQCPVYGLADCPPSYAGSHGELRGERQATLFDPQLHDGSCICERVASIVDVSMDSGSLVLSGIGDLPGGSSPSEDSCLLGAAGLRCSSDGLRSSFAPSSAACAGYCLSLAVALRGPVRGTAPCTLVPPEGLPDPIPALSLKLLAPLGVPTGGPRWQSVDGLASLASGPCFPELRRGSPLGTGAARRSFCYSLRHRTAKRSVERTRFPQRVPGATRAYIITGIRTPACRMAHDPKGDHERYAAHRDNGEHRGDNTQGLVEEKRFAMQMEVQSIVSKSDITGLQTGQPPKKVQARIKKARDQLINAIPTSFVHHSGAHGQYETKDHVQA

SEQ ID NO: 976931 - protein, 236 aa, Homo sapiens
  misc_feature (225)..(225): Xaa can be any naturally occurring amino acid
WPIQFFTGVEGRGTQLLYERKPRATSPGPNRGRQSSRCSGAVGAQAILLPWGGPGPRASPTIRGSPFGAPARAWGSRGLVLGLGKSSGSQGRPLPRSISHRFRFRPGDLGNSRFWLGLGEQGPHWGASPTAGQKYSMSSSSCHHRPHPTPGSPSLKGIPEASSSLPPTGAFLMPSRLFFLGGLPLPPVGAAHSGPAGPALGLQRSSSPWSRRAEVLLRLVNKLWXLFASRASGLDD

SEQ ID NO: 976932 - protein, 52 aa, Homo sapiens
MQHFEGCNPTTVNEEGVKHPTKGRPSEGQKQTEEPRVEEANTATGYSHRNQT

SEQ ID NO: 976933 - protein, 121 aa, Homo sapiens
DGGDGRGGHSCARGPWTQAELRSVELPQRTRQSPGQRRRVCGQGSRMRRTYSALSVLFPEPPRCEAEIAAVGPVVIQMPERTTKRVVGNGSHSEWTGILVVRWEMLKTVALLRISVYLTLS

SEQ ID NO: 976934 - protein, 137 aa, Homo sapiens
MLAVREVRAQACSSLSGGVDRALDGHCGPKGKVRRLGVCSTHLGVHLLGTDELRLGCSKIIALPRGASGELREPMPRVVRGHRRYGRKPGPKEAGESETAPGYQGGWEHNYQTEARAPGGDPNNRGVARSKQRGGHA

SEQ ID NO: 976935 - protein, 445 aa, Homo sapiens
GLHLRRPMLACLHPQPRQARTPLPLASCYHVACLQCCCPALPCLTPVTADHVPCAICALHGRLAGLSVDRWFPCPRYPARPQSSPKTEQLRPVPERLKEIQPRADRSSRTPAMTIRSRTMDTISETCSHACKLALGAWVCNESWAGLNVPSAQDARGVHATPDGREDLTWGRHVGCEERNDYQTLSMTLGPRTGPDRGSVLAPTDVTKVARLADCSCRHCDNHTLEQSFQKYSIQRNAQPYIAKWYHTDLLSSDHVTARYPADTMETLRKKDEHQNKKHRAKPGASYPASRPREQPSTPHAFDNRQPAHEQATKTNIDHQTNMAVAHCRAGQEYKTPQSTSSQGALLQTERRRLIDTKEVVATRQEKPPGPRTPSTTSNESATQRLHKHRLTGTTKNNQPDTAANNTDRETQNNKQKKSRHNPGLDSPRQREKGEHEHKKQKTRT

SEQ ID NO: 976936 - protein, 205 aa, Homo sapiens
MLPCVENAPCCSWQTCCAFPTDYTCTNLRVSSWSAHNPFRDGLKCQVDSAVPLAVIPSPFFQHLPFPGPCMLHLKAPGMPPWFPVDTWPSFPDSVEELSTKWTFPADSLTWCLVTVLWPQNKGEQKGAWKGGGCAPESPEAWSRTTGLLLLARKSKVGPRQEQETSKMRARATETAPAGEHRGNKERREQQTVVKTGTEKGRKEQ

SEQ ID NO: 976937 - protein, 356 aa, Homo sapiens
EDKKKNKRNFPQEQQPPPPPLRPLPPSAQPVCVPGVWLGLPCAPGPFQAKPFLPGPVPLNGRCPKPGARRLGFGSSVQAEGVCGGGDPEGSGAQTSPRAFLCVGIFQVAFLWGFPGVTARCQLSHRARFKPTTSDPENPMTQEHFCPRPCGRVGKTPQRAFQRAELDTLCVISPQSAVKADPWKRPPYISRVSLSNGGHSRENSLPVCPPRENSLPDTFFRKVRGYIVALSTFPPQAPICGDPPLKNVARETANNRCGQQGHNTQQGNPQCPRRNSFSHHTRKKSSGPSNTTRFHRLIIAPAMKRLSCGAHNGPRVPYRGKNFNQNLSPSGEPRYGSPELETPTHMGWDNMYTPLD

SEQ ID NO: 976938 - protein, 235 aa, Homo sapiens
VTPKSKYQSIRNESLIIAGGRGLWVLPPGGTACPISVHRLGPMLRSSGWVTIVQHYPVLLLPNRMSDLRAGQTGLGGAQCLRGESGRAADDVVRVIVRGLPDARVTSSTRPVRSCDVMPCELEGRAGAGIYLVVDRRAMREGERRQMDPRPTRELAVIIHHSVEGMAVDVHKRPSLLSTQVVTRICASRAGFSASRYRTDASTVLVNVICTEVTERCTLIQSCGEDITRRVKRRT

SEQ ID NO: 976939 - protein, 174 aa, Homo sapiens
  misc_feature (129)..(129): Xaa can be any naturally occurring amino acid
  misc_feature (133)..(133): Xaa can be any naturally occurring amino acid
  misc_feature (142)..(142): Xaa can be any naturally occurring amino acid
  misc_feature (163)..(163): Xaa can be any naturally occurring amino acid
QVERALYVAPAANGHVVYNVRSGVLGTCSSWLMCACVLHRARIVSYPRYMMCPALHHPAQDPYCCPTLSLLWHSLAYYRLLGYQLGDSLSLVLRTITIARGARSLTRTSQTGSRDTTIDKRARSNRVNXPGRXSPLLVSYHXALSKLLIKPMALSAKKRIRCXCDLFRNSKGIA

SEQ ID NO: 976940 - protein, 344 aa, Homo sapiens
MASRYSHNAKSRRSVMYQGIDANLVPTPYYRWGTGAVTDALAASSSGFARGMVRSAGGTAVRLGVVLDDDPGEGNDCRVGQSLVAGQPGTGKTAIAMGSGAGPGPWHAIHRPSPAVKIFSLEMSNDRGADCRRFRLVHRAFAVKEETETHRRGGGGDPYRSTINGYGLQMVGKVTLLRAHEMGTIYELGTKMRGGRPRDEVQAGNVITIETATGKISKLGRSFRKASASYTTMCSQKQVRGSGPEWGAYRKRREVGDTPCSLDEKWRSLNLANPGDNQGAHQQGDTGDNIVRNRGTNNVHGARCGEEATGRNPESRNNDRHTEGRKETCTQGTENRQAVINNNT

SEQ ID NO: 976941 - protein, 105 aa, Homo sapiens
MVCSQSDLGGCGCTSHLHDELPATVVKGSACELSAGPPSGHVDADAFLQDVMEASRYTIIGQCLLVLHSGVLEPLYLCSKWCPRVRTWLSRPYLAIIVANHAMPF

SEQ ID NO: 976942 - protein, 103 aa, Homo sapiens
MRALRNVGGVRYHYQTRCQWRYKWNVQALVIDDPSSFENEHDLGLRNKKLGARTPKDDVTPVPEGASPPDTIHIAQEDFLTNKGNRRRGELLILAHRGVYHIG

SEQ ID NO: 976943 - protein, 215 aa, Homo sapiens
MWSRLVHHRLRVQGPRFRNLVGVHEVRLSQELDVDPPYSVRLSETLLRRCSSDTRRSRSPMKVGCTPSNACCTVWRCPWWCLGIDPSVCRRVALVRSSRANRIAFAVARDLAYTDWRIDCHYVSWYDRVSLDRPARSVTLRFNNIEYAAVWTPHLACPPKRMALTGGLDLLPESFDSGPNRGLGWHGFLGWTPLRVATTRPRRSSLVLGFIPCCQ

SEQ ID NO: 976944 - protein, 284 aa, Homo sapiens
HDTDMAAERRMRGSAGPRVAPWMETLGMVEPVVSFRRGYGRLSISGGPLVDGTVAKRETQEDRQAGVYTSEVRAEVTDAKLGDEMHASSLTMLVETRVGIKMDSVDDLKVTACEAPDPIRPLLHMSLITGMVCRTWVWNLRYHGGGTPPHRGSEGNVQQGTVLGHAWHAKDRKPAVRAQGGDRVLYNGDNVCFGLISVRKLHRIGDHRSVHLSAFVCKGSIPKETAFGRYACAYCTVAAGRSYAHSALQAASRIRALPLVAATQGLYLWERVERKGTPRWHIGP

SEQ ID NO: 976945 - protein, 158 aa, Homo sapiens
CVGCLSKALARRKRAHDCMPSEGHPWPAGHRGGLPWRNRLRIALQSGGRCWGRARPIRVPVRNAHTTALKANGLCKERPVMIYRSRTGEDVMNRHGEIAYHDDKAVDHGRNCIPTEKTPKTTTYTVEHPALQVPKHKQKLRRRMDFQPHITKGEQEQD

SEQ ID NO: 976946 - protein, 177 aa, Homo sapiens
MLAAEYVVESYWRRSTTMEKAGAHLQVGAKRVIISAPHLLDAPMFVMGVNHEKYDKTASRSSSNASCISNCIATLAKVIHDERWYRGRTSGPQFHAITGTQNDCGLAPPGNCGVMARGGFQEHHPCLYWALAKGCGARSSPELNGKLTGMAFRVPLQVSVWTRTGVKKLPIYDTHTG

SEQ ID NO: 976947 - protein, 94 aa, Homo sapiens
MRWVNGKRDPGRPLTIARFVTGYPFTRVEEQGPLCDPRRMTARDMGIVPQRGLLTVLDPCHNRQGTNSTMGAKKLAKEKGHYQALRTREENLVR

SEQ ID NO: 976948 - protein, 218 aa, Homo sapiens
MAKIHDLPRAPTLGPTVPEEQTAVIMGNIFGIAFSRVLIGKKEMRILMVGLDAVGKISILYKLKLGADVTTIPTIGFNVETVEYKKHQSLQCGMLCGQDKIRTLWRHYFQNSQGLTSCGRLAMIGSEFLRPGQELMRMLAAGRCSGHAVAPCLCRAMQDLPYALKLLDDPRTTVGRVLPCVIVTGYAFQGQPGVTSVGRGLYGRLELVAEQVQNRMEA

SEQ ID NO: 976949 - protein, 220 aa, Homo sapiens
  misc_feature (62)..(62): Xaa can be any naturally occurring amino acid
  misc_feature (125)..(125): Xaa can be any naturally occurring amino acid
AADTVKQGVRKRSHFLPTPGEFEVSVGWTRIGTRSTDRDLAHQPDVAPTLPNDCSIAFTSDXPGIHLFNQGVLTDYVVTIHLRTELTFLVAQETRGGSRRNVEADRASTMPCHGDGLEIDLLKLXEPMGPLRSREIVLDDSIEMGLIDRGPNPRTECNQWHPSIAVEDAALTNCIGGLRFGSVLPEREINDSEFFPETDVWKLRSLNCYEPRLPARLSRG

SEQ ID NO: 976950 - protein, 156 aa, Homo sapiens
MRLYTLEPHDVIIVSSLMLSPVALRRKSKIYLAGEVRVNALNAAIAQVSFGDVGVPPEALTKDRRLPMGGEGGIPGRKPAWARVFIGDQRPGDEGAFVYSDISPMRTFNKVAATVSQNAYERRMRENVARRVERPGCPPLSPVWSDQRQLSPGVPW

SEQ ID NO: 976951 - protein, 314 aa, Homo sapiens
RRPGDSSAWEVNRARFQVNRNWSSSLHEEKDAPASLCSGSRSQAPRSCHGPRQVWQGVVQLGIPHAIGVCTLDLFCPRGLWEELLSCTLAHLNWWCLHAVADGLEPPKTVRENIEVEGMEGCTLSRWPVDHEHCCGARGIGGANSRGPCNSLVRSSCAPGAEGDAMLRGWCGWDEWEPLPPSLARLVAHYCCAACLERGTSRRSLEVCVTSGFGGNVLFHSELGGRRPPSVYVGDIVTVSRAGGARETAGGSGKWRRDSGLRNRGGLAGARLRDDLVDLYRGEGCWAKQVRIGRGKRGPLSWLGPCLAAGTGRL

SEQ ID NO: 976952 - protein, 184 aa, Homo sapiens
MSGNGFCFKPNVGTAHELQDVCDVIIIRIGGFNSGVLLDGQRSRTVRRFAVASKELKGGQLMIGHVQEDINLPTITLRMNLLDGCTLHQCRGATTRFSDRATGTGHAQPPRTTTHPTKRTRPYAQGTREPRNRPYETDDGPLPYVPHGPRLHPAAVEQKIATYTLTSERSTTPTIPEQEPALHR

SEQ ID NO: 976953 - protein, 76 aa, Homo sapiens
MSAANEEEEKPTGGVPKKRVAEGAHTKGVFTGIKPPVLGETEVGQEDASNSIPPHVRQLKEVLLTNSIYLPNKPAS

SEQ ID NO: 976954 - protein, 106 aa, Homo sapiens
MGLMYPYIFHVLRMGEIKMLFLLKMKSNKDLPPDSTHALKAQLSSVMCYVVPVLVWEKAETKTERLAVRQEQYFSSDIFSSVIIQGRRWADSTVGTVCLKPRRLVE

SEQ ID NO: 976955 - protein, 152 aa, Homo sapiens
AGRECPAGSAESCRGQGAAKPRRFCWENLRDALVEEAGPECTHRVTEYSGWTALIASRLKCRPQWTAMVDAEGECRVIAANGARMLRQVTLQSYVVPGLATCKGVPDLQEQVLSPYRWLIQGQNGLAVTVLVADVTIPEDDLSAEGASSSAL

SEQ ID NO: 976956 - protein, 136 aa, Homo sapiens
MAHEYVPHPRKPDRRFVRDSPSGNNGPRAEITRRRENILAEQGPRRDDLDEGPQRTDEAPHQPRRETADEGDDYHYERSVTCRDEHDGTARADGSSNLRTIEKEIDDTKKRLLGRLRSVQRPISNNPTRSDEQPRD

SEQ ID NO: 976957 - protein, 360 aa, Homo sapiens
MQVTVDHRVSLFLTTQLRRDHDTGNMALTACNRGANDGTHDLSCHMSLLSNSRWHHAPTTGDSPCDDLALLTLIPVMDGLADCQRVSAYSQPCYNCGLSEDGHAGTNITVVATVQDVHGKPSDRMAASPRAGEEAYAPALHAQRHPDGPLVQGTSYPRLHGHCADNQHSIVWTPLGRPDEGNLQWPPSESQCGDSNVNGIGSVPFAPNISSLWMPVRYTLHSERVRTAAIAEPQKVIITMMEWQQHRNVSLRGPIKAYGSPPRKEYETDTQRGDSAGKTVESTHVTKGPTKKDTDHTDKTKPRGRTRTRVDMKPAVRLTVPTNFDRNTYNTWIGTTSRRRHQEQSRCTYYGSGHESGRLR

SEQ ID NO: 976958 - protein, 169 aa, Homo sapiens
  misc_feature (119)..(119): Xaa can be any naturally occurring amino acid
  misc_feature (143)..(143): Xaa can be any naturally occurring amino acid
  misc_feature (167)..(167): Xaa can be any naturally occurring amino acid
GSGGSALVFCGLSWWPSPFRLPETVASSVWCVSELVSSTGVQADDEEVAVTSASAKKEVEESADEGRALFRAMSDGPKKNSLFSLDDGQRDDPWGGGECWARDRARRNLASRRRVLCEXLACSVLDGTSRVVTSSTDVQSLVXYPDGRSHRTRDGLVGWIRSFSLGXAP

SEQ ID NO: 976959 - protein, 224 aa, Homo sapiens
NVLLSLCDASVNERLCRFSDQLCNMARQESQRHVLAVHVDPVGLCGSLPARSVGFSSWGRHGAWSQQENPVVASCTRLALLPETNEGDTQRGVRLLLVFYANAGGLTLSLIMIKRSCINGHHHHASPGVIVSLRVITCKMHSVEHASRDSNILHHSVPPSGPCLPQLTTERGAPALGSEDFANVICCRFRRLTAGLIVLNTVFISINHVRRTKPLWRKEPLSKL

SEQ ID NO: 976960 - protein, 98 aa, Homo sapiens
MRHQKQNRNEEHKKENENKTNTENTNELRRANRRRRARRREGAETRTQTVKQKQEYDNTRRRRSTNHQRSEDRTKTQQPGGAKTEKRRRREMAERTKR

SEQ ID NO: 976961 - protein, 125 aa, Homo sapiens
MSNDRRVARHINTDEWVHVLQLQPLQLLLLSAPFHSINMLQEFCNASGNTLNAQPLVTKCNMLLFMYKGSGTFDCLHVWHLAPPQEAKPNVAVNGCFPLIQAWTLLLCGVNPWLLLEMVSPQLFI

SEQ ID NO: 976962 - protein, 231 aa, Homo sapiens
AAAPLALSQSTPGPARPSHSQQNGQGEDPHQHRGHLATWTPGKSTTTGHLIYKCWRYLTKRTIENVLKNGGRLRMGNGDPSSMPVGAGQAECAEAVSAASPSDISLWKFETTKYNITIIDAPVHRDYIKNMITVYIPSADLLQRADRGWLGVGEYEAGISKNGHDAGACPAGLQLLGVKRMLIVRCEQHGLHRRLAYSENALRQKIVTGESRALHPERIGYKPRASLLTIL

SEQ ID NO: 976963 - protein, 419 aa, Homo sapiens
ARGCSDSFCSGQNPLGCFSAIVSISSQVKCPCRELPETVAYAHVVRCIYDGELKCLTGVQAAPCGGVLDQHAKIACGAIIRVSKTLTQSGLVDNELAVLSPVWCKKLRGYAMGIGQWSRRGHGTEDMRRSTIRLVDIHRCEDFHVPTWVKTLDAQIRARDRAGSIPSRRAPLDFDRRRKCLQEEGTFHGGSANGGALRLSAGQPLDFAYAVLLREPERAYLRTTSGEVRTNCLYEALPLEATLSVHDSNRIQDFYILLPWKTVNCIELPNLPPGLRRLPISKRHEMIELLPFPVLGGFREMLAQGQWGVARCRYEGEYRVECPMSMSATRNGEPPGEGTQDARGPPEAATRGEGPGSEPRAEDPSPGEDEQSPPENLEQGERSSGERSDEYSRQGTRVATVEQTTQAQEPLSSGSDTHR

SEQ ID NO: 976964 - protein, 151 aa, Homo sapiens
CGRGCERCWPEDVRLRAVDAAFLPGCVPVACGLMPLCAACCADCSVSPVSSCHVPVLALCAPDVMCLLDGPSASVSRSSACDCVETLCDATAPLLLCVPCVMMLVPGAPVMALDAWVMGSAPAARPHVHAPGSALPGFHSSNAGGPWGDVV

SEQ ID NO: 976965 - protein, 181 aa, Homo sapiens
MVNCNDDQGVLAVDAGDNNYGEAVSPMCLDRQAWRSCGAGRTTAAVASSMGSAGSSTRGCTVREVLASYPRWTTTNRPRTGTRQASHRGTSAKKLGRSCWQERRCVLGDPLVVEPKRTRTPGPGYKDGGRAKPPETGRRQSEHREARGGDNSITEQRTNRNDNKEANNSQKKKAQGTTREK

SEQ ID NO: 976966 - protein, 258 aa, Homo sapiens
MGGNVVSFKKKSGYCRGAVKRTEGRTPWRQREPSEKRVRYVTEGWVTPQYRDSLCVTEGCAEQKRRAHLLPEWGGHPRGKAEGPTPTYECPEKISRGGAGESARNMSQRGRIVPGPSKQTRGEISSPLEGEPGGVGMKRTHNKGETRLGGLGRPHKRETKKMANEGYHYVRRNGPRERKKNNRNNKAKRELGDNEVTAVALEHRVPPRREGKNNTTPKGGNGAQRWEEHMATGAQTTGSVHYSPYIKRGAGPVRTKER

SEQ ID NO: 976967 - protein, 358 aa, Homo sapiens
  misc_feature (290)..(290): Xaa can be any naturally occurring amino acid
MGAMGSIGYGKGGWALHNNPGERAKCRAEGTIKAPRSTRGATGGKDKCKKNDPEEGTKQGEIAHEGEGNKATVTKTREEETPKKRHPSAQMKDAHVRQEHSERRGERQTNNNTTPKKQMRRTPITTRVGRRNNEEETINTTTDTPQEGENTTSEERNTRRREERSGGKRPKAATSSKHRHTHNTHCKSIKPQSNHSRKEEGTKQQHPIVQEEHPPMVRRQTKGGTKTTDTSAPNQRRGGMVVTPQHDEEKRRKDGAPPQPTTADRIDERKTDMGRGNPTRGGHTPQWKKXHADVVESHTRGGRPGRQDRRRKDNITQRRRNNQIGDATRSKICEHITQQPQRHTTAVEPPPSSNKAEC

SEQ ID NO: 976968 - protein, 286 aa, Homo sapiens
WGKKPGDFIWLWGAGGLRELWVGAGSVSSSPSQGLLGWPRDGRWALGDGLHRCDRGGEAEPVWFLGRSRWWSVEVRAWRGVGGERDNFVEREVVGSDTIREGAGQSAIIAGVGAREISRAHIDETTRQRKHHPCVARREAVARDSHKRAQRELERAGEENLERTRCENTRGERRDVRGSPSYKGTREGALKGARGKRALSRYKSPLCVSSREKQRVGATKGLHPIELEPPIFTDVVSRKVVGRETSMGGGRVGSPPASADEGAGACNKTQTKRRDEPPQKLNKQTI

SEQ ID NO: 976969 - protein, 440 aa, Homo sapiens
MTPVQRGGPGALVALGWGTGGVFRGRLSAAVTSWWPCGLRGCGLGSGAEAVGALRRHGLEDKEWMPVRQVRAAWSRTCETIKSLEEIYLFSLPITEQEIMDFFLVGHLSRMTVLRDSCSVHERHDPCPVLGLPEVQRQFCMPTRWARNTVALQIGSGVLKCILEGSGEPTGPFQVGAIYPWSQDFSHLFPQMAAREALTGGEPRIGARPPPLVPFCLRVDQCPLAGLLGALCTPINSACGPKGATLGNTVYHGTLVPKDKRASMELGVGKFRVERGVEAFNAPRGSLMSLVCYPLCGGDNYIAQEANTFLDVAHEFYKERHLTEGIPCDITREASELRRAEKRREVVFTNKQLPPPTTQRGRRPCESHAQRRFVRKASQHNEKDYLLRRRREQEQAPTARGGETQHRSGRGIKTEKQKGKQQRREDSSDKKAKPARPTIL

SEQ ID NO: 976970 - protein, 189 aa, Homo sapiens
KWWMDAGAVGVVLGFPGGPGMGNRGGFRGGFVHWHPGPGVARLCDGARGLRAALSSAECEVRMDKEWMPVTKIVPAVVKDMKIKSLEELYLFSLAVLTESTRSWIFFLCGLSQGGGFEDYASCNKQIRAGQRTRFKALVAIEDYNGQCRLMGVKCSRGRVYTDFRGDIDPGNALHRPRVGRGYCWEQDR

SEQ ID NO: 976971 - protein, 119 aa, Homo sapiens
AAGGGGGVLGVAALVMCCAVRCARTASMPWSPVPPVEVEPMQPRALCATCGNNMPHVLVCHHALLPLLPCPMPNGCGLSVAWALVCCLDSPCGHEYVDMGMGQWTGPWSRRGGHARVYH

SEQ ID NO: 976972 - protein, 379 aa, Homo sapiens
MRAGGVFCCCFSVVRVCECLVMCLDACCGCSVTCAGSLNAALLGCGCAVMVPLLLAVPLVVGCPPCVLLLAICPAPMLLSGAPCCLVTTCCCLVLLCALLCACMIGLTSVHAAGLELLSLLHVVSECCVLLLAVRLCMRSFITAYPAGTCKLIMASNNAGTLGKANCLEFNLRHDWNSLLSHDPRLLFRHYSRAYFPDARDMVRYLGDFADTLGLRVQYNTTIAHVTLDKDRQAWNGHYFILTDQKGQVHQCSVLFVATGLSVPNQVDFPGSESAEGYEIRSVGPRPLLAPLLLSWVVGTLALDTRDTLGCQAFSRLSAGPGLLSLWPPLVGALSLSLAGDFRYVLGVSAFAGLPLSGAVSTFCVAACVPRERFVYVGG

SEQ ID NO: 976973 - protein, 450 aa, Homo sapiens
AAAAPTEVCGRCQMCSQPKPEPDALPLMCPPGSLSLLLLLSSGLLAALPDDLVVSREQDCTMDLIRNDNDTSGSVCEAARVIAGAADSSQYSCTAVRSLTLETPECNAHRCAHAALLRRATTIHADDAPLLAALGALCTHNSVLGRPKRPHSLLCSLSALVCLYALVRLRSAFSSPIRQCPPRALGCSTLLLPTRAPASYLCARSPLTLSSLCSAARRLLACRLHFSSLGSLPIRRSPSPGGNSPPRRVGAPSLQFRYTGRLPPPFAFLLFQYHTLTPIVELTSSTALWATAPLRRPWTSSYSQSAPRGLSLPPLASTAAQDRRATPHTPPPQAAASIFAAVFLLLQSVPPPRRVAPLPGAWTVPLLVGSQISTGVALTRPGAPLGTLAPLPIDNFRGTPSSDCRDRVCPGARSTLHFGATRPQALPDWFIRDRARFISLATTVGPGAPT

SEQ ID NO: 976974 - protein, 280 aa, Homo sapiens
MYHGIDPMGTVPRSDMRYCKAVVIAALNRDTTCVRQSARVYGAPPPSVLVESGDPARSGLRVLGALRVRSSGRRTSSVAQRWCWEQLGHGALPELRVSLVVLGAVMLGDAVRLTCCDFVLLCCRLILSPVWGDWVWDGSLLIHPAGRRGSSPHRHCARVSVLPSPCVPPVGGPCLRHLSGPPARITTGRRALGRGNRALYDICFRSLKLTPPLGEPDTPGGWSLEWRPTCRAFRPSTAACGTRSFTFAAPGGSMAGATARAQYGCGRPPRVVHLSAPVAG

SEQ ID NO: 976975 - protein, 333 aa, Homo sapiens
  misc_feature (37)..(37): Xaa can be any naturally occurring amino acid
MWEGDLLGGCVGLPISVHSNYGGWRCVHRACNYSEGXRVKVKGKELGVDGVGTCSYVELAPPSRISLCNPRSLALQCVVGLWAATSLTLWVHSTRGDLSSSTVPPLGHLPRGERPPYRPYMCTRPRCAQHKTVPPHTGRRIQLPSNLFLPRDSPSHLSRRTNAHLPGYTILRGLSAPATTVCFRRTARRHPLHHAQLTCARAPPPRERGVQPSAHTSAPGTSPPPHHNSLPALSTRCVLPARQPLATAPPQVPRDRHRTSSESEHPTSDHLAPHAGTHNTPTARPQPTGEGTNHRRTKPTQNDNHKHPQQHPTPTSANILTNKTNREHQQSTP

SEQ ID NO: 976976 - protein, 314 aa, Homo sapiens
  misc_feature (97)..(97): Xaa can be any naturally occurring amino acid
MRYIAIKTDKDTSKEGHAWYLRPHWGTKKRNQKERSAFALTRRCAHVCSPRPPEAGTQNALGSAFARTTDRGKRLNTQPPGFPPQALLRVALPRVRXDTDSTIALPRHFVLRAWDFRTRSRNRVGAVPPDARHCRERVWCVLLLGSGWAALGVASGLTENSGPAVVPRFEAMGPPFTLHHWGWYTRGPPWNLSVRHSGFPLKVPPNPRCTLAIPLGQTPEPWASSPTFISNQSMKVWRDTSRGGHTRHTEHTAGAAPISWGPLEAALGPWPEKGVKFPQGGKTPKTLLTPPLWEPPGELKPRRCRMGNCRPVPG

SEQ ID NO: 976977 - protein, 129 aa, Homo sapiens
  misc_feature (31)..(31): Xaa can be any naturally occurring amino acid
MPLLALPLLGADKETRDSLTQLFYHALEMFXLYSIPHPSSESVPLVALTGGVGMREAPVDVCERTQEHRVASDGGKAVIVLSTRIDLVMCQVPYEMAGVEEPVRVPESLYRVSSYPGCPHTTQPFIRNP

SEQ ID NO: 976978 - protein, 335 aa, Homo sapiens
AVPVGAYRCAPPDPVFDMTAPVASAVPVAWPAWCAPTPPQEEELAFVVPAVKRHIFVWVGRLAVHKYLLVMEILLPHVVVAIDKAAWPPCSMPNPTGERWIRREGSCKSSLDRGWTLNGKECLIRGSRRVDGGAAELFPTSQDFFTDMRRHGIPPNGTLILGMVRDVLMIIVKLAERMRTGARIAATLSERRSCRESLGGVHRGVVVIGVLQGRGVETLPNQFFGRQQRPSMTVPFWGSLPTGKLSPSIRLDTDGVVLFKKLVKERNQLEGDGPLRTRGLMKPQVPCHEFAANAEDLGASESLVCQVLDGKASTPQMERYFGPRQPLEGRGLGDP

SEQ ID NO: 976979 - protein, 241 aa, Homo sapiens
PAQVHTCSAAGGFSTSDYDVGWESPHNGSGTWAYSAPVSAGELGSCSLEESRSTGVRIPASCFRLVVDYQERALCSWMLIAAIESRRVGLHCRSSSLRLEFPDGRPRPGRPQSSAPLRCAASARASSLPLLTSVCLLLVRRALRRGRWPVLGTRGQGAGACCGSEPWARVCLLVRADPVVTGYWYASPMWVPGVRPVDSVLVRRRRAPLARLRPWWRCDSPVVRGLVVSAVFLVMVKGGQR

SEQ ID NO: 976980 - protein, 176 aa, Homo sapiens
MSAKYNHHTEAPGVNERTESTNKRGVHKVHAHNGTDQRTKEATTKTTCDNSNERIKEASTPYNIDTHEKNHDKAQQSQQTPRYEEHPQKPDMSQPNTEQTGGKKNKRNANDNEHQRARKATRTQNKPRQGQKGRESQKPKKKKERAPTKKQKQTDTTTNDNNKTHTKQQKKNSRAI

SEQ ID NO: 976981 - protein, 145 aa, Homo sapiens
MAIHKRPRGALMLHYRVCATRILGTLADCSNLPRVDSQIQAMRGSEYCGEEGSHVVKVHLNHQGVQNAVTCARLPERGWPFLTYTSKKNTLSISVERLPLRTSPGSEAPCGCEENADVTMRIDIVSSLEKAFYTKTGFISLINVN

SEQ ID NO: 976982 - protein, 160 aa, Homo sapiens
MPSLPGLAPSVFCAGCGRRYSRCGTFGGETRAEVDCGGPHGTGGGVKTTAASGEQRGGDKPLARTVLCDDDPNCESTIETSVYIRRPAQRNGRVRQKDFTTGAASHMVLLHKGGRSQRARTTKQLTVRNPTGIVSDSTQQTDGPAHTEDIAMGGDHRLTR

SEQ ID NO: 976983 - protein, 182 aa, Homo sapiens
MICRESRTLFASSIQGTFPKKDRRLLSSRDILPSLPCYYVVLIFMRLLAGHVLVVFSPGIEPLDLHVGSYGDRKRAGSWSRSLPLLFIVVQITGYWRPSLKGIKVKVMVALFSGEPSDSLPVGEGSDMEVSVKRADRWRIVVGVWVQLNGWNSVTLHGCDAYAWLWWVEAGIDSWKLRNKRT

SEQ ID NO: 976984 - protein, 120 aa, Homo sapiens
MAVFLWTRGVSVCTRVSSVLTVALLPLVSLCLGFSLHWRGEPALANLIPSLGEHGLSLSRLSVGFALVHLQAEELPHLLRAFPESVLNVVSCLSCTYEMLMRSLPYRITVVNYADFHMPR

SEQ ID NO: 976985 - protein, 175 aa, Homo sapiens
MPCVTSQSVSQRRRTTLLPSALDVHGCDCQSGGRHTVCAVSTRWTAVCDSSRRTQQSPVSMRLSAVVGLQVGVCEQVWRCRTRLYCSCDESQCGVLSQSSRVVPRGGACACVTSKYWRHHASRPDVARVDVQGCDFQLVSQETSGVPGVECRVVSPDGPCSKQVSGVQRVDVAVV

SEQ ID NO: 976986 - protein, 673 aa, Homo sapiens
PTRRRVAVGRSSTNVSLVLYRVSSVLLVWILVCPNALGISEQKVSDSRCVRVWYLSVKEYVLDKDHMCILRLVHVQELLDQADIGKEDDQQECNAKNMARLKTACNAVAHEERYAHAAMFAKESRHRTRHDGVHRILYALKEHDGEHCRWVRDILGEYSSEILGSSDKQVIPEREINIPIQTALLEVPMARRGDAAPLTMCHRPERRKVAGQRRLSRKGKKNRYGRRELSHAGPQLSSLEDGPSGGNHMGRKRLGGGPNSMCPEYYVGSPWALNPMWRYGDSLTGDHGSSVRAGTIGGVSSFCGGRPSYQITNRGNSLAVRGTPTGAHLISVNQRDTGRVHSGTPWGHLAPGKANAGKYNLRLTIKDTPKSPLLKRKIKMGGHDVFKEALGLGGIVYRPSEDTPPTGEENGSVGGAKRYIQNGSPVRGVPSACEKATQAMGLYRTQGPSGDFPTDSQLKSVETKIHPQREFQGQQLFHLFLPGTIGDVVTGECEAKKENDPPVWEGKEIPREQTPKGAPFGQQKSGKPVGATERFQNPTGREAAKQTADLVRTQKLTGADTEEHLKTVWIRNEQATGRRRENTREKMGTAPKWPNDSTDNHNERRTRRRCAEHQGFEEDTVNVIDTHREQNPVLSETTTTWGSHHIESAEAREEDKIDEKRKHSKRSDTNRGN

SEQ ID NO: 976987 - protein, 411 aa, Homo sapiens
WYGEPKDLNNSKEGSVQNLGRDSVPIYKFPVIDRDFKDARVYVARDAVNVVGSGELSCRIESVGGILVISQCCYVLRSNIVLDAGYVIVTSCEASILLICAPMGIHYAIDDACGLPDAGFSVEARASHSTVKRGQGVYKALHARCDLRGLSPGVGAMVYGSRKASKHRAWWDLVAIDLEVDPSALDGNLKADTDERFHRTCGERTYALRKMGQRTWCDPPVTGSYIEGGPGVINDDRITYNADETTCDSMHLYNTRPGGEHIKRSRGWERENTLKHTEAERITRGKTERHRRTAKKHPRGTIEGGEHSKTRTKQQRERAKLCWLHEENRAHEEKKDSYEKRLKKTRRQQRREATDAKERGDRSRQREGESERHNNDEEGKGQATHARAHTATKEESQKKGGRGRKEAGERQ

SEQ ID NO: 976988 - protein, 259 aa, Homo sapiens
MARARLGPPSTLINSSHTEITRTPLRKGGDDHTKSTGHKATPTATGEHGRDQTDLGGFLPPDNTTNQQATTTTRLRHQADNTRGGEGPPVAREYVRRGKYIVSTLIDRCGGKQQLEIAAQDTQQTQARPNNLTTGGKRVRAKEDGEEKQTALTDEKLARTETQPKNDHALDRTQTPRVKLCDQMTRWKAHVNPAEEPQEGTRPATEHHPDRVHPRETAYKRCKESSPRSARYRTPYHDAADIHSRESNKPWIAHLTPHL

SEQ ID NO: 976989 - protein, 133 aa, Homo sapiens
  misc_feature (96)..(96): Xaa can be any naturally occurring amino acid
WRDVSRKVLRSQTWVPRAFLPRQAQDVVHRLGKVKTLPLTDDPVQSAVQLTDFLGYKAVYELNIDDSVTVRIWPAESNGEIQRKEGWSDGTCRPFXTTSTDTTVMGCVGAISLGRTSVTYTASHSLGEDRSHT

SEQ ID NO: 976990 - protein, 356 aa, Homo sapiens
MHVFGATVYSIWAPYCDVRCGRPPSSWGSILIDPHDRTCVAHWVSVPPEEATNIALERLGVRLGRDRSVPSFLGPGRIKSLTRKPLISYGEKKAPLGERHIHKGSFTRIPTKGARGRQQAKTSLPPGTSGTSNCSLWTHIGAHTFEEQGIQPVNHWAVHHEKLNGKCCKLRNSRVTQRTVIAETRGDSELHTVHHKSFPHYWNPTRTKRASSYILAVKQRYTTTHSTYRLLSLLDYSITIYYFDLVAVDEHIALTLSSVARHCQCRLTQREAIYKRSISTQHKLTNKHNTTYSTEDNPINQKSHTPHPPDHTPNNPPRLALSGASSHLLPSSRSRPLASCAHVGSAAAMCGLAVLR

SEQ ID NO: 976991 - protein, 63 aa, Homo sapiens
MCTNIILRPREQRCCHTTKLLHVHNELDLLYHSLADSSHTIILAHRSQRQRTPRAAVSPHCVH

SEQ ID NO: 976992 - protein, 103 aa, Homo sapiens
GVSFTSPSSCWMLEPRTRCVAMRVQQQRSGGGGPLRKPQIPSSRGLAMATTDRLGASMCIPPSYADLAKLQRYFQQRIWFGLVKLDVKTKVLQWRGIFNVRFI

SEQ ID NO: 976993 - protein, 214 aa, Homo sapiens
GEGRVASSLYSEEIPVGERGANKCSSNKTFNLGEAKSHTSKKSTQSTVTIQQQHHRASEQQPARHTAAKLPAMSGQAGQQAKMRGLTIDLKNLLKTRREDLHPTKPSLLWEIFLPTSTEEEMRKLFDEIWNGRRSLHAEGSRIWLYPVWKPEPLAEMAKVDAGQVCHSVEKQLLCAYAVIGASLTVRNLPQYVCKRTAGNEALVCCGARYEKGR

SEQ ID NO: 976994 - protein, 348 aa, Homo sapiens
  misc_feature (123)..(123): Xaa can be any naturally occurring amino acid
VVCQAVGYASGVEQQTDVGGSHEALQRWRFWMREQHGSRRWCFLDRWWSLHAIIVVDHDISSLLTIRSGIPVRQYSYFHGTAKGAQLRHEMDDVMIICKNALHSIVGKHRDQTCILPRRLWAXQDSRLGVHSGLPMQSIAGRSICHLSASILTIRCALSSNRAGRLIEGFTVPMLGALSMCGSHPRLVSVCSSSSIQLQYKVACLGSRIFVHSASAMAIGLLPQDLRRTCDYYVYGLRRSGLAYVHRLFPLYIPPVAFGSSGGDDVVLGVLCDLTVRPVLSIHMALRLTEACFGLGRGRFRTCTSEPFMWCSGGSADFLRVGPDPFRTGACSGPFLLGSRYLAGTAAL

SEQ ID NO: 976995 - protein, 56 aa, Homo sapiens
  misc_feature (33)..(33): Xaa can be any naturally occurring amino acid
MSYVHGIYARLTERERVRREDRVDELCHKAPMXWGPVRIALGCPERESTILLYVLG

SEQ ID NO: 976996 - protein, 226 aa, Homo sapiens
MEQGLLPILRAILVVQRGVHVRFGNPFCGFIMEGSDTLPLDSQRVEANSIPKCASQSGKGNIHTTTAKGARLPSTSLARNTPQRIGHTVEIWRSPGSQLRQTDMGPRQITKCTDIQHTRGRQPPWMKDDTGRGTVRTEPVESQHRRQRRGRTSIRRRGNNRYGVAPNDVMCLPPNTRQREDRQLNDPTTRITHNEMRADKKKHKEHDSTDKKQTRDRTARHSTHDK

SEQ ID NO: 976997 - protein, 238 aa, Homo sapiens
MIFWELRVIHSYYFIILLHLKPPGGPGGQVAWAIIPLINQQVQLAGKVDKDVRYSRAYLKGYRYLEEYRREPRTPHLLYQRDTQRSWRGAKLVRVVRPTPGEIPEHTWRRGPEERRKLQLGEGLQRESCGETREPVGRERSGAHTAISLDTIQNTHKRVYSGGGAREERVSSRRIHLTQRHFTVRGESGRERAEEEKIVAGDTPTEGEGPQKRDSAKRGARKEIQRPKWGHPPQPRGG

SEQ ID NO: 976998 - protein, 71 aa, Homo sapiens
GQAATAVAETVESLFYLYRVTGGPQIPGVVAGEILQSFIAASSRVPSWVAYSSINNVQDPSEDPRLRDNDV

SEQ ID NO: 976999 - protein, 104 aa, Homo sapiens
  misc_feature (9)..(9): Xaa can be any naturally occurring amino acid
  misc_feature (19)..(19): Xaa can be any naturally occurring amino acid
  misc_feature (37)..(37): Xaa can be any naturally occurring amino acid
  misc_feature (63)..(63): Xaa can be any naturally occurring amino acid
  misc_feature (66)..(66): Xaa can be any naturally occurring amino acid
  misc_feature (86)..(86): Xaa can be any naturally occurring amino acid
MRTSSVELXPRLGTQRKEXPGNPRIKAANKYGADVDXPPNERGSLLEGNRLCIGPPYQVTEQXVMXPRNCEQRISALNWRYYANVXTFQVSQAESKRVVRPKIY

SEQ ID NO: 977000 - protein, 328 aa, Homo sapiens
GIPVVFDSNAIAYYVSKEELRGTYSRGGESHVGAGGELAGFRYGAPTQYLGVPHLGPSLGPTHKQASLSNAKGGRGEAEIRGACLGWLDYDTTACTFISGCAPKRSWTMGLYICSGLHPCGGSYKPRLLEPFLPRARPFVPNLAHNARRFALHAWRLNAKTRTCFAGDSFFGGEVETCVRRWSQSADYFECAFSAPHFWEEDRSHAGGRKWFTGTEKQKAREELEPGTDVRKTHGGLDTAGSMNRGRLDKNCRSKGRMACMEPEGAKDAPFLKLSAKDVPSGGSERHVNDANYTHMRDPHTVRALDQNTWAALRYSTGRSCWTKYAPE

SEQ ID NO: 977001 - protein, 197 aa, Homo sapiens
MVITGGPVWSQEQRGRGVNFLGLLPPGIKVWMRSPSFLGSGGRFLQGRWAVASLGSYKTLGGSQLVVCRPGRLSGRGSGVWRLQSGCGCGVSHERESRLGVVENTTISPSEHSITGVTRGVVGSPSVCGENRDLYLYKRYTPSVYTYDLEKDKRRERRDQTYPSHIYLLSLNYLPMCGNIFISLERNNSPRGDYEWA

SEQ ID NO: 977002 - protein, 301 aa, Homo sapiens
  misc_feature (119)..(119): Xaa can be any naturally occurring amino acid
GPEKLRSMDQTRSAGTMTLGRFVLALMLRGAPRKMVGFDSVLNDSAPRPHAPGILTPVVRSALPLLPCATLSMLVSRRRGPAVVSPRACPCSPSQGAPLTLEVAHCTATPRPGETRVGXGLPEGLARRADGMGQGDGLRAAPCLPWSRRCTPLPVIAVAHMRSWGIQADDRRGHKVKSGDARQGAGTTPWVYLAETPREKGWTGATALRTTGSGTDFVGGQKHEFERHTRKYMQSWSWGNRLLAATGMNPDEVNLIEQQVARMQSEGKRQNKPGAGHGPYPIKWSMPVAENEEMKIVVTRH

SEQ ID NO: 977003 - protein, 345 aa, Homo sapiens
  misc_feature (304)..(304): Xaa can be any naturally occurring amino acid
MPIRPNRPTRPRLHELTPRDPEDTGATDTQGGQCMTHSCTYDGHGHMAWLGTTRGPRERGGTWGQEQDKSAKYPEWRHRTPIGIPRRDRKSLWDSQTWPETHTHHRYRETHGRKRARPWRIGRNGKATREHIRLASNGTKDKAHREIRDRHHYEGTHIMTRRQYWPHQLAYNGNWINKTHHAHQELARGTNRRSPIGQNRRKKRPPGHPQDRRDDGEKKKGPPPDEERQTKTMTTLHKAGRTKARGKHLDCTIRRQDRSEPGERNLRARGPHMQPKREHKETPRAQDHPCHSNTHIWTNTETRXRDGKHTNTTTEKTQQRDSTQGEHTSANKAVGNQTRTPRQEA

SEQ ID NO: 977004 - protein, 81 aa, Homo sapiens
LAVTTCDLRPCAASALNPVRDWIETSWRCSILWPTVRGFVHDHTSRSELVCMRPLVTKCKQDFLSTAAFLTSSSAAIATKS

SEQ ID NO: 977005 - protein, 86 aa, Homo sapiens
HCSRPRLAPPHYHRRLAASRHYPGREAQARRAQEEAEADGAPAVGSRRRCLVARARAAPAPVTAFRSRGVVLPPGRVGRCLLEKVT

SEQ ID NO: 977006 - protein, 229 aa, Homo sapiens
RDLTRLVRWPRYIRLLAGERAILYKSDWTGASCDEAQFTQALDRRTATQLFELAASKYMTMRHKHRRRMQRLLARAEKKAVWLKGTSQARSSTTCPFDAGVNTVTTLVERQESSAGGDFAHDVDPIDAGLSSCLPCVVEWGSLTVIIKGRGKTGTSSPQEDLQHLVVFTQVNSERRRRLRLQLVDSYQDQLQVTDTMEIRRHWGGTVLGPKSVARIAKLEQARLNELAL

SEQ ID NO: 977007 - protein, 141 aa, Homo sapiens
GSLRSGGGMTAAAAHRSDPRRRVPPPHGLGPAASELPPPGGGGTSGRRAGRAEERPRSAARTRQEEVRRKGCGDVEVAGERMEGRERQGRRTSDGVEVDSREYMITRSTEQCGRDGEQIEGTEEDTQDMEGSEWIRNIVRD

SEQ ID NO: 977008 - protein, 167 aa, Homo sapiens
GHRHRCMRYYTKVPPVLISTPIHYTCDRDYDSCLGGPVSVYDRKDVVSGTLTTYLINRPGVEAPYAFVQWVYMTDVPSMLARKVRDHDALPRIETRMHHNLPEGRLNGRTISDHTIAKDTVRERSSLRIDGRRALTRRLGLDGPSSRAIMTICVPCDPIPIIVSGHA

SEQ ID NO: 977009 - protein, 149 aa, Homo sapiens
MRRRLSSSLSGPFHRGLVYLFVPEIAPGRGRVHCACRELVRGSDGAGPDPGVRPSAFSLLGVWASGGSDCIRGVCLMIAPRGRAGPPSRSTLPGPGRLPRSQAIVAGVVPRVLEVCWLASVARRLSRGASSPLRPLTCQVLSSPCALTK

SEQ ID NO: 977010 - protein, 165 aa, Homo sapiens
  misc_feature (84)..(84): Xaa can be any naturally occurring amino acid
SKKRSLIFWKVLKWFHFSKDDGCPSSKTIFFSSFSNIREPQEGLAAWMWNVVDYQEPGPTTPNKSGILGEPLWTGLGWDGRLTXFSGDTMSCTMVGGYCDGVYARGWARGWRRLGWSQTWSYRRFTPFSTKGPPSNWSRSLTLIRISFSLAVILRGRNLRIEIIM

SEQ ID NO: 977011 - protein, 140 aa, Homo sapiens
MSGSSRRRSCKPNGEKPDEFESGNLPRALLGAGDELSDLIGSVHGADLLGAVRRGNIAQCWVGGSCMSVSMKSFRFPLSVNLMILVQAKEPKIRSSLRVTWVSTYRLPDGEAECRLQIAVKPVVMRAVEPNIEESRTRTE

SEQ ID NO: 977012 - protein, 194 aa, Homo sapiens
MPGVLGTPCPQVLESPSLSHGRLGQAWIILRGGAPHQEDGLPMGLTSQIHHDPECGKGFSKTSHLTKHQRTHTGERPYKCLVCGKGFSDRSNFSTHQRVHTGEKPYPCPECGKRFSQSSSWSSTEDTQRGAAYACTQCGKRFNNSSHFSAHRGRTQVRSPTPAGCGRGFRRGPTCTSTRDHMGQGPAKVQPVGP

SEQ ID NO: 977013 - protein, 201 aa, Homo sapiens
HSVGVLSILVDFSQGEWLKGGAGRADRKATVGFPSIQGKKNSVGTMLRLELNGGNHSLVLGVRMHVVQVTFRTTVSSFVLEEQCTFLRVWQKENTKHLKEKHQGCLQDANVLCVRRVLRAASSLKSRGFVACGHLWPLPCVPTVPCGAGLVGPPVALLLRQFFQWGLQGVLVSHRRVGEREKEPEIVGSHPGAVPKAGACG

SEQ ID NO: 977014 - protein, 105 aa, Homo sapiens
MTNYTLNLYTQIMSPDPTPTSCSYDTTQITPHPVQQSHNYTGKLFHKTSQIHASHRTLNTDSPNHNKNTASRRAHQHTLSAHPRTERQEGYATIRKQTKKSITEH

SEQ ID NO: 977015 - protein, 72 aa, Homo sapiens
GVIYSIMFARTLTHSAKLMLIVNREYARYDHVSCHASTNEKNSASFHLVAAINVSLLIGNVKRHCDKSLFYI

SEQ ID NO: 977016 - protein, 223 aa, Homo sapiens
GGGASATVRSTRQPAQPRRRRAFRERRSEDQEWGFGRWARSEPGARKSLGAPDACPVLPWMPHRLWTWEMLGNCNLPVPRRSLLPPGPPVHCAAPCVSSGPRMRDWLPPELRLIPALACVHAATLMPPRLTAWATCMLSLPCAPSGNHDPRLLGTMDAMAYRVLVPARGPPQPRRARRLLFAFTLSLSCTYLCYSFLCCCDDLGRSRLLGAPRCLRGPSAGVQ

SEQ ID NO: 977017 - protein, 411 aa, Homo sapiens
VIIRKGRDHYAYSYYPKPVNMTEGLPVDIILASEKDEHMMYAAVCSASYLQTMSIPAGGLMRLGLLLHGAPIVLLDTLREDDQAPGLLCGVYIEVRMPMLISLVVCASSRRVSPHSCARGTRGFPPLAHTVRTSLVKPLPGMRVISSEHFPCHVTQFTANELTLTWALERVYRGLHTAREVVEDALLLERAWGLLDEYDTKGPTVQSVHARAKRSSIAVALLILVPDVKLATPIAAWRPQVAGLIAHLSIEWLTTDGQNLRSISHSKGARTPETGLVSFLADIGSWHGRLRDYHASVHCFDPKFGQKVGQGWNMLYWVMARDSHHETYLGDNTELIEVNNRKDPRGRKNWVPAELTWKQSKGQLERRNRGPPEYPYRHDSTTIVVDKKYSEPHDNTREDSTTHKNKEHHDT

SEQ ID NO: 977018 - protein, 151 aa, Homo sapiens
MFLVKVYAVVRPSYVVMRCVPSYVHVGQCNMVQAAPAAPAVGGLPCIWIDLPAVDTLVASVYLEADVGVWIVLAMDCAFLTWSWLVGRCPGFRFGGRAACSSSQRVSLGADLIFSCLHPRVHSMPRRSEGFLFLGGIVDVKPASLDGAVYS

SEQ ID NO: 977019 - protein, 138 aa, Homo sapiens
KIEKKEERRPCKTIKKEEKDQDELETAGPDKIVVLGVTKDLGKQEEWSGTVCDGINIERGESRRFSVDKATKQVHKREAPTSQGLARSRKARDMRETSRRLIIIITKKGRESARGEREREIRETERRGSASSGSGEQR

SEQ ID NO: 977020 - protein, 187 aa, Homo sapiens
  misc_feature (137)..(137): Xaa can be any naturally occurring amino acid
  misc_feature (150)..(150): Xaa can be any naturally occurring amino acid
LGRLQSGSDRARCMSCMVAWRTAFSWLCYEDPTCSRRSVPRKVPRNAAGGGQCANEVCLAYVRYDDTSCSSFECREAGAILAPSWYQVRITRPIGIRTGALVPCSWCTRLRGCLYTVHVRHLMRAGYYTCGVLQYGXCGTRCFAYMLLVXEVSPSGVQRCRWEQASLPVVDWGQRNPNPSRDLGKAS

SEQ ID NO: 977021 - protein, 311 aa, Homo sapiens
MADGAGSQIPKCALVVDSVLRDAYNWWCRGCRCHQWHYAVAPFHTSEVTWCWYYCQPSVLMASCCAICLRRRLASADTLRLRVSNVFRKMTDLLTKTGSGGRFSIIARMQMLVCSTSFNRLFSQECDEPPGVYVFLRVCEILDRCAHGQSNPFMELSFSPANLSNRTSDSMICNTGLLGKNKDEIMVMKFGTQWTWCAWVLGSIVSVWYLFEESCGCDHLFGLTSPLIGEEVLKRKEVGHWWFREGTVMSDVSAVGPGGCDWRANGPNMCFPVWAGRPQVLWLAAVREGAREREKPQKYREQGKQSLRRNT

SEQ ID NO: 977022 - protein, 197 aa, Homo sapiens
GETPPRGKTGSITQGQPHGVLRIGRKGNPWGRVPLERLANRVPKTSEKIWVLVEPRERKGWGYRGPVLSQKFSRALVVSGVGDFTTPYVATWVASSIQWGDTCERMRTLILKHTGPGHSGCPGQMAGTQPQCGSPSFHILALAKNWMGVGIGKACSVVVGNSGKEGHDIGGSAWKRLGSRNGHNQKKITMACGGTTR

SEQ ID NO: 977023 - protein, 309 aa, Homo sapiens
GRVATGPLVDPCSRTSIMICLVVTIFFNLFPAAEPAVLSSEGCVAGSLGSVMTRACPLDRSLLRSQEGTFLAVTASDGGSRVCLVGEIVRVLREERSLDVGARVKLVQASEDLLACGTSGRSWLNARFYLGVCVKYVASVVLGVAIGFGRGLDVVRTSRALIGATEPVLDCPDRAAIRGDCLHRGWLRTVIHGSDSVAEAQREIALWSAQTELSVWEEERVGTGVFEENRMIARTRGLHTPRLRPGPKMAGILAHPERAWENPLDGCDIALSDIDVGGQASKTGNRGTTEECQSGRRGNSAILLRHGPA

SEQ ID NO: 977024 - protein, 203 aa, Homo sapiens
MIAGPPLVQRARGGCLDPTAIGDEPLFSHQVFKFISMELGEAPLLGDVGSSGGPGNLNWALAGLNHMLLVWQLGRGWDIDNWANGEPGPQVPVGLPKAPRMPVGSLSAPAQDNILGDADDVEGVEADPDMEAILANNFYQDLLGTNLGQPSRAPEDSVPQYHSRPHVWPQRGNIIHVWPFSAPGQNGDSGPRYPRTKRNGVRT

SEQ ID NO: 977025 - protein, 36 aa, Homo sapiens
MDERHTRKQAWRYPSANCTPKGNQPGSGDHRASASG

SEQ ID NO: 977026 - protein, 289 aa, Homo sapiens
AVPRRLLRLGLSPPVWPVQGPEPCTVAEGLVLDVRARLDTGTKCDQPCATGFYGEGCSHRCPPCRDGHAVYPLITVASVLRVQQAGWIVDRVRDQVVAMALYGEDCAFVCAELLAADTATSSGALPVQPWRPPVPHCKRDVPLPGLQRLADCAQACQLPLRTLCDPVTGACHSRKPSSAEGCDGLRGCGCSSCSSAAALAARLLLRLAVGKDPLRAVELSALGGKKAPNRNMRGASVASALKLPGFRLRREKLPKVVVDTTILVTQSMQFWTTSGLGSLTNCLSGLLSR

SEQ ID NO: 977027 - protein, 155 aa, Homo sapiens
  misc_feature (133)..(133): Xaa can be any naturally occurring amino acid
ESRGRAQSDVKSQARPGALAEPRSSALSYSPCLCMSARRRGGRTRSCELSGQSPRPPSASVTCGVGPRPRQGRQVARRCSPGCCALTSDIVHEHSRGTRRGRPGWECVRIGWPGFEGAKHLDNDTRTGLSALXRDNNCTNVGGDCQQTILCAKAL

SEQ ID NO: 977028 - protein, 202 aa, Homo sapiens
MVEVPWHMPCVARHALATRLGSLAEWPSNGWTLWWLQCDKWKGPHARTQHLHSIHRSELTEARLLSTKDPHTLTGPHSMRNLKGCTPRRYSQTDLDRWPKGETTTTANRKQAIESTHRDTLPYEKTHDPEQNNDAKTLHNWTTTGHRPLSTTLRQTTRGGQLAPIKHDHNWRMNLTLHGGKARVHEPWEALQATDNGDKMMA

SEQ ID NO: 977029 - protein, 69 aa, Homo sapiens
RRLVLSSRARGAVPALQLPSGSRSPIFVLASALCSRCPGPCAKPWTRPADADPTACVLGRQSFALPRPA

SEQ ID NO: 977030 - protein, 31 aa, Homo sapiens
MAPLAPYRSGPQEKLGKFLGNVTGPQPPDSL

SEQ ID NO: 977031 - protein, 195 aa, Homo sapiens
MEGDGRGVEMPRVRLLLSGSAIIAALLITYCSVKCCAPAIIAGARPRVSEIPPGADRAAGSGVSDYDYLDLGKTDAYTMLRLTTLASGSYGGFASRPHYPRGRSPPSGVRVFPPGSASIRTVQLVMRPWGPVPRKLLYHLPPVYRSLILDDRGLRGFPKNRVLEGVIDRYQQSKAGGLKCQLCEKAPKEATSCAK

SEQ ID NO: 977032 - protein, 57 aa, Homo sapiens
MGKMGRRGYLLFGIPGSLGGHGGALPPGGGPWAGTEISGQLKKRWISLEASGTPCSE

SEQ ID NO: 977033 - protein, 122 aa, Homo sapiens
MNSWGWVPTFRLCAQTQCALFGAVPPIRRQACANNQRRPRVFPESGARVRTLFFSPGGVSPDHNPVWPSVKTRPQKCDGLLHKRLWLWPIRVGWAPWSEKRGRVWGNHGALCMNRGSLLGFS

SEQ ID NO: 977034 - protein, 245 aa, Homo sapiens
DQVLSEFSPAVPAYHEVPDAKECMAYDVVPLLPDVTSLPGPAKARVPTLPEWCCSAGSSSAPGMDVCLERDTASCLTICRWSCPCLHASIVRSYAMFIPMCALHVSAMRATSMTSVRCALLAPWPPDATQVCVFLCPGFVLCITFFNPLGNRAPSFCNPLWALHPLALRIVLLVRALCRIWSFGSAHSGNVTPIRLWNRYSPLIPWVGSVALAVCTSVICVYFAPLDIAASLLLFVCSFFLMCSF

SEQ ID NO: 977035 - protein, 67 aa, Homo sapiens
GTQFPGRCMEGDGGGSDGGGMSDVVPNPLFGSPFPWSAQRWSRSPVPLAAEQRSYGVGGSSVELLET

SEQ ID NO: 977036 - protein, 90 aa, Homo sapiens
  misc_feature (70)..(70): Xaa can be any naturally occurring amino acid
GYLSGRAGWIALCGAPGELCWSRDKRYAMAAMRAQTVAIRGHPGTTGSDSMEKTGKILRIPMDIWQRKVXMRKRSGSTEHTARHITDGPN

SEQ ID NO: 977037 - protein, 159 aa, Homo sapiens
MLRRVRVKEPASSRLGPTRLFGRQVIRRIAAEPGHAWEILPARPGDRVLASITGCGCGRATNSREDGPRPGVGGAEAAVKAAGIYPACAGMLVPVNPSRLRGPPCVVGMGMFRGEQFGRCPGAGPLGGQLKPQLGQRGHQKNRAPGRAAIHLDAPKTPG

SEQ ID NO: 977038 - protein, 260 aa, Homo sapiens
ARTYRGAGAADGSQPKPEPETRPEVLVPSVWVSSPVAVRMGDEMYSQGTHRTEKNDMGMGTQRARTVGGALGRTGRVDYWTEAMTACVCWDEALDGTTTTAAVSASGATRHQGKTGPPGDVLSLCPRRNCGRVTSPTYHRSLIRPLTLGPSHGGSRQSSRAVLGSLSEGDLPYPRCLALVGLRRVPYLRSLGRLPLSSSTCGNFAMCQGPSAGEGPPDRASSRLAPTFVALRFEVTLQLGVALWACGALFAILLGVSDFC

SEQ ID NO: 977039 - protein, 222 aa, Homo sapiens
LVGHRASGCQWRRGTTVSCSEVSWLGILCPGRFLCAPRSAGATSDCLGRRPVMSAVPVWVWRASYAVWATSRSLAVLPGLQAELGAISTGNVSLSTASRCVTWARLWPAGRGMAVIVGGSSHWGFTLGPMLASLPAPGELAPWLALVFARLRSLLFMLLLRCLETLPLEKRAPSIALGFRDAVICSAPLALSALLGCRVVARTHPLERGSAACAAGLCLLPL

SEQ ID NO: 977040 - protein, 254 aa, Homo sapiens
QLPSRVHHHLHSNSVRPCSFSAGSITTWAVIQCGPCSFSAGSITTCDSNSVAAHAASQRGSITTCAVIQCRPGRVLQGGYSCTTVARIIAGVSAGAGPRGGVHDHRRGKFSEAQCRFPGGSSHQQLREEVQMQASAAVPGGLHHAQCAEKYSGGRCSCRAGSITDMRRKLRCTHMQVPTGDPSTTLRKEIQDAAHAGFHSGGPFSHMRRIIQVRADAGHTGGSITSCAGIRGSTCKCPGGSNHQMLRSHGGHEI

SEQ ID NO: 977041 - protein, 68 aa, Homo sapiens
SRHRPLDPIHTISDGLKNADSIVWLPCLILDRVSHWDYSIALLLLVSADGLQSAMCIHQSLPYAPRET

SEQ ID NO: 977042 - protein, 288 aa, Homo sapiens
GPRSWGAWTRPRSAGTMTLARFVLALMLGALPEVVGFDSVLNDSLHHSHRHSPPAGPHYPYYLPTQQRPPTTRPPPPLPRFPRPPRALPAQRPHALQAGHTPRPHPWGCPAGEPWVSVTDFGAPCLRWAEVPPFLERSPPASWAQLRGQRHNFVGAPTARADPGVSTETPWHGGLRLLLTADTDQYDFVAAKNDASNGPSASHMQAGTPRAPLHWHQPTANYTRTTQPISPHPPASDRNPTTPQTRISPRPHPLTGPLPPSHHTQHAPHTNSTASPPQPAPPPPHTAP

SEQ ID NO: 977043 - protein, 107 aa, Homo sapiens
MHMEGPRPACCPAYPRSFVRNRVSKGNWITRMREDAVRLAEIIGFSVLAGYESYGDPRNRTVFNFSWKVTLVVFQAAAIRPVWKKSLGAKVSLLYQLNTELSPTPTR

SEQ ID NO: 977044 - protein, 155 aa, Homo sapiens
MRIVSGYKTGPSNVQDQRQEQEKKQRLLARVREEGLLCNTWDVPTIETTVSFEQEVNIVTTLVENKKAQSGGDVQHVAVGSHLRLVVFLPALCRYYGGSLTALIKGKARLGRLVHRKTCTSVAFTQVNSDMTKGACGLKLGGSYQDQITTDHDTD

SEQ ID NO: 977045 - protein, 324 aa, Homo sapiens
KTPKWLDDCRVQLGVCALCGALCVPCVIGGTCCVCFLLDVFLCMCASWCAGVCCACGLWAWWPDVPAVMLCCDVQWPDGPKVTLDCPVTKFVAALVKDMKIKSLEEIYLFSLPIKEISRSFDFFLGGLSQRMRRFDTIMPVHECIPVPGQCTRFNGILYAIGGLQMATVGSWVLSAPRSVCTAIRGAIILANALQSSPCAEATGRNKIAKPHTVPCTGDTAACGSCAGYASSLHPGALASVSHLCLRKLLMMRWYRMTATTPVRCCIARWATSARPPLNAISKTKCYLAPKSGMRVIYQVSIYDVTDKYDKTSKVSEEATRYTY

SEQ ID NO: 977046 - protein, 224 aa, Homo sapiens
EESEIIDFFLLVASLKDEVLKIMPLCRSIPVPAQRTRFKAILLLSRDYNGHDRSGVFRCSKGGGHSLDPVGPLMLALSSPIVPVLAECYWRGTGSVEAPNTVPWKVTGTLRVCAGTRSSLRPGAAGTRLRALCLSKLLMIGWISDEVLHLSAVGCTGTMGRFVKAKALMPFRKTYSFLYPRSSGRRLVVHRVSLSMEFTDHRRQDHTHEFSVQLDVRLQLWVQT

SEQ ID NO: 977047 - protein, 144 aa, Homo sapiens
MDAFMGGYATVAMTEGETVAARHCGDIGGLGICARRLNPMPSMEEEDVRQSRVQLIRSRESVLVARWPYTSSQKALVRLWGHAPCRGGLGAVRLVDLGRLLVAVDSVAGVPLLLSSLAGVDRRGFGVGYNLLDHTLSSLYLRLC

SEQ ID NO: 977048 - protein, 163 aa, Homo sapiens
MSEAGWLLCLRDRETGSWAAIYVDAASTRLRPSGRGSLGPGSSRRALRVVRALSPRLECLLASAELGQACTRVGRGVPRVVAYLRPDSSARIQFNGACGVAGRLLLGKSASRPLTCPSSTSPKMLSDLRFSYGHAPGSSACTVTYLAHAIVPLMAAIIGVYDL

SEQ ID NO: 977049 - protein, 214 aa, Homo sapiens
MAAHSHKNCLTTRTSHTPYYHEQNYPTHGAPPRTENPPPPASALIKTNPTKPHAGKHPTHTASTFPTTNPPETRAAPPGATPPHWARGTRDIDKTTQHRTRRNDTRILPPRAVIPCLLIITQTTKQGEVLKLHERRAPTSNQRTRTPHPPRPLRQSKQHTLHVVPLTAQYQSVRQKQTAPHYNIKPAYQRYYAHIQHTNTNYRSLNVPPPRHPA

SEQ ID NO: 977050 - protein, 219 aa, Homo sapiens
AGYVLNWTLVSCTAPEEQELCMTTTGVICAEFLVRQCICVLDTGLCLNKHVVSLALIYRLELRVLSTSAIIGGEIHTEAFGGATTRSFAVCIEDFGVERLRVLRSATRITCTRSCLVPNTSPFWGAVACCATVVHGCRCRHPPFSMYFLVSCVKLRVCSPGGSVVFSCIDYSSLFRQETTCEAARLMGVCVSGGPSLVREGGLRRRDDAQRQLSELLLN

SEQ ID NO: 977051 - protein, 293 aa, Homo sapiens
QLGGSLFLDVPPTFPPKFQSLPITPKKKGSEGKGWRGFGAPGASKGEQKPKTTQRGVVTQKLTIQEVIQQEGDRGGQRQGDRTEKGEFKSANSTITPPKRGVERKATNLGRCRSVNKGGVVVETLKEEEGKQGGGHLYSWRMETPLQTQGAAVTQTVTPLPAHGQHKVREKKSPPRVVPGTQLDPWGRWSGLTWTLGWTKQQHRGTPRVEKGTPLRDPKKSHGPMGEDQKDQRITIRQGPLSRVWEPCYITRARARVYIQNHLAQERGLEGTALGQKLSLATAPGPDRCGGPT

SEQ ID NO: 977052 - protein, 357 aa, Homo sapiens
GLTTPRLHARTFILRPRAPFPTLSSSPRTGGAALSALVHSGARGRALPLPPLACTDRDDDGRDRTHEHKRSRHRRERRLPSSSRRQRGPPTSSPVPLTRSQMQPAFCKVDTIEEDYVFIELNALARQLTDVNVNSDKTPRPNIHTHSPAHTLTTLTHHSTTRHPTLPPPALDPQMTPHAPLHPHRTRLTPHWKPNPTNAPQHATTTLAHTAQHTPHPRPTQHTRPPPRPTTNHPRHPDLAHHRPPLPHTALTPRQPNHPQPSTPTPRPTVQHTTERTQRDNQTHHNPPSQQVKRDPQGTNQSDDATPTRPDATTRAHTRPHTHRAAYTRPRDPSSADRQHTTPHTTKPGTRPTTDTA

SEQ ID NO: 977053 - protein, 214 aa, Homo sapiens
WPPWSFGFQIGEKVGYTDRMGGKFAGLHWPKEGKGSLRGGPPIPVKGGGRRNRSQTRGLGLRGAKQYSPWARADTCAGSGGTNRTRNEDVHSQNRGKDAPTDGQSTRAPGHNIVLRRIGKTPLRGLEVVAKGAMSQEGGSPNGLKNGRGAPPISKHRVGQHQGTSAPSKARTRADPPHRPKGRPRKRVPARGGPRGSTRTGTRSPASADPTRPP

SEQ ID NO: 977054 - protein, 180 aa, Homo sapiens
GRSSTYPPVTRQGRGHLHVCTPPLWPFPTHLLPERHSAQRQDWSSVMGISLSWLEEHLRWLLSCSWLVPLPRSQATDLHVPVSGWGPLEETGMPSSYQCYEIAYFSEIMREPPHPRDPIKPGGGRWGSPIALSQEFPGGCMQIESSPTVRRGHLTLSVTAVWRVRFGAFWFQSLSSVWFI

SEQ ID NO: 977055 - protein, 220 aa, Homo sapiens
MPTLVIDNGSGMCKAEFCWGLTTPRARVSFHRRAPQINQGRHGWAMGFIKDSYVGYEAPVASVAIHDPVSTPLSMAIVYQLGTDYGEDLALHLSTTMLSRGSRRSIPVLLTEGPPEPAKDNREKMTHDYVLETFNQPVTCYVVHRSAVLSLYVHLGAPTWHCLWYSGDGVMRTSVSPSTEGYAHPHTPSCRLVAGWAGAERLTVMKILTERGYSVHLHER

SEQ ID NO: 977056 - protein, 47 aa, Homo sapiens
DRRVLRPQHELTPCDASAPRVCDRVLPAYYYPEEVTYLATGNTTYEK

SEQ ID NO: 977057 - protein, 261 aa, Homo sapiens
MRLPDLRPGLPGAVWTRLYCVSASGPSGDFASSRAVRIMAVGAPCWCEVLWVAAKARSGCWDLVGDTAVSRSVWPTLLICLPESPGLAGVPHCAPSQAMSRFSPLELAAGGVRGCGAQLVTVGCSEPSWSPGEGAGPGEQQSLDVEAAEALQAGPASPRCRFFFLVLAVVGETLIPHYSGRVIDILGGDFDPNAFASAIFFMCLFSFGSSLSAELAMRLVHYTMSRINLRIREQYYSPGGQDSGSYRRLDRGVDSGEVGYT

SEQ ID NO: 977058 - protein, 194 aa, Homo sapiens
QALEWALSLSAKIREEYPDRIMNTCSVVLFSPKVSDTGVEPYNATLSVHQLVENTDEYLLHGQQRAHRMYICVPATPEDMTYYSKAVRGSEPPCLSHHEWCHHCSVSHGQLNADLRRSWQSQHGPLSRTSPFHLCLVLTLSPVVEASSIELSQCRKLSQQVFDAKNMMAAVSPARRYLTVAGVFRGRMSMNGGR

SEQ ID NO: 977059 - protein, 31 aa, Homo sapiens
  misc_feature (1)..(1): Xaa can be any naturally occurring amino acid
XGTRFCIKWAHLNGIPGERFFLLLWAGVRGE

SEQ ID NO: 977060 - protein, 220 aa, Homo sapiens
VELDQEELQLGRGGAPVAPGPRGRGVLLLAQRSRPSPRRGAFPPGLAGFRLFPFASVNRQPGDARGAPAALWVEKLPGASRFHSFSGWAPSPLSPFPGAGCSRPLRSPSFSSGSLPLPVRPDRPESRAPQSVASGMGPRLPSCFPLHYPVVLPAFLYVPRAQCSRQSVRPPSQDRSTRAFWSPFRGRSVSLPPFSPRLEFHDAEPGSSQPQKMLPWRMAL

SEQ ID NO: 977061 - protein, 184 aa, Homo sapiens
MRESDSIGIPLIIEPSGQGTEFIMNEYKDRKITRTRFLDDAFRKNLESALRFGKPLLVQDVESYDPSLNPVLKREVREQGGKDVNQSRGTRDRPWGQRRTLLAPGDQGEIPQNTGPGEPNVHITAPRRKGNKDRDQSQQQREKDESKKKERPNTRGNSTDNSGKTQQSETEGTRHTTITANKRE

SEQ ID NO: 977062 - protein, 339 aa, Homo sapiens
MSKRGRGGSSGAKIPDFHWVFREELEDQCVADKHREPKEPVYHLREGDQRDWLTSDFPLLVCSDHGEWPTVRERATIRRLRKKTGYIHAAGSFRQPTGSYSVDKSLAAVSLTFDTSNCSESIVEADRRETDEGCWTLAGPESKGVCMTFVVRCGLALQIARQGSLAIGRSPRYYVVSTHRRIKHKSAVSEWKTSTNLSGSACGGVGGATQGASGSGSKGEEGGPPVARHGEAKAAGKHCARGRLISDRVLNRAIGGGDSCLDDFGDTAMREDPPAKESRSLGSMEDTGVAVGSWGPGDKWLVLRKHTDTSSRERAWLRRALVNQGNDRHTDTSKRTQET

SEQ ID NO: 977063 - protein, 208 aa, Homo sapiens
MECASASTGPFSLQAQGHAGKGHEGKGPRPRARSAGEAGPPYTISPYSQNPSFGAGGLRLVFKLPWLTESHNWRGWGRGAPSAFRNSQQGNGGDKGFNRTKCSGSNVSTWVASKGLSRDKSPRCPGQRGSSSIYGDGKDTFNQYGHGDTRCPISCGDRLWSSQDVVPRRWLKKMWAGGKGAKNGFPKKENAPGCHGKRGGKKPPKSQV

SEQ ID NO: 977064 - protein, 230 aa, Homo sapiens
MSPQSEISEVTSVLEAGTSEGRLSAWSGWYMMQIRAPDVAETPQRLGIGHKTKNQGPAGRDGRDGTVSQACEYVTGIDPRRSGNVYAHHNMIQLDLKTLHNTRSTLSIAIGLTSGTQCRLCLSLDELKSSVRLETLCVKRSLRRAIDVMGLYRNPHDKGDNARTIRDRDSINPQALGHPIGPRCDRDPIWAQGCAFTPGATCTILIVWESGWAVNTNQQGKARLWVKGIG

SEQ ID NO: 977065 - protein, 232 aa, Homo sapiens
MLLLLLRVRGLPRMIGSGMLLWSFCWVHEAVGGMLLADTFARNKVCRREARGREIELKRRTNNEGEGTMIFRLHNEGHGDLSPFSSKDAVYHDAKVLDKGRLPRHPRPTILMSAWRGHTLYELRTVKTGSRTLRVEPELLLIMAADKRCVAIETLQGMIDACIGNLALSVHFGACGRSRRCSSDWRDAIALLRVLAVPRGTARICGLTCKCVRQGRPLGAVRSLPTVGSGPH

SEQ ID NO: 977066 - protein, 92 aa, Homo sapiens
MKRFPTENDPCVLTWTWYLRTSHEAHLLASTKERRVVLHLQKPLGFDRQQEVNDYQFRRTLLLGQEAGFREPAVGTPPVKGRVGSGRSNRCG

SEQ ID NO: 977067 - protein, 248 aa, Homo sapiens
MQSRTLSARACSAADSDRCVVRTASPRSIGMLRSQNVDSAVVACIVCAVMAMVDPRRSGRCCVVPQQYACLSLGVIAKEKEALAPERRTPKSRIRPGLVLRHLAMSGFSSQGGFGSWKGDNRDYFWVVREWERLGPSGKLEATSPRAGEGPAWPHWSESVFWVHSEDSDVLNFPEGTLGTECRALALVPLGIRALDMAVGGAAGKKVARLIPPFFQEFRHFWELCSCMARLGLSCFGKAVGLLGGPAG

SEQ ID NO: 977068 - protein, 137 aa, Homo sapiens
DRDLEPQRSHVACAEPRGVDVTQQYRPLADYHLYTVTCNSKLIMDLLGWRPRLACGQLSAIVGAVVEEFRLAGSTRTSVCSAAPILMGLPACGSYVSFKCFWIAWVAMFGWSWSCKGHARAPNWCVTCESISHAPVS

SEQ ID NO: 977069 - protein, 270 aa, Homo sapiens
MTVVTGGMSQCEPIQLGRAGQQGIVVIGQHSPVYAATIADERNTPCIDFIGNTPLSLLSCAFTLQIDVARSEPVDQRHLTTGTSPSHDLTPACGSSILLVVKKRNLQLELTARSFMMISSFLASPVELQPPPEFYTGDLHNDICVQHDTMRWCRHNTGLRGPMAKSSNACTIRKGWIDQYGPSIVHVSIALWPGLGPSQRSVEVKEYRALTVAELTQQGFRCKEHDGACEPPQAILNGGAVFPGSDVPCKGGAMSKLLNVPTRTAVPFWD

SEQ ID NO: 977070 - protein, 183 aa, Homo sapiens
CRGGRNSRRREHGGLKSTPGRRADVRLLLEQCIEVATRTAVTDCAAHPHKEDGVISCQRGTETIRRTGCTRDRWIKYWSQHFSHTNGLSLALRSGVTNHDSRRIFVGQDNGAVMGSFSVSEDFEIKSTFIKTYPAHQNRLSAIIFRVGTECGDSRTVPRATCSELRMCTRKREHAREATSSRS

SEQ ID NO: 977071 - protein, 58 aa, Homo sapiens
MQNFWMTAKSLTLSRNNTLYRFTHITSPDAETYSNVSNPPTSIPRRPNPENGRGLWAS

SEQ ID NO: 977072 - protein, 135 aa, Homo sapiens
MGSCDSDEPDIGAWKVPWKWEGASGGTGRVLKQMLVCWRAKRQPGPGATDFNSLWCELTRHCWRPSFTIRVPSNQIRARLYSKSNAMIEKPSWKSRVTGRMLHHAELTHRRRPVYQVTAIFAGIYITTSSDAVNP

SEQ ID NO: 977073 - protein, 266 aa, Homo sapiens
GSTAVPVSLPTTAGWLPKTVIQTPLASPAPVKELSRAVATCRGRGGTIRLQQRADDASSDVVGDDNGDCLARSPMKITINPIYTVWKVTYLDERQPWVTVYEGPEVETLSLDVSLEWLRSYNAAPTSEVSIDARMVSTRERRTTARCRHMPWTIPEGKQCVSSVVMDGSGPITALRDARALTEGRIASDVDEVPIEADYIAGEARGHKTPTSVSEESSACTEYLDSIRRYTRAEEATVSMARRRPVPCWSCLFTLCRLRMVMSGCC

SEQ ID NO: 977074 - protein, 391 aa, Homo sapiens
GSTDDLAGYYVAPRMSSHAPYRYPLLGDRDPVARSSPWLYIYNDPWPGTILDYYAGNPDKYEVMIYYHLQTGTTISRLPRSLTWLLSNLATLLTAPLARHPRHQLHYTDSPYYWGHAAVLNTRLLAGHHHTTPTTTPPWPHGHSHTQTCTRSHDTNENASAHTPALHIRRTRDLGNTQKNTNTHTRPKRCRKRPTPMRESMLPSSPGHLHNRHRTAQRARTRGARYPPQGLQHSPTDISQEPSGALGATTRTHGQRSRTARTQPSHSAAYQTSSKYKKGRPGPYTPAPRPLRDTNQQRQLRHKPAPRQPPTNVATPHTHQVIREHDHNAPTQPHNSRAKHAPTPYARLTTGPSNHANRDLDITTQPHSPLAQPNTEISTTTTSTSNTHTNG

SEQ ID NO: 977075 - protein, 285 aa, Homo sapiens
AEGACGPLAAEQRSRAAAAGTRHPPPGGRAAASRLLPHMTAERAQPEAGARSSSASSTAVNKYLTGEAFGFKVKRLCASSLKKKQIWTAGCSPLTGGQRGVCLRSHLGRYLAADKDGNVSWSARVARFPIGRFLIGAHEDGRWSLQSEAHRRYFGGPRTCLSCFAQTVSPDEKWSVHIACTLRSAIYSVTRKRYLRTCSCAACDEIAWTCDVPWGVDSLITLRFQDQRYSVAERDSVPCANEGAGGAPERHWVTAESVREWLRRWEAYWRAGPREAQGGGPGGRE

SEQ ID NO: 977076 - protein, 298 aa, Homo sapiens
AVAVGCDRRREAGGLIWTCAVACEPACMWTCARCVFLTVGAPEGAGVRALSTSCVGVRVPLPPAALAYLRYLLLRARLGGVQAQQRLRACTSSGVRDIQKQVREWKEQGSKTFMCTGRPGGHCTHYVSRKYKNDDKNIMINLMDILEVDTKKPDCPCGSPCVTMGQVTALLTSIGGPLPVLPELDVTSQWGGLIMVHKASSHHSHQRTGLFQHNLDLLRRWSWLMAGFVAMHSRPENSDLFYAEPGPCGTLRFLWAVKTDHSGKNPYSCYQPDGLSIWPLPAVRRAPLEAHPEAHTRK

SEQ ID NO: 977077 - protein, 239 aa, Homo sapiens
MRQFINPAGLVLMLLVGSCHRSGRFWCQISLVPEVVSLAAAIWVLFHHFQPLQGLGGPGGPNSGSLGWNVGWGIDAVYSEVPHKFWVMGANPRATPEVHGAALGKQLAVVEPVLIVGSKLLGLGQFDGIHPFGDFQLPGLLEERCKALTNSGGDTSLPGNSRASGGLNWSMAFLDPTRVTKRVGITKRNRRGIPVEPPREPHTHTEETRSHHDTNRTHPQRNKKPYKTRATPIRHKVIF

SEQ ID NO: 977078 - protein, 386 aa, Homo sapiens
  misc_feature (54)..(54): Xaa can be any naturally occurring amino acid
MWQTDIHYYIGNRRGWCGRVGLCQLNPASWRHDSVNQRVARVSVDRHHEVDTLXLRAGDDPMYMNGHRTDATAVGEGRAGTEDRNMQRRTISNRLPRTGLQSVWESWEEFTLKTIRNSMDELEVQTVAAKAILGEPFCANGLATERRIELVHTSIYLAILGALDTFTNDNKGPRPFGSTPKLTRTRTKTPWGKDRPSEVASLFILRGVPRGNQNSYAPLSTPPYALPAHVEDFGLTGSKGLNRQGSRRKVNPAEDPAEECLCNCSSLIWPLSTNSPVWNDSHSREMHLLKSTQDLGPWRSPGQQQNAEPCNSPNAPNTEHTARTQAPPGHEPHKNDTAQQPQTGKPPSAHPHRLTHNRRRDWGEKDITVYNVTHTDKRGQNDPQHH

SEQ ID NO: 977079 - protein, 124 aa, Homo sapiens
  misc_feature (60)..(60): Xaa can be any naturally occurring amino acid
MRSIHRFRVPTRGALNPVVVAPKRLVSGRLFLPRHREFRPTASGGYPQEEHRVRAYQMRXLQRQFDFGKASLKIYMPAHTSKFLTSKHLDTPRLLLASHALRVQSARLTIYGELLAQPRTPKGS

SEQ ID NO: 977080 - protein, 473 aa, Homo sapiens
MQGQSILHSRSASRTTFACAPRLDSEITTHITQHSFSRGTTGGRQPCHTPVAGHFHVLVHTQNAQTGNEEGQRNVRGRHIRQHARTRSREPREARTSHEELAGGRKRENNDRTTVEDPTPVGSSAVQRQMFPKPLDAIRVAMATYADGVGVNPCEWARLVFVGTWQGFAHGVMERMVVLGPYNVWFPWHPVGLSVWPQDGGERTTLPYGATLNYVQKALRGPVAEEGNNRYVGNRHQAYSSLVGRNLPVGDSPHFVGRIEGVYPAPWDTGSHKLDARRCGKRERLRIWETGAQSSGAPGTFVGITATVTLTGHFKAGPPLGFPHAGDWWPTELPGGGDTNHYARRVPTGQRSAHKVPRHNDGRIGSPMTPPGGDQGLGGPTGLFRYGGHAFAAWDTLIPTKIIATIAAGRAHEIPHAAKQYEVRGPHRHLHQHDTAHSVIRDTDEHKMTSRQTDVSEQSVTEPTNEKITSHTV

SEQ ID NO: 977081 - protein, 127 aa, Homo sapiens
MAPRGLQLSLTLEPVKLTAREEAGMTQQDEKNPMDFNLINCETRYLTEPKGPKVTKTGITEYRGGDSEQKPNSEQYMLRRSPVNGNYYTHCCNNLTKEEVPWIQRIYSRVYQHGSDSQCIRMQGPKK

SEQ ID NO: 977082 - protein, 213 aa, Homo sapiens
MVARQALLLAVYVAAWASRRAAAAATIAAASARAARIGSLAGGMPRGGEAPGSGQVAGHMRGSHNPFTVDLRTGRWEPRPTAASLMLSPGIRSACWSTADRCTRETCMSCTMCEQAYAGHLAMVALVRGFPERKMATDTTDRQVVPFRCLPGEFVSEALLVPEWLPVLAPGAHGPMSEFKPEASGGTGGCSSQGLILHGRACSYPVARIGSVC

SEQ ID NO: 977083 - protein, 78 aa, Homo sapiens
AETGDDGGVCTSSRLMAVVRRALNFRCSVAGPRCEVRLSEPCGVGLCCLWATAVISSDARIPLWKRLWCAIALPVGAE

SEQ ID NO: 977084 - protein, 91 aa, Homo sapiens
DKPTVMCDGVVVSCGTAVYLHSLDQLVKENVAEYGHVIHWVWNDVCVRRHMVPQIMPVKWTNKGMVVSGEGMIYGSYVDASWSRLYHTCVC

SEQ ID NO: 977085 - protein, 282 aa, Homo sapiens
EVESLIRAAGGLPEVSSWPGRERFCALEKLTALEEREKERTERTREEEERGKQPPCSREPTAKCASRGPGGRTTTASDISLGLESQHVHHSSNTSGPSCYTGVCTDGESSSPCWDIRQRLEHESFPKVPGPGRQGTEAKVGPGGERQIRTRGPVPILSEMSPEQVYQSAMLHPDARGPEPSAQEQMEGMLCRSRRLEASGRRGANRSWQNVYCVCGVGGLGFYKDAKAASAECIPREKCCQLAGPGQGRLITKSRTWFQGGFRDGKILFRARLGENELGIRG

SEQ ID NO: 977086 - protein, 315 aa, Homo sapiens
MRWQSTERTIDKDLRAEAAEMGEGLLQVCLGLVIKVEELEREEWKSDIDICLVENLRPCKYVCELSVDAPGRRDFIKRHDYRDDLRLSCAVLIVWLLVLVNLKLVSPRNGQTRGAVPVLAYTLGVKQLIVGVNKDGFQLRPPYSQKRYEEIVTEVEALTLRELVGPRKSSIMCQISGWNGDDMLEPSAKMAWSRDGKVPEGWKAGGTTLLEGLEGVLPDNRPMRSLAPGDSRMSTKREARTAWWQNVKRGLQNGQAAHLGTKSYTGATGNGPATRENPREHRHGKGGNNHRQMRQTHAITARKNNQTPRAPPRLN

SEQ ID NO: 977087 - protein, 112 aa, Homo sapiens
MGIGEDTRTRTRTKEERRRRNNKYATDDSDRACSTRGAHYRTERHKHWTEQDKPSRYHPAGSHAIHQGIPRMLQSSDPEARKVSSMLTHTTKRAGRNGQTKAPATFERTSTR

SEQ ID NO: 977088 - protein, 91 aa, Homo sapiens
VPVGYEAEQAPSVPTAGLTPADTEDTVHCCVDEVVSKGIKYTCWEVWRDECEVRVQVMLESLVVRRCMRRSTLMSCSNQACLRLSRVDHNE

SEQ ID NO: 977089 - protein, 296 aa, Homo sapiens
GDDGNLYINVKLKAREGDGIEATHIRLPQNKHRIRGDEVHYIFEVKTLRYSGFSSSEADAFRFERIPLEAEEVIKAIAPEKDVDGYRVASNAGETGYEVTSEDVCSFRCERLRDAWNSSKRQGCRIARKAVLWMVEDCSQEIGWGTPNAVTCVYGRNEGHTGPPVRDVQGLRTLSLTEDGETTEGDILRRPALGQTVERVYQGAVGREAPEGHEVGSDRGELHLLVCQNGYSRRHKGQRTVKWGAGGEDNRESTEEGRNYGMHEYRAGDGPRNVEKDADIEVEQKGARTLKDVEPA

SEQ ID NO: 977090 - protein, 116 aa, Homo sapiens
  misc_feature (30)..(30): Xaa can be any naturally occurring amino acid
MEWPHVHISAHMIASPDWSNLLVPERAFQXSVLALTVGMVGKCSWYEPSAQKVLCASWANRAGDIIAPHVFMHPQRTRLEELERRDALCGTRSLSWGSQEEQVSRRSSPNTMLVGL

SEQ ID NO: 977091 - protein, 224 aa, Homo sapiens
  misc_feature (109)..(109): Xaa can be any naturally occurring amino acid
  misc_feature (160)..(160): Xaa can be any naturally occurring amino acid
  misc_feature (163)..(163): Xaa can be any naturally occurring amino acid
ALHRCTHVAGCMVLEVVGMMDSLPLSNVLEFLKEPLAHGSRLLGETLAASSTYTGLVRTSGSVKMTAIRIERADSVYVLCVHHPCVPRSCTLEMRRLARRQGTISSRRXTLEGGGTFFAVRGPWLCPDQWIRQLRCIERAEDSGRVLKRGLAQETPDPEXNPXFATLCEPMSGGIVVIGKSRAIRRVILHCKRPLLVVCVYELVTSSSENSVTTQERRRTGIAG

SEQ ID NO: 977092 - protein, 79 aa, Homo sapiens
GGLCGGSFGEVESGICSSFREGGLCGGQGPPLELLLGGAGCRDAEPYAGAERGPLLLSYFYSVLERRPSLIGWEEVGEV

SEQ ID NO: 977093 - protein, 150 aa, Homo sapiens
MVVVGQEKADNKTKRGGFHNTESLAEGSPGIIQGVPSVWGAKRRKHGGFISHTNSCVERAPFPHLLGRKGDITPREEKATSGATRAVGPPLVVRQPNSTEKSVGEETGQYAVWKCSDGLQENLWGQVGEDEKTEPINAQRTSRGDAPDAV

SEQ ID NO: 977094 - protein, 212 aa, Homo sapiens
MGEHVSGKSLRPFPTEPVNEDIVVCVREKIWDDVSSVAEYLQPRPLLYAYDDVGHAKYVYLIQNKADVCIDPGQLHGCKGPTDVAESKSDAEQVFWVDRAYALKMLFVKESHNMSKGPEATWRLTQTCSCVYDSSEKIPLQRRSQWLGSTTVNSHHARLPWSPPLGSPMSVEAQRTISLASSDPYKTVTMILSAVHIQLFDIISDLSSVEEH

SEQ ID NO: 977095 - protein, 321 aa, Homo sapiens
GEKPGGAGGGGGPPLGGGGPPLLGKIFFRGAPKVGGRGGGPPVDFLQKKKKTTLRRASSCRGGWRQNDREGKAKGGPASEHTGCPEPPDYCCVPQKGGNNTTARPPLIGGDWHYISSKKPRAGIRARFYIEDRWRDKPTGLKYRRPTRREDGASLGRHAERGSPRSKSSPWRRSKQQMNDAEHNDNKQPTDAQAGQQSRPTHGATRDQDTVRFCQRTTRLGEHVEASGGDDDTKQGQGLIKEDTRSRAAPTRRKSSERTAEEAQGSETTATQRSVAEGERKRSFHTRDAHNESVRRRSADGIRKEPQPATWKRHQERKPGI

SEQ ID NO: 977096 - protein, 75 aa, Homo sapiens
MQGTLPVLAFMKSGKSGYTHICWERRILISGAHHYIRLASAVLNTFADIALAPMEAAKVRMQTQQVDANTLRDAR

SEQ ID NO: 977097 - protein, 331 aa, Homo sapiens
ACGSGGDRTARGRVEADPSRARVVLVSGGPGGGCGGCGASLSGGSSRIIQRAPMVKRRGRCCLCRPHAAPGARGRGVEYTPVFSEMRDGGPRTQWMNFAYSDSVLGWRARSMSVRDVNALGVNAMVVTLNLGARCMEHNGVVGANSPHASYTSIDGPARWRQVSCAELDRGARWLEERTEAGLSLRVTPVCSLDRRRHDRMSTGWGRSCYRATCCVKEYSFSSVGGGTMNAEGRPGAQDSVQAYWGDAISVEAGRIGDGGTTELRIAWNVEGEVALCALQCGQRRIVTASGTKIRLKGVSHEDKPGPTGEWDQVEDTGLVHGQFSEVANIT

SEQ ID NO: 977098 - protein, 193 aa, Homo sapiens
SREINSSMIEKSQGHRGPGGPGPGGKSPVFDEGLKGCVPKVRVRAGKPLAGGDGGPPRLVGAQGLAGPQRAHKEVYMTRQIEVQASRHVCTPSLARTERPVSHTEDHPHVLGTPSGLGHAGSKSGGLRVHWPHGGARCKKGPRDRGGQDTSINHHSTQLLVLAPQGPGHLRGEKPFSENLPTWPSQPREARVR

SEQ ID NO: 977099 - protein, 52 aa, Homo sapiens
MHRESESRVLVRFVRGIELVVGVGRLPSVPMRCFGRPLWALPVAWGPSPVGG

SEQ ID NO: 977100 - protein, 344 aa, Homo sapiens
GTTTAKNEKKWSISDEAHPTGRVVHGTLSRWDTDSLCGSALLGVMYELDLVFGSVLYVAVSYTGRLASDSLEQTVPNAVHALVTLEPERGMLLAPSSIVLCGTLIECGRSSIWRDGSGLNLRCVIGMAKCTCYIIVFSRTTSRLYVPSVLMLVVPGVHGLTVPCFVRDLTILEVRDYGSGPSLTSVSLTTFYLSFHVPQEEYDGARHSDAWSLAVMADWVAAVRRVPMGLGHASPLLWCGDIQTGSSSTLVHKGGSGLTLSVCAFAFWRRPLRAHDYSQTVISPTVLILEDTRQAMLIVRDELPVCRAPRTLNHGEGHKVQSAKNRYFLIHPTLQTDSSRRFPP

SEQ ID NO: 977101 - protein, 115 aa, Homo sapiens
MWLWEKMWFTNRGDSGTPCVWGSPEGTSQYSRTIFVRANRVPCRPTKFISLTTRGGPTREVRGSLERGSHIGQGALQRGVSTAEPTTPAAQSEAGLSQRDKRKSGAHKTARLLSP

SEQ ID NO: 977102 - protein, 249 aa, Homo sapiens
MSLKEKTLPPGVKPKNHGAGKFPGALRGPGLSPGFLDRGKAPGTCVVTRLWDAGVLIPTVQQGHLGWHFRLQMRSPLGHTFGVGGSPTYLLRSLLDFWNLEAPRRGALKVFPFQAGIWKEGEGCTGEPPWSGSIGCNTAEKNASNYFKKTRRDLENRRAFRTPKAYGIRNYRVEPPEMRGAPALMRVRLICGAKAMRRGAGQAQENPGRREEMAIWTRAEEMRSPGERRETTDEMAFPPPRLDNRGGEY

SEQ ID NO: 977103 - protein, 213 aa, Homo sapiens
MMPAVSNGWTCIAGRCAGLSSLGYPGDLLKVNEAEHNIRDKPRGNLGKLSELNISRGDKTVVFDCASTLEEEVVRYCAVCRLHSLPTMWRTDHYDLLGHHCEACCIRAFDVSKLRYSGRKLAFVAYPLFSPLLVWVKPQKQVEPESVPEFRYTPVNELTLGHAVETSRYHWALGAVQPASAQHVGTLGRMCLSAVLPWDDRLEGPSVRLDGHL

SEQ ID NO: 977104 - protein, 202 aa, Homo sapiens
MPTEGCTIWSSVVTDQPSGRLHETVTESKTKKVKRKGSTIFHVLLPPSERPWWTRLSSSPSMGLDPHRPMFAADCVTPAAVGEHADGTAPEGNGDRDDNVRLRIRILSLVTIKWGRNPCPGSSSTTVTTLSIDLFYGDLKKAKAGTATLAMSEKVRTRLEELDDFEEGSQKELLNLTQQDYVNRIEELNQVAEGCLGPQTRK

SEQ ID NO: 977105 - protein, 111 aa, Homo sapiens
LGCVSFCVSSSLPQRLTHFYDWAPDLSASGSSEDLLMKLEAEPPGYSFVEIAHEKLWRTCGVDLLNQGRESGSPTQVDGPAQGVAAGVYTPCLSSKAEDRPVNGLLARCSA

SEQ ID NO: 977106 - protein, 46 aa, Homo sapiens
MLDRGQDVGEQREADNEVDDRETNRAGRTTRRKKEGDGRRNDDRAY

SEQ ID NO: 977107 - protein, 283 aa, Homo sapiens
  misc_feature (250)..(250): Xaa can be any naturally occurring amino acid
MGRIAQTGGPWWDSTPRTTQTSGEKKLRSLKVHHGVPEEPLLLPYLTASARRVVRDHRRGAFISVERRFHYPQFTYGRPQRGPPPTGGLAFWPIFGGPFSWKAEGGPWPLGRRGPYVSDWNPFVGVTRRHCHLYPPSEEYARLEWALPPFEGFLSRLELAPVPPPPMGVASPLDIEATRNGSASFARLGAPPAKRLSDQFGIPCHLLRTPFVGLQKLYSSPSPKRSHQKARAGKSMGTTHCGETKTPRLXGWNTRHRHRINTAASWSHRGGPRKHFLFCVGDR

SEQ ID NO: 977108 - protein, 114 aa, Homo sapiens
  misc_feature (22)..(22): Xaa can be any naturally occurring amino acid
MGLANPSPLWLTFSGWVPHPVXRAAEGPWRISGGWTFPGFLNSPRAANSPIRVWGATFLPRPRRRVPIRHLLARLPDIFCWSPMAAFEDTTAGWAQPYSDYYFGAGAFPHQVSR

SEQ ID NO: 977109 - protein, 57 aa, Homo sapiens
MERTVTQYTKLLRTIAPLYVPGALEMRPAPVATAHIVGPGLHGAEFSEGPFPFSPPA

SEQ ID NO: 977110 - protein, 166 aa, Homo sapiens
GRHWTQQGHAGGDSGHHSLAATGSRGGLVPPLPHQSPDPWGFRGLLLVLLGGGCWVSSFPESKLSSEMPGRMSRGPGEDGTSLCSPLRALHAHGQEAPGNGQPELLVRLGPSRLQIKWPRHPEFETLRLWSSRSNQQHVTKTCPWITQRDRKTYATSSPGTPHKSQ

SEQ ID NO: 977111 - protein, 76 aa, Homo sapiens
AGELGMVVPGVAMGPSSLGQRRPGSMAPWCSGEQRPSGYVLGMQELFRGHSRTREIPGAQCHGATLVAWSCRRASA

SEQ ID NO: 977112 - protein, 378 aa, Homo sapiens
GVGNLVLLFGYKGGKGQCGVAGYPQGAGEACAGQPQTGRRVERPVGKESVEFSQQSFISLCKGHRTTAWLVHEGVWEKRGKGPVGDGGGGGHGARGGTHHIPVATVTVGATENLQVGSSEKTRTTSVQTITKETTGQGAHTMAGRGPRNPPEEVGGATEGLCAGPPKREGPPKGRGKYKAKGPHGTGVGSLPKGKPHWGHWGERETRECGSIRKGEQGKREEASENQKRGPAQEHPKSQARKPNTQWSPEGPEADPKNHMRMVGPNMEMIREHQEGDPQGHGKNSGDKPHTRRGHPEEPTGGAQQHKGGQKWRPEQTVASHPGPRRDTRHLQREGRGHPHITHGTHGNGMDPSIRGGVKGEQEVTSTEKGSTTTSEKR

SEQ ID NO: 977113 - protein, 177 aa, Homo sapiens
MAPTQESSSKLISSQYLNNASYSERKLRVKPTLNKPNASWHSCDITYAILVQSCAYPAHTPIPMDGPEESYWGGRLAITTGNIGMDATGSCRDSDFRIVSHGSLDVSDAACVTVPPCVLAWSTKGPLQLEGPSLAACFAKTEVCLGWRARLQAAFKWLQASSKVSRGHGGVCLHFVE

SEQ ID NO: 977114 - protein, 130 aa, Homo sapiens
  misc_feature (72)..(72): Xaa can be any naturally occurring amino acid
MCGPRAVPWGLVDNLLGVAQSMSQRSRGTRHMILDAPKICEEPPPQNNPRTDTAGPYTYTGRGRQQTHHQEXRATNQRLAAPPHVQTRQQPPARRSPRRCHTHQHDTRTSYAHRPAPPTTHPTAPSVTTD

SEQ ID NO: 977115 - protein, 166 aa, Homo sapiens
MADETLNNLFQTSTIPRQGGKPGELHYSVPCWGGNALFTRKKVRGGGSGLLLTPLIQPVTVEEIVPGEAMLGRGQDAHEWLTMNVYLGPSSGPDSAGVTHGSPLRGATRYGILERGQLGETVGQMDKGGRRILTRFITWIPASPWFLGLLLQDCPQMSSEGPKWVI

SEQ ID NO: 977116 - protein, 258 aa, Homo sapiens
MDDDDHEDEEDECCLARGIVARCPVSGSSVQGAREVYPTYAYKPGGMLWVPLACALGYVRPPEVDPPCGSRGPMWPRELNRLGRPARGVGGLQPKDVLPLRQGSDKCVCAGPDFCCAAGAQELRTVLPRGPFGPQVIAKPYPVWCDGVPPLAVLPRGRTMMNAICSRSTLDLLDVCVRRDDFTEGLGVPREAEATSFPTEAGGLMANLCLLMQAHGCAHRLCIPARASLKVYEPHIQVLRQGLWGGLTPLGLRWGRST

SEQ ID NO: 977117 - protein, 346 aa, Homo sapiens
PAAGARFVRHRGRGIWCFGLRTVGGFPVCGEAGACWRVAPVGVWLCWHLVPFYELAGGRKRGPSSVMTSVAVMYARAAPTVDALREIGVVAEAVYMDVPIERVNGLGSSVSYVHTCAKHRYLGQCVEMRRVQHNPLQSMAQRTLRDQGSATTCTYCEKKPFHWDWTFLKVFVCQIHTNVSGKHLCRQQGDNHRASVGIADTRGRTKFGSLRGTNWMGPKNSEGATGPPKADWKAAQETTPRFEHDTNAELVRFDPYSRRPAVYKGDFCWATGTLDFGEPTLDAFATLRRRRLTKFARGRIWQRERWPLTTSWGIRAIGIHFVARTRLNKVDLDYREGGGKMKAPNV

SEQ ID NO: 977118 - protein, 107 aa, Homo sapiens
MISQQYYSNKKHYPGGDLFSRGAHSSLMATQPKRPRTENDLTLPIGFVHNDGQTLTRLSHKKQQEEPPKLTGATLSNTQLRTTQQRSILYMTTTHTYSTTTILPSTD

SEQ ID NO: 977119 - protein, 67 aa, Homo sapiens
SLLRLGQPAECRDSEARSSGQSRDVQSVRRWMELVINFRDESACEASKQQKASAELIEEEVAKLPVN

SEQ ID NO: 977120 - protein, 414 aa, Homo sapiens
AFLYAWLCAVSTSRGSRADIELSQCRNSPSQVFDAEEHDGCLGPPATDDTSRVAAVFRGRMSMRGGRVSETALNWQNKNSSYLVGMDSPDNVNDSRRVTLTHRRGPQSMGESPSVGQIAQASASERHSERHLGEQGLTDQEYRREEPALHMVTQGEGMDEDAECTGGLKATMKRTRRLEYQQETRMPTGRKRREAFRDGGEPTEEGPKARSPTVTLRHTQGPISRYYYNCALCAHTHTGKCMGNRMNIDAKDAPKHHMGHSEKTNETKHLEKHKNTEQRHTKRARQTGQKCTKTVVPNCAPQHTDTTAREQEDETPQRKTATTNNQQMTDGTTTENKPPERKNGTEKTTNERPHKQNKRRAGTKQRRRRHEEHKTQKQKRNTTHDRKRTKHSSRKEHETPHITTNAATEAADTN

SEQ ID NO: 977121 - protein, 95 aa, Homo sapiens
MNDENIQRRTLEPRGSQKKRVWTREHRGRNTGNHTERQKEYPAHKQEETHKGIKTKYKNKTAKREYKKTEKKQEKTTQTRSTKPTRKKEKNTEHP

SEQ ID NO: 977122 - protein, 45 aa, Homo sapiens
MSKKRHSNKTDADERNERKGGKNDRLILTCSAEPPVSHRCKGKTN

SEQ ID NO: 977123 - protein, 391 aa, Homo sapiens
GRRMYLVPGEEDDLLLRGRRVLIRGPVAGLGWTLADEELACGRCYVRRLCLCGVLAVASSGLLISSELMNVLRTVHAGSLYTVYQAEGVCVLASSDGASVRIQGGELHGAWQVNRLPPKSPSASPFGPSFEKSSWLGTGAGRVHVVSVNAALVTSRVGHCGSGGLGDGGPLASRKGLDGWILRAYGRCAGLQGKRPAAGKGEMVAGGRAVHVTRRAPGRCLKQGPCVGTTFVVQMGGQLGGAVDLTMGKGNDCLAKELGFESGETRNKLDYAETYTNPSSLTSGRPGRPSERMAGPPTNAWNRPREGVVEEEDGKEPWDRCWVPPSRGPNWTKVGTLTTGDHNEPAVEGSPQNQGVGEWSTTTGEPNARHFGTARDNPYRGRSGEKGGKDT

SEQ ID NO: 977124 - protein, 357 aa, Homo sapiens
LQTCLLPHWADRVQREKLMLDSMCIEQCLIDSLGVFSLSCDQVSHMILQQNMSIVVLLSVVAVSGEYTSLLCCVITVGSFGCAVCFAIVKYHWMRGPRITNTVLYFNTFHYRHLTGANCLGDNSRTALTLISPRTRVIANCGSSLTSLPGDCLISQPKGHYTVNQGKCDVAYAIHPKLTVTHLCKRIGTRFTSQNIMTSKLRTDTHWVYSSPEETTINSTIATLALGNEIKTTAVPRLTPSMPYSPPRPTHSVLQHPPLRARTVSQLHDPPAYTRDQRAPRAQLRNKLHEHQPDNSHHTPYRPPAQHPTGRPPTGHAATYTLPCTGHVSPTAPASVHSSPTAAGAHHKSEHTTGPTD

SEQ ID NO: 977125 - protein, 110 aa, Homo sapiens
MTTYSTSARGVSATHATTSHTTRYKDHHHPGRRPPRGHHIHVRNERKSPDTTVATPANTPPTCPEAKTSTPRTPPTPSATTTVTPQRPLTPCTHPSPLQSHPTTTTQTTR

SEQ ID NO: 977126 - protein, 152 aa, Homo sapiens
MGSPHKKTKRRPSRGVYPADPGKRSTQYYPRDIKHAGKGGPERADAGEGGESPNKKQTLTYTKTTHPWGYEKMVGARWGGPYYQGAQKTPLENKLRTPQKALTRGERKIPREATWGGQPIGGDTKTLKREHPRETKARRHVHISPNEKAGPT

SEQ ID NO: 977127 - protein, 274 aa, Homo sapiens
  misc_feature (163)..(163): Xaa can be any naturally occurring amino acid
MGGKGGPIPKKRGGKKGVVGDKIFGVNSGGKAAPLWWVPREKSEEAGAGGLINNQISEVVFAELLKQIGGQEGALKKRNSTVTCRHLENLYLENTTHQRKGTTGEVTVRDHYTTVANNKPYIQARTAAELRSGAEQNKQRSGGHYEWCGEQEVRDEQINRESXTILPDNELDTSIKPVTESSEETTHNNQTPYDDPPTTTTTPRARHIKDKHQPTRRPPDQPHPTLLTQQTMVTNNRATSHTRGCNTNNSERTPNEQNAHSPTRRQPKQSPNER

SEQ ID NO: 977128 - protein, 435 aa, Homo sapiens
WGERERYIFLRGEREARAGREREGGGALSLYLSPPGGGGGGLSLSLLRERDISRARARDGERCVLSQRRERKFLLHIAARAGERRREERAPPGGRERESGVSRAEGGASGEGERTARESRARGGGSRGESARGAHKRGAGRERQTENQSRADAREPYSVRRRRRDESVTASGRKEGRANGEREDDEEEKEREREETEQRRRRRQTHPPGEESAARDKKDPALHSERESQQTKVRERERRETNETAAKRQKDQHAPHERGKQEKRQRNRGEEITTDDGSDRRGHLQQSAKNKTTRSTRNTVGEATHTSRPARPTSTSLRAAERTTADEAVAKSQKKATKNVDSRGPVARTQNTEKKEDSPRVRTDIHHGPSSAEPTPHPPRARTHHTAPPAPPRPPARPTRRQENSTPTAHHTRRTDTHSTRANIHRTHENSHTRG

SEQ ID NO: 977129 - protein, 243 aa, Homo sapiens
MAHLGKKPGKRGQASIGTRRPDAITGCQHVSKSRSRDNTSGREGGSKKVRVDRNGATNDRPITLTPATTPTKATVKGRTRHNRHHTNPYAGKTQSNIHSTNTKRKTAYRTNTPQHRPHHTHTTPTTDTTTHRTQTKNRHTITNRTVTPRIETSKHRVTYTRDPRTPDDQKETGEHNAGHKRQPQPSTHIQETKTNLNQRLKNTTLSILRSRPTQKRSPNKADTTSTPLEPSQYEQDTKDVHAP

SEQ ID NO: 977130 - protein, 303 aa, Homo sapiens
GEPMSRHPRSDRLTQGQYEAWVLSVYRSPPPAGKARGSPECKKLHVDINDESVRKVDFIISDITQIATRTLTGDEDTRDRSVWRRLSGLNRCKLNKNGSPEQYEPQFRYSEDPGVLHIPLEEPVGCKSHKSARSTSAGSCSAYIAASSAKPDEGYKVSASTHVKTLGQGVAHEVAQKWATLSTPENYDSPYENLRVEGGFSSKLRVERLGDIGPCQRVPCARCIRRQVFLHGSFEVTGLRIDNEETHAVTGESPGRDRRRMPPGKTPVNMCRSRKHKMRDTPEEAHPPGNMFPTKRNKPNAHP

SEQ ID NO: 977131 - protein, 251 aa, Homo sapiens
ARRDRRALSSAPLSRRRQPKRRRLLRVRPCCAGLVLCLAVAPWCAPEPPRRRTEVLVLRKSNFSEALGAHKYLLVEFYAPWCGHCKALAPEYAKAAGNAEGSKVPRSRLGEGGLPRRSLSWTQQVRRGAVIPTSGSSGMETRLSPKELIQVWREADDIVNWLNEAQRARLHIDSAERRSCTSPWWSPSDVGVIGFFKDVESDICKQFLQAAEAIDDIPFGITSNSDVFSKYSSDKNGVGLLKVDEGRNHFS

SEQ ID NO: 977132 - protein, 424 aa, Homo sapiens
MAKKRGEVLLNPTAIVGMSRSFSATSVLQYYFKEMRNLGVKAPHISMEKWWNYIRGRPRKNCEHWAPGGKGLQTHSALHVRHRTNNCGAAEMEKHVNNPWRQTAEPPVAPNEATVEAISKKGHLSTKASDRGETEYETPQKTEEPTILWAGHRRKDNGEQEVVDNPRKQRKNSEKTHTKETHHTTSTHTVRDPHMEGTHKLLRRTSHHPEGHNQTRAQSSDHKQKQPHEHTTERQHKKPRAKKPSHTIRPTKPRTPNRPTNSDRNHWANTERTPPRARNRSTNRETPRQTTQQKHTRYNTSGRRNTTRPGENTQGKPNTGAHNKSNKKQQTNPSNTKYHTKPAHQKQCEKTQNKTEPSTIKTKMRQQRTKEETNKTQQTRRNGKNKKQTKTERRGKKPKQHHEHPNRGTPNKALQREENPTPQQ

SEQ ID NO: 977133 - protein, 129 aa, Homo sapiens
MAQHCKSPPPMILLSSTVLHYLHLRPVWTSTPYRLHIQHYLRTSKESLCNTPRYAILHATSFRHFRSSPTPLRQGNFLYMSCQLSTRRLPPQIHGITIPHLSPPLPLPRHPVISSFLHIIRDTTQTCFT

SEQ ID NO: 977134 - protein, 479 aa, Homo sapiens
CLPFLCLLPLYSHVTECGTPAPGPLCPCAAAGCVALLPIPAAAAVCACCCDVCVCVLCSCLCLCVTMCCVCDAVRSPDVRKPDVCSLAVLALRCTLLRVLIAVPVVTFQLSHEASGAVSEDRIPVAQAIEFVDKSIFMAAPQVYGALTVPGTQSDDPDLANHRELVLWETPYGLMIFPTPSSEHLDRPVCEFISRQVVGAEEEASQCFKFRAAEGGRNRTAVQAAMWYLPKRGTMVIHVKRRPPRAHYRTWFYTRLNVINGFWWVVLEQHKESAAEKLWPFIWYGYGKHYPFWQIITEAAAGVGRSRVGNNCTARLEAEISMANSVAIPREEDKMRHGKTCGSAAYVSFGTSRWPFVSSTPWLPDQQMGPASGYLNYTPWFDDWVDVTETLLLYPYIGEPNEQVPPVCACLSGERMRHPTIITVVGSRLARRGGNSLGLEIVARHRRGELFYNAWVGYTSLITFSRGDNTRFGYELKLQ

SEQ ID NO: 977135 - protein, 189 aa, Homo sapiens
MVTRDKYWHRSYNRESSDPDSPGASCLDRAALTKECRTHREAYHLLHMRLGLWSAFLVHKESDPFQACEFKYYPTVVVDTRNWSTTVFKGALWDQGQTLCRFEQDGFYEWGAMSGEQTRGSILSSMFLKSRRRKSGSIGWLQIVLSNLCHKSWDNWKAGAMCAIFDWWEPTREDDVMFPIQYHRGFLKG

SEQ ID NO: 977136 - protein, 112 aa, Homo sapiens
GGLSEDGPGGYHGWWQQRWEVRGGMAVEEAVVLSGLLVEVWLGPAVGTVQTRRPGGHFGRRKLASFESCAQEVSNQPYLCESGHWLRGDWLLQLPTMSSGGSGWLCDCPHPL

SEQ ID NO: 977137 - protein, 103 aa, Homo sapiens
MFLHACLHRAREHADVRDTTSIGTTCQGHGFLGGHSVPRGRAPFGGSYGIDLANLWPRQSPGELVKTGTYGGSPPWPCITSWKAEYVVRNSPKICIAPSDEHE

SEQ ID NO: 977138 - protein, 239 aa, Homo sapiens
MTAVCDSSRRLRQSTVYHALTAVCDDTSRVSRDSGVHSVDCRVGLQYGVSEVSDVHWLLTAVCDSSRGLSNTPVYHDVTAVCDSSTGLRQAPVSHGVELRVDYQIEGSSAAYQCPRRGGAECDSRRRYYQTTQCDHCELTAAVLITSTGDIQTDYRVYKPFDSTVVAESQAGRLSQHPGVHALEWQRDQPERAKNKQQHRPPASDCATKYSRHPPTPETQQKYRDNNRGRTQNDDTHEA

SEQ ID NO: 977139 - protein, 182 aa, Homo sapiens
NVFPVPADCPVPHRTQCWRPGPGGTLGHCRYLLCAWTTGSVPMSCAVLGCVPGAWTQVPEPAACMFLLLVLLPCWSVAGALVAAVWALQVGNALGSLEPLRWMLRSPFDLQRCLVNLELQELLLDYSFQHLGVSSQGCVDHPIVFDRSCVQPTVFTANDAELLFECYGIPKVAYGIDSLFSF

SEQ ID NO: 977140 - protein, 111 aa, Homo sapiens
MLGFVGRVAAAPAYRGPCSEYSLPSASSAPSSALTAGRSDGVSILSRVLCGHISPSRKAGADTGLHLWRVIEPQLVENVQSMTRGTTTNSNCPGSARRGDADCLEVAQRFG

SEQ ID NO: 977141 - protein, 178 aa, Homo sapiens
MKCTSLHSLSRGRATVSSLTEVSIVKTPCSLPGTNFGWSPDGLRLPVISSTQSPVIVFLEDRRFPYELITIPARGPTSVIVVAHRVCVPDVWLLWSPLLAVGVSRFGVHRVHGHSGRACPASREDLSYPFSVWQRGGKIRRSRGLPQFHPVGNTGSQPGSPRATFLGPHKRVLLRSAH

SEQ ID NO: 977142 - protein, 73 aa, Homo sapiens
VARCLGELLAAACASRALPPSLGPCCLTHSPGLQQQTSHAETDDLTRSTKLTHPHEQNRAITVLSRALTQTGT

SEQ ID NO: 977143 - protein, 450 aa, Homo sapiens
MPSIGLEARVSTYGRDSKDRWSWFVVSGHVRASVWRLAGGVSTVSPVASCGHLPDQYVVPCLESATGRGDGPCLKVLDDYRPITRLRFIGYPWHCRGSEGDGEHRERRHPLRTEPRRKVKFCNHPSVGMKSDGHEPSGAARYRKMRRPWRKATRTGGGFRNSIGRKKELVREILPHFEASCMLYGLGSATRDATTSGDGNQMIAVWALRFWRISPLRNGDTPICHTVSLGSSSKLDSVKSLDQKVRREVGSVPFARMGGRTVTPKAATLTFGGGQNLPIEVVLPISEGAREITDDLATGSLLMKRVCKDTEDRNTFVALVVCHSAPCVCTGPCKGTRGVMEGATIVPPLWRPWDQSGLENGGPAERHQNAQELIGGAWVKPASAGLNISALGVGLWCWGRTRLERWGSPRSRWCSGRRFASRHTGLSWNRRVIGLAENRRAFRKLGPKGR

SEQ ID NO: 977144 - protein, 222 aa, Homo sapiens
RREPLVLVEVPHACSAARRAAGCLCGMNALSPAACDLEIQLNVPMSHVTLCAVPVDDWRCAALHARCFPANGHRVWHMVNPCDQCSLVASVCIVNQRGLPMLGKTESKLHSCSSTCTPDTLSVVCWILAFPCNQFGKQLSQCSNLKMIKEFAAGYNVKFDMFSKICVNGDDAHPLWQVGMKIQPKGKGHSWEMPSSGTSPKFLIDKNGCVLKRYGPIGGAPW

SEQ ID NO: 977145 - protein, 269 aa, Homo sapiens
  misc_feature (108)..(108): Xaa can be any naturally occurring amino acid
ALVRRIASKGPSIRPPQHHANRPADASWSYGGGDPPAGKCVPRTCACVWSLAHAGSLSASSTLGFADYRLVEPTPRRGSPRPLHAESSLGAETALGNWSTPYLSAPRXALHCGRDAHGAMILALRGVSTCRQDLVLADHMRVPPRTLALTYELASTRGNDWSLGHGMAMLTSTSPSVRVCTTICDPWVLYFSIRRTSSKYVVSFIRNGVYPSATPVHYACVGMAPLAVSGYSDRGARFPLVPVYPRGQNPSGIFFYPSLPRGTQLPFSE

SEQ ID NO: 977146 - protein, 196 aa, Homo sapiens
RQKKNKAVSFPTKQQPPPQPFAGCLPSAQPVVPAVGRRLPLRPGPSKPSLSCRALAGEWNGAPSREARGLGFGPLQSSKRSAVVAVRAPPKGAYAEAHPSPRRALTHALGEYIYYSGSHYVWVCTSHEGELGESRRLFITSHSLVMRYLLPLHAPQRSHNLRQLRAHHAPTGATLSGHKPRKRITPHKKARAAHKR

SEQ ID NO: 977147 - protein, 152 aa, Homo sapiens
MESCGQERQDVSLYVCLAVSVPPVMPRGEILEESVRREGDWRSGYWARGLSALGSIGTSGMTCEPLSIFNLGGLQRRAYGIAMLTCERYRALYVGLLMSLESTDKNPKIYGANITWQPIVDIPYSACNDKGPTTMNPFSELVLICEQGRDTS

SEQ ID NO: 977148 - protein, 239 aa, Homo sapiens
QGAETEPLLCVVYAVAAGRGAVTLHLSRVPLCPALCVSGPAARSHMPWLPWARPPPPPPPAWPVLSAFPCTVSVTCTASHRRVSVIWLLDGYAWVSQGGRSSQGHCGEPWGGMVTNRIVLCPAMAEAAAFVWRPNLRSRLEKPASRGVAAGSALVHSTVPGAAEFVEGCDSVGAQSGSSRVRRAVKSKGHRTMTCPFSRGCSSAVPTQQCWLTLSKCSQGPVDWELLSPHMDGADLALG

SEQ ID NO: 977149 - protein, 83 aa, Homo sapiens
GTPRQHGPNWQGPEQGAFVHRLPPGAQLHHTSTPFLGHWGKGCVGHYKTSLVVEKGKRNEMCGTGDVKLTRKGQNPPSRGKRA

SEQ ID NO: 977150 - protein, 53 aa, Homo sapiens
AAPTLPRATACRVLEPEPEPEWLPVPDCGGSCGLLAGLVRAMLHECLIHVHVR

SEQ ID NO: 977151 - protein, 161 aa, Homo sapiens
MCCCHGAWGAARSWDARWEPVPPWPCYFCGIIRGGRDDRTLYELDLCLGLRRIRLTECLTVCTVAVPSELGSARLKRLLGVTGSSMSMDLEWLAVCGRGRGISDNSHPWVQAMMLGRAVAFNNGILCLFRPQSVPRAFGHDPVEQADGSRFQVWDYEEGEV

SEQ ID NO: 977152 - protein, 289 aa, Homo sapiens
MAADYWIPCILSREVLHHDPCNDGARESWSMERLGGFARLQGPTVFVWEHRGQRVYDCPSVYLAGAIRLSGNGGEVQSWHYRSPCGTLDALTAIRCEMLRCERDPVWWLITELPEGHCHLVFAAEEVTPTVAVLASRLALHKRPAATYQSKVITLCLYRDLSGMFTTESRLGGARDELGGRSWPGGLRAWAQRLAPQWMTRREMLYGDAGLLFRPKKGNRGPDIIKTSSLNDAVTLVNIYRSKEITKWMACKIDGRTWNPMRIYQLTQHGRIGEPGDRNHTTQRAQASH

SEQ ID NO: 977153 - protein, 268 aa, Homo sapiens
  misc_feature (256)..(256): Xaa can be any naturally occurring amino acid
MRDTLNKTNNTSQQDNPHTQETNHSQITPNNDGPGEITTIAPPAHTLINPISRQARRDHTNLNTPQRQSTTTISTQQNTDDDNSPHPERRQLTQLTIQNTQMNPPTNTYTAAKPNKSENNMHHTPPQMDNTESHKWGSKRTDKQEENTKNDGTPLETASHAKHTNDHIVPAGTTQQRQETYSPALIRVSNALFVGNSTNNTDKNTTAPGLRYHYELLAPPTTPQRRRQCITLNGPHRQRRHTNENTQTTQPVPSHXVYKNKLNSEIVY

SEQ ID NO: 977154 - protein, 149 aa, Homo sapiens
MGCSLSRVVDPAVLICTCTDLRVDPPSPPVVTFDTWAAVRCVEFMAEAKDHLLFSGSTAAYSTVQCKSYGPLSLKAQLGDLSLTLSQFDSRRNYMHICIVFSSDGTLYPQLGLVHSADGGNESKRPERRPVGLEENYRSRPIIDVWIRK

SEQ ID NO: 977155 - protein, 230 aa, Homo sapiens
MPHVHLISHFNLPQRLRCPETEIRRPEFVHPIDLGPRACTRQSPPPVYICRDVIDVLPETMIRCDHSALSIQSLKTRLLPHRVKHLTISPSEQMYQCRSADMEPASLYQTKGLHDVCALPWTRSQPCSTQVSCEQWIYLLTSLFIRTMDTSETQLLVCLGRSTLTPFSAFGSPPKRNPTRLLIVLRASHARGIPRSTTSVVHSGTATFPPQASCVWVKRIKQVFTHDLYN

SEQ ID NO: 977156 - protein, 189 aa, Homo sapiens
MRCWVVVVSMRSCACDLSVALSCVGLSGKMYVIAFVPLVGAWNVKTSSLGSVISRSILESTEIREGPGTTLEFRTEGAVLIVPCVGSHVPHSCDLKSLVMFYRYACYSWKRHSIDRGWETPSSHQCKRCYWERYRTGPLDDRGPAGLKAHHASCLRTMATSMGNSMGVGLKDTLDEPEAFIPCSREMWL

SEQ ID NO: 977157 - protein, 111 aa, Homo sapiens
MSVWSASVQALKARTGHTWLAGSFQWRHVLGRLSCLQLKGWHFFTSITQWVVIVLLFIMVAGDLVVCCGHSGGVLLLRCVADVENTGAFLRECGVPDGVGGIVQRGPMLYL

SEQ ID NO: 977158 - protein, 184 aa, Homo sapiens
AHPDPIALRIREQGRVRSSRTVHRKAAGTDPNMVLTTGDLDLGASWRRSRPTPHPGLPPRCFTLTVTDFYRSCNCAPGLSIFSPRIPFDPVSPSEATILGLRDWLSAYWWWTLGVLGRRFRQSLGERVFPESSSGGDVTYEREEVLYEALLIEAEVVSPYLNKVVVSVEFSQASLSRETFCGLT

SEQ ID NO: 977159 - protein, 320 aa, Homo sapiens
QVQSPLCGACDWLLGPPVAVRGFVRVTTCDIGCFAKAHATTLLSEVAIGGSDNFYSVFEGEALREPSPVAARVYRRLLASSGSHCVWGNRALDLLGTLEHSTSRTQESCKHIRKVLPDTGQIRRVEDAVLILGQCLHLQIDYVGLFGPYSQTLERREDRRNCWARCAHGWVMSSPSTDQSRRPRVLVGRLLCLQGIEVQGCCITNDFDCERAMDEFVLCFFESPLVGVDCCSRGRGVIVGAWWWLICVHVHYLSCGATIFLLSRVVGLLGLWWGCVTPLAQLGFSLGCLSVLPVRPRGGALAALMLRGRLCLRGATSGAG

SEQ ID NO: 977160 - protein, 182 aa, Homo sapiens
AFLYAWLAPSQQPWKPSEYRALTGPELTQEVFDAKNMMAACDPRHGDTSPWLRVFRGRMSMRGGRVSRCLTWQNKEQQLLCGMDPLTKCQEQSSCDIPPRWASRWRVTFIGNSHSHSRSSSERISEQFTAMFLRKAFLHWYTGEGMDEMELHRKAESNVGDVVSEYQQYHGCHRDEVGGGFR

SEQ ID NO: 977161 - protein, 94 aa, Homo sapiens
MAVTGLRTKGVYKKLAGLGVRTHHGGLDIRKEVTQTHPQSSNTSRDEERTGRRNSARNKSLATTSRPRANPTTTSTDNTTKNTPPAHQQMDNAT

SEQ ID NO: 977162 - protein, 105 aa, Homo sapiens
MLVESGLCCCLSHELTGRGHFVVATRGGGTCMRGRQGPGMQLSGPSWVLLQGTDNLIIVPVDVGCRVLAEPSREWGAESVCPESSAKREFIVPGSAPDELWRMCA

SEQ ID NO: 977163 - protein, 81 aa, Homo sapiens
TCGDKIHVCRESEAVHLIKAVSGLLNCAQEEENMLKEKSGSIRCHGWGAKGSSQGQHADVYLKASDTMVLEGTTQGWSSVG

SEQ ID NO: 977164 - protein, 151 aa, Homo sapiens
MSSSNQGVLVYLIHQQLSQARLAGAQCYSFWMSACRGWISRRGLQERCALLRGLGQLLHAQEVGGEPPSPSGVHQGGVGCPVGRVTFTWVHTRPRAKFLIRGHELLRSPSLIGTRGWGDLSSNFSSLLVIHDYVRLQEISSSGQTHEGAAG

SEQ ID NO: 977165 - protein, 155 aa, Homo sapiens
MDRELVFMGIMYAKDATHAPGRLRAGEERIDCDVEIVAAGRFINLRQENMVLNAGQTQIERASREGIGPRRVLVGRRGGSLKIGGAFNLEMVACMTVSPRSPHDVSGSSKAMDCLILVLAHVTVSVAEERRFIFVIGLSKRVEIGMEPQDLRAIA

SEQ ID NO: 977166 - protein, 141 aa, Homo sapiens
ALSTVGSAISGGSWRHEELCDLQVVGGASGTIKSKVWVTEERSDNLPSSAGSGDKPPVGSRTFLSLWLLHPLHESITLGTRPLDIDSRSSVQTVVRASSRSDEREPVLWTVLPIHAEMWLPRLMNLKNTGLCTDVLHSRCR

SEQ ID NO: 977167 - protein, 217 aa, Homo sapiens
GPSRIIAEGSALRPCVLLFLLLLLWRYDVFVTSHAFSARLPTMPLGRRADAESLRCPESPPAPSSRDAMACSPEEELKDGERRWLRPSTAATCGCCGCWSPASSSATRHCVWVLPPGSADVAACPGSLELCPEEAGKVSSWCGMLVWALSFMALPGGPARALCAQERRLQAGAGPAMTEDEMTSCSQEFVRQEVWTAQSAPTQGTTAGPGGCLPGFS

SEQ ID NO: 977168 - protein, 260 aa, Homo sapiens
QNYSRGTPQEMGAPYPGYCPLGSGHHVSQRRMFPLQKSPGTSISKTDGMARKKQGLLQRKNEELSQLSPRALLENPWSLQIVSLQRVGDRRFNKEASWRSSKEAFELFDPSGGWKDPVQTVLGTVIEGPACQKRQAKAEVLKVLGNPKIDELKSRRVDFDDFPAMLHAVAKNRGKAHMRTTWRGPRVFDKGGERHVTGSGASDMLLDQPWREDDWEEVVTVRGRTRGRHRVHQLTGPSGTNAKRLNAAIQERSEMAARGK

SEQ ID NO: 977169 - protein, 104 aa, Homo sapiens
MVRTCCDGLWNHERYLIERSTLMRFAKFSDINPVNRSSDLKEGLMQVMPYCMFVAAAGAYVHIGHSCSFRLACCLPWCSLHIDDLACWQQPHSPCNTEQKRLDF

SEQ ID NO: 977170 - protein, 101 aa, Homo sapiens
MRPTQTKGKRNPQRKCNIAVHSTSPTKYPPPITRGIPTNERKANTYHKEIEEQTQRPNRREIMTICITPRRKLPGHKLSNVNDAVTDNPDKKQNKEPKNTD

SEQ ID NO: 977171 - protein, 250 aa, Homo sapiens
  misc_feature (14)..(14): Xaa can be any naturally occurring amino acid
MSFARTRQRKRYPXTLGWTTGHGPCTKRLSLHKVKFREADVPNVWIPKGSSVEASSRRGCKTLYHDLGQIRVWAFEFCPTWWQRKVGVIEQEHRRLMKSMVGSLTAGGSFAVSAEHGEPIGRGTEVIVQSYRRIRRSTSEERRVKRWWKKRSQCHRHPIRLDGTKEEAGTAMMKRGRERGNRGSKGREKAQSRKVALRERGGPEKARHRTGASDKQSGKHHGQPGDRPGNPERGELGAIRQRTGYNTMRQ

SEQ ID NO: 977172 - protein, 514 aa, Homo sapiens
MSASTDSDTAWLSLPTHYTRLTTRRFCLSPYTSTGTHALNCSHGNALSTERSNTHRQPPAAPLQQAHAGNATAAQLHGRRHGTHDAQTPHSLSTTTPHACAPLRTLPHRCDAADRTRTQPHAHAPTPTHTTPRSATHPPLRAHHARFRTYTARPHAAHTHALAPHTPSYPSTHRNSPAPVPTAYSAQPPRGTLSYCRRTSTNSSCYSLHANTDSALRKRNAQPFIIAPAPGTKQTPPPTPGPPAPPPATPPSPPPRETHPQHPHPPPTHTKRLPPHPPSPPAQPSRLSTTHASSTPPRNCNPQTTEPLHTASTRQQQGDRGPDTATATYPPIASTPTRTASPPWQPSREHRLDGPSSHISGLPPRTHSPKTPLTKWNENATPNTPTRPPQPRSHETADRPHNTLRTTHTEARQSSQHSKAPGPPKRRPQQNHEVDLHNTGKQLVPHPDTPPRQPAQRDPPTPQRMTTQRILHHNPPTGQHSKQPEVKQRQKDTDRYTYQPVTDRLRQDSNATTP

SEQ ID NO: 977173 - protein, 338 aa, Homo sapiens
  misc_feature (265)..(265): Xaa can be any naturally occurring amino acid
RQKKNKRNFPQSNNPPPHPSPVGLPSGPSQLVPGGLVGLALAARALQAKPSGRALGRRWEVAPSREAPAAKARASSSPSKAVWRVVRPKRSGANLPGASWLGISMGLLGVPGCGAGRFSLGRAHTNPSTQEPMATDLSAGASGKRETPKEMSRVGGPLASSPETPEARPWSATLFRVVFEGGASRGTSFPVGATREDLLSRNSFVDVLRGSSCHVGIFPPEALIGGTRHKIGAGRAETGFWKQGAHSQGKSTGRRITLSENRESXVWANTKTGLSKVIMCRRIEGMDGGPNRPPGGHSGKRFTQSSPGAAPEGPERKKHRKGGPSGNICTKKDSGGER

SEQ ID NO: 977174 - protein, 341 aa, Homo sapiens
MPSCEDRLRLKVSVAMDLIMSRESSHNHWAEPVNGSGNADKCPGVIINSRTSANKSDMVLVSEDLKNEVEIDAAKIHVMKLVVRVLGVKNTLFELSRVAEYLSTSLHKNIMGERRRKALKRFVHESETYQKSANRVQPENSNGRDHVVDHHARTSSQSVEARPETGFLSIEKDLGNIKTEVGGLPSPAKLRNSLIGTKGRLIRSMHGGVRRGPHSLSRGRFRTRQRCYQGAFLGWWRTARSSSCIWRRKATKSSLLNSRQQIHEILIRRGGQIEGRSWAVYSRGEARPDRPPWERRGRAQDGLWPTGGVEPRGHNNPPQRLEEMGAPGNGGGNTRGGRITG

SEQ ID NO: 977175 - protein, 182 aa, Homo sapiens
MLLHKNCTYLQVRSPPRRRICRLHGSSGRLHWRYDRQRCGISAKDTGVRSKRQGGCGRCPPSRGVLLFSPPVSRENIGVQAWCGARRRCMGWPEQGLARERDGNREGGEVSRGQPAGCECGRAQGRESQAPKERQPGTRREAWTDRTPAEKGAATQESPRETWGTRAGVPGEPQRVWENREH

SEQ ID NO: 977176 - protein, 346 aa, Homo sapiens
MQITGDMYSMTRRFDRRHVCAYEIILLDLTRPRITRVTEELFLSVQYGSTWCIRHWAMRMVQPQCPGPPRCTAPRIVVELSKQYRAKSTYIVASDIITAVKCNVEVGSINGIVAETCMHPIGIEKGMEPRSTTSMRGSEEGSCLSDQWIISDVYPAFHSSDFEGDAKFLVTDNWESWCEGASIADEDTLHVLCRIDTGGSFRNVADDLHEPKISAEAARGQVPVDQMGIREPLPAGDPEDGAVARALEQVQGHLLLREGYYDREEAGQQDLGEKVGISAGESLIPLTTAGGRVQCGGGSGGPKWGRNSRLQGGEAMKWAQGTRRTGGKGRPPRKKDPSLAEKAGQT

SEQ ID NO: 977177 - protein, 154 aa, Homo sapiens
MAPRGDREEELEEVQTVKDVEALRDEEELTVVQVTFSGPESLASTLGRISLSNGRPVRNWAAFSLDARTSRYQGRCSEPCVYYGPPPDERSKGPTIDAQGDRSSPDRVTRAREEGVQEKAGPTAVLGPGTPRPALEGGPGWRGRGHSDVAGATE

SEQ ID NO: 977178 - protein, 364 aa, Homo sapiens
MPGLCPMGGLGCWGLAVFISCIILPTCQHSHTAQPAHINTHGIHTKAHLANIIQHQTHFTQCRTTWHACIGSSVTTHKQSRLATYGSFTLVSLASSTFDFCAHIGGLLTPAEFKPATPAPTQHRRTLFISDVWLNSQQLLLIRLTEQRPSQNDLASRRPTFMGLGPALTSPAVAQPGDGRGFAGEIQGPRSRRHYGQRDCQTAALCLDAPCTGTSHESRPHGRLDLTSGAPCFTSTTLEVVDTASHYRLITPVHDKQNPRQSKRRQRLMSRASGATTHRRGPATPGHPGGHYQTWARTQGRAQPPRSRGERTTPRPREGEQRHPGDPSNDTSRTRATSRHRGRQNTRRPAGPSSAPTQENNNNS

SEQ ID NO: 977179 - protein, 308 aa, Homo sapiens
GGSETFLLGGRGRGPQISAPKKKTQKGVEHGAVGGRIGPGPVVAGPGDQDAIAYKSRPFGGKGIEARGNRHSKRSAVEKAVEGETHRSEPSISSASLVDATAHILDTQNVPRQRGDECNPRWVKRVLRAAPHKRRGEGRTGGANSGGNVGSTQEELLRKAHEAGDITHTQGRAGIIRGDQMCIPMIAQQSQTAASTPVRDTATSELEGCAPVSTAHKEGAEGAEGIPQVRQPGTPNGTKSGAAAQRGAEHLVATQSSAPEKEAGPRKRAREKPVTKEATPSTSAPGNPETKAAYMSHPRWRRNHQRPE

SEQ ID NO: 977180 - protein, 241 aa, Homo sapiens
MQKEQEGDNKSTDKHRMNPTKITQKNNTGGKHTAPKNTHKKKDTTKKKSKQQNEPQRKTRGHIKRDNTAKKKRRKTEDTTRTGHKTTKKDNKGKESKTNKKTTRRKKYKQQREREKKENQKTRKQRRTNRRTTRKKTREKRKQKTGKTTQNNQKKNRSKKPTNKGTNQREKGNTTSSSSATKKKRKKDTTKRRAQKKTHQETEEKNAERETKQRKTNSRTTKTKKDRGQKNAAHASRKKKR

SEQ ID NO: 977181 - protein, 325 aa, Homo sapiens
GWMTAWCSWGVPGVPWWPCVMGEPAVCFLLDGFWHVASCGPGVCWPVDWWPGGLMACWMLLLECNGLRIMDVDCPVTKLGLLGQGHEDQCPWRRSISSPCLLRNHEIIDFFLGASLKDEVFERLCQCRSMTLCLAMLHQGSQALLFAIWGLQWPRRSWVLSAPMDVWPPAIRGAIILCNALHRPRAAEATWGNKIGKPHTVPCKVTGLCGSVLVRLIPAPSGHWHRLRTCAYEGCHDWVGIDDCTPQPGLTAPWELRHGNFDCISKTYRYLNPGTLWTATGYPPRVLLTGESLANLRKHRNQKFRGHGATGTRSCAKTRRLITER

SEQ ID NO: 977182 - protein, 286 aa, Homo sapiens
DTTPGPWLCPTRYLGLRLLHSVLRLQQLLVNLLQARGADLLRTTRGQVLELTPPPALTPPLPGMTPAWALTPPLPDNPAPGPDPTSSWDDFALGSDSAFSLIQPCQLPKPLLLRYDPPCLNPAFSPSQALTPPTSHLGSTQNLDLVLLGPTHLLMLALPTGMPPSTVAPHRPCAQALSLLTPPQDSSSGPAPEPEAAPPNQEAERLPPDDPESPDHNIWTLICHWRKDPPTRANPPTPNLMPLTNSSEAASALHQTGMVGSNQVCDQATDYKGARRGGQEEEREDG

SEQ ID NO: 977183 - protein, 443 aa, Homo sapiens
WKGPGQTLAEGARWQWCEFPTSSGQVMLWCLHLLLFLLADPTWVGTCCHGCWMLGPGNLFLANGDGPCSCDCLVVPPRWLTMWNGCGDPVMSWLCLPLKDIALCVVLSHSMGAPGPDGTMDVTVSQGHPFSHATGCQLVRDRCHACHDGAVPMEGFDVMWPSSGIQCFLASQRCSNNCMPAHVVTFMTPGLLSYHKHCGLVTWQVGTCMSFQIRLLKPPCSGHCLGNLFHPGGWNPVGVCCRIVLLGHGFPPFNYGAWWLGTFGADPPGSFFSLVEPTPGPRWLVGLLLVPLLVSWLRPGPAGLRPFLRLAHTSGPETTQWCGTQSARAGSKSPEWSWGYEPPDSGRSSEEESLLERNAAGRARLPECTPETFPPQKLGVERRRMAPRDISKTDEMRECQPHSMRPQARAHKTSNSWSSNVSTQTSHTDPEKEVHTSICVVGL

SEQ ID NO: 977184 - protein, 193 aa, Homo sapiens
MEAASGYTDLREKLKSMTSRDNYKAGSREADDAAAARRADAGGDAAGDEPLTLSPGPRRKYQEDSEPERRDYEEQQLQTEEEARKVKERHHRQDDAILTARNECAENEGPALEEVGVTGQDKGQDNRWTTVGRGPPKDRQRTYEAKGDTERGPRRETARTRQGTGPPQRKYRAKKHEWIDKVEARRPGGEHGK

SEQ ID NO: 977185 - protein, 210 aa, Homo sapiens
GSLRAAGPELSVSFLVRAPCIPAPGCPLEVRLRSHRADWFLVAPEARWLGPAWSACMLPLEAAGLLAGWGRWGGVPAGASGQSVPLLSRGLRCAGCAHADRCSSTACLYSEMLTACCSPRACLWLPVLATGLSFAIASALMCWLLCTAVYLFCGRWMMDPVMDVTFAEDLLDDDERACGKKLSKVVCQGALGVTGTALRRTKQAQLRTGN

SEQ ID NO: 977186 - protein, 345 aa, Homo sapiens
MDSWVREDCAGLNYAVLVRWGRPLRQSGADGVTSPLGYWTSGQTFFDAILTHSSKCQVSVVPLGRGIGEAVCQWCVRSVAAWLRGPAPTCPACPCACEAACALKNAGPLLVGVAMCCGAALEGAALRGWHGMELVAPVVISLTPRKSTARFPAWWRKYGLLVGRGPSLPTVKDLVEGWCWVKDACDVRGRPCPLSSVVGYTDLSGVVLLACVTWYRIGFYGGYVCVAGVYAAVLIDLMEVDGVDPCADRRIREPVLVVDVEGQWSELPGATSGMFVVRNRRELQGNVKGSPGINFRKRVATRVRANTHSLTERPQTRRGHARYTLSGGRNSHKHPATHWGGPHTE

SEQ ID NO: 977187 - protein, 144 aa, Homo sapiens
AKTLRSCIHSPPLSECTIISLMTGNWGPKKLDLGGLRIAVGRLRGPAFSLGVHDPLDQWFHTGVNRKPSGSTTWRHERLKEKNKNFFGTGASRKPTFCKNTIPQKGLYANGGLFSSLGPAFNSYSIALGKRAYHVAYPPLVGGA

SEQ ID NO: 977188 - protein, 286 aa, Homo sapiens
LDDEDVEELRGSSEGGMEMRAMRQRDREAMAGAWARMRAWAPWYDSDEEDEERACPQAPQGGAGPRMDGRSDGQRMMIEELSEMNAWRDSQSAHSCALRWCERCAGPPAVRIHHRFKNFLRTHVDQSRHIASSGSAFSDYVLEVEACDEPGGELVRDLAKQVASVLVLSFLYCRAPAGAACYESLMRLHCGGGTGHVPQVLTHHNASSVRISHLPLVEELGSLRQTDLDEQLIRPSGVVTMHWVPAQVNMVTTSANSANFVPGVLFANRKREVKQGPGLIAMAGPF

SEQ ID NO: 977189 - protein, 336 aa, Homo sapiens
AHPEWSDRVPKMRLECTEPWLNPGVPVRMGTTLLYQSITYQAGEICCACFCLWTALTLSDEVTITCVPGARTLPQWTSQPSYSGIMGLQMHRSHLQAMRGKGGILCLWCHPGCLVGLCRWYSCEWRLHLRTIHSFRVNVRVFWLRLGLSHVLHGPNHSWRSGLQTIRLYERLGIRGSMNVFASEPRELQLQEQEAPPLLIRAEGNTGPGLWLPGGLLPGCVNSLPIPRGGFDWPGDPDSKYSKDSDGQSSSSQLPNGGACPRLTGLDLGGGALVPLDFGGLLCGTLKGGAERLSPWGKRVAQMVGLMLSPVWCKLVSACASALSNQSPCWVCRNLS

SEQ ID NO: 977190 - protein, 69 aa, Homo sapiens
GRTESPTPAALMLLVGGGINLNEIGDPKEGCVVEDGGWLRKNVLVVAAVQPLECFVEVFGNSLCLTLAR

SEQ ID NO: 977191 - protein, 104 aa, Homo sapiens
MNWEPRPILTLANHQARKPDEGQHQWATVDASTKGHSNVSPARSTQQRPHRDSTPRANHTKGPVTRAPQHVATTATTGTPPAGTKKPRPGTNPLHSTATPGPFR

SEQ ID NO: 977192 - protein, 170 aa, Homo sapiens
MGPTNNDVISIAVGQYKGADNIALTILVNCSYTTIFTWRRVWMTSSFAGERFLAMDRYCPVGASNRSRGNLEPSYLVGFRTSVRVCLTGHSSTVLSYSSLLALQDAQEVKLGARPVICDLADSGEGSPSNLLPAGSWGRLGQRGGYPYPREPFWWVFCWWSWPKDYKGGL

SEQ ID NO: 977193 - protein, 173 aa, Homo sapiens
VILLHWWRWKNEVAVQLKQDHAVLMSFLWRNVKAPQKEIVEFTDECCCVTGLRMDAARRAVDAGRCVATRRDRPALQRLAWCWGNRNVFVDGRASEVKTPGAVLVGPSTLSREDPLVELLSQVEPSDGSELVSACRGCERRRRLAEIRPYPRGVSREIRSIARRAFEHGGKWE

SEQ ID NO: 977194 - protein, 72 aa, Homo sapiens
MLRRIGRQERYSKQHSRGSVGRTQTTYRRSARTTHVDSETNHRRSNPQSNDRTRHQPTHMTQTHPVHHTHKH

SEQ ID NO: 977195 - protein, 103 aa, Homo sapiens
  misc_feature (73)..(73): Xaa can be any naturally occurring amino acid
GVVQALGTAACPLRAITCPQSVGGLAEAIGGCSGCVEGEKPSSQGGKGMEARVSQWVMLLLHAFNRYPASLQXSRRVDHGVEAKRAPMPTHSHPPRHHLHMWH

SEQ ID NO: 977196 - protein, 85 aa, Homo sapiens
DGGINSLSTLDTPSTCLLTYTAHILHVSPLMKDSREVRSCNMSGLSLACCKTYKLTMIVATSYFAYAHILLMSPYEYDSHVDTTH

SEQ ID NO: 977197 - protein, 326 aa, Homo sapiens
MGATPRECVPVRTEDACEGLAQLLVSLGDPSQETATRRADKAPLSAETISLTCGPQRSRGGTPQAGGHPTAPYHERSPNTFNTAGAPKNKKSPRKNKLQAVDHSKGPRTGVSPKLGATQRPSSNAQRPSPSPPSRKQTSGTHNSGLRPPRGRRWAPTTATRSHPHNQASSRQKRPHTTRHAKYPPQNKVAPPADDWHTAHKQQPPGSTGATATPKKTPRLGPPDQHTGGTTSNTPTANKTRRSPTTQQARRMQHQGTPDLRRAAPHENSKQASHTTVPPNAPNRRAYTVLRRSSTQTANHGAGQNDESTHTNANTTTNDSRTANTQ

SEQ ID NO: 977198 - protein, 170 aa, Homo sapiens
MRARRRRDNKRETERKRSDTYARKRGPTKQTKNTRRERNEKTGRTKKTKRTSKRSKEQRERKTKTETRNTHSRRKTNTDTDRETRENEERKKEEQKDNKRKTKREENNKQNNKKKKETQQTQKETRTKTKEEQTQEHKRTTQATAQSTKKKNKREQTTTKNRRIKKTKRR

SEQ ID NO: 977199 - protein, 272 aa, Homo sapiens
MSISDEVSWISWFCGAPWQMNLLLVKLDEDYVQVKCESLLDSDERRSLNYAEIAHRHDPLDLELDEELEAEPMQRDLMEQRGEMLYGGSRPRTFLPTVDRPDVGKVPARRLGYCPRVYCEKQANAFQWVLSDIPGEGMGEGSNAQVMDVYTAQVIKKQQQGMGPTSALVFLTCLHGASEYGQKTASNCASLVPDHRWLQVGQRERIRTQLKIGDSSHFGIGFFLPLGPLVSYTAVWGTAESEGEKKTGLGCKVMSLSPYGCACYGYIYLVKT

SEQ ID NO: 977200 - protein, 123 aa, Homo sapiens
  misc_feature (123)..(123): Xaa can be any naturally occurring amino acid
MDIISEGVSGTFRSESHKNKALNAITQQTLTAIKRTPLTNIHDPSTTPVTRREQQQTTRRARRSATRDRLGTEWRNRSHQRNNMIDHTTALHTNRRTGGPHHQATQCTNQPRPDDLEMIDIKX

SEQ ID NO: 977201 - protein, 112 aa, Homo sapiens
MWHHTVSDDVSMTFITSKEDWTGKEEEDPMNKLKGQKNRVLRICKATLDHPCPTMIRWGPCRKELGRASGACSTGKRRKLPGELEAVQARRTDGSMCRELARGQRAGVMQPR

SEQ ID NO: 977202 - protein, 96 aa, Homo sapiens
QAFQGSGSVIAILGTKMFLGPWRTWRGRDPFKTPHAAVGATNGLGDLREKIPRGPRETRPSCVRSQGVGSAADRENEYSWEILSLRESIMHLCGIW

SEQ ID NO: 977203 - protein, 163 aa, Homo sapiens
MVTQLCSPDVGAVARHSEGCRDGRTRRKAGFQGLPSRMGTRRSRGVPSSQCPDLRRGQLPHGRAAPGLPISGGKGPRRILYLGEPPRHGAGPTGRGLHDSIGPSGNTGRTSGPNARPTGTPLCQHKHPSGRSRPRAGLTLQPREPFTRTAGMRQHGDGTTASG

SEQ ID NO: 977204 - protein, 145 aa, Homo sapiens
GWLRPVNGGFHVGVGEGAHPCPGGVPPVKDLSRRKQCPQVGAHLVPWVLLWSPTGQFWGLVGARAMFQSLRLRPRCSPGWLGRLCARASRAVPHFGTPSSWRAKPRVSHLARGKRRRPLVRRGPISPSMDECPRGKEMVFWEALI

SEQ ID NO: 977205 - protein, 113 aa, Homo sapiens
RDELDQTRGLLGNDAIYNVIVYTHQCIVIIFFIVIPIIIGGFGNWLDSPNNRCPRIWRIPRIRQQYSFLTSVAPLSPYSVLHSCYSGGRMQEPRLNQSMPPLAGNLHPDLEPP

SEQ ID NO: 977206 - protein, 179 aa, Homo sapiens
GGARWLSPPPGMAVQLLEEKLTCAICLGLYQDPVTLALRHNFCGACIRDWWDRCGKACPECREPFPDGAELPAWQRGPQLAVLEVVLRPGSVLGSRPPIPGPVPLTLRLLTPARWLCGGSLLPGPEGRCVCSVCTVRECLPSTSGRCLDAERLKARGPAEEPGWRLPSSRVTPVAKASY

SEQ ID NO: 977207 - protein, 73 aa, Homo sapiens
LSPSAAPAGTALAPSIRLVLIASSRRRLPLQIRHHDYLPGPTSVTYEMFSARSRRSGRSPDGLCLEVEGRDGQ

SEQ ID NO: 977208 - protein, 113 aa, Homo sapiens
MGSKIEITQGINIRHRTHPDKPIMHELTLNPYATRLIGTSAAARPSIRSPAKKRAHRRPTHNDARLAHQTHKHRSNPPHNKRAHPLHTPQTGEPPNTQPDAPDSTPPGRVRPC

SEQ ID NO: 977209 - protein, 170 aa, Homo sapiens
  misc_feature (34)..(34): Xaa can be any naturally occurring amino acid
RRCSAGPPETHMTHQPISDHEATLRCWALGFYTXLEITLTWQWDGGGPDPGHGARGEQAWQWDGILSRKLGRLWWCLLVEELEDSTCHVQAVGSVAKRPLAHGEWELSSQTHQSPVGGHSLLGWFSLWSCDHLELWCRCRDVEEERAHDEKEEGRLAESRTVRSDSADGL

SEQ ID NO: 977210 - protein, 220 aa, Homo sapiens
WGWGGRGGEGGGVGEILLKRGGGGCGRKCFTKCRGVCYWIGGSRGDHGGCSCLCHLHKKTMVGVKHSGRLWSAPQHLCGGVLSVVRFARPSLFVLLQEIIVVAWRGRAHHPTTEGVVCIHAAIQTNTQGGKDGAAWTGVSYHSRFNPPSARHSTMRAAPSLDNPRYTRGRPSDVAPIVAAVGGAAPPQPPPRPNGRRLRGGSAITTHRGGRQPGRKTTSS

SEQ ID NO: 977211 - protein, 309 aa, Homo sapiens
DSQLVGDGRRRTRVVCSCRPSPTLDRLLHICDEVQLSIAAIVPRAGSPSIGKRLARQLYVVWKHGIQARMAAECTSVEVSHWGVRRMYCCAVPILQCEVGALWNTTGVPTSGVEGSGKEHCENPHELSWHAHGIGKRGTPHIRLAFLHTRIGDHDSIHPWCQCGHELLRTIELVAPKGSTYYLICGKGKIHIDTLLVVGSRSKPAKLALDSGCTESFRGTSMVCMHITTIGGVANLVTESVILTHVFTGLSTRQFDLIVRKTSPKPVMFSNFIHMIPQGNPQGVRMEGLTSPMLQATKNSLEGTLIGAF

SEQ ID NO: 977212 - protein, 276 aa, Homo sapiens
MVGKGRPTKLTAPVNRMAEDAHPQVDIATEGRSTTAFETIPPSLTRDTGTDSPKERIIQDLGNLPLTTNRKKSENAKCLTSTPFTYEHKTCNLREAYTGQTQWNKDWFYPSRRIKALGGSGIYIPPIVGTSGHDFEARRANSFVNRSSQNHNKKGRLNLNALQDVQHPDSTVICTISDSGFPPTRQNRERSAKSYSQQVSPKKITASRITTHSEKDRPWQQNSGNRAPETQNGRKGTPPGAVKQSPAKRAHNEQRPPLPPDNSGRKEALHQTTRRS

SEQ ID NO: 977213 - protein, 245 aa, Homo sapiens
GRTQVMPGGLPVPEGNVGVHTIASGVDCGLLKQMKELEQEKEVLLQGLEMMARGRDWYQQQLQTDVHVMLPAARLVPEQSHAPDFVVLQGAPAHWVLATCPRYNECGPGAWVGAAGCMPVPSLVPGPVLTPGATLALPYVHSHPGLAAGEHPHAEGAEPTPQPGGEPRRVRCITAAGAGEVGLIKPLFEGRALSQEDGGALDSTFIYILVGRVRHQGPDLGISPSGGGRPHEANHSIGGDHAEGN

SEQ ID NO: 977214 - protein, 201 aa, Homo sapiens
GFQGGRCAVCALWSECLLDENSMLIPICCGGALCVWLVLICPHRLPLSAVKRSHAGYQTIYLVHAVHRQLQWAYCSFTLRLRVLVERGGTLSWQTSLKSASSNVTVHLAAYYYAQQSNYRNDWCKFMLNWVHTIIANCVQHIQSSTQSTRISSGALVLSLHAADGMPLSLDCADSFLPPSLTTIKNKALSTENIATISTIT

SEQ ID NO: 977215 - protein, 283 aa, Homo sapiens
MYTGITRTTDNNEDSNLKKMRSETRKKETDRNDTATVKNTNRDQNRHTDNAIRKKKTRRGSKQRDTDTQQTTRERQTRSDNDETRNRDKGTRDEATNGGEEGEGRPSGERRPWRRRGQEPAEKGREHAGEGDEKRRAGQAGGGRQREEGQGGAGARGAKGGGGVRAGERRRSQVASEETRTEEAGHTGEHTEDETGNDAASEQQGTGAEKQQERNAIGENTRRPRERAEEESRGRAAAGDRKRGRDMTRYSRQRQGTAQGAEPRVGGTQRKRAESQTPRGKMP

SEQ ID NO: 977216 - protein, 169 aa, Homo sapiens
MAGEQNDSSLHQWLESEKASSKLKPQHYVLASPVHILSWSKAIKAAEASTWFRAGRARDSLLDQRLGGLIKRMSIVRGWGRLRIRLGLTMVCRGSAYTRGLERSLPTSLRERECPDNSWFHDKHEVPEECMSRELERLSLKTVTVCWFSRGFTSKNEAAAKARLSEVGW

SEQ ID NO: 977217 - protein, 129 aa, Homo sapiens
APSDDIEEVSQGCSGCWAPIARRRSSEQVWGRHEQVVELVLETQDGAEKQLGEILIMEKEVAQSLRQNAEGAGAPGMAWMLQQAGTLGFRRLGRRTPVVKGSLLQSHHEELVGELNEIEVDLEREEREV

SEQ ID NO: 977218 - protein, 174 aa, Homo sapiens
MPLLKWVQMRLNFSPGLSNANDLGKQHGKSPFTGGNGYHQGPKDDDQTLNVITAKWHIPGCLKIDPVVILDLTVPLREISSGSQGKTGSPGNKFGAEETAASTLSFLTTKLRIKRWPFLSVIVHDKLTHRQTTVALICWSVLIYGQQCYDGSRHTVSATIREEHLQRNTAPYCE

SEQ ID NO: 977219 - protein, 93 aa, Homo sapiens
MVQEEYREKTWKESGVNDTGTWYGPVQQASTLSKLKQQPNICPEQDLQLKFTKRTHTRIPLAVTAGHRSQGWAPIIVVGPWTLTIQPRTGPSG

SEQ ID NO: 977220 - protein, 394 aa, Homo sapiens
MGLVFSKGQPVPSSSLQSEYTLSELATLTERNDPSGVILKGPQSGWDKPRSAKLIPGEVSRERSDCLSRARRTIETKSSRLVEIVNRDGGRTSYGRLHESVICGRSLPRVALGELVVIVRQSGAGVCAVLQDSLGNGTTAVGALGILSNGVTRPPEVVTLLGAITRGLCVSVAFGPAEQSGRLSLDLEIKSIEAMEYPGVCANTAVQDESHSEWVSCVPFSPKEEPIIVSCGLGQAGQGMEPGNCKVKTTHWHTGYLEHGEWFPNDPLWFGGKKAGQLGSTKGTLYTPGGKKSRLPHQGVAPNVRDRSVTTHQDARRLILLDMIVTKNRALIPPSQCTTTNIRRPYTIRKTIITMNTHNNTPKPNTHHHTTHTQHNRKHNNTHAHHRHQQTKQS

SEQ ID NO: 977221 - protein, 415 aa, Homo sapiens
MWAMGGALVVGTLALPCVGPTAAPRCRFCLGIGRRETRKVVPLGGSSDRLRRKFHVHRLGPLALVGPCVLTGPMGVLKQGRGPFGCWSKRALWPGKLGQTAVVVAFRLPAMGTFNSKAPARNSHRGVDRKAGDSHTLTSLGSLHPNMKLQDPHGIVGTWLDNNTCSLAYVNPPRHTPYNVEAQVTSPYPGATNQQWVEDQQGVIERENTKKEAPHQDRGDRKTVYSSNPHMDALEPVVSQIDHMRCIKRNYKQLVTYNGDAPGCIYCEYIVDFQLRTNRVCDHTSAHEQHTISCVHQCIIRLKRVTHTQHDARSSDTLEERTRNTKEDQSRKKKPMTDIDTPYQSRPTETKLHHSPASTQPNTQTTEGLISITHTENQPQSKAENRSCEAHTSSPMSGDEETTRTPQTNMHIYLQ

SEQ ID NO: 977222 - protein, 123 aa, Homo sapiens
MDLMRKKKLYCIYVAIGRKRSTVASLVTELTDADAMKYTIVVSAYGLGCCPRSDTWLLTLAVPWDEISRDDGKHVLDRSMKTVSKRLFGYRQMSAVVADAPGPEDYPGDVSSYIAVAGESTSK

SEQ ID NO: 977223 - protein, 72 aa, Homo sapiens
GRQDLTSSSEPCLCASQHLAHTLQTGPMVWCLRGYKQFSVGITFICCVASYDVHVCAYHASGRGSISDEYCL

SEQ ID NO: 977224 - protein, 282 aa, Homo sapiens
MLEIFDTPVMYVAFQVVLALYASGRILAIVMDSGVRGSNQQSVPIYEGYALPHANAMRSGPWLVVELDRLNFMKSPLSDARIESSYIQGRAGKFVRDMSTEKLCYRSSSGTIDAVMNGTPVDIPPSCILGSRGATKSAPNGQSHHHGTTEAVSGCPVMDRLFQAYSISLGDIGIPLDVPSRSDGSQPFKHPNSSDTSFERWGNHFSEYKSTLVTATRTTVWLVRVTGYLNPELINSQGTMCQNERIATYRKNSPGTRDVPEDNIDKIQEFIRIPAEAPTLLA

SEQ ID NO: 977225 - protein, 153 aa, Homo sapiens
MRRRENPSLLYASGSLNKLIWVAMDHYYRDSSTVYVMTGMYWGDPFWKWVLENLPWYSQHGDGLRELVERGLLWALEVTCYQESWGMESWDFCSFRCGPGAASVDPIAMRRELAPHVMYLTCGADWSNEGLAKGRSFALLAGPVLDNVRNTFW

SEQ ID NO: 977226 - protein, 252 aa, Homo sapiens
HHQHPGYWYRDDTGRAVVSKLGTMQIGVKGFLDALQNQALRPAAKIIGQLWSGFSTQLSWWLTRVEVYSRSEGPGSLGYQVAFRWFWSVLEIAEASGVRTGTKIIIHLKSDCIGVVPCEVRGARCGNRSTSNFVELRPCTMNGRRMNTWQAIWMMDPRDVREWQHEEFYRYSRRMAQDKSAVHPVAIRRTHRSTSAASSTVPDMKPSMFDVSRELGAQRCTVQRKSSSRPMPRTSCQVGGFIRGVVQAEDIP

SEQ ID NO: 977227 - protein, 473 aa, Homo sapiens
  misc_feature (401)..(401): Xaa can be any naturally occurring amino acid
REVSQKVLRLPEYMVSLELPASEAARAGIVGKVKSYPKDDPDPSRSTVTGLPGVVQRLAMQLTIGGGKSDDGRGSKDEIRRNGGGERLVNEWSENNLSDGWVRGLLWRAYVGNRLVRASRNLQSNGLSCSTSGDANGRVGVAYKNCALNLSRNGLITQCTEQKMVGVMAWTKESDYVDDGTCTKHENTVLRTVNPASVGPSSQYDDLLGCVATRKLGNLDGRIQKVSRRSTRGRRNPELGLRRWIELGESLVEPKMFGLRVTDPPGYRVPPGKGSTATRSVQGAPVMGPNPTGREKDGKGQTGGATRDGKRRKQQRPTGEDTLAIDRIYTDTIVVCVWSTADSHHRSSTNSANAQRQHSNPHHTPHTRTTTHIRPNNPATQTTTTPSTTRHAHTRLHPPQXPKRTYMKTTKDRDDTRHRDGSTGPDTAANRVSKTCEQKQERKERVQSDRRQRELYDERPNQALERRKRDDEL

SEQ ID NO: 977228 - protein, 306 aa, Homo sapiens
MARGWLLCDACLARVLLRAGARIAVARTPRWGERELGAEASERDDWADAWRDFREKTMAGVAWGVSLERRGAEGIRHVIDDCKKPPSEQAWGLELLDGVLVHLAAGKKDMEESEQTRLSVDGGFLSVGDRHVDVVLGEREMRSWMDECAGRDVTGDVVLGVICEEAGSRICGACWVYHGRAWDVCDLTSIQQDVLPQLETAGMVGTEHVTYPHPVLDNSPGNCLDSSENPSWGISGRFLGLNRPPCEEQPSGTGGGVTVAIEVGALATRRGKGLKGGFGASGPGEQVRHVGYETRVVNQPLECRMN

SEQ ID NO: 977229 - protein, 317 aa, Homo sapiens
TKSEAIELEDLLRYSKLYRLGNTARHPDGEAEPGKLSQGPSCVQPSPPPRVPDPSSMPHHAPLPGSQGVQVVREGPGPITMFPWPQSCPASLHHSYREAPHVRLFARSLPKPSFQGSSPRRTSPWVSSQEAGPIRMWDSGLCRGLRTLCRHSMCLFLLLMRFPAFQPSPDLRSPRAPASVMACPSRIPAPWALRPVLPCVLSVPVFLSLCSRSLSLFAVCVYEMCQMSEVCGRGPADILYSLRVCAELLQNRQRWEEFGLQTALGVGDKAFVCVTLRQPGHKPEKGAQLVGRLPTFLRIWGAHPNNQQEGTHRRGPI

SEQ ID NO: 977230 - protein, 39 aa, Homo sapiens
MNKHKRNRSDAHKNNRGGTHTTEHPDHEPTDPPTQAPTS

SEQ ID NO: 977231 - protein, 155 aa, Homo sapiens
  misc_feature (55)..(55): Xaa can be any naturally occurring amino acid
KINPLIKLINHVTHRSPPARSKHLRSDDNFVLTSVVAPALSPRKITTGAYSVAMXLLDQTHSIGVFIIERTISVEEVNCMAGIIRLHLHAKWGPQYFVQSASSVAQSGEAVLLAVSVVVIRQETVKTSAIISSCIAMYEQSSPCIGVWSVAVRPK

SEQ ID NO: 977232 - protein, 459 aa, Homo sapiens
RERTRQRLCLAFSYFSPLSPFFLFFCCFFSPLPPLHNIPLGGGFHRGRGQSRVYTQGVVTTRPSGGPQMRESGQPQAHNTGRLESGDARPDEETEERHDRGKKKIKASHASTKSERRRTEVTREPTRGRGTREDHRKRKYTTHKTARGERKKETTIQRKDREPETQDTRPQTDRGTTPNLRRRSTWATAHAQGVVTNMGETPPEGEDRRGATPTKAEEYNSEQDGTNTRRRERAPRVTNNEGAPQERADSRRNTPGSQDAKTRGSRETRTERTDNDPTNGQLQQTRTRKTEEDKKKERQQARDRTGCPPTDDRATERTKPTANRDRHRRQPHNKTLTDKNRREPRSKRQKTTGHHPDSVTPKVDTPKETECRKKCVTKTKRQAQSTQEDNTETSKGAQAKVEHQTDTREERRREKRHNTRQTQENQDASRTKQEATSNEQAQRRREADKPEGYTQRSED

SEQ ID NO: 977233 - protein, 394 aa, Homo sapiens
MALTRLFYLGLLSYLRTSLRAEEEAEIPEISGMTVTWLSIPKRSLPRYGYRNRLEYLGLLEDFGDGGACPVDPCGPASPLDMGRKKQKCRMRWPCQVDCCRKNEIRCKLLVRGQVKGQRSVDKQNTVIVVPEGGYEMQMIREVQRADEEAMTRRYPRKDKSSLRKICITEGRRQHAKFEQLTNVAPAQYIRYTPSQQGVAFNSGANQRVIRMVETATRSNWSLQGFTITEDNSPENNFLAPATGIGFFLAERMTVNGTKAVEDPPWDCLKCDNCTRVLRVPSNKRLLLTEHDTDSHTYAPRPQRQKHSTKRNRRLRNTGNGAPNAAKEPNKQTHEKPTQRKAATTKAHHRTQEEQHRKARGRRKRTHQTKRREEMRAPQNTRRRVDTDTTDHSS

SEQ ID NO: 977234 - protein, 207 aa, Homo sapiens
MWKPETSRIPFRRAKGRPGGPRLGVGIPLIFMPQRVHEGTEHSEESLASADKGGKRHKAPNSLTLPRMAQLKGREDCHMHIAGGRAPTCRDTGTKHTRDRTTRTQKRFEETATAKRRQKSTRSPKLAGPGGSKLETDSNNNTAKWYNNAVGQKTASNTQHAVPKNCKYNTQRSYPHHPTPPPYREANTEQHSATTNNKTAREKHKHV

SEQ ID NO: 977235 - protein, 589 aa, Homo sapiens
  misc_feature (82)..(82): Xaa can be any naturally occurring amino acid
  misc_feature (85)..(85): Xaa can be any naturally occurring amino acid
  misc_feature (108)..(108): Xaa can be any naturally occurring amino acid
  misc_feature (128)..(128): Xaa can be any naturally occurring amino acid
  misc_feature (140)..(140): Xaa can be any naturally occurring amino acid
  misc_feature (169)..(169): Xaa can be any naturally occurring amino acid
MRYEPGIIAARQCSRRGSRMSRLSVRGPARSCPGVERAAWRAHLAADGDALEIVTRDRSGGLPLSEIELSLETSWYGKYLTXSYXAEKYAHASDRLRSMSQQNATTIXACTPRFAYKRKSSRERSMMXSDLTEGGRKEAXPFACAKPAADLRAFLRRLGALTQSLCFAXGQDPDGNVSAALQDGSRCGRAQRWRVLGGGRGGNEAKGNVEAIFTPILETLPSPNAPLQEVPHGAKNLSIGRDNPLIRRGVITIEIPPGSSLQDLSSHFTPLRGILEYTTYGTFAQSHAAPPLEKGRSPFSSFALCPKKVALVIYTTFTVGGHRTRVANRITKRISDGKQKQRGDTIQSPEVSTTNTRQQQTKAAKMGQHPAQRPHKGIYKQRHRHKRSHRGVPSQGNGQITQHITPKHWHTNTAQHTEQQAPQEQRLRGHKRTTRVSNQNPGTYRLETKRAPLMNTTNHPTLTPKAEQSDKSPKQTNQQQNTRGETHQHEEGQTTRTPHEPLEPQKTTRNKYLHQKSHTTGPTKDRKKTTSSSPDKQQHNTTAQPKRAETKTNTKDNSKTEKHNPTTTTNRRQRTTHQQHSKSTTNNNT

SEQ ID NO: 977236 - protein, 522 aa, Homo sapiens
MTHMAGSMPKPSLHQPLTPAQDEAPRAWMASHPLNFQTCEHPRRKQVAPTTRRSEPINGASPKHHHTHHEHGDSHNITPSGDQERHQRDMGTIGDDGIIQRLPTMTPSLIMTHRQDRESWQTIDISFLEPYKTRESLDEPYNIYILATRPGLNRETAEERGHGRRPTCRTDCRPRSHQQNIHLKDPTSTKTQNRYDHPSDTRPRATHTMSATKIANTQTNTSHARGRHPYTHHEKVTTTGTTPRTTHPPQDIEHHKAARPQDPGAWREPTAHRQPTTESRRTPPTGKQPNNTRTKTPRTTPPHDPTETTQHKTQNTRRKTKTANKTPDPDATTEQRPSTRTTRQNKEHATQAKQENKPAKKLRPNQTTTTPDKQEQKEPNKQQQQPNTIENRTSKKQEPKEHETEKKTNKAAEQKPKRQQKTKEPRRKTKQRKNNNTTDSLSKPTQQRKARKPKKTHNDNANTTREQSTQTKIQKQTNKKKKEARNNTQQDQKQKERTRRNTNEKYDKSNKKRRQRERKLTK

SEQ ID NO: 977237 - protein, 201 aa, Homo sapiens
PKARHGMTDAVFGDPAVFLEQFGSVGCALVACCCRLLDCGACMWDVSVWCLAAVCVCALHVAFTGQDLNVTMMLWRSWVASCVAPSPAPLLGSMCLCSCLSGFPDMLSCPGLLCPTMLWDSCAVLFCFHASPCSLCHPWHVLLGHRGGERKSHCFSLHWPPVLVKDSTWHAGPHLSLPGGKGANWTAMPSSGGFLRTYSMT

SEQ ID NO: 977238 - protein, 482 aa, Homo sapiens
YIGVAQKGKEALIENHSRGTGHPRGEGRGPRCPHASDQESKEAGGETTRLDMAYTRDSKANTSALLPPEEENKSPRGVVNYKERGEKSGYSVSSARRFGARRKLEGRGDGEGAIPRPTRGALKGKDNKLGGAVKKENTGQRGGHKAERTERWRERLRVETLEHEQRGGDYDPPEKNPAAHTTSGCRHTSPQGGEYKKSYMIHNHLKRRETNLPQTGTPTNKIYKGEDTKTQRGEQHKQGGGGDETKNTGTTVAITDTPESKNTHREPTRKQRSNKGHQIDGVPPRAHSWTKSHTRSIKKEPHTHNDTTQLHQRAQKTANREKQQGPPSRDNTNHQDTPTHSESSKTRRNKDPANNATKQHTPPHHKTVDQKRNKNNTPQTTQSPETTTKHEANKTHGSTSETTTTDRAKRATTHQTLPQGKHRHHTPRTDHKQPNTNPQAAAPPQKEATHSIKQKQTPPRTNDEQQTHHTSEVGDPLPPRRQ

SEQ ID NO: 977239 - protein, 115 aa, Homo sapiens
MDLGTTYSWGGCSSTEKSDNAAGFGNRTSSRVAKDTERLNAEAGKETCGLTPQTSPGCQRLRRKKIRAPADKMGLRGDSLGRQAKTRETKLPGGQVDQKNDPRIKCGRGTRSRHK

SEQ ID NO: 977240 - protein, 257 aa, Homo sapiens
NCACSERVVCDVMSSCDTRRSWGKEKYGVDLDEIKPSSAPDLQGVRLFADYLAQQYRKDEIVVEMDREISRTVDRDQYCSIPVIMDDSHLSRTEAMNPDVRPCVGKNHQWWNIAWEMLPSHEQVAGSCMKHGSRGPRPEGAEENARTVGGGCPTISQFANAWVRLEHGMVRKREDAYYIFQEMGDKCSPTLLLSMGRRLHMAKGRWEGVRACEEALDKDSWATPENGWSNLIVLLPGTWGSPPEVENPIPGPGAPIW

SEQ ID NO: 977241 - protein, 432 aa, Homo sapiens
KKPLAIFGFSLFPKKGKYFSGVHTRETGAWARAQGCPSTNYRTQGEKGGATGEGSKDPSQAGPRVSLSLAPPTSRKSWVLPRPGTRQDSKGGHAQDRQTRALWVSPREGCGGEVRGWLCVWSPHLARRWAEVAPMDWRFGALGRIKHKEKIPRGQDVCGVPNTQYGGPTNWANLPFNKGGAYMAPWSKCEDAPTWQRSKKTFSEKHPVGVPAHHTLESRLLGNTVIPRVISLNFLKKHIAHLYKGIFGPPSFKQCGQEALGTTRSGPREVGPLRRRGALESKGSIGGDHLVDAPKKMHHDLCAAQNTTRANKTPLRKVLLRKTICTSVTPKGEQAAQGPHRGDYTPNILEKRGQTRTLQARPNRQKQKKERRKQSTKAATREHPTKHTRPGTQDDDSESTHPQEKRPKDPKQRETTYNNTRRRTTRDQATNS

SEQ ID NO: 977242 - protein, 336 aa, Homo sapiens
LPHCCCCWLLLLLLHRIVASPSRARRRYLLGQKYMNKHQKPVLTGQRFTTAEKGGKREIQNPQSSRDTLVQELNEAGDDSWKLQPNFWTLQAQDYDYRRLCRHTLLISWWRRHGMLAPVEERCIDDGDEDQDDQPLVCFQRMKIMKPSETMLTVFNYTLSQEINVLRENGVGDPVRVAFSGFLRRLAEADQTQLAMLSGMLLGKCTLPRIITVSSRKLVKNGLRPFCVTLSTLRGEKRCHSVTSSSAKALTQGAELFRTKNGVPAKLPNPANGSSLEHRPATEIVWSQVFIRKSDLNKRTHRGAPTHTSDETRLTHSGTHTPKQQLISLIDSPYSE

SEQ ID NO: 977243 - protein, 276 aa, Homo sapiens
  misc_feature (61)..(61): Xaa can be any naturally occurring amino acid
MSGERGECPLSEDGQTRQRERPQKRGERIPTVCVCPEKYAHRVCAPHNVGNNSHGWAPIQXWVSLTQSGRDCVVWEQCGVHTMIRVRGALIHSETAPHTIHEELEHQGDNTDCVNTGLVAKTRPRTQTSCLCAKAVGKHPKCRKEENSTTWGPRGPQSVEKVDVQTEKRNPNKQVGQLKTPPQTEMKQDTVDPRRRTEVAKVEHHGKSPPQQNKREDKKRPRDTQNNHREKEQTTATKREPTSHTKEETVKQVYQKLHESKNDEQGTENDNDRQRT

SEQ ID NO: 977244 - protein, 108 aa, Homo sapiens
MSITRGGGVEPQFVGETLWGTPWWPPLGDATRNGWGHWRLYTKKLCGVSPHKNVSSRGGAGDERALLYPEGPFGERKPGVNLSWGVLTKKSGENQRAQVPPPSDRVAR

SEQ ID NO: 977245 - protein, 297 aa, Homo sapiens
RKRMAKSVCAMSAGSTSTGCIPASTVSSSGVAQRTSYSRRMREAKTRQRWPSDLMYGGIYVLTVPRDYFYDIDMELIAKEDHRTQLGQMPGGWERSFHTLGTQLKNGELELAEAQPEKETDHLRTGTIGLQLVLINTWEHDASGTAVVAWPCNPDSAQFLRETSSCLTGYLLEISESPQTPVVVCEMSSLFHGVLLWTPGPRLYIPYIVAGPGVGPHVEAPSKVYERAEKPTSSVIAVLDVVHRQCQVDAHGEAGKKAINGLDHRPDFQAGWKQEGYLPSLQGFPHKRPFGPVGSRA

SEQ ID NO: 977246 - protein, 168 aa, Homo sapiens
MCASENSAGFLTHIPLITFEVQAVITLWGAIFLDPGYLLEQRRRKIVDFSSIQCDLLGRLLGCGLYPSGLPMPMWLPFRGAKGVFPGSSPGQGRVTGLRMISHLVMSSPDLLTGVGMGGFHGSHWGLTRPSSLPQRRTPRGEAFLKLSIIMGGAPFPPFFWDTQGIGL

SEQ ID NO: 977247 - protein, 192 aa, Homo sapiens
MRAGVGEREVRVRSLCGNAGKRHIGGPIIRGTSQWPKASDNEGYTMTEDFYKLLALVTIPAGKMWSYLEGCRAGPRSVRIRRLKAVPRTHSKGAEKQRIRVPKRLCGSVAATVQPVWTNHQGARAATQAPHIDNFATPIQPDRRKHHLNPPQGQSTTHGTIARTRFKPAGVHPPKPRREKHEPETRGPRPTL

SEQ ID NO: 977248 - protein, 106 aa, Homo sapiens
GNKVSLGHPGLGCTGGSILGLTGGVSASRVFTAISLWLSALANVGWEIWQAPATTPGLIFWDIFRIRSTGVPPWLGQGWALRSSCDPLVIHLASRALPRGGNFQGG

SEQ ID NO: 977249 - protein, 155 aa, Homo sapiens
MSPGVDDWRSTWDVPLRLALEYTEQTYEIIEEKTHLSRERRYKTHGCHNHRTHPTTTEKREHQTNRETKLAQYRRPQNTIKGRKNQQRGGEQQQRRSQQQESPEHAHPDSTRLKGERESKQTRQQEKTNHRTEQRTTHTTPHTPQKETRQNTKQQ

SEQ ID NO: 977250 - protein, 104 aa, Homo sapiens
ERKIRKLEKATQELIPIEDFITPLKFWDKARELVSGGRCILLRRLTRRALLSDRKWSCVQGMQRRVTMERDIHLGAMLEGQQEALEELELESPKLHAEASQAGS

SEQ ID NO: 977251 - protein, 220 aa, Homo sapiens
MEGSSTIRTFRFEAKASQIMKIINITAVREMNEPTDDRMSHVVYCIGVVRVTSGHPDRPRKCCGKNVRFDADEYDSEQGFGRRKGLGCTPENEGNSVNEASYEGKYRSYGSDIGERELQRSTCRCSTMRHRGRRVRLLRRKSAANALRWLLPGGCPKGESSPEGKDLQKIGDQLGIRGDETGQTVSGGDGNLESLAQVWSCSPVGGDRLCQLTRCLPVKK

SEQ ID NO: 977252 - protein, 170 aa, Homo sapiens
ALLNSVPPPAPVKRGMRERSPRRLSPKYLQPRSPEECKMFAMLQSSSLSPPSLDPTLDSRGCIQTNFCISVISIQEASSDWRGLYVYLMGPSNWCVSANPKASFHDQLQSAETLILLPNLLVHGAATVGVAGSGCWYWNSLWQALSLAYARNPSLKQQLFSYAILGFALS

SEQ ID NO: 977253 - protein, 269 aa, Homo sapiens
  misc_feature (109)..(109): Xaa can be any naturally occurring amino acid
FRSLAWQSLTHRRDAQGRQGELEVHTYFLKIIQLWMMIRNVSFVGADNVGSKQMRRSDVPVAGKAVVLMGKNTMMRKAIAQGTWKTNPASGRNVLPSVSGGMWALCSPXGGPSADIRDMLLANNGAQLLPVLVPLHPCEVTVLRPEQLVSGPRRLPFSRSLGIRHKNLQGTMEILSDVQLIKTGDKVGASEGTLMNMLNISPFSFGLVMQQVFDNGSIYNLKCLISQRKLCILFLEGVRMFAVSCLQIGTQCCISTPFYHQRYNESWLL

SEQ ID NO: 977254 - protein, 47 aa, Homo sapiens
MRPEHRDEALIHPTPANGDRFPLAVRLTSVELGHFLHVSLITTPITN

SEQ ID NO: 977255 - protein, 221 aa, Homo sapiens
PPYSFFFFGLKTLFGAPGGAGAPGGEPGGGFWGGGGAPGVRGKWGKQRPLFPERGGGPETGGGGLQKGLHRGGPLGKISPGGMSAPRWSWWVHPHANYPTIRGNHFSDDTGCGQTQRRSGPCGAGEMWGAPPPQKPQRGACDHLEEEETPGGGAVRQNICVPPQKKPPVWREGNTSENYFCGQVMMAPKEGGVCPPLGSTLNPTKPEVYQWSSPKQRGLNR

SEQ ID NO: 977256 - protein, 462 aa, Homo sapiens
ALVLSAGLLTGLVRDSRALRAGLVVLVSLAALNRPFLTSTLDPLIPDTELALGQQTPDHTEQPDVLEIHRTTLPLTELRLPLRSAPMRRADTQTLRLSTLTRQEQSTYTTDSDRGQRTRQTTTIEGSRSNQHRQWRGRNGDHRAEESGAGSSNRNAQEQAIGEGTIKKERTRRPHAASKQIEDEDSQKKQSADPRKVWSQEVGRAGKSDDEREDEQLAERGRSHPKGRVEETVSEGESVIAGKGDGRESRQGNNKAHEERKGANTGNARRDAGDRQKEERVQTERRGGEARGNSDRGGQGQRDERETKRWARTHRGGGIRKDNRREGRKTKRGKREAEERTNNERGETQTKRAYHGLDTTRKNDELTRYRQANKNKAKKTQDEIIHTERAGGRAGGQETWRQRVVREEPRRRDGQRTVELDGASADEALRRRAGTDGGGAKGARYRYAGERGEGDGIRRTLR

SEQ ID NO: 977257 - protein, 202 aa, Homo sapiens
  misc_feature (104)..(104): Xaa can be any naturally occurring amino acid
  misc_feature (114)..(114): Xaa can be any naturally occurring amino acid
MDEVSVARSSARQIAPSCCASRCCSHMVSGGQCDLPVALAMLPDVPAFCQDEPCCARVGLCLVSDGAGNGCRVLWSASLRPFAFLLRCKAFSQAFRHPVSLRAXDEVLPRALGXCRRDPTDPARTAWSAASFGSCGTPLCVLIALRTELRPAPAASVVCCPRGWRVPVDGGWGLNFEGTSNEGISVGDTGGFRPVAIFQRWA

SEQ ID NO: 977258 - protein, 301 aa, Homo sapiens
MPSWMDLDSKPSWADQVEEEGEDDCCVTRVAPQGDPSWSTVVDQSQKPELSAVELHLLRAPKEVINGNIKTVTEYKIDEDGRKFRDCCVDLHGIEHPEGLAKVLSRGGDELEEFRRTQSLTPPEPDVCSTNVREYVSMTYISLSEALELPETEEDPMNKRQGASKISSPAASAQGDTGPPAAPTQDTLGPMQRSWPTQLGLSTARRRSCRRELRAGCKATHNPRPRPLCPSRLRDGAQRAGTSCTPPRSPHNAPSVSHLAKTACDRPGELSAIRRNSDIPAKQPGPPGCHHTPPRQRPPAT

SEQ ID NO: 977259 - protein, 152 aa, Homo sapiens
PRRSTQPGGEGARPALGTGTWSPFPYRTYAPPAQPAAAGLGSSSGWFLSSRGPRALETQRRLKRRGAPPRLRRTVQVWGLLLEPRGERPLCDGRPLSRPVRVRGSPATAMGSGPLSLPLALSAAGCCCSLLSLLTVASGLRGLSTVYFERLF

SEQ ID NO: 977260 - protein, 219 aa, Homo sapiens
MECIRERVRRGRVPMLLLRVPNTAYLMLSGEGRGSIVCLVVQSLLSLSATDGLAEELTWVISEVERAEGPGVDGCSVDSSRYGSSHLLTIGLVMLVGRNNAIVLTDMNSPDVVGQAHQELSGVYRARGPGAANLTALLITAEPGVEGEANKSRRVAPGVERRGERNTGEIGDEHKRQRLHARTRARRSERDRLRMCGGPHAADAGHIHPTPVNGRSQIM

SEQ ID NO: 977261 - protein, 214 aa, Homo sapiens
VRGLSGRYRRGRSAMRARVSPACCGRQPMRSTATCDQALQFVPETQVSLVDNGLRVASEQCLSAHCTVGVWIDVWQAVLETEKNNGARLLIGASGISREQRIGLAVLLEKEVESMVAILMPKNREQQLLIKALAQGIWRKACGRSVGRHSRRNVYVLDTITGFGEGNVTVTPAGTMQRRIDTMYSRRMTVRCNSGLAESIPGQALPRTGRALPQ

SEQ ID NO: 977262 - protein, 340 aa, Homo sapiens
PCYKVFKGCIGAALACPSQRCKNPLCLVCCLALRGLERNGRGRTNLSGEREGPSCGAKTSVVRKLEFRGGVGAYLWGCEGDGADSCAVWWSQRCWVSGRERKGRQINESSGKEWHVDGAYTGTLNLLHHGPLAVRDRRDVGNGPSRVMLLQSANFDKMLRRECMNLVWGGWYSIQIPRGYPDRPMARRMQAMLLASFPGVPDAPWASRESARNAQARAAPESRSGRQMGRYPGVCTQGASHQLKARLMDQEDTGRGAGGSKLRRGKHEAVRATLEVSSRHRPGRSAEPEGIIGQRPGRMGPEYGGPAGGGGEYPPRGRGRKAKKGGHGRGTRRKTPREDK

SEQ ID NO: 977263 - protein, 369 aa, Homo sapiens
MEEDATADGLRWERWIRPGGCGLDGPGLDFASDRGGRRRTSDDTVFTAPTGRTNIRNASRLTRRVDTTLDQRHERSTVDYGCWQLDQLTDSCVTMSTPLHPLTPQPVFATFTTRGHDASTHLGPLRLALPHTTPGDGTTGTHLWPLPDGIPVSHTYHPHSLDQVLCHHIMSSHRKIGTLTYRPENTVNTHLVAWCAQPPIDGPEHHSCPLDVDLPDTLMMQRKGAETWAGSQECEGNPDGTRRSGSLSANTPDLHHGRYLQRLHGPRRLLIDAKVASNRVNQHNTKRSRRLVSTDHHTHSKTQYNKQGGQQAGPPQGDYPPGTGAPGCETNAPTQTNTPERKPPGDNRGTPHPETYTLGATRERPKGSN

SEQ ID NO: 977264 - protein, 141 aa, Homo sapiens
  misc_feature (18)..(18): Xaa can be any naturally occurring amino acid
MRKSCLKVTEKLLEVCTXVITRNIDMSTRDDYGLVSLLVVCIRVEIRDETIVGAISRDYGTEVTGRYVRAQEQAFTSILGRALYNECNEDRTKSCTMSRTAHVLLAQLTCVVRVLDRNYWARNFIVDFEIGHFATCTRDKG

SEQ ID NO: 977265 - protein, 364 aa, Homo sapiens
MSKRPNPISSSRLLRLFLGFNLSWGLQHAAGSTLVGGQQPQGAEGQQRARWDTAKEGPGPFSSKGENGGTPGAPPDKGQRLGWDTRLDEIRMGALAGKQWGYANLANKTTGHTWRRNPSREAEEWREISPPGGNQGHHSGSVQLAGQLAREPPGEGLAPDPHGQKRGGHNAVTHVVQATAVALSRGTTKLRDTQTRGHKLCTITHTALHNRACTHGGNTHTTSVASKYPHKRARRDHPQGDGDIHIGGAPRNTQDEYVSDMTNQGRTLPPLAGHQRGPPALQSKQHKIGNHYSGAAQRKQVTPTEHHRGRGPTPRVGTHHKKDPTIIPKREHKKGHTEITTRQRGGMHHEVDTHNAAKTERKQR

SEQ ID NO: 977266 - protein, 419 aa, Homo sapiens
  misc_feature (344)..(344): Xaa can be any naturally occurring amino acid
  misc_feature (389)..(389): Xaa can be any naturally occurring amino acid
MDEHEHSNNPHTIIYKLVRPLQGWWLHIEELGDQRRKDKLHTTRGRGAPPYVEERKIVEKTTKTGESEEEQQQVSQPVAREQANNSRYQASKQTLLPTCKRKKTSNKQDSEKRPNPSRGEKRHSPPHNQPDQTSPVCNTSGVDHIQQRPFLSPEEETHRPRTTKHEADTHRHPVQTTARQDTKSQHHPPPTPTNNAEIQNKKNTAHNTHTRQQSLDTNETQKNHNNKQASPNNGMNKHDKTTTNAAVAKTQTNDREKRRRNQQQPDKTGENQREPERQTSRKARTERTRKGAKRGGDRNNTHTLKAASRDNSETATVAPAQQTTTTTDNKRPAKRQERNHHKTXTSRNQARDQSVQLTAASTPLLHTRRNAHITQTQQQTNTTSLGYAXQTKQTQKRDTNDDERREREEPHTQRRKTPT

SEQ ID NO: 977267 - protein, 249 aa, Homo sapiens
MRSNHKNRAVNRRVWVTHLCGVAVQGRVRHYVALRKMAGVRVSSHYTWVSGYDDSGKGPGGIDVKPELVRTPLRTRSKGVTEGPRTTGGDNPHTYGQGVLRAETKTRGDLPHRQPGGHRNTRATHTTMSATPQAAPTRTQKSNCRTTDKTERRITGDYIVIQTQPPRTTTSTPTATPKAAHPHKDATLDDTKGTPRPTRPTQHNHNHNSATEKPPSTPHNPNPPTSKHPTNDPYTQVPPTSPTPHPDPP

SEQ ID NO: 977268 - protein, 305 aa, Homo sapiens
  misc_feature (110)..(110): Xaa can be any naturally occurring amino acid
  misc_feature (125)..(125): Xaa can be any naturally occurring amino acid
  misc_feature (163)..(163): Xaa can be any naturally occurring amino acid
MGPVVYLETPGIWFKNSVGGVLSHLFPAGKWVRGRVNRRAFLTISFEQRERVRGFLQPRAEPQICVEGDEVWARGTQRAEEDISPKSAISQYTEERGVKHSELPTHIFTXQSGQGVRELPVTCVXLTCGPVRIQCAHCWLSLCVGLLSLYPQLSHTSLKDISXYTGEDLSHTGVDAQATRGTYISPIYPSRAGATHITHRGTHSAPQREEREWHRKGIRRAGKRVPERQETPNCYPQRRVPARVRRGYQPAGCECGYTHKRGRHRSRRSTPPHEGGPPKKNHKKKCVPRKRRLPKSYYSISTLLT

SEQ ID NO: 977269 - protein, 238 aa, Homo sapiens
AWADVTQQAGLVKSELEAQTGSPNLGRQEWDRGRRQLQSFPKLRTAPHPCAQCCSLWWPWQVWLGCWVALAVALCVRQHARRARQGAPWRAPWGLRGPMVTRTFEYHGPVASAHGHEVLVQSGQRVHAEPSRVSSVSSQFSDAETQGQDPGPTAAFPYLVRGLPAKCNMDISIGTHDAGIHGGSPAERDACQGVEASVLTSRAKLWHRQGEGNQKERILILPMSMPHKTDVERDFSEE

SEQ ID NO: 977270 - protein, 241 aa, Homo sapiens
EDKKKISVTSLKATTPPPTLAPRCAFPSCPAKLGAGGLVGLPCAPGPFQSQAFLAGPCAGESGRCPKPGSPGPEASALFNSKTRRCWGWAPRGFRGQPLRRALSVRGISSAVAFRGVSPGWRECAGFSFGRGQPILFNPMRPIGDGPLAPGCLGGDAMKTPKEECQRDRRHRVGVYPAERVRRGRAVEGQPIIPREPRQRGQISVNLPPPCSILGKTRVAKIFLGVPRLLRGSGVFPPKPL

SEQ ID NO: 977271 - protein, 110 aa, Homo sapiens
GDLYYEGKEFETRLKEKKPGDLSDELRISLGMPVGPNAHKVPPPWLIAMQRYGPPPSYPNLKIPGLNSPIPWRAVPLGTMLVAGANSPVDETGKPLYGDVFGTNAAEFQT

SEQ ID NO: 977272 - protein, 173 aa, Homo sapiens
MKVRVDANSAVTGPINGEDDSNEECNARAAPSTARTHRGGTRGAITRNGEGETPKGEETEPPFVRAQTRKAGVPLTSGRAKREAAKCNGQRQEPSCGSTRYTGEPPQDYMNKRPRMGGGNKDGTGGPPKVMGPREKNQRGGESDRKKARRRSARQHKRHQCKTNNWANNDTRN

SEQ ID NO: 977273 - protein, 240 aa, Homo sapiens
  misc_feature (222)..(222): Xaa can be any naturally occurring amino acid
MVVAMGTCNGRSLLHFGLRRSTLPLEHLNAFSVPGPLPLFAGPYTHDFSVLLGLCVTLLLSLKRSSRVEPVTPRTPGASSGWEVLHLDPGGSFLQGPTCPKSALVNTWGKPPLGVVATMTGAFDKGGRLLRTPTFSGCLRIPPPSGGRRLCHGCGAVPPKGEWSSTCCDHEDPLLSRAESNSATQAYDNQVNHQELRESDKISRVRADEDRNTLVRRKNDVXYPHVQAYNESDRSFIHKR

SEQ ID NO: 977274 - protein, 308 aa, Homo sapiens
LSGQGDPGSNPNKRQRQPPLLGDHPAEYGGPHGGYHSHYHDEGYGPPPPHYEGRRMGPPVGGHRRGPSRYGAQYGQHEDGSQELEYGVKPKACGRWCYGLDQSKMKCELSVNVFDYMGMWKKVKMMKSKHGGGLVEMADGYDCRPGTLAHVINKIPCLGQKWMSVFSKSGQNIMTVVRKYRVGRRVLQGTKEFSELRQQLGIYHTTEKGQPHRTRIQDNPRQVMTIFKPPVEVNDGDNPGDLGMHMAAEGGIFMVKVYSRNNDTEYVEGEEKPEETGQLGHEQYRENERAAAKRQRDTRQEPQYRAET

SEQ ID NO: 977275 - protein, 160 aa, Homo sapiens
LGGGGEGVKKGGKRGGGEGGGIKKRKKKMGQKRIRSRRESYAEGQKQRAGVPHHTTRGRRAGASPPAVDAHPRAGGDKHPGWLSRANTQILIETIEPLPGMRSDGRHPIDHQQRGAAREDTQTTTTHKEHAGPTPPHHPTTTTTTQRPDGRHAPPTKVRS

SEQ ID NO: 977276 - protein, 336 aa, Homo sapiens
GRGVDTQMGLSQWSGVHERRGPECRASWWQCMREEEEEEEEEAECWRGVLSRGRRPHVVLNPQPALCYEEIRNGESRSEASGCVDGAGKPGAEGGSGALTGMGEQEHSQQKEEELRRWQWSPGKASSEVGKSGRSWLHRTDGACSPMEVGETLQQLVRQDRTKLARGKLDVNDNAAMKEQRRRARIDNARDMYPLKVYLSGGPGDLGARRGPGAANEDEVAERGQYIPQVKEQGNCNSEAAHPGSERNHRRTERSRGRAGPSTPEGPEDQEQQSCGQLTHTREGDHKWRTRTVQETVEREPRRRRALFKGHRRSADDQDDRREPTRQKERGNGRQQ

SEQ ID NO: 977277 - protein, 516 aa, Homo sapiens
MRDPGRVLEATAVPSGLRSSLDPTIENRQSSHDRSTDNDHNIVCALTCSQGYAMSRDGGTVIRVAYLISVAIVNVEQGLRGDDALVIDCNLVNYGVTYVIYMHTCLYTSVGDLVDFASPTGLRLEIGIRPTREACSIRALMGLATLRGRSRNRFEYDSSLKWALDQEEHLTRKSYTSTRDPSSDERYEFSRGANEDHSRFPIYKTFPLMEEGDLGSIVEEIRVPSAPYHPGGFNGFTPSIQTLNKHHATLCYIQTWARVAPKRYGNYAPFGPRTCHVPLTQQGELKHQMRTEGHWTSAEKAELRSGDLAKNLITEKEIYKGTGTSGIHRSSGGRRRSRKTEAVNQVSTGEQEGHKGWEPQQQRQSGLRARGKKEDRVPPGGDTERQGDSTRRGRKSCDTGPCDKHGNERRGAPNEEPAGSRRRKTQRRTKRHIKQRSQIGATKGATVIQHSGKPSKPEEGDTEHRLPGRDGGIYRPPSALWEKQGVRKQTTCGGEVRQQHRERRQHCSDASDYRDR

SEQ ID NO: 977278 - protein, 109 aa, Homo sapiens
MDTKKNVLLPDLSYNRFLPIAHGGAIAVLGTEDGACAVEKGAMLRVDEAPGEIPQVSGCINKPMDVATLYEIECDEMHFARAEPVAASARANTLLEEKLPNGSCGRKLH

SEQ ID NO: 977279 - protein, 212 aa, Homo sapiens
MGKIPGVADNMGDNERRCHRIGPPAINTIVREEREPSIIPLRRDARRSSDPVVVDPMRSLYNTMDVTAGGSIFVVVENDQQMRSCNPTWCRILDDATQGEVLRDVNREIYDTGRQIITVTAETSKDLEAVCICSLQGDLCVSVGEDLRRQPLTMLMDEHSNNSRSYSPSRDEGDVSEREYPRKDVRPCVAHEGKERGEILTQGYKAVNYGQG

SEQ ID NO: 977280 - protein, 81 aa, Homo sapiens
  misc_feature (66)..(66): Xaa can be any naturally occurring amino acid
GGGRTEASGCRSIHVVPRPCCGCPPVPAGRAASRTEQVDLLSAKRTFVAGGIRPVVILAGTGRGIXIGAGSMLRAARSRCN

SEQ ID NO: 977281 - protein, 149 aa, Homo sapiens
  misc_feature (110)..(110): Xaa can be any naturally occurring amino acid
  misc_feature (133)..(133): Xaa can be any naturally occurring amino acid
GQPSGTPRVGASEVHAGGYVRKKQADVTCAFFLRVLLLGDSGIDLWSRQGSPARARPDIDRRAGLRLTKGANAMVTVSIYENSDVLLRVVWAEEGTQLDLRVVASLTRTXALVQSFGCYTRARKLCCGKARAXIARWSTRRCLKLESAT

SEQ ID NO: 977282 - protein, 217 aa, Homo sapiens
MEVHHPVAVAKFVVIPGNELDKGVVEGNASPSVKGGGVGVAVKSEETTWVLSVAQDALGGGPPTPVFTTFLDVITNWDRFSLKGGSGPPWTRGHGGTRKAMPVSFRKLKDDLAKLGAQKKAGMIVWKAPGPSRQRVSGRGHPKSLGGRDGMDWGKSLPETQAVLAALAGWSPWCAGRLAQTERGENQGTHDNRADRERLWPQDTPVEQAQNDMLPQK

SEQ ID NO: 977283 - protein, 432 aa, Homo sapiens
KTVYMKGNLLTGKLFGRESGVSQDGRTTGDPPSWRMWLVRGGWGVDYLSIRPDLHTRGGQRARGGPSGAPRAPRGRGPNFLAGCRGRLEWCRARGYPDSVGTLLEANIRVGQSKHIDEQYVGEGTTLLRSRALYPYNPNQFNSGHEGFLLWPRKRSQRDLGAKGVLTVKGMCKRIVAKNTKYNISSSFRATVRGPEAVCDLVTLHYLSPSPFTRVAISLAAVGLTVLRPPWRGPKPGGLFPKSGGPVRGALQTCVRGTDSRGQKSGKDDKVVTRWNTVVHEKEATQKDPRDKNSGKDPHKIPREGETHTPRDTQVPKNPPPGDQPWGAGPLGRPICGKGAPQRGQDRPPGATLSPSTQTGRGKRTPAGANRRVAPDHNHTNYGRGESETIYTDAACTINFVNHSRSSNHEASEPLGGQHNFCQNAETDNMTT

SEQ ID NO: 977284 - protein, 184 aa, Homo sapiens
  misc_feature (94)..(94): Xaa can be any naturally occurring amino acid
RTPASRTPLSNKSPSVPLGIDRAPCTAFPDSVPGACGYQFVKVGVQPQSSQTFFERSLMDVRSRVSSSEPACARVVMSRVANCLCTMQSTITRXGGDPCGFNASAGALSGGRPKTVVASNSRGTCTRVSPRVPYDRSRTGQRSGGSRGYATSGMCQAWAEVTTEVTTVTDLRRGAKVVRVAASD

SEQ ID NO: 977285 - protein, 337 aa, Homo sapiens
AKSLPWAPYCLQRMNRNKSYSLDFEGSPPCGPIAPHRATILITVSVTLTYGQMAQSSTVTHDYTSAHDCQPPLPQVTGISDIAHQPLLHYISRPVPPEDMQCATPKAWHLKRRDTIPELPSFHAPQGPVGSIESSLNQVFIRTSVVVKRYTHTRHVKKRTKAFKKPSTPPPSLVLRNHFHATTATHVRIDPSDLQHHMHTEHSWQTLPTALGTAFQPKSMSSLYREPDHPRRLILQHTQPTTTITLCVHHGIHTPQLCTSPPHHSTTPPYRPATPAPTHHQQTQHPLAPTPREAPPWKSPPGGQRHNTAAPPPINHHHHPSGPGSKPRKLTTQSNDH

SEQ ID NO: 977286 - protein, 119 aa, Homo sapiens
  misc_feature (78)..(78): Xaa can be any naturally occurring amino acid
MAISVEYIVRSSLLNIRPRVRRFYNVIALSDAKLTRAGVDKRVNNVKQSVVRSPYEGERRPPHVKTRNLKTEFNKREXPLKENPKRIGETRKKILWYPPFQFSNFWPPRKRKMRLKGDA

SEQ ID NO: 977287 - protein, 136 aa, Homo sapiens
MSPPGEVYQVEPKRERGVAAGRTSTNTRAHKQTSAGGTHIGALVTVTRHTRGLNIVGGPRSKTWSAGESGRHRTDKTHELGNPRVTQNTLREPRRPPPQHHPPGFANPPDLSRGTPPLRTAAAASRTCPATQRQTA

SEQ ID NO: 977288 - protein, 126 aa, Homo sapiens
GWDSASRAGDVKLSRLLPACEVGARPFVLLDRSVRTPGRGSPLEKTELIQKAKLAETGRGATKGTLGTLQDMACVARCQETDAYACPHRRGGADRGFSRCGHTMNDGSGGRGGTWLDGSLSRHSKQ

SEQ ID NO: 977289 - protein, 118 aa, Homo sapiens
EVAHAEPGEDLERTRAPFQDTEGWSQVLIPTLPPGHVYLACRYVQQDAAESRILLQAQWLSECPQSVRGALWLPQWARTSRGVGPRRVTTLALSSRTLPCQRSKLTRGLVTVRTNSDP

SEQ ID NO: 977290 - protein, 145 aa, Homo sapiens
MATTPGYAQSGKTQTSGQPVGGTPSRKAKTSQTVPPGILKALTRVAPMLPFVGTHLLDRPAPKGHKVGHMFHHCHQPARWALQRDSPHMGLPALGLQLWHTHSHAYTGLPRGHITADEPHNPATQQALHPGPKPRSRTGHRKTHG

SEQ ID NO: 977291 - protein, 228 aa, Homo sapiens
MRKLRLIEVTWLARGPPGSVNPLVPCPQGQLQERRYLPLSRRRREMSSNKEQRSAVFVILFVASSPILDPLQLQTVPNEVFHYGSLRGRAVRPVNLKKWSITDGMSPVLGNKTHASRCQQCVSCQQLQPPAWATKLGPEIERAECTIRVNDVPPPGYSADVGNKSTTRRGHSSVFRVLSEAQEFVNVTLKRVHLLGGPEKMQKPRAARACDQEAAGVPNMGDLRSPAM

SEQ ID NO: 977292 - protein, 112 aa, Homo sapiens
MKGGREVAKSHQKAIGGVRSRTPSATRIYRSHTGASASRNIMEGPASAPTQSIDATVNARGPHPCHTDSHAGAPPTAELPALATGARHQTKRAPPAADPTRAFTTGAHQQGQ

SEQ ID NO: 977293 - protein, 334 aa, Homo sapiens
CVEALERRLGELPADTPRGGCCEKSSLRPPPLAFSTLTWLGPFPATHYSTLCKPAPITGTLEVRVVGCRDLPESIRVEPYPLNGVDLGHPDQAPPFLMAPCPWAFTSECGSLSGGAAQSRSREHQVKSRTVALRVDITPRGGGTTCLENTQCGPPCARETKTLLISWTRGKGHEELRCGDVLGRGPRARTVSPKTSLDTLAATSGTTDESLTVQLDTLERAQDCPGERKATDPGTPVIAEALHRQPHGETRTNPTAASKGQEQPPSPAGIDIEYRKVRATDRRATPDAPGTRRVYARSSHGSRRNQRNTGPQQKTDIRDSHKRSAETQRATRRH

SEQ ID NO: 977294 - protein, 245 aa, Homo sapiens
  misc_feature (190)..(190): Xaa can be any naturally occurring amino acid
LQSWLPSYAAAVCRVSPESPELNCSRKATRYNVAEEELEEDDDEELDDTLSERLWGLTEMFPERVRIRGRSHFGSSSPSCVDSEQCTRVVPGLGPCASRDQMSVYESLVSFPLSFEMEIVVNTGRNEHAWSCMRRRSRYLLVSPNDMVSSGTGHCHGVLYLLDFLDQIYDWLLHVLSCTQVGIRFSKQFXTCKLDLSMDISSGMFLLPIMLTCLGAHCDAILILVREARRRWGSEVLGFILQEEL

SEQ ID NO: 977295 - protein, 215 aa, Homo sapiens
MSTHAQHISCAWSRGLAWSMTGPAERRIGRAVHSTGRIPSSFRKESVATSSPSCQHLAPAREELPPKWSWPPGSLAASRSPSGSSHRSPKHGGHKRCIAPCNSHRTNPIGRRVAQARWQLALPRRSHATLAGEPVLRSPATHGRHITREALSIETCTNRNKDRDTETDRRLATPRQPTVALPQHTWARIRDRCPQPHRLPKPRRAQKPTKRPRTK

SEQ ID NO: 977296 - protein, 203 aa, Homo sapiens
GRFNAQHSQRWCSSVNSEDYMYRRGTLVPGQGRCSSPGPAPAHQHFEEWDMAVLEDNVDGGRRSSLVQDWLMGEEDEDMDACKTLCETVARARSARVAVNRVQYRRLAGLASELLRLYGTPGEAPLRARDVPFGRWFVSRGRFRVNDVRGISRDPPLLCGQAQIQGRTPAPWVPVILWACMCAKTESTCEPSPGGQAQHRGGW

SEQ ID NO: 977297 - protein, 294 aa, Homo sapiens
MAYKDVYHQVGDRPDSMKPLPSLRVWRAVILVHAENGDWIAQEQKRILEMGIMGSRRPCGEQPESWSAEAVCRAITIAGRINCPVYITKVMITAVQATSSALARKKRAPSFRRAHCSHLGTDGSHYWEPELGQGMRRFVTSPPLSPESSRSASYLTFLLACEGLAGQQADGPLSLQSAQKAVCKDNFNLIPEGVNGIEEWMTVVWHQGCGMATCMTIDGYEVTQQRCSRTMIGAKDGRRERIRFRGTSRTRKVKAKAKARGGDKHKKRPPSDTTPETEHERSTTKTEQHDNKRT

SEQ ID NO: 977298 - protein, 150 aa, Homo sapiens
MMAMMAPETPRWPSTGSRWMDEGNYTLRVCQLPQGVRPRDDLAQSHSQKARRTIAECPRRSRSASDPYRTCGPSASTKEGRPRLGRISWLSSLDWEAKETQVSGTHVRELSLSPGSSPWCPLGRADGVTVTLQSGRMRAFDGTRPDTCDL

SEQ ID NO: 977299 - protein, 483 aa, Homo sapiens
  misc_feature (269)..(269): Xaa can be any naturally occurring amino acid
WAKSRGVSQKKIQKIYKWQVELFFLKWQILQNIFFFTGWVLFGWSGSGWSGKMLVYLGPDLGVSLSGSPQRELSCGECESVGQSPLGRTGSRAGDPPVCVCDTEKGSLWGVCVALSDGDKHARGGVILEGVVGSLLFYKRNNIYTHRDTYISITEEGGALSTTLGGELHNLDTQYSAYKVWFCGGIIFKKKRVCNIYILWVARPMCASQSVQNSRRQRRGTATGGVCCVAPPLGGCTPEDSVAPAGRLLERRYWGVVRDQIGVFSGDLXSWGDEKASRTMRTRGVFCVSGSESGRRGPSWVLGENPLGSFLGGPPSHHGDVPQKGRTHYGWAAKHSWACLSDNQRWSLVLPAPKRARPRLGVGYNHFHSRKTLGGGPNVRTTNGAQRGHSVARGERAPLWVPKKNFISPFPHLLFIPWCGPRNTLLVGCCLPERGAPRGVAREKNYHTAPWGDTACKKTRQCLPGGGNTQKQHPVGGETLLKQ

SEQ ID NO: 977300 - protein, 305 aa, Homo sapiens
  misc_feature (58)..(58): Xaa can be any naturally occurring amino acid
  misc_feature (89)..(89): Xaa can be any naturally occurring amino acid
  misc_feature (122)..(122): Xaa can be any naturally occurring amino acid
  misc_feature (131)..(131): Xaa can be any naturally occurring amino acid
  misc_feature (143)..(143): Xaa can be any naturally occurring amino acid
  misc_feature (148)..(148): Xaa can be any naturally occurring amino acid
  misc_feature (158)..(158): Xaa can be any naturally occurring amino acid
  misc_feature (170)..(170): Xaa can be any naturally occurring amino acid
PRQEGYGWYRVEGEEELEGTVFDRAASARSELASTRGGAGRGYGTRLTRCCQDAHRWXTPDVNAGQRMTLRMPSIRGRDLVKGRTIRYXACDPIRLHPVRAANRVGLDSVDKRDVACIHSLXAKAYRASAXLLCPAVAHETAXAGSIXTIFNNESSGXERWAASEQASEXLVDERLGLALDDLLRETLFLSDILRVRVAMGCPEYHVSVDVSRCFLSADTKLKGRVTRKGDLHPLTEVHGDRFDQQATSEGPRHGAGPMIRRRRDASSLNASGGLTPYVLQGDFGTHACNASVSSPNGFPTSYRP

SEQ ID NO: 977301 - protein, 167 aa, Homo sapiens
MWENWEAERWEAAGPNPAQEHLSPGTVSWRDPAQPAGCVSAKGVSRQVLADALTHGRLDADGTRAWWTATSRSIGKPSYAEFLAPGHRPEVYESLQDGSLGPEFLGVELSTDVSPERRPQGTCSRRLGDTYRVIDTRKTERRRAWAGPTVTYRPADIPPSTRRRKRI

SEQ ID NO: 977302 - protein, 117 aa, Homo sapiens
MCIPEEKAWEGHNDRQRSKVGELGSYTLGSENSSKGQKGLLGGSPGPQVAKGAFRNNTLAQMSSEAKGWPPEGGLNTQTGFGVRAEVPKWRGGCLSESPCGNGERGKAFLGEPTKGR

SEQ ID NO: 977303 - protein, 124 aa, Homo sapiens
WGINTNFMEALRLVLFLRHSLGSPETSSPGGSNETHFGLASGGISWRMWVEGCRVCVGGVPPPKGVLHEDPVATPAILGGQQFLLAYILGGTPGQPSRSGLVKFGHLQPPHQPQLCGREENNLL

SEQ ID NO: 977304 - protein, 106 aa, Homo sapiens
MVMTDSQYEGMTACSSSQGEHHFSWEAMQENLHGTRRSPPVMAPERKKGSSCLEIIPLVKMKNYQHLPYAQQEAIEEPLSLHPPECISPSWYILGGHQPKGLQSWL

SEQ ID NO: 977305 - protein, 157 aa, Homo sapiens
  misc_feature (75)..(75): Xaa can be any naturally occurring amino acid
  misc_feature (119)..(119): Xaa can be any naturally occurring amino acid
MMRECISIHVGQAGVQIGDACWELYWPGTRHPAPMGRCQVSKTIGGGDDSFNKSSSVSTGAGKHVPRGCVCGAGXPHSAVDEDSALDTVADRLLTSPGDSVNQQDKGRMAGQVTDARRXDVALSWTKGRTQCDPSDALERVIPTRLAMNRVVNRILQ

SEQ ID NO: 977306 - protein, 92 aa, Homo sapiens
MSRQSRHNESTKAHNKGTQKTQREYTRERQQGTQLKPELIVEAVRKLYAMEPGGRETSIDISHTRGYTKQHDSETHTQDEHRKRYPTARQSS

SEQ ID NO: 977307 - protein, 350 aa, Homo sapiens
  misc_feature (28)..(28): Xaa can be any naturally occurring amino acid
MGQKRRDAKGHPIRFTTPACVEGIAVGXPCAVNEDHVEEKGLQPQDGTAHRKGDPERQRHSDELVLLALAVVILSDETVSGRPGGGPGCHSQGRWAGDSPLSANIEGSQYITQSGEEYPPFQLKVRTCPGESSRGNFSLDIWLRGPLATNKRPFNGAPLGTFGATYWGDVWRIQIEGVEGFPQLIRVKGQPQGGTAHIRVSWDVSKFRTPRGRPPERGSAPRHGVNTPPTSIATPHRPRPNTTDGGTRKHNRLLSPGVVDVTRHSEDKQLPQAGRKAKYSREDTPQPTGETHKRGGYPRGTHGVNAQYTMVCTTCQKAEEYTRAGGESQTPTNAVTQTGNPSATTLYQNA

SEQ ID NO: 977308 - protein, 312 aa, Homo sapiens
EAYSVSHWGALLQRPMYRPSGGPSNECLRCTVCLHWFWPVKCPGPVHPPGNPMRNALAGALPICSMLALVDLFAGPDSALRGSRGSSWAAVWERATCRIISGLYSATFHAGFLFLACISADRYVAIALSCVPAGPRASTSRAAPYLVLRHRVGVVTVPERCLRCSSSQDGLAGKANWTAVASSSLEGLTQRVTGASAVAQVALGFALPLGVVVSLLRAFLGARCGRMWPERRRALPVVVALVAGFVVLPLAYGSPVAGSGDPTGARQRMACRTQDSPAGAPALPSPGLNRLASGWFAAGLRGGPRPPGPAPL

SEQ ID NO: 977309 - protein, 220 aa, Homo sapiens
MVGVRVFIIIMLVYRLLKNGRRGLRSIDVEALRLVRIPFGQGRRGYREGLGYGGDKLTCRAKGQCWQELTPEGYYSRERLETLTRKPTHNTRRNTTRRQRQTPTAHPDEATKPHRTTQQEDNMKYTDTPPDTKTHTQTAAGHNWAKHKPRKPQARTLTTQPATQKRPQQPTHDHHPPHQPPPSHPPQPQQHTETRPYPTSHAHNKHTNQKNTRTHGQRRI

SEQ ID NO: 977310 - protein, 184 aa, Homo sapiens
ASFNARRETGVSSSKSLFSNVLPKIKIGQSLPSESSSEPPLLSEYTQSRLCVLRQERAGYRALEQDSSLVYTALALQGDKAKTIGGLDTIQESAFEKFKTGVTRAEDLQCHRSICDWNHWEDEDVDQVVMALCEEVPELLTVGTTKEGTGFEKLTERLPISSDAFLPFSEDNVDRAAKEWSSAY

SEQ ID NO: 977311 - protein, 204 aa, Homo sapiens
KGSWWKVRQRESRDRTGQEGGWLCDGESKSAVVPLVNAEVWAPWAWLPPVVQSMPLPPGDGGLHVALATIHDHAARYDSVDSPSIYAGINEDEWYWRCWIQLSHDVPRWCCSSCRGAESHLVRMTRMVPRRGQRMLVALRNVSVPRRCCTDSVPCIVLEWAPVLISQRVLPFVLDSRVVLLVRETLCSLFCCQGCVDLWLFLFF

SEQ ID NO: 977312 - protein, 296 aa, Homo sapiens
GRFRHKPTCVSQQDSQAIRGVGQAAPGPGSPQLPAGPRSPRRAHPGVPLKPAQEPRQGPRQSTRRTRIEAPPSLYSCDDCGRSFRLERFLRAHQRQHTGELAFTCAECGKNFGKKTHLVAHSRVHSGGGLRLRGVRARFSQAAIWRRIGATTPPIGLRVSRLGKAFRTNLLAGTGIHTGEAYVLPDGKASAEVNWCRTAHSTRASGLRLSDWDEFRQKSNSSPPKSNREGFWCATVADFDDEEEILATEELELDGGRLGRGGASGEAGGARAMGGGTRGDRGAHNSQVLYTGASSG

SEQ ID NO: 977313 - protein, 217 aa, Homo sapiens
  misc_feature (134)..(134): Xaa can be any naturally occurring amino acid
MANGVRTRDVLYFLFLVFLRFLKFRGEVKSLDVLARSEIFDTPQGKQMSWEYAVNCHVITWERIISHLDIFAFGQFSGAGPLKALVVIRVTVSAVTTQYYLGAELSSVFMHLRPQFCRVLVGSKSILDIRVVQXGWHFGGAWVSMTVFRDERLTLGKASRHIHSTHREDQESCSEVHSWVVEPMCDGLSPNILFREYLRYLLMIIWGDWGETLLEEI

SEQ ID NO: 977314 - protein, 213 aa, Homo sapiens
MDTLLLGSPEMSHARCLRSEQWSWWPVVYRPGVCSSPCPHVWSGAVGDPGVLVSRMEEPKLFQGTVMSGPEGMRPESWSPVADMALEYSGHLHQFAKYPCDVCRLRGRHDVISLTNCGYPASTQTLFVYLSLRRQLTYEKSSSLTLGKSPRPDQTVYPPATSLSYRKKTVLGADEPEEESIHRALACPQDPLGAGRCVVHGGEFWSQYRINVT

SEQ ID NO: 977315 - protein, 102 aa, Homo sapiens
DSVWPNGARVTASDSLGLAPSMELGKLEVSESGADLVIGVQEAVKNRGACVQEVHDLLRIRDQCRRIVESVARMSSQCSGDRQQHIVLLLTTGEQVPFWARV

SEQ ID NO: 977316 - protein, 69 aa, Homo sapiens
MSTDCAPNRGGLGGNSSHKAGTSENLARGRYSGKDAKQVSGPLEQLGRSGMQRRRGADVSRAGAPGEST

SEQ ID NO: 977317 - protein, 309 aa, Homo sapiens
  misc_feature (89)..(89): Xaa can be any naturally occurring amino acid
  misc_feature (103)..(103): Xaa can be any naturally occurring amino acid
  misc_feature (114)..(114): Xaa can be any naturally occurring amino acid
  misc_feature (123)..(123): Xaa can be any naturally occurring amino acid
  misc_feature (135)..(135): Xaa can be any naturally occurring amino acid
  misc_feature (183)..(183): Xaa can be any naturally occurring amino acid
  misc_feature (201)..(201): Xaa can be any naturally occurring amino acid
LRMPSGTDESAGRTYLCAPGPQLCLDAIQWARDTKKCVRSPSFRKTVPLITVPRSLCCTQETFPTERLDTRGNLLALRLSWKVRPPVSXLSVLVEGRGIGVLXYLLMKKAEPVXRLHVPWALXLLPHDVEHATAXLVAMPGARSDGRERCMPLSFKGLRTRSIRLNMNAKIAPKHVHGTKEGXHDVIGGPSERGRIDNGLXSRNNGAENGFLGRYIEGFKLGPLLHSMDIELIGSTPTLRWDRIEKEISSILGLGSFGTKRQFAESTCAGIGLALSFGVPRVVEGAVGVTIYCELLHGERRATIEVGRS

SEQ ID NO: 977318 - protein, 593 aa, Homo sapiens
  misc_feature (65)..(65): Xaa can be any naturally occurring amino acid
  misc_feature (118)..(118): Xaa can be any naturally occurring amino acid
  misc_feature (283)..(283): Xaa can be any naturally occurring amino acid
  misc_feature (345)..(345): Xaa can be any naturally occurring amino acid
VSIGMEFRVEERERYDWGGELKNCWALLGTHDAGHGTGELRVLTRSNLCAYRSVVDGDRGRSMAXDLNEQIHPKQRQDLSRTKQLLDEHVTIPEDSVDRDLICRSIVQERCDDLGIDXLMRDIKCLFDSLDIRITRRHQSCCTLRGEPRGTGDTGLWVPPYDTLNWGRLRQGCPKLWQGTQWQTGRGVPEQILIWVAETNNRQYYLCKLTSGPPKPKGNKIRYSMGSNTPTWGTVEHTNTFGGHNRGEKSYRRPQPQYQGCETARIGGRMTGEHRPSRDMRRXALPEPPCGCTRTPVGLQKVHHTVTRVGTRAKGAISSGSYSAGHIRVGLPIYFGLVCRKSKKXAIRIGRLFSPPCTLGSLHQSPALRKGDPRRCGHWQPLGCGHQIDCSGGTSIRRKHPHPLQAMPTAPWRRSPPSPRSLYPKDRSPPPGDTELDPGHEVPKPQEVVPRTVEPISESKKMAKSAGTGTGFAGPTNLRVERYTQKGHSGVPKIKHTTYVGGRQRGETPTVSKKQPASVRYKQVRHAAGNTLRVSMRKRKQDVPPQTGHTKEFAPTEVFQASTRRAHKGTANKGDIQQRKTKPSQTPIDYDSP

SEQ ID NO: 977319 - protein, 36 aa, Homo sapiens
MTVGKSSTDRCMHKFELSDMSMYPCKMARIFIGTFK

SEQ ID NO: 977320 - protein, 286 aa, Homo sapiens
  misc_feature (242)..(242): Xaa can be any naturally occurring amino acid
PNRARRAGMRRREDGCARCDLCDQCFHVRPIGHQSTVYPRDTASLPLLTRTHLRQGLHLHLPYTLSCLYVPVYARTGASCREGSVTSKLRRACVAQPHGAPSSTYTRKEDPYLSCEYCVANAWVSLRYVVRGGPQGLRRDRCRRNWLISDVHDCELRAEGDLGQKEHQHVYAQHNEDEGTVWIDGGALAVSQGTSHGGKLARERVGLQMGYALGVENSPTGKFDIARPCNRSRLEQGRFAEXDIRKAPSNTLVGSTKGDVTESGARDGDFRMHSPLEGGPQLGPPD

SEQ ID NO: 977321 - protein, 69 aa, Homo sapiens
MNKQRIHRHLSCDPIPRGPTTYGRGDHKQHGRSHPPFVGDNAVHRVRSIAETNTNPLAVCTLGPPSGAP

SEQ ID NO: 977322 - protein, 155 aa, Homo sapiens
RLSLSLVRGRGREAKRNGVVQAGASASPLGHTRDPLTSVPQTRTLEVLNSSPAHPRAAQARQAAGPGRRRCAQGVGQLGSGGGSRARQEAGRLQSQSRGLRPGQEGRPRSSKTCAATGRMKPAWSRCCGRRACSAGQREAFCRPRGQAGHKGVFG

SEQ ID NO: 977323 - protein, 78 aa, Homo sapiens
LEAAAVASAAGAWPYSPGCGGVAIRGLLSVLSPVLRVTCTFPVMCECCCECAGPGLPCPAFRARDVTVDVTIYDDWGT

SEQ ID NO: 977324 - protein, 274 aa, Homo sapiens
MGHQRAIMAHMTVEEIYKDRQKFSEQVFKRGLLRPGQHGHQLWLATLCQDIHDDQDYLHSIGEGSNSSSPKRCTDSDEAEAKETMLRDPGKLKPRQDTVSASEPELTSTMAKAQQTITNLDGTAAYDIRRSNTPTKHPALALAYPASTVDKTNAAELTDHPAQVCRACVHRDPKRDAAQASDEGAMRRVGTDRVPGTCPAVSTQTLVAENIRRAAPKRFDETITISQSAVRAQLTTIYARGPRTEFLSTISRAERKPTEHSVRSPYPCEYAHTH

SEQ ID NO: 977325 - protein, 132 aa, Homo sapiens
MHGLVCAHAIGAPVTPDVMPEMLGRAVTSVLLEGTLVDTDRTNMWPMLFEVPLRELCHGAPTRMNDDTGRDCDTLVQVPYCPPGDWDCGPWGWSRTTMPHGPVDHIRSTALDQQRAHTPLGTAFPRHRFGAG

SEQ ID NO: 977326 - protein, 310 aa, Homo sapiens
SPGTAADYLAAEMMPGSLHCDLLQFPLQEFILAMGFFLVLVNGADHTWLTKEQSGPVTSGCETTVLCLVNMEWLCACSIVHDGPRVSHKAEWMPQQTPQPCCCLVYLVFSLALHSVFQMVAGGSGLQLRPGLRGPWSCAWLCLAPQGHPGCQLSLRLVCRATLGHRWWLAVWILFSCMTPLVHPGWVQSGRVGRTSAARWPKSCAKSAHWHVGTFLYNHLFLRNPCSQELEQFLSKGSSTVIICSLARFALVTLAWFYSKSRGRPTDGHCEIAERSPVPLPSPNSRRKRREPAPYLSDTTLAANINSRLR

SEQ ID NO: 977327 - protein, 119 aa, Homo sapiens
MLTMSNSRRLPLGHHNQRHAGLRSQRTHLTTREENMGKPPRKITTANTKHRCTKRQHGRQHHNIGDARQNHHGASATNQTHMPQIGNNTVMTTNAHWKNNPNTPTISTLPTKKAHRAQQ

SEQ ID NO: 977328 - protein, 147 aa, Homo sapiens
MYAKFSVCQYQENTVSVFGPQVGALESVRNCRPVLSKVRSNVCCESETVGVCTRCVREVSRDEERPHSYVCSPEVLVQLAELKVVPPLVDIGVDVPLPRDRPRGVYNHPPPPLSCRAFDPSITILYWEARRDIIPRKEQAVHDSVAP

SEQ ID NO: 977329 - protein, 122 aa, Homo sapiens
MARGRNEASEAGGSSKAWMLDKLTGVLAPRSIHRSPHVDRVSPPHHFDLRKRLKYALTHGRRNGRRRLGSVARVLHLKIADRGKRSSDTWTSKRYACVDFMGFVTHAIGARRAGDDISGLSL

SEQ ID NO: 977330 - protein, 208 aa, Homo sapiens
EFCWRQAPYPGGEGTTSWSTPRASPRWELIPLLPAPGLRDAGGALLGAVTAGALLSVCMHKVDKAKRRHGGENVVAVLRAHGVRFIFTLDGGHISPLLVACEKLGIRVVDTRHEVTGVFACVSAYVARLVLWTGVAVCWQLNKHGTLDRQPKQRLILLCEELLRWLSPQSVLLGGAAALCCRTGVRSRLLISLSLFRPLCKFCVSVRK

SEQ ID NO: 977331 - protein, 116 aa, Homo sapiens
WSWTSEELQLGRGWSCLLSRQWPARRGVLLLAHLLSLPPALRRGAFPARPGCLPASFHFPGISCRRACDPDPLLGGEASRLFPVSLLLSLWLPAPSLLFLDWLSPPSCPLPLAQAP

SEQ ID NO: 977332 - protein, 256 aa, Homo sapiens
  misc_feature (143)..(143): Xaa can be any naturally occurring amino acid
MVGPGGRHAVGPAISSYCVGLPAAFIPCASARESGASPVTSEKRLDQHSAARRRLETCVPFARREGRTSVATGWLRLRAAVSRLGEIARTLRGRSPGSKFELASTPCKFGVPAVGTGFDSLVDRHRMLRMRGADVMRKARAVXLEGSKGWSRAVRIRWRKDPLTVGTQAPWRTRRGLSHRTVARCLKRLDLMARKYGDRIVTRGSGRGPWPWGEVWNTKRSGYPTRVLRGPLRVTGGLRAIAGKCSPNPVVGVVSM

SEQ ID NO: 977333 - protein, 204 aa, Homo sapiens
MVSPRMCGVLSQSVILALIVLPQTRPAGVFERADPVFRAGSMARGAPVVPAAAPGVPRARPASSRVWSEGLRLSRVRPGGVASVQPRGLLVLELRAGPGLATRMPPRDALTAGLGSFSSWFTEQGPHWQRVGSPSYPGWIGPMCRVEAARVPSLCASASYWETPSWGLKTGQVSMGTDFDGIWCHGAAWLDIGDCPIVLLGVSG

SEQ ID NO: 977334 - protein, 87 aa, Homo sapiens
MEKETHSPAHSSTGQRHNFHGGPNGTTEPGQNPPRGTTNHNGALTYRDHRDYMTPLGRDTHTGGVKHCCLWTRDAPTPGRRQGQIGQ

SEQ ID NO: 977335 - protein, 350 aa, Homo sapiens
VPQVGPDRLEILTTMSCHIDLCQVGENHPDDFDPDMEDGNDHYKGYICLEYWRAPAQAVDAAEESAERLTELDEQHTFRVTLFTDFDKVYEISDEWDIPEKQAFKDLGNITYWLEEAELQRSVTVVNLREWETATCHTSWNALYQRPLSSKLSETRHEMDMTTIMCSWGFLYEAILTLGLSLFIYTCGAIASNCARARRHHTPSRLQQISAHQTGVPNSPGPSTPVALNPRPLALNRQDTPWEGQRRDGNPQAPINAHWRASLPRRSPTRSGILPRSPRPQPTGGYCAQVGQQRTANTLRNMTPGNPSPSTDTPPNANMRPTNNSEHLWDKDTLRLRGITTPSARATTTT

SEQ ID NO: 977336 - protein, 149 aa, Homo sapiens
MPSTPLPALDLYRAVERLTGADGTLPKAILARQAVDWHDRRCHWCLVGTPAELVLSDDCDGGSSDQRGYKNVYNALIRITREEGVSHCGGLSLYMARASSSMCQSLYPSSVYWLGTLALCAFGASRLSRLGGCDVHWVWAATGAVGGVP

SEQ ID NO: 977337 - protein, 168 aa, Homo sapiens
MTEQAGGETERRRDETQPTQRRSRERSREGHQAAERSETETRDRRERQHGEEREDGQRRQTHKDASTRRAQDVERQEQGKERNDGTASSKRTSEKKTTRARREEESTHTRSTKRDDEKHNEHGIRHQNDRSSTRERGARRECSLRDRKDEDDKETHRTEAHHSGRGDK

SEQ ID NO: 977338 - protein, 186 aa, Homo sapiens
QETSNSLTRFLIGQRQWLRWRTYGEQGSSSSSSSSSSSRQQQQQQQQQQQQQQQQQQQQQQHAAAAHTDNSAAAFIVDDVRSVVRAQHAFCERRGSGTTQRRRRARACIRSQQLLIAADCLVAWSNGRRLLLHARPARPLANSRPTSDAARGRSLAKQSRDEVAGGRTRRSRVVVDQIRIRQACMA

SEQ ID NO: 977339 - protein, 103 aa, Homo sapiens
RECPGLVRNQDKVCAAWSPLASRLDPAIGPLLGRRLDPACDLLRTPGPQGSSWCSWYSGSPWPQEVNVVYQVWLVLWVNLVLWALPALLGPVVLLVLWVVLES

SEQ ID NO: 977340 - protein, 69 aa, Homo sapiens
SRLDSLWMYIERSMDELISFLKDETFINGPSDTGDPSRKRKCSSRVMKIYVNLLCFFTGYKIREVFSNL

SEQ ID NO: 977341 - protein, 52 aa, Homo sapiens
MTSPSFTKPSPIIALGICKLQGDMGAAGTQVFHVEQALSVLDIPNYAVHGVR

SEQ ID NO: 977342 - protein, 86 aa, Homo sapiens
CYCAHDRLKVYADYEDLMSSVKIESEIQHVHESKGHGNTMVHKNIAASGKFSSDRTIKEYAQNIWNVEPSDLKISLSNESHTVHGN

SEQ ID NO: 977343 - protein, 121 aa, Homo sapiens
DHTLEADRTLEIEDRTDHCFLLPEGQTDIGIEKGARQTGKEVAGLVTLKHVYEIARITAQDEAFALQDVPLSSVVRSIIGSARSLGIRVVKDLSSEELAAFQKDRAIFLAAQKEADLAAQE

SEQ ID NO: 977344 - protein, 84 aa, Homo sapiens
ARLPLSRALSARSAAGKASVSRSNVGLSALLCSPPLAPPRDPLASSGVHCWLGPGLSVSTQWMLSDKRLAPLQPGHTPFAYDST

SEQ ID NO: 977345 - protein, 105 aa, Homo sapiens
AGHLLLAQVRSPKGVPSNRFQSLLQSHHQADLFLGRPCRHPNPVTSGITICCHAGLQSLCDGLNGTSKHSYQFEGALRLGRNHVDKSLVEHSTLGQPGDQIHSLR

SEQ ID NO: 977346 - protein, 55 aa, Homo sapiens
HTLVLEDPLKSTRLQLNDIRRSARSSRCRRNLSREACTDNGEYTSNRLHVYVLWK

SEQ ID NO: 977347 - protein, 178 aa, Homo sapiens
GAAVCMSKKNSELQSEYVPGEQRWSEKEVKMREKQFSQARPLTRYLPIRKEDFDLKTHIESSGHGVDTCLHVVLSSKVCRGYLVKMGGKIKSWKKRWFVFDRLKRTLSYYVDKHETKLKGVIYFQAIEEVYYMVAPSAEAMRIWMDVIVTGAEGYTQFMNYTAVGLLAEHNWRFCIRR

SEQ ID NO: 977348 - protein, 102 aa, Homo sapiens
MGCHLGARNVQVIRDSLLQDGEFSMDLRTMSTGGAPTFNVTVTKTDKTLVLLMGKEGVHGGKINKKCYEMAPNFGVPSTDLVCPFPFTAPHSFAPLSSPYTH

SEQ ID NO: 977349 - protein, 123 aa, Homo sapiens
IDQLIHELGVAGELEDGHKPGADLLRGKDFVFSLLGLVHRRDSRFPPEAELLLLRGGILLRCSLDLGHAPLGPYARGPHYDAGFTLLVPMFSLDGTELQLDLESCYAQVCLPEMVCGTPIRDD

SEQ ID NO: 977350 - protein, 121 aa, Homo sapiens
KLILEYTRLSLILLRHSQMEVSNIREEHAIAHALSWSKSVCCLQSRLMALLGLALKWQLPQGLLPPGMTIDLFRGKAAVKDVEEEKFPTQLSRHIKFGQKSHVECARFSPDGQYLVTGSVD

SEQ ID NO: 977351 - protein, 102 aa, Homo sapiens
FCGLDELWYRTPSSGVLSTSQQRLVLALLTSGPPRYSYFHARLHAQRSWLLTLLKFENRLRSFRPQDLYIIRFTGENCVAGVRRVCESASYPEGNFGGNQLL

SEQ ID NO: 977352 - protein, 50 aa, Homo sapiens
  misc_feature (23)..(23): Xaa can be any naturally occurring amino acid
KRGIVHPLLGPDENPTPRSDDRXARQVFYGPPPRAPSGFALPRHSSPSFG

SEQ ID NO: 977353 - protein, 117 aa, Homo sapiens
SIDIAGPLSVLLGFSISMIAFQTLGIVHYSRGARSVQIWVAALVPCEIAGFTSPRLLEASRDHLTGPWAPQSQDEEMWLAGRSLHCICPELSEQLASLRTQQCLFLRAFLIIHNDYS

SEQ ID NO: 977354 - protein, 31 aa, Homo sapiens
MTAIETLLNSLFKVLFNFPLRYLLTIGQGFD

SEQ ID NO: 977355 - protein, 137 aa, Homo sapiens
MTDGYQYERRHETTDRDDVAGHKLTFLRLMSSEASQNINYSSKNSVPYVDQQTGNLKYRPCSSRGSNEIEIRAEGNSRFSYKYTVDGCTSHTGAWGKTVIEYKNTKTSRLPIIDVAPLDVGAPDQEFGFDVGPVCFL

SEQ ID NO: 977356 - protein, 86 aa, Homo sapiens
VRLCSTIRVVNSSREGHRTDLWELVVPRSLQAIPEAYASDAPMASTGTIRPIQRHNKVAQFCSTEGASVDQFMLMDNSTTDSYSEG

SEQ ID NO: 977357 - protein, 56 aa, Homo sapiens
MPAMVRTARARDEWVLGSSMSFSKGVDGHNGHVRLTLGVNSSSRGILASSAPGCPS

SEQ ID NO: 977358 - protein, 73 aa, Homo sapiens
LAVPLLYELKPVTKDRMEDIKILSASPSPTHIRGETASATSSPCRDSQESDGRTNQSRKRSHRTDRKISSKKP

SEQ ID NO: 977359 - protein, 53 aa, Homo sapiens
IAGPEIQQDEYHPPDPIHISHGSLQSRNLNWYSILVEVDYILSDLPESMGHIW

SEQ ID NO: 977360 - protein, 58 aa, Homo sapiens
SLSTPAIHMVLTEHEPFKRSADSELKALVVLALNEQRLVSWVNLICSNRMRTLRRRFQ

SEQ ID NO: 977361 - protein, 43 aa, Homo sapiens
ARQYHQGLKEKKEVVEEAENEETPLLNGNANEENGEQEADKVG

SEQ ID NO: 977362 - protein, 73 aa, Homo sapiens
GLQHQLTCSCQAFPPGICPTAMGNVCLFGWQTEQFLWAFGAKDGAKETCLNAAYLCTVAVPVYPLISQTQVAT

SEQ ID NO: 977363 - protein, 33 aa, Homo sapiens
MRDVWLVSRHPASGRSKLPLQALGLTLNLTLSY

SEQ ID NO: 977364 - protein, 39 aa, Homo sapiens
RCARVRLVSLKEAEFYDKQLKVLLSWSHLPRHVWKLRET

SEQ ID NO: 977365 - protein, 62 aa, Homo sapiens
QGGPDSLGVRDPGKLQGRLIKNSQREIKRLKGLLTQQGSPYTRPTENSNLEHLGHETPKEPS

SEQ ID NO: 977366 - protein, 79 aa, Homo sapiens
LCVLLCDDTEVQKVMEDCMRLHVKFRVLREENKQFTEEDGLRMRKTVQSNSPISALAPTGKEEGLSTRLLALVVTCFIV

SEQ ID NO: 977367 - protein, 80 aa, Homo sapiens
SLEGSRQRDMLVPLDWKDELLSGIFSVSLYIYRHEALNWAINIRGRSLMASLRILDRGLARSPFATRITPRSAAVVTAPA

SEQ ID NO: 977368 - protein, 82 aa, Homo sapiens
EGLVDLDGDGVYDAVDQSPSSVCARGICLSLQNEFHPLNQGMLSTWLQHVVSIPTRNWHKCYCVGVVANFLNVSADFLNNLL

SEQ ID NO: 977369 - protein, 54 aa, Homo sapiens
TDALVTADEGRSEVPQEIYADIGGLENSIAWTFWTLWSFLSPILRYYEEMGIKP

SEQ ID NO: 977370 - protein, 35 aa, Homo sapiens
RTRSLYRSPVTAPHGLLQLPEYPTCLFTTDRSPRP

SEQ ID NO: 977371 - protein, 45 aa, Homo sapiens
DIQIAIDLAGEEQHAPPLSSWPAAPLTTMSPDEATVADQESEDDL

SEQ ID NO: 977372 - protein, 74 aa, Homo sapiens
RTRSVYRMIIETSDTEQQTCVDSAKMQDSNRPLMWTKVIRRGGTRGVWETILCPIMHCNKEFDNGHLLLGHLTR

SEQ ID NO: 977373 - protein, 72 aa, Homo sapiens
MVVLTRQGSRLLRQGSASQEQALSAQTSCGDEPYWSRKFNAVTGSCSCDSCSIKWLWQQQQHKQLSYIIIGI

SEQ ID NO: 977374 - protein, 120 aa, Homo sapiens
VPGMQGQTRFQCGAPTFVKHSDDKPYVCNVCHRALRWAAGLSHHALTHTAATPSFCRLCNYKAKQKFQVVKHVRRHHPDQADPNQGVGKDPTTPTVHLHDVQLEDPGPPAPAAPRTGPEG

SEQ ID NO: 977375 - protein, 73 aa, Homo sapiens
QYPSMLACLPVDVYTPLRCMPPLDKFRRHSERAADLQISLSWSLVDVYSPLRCNASLYKFRRHVSTVLTSKYR

SEQ ID NO: 977376 - protein, 73 aa, Homo sapiens
QYPSMHACLPVDVYTPLPCVPPWNKFRRDMSSRRRAPGFVQLEPGRRVFTTAVHASLYKFRRHVSTVLTSKYR

SEQ ID NO: 977377 - protein, 73 aa, Homo sapiens
QYPSMHACVRVDVYPPLLLHASLNKYRQTREEPRGPPNIVKLEPGRRVFTNAVHASLYKFRRHVSTVLTSKYR

SEQ ID NO: 977378 - protein, 141 aa, Homo sapiens
NEVLKLISRTCSIQLLQVPVAVPTQMCAALADGLLGGTDNRVPISMECPEPRASTPVFGGILSLINEHRILSSPPPSWLAQPNGLYQQHGAGLFDVTRGCHESCLDEEVEGQAFCSGHSCDPVTGWGTPNFPALLKTLLNP

SEQ ID NO: 977379 - protein, 94 aa, Homo sapiens
MHHCNAASLNKFRRHVEHSAELPNIVKLEPGRRVSLTAVHASLNKIRRHVRHRADLQISLSMEPGRLLEDPPVPEHCIACLQVNVYSPLRCMPP

SEQ ID NO: 977380 - protein, 126 aa, Homo sapiens
RTDPSRTSAPSSGSGSKSSQRVSTTITSGCCCLSVVGVVQTPSRLLPKKPTAIKTEGKPAEVEKMTAKPVPADLSRPKSKLTVLTDPLTSCTKEVGKAALEPQIDHITEPIRTEKEEAEARMRQAS

SEQ ID NO: 977381 - protein, 73 aa, Homo sapiens
MNSFFLSLYYFIIRPGSFSTFTQILFYCTIHINFIVSSDRPEGQQDAAEAQHPQGPHGVRPVSLKSPSIAGTH

SEQ ID NO: 977382 - protein, 115 aa, Homo sapiens
MQNKPIDDITLQTGKVLGVTSDGEIARCKQLICDPSYVQDRVEKVGQVIRVISILRHPIKTTNDDNSCQIIIPQNQVTRKSDIYVCMISFAAHCSSTSQYIAIVSTPVEPKEPAK

SEQ ID NO: 977383 - protein, 75 aa, Homo sapiens
GESRDPSDQEVPGGYMATRCSATKALWMFKVMCSDWAAAFLGSRRVAYGYLGYPVDLIFVKGSAVVPLALISIVG

SEQ ID NO: 977384 - protein, 84 aa, Homo sapiens
RDRGTGGQISAGRSLYTGLRSIRRSLVVPAYEPFFKLLQEVHPQVRKIGVFSCGPPGMTKNVEKACQLVNRQDRAHFMHHYENF

SEQ ID NO: 977385 - protein, 101 aa, Homo sapiens
TTLLIWRLSGAVPLSAVCSFSVVVSLVLGAAVPACFCLSPSQGFVLSAARVQCPKPASDHVPPLPCLQDIAHAQLHYQRGSLQPDPIVLPRHLLLFPPQDT

SEQ ID NO: 977386 - protein, 168 aa, Homo sapiens
AQLMMLLLRPPRRRKLRDPSVHAEQGGWNVELHAEQDNTVHWLSGVRQQCEQRLAQSLRQPVQFVSGKIEVGMMLPPLILPRFKTDIAVARQRLGQGLCMPFEVAGSSGELRMEPGTAPVGIQPLCFETACGVLAFSEPGPQFSLMGECPVTLEPAGNDPDAWFWELS

SEQ ID NO: 977387 - protein, 192 aa, Homo sapiens
SSCSEVTELTADIQVIDYMHVILTRSHISKPSTMTQLPSRSFVSVPKGGRLMVLNNMKYGVIGIIFIQKIFKNRAVFKKKNKTRKAAVIIERSHSKWGRGVTTLHGHARPSCSGVFTWSHVCVSPVGQLLVIPPVAVGVDNLTEQKAMKSLGSHTGYIGIFTSVYEVYFEIHSHLRMNTCLPCISLLVSKIV

SEQ ID NO: 977388 - protein, 142 aa, Homo sapiens
MLPMDFEQEMAMAASSSSVEKSYELPDGQVITIGNERFRCPEALFQPCFLGMESCGIHKTTSNSIVKSDVDIRKDLYTNTVLSGGTTMYPGIAHRMQKEITALAPSTMKIKIIAPPKRKYSVWVGGSILASLSTFQQMWISK

SEQ ID NO: 977389 - protein, 119 aa, Homo sapiens
KVKKLQLSTRKVETEMETYQPTSLCNMKDDTGKGTQVSVEDSASRMDTGVGCLSTSSHYANRNADTFRCLCRTRCQRLLKSQRRGVKKSCISVPHRQLSQALHAMRDSSETWALLLDAD

SEQ ID NO: 977390 - protein, 143 aa, Homo sapiens
DTAVHLILHGDSMRSPEPSRLEDSYYLQWTDSTRRRSIRNFDLHLRYLSGYETDFDCAYDLFSEACVREYKGFERTIFVRAKTEVSGPISCFFSLHHCCCLEEQPGEQPPSRKQVNHITYSCGGGKWMVKPNGVVLKFGDKSP

SEQ ID NO: 977391 - protein, 55 aa, Homo sapiens
TDEEEVSDILAVKACIIDFHSPTYLILGTVPVSRVWLGRWNYQEELDEHVAKHMY

SEQ ID NO: 977392 - protein, 88 aa, Homo sapiens
MRMKRNQNQKKKMNHRKMLKNCNKVNHIIGETGQSLGEGTAYIFGVMQQPWNYLMAVMDGSDLSWMENLPPCIQVVVRKVDLTVQKAE

SEQ ID NO: 977393 - protein, 112 aa, Homo sapiens
RICEPDLHLPLSLYKKLLNCKACLGRLKGVVTQVKEGVSKSCLDLPGEDVEETFCLNFTICRESYGVIEQKKLIPGGDNVTVCKDNRQEFVDAYVNYVFQISVHEWYTAFSS

SEQ ID NO: 977394 - protein, 70 aa, Homo sapiens
MTLIITKYRECPVAVVDCDVISLPSALNVKVKKFNEARVNGGSNYDSLKVAECLVIYISDAHEWMNEIPT

SEQ ID NO: 977395 - protein, 104 aa, Homo sapiens
MDDIQIRVVAVPRDFPSRCSLDPEILMACGSVFSEGSPLIEQEDSSPSHDRSRPVSASSTGDLPKAKTRAADLLVNPLDPRNADKIRVKIADLGNACWVHKHFT

SEQ ID NO: 977396 - protein, 115 aa, Homo sapiens
MDARPSCLCAVSPSMQVSATLPSPPHHTRLLPPGHLTSVCTCVPQEALTSGFSSWAVVIQSMPGCPQKICGVLCSPALGVTTVDPQHFSCLLLPLVAASKLNQLVMFLQPFPFLA

SEQ ID NO: 977397 - protein, 147 aa, Homo sapiens
LKSNHMLQNSVNLKHLLLKGKRRTRYEAEKHPEVLPAEKASDPASSLRVAKTDSKTEEKTAASAPANVSKGTTPLAPPPKPVRRRLKSEDELRPEVDEHTQKTGVLAAVLASQPSIPRMFLRREFPWKFNWNNFDHSLTYKPIAVNC

SEQ ID NO: 977398 - protein, 32 aa, Homo sapiens
MSIEKTHTHTIAAGMVLSLVFSYWQGILEVSK

SEQ ID NO: 977399 - protein, 32 aa, Homo sapiens
ILPPETQTLLTATQERGNRRAAIKVPVTERHI

SEQ ID NO: 977400 - protein, 84 aa, Homo sapiens
MSTGRGYAAECHVIESCQDSPQCDRVNSININQVSITFAGGPGRDGTIDFTPGSELLITKAKNGHLAVVSPTAEFSVIKAPTGP

SEQ ID NO: 977401 - protein, 125 aa, Homo sapiens
  misc_feature (4)..(4): Xaa can be any naturally occurring amino acid
HLRXCGSGHIKLRQRLYIQPHLSGTGELSGEETQAGMGTGVTVDTGVGCLSTSSHYANRDADTFRCLCRKRCQRLLKSQRGGVKKSCISVPHKTAVSGFSSCERHIRALGTVAARSLRVAPSFST

SEQ ID NO: 977402 - protein, 73 aa, Homo sapiens
MVREKLEMNILEINETLRPQLAEKKQQFRNLKEKCFLTQLAGFLANQQKKYSKIYRLTIMKVMNDILISLGPM

SEQ ID NO: 977403 - protein, 106 aa, Homo sapiens
WNLEGYYTYRRRDFSYCRPSLCSACYRTYSFHAAWPSDGWTRCPYSHQYSDRRQPNISDQQVSALSYSDQIQQPLTNQRRMPQTFRDPATAPLRKLSVDLIKTYKH

SEQ ID NO: 977404 - protein, 127 aa, Homo sapiens
MTNYRFLVVTHSWGGAFSRPWMSAHSMCCHRGAVLQVACRLLDALEFLHENEYVHGNVTAENIFVDPEDQSQVTLAGYGFAFRYCPSGKHVAYVEGSRSPHEGDLEFISMDLHKGCGPSRRSDLQSL

SEQ ID NO: 977405 - protein, 61 aa, Homo sapiens
LRVSGGQQVLKCRRNLSRQACTARGEYTSTKAPSLRSLEVSTVLKYRRNLYREACTAVVNT

SEQ ID NO: 977406 - protein, 80 aa, Homo sapiens
SLSDFALFSLLHSLGADDFQYFLILLSLNIFIPIFVIFWAELLDKVLCQSTPLSQLFLEVLPLGLVRLIRSEEGLEMLIQ

SEQ ID NO: 977407 - protein, 123 aa, Homo sapiens
LRLQNYWAQQAGLFTMSARKAMLAHPEVDYNLQYSHYNGTVRNQLAADQAQQRQAIAKLAEHYGIMFFYRGQDPIDGQLAQVINGFRDTYGLSVIPVSVDGVINPLLPDSRTDQGQAQRLRVK

SEQ ID NO: 977408 - protein, 106 aa, Homo sapiens
RSIHDVIRISAMAPGSQASRYSLLGFILLFNLSNYVLPIDEGFEATHSGLVIQRKDIYSLNGHVTFICVCLKNNGLGYSVYDSPFDVDILQRNQVMLYRSNITWFL

SEQ ID NO: 977409 - protein, 117 aa, Homo sapiens
WIAQDLVCTHRKCIHTHIKEPRDVFGSQCGHPVICAYTFDTCVHTHRQKHRDVSGSQRGCPVISAYTDTCMHRPIQEQRDTFGSRCTPCDLCVHVTHAYTPTDKNTETCLEASVDAL

SEQ ID NO: 977410 - protein, 44 aa, Homo sapiens
MNRQYLKPDAVLHLASMGPKLCSLYHHVHSTLNSQSYSEHQPSS

SEQ ID NO: 977411 - protein, 79 aa, Homo sapiens
MYLQAWRAPLLIKAKRPQEGDILLEEKRLVLVRRKSSISLAISESCSFEPMVSSFWISSFSSFLLRVCLSPSLPEYLWK

SEQ ID NO: 977412 - protein, 133 aa, Homo sapiens
RPLHPPYFGTKFKHPEGKTKRGSKLTGSQPHRKPDYNKLVLSTLRRGSQGCARPGQAKQDDSKRILNVVAIRSPVMCLESVDKGRDESYELCKRMGEAEGHKQKYWRERPGSQEAAGTCQVEASCRQTRKEAL

SEQ ID NO: 977413 - protein, 95 aa, Homo sapiens
MDQDDLGYLHGNLSLLPGEPWNYSLALVNSSNVRAMMQELQAFLEPALLTYGLTCASGILLAAERFAPTKRWHIDTILHVLTTAGTHVRDDAVDR

SEQ ID NO: 977414 - protein, 108 aa, Homo sapiens
MEVCGLSLHEFSRSEYAVCALWNDIRCCRWTNRTAVMSGLYNSQLNIGIRVAFVNKGRWRHEMAVLLGDVYVVGGYDGQNRLSSVECYDSLSNRWTEVAPLKEAVSSP

SEQ ID NO: 977415 - protein, 109 aa, Homo sapiens
MANPDIKYINQESTTHTATPTPMEELGTDFYKVQKAEMPFHSVSSEDNLPTIECQNVCALIFLHKHCLEMSQKQMLGIKVELIYSFKILKNAEKFQFRTAAFFLSELMT

SEQ ID NO: 977416 - protein, 80 aa, Homo sapiens
MTKMHSPPGHKDIHTYSHINPSDFKSISSVSLSNIYTFRFPLHGIRVNGRDLWELWAISCRNRDSFSNWDSICSLSSFSS

SEQ ID NO: 977417 - protein, 95 aa, Homo sapiens
MRHADNDRPPRRGLDEDRGSWRTADEDRGPRRGMDEDRGPRRGGVDDERSSWRNADDDRPRRGMDDDRGPRRGMDDDRGPRRLMMMAIISIRVPS

SEQ ID NO: 977418 - protein, 72 aa, Homo sapiens
TYGPWANAGPNTNGSQYIRSALPRTEWLYGKHVLFGNVKEGLNIVEAMERFGSRNGKTKAGRSPLLDCGQLE

SEQ ID NO: 977419 - protein, 40 aa, Homo sapiens
GTITDLIKVLDSQTMMVLVNYSSCFKAKWEMPFDPTRYII

SEQ ID NO: 977420 - protein, 100 aa, Homo sapiens
MCCCWCVCHATRLSPERRVTDAIIRIELAVLSDDVAQFLDHNSVLLIPKMAGHPSSTRGLEIVDVAATSLPTDAGPFLKIGHAFPVFVVIEVTLGAYGPS

SEQ ID NO: 977421 - protein, 43 aa, Homo sapiens
ERREERSSAHRNGPRGPMKNTLSRRRKTAENEEEPVSSGNRKG

SEQ ID NO: 977422 - protein, 77 aa, Homo sapiens
PVVNQTHDEAERDKSRLSIVREAAELLNHLVTFLCESHQLGPQVELNGGPLMAGYRRSNSRRSMLREMGTTQGQEGS

SEQ ID NO: 977423 - protein, 74 aa, Homo sapiens
PPGFSDQPTRFTFDVDYRVPGTSSEFPGPARTLGYLPGLPTRFRVLRQLSRNGAPSGLLGLLSTPGTHQASPPD

SEQ ID NO: 977424 - protein, 166 aa, Homo sapiens
DALYPACAVCQRQPIAVYWSIERDCPNCCTPFGYRDPGVLPWGRSWRRRRRTVGMESQRPSQKSPRHELQDPHPSRELPWPMQARRALMAKKCHAEIQVVYGSGTKTDRWARLLRRSKEKTKEGLRSLQPWAWTLKRIGGQFGAGTESYFSLLRFLLLLNALAYST

SEQ ID NO: 977425 - protein, 72 aa, Homo sapiens
IAVPEYPGYPGNPSTTYVQGPGFAISTKSVTDSVPVRHDINRQCEAMYVPLPLITKSSLRNEESHLFMVFSY

SEQ ID NO: 977426 - protein, 143 aa, Homo sapiens
RIPASTVGSSFSCIGWSPVTIMTLIPALSDMCPRNPERPPVEEAIMEISPTEHSSSIGKSIIVSVRLEPFRKSICWHAGVAVTKDSNSEAPQLQIGVLKGVFQLLIQGLLLAVEEDRAATVKDPFWGALHHQQVLGLRCVGDN

SEQ ID NO: 977427 - protein, 138 aa, Homo sapiens
TLEPNTVADERRPRKDPSTLQIYPPPRTRSRPLVRGAERRLSATPHFELGGTRENESYGFCHLFLPDEQFPEGFQFDTDDVNFPMLICAYVGLISMIEPPRADVPDAVSKCEVLELSVIMVTGDHPITAKAIAKGVGR

SEQ ID NO: 977428 - protein, 35 aa, Homo sapiens
CLNLSPGQCHSQGRQFIFTISQLVKSLTPMQELVG

SEQ ID NO: 977429 - protein, 40 aa, Homo sapiens
QEEWQQLLRVMLLVAQEIEMQNGQPCSKKMGRIIRERGSK

SEQ ID NO: 977430 - protein, 149 aa, Homo sapiens
MPLVYSMSAAVDKQLAEIVEKIIIINDKGRLSMEDIERVLQDAVKYAACGGEARVQGATQVLTCFPVPLNMKAPVEDEKLSRHDQSMRPEQKILDKCNEIINWLDKNQTAEKEEFEHQQKELEKVCNPIITKLYQSAGGMPGGMPGGRR

SEQ ID NO: 977431 - protein, 155 aa, Homo sapiens
IAYWYTLVSLLWTRVREIVEQDYYTNVARRRSSKDDIDRIAQEAEMSNAENETQKYTVSSINPLVSYAFNIIPTVEGLHPFEVKHYLIQDQCMKQFCTECHVLIHCLDNNQTAEKEEFEHQQKELEKVCNPIITKLYQSAGGMPGGMPGGRRWVP

SEQ ID NO: 977432 - protein, 168 aa, Homo sapiens
IRTHGGVVRLPSLLRLYANGILNVSAVDKRYGEKRTGLLSLNDKAVRARNDIERMVQEAEKYTADDAKQRDKVSSTQFTGVPHAFKHVKRTDVKHEKLQGKINDEDKQSASGQVYMQFINWLDQAIRHAEKEDFEHQQKELEKVCNPIITKLYQSAGGMPGGLPEDKR

SEQ ID NO: 977433 - protein, 111 aa, Homo sapiens
ESSVHICNKKSEPQYPSDVGPIVCREATEAWLRDGRLMLNDLPSPPTFEGGEEVVSFRGRGRERGFGGANHGGYLNAGAGYGCYGYGGTSATVGDSDCATDCYGYHDFGSS

SEQ ID NO: 977434 - protein, 52 aa, Homo sapiens
KLGDVLVDVEDTGTTPAFRQKPVVFCIRREENRVLISRDLVELDGNGDNLVG

SEQ ID NO: 977435 - protein, 158 aa, Homo sapiens
RKVVVVRVLQAGSRIGYIVSVGMQGSGVTDEMHRYECDARVKEGVEVTEHRFFIRASIRHSDLITKEASFEYLQNEGERLLLEAMDYLKVAYNNTSVRTDCNHIFLNFVPTVIMDPFKIEESVSYMVMQLKEDGCGKLRVLQAEVKIKIRQNTTAVPF

SEQ ID NO: 977436 - protein, 161 aa, Homo sapiens
MLFLMFLVYWYPMLGERSSCPDSSMVILDTWFGVSFPSSKESFSPVSESQYINVSVVAPRVTVGLAAVFIHRQTLDRFTVTLDDVQGIAGVVSVQIVDVPGQGDTEQVVLLPEAAHAAGPEPWSPMENVLTTDSTLLSKSWKYGSPEAESKWVLSGLRLIA

SEQ ID NO: 977437 - protein, 109 aa, Homo sapiens
IRIELVPVSSASRIIPLLSGRLGRGCGGTQATQERDATEFSKILSALALPCPASSGHQISTQCVTTPSPPIPQRDSSRGDESQGPWGPSVEKGAGRDAWESTQGQVQAC

SEQ ID NO: 977438 - protein, 107 aa, Homo sapiens
SRGSCRGVAGCKAGGHGISRSSWSGVLRRTYPSLRSRVLGVLGACWVITGSEQESERQAGHESHSSIVAREGNPSLLWISPATFQGRPHYIIRLNTAGRSAGSSRKL

SEQ ID NO: 977439 - protein, 103 aa, Homo sapiens
ASPKGTCFCCSMPHYFGVIGLRHHFAIHDPAVVIIMDGLLELLAVQGITKIKVLTIFQQAAVVAISAVQLDLDVQQGLILLGLALSLCPGLCQLCLKVQQDPV

SEQ ID NO: 977440 - protein, 37 aa, Homo sapiens
MDVYCFFFSITKVMTITVAMTTPATMSPMIAPLFEPT

SEQ ID NO: 977441 - protein, 140 aa, Homo sapiens
MADIDNKEQSELDQDLHDVEEVEEEETGEETKLKARQLTVQMMQNPQILAALQERLDGLVETPTGYIESLPRVVKRRVNALKNLQVKCAQIEAKFYEEVHDLERKYAVLYQPLFDKRFEIINAIYEPTEEECEWKPDEED

SEQ ID NO: 977442 - protein, 156 aa, Homo sapiens
  misc_feature (21)..(21): Xaa can be any naturally occurring amino acid
  misc_feature (156)..(156): Xaa can be any naturally occurring amino acid
IDPKEDKSVGRAPGPYTRKMXQTLLRILDKESLSENPTLEYLFYRENCGNCTFIQYSDVDFTGAPVQRNYLSSIPGIMDYLTPEKERVQEDLGLLQYHICGEEEVVFQEEQLQTQNSAIVKDDEGQEDYQFDELNTEILNNLADQELQLNHLKNSX

SEQ ID NO: 977443 - protein, 67 aa, Homo sapiens
  misc_feature (44)..(44): Xaa can be any naturally occurring amino acid
SERYPGLRMTRNQNMTGKDDDYGNMLCMRRRTAFDQVTGVHRKXENIQNSKFITKEQEENVALKGVS

SEQ ID NO: 977444 - protein, 137 aa, Homo sapiens
MVQIINILITRTVILLNLLTVIILLFITVYHLGILAILCPLGWDGSTLLTRSSYQCFAWCGSLLARCGNCFGWCSCLLGRCCCCLLAWSDSCFLGWCGNCNLFRWGNDHLLCWGSSSLLAFLLRYDDLFSTAIIFFI

SEQ ID NO: 977445 - protein, 76 aa, Homo sapiens
MHRGVLVTLLKIAVLKSMHRGVLVTLLKITVLKSMHRGILVTLLKITILKSMHRGVLVTLIKITILKSMHRGILVT

SEQ ID NO: 977446 - protein, 165 aa, Homo sapiens
  misc_feature (160)..(160): Xaa can be any naturally occurring amino acid
QEFKDRCFTFLSLVTHHPYLWLDSIYLQMKHENNYKAHMGPAYDEHLYKCESITIYGELSTFLSTAIYAMVPLLEEMERQISYVTLVRPIREDAAIIYHVCRGLMKRSFLLLHLAGTPPVPGSLLSFQVTHFSFLKILDPRRSLFTLGRNLCPCNVYPPXSFLST

SEQ ID NO: 977447 - protein, 41 aa, Homo sapiens
RSHAVDKIQNTWHGGGVTDYRDGTDTNYYSEKGFPKSGCKL

SEQ ID NO: 977448 - protein, 110 aa, Homo sapiens
SRECHDVIPGCMMNEAWVHQCHHVWTMVGERLNGTDPEDVIRNAFACFDEEATGTIQEDYLRELLTTMGDRFTDEEVDELYREAPIDKKGNFNYIEFTRILKHGAKDKDD

SEQ ID NO: 977449 - protein, 90 aa, Homo sapiens
YISWQSEHILQPLSLSNYGTLLHQCNTPPYVLQDTWSNKTLNLGCLGPRFLTFFISGLSYNILADIIFFIEIEKFADSANSFGAQVGEAL

SEQ ID NO: 977450 - protein, 46 aa, Homo sapiens
MLWSIGLAISKETAMPYKCMRSLISSSSFTQQCPPEVCPTSLARRQ

SEQ ID NO: 977451 - protein, 92 aa, Homo sapiens
KTKLADRYATQRSLNQLVRSSLTSSKEELAESSCRNQSVNGKAPLATGEDDDDEVPDLVENFDEAPRMRQTELSQLLKIKPEEVTGSCYFIL

SEQ ID NO: 977452 - protein, 116 aa, Homo sapiens
MCLLYGTGRGKAKGAEIKTTNEVVLAVEFHPTDANTIITCGKSHIFFWTWSGNSLTRKQGIFGKYEKPKFVQCLAFLGNGDVLTGDSGGVMLIWGKTTVEPTPGKGPKGVYQISKQ

SEQ ID NO: 977453 - protein, 112 aa, Homo sapiens
LGKVTKGLSNSAGFLTMPTLDNIPFVAYLSQDVVKAAVAAVLYPEEFMVLLDSVLPESAHRLKSSIGLINEKAADKLGSTQIVKILTQDTPEFFIDQGHAKVAQLIVLEVFP

SEQ ID NO: 977454 - protein, 181 aa, Homo sapiens
HHHISAEDKATISQPPRGVVGAQRVLQMWQGRTAWTCGERQQALKDWTEPWEAGRRLRRTEDEDAAPGWSQTLPTCPAQELRATGLASYGMRGSWHRSPLPAVVLPSVLQTALSPLALCQAWRRAVPHGVPSHRLRNQEASLVPKGVPSAWYPGPLENGLWTHLETAELLGLKTTPGGLLL

SEQ ID NO: 977455 - protein, 83 aa, Homo sapiens
APPLSSRDACWGSRDSALAVCSEDTETEPSLMNGAEYQAGRFALSLRKHCFGVILGANTRPDLDLRDPICDDFFQKWQDMAES

SEQ ID NO: 977456 - protein, 82 aa, Homo sapiens
METDDNIRAIQLSRDGQYLLTGGDRGVVVVRQVSDLKQLFAYPGCDAGIRAMALSYDQRCIISGMASGSIVLFYNDFNRWHH

SEQ ID NO: 977457 - protein, 87 aa, Homo sapiens
MVCTGASVDHGVAGSMLHWRQEVSHRLSAGHDSRSQAFVVSRGLQMMSKVFFRVSRYQALAVLWMSQQILNVDQCQFRFDWACVMDL

SEQ ID NO: 977458 - protein, 80 aa, Homo sapiens
MINKATSLSTLGRHKPVIPLLNFLPPPAENPKGQKDREAPLSRSVFVLKIKIKRAFALLLHGRFLSSLSSPEDTCVADVP

SEQ ID NO: 977459 - protein, 93 aa, Homo sapiens
MCQKSYHRALLARGRHAFISTSLFDHSMSALPIIVKQNVTKRWIVHPLIGNVSWDETVVRQVSFTLLMMCCCHGNPAQYERNRRFRHLVYVLG

SEQ ID NO: 977460 - protein, 141 aa, Homo sapiens
DTRDAGRRIMENNADVLTSRHRVWSYTTTVSDHLQNLRLVVLDSYENILGVCLRIWIRLATGPRIVSRLAAQYECPRVLSLLSMASVPKTNKIEPRSYSIIPSCGIQAARACFEHSNFFKVNASGPAGHSAKSIEGAPRGK

SEQ ID NO: 977461 - protein, 106 aa, Homo sapiens
MKEKWEDMESVLKDLTEEKRKDVLNSLAKCLGKEDIRQDLEQRVSEVLISRELLMEDSDKPLLSSLFNAAGVLVEARAKAILDFLDALLELSEEQQFVAEALEKGT

SEQ ID NO: 977462 - protein, 91 aa, Homo sapiens
WRADNQGLQLTSTQDKVASVINIHPNTTHSTGSCRPHTAQLQHNSSTIKYLDFVFAVKNENRFYLKEVNISMYLVHGSVISIAHNNLSYWN

SEQ ID NO: 977463 - protein, 79 aa, Homo sapiens
MSMIVQYNQRSLYAVICEWHYTPYLEITASRSLNNRYLRHQGHCAQASDTCLEWNNLAQEIPCLSKCICNCTGMNIEVV

SEQ ID NO: 977464 - protein, 137 aa, Homo sapiens
YTDDYNVIDCDPIIFIYLLNCSYRARVVKYQRDGPNCMQDNQGGAPNYYPIQLWCSVTAGFCPVSQYPIFCINGEIQTGNDYYIIQVWAFYVNVLNEAQRKRLCENIAGHLKDAQICIQKKAVLNFTDVQPYYGSHI

SEQ ID NO: 977465 - protein, 92 aa, Homo sapiens
QLAGFLDFTYQEFRIQLFVFEDKMNEPRVDQRYSQPWMVEFQSASEVAFYIDQDMIQIADTKVARCNGDVFIRQIHKFEELNRTLKKMGQRP

SEQ ID NO: 977466 - protein, 121 aa, Homo sapiens
GSIDIASVFLSMYTSGKVYAASMNISIGRFLIKSECDKILAVIAQVQVLRDQLCKHCTTINIDSTWQDESNQAEEPLNIDRECNEGSTERQKSIEKKSNSTRICNLTEEESSKSSDPFSLW

SEQ ID NO: 977467 - protein, 83 aa, Homo sapiens
TGPFIAGSAGTPSSNSTRWCHVADTSKPYGNFLLATKIHTGKGTELCGETGKVLTIQHHADELFIVDTTIAVLMPCHQHLRFG

SEQ ID NO: 977468 - protein, 39 aa, Homo sapiens
RQQAYHNHEEPVKDDELSVGLMVPREVGAETTEQKYTPR

SEQ ID NO: 977469 - protein, 92 aa, Homo sapiens
MPWLVRYRNYQRICFTNYRTALHHHPRNRERAINLSILSVSGPGEVSRVESNEAAGSTPGGALPSIPLSFSFATILPPEPKDFGFPDCLDYK

SEQ ID NO: 977470 - protein, 97 aa, Homo sapiens
NPSSRSEASLRLLALSQTRRTGAFQFYPVNPMIRGLGAETISTYSQTLNGKEARLAGVEPGVECECLVGHFWEAELALRDEPNAVVKAPDADCLDYK

SEQ ID NO: 977471 - protein, 62 aa, Homo sapiens
QREEEEEEKEPEAEPLVPPQVSVEVALPRPAELEVKKVTKGDTLTRRTVNQQKSEFPITIDR

SEQ ID NO: 977472 - protein, 94 aa, Homo sapiens
MVAWLNSASAELVKKILCDEQQRELQALYALQALVVTLEQPPNLLRMFFDALYDEDVVKEDAFYSWESSMDPAEQQGKGVALKSVTAFFKWLRE

SEQ ID NO: 977473 - protein, 77 aa, Homo sapiens
MKNDESEEEQSSSSVREDETNVKMESEGGADDSAEEGDLLDDDDTEDRGDDQLELIKDDEKEAEEGEDDRDSAHGED

SEQ ID NO: 977474 - protein, 74 aa, Homo sapiens
MGVLGPLSIDPNMLNAQKQQVQFMLKEFEARRQQHEQLNEAAQGILTGPGGVSLSTSQVQKELQSINQKWVELT

SEQ ID NO: 977475 - protein, 133 aa, Homo sapiens
SACKIGTNPVCEDCTRVSVTGFILLVIAASRAYRILIIIFLSEEDEDVMSACFLLVLVLREFLFFSLTMTAFFLDEVLCFFFLLSSELSSASDDDEPLCISLVFLFELKFLLSLNSILFSLLSEELQPSSFME

SEQ ID NO: 977476 - protein, 127 aa, Homo sapiens
SRDGGLTNDSSYSKFRVLVVHGRYVRLVDADLSGYFLSNERESGMLTSYASPERSASPNFLEGQVAFSHPRLSNNRSVMPLDVRGCTRATLTGSACAYPTPAGAGNPLNPIRDGDRGLQLFPMNEEF

SEQ ID NO: 977477 - protein, 92 aa, Homo sapiens
MIQLELSTVRVKLLIGSAESCQLSCVKFACSQSYQIVRLVFRPYTQVDDRFARQDRYGPPPEFPLASPCPGIVHHLSGPNTVRSCSTSPSRL

SEQ ID NO: 977478 - protein, 135 aa, Homo sapiens
KSSFQPLRLYLFQLHSEVFDWNYFRDLSSFHFFLTKVPESSIYNITALADQCLQLIFFCWILFTSWGRACTSIEFADNWMNNFFQFLLLSCEVFNVSILVAFQPFNLFFYSFFHGLLIFRGKFTSQLFFISNLIL

SEQ ID NO: 977479 - protein, 44 aa, Homo sapiens
SRASRIIDELFQDRFFTRETQDTYHYLPFSLPQRRPHFFFPKSR

SEQ ID NO: 977480 - protein, 53 aa, Homo sapiens
MVVGAKIQTRTLKAEVEKGSMEQQLNMGQSALRDGRAPFRRDGRWPPMPSAER

SEQ ID NO: 977481 - protein, 72 aa, Homo sapiens
DHDPSTPLTVTCGPDRSNLGYMLARKTHGLVVANQELRQRLGMDALVAGEEEETKGNEVRPVDGSAESAELR

SEQ ID NO: 977482 - protein, 71 aa, Homo sapiens
MCLRVILAIGADSVILSFLSLFFIILDQSSWSSPRSSLSSSSSRSPSSAESSAPPSDSIFTLVSSFFTELL

SEQ ID NO: 977483 - protein, 106 aa, Homo sapiens
MEPLGQLEKLREPSFFQTMAVEEGPPARQGCTGGRPAGVLRPARVPKHGCGRSQCRAIGPCRPGNDGGGQGASQLGAYHHIPGLGVLGQSLPPGDSARPRPTRPAP

SEQ ID NO: 977484 - protein, 100 aa, Homo sapiens
  misc_feature (44)..(44): Xaa can be any naturally occurring amino acid
HLLSMNSSRQLSLQNIRDTEVTQRKGQLKSEARHARPCSTYSPXEVWLDHVDRIRSAAPVARGTPAQTTGSSLLRALYPFGDEVYFDSQQGDMQLLLNDD

SEQ ID NO: 977485 - protein, 149 aa, Homo sapiens
TGTCKDMNVITWRFCFQEMEKDFMILSFSGKKMKEIAMKDPMTEIKQLTGSTNRHDQRHAGNKPIKDQLGSSFHSHLPELHMFQTEGKIGNQVEKSINSASLVSTSQRISCRPKTHISKNYGNNFLNSSLLTQKAGSTHERKIFPVWRE

SEQ ID NO: 977486 - protein, 98 aa, Homo sapiens
LCSWIERSQAPSDDLIPYRVTCRTDYIEVMADVDGRRARGRAIGRGIKSQAAGRPRRGREGCRFGLILIMHASPREGGQRPSACISSRITTGIQVGEE

SEQ ID NO: 977487 - protein, 102 aa, Homo sapiens
MMHLPPSQIAEGALCLALQILDTGEWTPTLQHYLSYTDESLLPVMQQLAKHVVMVTSRTYHAHDCQEQVCHIEACYDQHSTTAEYCTSSRFSQGCGKGVTCK

SEQ ID NO: 977488 - protein, 113 aa, Homo sapiens
MEKARYYIKIHEPNVPSHHVSYIIFETERSLEPGSIHKRGHDPLSQQNFMGTSEGSWSPAHFCMLGLSSRKGSWALRTQWPLIQGRTLSMMCLACFSFAFSPQALGHNVSARE

SEQ ID NO: 977489 - protein, 47 aa, Homo sapiens
MQTARIKAKAKRDAKRISHSGIWGVLIGPEVVFAPPSDSHVSVHLIQ

SEQ ID NO: 977490 - protein, 43 aa, Homo sapiens
KLLHQCALSQRRFEAIHHELLQSELTELRTTQVKTAKESEGSL

SEQ ID NO: 977491 - protein, 75 aa, Homo sapiens
ALSRSDMRRGYPDVLRSGSQLPVHGMLTRGSEEISMGSPSDRSPLSPGASAEAGLLLFFGLSNRKSAGYRCILTM

SEQ ID NO: 977492 - protein, 113 aa, Homo sapiens
MDLHVVGGQECCRARCILQAANSRDPPLWILLIYTRFIVLSASFRSDSLLQFSVKFINALHVGFLRLRCWWQMTESLLDAGPYDFFPKSHRWPLAFRVLWFWYPSSQSPVGMH

SEQ ID NO: 977493 - protein, 172 aa, Homo sapiens
HSERDKQHFQGEKKNHVIRKQRRVRASHFHVCLFPAALAPFVFLLFLMAFIPSFVLVCFQSFCLPSFSFFEEVVGSLEEGMCGFFSLFFYRILIVWFSVISSIPERDKQHFQAEKKNHVIRKQRRVRASHFHVCLFPAALAPFVFLLFLMAFIPSFVLVCFQSFCRPSFSFF

SEQ ID NO: 977494 - protein, 34 aa, Homo sapiens
EEARGLLGKNYTWGGLREERRQISGCGQVVMGLN

SEQ ID NO: 977495 - protein, 64 aa, Homo sapiens
MSIGIKMRHRRGWAQQRHDNDIDIIKKENDTFTRQVHATRGGAAYNIMVLEAKQEIPASPFHIK

SEQ ID NO: 977496 - protein, 126 aa, Homo sapiens
LVHLLACSNIVKYTATQPFRQYRVLAVGRLVLCNTRWNSVFQQGMKNKILILGLFEETVLAAFQIATALEWVLLLGCIPSNLPGGSVPSPTLFSSSYMTKSEHSSSGDRPGGYGLEKETYYKPPVL

SEQ ID NO: 977497 - protein, 108 aa, Homo sapiens
WLFGGYRTAVINGIMIVLGTASCNRKVGGTLWSFVFVYQYARMMLVARLYLSPSFIRHWGRGILSAAVFLDSLNPLLCSTGVSCAINASPQDLENNLNSKSNAKTLSW

SEQ ID NO: 977498 - protein, 105 aa, Homo sapiens
ETVMTGAKYTAVDSPYPGADALTSSGELACAFDIPAYLSIRVLISYAGAVEGITQQEILGVETWFSSVNWQDQCGLTCEHKVDLLPISASVQFMKMPAQLPQPLT

SEQ ID NO: 977499 - protein, 55 aa, Homo sapiens
MHASLNKYRRDVSTVMSSKYSLCMEPGRRVFTTAVHASLYNFRRHVSTVLTSKYR

SEQ ID NO: 977500 - protein, 68 aa, Homo sapiens
LCISCLRGNNFHMGPESSPVVFPSLMAESFYEVVFGYGFRDPPVAFFFFLGFSPVNYRGVGSYLFVDS

SEQ ID NO: 977501 - protein, 116 aa, Homo sapiens
MRALANNPTKAEVLKVLGNPKRDEMNVTVLDFEHLLPMLHTGGQDKDQGTYEDYVEGLRVLDKDGTGTVMGAEIRHVLVTLGEKMTEAEVEMLVPGHEDSNGCINYEELVRMEMTG

SEQ ID NO: 977502 - protein, 101 aa, Homo sapiens
SDNSVRGSTALRCTLPSGAPKSSVQSGVQSMELLPAPSPGSMVQVEVSGQLILTNLSLTSSGTYRCVATNQMGRASCELTLSVTEPSQGRVAGALIGVLLG

SEQ ID NO: 977503 - protein, 147 aa, Homo sapiens
LLRHFFRSLNVSRQDTQCKTLSMGQMSKTWAAREHGSGREAGQQEATTPTIGWVPLILSHHLWHIVLAPKSPDGAHVSDQLPHDRGGGQGMVLHVEDHVVCVCKDVIIPVEQKLELAHLVSCHCKNRTCLSVRLTKESWQSHCRMSP

SEQ ID NO: 977504 - protein, 203 aa, Homo sapiens
VQRTHEAELGCGAGARIQARRGGHLSIQNMTTLLANASLNLHSKKQAELEEIYESSIRGVQLRRLSAVNSIFLSHNNTKELNSPILFAFSHLESSDGEAGRDPPAKDVMPGPRQELLCAFWNGDSDRGGHWATEGCQVLGRKNGSTTCQLQPPEQLCDPYGSYDVEDWKLTLITRLGLALSLFCLLLCILTFLLVRPSRVAHG

SEQ ID NO: 977505 - protein, 70 aa, Homo sapiens
  misc_feature (25)..(25): Xaa can be any naturally occurring amino acid
PYFRYISTLIINHLSTGISGESTVXETSPGYLENQFNVEEFSFQELSRHVQKEAKFCSSFLIGVYSLNAS

SEQ ID NO: 977506 - protein, 154 aa, Homo sapiens
MTLHADTYLEETTGSVESDVKSCKWAAVLSGSQAGWAGQGDLSLSFRKYISTEQFPESSWYSANMWQEADHGACITIVDIQCHYAGQPGSVSVLQSNTSSLGKLGGGRHEGQVLPYLEPEGLPPEAGPSPPAGQIPKRKLEAEVLQPDETLHGI

SEQ ID NO: 977507 - protein, 38 aa, Homo sapiens
SGSEHSVSSIVTCVILYEVVASQNRKDAEAWFTSRTEE

SEQ ID NO: 977508 - protein, 126 aa, Homo sapiens
MISGSRVRFISYDRPGYKLPTKGIKSHQQVSLRRVHPLLSKLYGDPLASCLAPALQLLLKSLEVHIRCHTEVKAGAHGGRYHVIGHATLKLSQVHGGHGPLFQVGVRLQPLPFLLPECQDGVYNLV

SEQ ID NO: 977509 - protein, 104 aa, Homo sapiens
MPEHTYRSRNNFTNTYNMKSPLLIRLHYARTRAPKRVHSNTLDIPQPSPPKNVTDAQRQNGTKCEGISLLAQNTSRLLMLLLSLSLLQATDFMSLCLVGPMEET

SEQ ID NO: 977510 - protein, 162 aa, Homo sapiens
RHGCADCCSLGGVRTGDMQVLAPVVGDSCVTLRRPLVPVVGVWALERGTGRVVDVGSTSTGSLNMTRKVLAEPSQLKPVSFWPKTVLLIGVNNLDVHLVSVGPWMDPYSPNPTTKMRLLTENLMRSLVPLQPQRLSTCWKRLMLHSFPRRQQRGRSMNSTRG

SEQ ID NO: 977511 - protein, 144 aa, Homo sapiens
KGKGEMLSMYIQRGYSWLPLLSPVSISCASLRISMVRLEILVVIPKAWNKEVFSGPRPVFWAGTVTSHGAMAPARVSSWHLIGQQHVPDLSEVLLGEHKAHIPPDMMQQFLQSWVVFQVPSDGLAHHGVLAHQHHSLPAKGHAD

SEQ ID NO: 977512 - protein, 37 aa, Homo sapiens
HSQVAPTHSSSRICCSDALDEVQSLLQAVGLVVLPAD

SEQ ID NO: 977513 - protein, 137 aa, Homo sapiens
PLRLCVGSSSSRKTLAPDVHCQPLSTSVILPVGRRIILIVFLRVLLAVWPLSLVGQCDRSCLVKPWLDVLLTVGDSLILLHIPLEQDDVNFRVLHPIHQDGDQLDQMGGQDFLADGLLGQRQPELTGLKGNVLIMVL

SEQ ID NO: 977514 - protein, 172 aa, Homo sapiens
TTHGHKPQKRVTVSYPYDAITTIREEVMYFKERFYMRTNPFYPEVELNYISVFWPQLPNGLEAAYEFADRDEVRFFKGNKYWAVQGQNVLHGYPKDIYSSFGFPRTVKHIDAALSEENTGKTYFFVANKYWRYDEYKRSMDPGYPKMIAHDFPGIGHKVDAVFMNDGFFYFF

SEQ ID NO: 977515 - protein, 67 aa, Homo sapiens
ATLPVFISSIILRRPLMLSSTYMRIRPVSVSNLVRKSSAARRALSICRTILEFSTGGTKNLVPQVLE

SEQ ID NO: 977516 - protein, 129 aa, Homo sapiens
TLEDQPAARYALMQRAPEAREQTIANLQTDLSDGVRLIALLEVLSQKKMHRKHNQRPTFRQMQLENVSVALEFLDRESIKLVSIDSKAIVDENLKLILGLIWTLILHYSISMPMWDEEEHEDAKKQTPK

SEQ ID NO: 977517 - protein, 102 aa, Homo sapiens
MDQHKLTRDQWEDRIQVWHAEHRGMLKDNAMLEYLKIAQDLEMYGINYFEIKNKKGTDLWLGVDALGLNIYEKDDKFNPKIGFPWSEIRNISFNDKKFVIKP

SEQ ID NO: 977518 - protein, 31 aa, Homo sapiens
MSLWVGEYRQRFTNIGKMAEEALDCKSKDRG

SEQ ID NO: 977519 - protein, 149 aa, Homo sapiens
CCRLTDRNETQLTVRAVIVRSEATGHGVATESGEVLNPRYEVGEVIFDAADAHAIEEVNLAYENVKEVDGLDVSKEGTEAWEAAMKRYDERIDRVETRITARLRDQLVTARNANEMFRIFSRFNALVVRPHIRGAIREYQTQLTKRVKD

SEQ ID NO: 977520 - protein, 103 aa, Homo sapiens
MVLRCLFDILISRCLREYAWSDTVERVRCELLRMTVKVRCLALQQGEACLVLCLNPPLAVHQQWAAAILGPFPETPVLDAFAFLTVVGAEHGHRASCHPLHHS

SEQ ID NO: 977521 - protein, 100 aa, Homo sapiens
  misc_feature (59)..(59): Xaa can be any naturally occurring amino acid
IGAWVCGVLCPTRMKQSISTVSLEGPEWRAPAVTRGWLGQYEALSCWRSRQRHFTVILXQLTSRDAGFYWCLTNGDTLWRTTVEIKIIEGEPNLKVPGNV

SEQ ID NO: 977522 - protein, 72 aa, Homo sapiens
ARGLPDQVTLSNNSNIVTLKPIIGSMPHRIQATGCIEVRGEGSELDQKARDGDVAEKVLVGRPELLTGFWKS

SEQ ID NO: 977523 - protein, 68 aa, Homo sapiens
MGLMPVAMALMKQVCSSDPFPGLNPRTVPSLSCNVTLEDFYGVFSSPGYTHLASVTNPSPDIGCWNPK

SEQ ID NO: 977524 - protein, 126 aa, Homo sapiens
HMWYPLVVYDDCAYKACGIIAARYSDSSVYSLVDSSWWSRQDLEVIWYDFCTISSLTQLYQQCVECQAHNNAQCICIYLRQKSPLNIRTIQIQQMMLPTGVVFLSFTFPKQSPPTTNVGSVHVNDY

SEQ ID NO: 977525 - protein, 79 aa, Homo sapiens
LLVGQRLLLWAGQVHGGLDELRSQVVACQVVTGSRTGAGVPYWAWIQGISGERGDPRQGKESQWDKPIALSQSIWAPEQ

SEQ ID NO: 977526 - protein, 91 aa, Homo sapiens
LWPAAYGTLLGVSSHVGQTYEMFSWFLLATCQALAASESPGLCSLVEVNELFQQPYAPIPLVTYDLSHVTYQMHMTNVHPTLHPVCVYLMS

SEQ ID NO: 977527 - protein, 130 aa, Homo sapiens
VLQTRTNSCRLAKSSLHLDVLYDVMKSKKPENMAKDTRTNYVDILGNLAWIFARDHKAKEGLYQYKNICQQVNIKSLEDVERAYLKMAEEKTEAAKEESQQMVLDIEDLDHIQTPESVLLSAVSGERHSG

SEQ ID NO: 977528 - protein, 44 aa, Homo sapiens
DLILISQKSDDDRDKLHMPPGRKDSILSVIITITYKEVCDFIDP

SEQ ID NO: 977529 - protein, 64 aa, Homo sapiens
DGNLYRQACTCSGEYTDLTRLQVNNIVEVNTVLTVSDENLSSEGMHRSGEYTSDLEACMHARVL

SEQ ID NO: 977530 - protein, 121 aa, Homo sapiens
IWKTLIDLADLDTVLKDTDWLEDLDFLERTRYTGRLGFGGRHRYYWKTWISWKICICWKTLKLLEDMDFLEDVDFPGRSGFGGRPVIAGRLDLQEDLIYMEDLELLEDMDCPEDMDCLEDV

SEQ ID NO: 977531 - protein, 120 aa, Homo sapiens
YSVPPKEDDKAIKETRDEDDADYKPKQQIKTEDTKKEKKKKTSKQEADGQHLTKTQESSIKINKVPEPDNKKKKPKKEEEQKWKWWAEERYPEGIKWKYLEHKGPVYAPPYEPLPEISRG

SEQ ID NO: 977532 - protein, 177 aa, Homo sapiens
LRLRSTHIEHLMSMSYSEILASTRNMKFNPNFLDIKFLSTFQEMPTVLQGSAKLHVTLFTSNIIFCCNMEEDLGMWVITCNFLQFNFIVTCQDIHSNFCCILYLRHLLVRHFCKYCILEVHPTLALKPFPCLLEQANPVPRAAKISSTAGAELHFNCVEWLTLRSLHSGIDCVTYHN

SEQ ID NO: 977533 - protein, 65 aa, Homo sapiens
KSLSAHCALPDAWRVPRSSLGSVLGPTLGFSLWAQAGVRLSFLYPSAEGPVHALQTNNPVSAPTK

SEQ ID NO: 977534 - protein, 103 aa, Homo sapiens
RGQLSQTLPGIAYQRHSLVTALSDHPHHSINLHESWSVQAQQNLRSDYPKPRQRQQLYVAELKGEDPARVNVPVIGGHAGKTIIPLISQCTPKVDYPQEQLTA

SEQ ID NO: 977535 - protein, 87 aa, Homo sapiens
ILEHPLNRLMQHDMFKVSQTIKPIMQCQVTGGPACTGYPMEWTKKVITNIAWSGYVSSDRTITKYAREIWGVEPSDLQIPPPNIPRD

SEQ ID NO: 977536 - protein, 80 aa, Homo sapiens
MAPPGNMDSEKQGPPVAGKVFGEKRRCKVSKKTNARWSRQGRVCLVAGDVGGRDLQVVGLHTPDLRAYSVWSGTENCREH

SEQ ID NO: 977537 - protein, 120 aa, Homo sapiens
SITQRVHLSSRLRRDADARSYDITRAVNEKGWAYGITIPPDHKPKSWVAAEKMYHTHRRRRLVRKRKKDLTQTASSTARPMEDSQDQAGWAYAPLIGWKFHWKQRSSDTFRRNRWRRKMA

SEQ ID NO: 977538 - protein, 128 aa, Homo sapiens
MPRETFLSSNRAVHAYSDSLQATYSHQESLCSCLRSKLDCKSYRLRDQCISEHIQFPKILVAPSILISSPVMSKGTLSSAVRTTRKTTFKREHSLRHTTHDKYLGKDQLALPLAVPTPIFTIKTTIDI

SEQ ID NO: 977539 - protein, 120 aa, Homo sapiens
MSTELVQAGMHRNGEYTSTRLHLYIIVDVSTVLTVSDESLSRKACTAVVNTRRPGSMHAYSGTEGSIYSRPGSSLTIYGGQHGAHVSTELVQGGMHRSGEYTSTRIHVKRYRDMSGDLKY

SEQ ID NO: 977540 - protein, 107 aa, Homo sapiens
MSVHVGTQKQHWHDQCGSWLGEENWVCQQQGISEVIKSWVLIFGDEVPMDRAPYLKVHHLHCKYTFSSLRVSREGRGSQSSDKVLEHQGRAHSYKTPHQHASPYMAR

SEQ ID NO: 977541 - protein, 86 aa, Homo sapiens
VVITDNTDGGQLHKVYWPGYIPAEIYTFFIDILLDTIRHEIAGCIEKAYEKILFTEATRILFFNTPKKMTDYAKKRGWVLGPNNYY

SEQ ID NO: 977542 - protein, 66 aa, Homo sapiens
  misc_feature (54)..(54): Xaa can be any naturally occurring amino acid
MSACHVCWTLTNISVSVAESCWTQWITMPVLQLDIVVVGTSAWNSVDALIDAEXKIKTWPKKLLLK

SEQ ID NO: 977543 - protein, 118 aa, Homo sapiens
  misc_feature (107)..(107): Xaa can be any naturally occurring amino acid
FFSLDAFLLTNIMIPEGYSHYYTKDLAQQITLCDSVAGLPWVFHEQCNESNKGIQVVIALGSDHGGIGSRIVLLLSLSSVTDFNTHFSTQTTEPCYEIIGLQYSLLXHLSNICRESFG

SEQ ID NO: 977544 - protein, 37 aa, Homo sapiens
  misc_feature (33)..(33): Xaa can be any naturally occurring amino acid
NGSELLSRKVNELRKQHFATFIALQEIQQTALXLAIV

SEQ ID NO: 977545 - protein, 55 aa, Homo sapiens
MYKGPTITAQHMLIFQEDEICRNKSAELQAFGLGMNPFIFPYRISAHQVTKVNHY

SEQ ID NO: 977546 - protein, 105 aa, Homo sapiens
TLVCSNLAYTAEAHDVCVLNRISIHSDPFCKAIEGLNARNTCSALIPSHFLLAPVSAPTGTKHSNSWLKPRENQTDNTLPLQTKLSPKWWLGNNGDRTTKILRDQ

SEQ ID NO: 977547 - protein, 101 aa, Homo sapiens
GSHAAILIHGRCGIPYRADSICMAERGPTSLRLISQLAFKFLMESRSLSKDWPVRLSYCEPRLSSSKPQQTVSVDHCGALTQSAETQYLSSSSRNFRASSS

SEQ ID NO: 977548 - protein, 141 aa, Homo sapiens
GNTQLPITSPIIVHTMHMTSNQAMINIKAHMMSSHIMIRSMIPIVNTSSPIIHKGQSTAIRHKMTVVMWVGMGQIIEDMAGHREEVEGVRDDDKDGRGPITGSSGGDRGGFKNFGGHRDYGPRTDADSESDNSDNNTIFVQ

SEQ ID NO: 977549 - protein, 140 aa, Homo sapiens
LCGHTRATGQQNKRDINNDEGRKSKEDKNVWFHEAEKYKADDEKQSGTRCHPRSHFSPSAFNMKATVEDEKLQGKINDKDKQKILDKCNEIINWLDKNQTAEKEEFEHQQKELEKVCQPIITKLYQSAGGMPGGMPGGRR

SEQ ID NO: 977550 - protein, 36 aa, Homo sapiens; identical to SEQ ID NO: 787339

SEQ ID NO: 977551 - protein, 107 aa, Homo sapiens
RRAVLGPGSGNGSRPGMRKSWALNQMWGFERRRNRQGYKFPCGLGERGHHYEGAHQETRDDLVLRVSPAGPLHQPLRPVPDTRVCIASISRGGPRTRASQAPAVLGQ

SEQ ID NO: 977552 - protein, 95 aa, Homo sapiens
MMAWSEPLELVPLHRYWPGSASYVQVLNVCSDRPCEELTKNLLSEPFMRALSSESVILYQAQSVTGGTDSDLQTSMAVSPSLMCSDDFTAFTLGG

SEQ ID NO: 977553 - protein, 71 aa, Homo sapiens
VRAIIIDLNFGMHWFHKEILFLCCAHDFSIEGFFISTYHSLLDFVVNSYHTCTRGAEKEEEKKVIDKWNLS

SEQ ID NO: 977554 - protein, 52 aa, Homo sapiens
GSSLTIFGGQHGYSRVDGTCTREGMHRNGEYTSTRLHVSVLGPSARISRVEG

SEQ ID NO: 977555 - protein, 51 aa, Homo sapiens
PDKIIHFLYRTNFRQPCWLQPFGLAFVLGVVIVTLNIHSRKQTHRCSVGNE

SEQ ID NO: 977556 - protein, 55 aa, Homo sapiens
MPEDFSKLSSVLHKALQNTRKSCVSSAWAWASEGMKSTADLHQKLGKAIEMVANP

SEQ ID NO: 977557 - protein, 66 aa, Homo sapiens
GLKGYRGDEGHRMSYVYRVRSTARVGDQLFIKVNLLFNTENKLDDRFPNGTAVAGLWESVPRGLFG

SEQ ID NO: 977558 - protein, 168 aa, Homo sapiens
PGQVDSRTINSPFGSPIWMYNDEPVHQAKYIFLLKVWRPISSMTFPCLLPLNRLHISYHHPHPLLFQISLTPSVLLLCSSTLSCIVNRAINGDLNPLELRARLSNSFRRSFTFIVYWIKLRPMGRCRNIFSFTIILLFFILFSISLLAFTLKLLDHMLLVSSGEGFPL

SEQ ID NO: 977559 - protein, 37 aa, Homo sapiens
WVNSDSCDSTGLRLGDFKPGKKIPISEGGHGSSVEMM

SEQ ID NO: 977560 - protein, 97 aa, Homo sapiens
PAPSYISAHARLHNAFSHSCEYRFLSGIHICNMINVKVLGSGLECSRRLVEDSTDKHKFCSPSADPDLSAGGRIRYKNFDGITFITWLVRLTICHAA

SEQ ID NO: 977561 - protein, 141 aa, Homo sapiens
QRTPALTHQLQLLLAGCQPPPLSLGLCTQFCLCSQLLCQAGALLFQLCHIVPWMLPTLQRALSLLELLALSCSSVGPVRCMHLNPACVTLHAVASPLVNEPPPLPCVSSLVVVPRSSCCITLMGALLLLALLEGPASQVSL

SEQ ID NO: 977562 - protein, 36 aa, Homo sapiens
LLYWISLYDRYYSIVLVEEKFDHIISNTENQEKKKI

SEQ ID NO: 977563 - protein, 55 aa, Homo sapiens
GSAGLLSKPGITTGYALLLLFISLRKIFFRNACAHSMQSLQGSAGIGHISTFNQH

SEQ ID NO: 977564 - protein, 34 aa, Homo sapiens
ALICQVQITGTDQTYPLSQALQPGTSVSPTVLIE

SEQ ID NO: 977565 - protein, 252 aa, Homo sapiens
APGRDWVLDNPPLPGSNAPSTPDRVDYSLAGALNAGYKETRASERDRDDGDSMTGLTATSRRLRFTGTAKQWRWLRETEPAAGQGDPPRLADVIPGMSCERQRLQARINVTDNRRPEWRLRGTNLATGHWTTDEARTPPTDEDQTMSAGNAREQTNGMPKYDQDTPDRKPHLDTRSWTLDEDRTRQNGQRREGQELTGYVGQGKESKRKRRDRKREKQPRQTAHGHRTRQGTQRWQARTVDQGPEAYKRKTR

SEQ ID NO: 977566 - protein, 167 aa, Homo sapiens
MAEARSGGKLIFWITMKRKSPRLAREREHQLHAVRRDDQGILRCPSIGVWIPGNLTAGSRERPCRAISGTSEHSEQSLHEVRAMRCIPQGHPGHGLSLCQANVRGWARQQVYRSLVHPTMQIRALSTGPVCRIHGSVLTTRVEHEPYYQISKRKYEQQFANVHCCSR

SEQ ID NO: 977567 - protein, 126 aa, Homo sapiens
TPSYLVSCPHAAPGSASCFRGGVSDSRCSPIVNLHQSGRMAALGLTQLLTVDVLLEVQSSFMVVLPVLSIHPRERSHPEVASWPHLGLPQACAPGPADHAALPSSVRSSLRAVLSAASLEFSRASR

SEQ ID NO: 977568 - protein, 74 aa, Homo sapiens
HASADGRGSGSTSNSSSLAVFTTSVVTSSTEIFNPSVIHEGGINFFPIPVNADILTFFHESLMFLISSRMVIIF

SEQ ID NO: 977569 - protein, 39 aa, Homo sapiens
MQQDAKPAADPPDYYPGRPNTKRGTDTHNYPTDGKKHAE

SEQ ID NO: 977570 - protein, 211 aa, Homo sapiens
MPQEKDFQIGHCFNKIKLTPNADNNVSYPPRGISGREATVHYQRMTRTEERQKTGAKTHLRIRTQEKKSKHRHTHKQNTNNSKTQNKNTNQTKHYHNGSHPSMVAAPPRTPHPPPPSLSHHTSASTSRRRTDSYPRRHRASACITQTPWQSAKNSTQKIGNNRYRRSHQPGGVAIKHTRPIPTRTLMQLTLLNTTSMSCLKSRSCSCRLNE

SEQ ID NO: 977571 - protein, 38 aa, Homo sapiens
SYFCRGKGGGRYKRSSRWEQSICGFLAALSEQGGSEHK

SEQ ID NO: 977572 - protein, 193 aa, Homo sapiens
PGRVPKLLSKHQKHQAIEAEHDASAARTPMRLSTWCESLIERGACAGSEDAVNARLAALSDQCAVLGAKVSGKEPETERKPTSSRTSTQGSRTLTSWLSEVEALLASEDYGKDLASVNNLLKKHQLLEADISAHEDRLKDLNSQADSLMTSSAFDTSQVKDKRDTINGRFQKIKSMADSRGDKLNEPIASPVL

SEQ ID NO: 977573 - protein, 363 aa, Homo sapiens
RRLAAAAAPQMSWLSAPCCWLQPADAPIPDDHLRWCRSAPVWLSCNCVCAVPVDFMLQPLTIITWSMLGMQWHALAATVPRRPDPGHQLVMMHMMLMTHLLRHKNLHQWCCHDHLTLSVSSAWVCRMLAQLPHDDSNGSGNTVIHYDPEIQGRHAQQPCMCGPQCTGTGAQKMRMTKAWDLHMDKPTSLSSTPHNGSSEATLAAQIEHPAIDDIQTTQTAEPSQRDSPRDPGLQKSEPGASKGEQDAAGRQDKKTVDREKHKSRIQGITTQIHMQGNIVTKARAKDSENSSPAAISRHPGTPTKPTGKASTRQSTHERARHEHEHSPQKTAARSNQRRIDDGPQLLSVARETTVIPTYPDRNH

SEQ ID NO: 977574 - protein, 322 aa, Homo sapiens
MTPPLSEAKSAAYLSERADRRGPGDESRDSLLEYHSPAHCRPLTDAPCTPRTLSCARNYATYQNMPYQYPAHDPGAEDVTLSDTRSTRIDGNLATGRILCCTMSPHGTDICQTVLYVHSRPAEPPRKNTDRTHNTPARQLTRLHRTDDEHPRQIQSGVEHTYITTDDPNTIPGPATPERAQHHNHNPHTTTSTNKTRDDRRAKQRNKATAPQQHTPDRRTTTEPQNPNTPQEKSTIREQTKDTSHRTPQRHQEDKDTQHNRTHTHQQHTTPKKPPNHHERHPHPHPTQTPTTENNWTPQDHKLNQGTLIKCTTIITSNANKV

SEQ ID NO: 977575 - protein, 168 aa, Homo sapiens
MGSHYYLAQPGLELRELNVILRALASQTGGLQVMSSSPGPQITWIMDQRDRCAMYSKLKPPTVPNSGPVFYHILPLLVRARVREAQGKMKGLEKVNPTADLKTKIGEGNTQLRGQRGPRGRANMKEGKCTTDIMPTSGHNPSKGENQLGTLNGESTTDRGGKEQRRHK

SEQ ID NO: 977576 - protein, 257 aa, Homo sapiens
MLRVKDPKKSLDCYTRVLGMTLNPQMSFSHYEVYIYFLAYEDKNDIPKEQRCTKKPGRSPENATLELTHNWGTEDDATQSYHNGNSDPRRIPVIGDIAVPACIQSLVKGLKNWESNLRRTLMMVTLKGLAFITDPDATRIAHSESKQNWTLNVRAEHILLRDPADRATTVFQIFSVPAASWADLITARIHIILAIPYLISAPTTTCSHLVKRSKKAEHRRIRRTELHYSAHHQKTSTDLTNIERHPTNSYRKYHTTQ

SEQ ID NO: 977577 - protein, 253 aa, Homo sapiens
MDSRERAENSIQTGTKWTLNDEKHIQEQLQKNGGTEKKQSKKSTSPQEQTESKEAKATINEGHKHGTTNQRHCKPTERRKKTQKYTNQHTQNKNNKAKNKETRKSQKKKPNKDSKRARHNRHPTTNKGHTAERKRTKDSTKTASRTRQSKTDHEIRRHTSKNVTTWGTSDRNRKKNMSWIELVYSNYTSYETDQTTSQQVHTWIGLDKTKVSTKAARHRHNKRLRSINKNHKKHEIYKENHHSMATHIKRTSR

SEQ ID NO: 977578 - protein, 299 aa, Homo sapiens
HASGETVTNLVFPLGSVLGEAQEPALTPERKTLKASGPNPWRGLGVYESRLTDFPGMLLEPSAKPSASWQSSITNWISEYGCKLDMGSEVSHSHSIYLKKARILHSHVDRRASGMPGMIYKDKKLCNREHKLTAHRPNAARRHMAYLANTAFKKCFEPRLGEVAQACDPQYFGRPRQVDHLRSGVHDQPGSMTKPVSTKIQNWPGVVGPCLQSSYPSCLRGLRQDDSLTLGGRRLQRAEINIELKLGDNERTRPLLVYTIHNTHTQKGGVKTHEGPFQSHFYKGPIGIKKQRANGAMHR

SEQ ID NO: 977579 - protein, 80 aa, Homo sapiens
TEQLWPGVSRGVVVTHDNHQSILPETHGRKQDVYRSTGNQSECLIQFKDQLDNMMRLPTILCEPGFITIDVGDVCAHLRS

SEQ ID NO: 977580 - protein, 112 aa, Homo sapiens
MTKQRHSRYTPPGVKTHTCGPILCSESQVNTQGTDRRTPAHRSVLSMPQSIISPSVQSLQCVSPITTLRTSHHPLAHPQHRLHTSLGHPITTSSPTHETDILPHHIPQLPQR

SEQ ID NO: 977581 - protein, 217 aa, Homo sapiens
MRRISSTNSKRMLAHGMRYTTTQPVPTGGSDHSTGKCTRVLQTKRDVTGPTEAQHHSNGNHKKRGPLHQQPRKHRPSPEPQVAAKAETTAAIKPWRPRPLHSRSQWKHMSHFTQQSSGGSDHVKSTAMEAQTHCIMKAYSGGHKSTKPPDDDGLHLTNSTGKGTGKGPSTTRQPMCRKSALVHGNLLPKIRSRTTLGGKRTGHWSDLRSSPPRGIKS

SEQ ID NO: 977582 - protein, 93 aa, Homo sapiens
MGVDEVSDLLAVGFHGGYRSREIPRGLRRDGERPEILTQAKERGLSNTVGTTGQALPPRGNIPHKHRDTGLFQKRYSPIPYIPKKPKAKWTGV

SEQ ID NO: 977583 - protein, 332 aa, Homo sapiens
MCSVPLKCLHRVSLCPLWHSIMSSYYEPQTCVSSMGVLNDFRGTLVAPSHRHAVVCCGKASHIVPRFLRLWTLGWCSDYAELWIGRMCLVGVPSSSFFVASGLALALCLVRCIAEHVFGVADPPRAYAMCRQIIRVNWVLCCSVVPLDHSLHEAAGWEAGPLRSFLVWEMGTEKWEVRCARTGGASVAAGVYLALRFYDAVSLILRLTALVCMGAICSGGSQDTSALMEDVLFCDIMASNRVLTLGCTVGRIACARRGASPGAPTYRSGMGIPLWGAGARGASPPSGGTKSRASGGLEPQLPPISDPTNGGIPRQWASGDVYPPCVCTEGVT

SEQ ID NO: 977584 - protein, 219 aa, Homo sapiens
MEPGPPPPCVQLYAVSVWGPWLRSCDDAFALCTRPTWKPEDVIESRFWGMLRGKPGSGRLGDLTDLPTYEHIQTGLSSKDGRLPRTVPALPVEPLPVPDRPRELQLEPVPVRVVWTRIESKKAVWLYKTVHTIVCHRTTAVCILSELNVPISGVSIEPDTQARKQVKCPALECSVHEEAVVLPSRLWDMGAEVLEEPGLEAEGDHKAPEPGWYRTLKRK

SEQ ID NO: 977585 - protein, 571 aa, Homo sapiens
  misc_feature (157)..(157): Xaa can be any naturally occurring amino acid
  misc_feature (272)..(272): Xaa can be any naturally occurring amino acid
MRLKWRMTPVQGGGPGGPELATCGWGIRGGFPADGFGEVAVSGPVVCGPDGPGGLGPMAGWTLRMVMACGFPDVRIAPVTQSSEPSIESNRTIRMNQKISFVIGSIYSPFFRDAHNYIGYSMDDFNLEVCPFLIGECGLCIRSIVRVDEVCPRDSEXEFAKSSQVKTASETRLVSPSALSTASQGVFRLGYFVGPDYNSWGRTYQKLCAKLVLEVLGVARLKMCACQRDGVCALSRAKFPGLGAQYIPFGGQMHLLDIQGHRACIACEWRRXNDMWVGKRNGNRGMNGASDQHVVRTIWPKGGLGPMVAQAVVGGHPFVAFGLIGPPIRPEGIRAKVGVHHLGKLLVSFRMAKTPFGLALTCENWRLDVQIEDCGASGVITNSLCHFAIREAIRKSSVGMGLCGGLDQYPICETSTIYLLKEEVPQHHFFENDSPIMSSKGNRYTTSLKHFGNGPRKTTLCEYGPNECLFPTNRESPEDRGRNYLGEQYPRARKKHPDETRVSSSGDRTLREVPHEEWGLHQKEEEEIQRTNNQQNGKLEELRITNERRSKNEEVAHMMTTERGATTDHNR

SEQ ID NO: 977586 - protein, 345 aa, Homo sapiens
MVEADLRGVLVRSSWLNRYCMGRKVVVVGCDGINICGNFYKKASKKYLGLSLRQADEQLTLPEVALPYYPGAPRPSSSGVILLARYAAPINRASEDRTVWNVLKVLDGSQHPTTMKKRNGGSCLPSKVVRLMPSKKVCLSGRAWLTRLAGSTRQGQTSPGGEEERGKGTIHYRKKKQLMRLRKTGREERGARELTRITQRSSRPRDSWCEPSKDLCKFLLIADVMVVNDWCAFLCARTTTSQRSCQWVEEGASNAELKAKLTTNGNIQMRGCPSIECVPESTSQVGNEDMDRTVGQLKNSGRSHDARRRAKLIEMRENSMHTGTHEELRANTSVETTSVGRDEYT

SEQ ID NO: 977587 - protein, 58 aa, Homo sapiens
  misc_feature (52)..(52): Xaa can be any naturally occurring amino acid
  misc_feature (54)..(54): Xaa can be any naturally occurring amino acid
PESMPYLAYTLGCETTYIVGGEQNWIPLSTYSHEVDYDGQLGYTDSSGDVTXLXQHTW

SEQ ID NO: 977588 - protein, 135 aa, Homo sapiens
QQVPYATKGIQWVGYDDQESVKKQGCMYLKDRQLAGAMVWALDLDDFQGSFCGLGICASLSPMPIKDAIAWNVALLFCNYMRVGAKVVPPSRLWLHAGSGVLIYLLLLDGLQAVVPHSPSLGAYCDEVHYKPLSI

SEQ ID NO: 977589 - protein, 102 aa, Homo sapiens
TNYNMYIFSKSRASSSTGMVSLPPGLLILMDLLARDVREGTDKHVHPSLYIGSTASWTSIPLTGTLSHTRAVSTCVLPLLSPFGAIAETPPAFSMTLVILDQ

SEQ ID NO: 977590 - protein, 581 aa, Homo sapiens
KKKKNTHKHQNTPHTHHKQPTQETPITSPAHHNYPPPLPHASPYTTAHLYHTTPTYLSYSLLHHAAPYSHAPTLITTPPYTTLPLFSTPPPPTAPHHPPTTPPPHTLTPHLPHPTTYQTTTTPTTPHTPSTPHTIISSPINPLTPLLSSPTHPPHPPHPPPSPPTNHPPTTPSPTPLPTSTPPSQLLHPTPTPPNYSPSPPSHTPPPPHSYPYSSISPPTSHTSPPNARERPAPWTTHRPHRRARPHTDPPDHGPHQHTSEPVRTTRAIHTHQPSHNSATSAPPPARHRAPAPHPRHHRLPRPCSCGAPAHPTAMTRPHKPPHAPLPATLPHRAPTPQPPPPPSGEPPPRHLLPSHHHHPPTHPPSPRNTTAPPTTARPLPPPPTPHPHTPPLSPQPPPTPSPPPPIHTTPPTTPPSPYPLLLPRRPHPPPHPPPLTTLHHSPLTLTSPPHAPLPHSLSPHHHTTHDAPPDTLCTPSTPFTTHRQPTHPHKPAHRPPNQEPAQPPPHPHHTPATPNSPQHHPLHRHSPPLAARTPPYSLEPPTRPPDNARPHTPHHTHQYRPHLSTTHVPEQPRALRQPAA

SEQ ID NO: 977591 - protein, 150 aa, Homo sapiens
MILFTELRTTRYHDPRTDDVEICSCDNYRDESLAAHGSCPLEHIDAKHDKDNSCCITQRSHTPGRKKLPKIAHDARETQGSRNENQTWRSQLERRSIIQAFGAYGWRTTCLNPRRMITLLTMNYHLRKDPMARAQSEEKILNPTHQPHTV

SEQ ID NO: 977592 - protein, 197 aa, Homo sapiens
GRVGRPTRPQQKVGSRTKESSVEVEKNLNVWVLDKVPDAAGLSQTAQQQDTVAQPRAESSQHEPQNSRHAQRAPARRAHTEYRQTTRKHQDNNTRKREKKQSRKHNQSPPPLENDKRPTTHTPRQTKRKNKKENTNQEDRTEENDRANTKQRPETNNTAHQNTGTQAADQNQTAREKDTPETEDNRATNNDRQQGTT

SEQ ID NO: 977593 - protein, 297 aa, Homo sapiens
MCWTTIDASMWLVVAEEPDALCAIALEHATLPSTVIGPGVNRPEDGAWAPIYPIDTNLTCVLTITKPGLTFVPWTVIVTNADVDLETNWKWLASTFGTCHDTLGYMAATPKVTAAQLRSNTTADRHTEKEFAQASKATKKPRREISQDPLGETPFEVDHVGTTRVVVPWITLCPKPLAGNGRYLARQRVEWRTTQELVETCDSNSSRSQCRMVRNDQQKGQATKDRCEYMSRETSGDSRRPPETIGESPGKISDWALIHEDTVPSRKGQDMGCIQFSQVNAHKNSDNDGQRDTDRYS

SEQ ID NO: 977594 - protein, 130 aa, Homo sapiens
MPSLVLDRGAALFLYYFFFGVNKVLWKVPSPPKRGAHPHINNPSLETNPSWQINPPARWKVRHRRVPIRKRRRSNTPDNSSRHKTSSAGQATHTNQGQSNNTQTERMASSWTVQAPGKDTDQTESNKEWE

SEQ ID NO: 977595 - protein, 280 aa, Homo sapiens
GTRWAQLFCESFSKHLVNELNGVLHSFFFLSILLSALTQTPHTSLVPLTERCSLHFAGATLNTLCALSHRALLKCSSSSPSSTHHAAWRSGGNVVVVTTHYTICAHTSVKHHATPSTVTVELSYYLLSSYCAVRVAIYNRQFTTPSVYTLLWLKTAPVDSEDGLNVCDPLDGRCVWQQRAAHNSYTKIVPTSVSLCDHSVSSPRKHRVCGQESVYNVRLLYVRRRKSVYYSAVFYTNITHLLRVDSLLIYLWRGIQYLLFSSKGPQGLQIFLKHICVLVL

SEQ ID NO: 977596 - protein, 158 aa, Homo sapiens
MTTVSTSQVRQNYHQDITRPAINRQINLELYAIPTFTSSMSYITLTAHDSEIHSTELSHNTYFFTNLMRRREPIADTHLTDLLPTPNRPGDPHSTLQAYPRTPYLIMHLAPQPHMTSHCTHALQICPKQTMNYNQPPAPPTNLATCTQHTPQTIYTNN

SEQ ID NO: 977597 - protein, 170 aa, Homo sapiens
SKRVLNGTPIWARQYPPPCPLIQAQVPPGELSSEKAISPRTRSNERWGKKGKGDTPGKRGGKMEETPGEKRRGPEKLGQRRWRLVLAHAPISCPFYRGNYPSGHPTNHQNQVLQLCGGYMPGLSIGWYCHHYRGAQWIDVGGLGYPILDGDQEKKPKSQQDLVSKGETAL

SEQ ID NO: 977598 - protein, 255 aa, Homo sapiens
MPSSEDQAHREREKQEDLEHIYTRSPEIGCDTGEHERARQTQASESRYKKPMSTCCATHTGTLEDVILIPTGKTHYLIGEAYYRGYRKQGPGRQHPLNTHKKGETLTEARREWNHLRPLPVENEEHGLGHPGKTKAPNRRNTEGTTNGAITNNGQRIGQAYTITKSKTTTPHHKDKERDRGSTKENTERPVETYDPGERTERPSRTGPRGSKRPPKEGDRHRTVTHRSDAKQQHKTAQEGTNAADTPTGDKATQI

SEQ ID NO: 977599 - protein, 104 aa, Homo sapiens
KNTFDPQKKGFILGAGKKKGGKLGGGGEEMAMWWHGRRVNGLSAWSKTQSRGPTRYGNYKPWGGPSVCGIMVKRQQETPLSGRTRVCGWGEIARWTHVVTLTTQ

SEQ ID NO: 977600 - protein, 333 aa, Homo sapiens
MAFRNCLPNEEISRLYTTTRKAPDGCGPLRATTTPSHDAIKLFTQRAAVKPATSLPCYASTSPPRPVAAFTMRSSTMEPPRTANTQSHVVINQIRSCHDIVQDQLQSTKGVVARRALLNRGVSSEHSKGSTMNRDGLTYAAWHTTNYYICPVHALIRNAFTSVNTSHVTEITGGSTYLIVVQRFNGLRAREHLLKKCLPFSEGRRAIMMDEIFQTGRKNRARPRVRTMAERGRSGTRSRARDIGVRQERTLDADTRVAENREALIMVREPRHVTELLGPMRTHRPEAKEHVGCQEHKTRGRAQESGNDPLRRKHENSRKAAAPQSKVQQRTDQ

SEQ ID NO: 977601 - protein, 221 aa, Homo sapiens
ALPHIPIDICCRSHPCDGQTAQVQSHPPQPPCPGHAGFMPPMIWSIVALYIDELPTTDGDIFLQPCDEQDVCDGSHALDTRAHRIPQEVKCPLLSAQATTQNPVSLYYLVHSQTSDHRIDELQYRNLTTGITSPERQPLPSTHKYCPYQCYTRLPLKSYPGPHIEHLRCLCMAHMHRNQQNAIETVHNAIRIRNQLYILIATSTPNWYQTDLDTQRHHSLL

SEQ ID NO: 977602 - protein, 102 aa, Homo sapiens
HASLVLECSVSSVYKQQPEVTAYSVYVVSAELAPLRLDFPDTVTQVQERQRGLGPHGGPGMPRHHPSPDTVLLPPSWIPDPQHSWRETRWAPYPEPYDRSIK

SEQ ID NO: 977603 - protein, 106 aa, Homo sapiens
MRDHANTFRDAIVGGKWLPLITPHSHRDSRSDIALRRELWGGLNKGIWSWLPLCGHPSWLCATCATCPPPRFVLKRYPDDSVNNMWLVLVATPRGRRVIIPIIVIG

SEQ ID NO: 977604 - protein, 179 aa, Homo sapiens
  misc_feature (122)..(122): Xaa can be any naturally occurring amino acid
  misc_feature (132)..(132): Xaa can be any naturally occurring amino acid
ATESQTPNAEQGAQAKIASDQTNCRCPCRTHVCCCMSRPMADDYLAQLSLEPNNQDPGHKITKVHVDLNWGLRAVGMYLTRRDSHCVRSDGSGLSEDDVLPILYIDKGLSIDCVDYYLLGYXEPRTIDPHQXDSEHADGTVTPHDILTELFILARVKMILQQTSYQLMVATHGSTMINS

SEQ ID NO: 977605 - protein, 165 aa, Homo sapiens
YASHSILEARRGLIITSKALAPFLVLIPMRHNYNKCPSWRTTKRPKIAHCILYTSSHSRLLGSESAPIVLQCPQEKHSRMGNALASNGQAKGALLYTSSPRVLACASLSILPMQRRQIYEAQHQQIGISNPCSSRTCKAAYVPLTSVFDDLRSQALANLRALAPH

SEQ ID NO: 977606 - protein, 83 aa, Homo sapiens
MRKGAPHPLRESQEKGEPAGHVMEQPGEHPWGTDKDKHTSTGGRKHRRATSMRHGTSDNRCGGAPLTSTPRRHTIKQKRPEEK

SEQ ID NO: 977607 - protein, 249 aa, Homo sapiens
TFYNELRVAPEEQPVLLSRGPPESPKGNREKMTQIMFETFETPQPCTLLSSAVLSLYASWPYHLADQCMDSGDGVDRNDMCPSTRGMPIPHAHPCGLDHGVAVDLYLSYSLYEVYLTVAAGAYKLQQLRSPDAGKFWLQLHHFMGMHILVTHRSVPLGTFLRQRTHWASTGPCRLPGVTSPWHAHDDYQTVLSLYRARVHSNSNLCQNRTTAVSQARHSWRRQLPLPTTIYRFHWRHLVRSLFEAIHRI

SEQ ID NO: 977608 - protein, 115 aa, Homo sapiens
MVKRNTTALLTGSFVRALRRPAWSAPRVACGLSGRSGSRQRVLPGRRLEAFTTMLPWESLSAWVRPLDVFVSPASGRHGSVLAVHPLVWMRERACPWDLSLCRLARGAWLCSTSL

SEQ ID NO: 977609 - protein, 244 aa, Homo sapiens
  misc_feature (126)..(126): Xaa can be any naturally occurring amino acid
TEVEPEFGTKVEAQFDEPSGSLSIDDPSWNPEFEGTRRSECDKRDGGYANVARGYSLFQQLVSDSYYKLNRLADCLAGIHAVLTEVPRGPNSRRTGSGYIALKACLHHQVHRFSLISTVDMGTPGXLCTQLKEAMGGSGLVSPIFDGGNGQYSLNRVETPYRRHKNVLGVRTGYTLAAIGLPMFIRLNAAVVDMAWLEIVVEDDNARDNEGGKAAQAPSGVSTYTSIHTRGQKYISQVGGPKGK

SEQ ID NO: 977610 - protein, 268 aa, Homo sapiens
LYYYRIFTVDDNLLPVGKTVVILIETPDGFLYKRDISVLPTTNTDLALSWNIPELVNMGQWKIRAFYEHAPKQIFSAELRRRNTCCQFEVRVEPTETFLLHQMTQSGLEVSIIAKFLYGKHVDGTAYVIEGVQDGRIRRFLMAHSLTRDSDRGWVGDSSADPETVMMGRGKAYNANALDGEDPCMSPTHDTSMHSGRDNGKGKSAQRDPDVTNPEYRYHLTRTSQYSFKPSQAISTMGREPPRRISAATGTETQRETNARRTQKRRGT

SEQ ID NO: 977611 - protein, 79 aa, Homo sapiens
SEIGVYPGLTCAPQNVMPTYERVVKMAEKETPTPYYLPEEILPLIINAIPAIRLVNVTECCSSGVFKVCSDIKYVVLLL

SEQ ID NO: 977612 - protein, 329 aa, Homo sapiens
EEFVYEDMEALCSVLRTLATDSNKYRAKVPGKLKEQCNGFTGSDPRFTLSLLFELARDLRRIVDDMEALCQCPVHSGALTRNKYRDQRLIVGTSALLSASVLHSVEGGDVPKKEYVRLRLGECSSMERWARTGSKRPLKEGAEVRGMHTTSLIEQGVYYRDIFAPGSCAVAGCHCPEGLQRSTLEKRLYEAAASETGPRLDSRVQKERGTTFGERQGTRLRARLCYWPRGAVLNNKNDTAENERVAQPSEGHSTSFESAKTITRHEEPMHGGPDTGPDLDWRPEALTNVKAGRGPQVGLKGTRTSGAQNPAEANPRGIELLYNKTANTR

SEQ ID NO: 977613 - protein, 195 aa, Homo sapiens
EAAPCARRAVPPALPARSLARPPLPRCLTCHACCLRCGLPLRCALPAACLLLPAAAGCCCCYWALMWLAGGCGAARCECADSVLPCPWTPRSRLWQAVGAPQAVLVAGRRRGGGMGPEGGGGDAPSPGTCRIAAGNGFVSGGTPREARRSLAGLRRVVSRLCVLEHVCMSTFMQRSVIAAPRRALGRERQEGGAR

SEQ ID NO: 977614 - protein, 215 aa, Homo sapiens
  misc_feature (212)..(212): Xaa can be any naturally occurring amino acid
HVVVRIMVIVAGISSLADLQTGAMRCSMFLRAQDLTPVRGYVWCMLLDQVLCYVERSQAERRARTCWGHARARLLLLVVVVGSNLPSPTPWYGGLGLCANLRFSRGVHMMLRFLRVLQDLLVSYPDSAVGTCVVAGSSTSLACEKNVEGLVCAHGRTSFLRRIACIGRMFNPYNKGVVGRNGVSQEVGIIAEDVDRKLKPSSCPVDSVQPWXWVP

SEQ ID NO: 977615 - protein, 304 aa, Homo sapiens
NKGAIKSRELSVPQSRALRGTPVPPQLKKHKKTNTSRTQKTGQRRERREHRNRHSDRKKKSRRRKKRTQMIQRRHAHTHPKTSTTTDTQTIQTHNSKKNTDRKKKDDITQNHKRGHTRRIKKSANNPKKTKQQQKEANKQQAERTKSKEHHNTHKKNTQHKQDDTAEKENRETTKKTKTKQKKKKEKKQTKTKNKKKMTKNKTPKQNTNKTTKNTTKHNKQKNEKKKQRTEQRTHRTKRRRRPEKDKDKKEEKETEDQQRAQQRDEKGKKQRNKRRAKQQNKKTQKQQKQTNNQNKNKATKNKK

SEQ ID NO: 977616 - protein, 114 aa, Homo sapiens
  misc_feature (12)..(12): Xaa can be any naturally occurring amino acid
MECRRWGVNFAXSSALSIRLPTFHLVHPTAVVPLALLGKAPRVLGATRGSLPLEGPPVQEGSSSQGHKGARSGPQVPVPFTEASQKKGLQRCALQVKNRQLRLEKLTSPGRKET

SEQ ID NO: 977617 - protein, 624 aa, Homo sapiens
  misc_feature (46)..(46): Xaa can be any naturally occurring amino acid
  misc_feature (48)..(48): Xaa can be any naturally occurring amino acid
  misc_feature (65)..(66): Xaa can be any naturally occurring amino acid
  misc_feature (73)..(73): Xaa can be any naturally occurring amino acid
KPSRLQRQREPCMQALQAHTEMADARNWLEALVAGSVHPPPCSREXLXASATVHATDIFLAWACXXNVPCTGXTAVRGQRVPASKTVQQGVAVASETPRASKRRPVPPSVTGGIPVRKAVNTRFTGVGSAYTGGGEDPYTFREARKRQHGIQRGDFNGHFHGRLLAEGGPRRNYAVNFHTSHITGSGLWSETLTPIRRTKGAPKVRHDGRTPNLRTRGVDTPFYMPPVRKCVDPERKDNIRSGGEVPYPYDVSTPADWGLTPLYGEHLLEENMGGNKTPEGNTGPPILSPFNADHYGWRHFQPESLDELAVSALCIPKLSPPLTTRGHQRFSIMCRSTYLRFACEEHEANRPCIGPPPLVVLLCKGPLYWATPVASLLGRTKKVPLKGVKSSKKGRPTSEYPPWEGRYNIPPSVKRRNRQARLQALFPYTSIVSSQGPFSLPRRVSVERLETTDVEAPLRRPPQGSLGGEPHTLWRTYGHARAKSGKSGPTIPTEAPCAHWAREEYLKGELMALDGPPSSGAPIARHLKSPRTSAPTKNNCRSTHGDPPVSAHLPPPLPSRTTIRGAPAPSATRLPCPRAKTTPARARRPGPPTHPAGSTRQRHTTPCQPPRATPHSPHNTAPP

SEQ ID NO: 977618 - protein, 69 aa, Homo sapiens
GSGGGGSSLNRPPSHLPSQYPSNESPEPPEAAVSSLGTAAPALEAKAPDLSSPRAENTKCLFEGVCLET

SEQ ID NO: 977619 - protein, 256 aa, Homo sapiens
MTFKVKRDGGFTIGGPGMGPESLWTLGDLAWPGALPKVAGRLQGGGGHHGPGAQDGSFTFGAFGGERVQRGGSSSPKRGEGLGTRSSELFKTRSGGEYFPCMGHTTCTRGDLPGTGPPHKFQGDPKTSPGVGAKTLSPIRGGNGQLPLEQRKPTGGAWRGANNYFLVNIKVPRANKGRRLHAGRQKKGGGAGTEYTKKRNKDGGEDGSQKTNTTRLIKKEGGGRPPTGRTSDETIRKKRGTDAPHPDKSPSSPVHV

SEQ ID NO: 977620 - protein, 265 aa, Homo sapiens
  misc_feature (2)..(2): Xaa can be any naturally occurring amino acid
MXRGAAGSPGTGHTGPGEPIGENLGGANRGNEAQENPLETPTQGGPRQPQRLPAGYEKHLHREGGPTTGAGGTHPRRGGRTTNLTPRDTPKERASKHPKEETHIPTQQSRVPENGTRPGQNRLTHSVSIPQMGAPTKGRRHPPSVPHSIVYNNHGKRSSHPHRLISHYNNRPHPTHAEAYDRQYTPHGHQLARRHDQTSTHWDLTTVKHIVASHTAYDARNRPRLRYVARDQACSQEIDTTLTIAVCPRLFFCFPLSFCRRTPNT

SEQ ID NO: 977621 - protein, 74 aa, Homo sapiens
AHAFRKCSSSSTYGTATQTLGGSALPPPVPTILSKTTVNDLVGEVSFQQRKNLNEKRIDNKIKESKFIVCKPLF

SEQ ID NO: 977622 - protein, 102 aa, Homo sapiens
MWGIRGEYRSPVERQLQSTVRLPGLGTDGQDAARRGHKGRLVTVGDGPSVAPGGGDPKRGQGANGGTPSRTKQDTMGTGWRPTGAHGKPARRDHAHNDHQGR

SEQ ID NO: 977623 - protein, 121 aa, Homo sapiens
ASDLCGIYRYRCRTTSIIMTGSYGNYVNVQTCRDCSTSYGIEGTYHVTKCVNYLQRVLLVILILVAHIRKTNNLQPAVISKIFSCSDTDAFISGGLPQNLLRHHCVIFAVDHHLLDIEYYN

SEQ ID NO: 977624 - protein, 122 aa, Homo sapiens
MACVYLQRFNSSGKRRCPYLERFFTSKRLGMCRRDMLEGTFDGRWNIGEQVHARTRERHVVIPTLRHEEVHPVVSFMWRFSYGGVGVITAHSAMFYGMHIDACWYFEQDLTQPSKLYLKVQV

SEQ ID NO: 977625 - protein, 79 aa, Homo sapiens
STLSTDEELRYFIKPLTQDTLGKWFYEVPQFFISRMSCWDAWLDDLAGIRGQRPLGTTLVLLICVDVDPVQLSSMLQIM

SEQ ID NO: 977626 - protein, 136 aa, Homo sapiens
MEFSPYSHRGPNLVYPWVALGPMGPMETGPGHAALQVNLTHRQGRATTQGPLRAEKPRMGVETQERSTPVCGAGPTPESPIELPPASAPQGDLKRRDKDVATRTTAGQRRNSLDKQAENDETHSNEERFNCPQTAH

SEQ ID NO: 977627 - protein, 375 aa, Homo sapiens
HASALQQPAPALWPYGPLTSALVGTPLCLGPLRPPNDGLPAQVSSRLLVPPLGSSGCTEVPHSVKSQQHRRELGLGQGLGLKEKEEAVVAAAAGLEEASAAVAVGAGGAPAGPAVIGPSLPLALADAIARAWAPDPPVGGRPTAPAPRMRHSMNLLSHAVLETRTHSSQRHPPGLMALEGTQSPMRVNDNEAQGKPRELETEHTHSRKGSHTGQDPRQLNMGCKTDSGSSETICADEETEDIKGNAPSARNTNTFLKDKDDPATSDQARPRKQERGITNQRKEGASATRTGQHEVSPKQERRHRCRPETGAARENRNKGTRREQAMASPDHRGRAQQRNTSAHADSEQDHKNNPHHAEQAAKSRREENSRHITGG

SEQ ID NO: 977628 - protein, 351 aa, Homo sapiens
PKWCEMMVAWCLFVSDVCIFWAVCWVSVANTRDLLEPTSVVRLLWEQALYLCQYSMEISREYLFIFLQLESNNQGLIPEKPLTRCPVPHSGSSMADPVVKGWCAEYNRNAEETRDGIVGAVVQWKLCSEGAQRATKRPLAGMSRCRVVAPPVVLYGSVQNKVCLNCGRLCGAGRVASAEVPTGKIPGRPVQDDAWKEKTRKNEIPGSKEPESMRLRDDGYEKNGRRKNVDKYNSGPSKTSASCPEPGTESIRQGCLLCRPVLPESVRVTRRDQVSAQQARKIRGSTEAGLGGLRSAQNRETAGLDVTMRHQNTTEERKGTNPWAGEGARQRDKGKAERKVTQEKRDTEPRL

SEQ ID NO: 977629 - protein, 171 aa, Homo sapiens
GDSWVLSKRRQGVVRGASRDRLGTHVTVGRSFAILFDYDAAAIRLGLSALEQEQCTIGAPFPLGALSTLAAGGRSRRGRPRTATLGPGTDKRGPFSPASLETYTYFWTSIGTTVRTLGDTAHTWRQRALTSHSHAPTTGTWAPQDRSSNSPWSPVHALGTDALPFLAPLSF

SEQ ID NO: 977630 - protein, 307 aa, Homo sapiens
MVAYLSDAVALCCYIRGGVSERVVGRECKDFCPFVGSSLVKVRAPWCVSVAADARCPPRGFSAPLVLFSVASASRPPSRCAPPPPPYSFLSLGLSVRRVSPFPHAPRRLSVAAVRCPLRPLSSSLLGSQSYLSRSIKERGAPPPRPSLSLSCTYTPLRLLRARRRRPAFRSTTHPPSTWPPPLTPQHTSTAGENAATNHSYTPALDYTTQSRTMSLYAQHCESRESETATLTRKHLLRSSPGPSAPYSLRDANTINYDVTHSGDRLLVLMYERTENIHDTTQYKRITPPRTPEEWLDEHKTHNMQKQ

SEQ ID NO: 977631 - protein, 134 aa, Homo sapiens
MAIPNAYRTRKFYGYIQLRKGPKRSMAPTGYYDPSAERHEKLFTKEPLKPARSYRSTLYITGPTLALTILFYYEPPSPYASTHLVNLKLGLAIDSRQLYAYACRVNPRDQGETSKVKTSALIGALRAGGESNLI

SEQ ID NO: 977632 - protein, 114 aa, Homo sapiens
TEQTPIPGLEDPPLGQPAEKAPRGRGKLTSHLEPSLLFLPSRLSAPFRAPEVQGPPGSCAPAGPGTPRNSHQEQAGWHGSTGEMAEDASRTHGSSRPCLAACAYAWMVCAWAYR

SEQ ID NO: 977633 - protein, 133 aa, Homo sapiens
IASHLLGSTSISLTPHILPTMPRRNNTIGVHYSYSHRPQHPLPLSQYCAYGILVFAACECMRWAVSPYVGLHILLIDEYGLMDIAVRSEHVKAYSNAKTNRPANNCITYARDMTFPKDSIDFEVKLLSATHQR

SEQ ID NO: 977634 - protein, 316 aa, Homo sapiens
LVRDREQSSCYYIRGALAHMNQNMREGHHNITMKDNCRCEQSVFRSGRGEPRFIAVVATWTRTQFDACSIMLTPGSREDCDAVGAGGIEQEGPEYWGTMADTGSMKGPTLQTDRANLGTLRGYYNQSEDGSQTIQIMYGCDVGPDGRFLRRVPVIDAYDGKDYIALNEDLLLLDLLADMAAQITKRKWEAVHAAEQRRVYLEGRCVDGLRRLPGEREGDLLQRTDPPKTHMTEQPISDHEANLEVWGLGFYPAEITLTWQGDGDGPNPGHETLWINQWLNVGHAPSKKWPGCSCAYWKEQQHCIYNRRFRKTPTDI

SEQ ID NO: 977635 - protein, 90 aa, Homo sapiens
EAPEAFGERSLESHALPLVSVLTWLRRLCRGELYPLGPSSGDPGLLCPAGLQRYVVAGVGWTTVPMASHFQRCVRAVWVSLLDVLVAREV

SEQ ID NO: 977636 - protein, 127 aa, Homo sapiens
QQPWNVWLDVRSTSYSKLECSHGPRLTLEELPREPTEIQKGVGLAGPFNSSRGPFSLLAGARSSSSLYMAINVLRESPDHLQLENTRHSQGLSDRSGSMKQCGCLSDHPTFPALRQQPRQVLHIQTR

SEQ ID NO: 977637 - protein, 431 aa, Homo sapiens
MDFLQKYPLPLIPPTRGGERGRRLIDIGLPSSEEDTRKESELLGQVSQELYRRRFPLMHSRKRWARQEVGYDDLSCRSPYHNVCTYHDLSVGTAPLHAQARMNNAAEARWMERTHGLCGRRNLESNGTGRTLVRMHWGLSHAFREPEVWQSAGLHVVALVTPPKPSRRSWAEGRGWWRSGSHGRGDACTCEPSAEETHSRDTSWASVAPLGFKREDGHRMSACDSQSSRNITARRMWEKSSQGYATQSMAKDGQVMYDWEPLCEALGMPWVGPGERERHWRPEARPSSAGRKGSGPIVHAQLGIGQRRGDMTPGRRSDNENERSQQGTQDAQVGAVAASERQRGHGHGRQKPEGGTEAGEGPQTGGHTRGRAEVPKMHRAPSVELRATANKARKRCEPEDHITHKYRGYSRHARTAAGTQQGTTIDRTKAH

SEQ ID NO: 977638 - protein, 364 aa, Homo sapiens
MKDTQNTNTTLDTNTTDTGTKEMNRHEHDNTKRQRTETTHEMNRTEEKRREEKGRDREERETEKYEEEIKSEVLVIIIIENVVESQGGCSSLMLMVVGVWAHVSVASRQYRVRLKSSLYMTMRKDVEQWSGYRFGITACGKVNALVFALKEGYGVLDNALVPEIRIGVVACDGRFALLEQGLCISPCMPRLRLGLPDMYDSCCPFSLTPFSRIRRPKDSVSLPILMYELAAFSLPLAKVVRSVPSLLNTEGKQVQQQTMVMRAHLRTTLDSEPLRTETISTSGGLSAPSVMSRLPNNAEYITDTNGAELLAPCTEPEELRAQDVATSSTDWNHLASGKPVYQPTRRRVGKTQTRRHTQHTLPED

SEQ ID NO: 977639 - protein, 200 aa, Homo sapiens
TRCDFPYHREELIGFQDHALIIMFLICCPSPVMAYYSSALDKENTELILRSREALGNRSQSELILAANRSRSPQRPSHRLTASVLRVDRLRVKRSLPVDHQNQMLAYHMCTEPDEYSELTAVLSRSGSVRYFLASLVASGTQASCDVLNVDNSSSTPVWKRPISLIHKLIESPRGTFLQLIEAVPRQLGVKKADAIARDV

SEQ ID NO: 977640 - protein, 275 aa, Homo sapiens
MEVEVEREVHNWSKGKRCRMIELVDSSEASAVHVGQVVDCKLDLFDTARHAAKGKAFLYAPYKRPGRRLVEPVIRRFVGLATEGDVYALCRTLEVVTLRMHRDACRSWRSHGAGIGWPSVRYGGGVRSVPSLATKGLPLCSTWIVGCTRLLECLEPRRGLRAVWPRRPSEVNHPFAFGGVVAAQKIGYVVARRFGPGPLGATWAALIRRCCPSLVLPKWAELSPASPCCMCVYRNDSTGVGHVRGQGWHCRGNGWGWRVDLVGTLFGGVVVARWC

SEQ ID NO: 977641 - protein, 138 aa, Homo sapiens
MASLLCCGPKLAACGDRPQRLGSDHVDNARNIFQCPFRCVDVRTFPSAEKDFENGPQNIYKLYEQVSYNCFILAGLYLLLGGFSFCQVRLNKRKEYMVLLGPRRVSPLRAPPLFKDSLRACVTPGRVHIPCRAALVWD

SEQ ID NO: 977642 - protein, 275 aa, Homo sapiens
MRRTHASRTRGSTHASAGSSSAASSSLAPPPKVPVPGAEGPRVPLRPPSPVRVRPGASGGHCPRIELDFPPTLSACLSVPQLMTSLSRFLEKTYYPNFNRHITHCILVQKLIGSSPHQLTRELLRDRRHVSCFACECITCPDILEPHSSKLHSQLYTHVCIEGGSTIDHACRSTHGLGRYYSKFTQLTYDGNHDTYQSGSPGRDTKAFSDFPGVNHEFNPFMEQSIRELISHEYPGSTSDPSLSARVQVKKNRRREYNNRPQHEKHKRVNDTQQS

SEQ ID NO: 977643 - protein, 363 aa, Homo sapiens
MEQEARRNQKTDSITQTTRDPDKQDSSTHNTTNKKTRSQQESKDENKRANQDAEPTVRSNTERDNTPVQNRQQNNGWYPTDNCCFMYYILTQNKQQQEEQHTHTHTPHKQEKTTAEDSRQTNSTMTATDRRVRKRNIKNSKYEKREKNRHRAGSRDNTKEQHTKDVTKRLNARGIKQKNIEKQNREVVEKQNENKRKNRHKKQNISKNKKGEQGDERKEEEDKKNKTKEQQRRHTREEESRREREQESTKEQDKKQSMKKARKEGPTEEKRTETHKQRSQAGQGTNETETDRHERQRRKRKRRQRRRKTQQSTTHNTRTHSRQQRQRRTGDADTEARRTKRAEKRDSQDTKRSKRERHRETRR

SEQ ID NO: 977644 - protein, 314 aa, Homo sapiens
APGTRASMVLLPGPPLESTFHQSLDDRYAADQAAAGRTGFCARLHGGAYDQQARRRRTQLEARLLAVDPGNSLGQMPPGQAGGSRRGPGARQLPLAATVLCHAAERPPFCHLTSGSESRAPRTQYSVALAARTWRTSKQQHAASTVLHPGFSPGQSCLLSSSCWHWLEDTLAGLGGPQKPSPHTEPDSPSPVLQREESSERESLPESLETDSSLGPPRLTGRRPPGGDNRPRPDLHSAPWEVTEGSNRRLPAPERPRTLPFPTSVGKPRGPAWARAPGLRGPRGNGNRKVALKTESGEEPPSPKPPRPHPGEIG

SEQ ID NO: 977645 - protein, 107 aa, Homo sapiens
MGQPVACRGRMHPGRLESDEDICSALARGTLSLPPWVSLDTVRRHILEKPGMKKVDEPVLVGMATEPRASCKGQPDNLGVWRISQVSRHFNRPFDLGLLAPTRNREH

SEQ ID NO: 977646 - protein, 48 aa, Homo sapiens
  misc_feature (48)..(48): Xaa can be any naturally occurring amino acid
MSLLFTYRLRRYERLCALSTTHPRSVTRRVTHTTCRLMALPTPTRSAX

SEQ ID NO: 977647 - protein, 270 aa, Homo sapiens
GSWTRLGPGTRLSLARMPPPLPSRVDFSLAGALNAGFKETRASERAEMMELNDRLAQLHRRRFCFPGNSQNKGRWLSELKPDCCGQGCPTNAGKTSTMAERARCMRVCGVDSTQRAKQPGARDWKCMTYREQVLSTKWSPGPELVKGHDTQSRGIETSNTRKGLGERHVGKRSACGLPLIRSEGNGMDCNVLPLCPVLDPWDGCDTIRGRSERMEDPACPGTDTSPSDGEAGFGAETPKAAMLAPEQRGSSVGEAFDCGPKAQGPVTGKD

SEQ ID NO: 977648 - protein, 377 aa, Homo sapiens
PGVSIEDPLDQDDWGAREDSSQPRCRNPRLVGDDLTVTKPKEDANGREGEVLLTASCIKVKQMGSGDRGLFRACKLAQANWLGRHCVSQSYGGDWQIPSLADLVVGAVQLGEIKIWCPVVRFWSAWPYVANQLLMNWNEGCWARMAKFAWQERSEMPYGQSKRLGRQGALAGHLYGYTDSLPIVSATGSSRPPEQALAEVSRASVVPTTVVEFVPASLELLQKAKHPVEPVLAASSFAVVYLAKSCYRRPQLPPSGLEAWDARVISGAGHRAKSRGVRGQNKSASDLAKHTQGARPQTTRAPRTRPPASDTRGPKSANHHAARRYRASGTRSDSRATQREQATPHSTTRDTQMYTTAQMHKNNRLTDAQTINRAHRT

SEQ ID NO: 977649 - protein, 164 aa, Homo sapiens
IEGVFTNGSRVEVEVDIHWQPGQGEGETAAPGFKVPAEASDEGIGISANEDEPGLGQEGDFSGVGTIGRRRAMVCWRPRKGATIVIGGWYRPPLRKPGGYFAGPAQRILDDQFIIPPELEEEVQEIMKITGATAAAEAHNPSAQPRLPGHYQLDQLQIINDTPL

SEQ ID NO: 977650 - protein, 140 aa, Homo sapiens
  misc_feature (68)..(68): Xaa can be any naturally occurring amino acid
  misc_feature (85)..(85): Xaa can be any naturally occurring amino acid
MEKGDPDPKNCASASLWCWGAARDVSVELGCACRSIGVDTPVVPGSSARCRIVHHMTTVRDSSHHLGXAVVDHDGTITAHTCGIXMEVVITYFMGDDRGRVAHALRQEVGVGCGKLIDGGRKEITFLSGLIIRLKDVLFP

SEQ ID NO: 977651 - protein, 37 aa, Homo sapiens
HASVKSRVKPSWPKGYLEGRQSQACCPVELWEEEEQA

SEQ ID NO: 977652 - protein, 111 aa, Homo sapiens
MGSWNWGGAATVMTPHDGSSRKEVVSEDSAGPPRGTARARGAGRREGQGTKPPSLRAEREKGTGEGYSITGAFPIRGEETGVHGLHGPFKPGPKAGTGVHASGKNAFGRNS

SEQ ID NO: 977653 - protein, 202 aa, Homo sapiens
VGAVGAASPPPAQGCVSGSSAMPDDLQKRLACVPWPGPCEGAELRLLCHPLSCLGPLVEQCLCAGRHCGLPWPGHAATRELGPGLEVRAGCGCADGVRWAGRDPADAWTEVTRTARCRRCAAKPGWRQGHQTRLRLAWREALQGPTQRGLDTDSPMVERTLQAPGCVTGLGGEGAGADSWATKRQHHVTQEKNHERTKDWKT

SEQ ID NO: 977654 - protein, 249 aa, Homo sapiens
REEHDKEERIRRGDDLRLHDGNRGEQEGDWWARRSRPSWTLLYVFTAPRLLSPTTDPWGGPGTHGLLPSPTGLLLNSDALVACPLVPPAADPWGGITAPHAGTSGGHPERTCMTPCKDTIRWTPKEVETTQNRYMDKDMSSSEGTQTHLGSPTGRANDTQSRSRGDHQGSRREDTNKDTSSNPRGEQHGDNRGTHILRRNPPWSSTGDHPHGTKRHPRTPKVGHPRTRQGAGGEKFTEATEEPRTGKLH

SEQ ID NO: 977655 - protein, 70 aa, Homo sapiens
MCRNKKRGPPHKRQGRTHNTIRDRSKSTLVDNNTGPADRRNNRDDNAEKKRREKKNNNTSKRETTHKTGE

SEQ ID NO: 977656 - protein, 314 aa, Homo sapiens
  misc_feature (110)..(110): Xaa can be any naturally occurring amino acid
SGQVLGDQTVSDNVAPGKVQSGKKVASIKESSNVLSRRGGNMIIQSISLVTIAKTERGAQTLLEQPRRSRTKTNMRMPYSEDQGNQRHELNGAPQEVCKWRPLSGPPGKXCKACAEHRPAVTFLRMASADSALRPGLAAGLGVPETRASAFYLLDDSGDRTRAPVRGGTDRQRERTCAGLSCRTISDVRPAVIDELFQDRFFTREPEDTLGTELPFSRGPGEASTVFFRKFPQSVRALMRFSPCDRTGTCHASVPVLSSEIDTRRAQEGHGTSTSTGPAFKNRQQIPTKRDEDRTVVAGELGTNSGRPVDEGPK

SEQ ID NO: 977657 - protein, 270 aa, Homo sapiens
MSKSLVDEAGSGFIQMPSQAAREAWLRHVLWHLCRLDIDSPTITARATLVIIVVAIGPASRIRWQTLKEYDDTSGTCMWLVVDFSHVKAHAVTMGRRIQECCAQARKEATLSEPRSYYRSRRCVDSEKHYTGSLRLQNLAFVQGAAGPWQHGGELTDTGANLEHVTAGLTPPRIGSKKLIAQTIPREVGPNEATVLATAIGSANSTPAYDSNKLAYARWYKHITKSQTLQQNRQRLPWIRLEEESNTLDMATLRILGKKSGEGQHSRVPS

SEQ ID NO: 977658 - protein, 109 aa, Homo sapiens
TRRQIRRYQKSTELSHPEAGLPEVGEGASQQRFAKCDSERYHEPHAIGALLRRLAEAYSVVGRVLRVLPNPCCATRDSIIGDVYRFTAANTNNPTVRVAGSTGEQRALS

SEQ ID NO: 977659 - protein, 240 aa, Homo sapiens
MAVMAPRTLLLLLSGALALTQTWAGSHSMRYFFTSVSRPGRGEPRFIAVGYVDDTQFVRFDSDAASQKMEPRAPWIEQEGPEYWDQETRNMKAHSQTDRANLVALRGYYNQSEDGSHTIQDYWIGVASGAPRGRDNPRGVYRGRDAIRRDKDYIALNEDLRSWTAADMGSQITKRKWEASHAAEQRRVYLEGRCVDGLRRYLAEREKETLQRTRPPQDTYDPNTQSLTMKPPEVQRPGNN

SEQ ID NO: 977660 - protein, 241 aa, Homo sapiens
PRVVPACGTSSLSPEAHDVARSALNDRGAGSLDGTTGHGKHAGIPTNDRKNGRSSLWGSFRVGLLLRGSASKACEPGKPGIDFNMRLSSPWCRAPATEEPGTRAIWCVALYVKRLDVGDRNLFSINPITNAQAQCGNASGRRCIQPDDACSRLVGDAVAGDASAPSILEEAITVIISSQAPSGQTNPLRQCDQATGGRQLAPERTRAPTVGNKGRFGPCEDSNGVYSSSLRDRILRPEDRR

SEQ ID NO: 977661 - protein, 137 aa, Homo sapiens
ATVNLKPGEWLPECEAEVAPDAKSFVLNRGQRQRTILCLQIQPSVQRPRRRQHHRVQQQGRRGLGDRAVGGCLSLPAWEAVGEVCINFEAGNLMRRSCQDGYRIANVSRKTPVILEAIELHGMLTVSSRSECVAALT

SEQ ID NO: 977662 - protein, 161 aa, Homo sapiens
LCLHWTTSWIAWVYWRLDTAVRGSGVDYTCLSSPTKLDVYLLPGHLPGTIAGTSAPFSMRAVSSLGVVPVAPELLDRAKQRGTDRRGAKLGRLATLHPSMLVVGSSCLPPCPMKANPPALGTPRSTWELPCIFSPLELLPSVSGLTTSPHQVWGGSGCPEG

SEQ ID NO: 977663 - protein, 103 aa, Homo sapiens
MKKRKKPQGIFWRETETHIRARTGLDSTDRQSHKDQSPQWEKQEKHEYVHKNNTGKYKENSQNKKKTQTRKRQKNTENLKEEPHQKRHTQKKKKITIDATPKR

SEQ ID NO: 977664 - protein, 169 aa, Homo sapiens
MGGPEHKSHPHSSRKNEARHANVAQATIKTDNEQADSTKQKLEHREKHTEDPEDALDEKHRQPGAARQTRRTNANTQQEHYNPQLRHTRKKHSKQQKHLGYHHNKPNHYRRTNKTNDTRTKERNKENNHGTHSERQAGTERTTPENRPRNNQRETKSTKPNNKTEKTRT

SEQ ID NO: 977665 - protein, 82 aa, Homo sapiens
AGPRSSRFYSTGGGADTARAVTLTRLEKMYHACGEPIELYRNAEGHGQWLVSTANCIHAVMDLRPPPCEGTSRTVAGTQDQT

SEQ ID NO: 977666 - protein, 139 aa, Homo sapiens
  misc_feature (137)..(137): Xaa can be any naturally occurring amino acid
GSVGERGWHRDPVHLGPPPLGDTELRRPDGQGSLTYLLSRRCHEERHRSVVDGECSVMTDSDSALTETSTLLRQARIRRGTACLLMSLANTTSTAPEGVPLALLLRDHYIEGLVAREGWRDEEREKSTYGRLEMRRXRE

SEQ ID NO: 977667 - protein, 163 aa, Homo sapiens
MAQRGGEEGERAHRREDEGETDNEEAEAGRERAEKEKERRRERKKWAREGACREREDDKGSAERGEESGEKGREEKKRERNAQREERGRRRTEKDGEAAREDLEGGGASRKGRRRRKKRGEPSAKRGEAARGREEQETHEEEERTKRKKESGRDKERETRRGR

SEQ ID NO: 977668 - protein, 563 aa, Homo sapiens
DAWVLDAVVRDAEGTEHTLYDRVRENRTMVLSPADKTNDQGRLVVTVGCAKQGDVWCRRPLEEDVPSPYPSNHRPYFIQNVSDLSQRAPRHTCSQEPRRHDTDGTDHAARTHTRTVRSHEKRTEHSRKGEHRTTTSEGDAYATRDRPHTITHACEPPEINTITKRPHIKCDVIGPCHERRYRHGTLTRQTPKLTTDTKSDTNTHLLVIAQGTMQTTDQHKETTKEDENNADQAKREKATEHSDKKVNQGNKTERRHQTADHNRQDTSHDNQDIRDDNAHTEERPPSHSYDHPRRMHYHRAPRSSSSGSSISCKAEQRHVNYWSAHGTDMHHNVTHTHTPQNPPAAAERPSTGTTATKTYHALTPARPLPARAHAHNTGDAHIQRQDTTQTTHTSNKQTDDNKPRNATPRTQRPTEITTTTAHQDQQREHSTERRRNKRKRQRHTTPRQATSTERETRRTNARSEPNKWMYDIRRAGTTKRGDDSAQHQRGQTEERQDRPWRKTPEAQRQRRGGQQTEQPYEGCAEKQRGTSERQTSARGRLRGARQADRENERQAHNKWKLLR

SEQ ID NO: 977669 - protein, 119 aa, Homo sapiens
MEGGEGGGRRGGAGEGIRTEEGRERGEARRRERADRGRGRPGAEGEREKASGVSEGRERGTEQGSRRRRWGADEERRGKRGTNGRGVEGGGGGREGRRQGRGTTWRYTKHNPIESRINN

SEQ ID NO: 977670 - protein, 136 aa, Homo sapiens
MLGGRSHTVKCNQQEAQNCKRSGTIETMRRLVAGASRNKKAAWGPAWPQLRGEWLQCGPTLHMFLCRDSTTSMIRGLQYFTQQESHQYAQVARGTPPCGGNEEECKSPNRSMVPILYAGVARRDNHPGDRTNRRRD

SEQ ID NO: 977671 - protein, 39 aa, Homo sapiens
MGNTDRGLAYCTGHGLDHAYGWSQLRHYCNTTWVEPTSQ

SEQ ID NO: 977672 - protein, 192 aa, Homo sapiens
REGASLCSTLTRTTCGGLETTVLYHLPYAPLASVIPARSFSEREGVCPYGLHPEQGYMRHMTLDGGSRRMGRFTRHVKTLSPLRSPIRHRASRGLNPMTPSMSIGKRFKNKWMKLFSSNASYDALKVAESKRLTSLYSPASFLGQRHMFSVLPLKDDKLDIKKSSYKKLSNVPAANAAGARLIQVKELSKGV

SEQ ID NO: 977673 - protein, 475 aa, Homo sapiens
GAAQQPVDEMPIAGNGVALLLGVQRKEQIEIGDMVVAGDVADPRLNALAPGGKPGDDLDRREDPRLSRGPSDPGERTSVPVGDPPLTLTTERDLVTPLEDAVGSDVRRRSPLGSALLWIQGVTTIIVMAPETDARCRIELGHVMIYYEFLDVSRGYRTIEGSTAKDAKPGERERTRGPQEELEAPMGRNPPGECFLTLLGTHRGHETQENNVCDRTLRAYAGEHNRNTMRGARYNAASHGERDVGDLGAQGRPRRSSTLGPRRTRKTGAEVTHQCSLCPRFTAEPNDRATQGRICRVDTHSVRRRNHHRIHKGRRHRLTKGEQKPPGPYPSTHHIVRNTAGQNTAQCAMCGTQPAIPTNTNGTSNSDKMNTHTPTSDGRRTGTHQSGRRAERREPSTKEVCHKGAIPDLNGASCAQGKSVLRHTIRYTVVYRHLGICHMRRLTDQQKSHTRGERSSPSAEVSGNEAQNSNGQWHT

SEQ ID NO: 977674 - protein, 147 aa, Homo sapiens
MSQTLRWRRPTASRPAPGMTIREHPTREAPATVQACPVLSFWALTPPGRVLQCLGPGREALDTLSVGARTNALRTLRSTNAVHGREAACQVNGHSVRGGGGQGFQARCCARDILTVVCSVCPSVTFLLTKVEERKRGISHGVQTPPQ

SEQ ID NO: 977675 - protein, 97 aa, Homo sapiens
MRTQGLNREPGGPTPIYTRTKHTAAHRRIPPAQKDMRGPQGVRKHDRHPTSHKPTGAGQHNNDRATTRTPPTSHDEAQHGRNDNKNPQQKTVRQQKK

SEQ ID NO: 977676 - protein, 270 aa, Homo sapiens
MTTKKPIPHSLVPGSRRKVLSLGYTPSMGGAAANKTRTTEWGGADHPRGGKRTQQRGKSDHLAEKRPLNIYRQRGKRVKPRLPETSGRDSCGIPRVKYNTRGGTGVRPPVWGKPHKKSAISCQPGGGPRMGVHKNCGHFVGTAGRRQKAAKTAGEQIHPHCRAPKCGAQHEKLDQRVLLRKPHGGRCAPKWVGAKNVRGAQTTSVAAQRSVSQKTRRGGGIHTRLPSEPTPLTQRRSALCWGRTAAQQERSEATWETPRDRGRDSQWQKT

SEQ ID NO: 977677 - protein, 530 aa, Homo sapiens
  misc_feature (151)..(151): Xaa can be any naturally occurring amino acid
  misc_feature (155)..(155): Xaa can be any naturally occurring amino acid
  misc_feature (175)..(175): Xaa can be any naturally occurring amino acid
YHNPQGTYHYYQLRVCCPERIRHTKPETLGEVRGVADRKWSDVFVSEIRGVTATIQWRGRILCRDECEHRVHAPELGVSCSTGLTLRRTDIDTLRCVDGEDELSHGPRAFDEGVHVDARKVASPSPTNEPHQGSKHDSGNTRLMWAMRIQXLYAXCPLVENRTTIVFPPHTASSXGTGDRSNVALSESHGVNAWLYRYTHGTSGIASRRRVKPPTHILTYASSPSWWYLAMQPLTTFGYARFRARLDQGRPAVVERDGGGFPLAPRKALSGPIPISGFRSRLHVKLMRNCEGPRRDSPQSSGIGQLNGMELVSPVCVKLPVDAHLRNMHLGPAWFSTPLEQWRREEPNDIPANVVSWADIEPIWNQEENDKIGTWGNDIHSNNQRIALQQRVPPTINREEHRRLGAMRQGAAALPQRAPEQHGQQGRTNGQRTTGPGHVATHSTRDTEEAEKTKQADWGGGPRTGQTPRKRPATYRNRHGHRSRQINNRQTGNIREENTGSRPTPAHTRLNDTTQASSKQHTRTQQTEHD

SEQ ID NO: 977678 - protein, 127 aa, Homo sapiens
MEVRNPLFDHAALSAPLPVPPCSPACTAMTWSADRRPPAPLTSDVPPVGWWHGPGCFPLKTCFDACVLFGLGLVAPVPCGPSCQVRPPEPFVPWTPPVSPCTSPCCGLDHPRLDGGMENRRAQERVG

SEQ ID NO: 977679 - protein, 245 aa, Homo sapiens
MLSERIAKVATFRGKDLTLTLPGEPLYARPWPRLSPRRGRLGSDVPGGYCTRSQRHVGTRNRRKWPRGYRGGFPGAPLPWKFGSTTPGADALNHIHDGPPWHPTSPRDTWTGLDRSVEDRKQCPVISFPPEETGPPQIWCHGMGRHAREPAPTRLGIPQRISAPNPRAPATEKKVPPRTPGEEKATKMSGQPRIQAARERPPGSPWGLHRPAPSRRSLSRRGAAEDDTKFTGRWTLAKGQKRGDG

SEQ ID NO: 977680 - protein, 71 aa, Homo sapiens
MSFPAALRTRALRGVHENESYRCRYQNFIFDPLPDAVGELTALLMGIYPYRIQKGERPYMSKGSDDTDKLV

SEQ ID NO: 977681 - protein, 149 aa, Homo sapiens
EDAPGAQRQDCGGPGLASPAPPIQAPDPVPPSRITPGSTDASLERSKTHRQGDKHVPREGDRNARREITMAPICENGPVRSSAVSWIQMSTDFYHHHCSQPPPFHDESPKCKISISIPLNQKIYHWIEEALVSVKRYERVTEERNRNVE

SEQ ID NO: 977682 - protein, 296 aa, Homo sapiens
MATHNSVRQVRDSRSLWHKKPQTNHMAICNYTELVGDVNSCSPRWPHLGRTNLRANPRPHSTPSTEVHDNISWDIKLGTQNMRYTLPLTKHGQINYTRTQRHKSMDMPHTKCGTATRHITTTDGWTTRRDAAGNSDHNPQRVMEKTCSITPNSQRIPTQHCPPRKAHTRHTHNGRNINPAPHGTHGATGGPTGAPVTCHNTVCADVAPRETKVARSNIPPPVDDATAETDEVRRTPDADDAPQDTELASQAQHEERRKRTRRRRTHNSNERHHTTTPHQPQATTDDTVNETKKRKH

SEQ ID NO: 977683 - protein, 241 aa, Homo sapiens
GLLATTYREEVVQSRTADYKRRRAGRVLIDLHQQPPPVKQRMNDLSGYGRNGETRDWPQRNLDSLDRDLRCVPSVRTSSRSACYARDRSHGSSEEESPWTRGELLVRVSGGLAVRESVSSPGSPVLGRSWVLVPRTVCASPGMTGGVASGSWGVGGLAPSGYAKSHVAMQRMGPEWLPITVRKTAKHGHGDRTPHGFATFAIAGPRQYDIGSRLVPSRRPWEALLSACVNAQEIDTTKKPT

SEQ ID NO: 977684 - protein, 110 aa, Homo sapiens
MTTLDVLPPPLKSSLDRKYVPSCLELLRLFLPTTRYDMIDCHISVISSNALPLPEDGTTRRIVIRLDPKRTHNEIGSPVPLYNTKGCEVSSFHEFGPYNMDVRPVVPIAT

SEQ ID NO: 977685 - protein, 241 aa, Homo sapiens
MGRTEDRGNLKKERWDPHIIKNRLGHTREKLDVDRQRNLQHDGEGTSAEAHNTQKGDKKTPYTTDDIKQTIVNKGDKRPSGSRPPIKDNRDTPPPKGAADTKSGERTCTGHTDERRDQQGAHTAKREETPIRHLPRNDRPKNQGTKLRRTHEQETDAGGNTRESEDRTEHTERQQGDSDAIKKKKRSKMGQNHGAKERKTRTARSGTPLGENVPHIKTEGETTPKQENSMRRERLRYESTR

SEQ ID NO: 977686 - protein, 89 aa, Homo sapiens
PHPTALGASLWTGCCRHPTCLDVAWRVAQSLSNPWRTGFPARGKLLQEPARSPVKLCQDDCLVGAQPISWSNRYISITQVLVLRYREYK

SEQ ID NO: 977687 - protein, 57 aa, Homo sapiens
MLATRSTLEIYANRHGVTTGHTQPITCGDIRHPPYQQNHAVMNNDEDEAPHQNSQND

SEQ ID NO: 977688 - protein, 74 aa, Homo sapiens
LLKMQKLAGHGGGRLWSQLLGRLRQENHLNSVETAVTQIAPLHSGLGNRTRLHHQKKKKYSETSISGSRQGPSN

SEQ ID NO: 977689 - protein, 109 aa, Homo sapiens
MGNQGDPMTPNCSFPPKKRSNLLSTLLSLSGRIPLLGYPPIIRSARLCFNGAFKPTTSFKGKPLRERRKLETKLDGNTWLCPSIWKHITAGGAIAFEKIPKFSFPPNGA

SEQ ID NO: 977690 - protein, 43 aa, Homo sapiens
MIGPWPFDSAGRGIPVTVALLNPCGNGIISWVDFEIKWAYHKV

SEQ ID NO: 977691 - protein, 446 aa, Homo sapiens
  misc_feature (4)..(4): Xaa can be any naturally occurring amino acid
MLPXKLDSIAQGTQTGALQWRCFVQQQNEGSLNRVWTTGHCLYYALMECIGTMPATCRAQKFHGKVTSSFSTYSDIHLAFIQEHIGMGPAGHRVMPPVRGTLYLGQETQLEYSGWDVCESGEAKFWIRRGLSPGPCGEFHNILLSRLGFQLDWVFGLPSAIQNGPHLGTGMSIGQRKWPKRVLGMRLHTMETSNFQNEGGHWHKREAMGLGGDSLGMNFRGNGPLMHKAPRGVPSKNWAWFGIGRGATIVQCPGKELPYHPWVTVTAMETPKKSIGGLVALDGEAPQNTRAERKPEEEPPGERIPRSEEPTSRPGDKGKLLATCPPGHNQYQGIVPLIGGEKKGKTKNAVKLGPEERRHPPFGEQAHRKNVRTETDHTQVDNPEHWGATQATDTKPPSFWGNTLVEQWATAATYQGTVNPGNDEEVEPLSAATHKSQRQSRLGLLK

SEQ ID NO: 977692 - protein, 41 aa, Homo sapiens
MAMTTYERAQDIIGYRIVRLKNAHKPITYQKAQACTPLYPH

SEQ ID NO: 977693 - protein, 237 aa, Homo sapiens
APSSTGPAPMAPPMSPSALSKQGSGSSHAMEVQEKAMALGQEMIPTQVQSPMSQSVKRSRSGEGEVMCALCCNGATSEPGTPGPGPHSLTAQATRLQGLPRHVPLMDIQPYCYIERGCMPRMQLHWPAQGTCSHEREHPWCPHTHGLAMDHYVNKTEGDRRHGHMGATIHTSHMKGPEDTKTGALMASLRAEGHMEQHRTGVPPANGLIKHLKLGHADSSRSNGTARTKAEDSHEAG

SEQ ID NO: 977694 - protein, 145 aa, Homo sapiens
MEKTLATQGLAALRPDIRRAWENGQHGIWASQEKERLEEKQRDSRRERANGGGRVADEVVLTQGINPYTGTPDVVVCGDHFDDGFLRMARFLLGALDAPGARNRYVDKVGILRVAVVALSRAPNFYDGPGEGTLVGVPIRSCDHP

SEQ ID NO: 977695 - protein, 508 aa, Homo sapiens
IRVHPVPKMTPDDSQCYEEVQAVLSIPRPLSPDSRASSLSDTVLLPKAMQVSGTCKQQHCVECTSKQDISLLERLIGQNSQDVYKISMTIPDCIHNCKPTNVRSQETYALIYTWTSSTIDKTLTYQIHTPLNILKAQNIMHSKSLKAPHAHTTTGTTTRAQATNARHNAHHPLKAQQPATHQTRPKKHSAHSKPRTPEPHAGDKTPDSPHTTRPKSDAQMATQRHATHNQRDTDHTQPHPSLPDHARHTDTPHTSPTPQTTHHHQHLYCATAPCAHHPHTRTPRPTAPPHPAPCPGTRQPPPLPPPPQRTQPTNAQTTPTHHPPATTPLAATRQQTTSITHHRTAASTPINTHRPRPHTQATNPHGAAKQPNTAAQRQRQGTQENDGHPQPPTAHTRRSAATSQHSANTNGTTRPTHDTSHPEPATTTAQTNTHPARPAREPTAHTSPPQTHHAHTEETTNMNSKPNAHAEPRTAPNTKTHMTTQPAPTTTNPRNHPTHHSAQPADHA

SEQ ID NO: 977696 - protein, 333 aa, Homo sapiens
MRLACARLRRVCGDGYRGTCVARLLGPPTRNTWGAMCCTWRGTGYAREWNSAHLQSLGTARASKSIGPEPYVQTIAKPQRNRKRPHAHVSLVVHWGGSIGMTAKRTLEGYWRCRGGPPNGHTPGIACVRGSGVRERTGMGTGFREAKASPGEMAKALGPSGNAVEGCTNGWRHGLVDLVGEPKGHQGKHVLSTCHRLALWTIGHGISARHSWQWRKLDWGENFGGGPKGPHPFCQGWNTAPGQPNGCVYRVGMPKTMNVVGDRTALRTKMQTAMERGRHMTQERAGRQRPLGVPRRPRGAHKGRPVRKAHNVGHIYRLRVGPKELGPQRAHMW

SEQ ID NO: 977697 - protein, 115 aa, Homo sapiens
APVWIATRLTLHASLLELKETIDDRSGKKLERWPYRFLKSGCHAAIVDMVPGQCPCVFAELSTRLSTFGSLRCLVNIETGRVAVGVIKAVDKKVLLRAGHRSPYLCPRLGSEWLA

SEQ ID NO: 977698 - protein, 223 aa, Homo sapiens
SNATSPALAYPCMPGTGFLCQSIADETFSFMLDWGRWQRDASATAGAYCQCGKGPRLPEAVLCHQSALCCFGVSISKVLDEVERRQWDLLLHSVYPFMTKSHGVALSQPQGKTITVNDIPAQELAHECCIELLRQDQWNYKGWRHSGTYMSSTIKTLDIPEMPHRHTLRKIHRHYTGIAAQTTRRYQQTEESQEYRPPANPRPPTHMPTPNAVTELEPTSDVH

SEQ ID NO: 977699 - protein, 279 aa, Homo sapiens
MANSETGVIIRQMQWFICFITRCYRYVRNFCVGRCNAVGSLCVRAAVPPFQVCAPSLSLSLAARRFSAPPLSFGGLSPFSHPPRPPPAVSLYSARGYHPPCAPRLIMCPSLALLPLRRGALSLVSLFLPCRRILCSLLSPARTTRSLFCSSLGRASFLRASSHSPAPVSHASRLPARVCFYALSDPTYYTQHGCRLILTELRPARSSLPTPPVGAVQRPTPPRAPSSLPLSCLLSADPPSPPPRISSHFVTGQHTQKNRPECSKQLVNMACRSLTSTLH

SEQ ID NO: 977700 - protein, 180 aa, Homo sapiens
IIKFNYDSEKIERITFSGKNYYWTLVIRPTVYWGREGLGRLNLSYFLFWKMIINRNVPFPVWIYNRSHLAQNGSGRINHNRKCEKLVKAKAHAREISQNTQSGQHRTRWAGNLEVISVILGTMGLHGSHGSRGGTPMVNWKFPLFINKVAFSGHSSSIFQLAWVLPGEENTLVTGAYIWE

SEQ ID NO: 977701 - protein, 261 aa, Homo sapiens
GARGHRVPLTEACKGSRIGGHDEDSDWLCWWGLTGMTVVMAGQVLGDHDGSQYHELQEIVQVREVSTSHKEIPKLLSTGGEHEINDSSVRKKTTEERKTLLSNLEEARRKTEDALKETQGDQRQQLKELPGVCNETMMAPGNECKRRTETDRHEEFYARVCRSGSGLVGRQLEEFLNQSSPFYFWMNGERIDVLLNGRTIGQQTAHAGMSWQDHFSRAFRIIDELFKDRCLHPGSPGILAITGLQRGPTEAPFYLPSPGWQ

SEQ ID NO: 977702 - protein, 97 aa, Homo sapiens
VGADRRDCELMSWFIVEAHLAQPCISPSTNIQPVVLHSKTREGKRQQGQVATGRASGAIQTKDGQIFLSYVSTCESPTSSCAKSQGRGIVSKTSGTS

SEQ ID NO: 977703 - protein, 103 aa, Homo sapiens
MGTHPTEKHTATENTKIQGDTRTTTPHSEKGNNATGRTQTNTGATQKHEARAKTRHPTTDETSAHNDINAHRHNKQHHTPNAAPNNKDKNTATANNTKANNNP

SEQ ID NO: 977704 - protein, 91 aa, Homo sapiens
MALPMRGPRVGVKLCKKETQRVWFSNLGSNYYRGSRNLYGRNGADPTERSEDSQGKHPPLRTGNSRPGEKPTREHMAQNHRGNKHRAQEKG

SEQ ID NO: 977705 - protein, 380 aa, Homo sapiens
MDDDIGALVVDNGSGMCKAGRFAATSDAAPGPSFPIQSWGAPGTRGVMVGMGQKDSYVGDEAQSKRGFLTLEDTPFEHGIRRPTGYDHGRKSGTTTLLQVWLRDGSRRSTRVLRDRGHPVKTRRTTRRATMTPESCCEHLQDTQTMERRYPVLCYIPYTASVPYALVIDDGHPGRQGSPQTVPIYEGYALPRCHPCVLDLAARDLTEYLKKILTERGYSFTTSAERGRIVSELQEKLCYVGLWLRDKDGTDVSRSPGKELELPARHVITLATHPVPTRRRNTHRTFHPGMEPGKHQEKHPTTPKQKARGQPEQNTVATPTGNEPTQRQGHAPTHNDNTRTNNGTHNVHQPTAAERPHPSRDHSKDAPHRNNTTDTYISAP

SEQ ID NO: 977706 - protein, 168 aa, Homo sapiens
MDARCECHLKASYTCLHTLRLGYIVDTGCRAGTRVAPWGQSLLQCGLSVCECASRIAWTIVNIAALIGCTEPNCDHEKLAENCLVLSTQNPQEVIQCPFYCVYLIHRVAVNMGIVRYKGQKGDSYWREETVEKFLGRVEKTTDVFGWGKGGLRYDWDPGENRVGGPGN

SEQ ID NO: 977707 - protein, 295 aa, Homo sapiens
HSSPRKLEKVYDPKNEEDDMREMEEDADCACVEHVMKNVDTNQDRLGDPGRKFLASTQRKEFGDTGEGCETVEMHPAYTEEELRRFEEELGCPGGRAECLRPSVLSQERDGSRAVPGRLEAHEERAGCRLCCIMEHAEAASKSAASKAMRSRGAHPEGQLMFQPRTHDDVTVPGSSRGPAQVGGHFRTEILERYLRLRCPASVSSGDPQPLRIPDAPRRLTGRWMKWHRQLPWGAGVMLGLLGPGHGLAFTRICCTQDGRFHFSGFKFVVLLLFHEGALSRSGEAGSAYFRARPT

SEQ ID NO: 977708 - protein, 229 aa, Homo sapiens
LSGLPGASAMRPLLVLLLLWPGGWLAPTGRQQDPHASALGHPCAFHVHRLWATMAAMWLAWAADGLATGRDVLLPWWLLVDDEMAKGGSAWDCLGTSKWDPGPAMEMGWDPAWAHTVVLPGELLECLRDPAFSSQGRSEDAGVPPPSDAPLPFRPRAGELSRDITDAVTVQVHLPGCLGVLLLRRPCHRLPGQPASLIWGTIGELHCLFLPVNRGVAQASLRSRVGGHC

SEQ ID NO: 977709 - protein, 282 aa, Homo sapiens
MERRRITSADRRSYVSSERDDGGGAWLLDRRLESWHPLSLARMPPHTPDPGGFLPGLGTLNAGFKADPVASDAVRRLLELTDRYASYIEKRFAVLDTARTRRWLLADSSLRAMEPTKLADVYQAELAELRVRLDQVTAHSARLEVERDNLAQELDTVRQKLQEKPNLRPGSREQLVPIDTEADEATLARLDLATEDLRSRGRTDDPGSFEGTIHEGESGKLQGGKWDRQDGTWWSIERSARPELTGALEGRSATPGCKNGGPNMTGAKIETDPAVKPNERCR

SEQ ID NO: 977710 - protein, 441 aa, Homo sapiens
MKDGHHERVETVGPNNGTVAPCAQPYQCTEPTDGTTNDLRAQGTTCDGASTERAMHRSQPPTQGRDPTLSSTPQTHKGPGEPIATRETHEGARAQRERPRRSENGDRTLVRAHVGPTRTNWQHIGNRPRHRSAQGHQDERPQHRAERREPRRGRHTRPPSAEQSNKHYCSGRAQKPHMVRALEYFRTRESMANRTYDLGVVRLSRSSPTLERGASTTETTAVADHMPRTSQTSGFRPFLLALRVLGKLPLVRDRPLLAYAVSYGALCFIRHSLDLDIPITAAHQSHFTTQLFRVYTHAEIRLLNSAITDYKRVAPPPSLPHTYASVSLFHLARGEDEATQQQPEPADERRERTGARDEGGSRAADERAPPATDERVTGDKTQARRRRDADSNARRAPTRSDRRRARPADRSDPRAPTRRSKTDDGRTERPRREQQPQRRSA

SEQ ID NO: 977711 - protein, 167 aa, Homo sapiens
MNVLAHNQQLPTTQLCARHTTGQNHTHTNVIDSVPIDQPRTHKDRTIKKRSITWQANQADIMLVEITNLWEQTSGGGDQPRRTHTVGTASPPTVKHPLPPTKTKERRELDAQINANVAEPAHNTVVDQQNDANSQIKTETQNKRQMPSERLRHCIIARSARPKSDAH

SEQ ID NO: 977712 - protein, 335 aa, Homo sapiens
MAGTPHGDRWHRCNRGIPLVPGCSLHLLHLAWQTNLQHGCRTWRPTLSVIYPYNPQDEAVPEQDRTGKVYLVAAPIQDYCSSWGAQDSMRPQHGTGPMASKCTDHTRPTLKSRHRRRSEHTNETGPDTAPTHHRREHKRHGHYRPLEHSDKVATLTIGPSGQHATGTINDTGGTRHHNPTTSHNKQRQRHTRSKKKRKNPDDTTDLGQQIPRNKDKSHGTPGANKQVQPRETTPRTGRPTAQPNSQRNRNNTTLHREYNQERHNTKPHEQKAQEQTAKRTQPDRSQRQRQKATKARGTGHAEANSGSQENGQNKEQHSNKEKRKKREEKTRLSHD

SEQ ID NO: 977713 - protein, 297 aa, Homo sapiens
MRRNMDKAQDRNATALQPSTQAHPSRQPRQAHSGQHNHTATQPSGSAKPHSGPTHHRTKRTPATQGTHTHRPPPGHKTPRSTPAQTTGDNTTLTRAHHPNTTQPHAIHPPQPTPAPQGPGTPDETQPPARPTTSHATRHHPRQQHPTAVNATPKPPPHHPHPASSPDTRGPQDRQTRQRTHPPTTTAKPQNTTDERQGRQGRKTPRPHPAQHKTTRATRTTRTNHNKKRENPQRASKATLTQQTEETNKKKKANRPQTATPRTSPPQTPPTPRTRQTTDDHTASTAHHTDRRQTQAN

SEQ ID NO: 977714 - protein, 383 aa, Homo sapiens
CVPPGRRSDHMESAHWAITWHRYRCPMRELLCGTYYGIPMERRVVIQYECLLMAQTMETSRGDQRSCSGGCTWYLQWLVDVVDVGGPHLVPKGAEPVDVHVDMWRLTRLYRLRVRVEAACASVGGRLTWCQRGVRPAWYMPSNRSARVDLRRLDASEAAPGAPWRLATYVREPRPHALLVMQEGRQNVWHGHPSKIQRLSPESPGGYPHREDSRALTRQGRGAWRGMTLGGGYAYVKGQRTQHVSQGDIAPRIRFKTDGQRSGTNGIDASQGRQARRRRGTTNLSDKHLSKLEGTRDTERRGYQPPLEVDDETPYSGGAPNKRGEELNTGAQVTGHREEMTHSGGDSTTMVASRIGSLVEQWRVRAGQKYWEPWRHDSGHYTG

SEQ ID NO: 977715 - protein, 197 aa, Homo sapiens
MTLNPGLAILQVNGVLIYGRGSKISFSSTIIFQELGRGMKGLVSPKVYYKYPFLLAGGSGVELTAYGNSQDLCDTGLEAKQDTTLRVCTWETSRDHLGERQCSAGRYKIRRGAGAAILGRPSILGRLRQGRLLTREGVVGVTRSPWTLTCGRRDLVFKQKTKRARKNPGGQLRPHLTGHKAQNSGGNPRNADRATGS

SEQ ID NO: 977716 - protein, 290 aa, Homo sapiens
MPYQYPALTPEQKKDGFDIAHRIVAHWQGHPGLQMSPRGMQIAKRLQSIGDREHRGEPGGFIPASCCMTADCACEARALGVSSLFHETLYQKADDGRNLPPSYHNANGGVVGMKVDKGVVRLVGTYGDDYSATGWMGCLSRCAQNTEGLDADFAKCRSVLTDSWNTPVRPSDDGRPPCLAVFARIWRRRREPIGEPDIPLMGDQTESAQMAEKEQRRQKTGGPHIYLKAWQPKGTQPAAQTTPEMHAHAGAQARAAHTGAKRAPPQTRPHNTTRPDPRRATDTDPKPHTG

SEQ ID NO: 977717 - protein, 311 aa, Homo sapiens
HASGWEAAPALLPTQSQGWLRWGLVWLCRAPWLQLVRGALWLLGAAGLRVPCVCGDAHVGLVPQLDCWWQPLLAPSDLPTHELLSLIQESPMIHDLACSCPPVTHVNNDGCPLSLHARGPDGAFPFGRFTTLATVGPPSRRVVGLGGVESPLLVRAMRGLGGIPHDYPYPFTLPHLNDSGVGPPFPLGLGAPTGTTGDRTRRRPEREERAINRVDASPSFVRITTFRRADTPFRGKGREHNVACYRRGTKSDPHGATRPGTPDTRHVNVTHPEPQLCQVAGANRQDQCGPTAQRLTPREYHAPPYSFLWHQ

SEQ ID NO: 977718 - protein, 406 aa, Homo sapiens
SGLVRGHPLMTQMRPWTFSSTDLHGNNLFLCVHVHELLATRWGWSTPCNPNAHHSAAVLPVEWTFDTFNAALQDDTPVCIHAALLVTPGRSCHMPTHAISHTSDATLLDRPAMTTGLPRAIPKTRHHPGWECPEHGPQAARAQPPTDQSTHETQTRQRPRPKNRTPKRLIGDTSRATPAAPQAGAPMNNHERHTRYRFVLNVTPPSEPQAALHKELNQSVHLVTKPKHPKEPINNELILGDIATMSHRCIPPSTLAWTRCACRTNNHLVKYKMYSLPTKHQSLTTRINWTSYSRKHDEILLHPSVHHLYHTAERHREPATREQATRKRHETTPNEANHMTDAHTDPRHTRRHAPTHRHRARTNKRTNPRGRHPDTQGPTAGLRRTRTARRNADKHAPPPHRSPHRK

SEQ ID NO: 977719 - protein, 208 aa, Homo sapiens
MRGSNYDWYLLPQGWLRRRRGQGLCRSQLSEMPKCFRGSAGHVYSGATGGPLLVLPPSALGLGRLATRLDVRSTTVCGTDSAARSCLRSSGTFPARNPFGHAACGGVVMGLSQNTQRDTPAGQQRTHTKEHGEGGPGKEAAQGQVAPCIESYRRNFAGKSASDSESRARKKKKRRGAVQKIGAVGNTMVGKKQKKTTNGRGKEEEKQQ

SEQ ID NO: 977720 - protein, 124 aa, Homo sapiens
RRDSLRVIVRWILEFDHDESVLSRVLLVNGRICQYDRGPGCCRGRRVGWHGALYNNSVKTLMERTEWKYGGPRCSSVWSITYISVVTHTYESYSVRGTSVKRDSPERCAERMHDMSVLAHHRTR

SEQ ID NO: 977721 - protein, 199 aa, Homo sapiens
MTARVWCGQRRRPPERRRVNKRQDTRAQVLTTAFGWRKKQCRRGNHLGERNRKRVGGAHCVAQTNRQTMKAPEGKNINVEGYGGVTTKKEIGQRDRKLAAQAYMAHNSTDGCSKSAKENNATAQTTEPKGRLHDDHNKQTKKTPNEQQTHHHEQNPAKTTTPHTSRKHTEQPEQRKTSKNAPNMNNRNKNNTDAKRTTK

SEQ ID NO: 977722 - protein, 67 aa, Homo sapiens
GEVAWQADRGLRGEGWDGTSLGDPVLRNVLLASQVAGLDRVPEVCALGLSSGIYPPVGWEWEVPRGK

SEQ ID NO: 977723 - protein, 276 aa, Homo sapiens
MLVMAPRTVLLLLSAVLALSRVPWAGSHSMRYFDTAMSRPGGGSPVSSQWAYSGRPRRFVRVRQARPRVRERSRGRGIRRRRGRSMGPEDHRIFKTNTPDLTERACVNLRRYLETLMMQKGRGSQKSPLPRMHLYGAGERLRARDLGAPSPSWRGIEPKVRAVNGRAHAHLHSAPWKPRDPLALPLDTGGGKTGGGSGFNPKAGQRWRRAGPGCGPEFKGQIRPEPWGGGHPFRFATGGVPDGNYLGRHRDTRLRLGNAAGPLAKEEHVVAQATPI

SEQ ID NO: 977724 - protein, 71 aa, Homo sapiens
  misc_feature (61)..(61): Xaa can be any naturally occurring amino acid
MARARLLRRIEDRELRRVYQHTLFEGGETRVVAVSETTIGVIQQPPSNSRWGGGHKSCGAXTTYSSYSSDL

SEQ ID NO: 977725 - protein, 564 aa, Homo sapiens
ASPFSGALQLTDLDDFIGPSQECIKPVKVEEKGGKWRGQGIRIEDDEELASKLTNDGGTRRLEKAKVSLNDCLACSGCITSAETVLITQTEPEELKKVLDANKMADTHVTHEAGRMFRSRAQSRASLAAPVSAESYRYCLEYEPHSLPEIGVHIRLRTPDVSSMGTSVLLVRATRELVQEIPRDRPTADKALPLVGSDCPGWICYGEKTPGSSSFPNQTAGRAQVMGSWPGIVAHRIIEPGQVYTTGRRYRKGGTNRVQTDTTEWQGPQEQEGREHKNPRRCYGPKGERSRMYSGAARISKQTTKKQYADKTKKTKTTTHKNERQNKTTKKIIRRETKKRQQANKRHGSTERGGERGEIGGAKKLDRRAEEKERKSNEEKRRGSGSKARRRDERRSRRGKEDEEEEGKEEDRNKKTQAGKERAEKRKAEGERRRRDARQEEGEEADGETKKTSEGRTNKRREKNRDNRDDKDENEKKRKENDEKQRTKRDEREKKQKRNRTREERDKRESTGNERQNEETNTARQQRDKTTQKPARKTPQRQAQQIDTSATTSSEREKHEDTQR

SEQ ID NO: 977726 - protein, 353 aa, Homo sapiens
MMGPLTHLLLLLEEGKLVPKWPSAGSCGALPNVGLPLAHRAHSGMALHGVQWLFGWTPEELSDAAMDPALLPSSPQISEPGPPCSLVDNMVTGSDVTLWLHRAHRDAGVLGETPHCTLGMPRSLPEPDQLQRHGDLDEFRAFPNMHPFTDNFLSLFMAELFAPPRWLRRAVGPTLDPGDLLSITDCLSGLPQRLHGPPSLLCATASPPVVYGLMTGEHATRVPAGGMKTLHDSRVSVSITIDPKEAHSVVSPFTNGRKVHAARDMDQTPRGYRDTQNSEGQRTRTGKHAPKTRYEVRRRHKNTCDDRETPRRQQWKLSTTVQRTPRAAPTPKTTKAAALTAQAPASPGYPPLS

SEQ ID NO: 977727 - protein, 302 aa, Homo sapiens
MTRTSTNPRRPGATGNSQEDKQHARQQAQSSTRTTTRDTRKAQTTLHTKTREAAHREPRRKHAPDEDNTSTQSHEKKERTNAQPEHTLWDPQTQTTHNRQTHQQSRAKTTTKHDNTAQTTEQSTQKGARKEAKRRKGTKEREKSQSSDKAEGAGAGENNKKDGGDGGHEEEETEKRKAAEAGTNGDERGRERQEGTGDRGKEEEGEKAEEDTKRRRKQKEQTMQETGQGEKRKEGGRQARQKKKRERRQNERERGRAKEQQKADDEKKEDRTRRSERKENAAKDRDQEEKTANPRRRGDAEE

SEQ ID NO: 977728 - protein, 359 aa, Homo sapiens
QETPMGDLHDDFTCAEPTSKNVQFVFDAVTTVIIKNRPVRTCGSSSEWAWREDLSGYSGRNRSSIFVSLRQHSLMGTMGEQERSRLTSAGSARPSSSPSVLSLFSSSPVSPQLQNVKGKGLTRGLTCLKACPCHEMLVIVAMCTPPSGHLYLVFNPIVLFCDDGEGGTVLSLTKDAVWRGPLLLQPGPQLMPKTRPMTQTKVHMLHGRLLPKSPNPIRHRRNPKGTNSTKKRETPPALEHPKTNWVHPGNFTTNEGQRRTTMDSTRSRAPSTGNRHTPQTKERRPRAEARHKKLTVDDYLRNAKRAADPEHKHTGPDDRLAHTARKKQRDKEQPVTRAEIARGIAARKKAKNHSAENKN

SEQ ID NO: 977729 - protein, 282 aa, Homo sapiens
MTQTQQQKKKDAEATRAEKEREQRAGTRETTEGEQRERRREGGEKGERSNAKREKERREEKKDETETRKETNKKNEHRREADRKEQTRASSREGEKEKEQKKEKKREKDRKAPRQQKKNEKTRTSKKQQRTKDEKTQEKRKESKNTREKKDKNDKKDTYVKIREESEKNRTKTNTDTTRKANTKHNKQREAERQRSERKRRARNTDREETKRQEKKQQRPQKAAQVRKNKEREQQPAEKRARNNRQNNDRKRQSKRQQEQKDTTGTTKTTTRRKERRKKQKK

SEQ ID NO: 977730 - protein, 359 aa, Homo sapiens
MPTTQVYPVWLWKRLQLREWHLYPCLPAHYLRSLDGLMLAAHSRCLIVPPLARHLHRLPPPAPRRCAAVCARRAPSPSSFPPALPSGPSAAAAAPPHSLPPPYSRPPPHHSSPPHRLPTRRCAAPACLAPPTSPPPPPPAPPPLPCRLSPAGPLATLPPVSRALPAFATSPLPHHPRPRAPSSPPRALALHPPASRPRLSRPGPPPCPARPSTLIPNPPPPPPPPPPPPHRMHNRPDPTPAGPLPYSPSEPLPSPPQPIVCSSNKRTNQHRSPTTSSQARPPPPPSHPSPPPPPPPPPPFSLISSPPPPHPPPLSPPTHSHPTPPPPLPPPPPPPQPPPYSPPPPTPSTPSPTTHILPT

SEQ ID NO: 977731 - protein, 106 aa, Homo sapiens
  misc_feature (13)..(13): Xaa can be any naturally occurring amino acid
MSNPKTAPIKHQXGAAAAGSEGTPTQEGTPQVNGTTTPLAVRPGAHQTRKAEQSAAPAPGIQTHGAGKRHVWYSGRCPRAARRGNPRNRGSNTGAPGAPPPRPTTA

SEQ ID NO: 977732 - protein, 475 aa, Homo sapiens
LCQLLWSSHLVTSGGGRKSLEREEQLSLRKSRSMPAPVPHGKHAMLPASSIMLYPHALMEPCYDGPSDQTVTTWHQLVTHALFPMILVKPTVKNNCPTDGQLTNYTLFKQQILPTIQLSDSALCAMASGERRTYNGPWRVGRPGLLQRDLQSMLTVDTNMVLRRSCSLAGACTWGNLLCHSPAPTHAWSHTSTNSLTTLHASCTHMTAYQRRNTTPPARPPNHYLPPHKNAARTQPILPPTRPHTHPPPRPQTPAPYTTNAPTHPHHNTHDPVTPNDQSPGALAPRPTQLTLRSPQSHRHPPLTPTTERRNHIRQLSKSHPSHAPPQPPTHAHNTSPRPPTPRQPTPPAAPPRGQAAEWQHEELGAGTPSATEGPPPDASPRPSTNSRDHQQTPTPATHNAPHSNAPTHNHRNKTHARFQPRHSQIRIPQQHHTTPKRTHTPQLTTHTTSPIPTPTTTLHNNPHHIHDIPTIHHT

SEQ ID NO: 977733 - protein, 223 aa, Homo sapiens
QVGSEVQSGKCESSVLGYSDTCLPDMGRLEGQRVVESVAFCVHGWEIGHCHWQGNWRLRRPPGRFSIRPPDSWDARSGADVVSCSSDPYCLQIKRYDHLEARAEKSSREKRHRGESRARCVLPRKDSSYVGGECHAERQISYGPQRVNVFRRTAGSNTMCGVHEKLHLVSPQSADPGVSSREKDSLPAVEETHTVIHDANGLKVDGFLAWIHHSRFKKANGAN

SEQ ID NO: 977734 - protein, 72 aa, Homo sapiens
AWIEYCCLIGDTKSTERELASRRQHYKLPVHLISELGAYTASSVVPGSGRPCHSSKARSQPCAISYNPCKCA

SEQ ID NO: 977735 - protein, 119 aa, Homo sapiens
MRFSSLDSDARCRVLDAGAEKDMNAPWEKETCGYPGERSCLSNQPGKTIRLGLHTHVKPDEVPRMEAGFWMDRLLMFVSVYHECFLYEKIIFVRLFLVPLLNVAALMGRMACYGISEKT

SEQ ID NO: 977736 - protein, 130 aa, Homo sapiens
MGKVKVVSQRDWSYWAPGHQGCILALGKVRYCEPSMTPFIEPQLHGYTCANMIPAHGRIPWHQSKAENGKLVINGNPITIFQERDPIQNQVGQMLALSTSEGDPMDVNNTHGRRLGDHKTEGEAKRDIII

SEQ ID NO: 977737 - protein, 236 aa, Homo sapiens
MIPPSGRHSMCTVKAENGKLSHTMEIPSPIFQERDPSRNQDGAMLALEIVVESTGVFTTIGEGWVLIAGGSHKGSSSLTPSADAPMYVMGVNHEKYDKSLKIISKDSCTHQSAIATQDKGQTTDNISVIEERNSMNNRPCTTHATQKKEGIEQQTRKQERAEETEERNTKNNKTTDTTRNMTKEREEKDKHRTGKREQQTKRTNRQYTKNPNNKPKQLRHTEKNTTTRGKTQQKRP

SEQ ID NO: 977738 - protein, 362 aa, Homo sapiens
SWTAPFPALGWTIVVQELPVQVQEREVIKLCRPELDSAGSSTVDFEISTISSLSVRQLVCVVCLPASGEEGHQFIADKLSILSKCCHAMVALIYPFAKAATPTSRMLPSAMVDIVCSPTPFLIGLLLQLLALVRELTLEEVLVVDLVQQTVPQTDGRLRTPYLPRKASGGPGTHSGTEEPSWLVEQDAGPLDGKATGQSPGPLNEEESEAKERNYTRSMGDTYVIEQQWGEREGETLEEERPPAKLAPQRAIGNYRRVTRKLKRYRGDTKKGDCPRRRQRQEKGNAQHPEKTQRGHQRETKAERGTPKRKSPEKQPTQEESHRTSEKAGAPKRHTETTPSIKLTRQRDAAYHREAEKRRTNA

SEQ ID NO: 977739 - protein, 83 aa, Homo sapiens
  misc_feature (71)..(71): Xaa can be any naturally occurring amino acid
AELVAFNRAACVCGELLERVGTGSSLILTGVEVDAAMRLTKVGNRMTFFYKLAMNCHRSFEHAESSAGHQXPFPTAKGIMRSQ

SEQ ID NO: 977740 - protein, 505 aa, Homo sapiens
MQRASVKLQMCESLMGPSTPVPIMEDGGGGSSTSRRPSRGPIGRVLEIKKHKTRDTDRRGFTERGQVRHWAGRRAHMQIDEEKRRSDERTRRDGARARRPQERQMDTTAQPHDRTRSTQQDPHHHTNRKQSHPREGQIKQQPKARPRQQGTDTQPAPRGEHSTREHLKTTHRPRTTKHKGPTQRESPKKTTTTTRRHRSSTQHPPTSNDRRHERRQTQQNTHLAPNPPGDEDTRQHKRHRARDGNDANPNADRNPNKQHQHTKDMHTHNKREKKNNKKKQNKRKEPHKGEGDHIPTGQYTDDEHKRRQPQEAGKHTDANNEREQTEHDNKTNHKERKSSRPRQQGTQQRAKKQKTSKQKQEQRQKQKNTTAARKNERRKKQENTEQTEGATKERTGETQSTQRSHKKQKTQRKKGGTAKQKKTRDPAQREDNHSAAEPDKTRESRTASTPTRAGHAHRQRRRKRQHTEATEHAQTKRTESAHSATRGSGEAHARTQHAKHRRRTG

SEQ ID NO: 977741 - protein, 185 aa, Homo sapiens
MNDTTWNEETSTRKRGPRHTIEAANDKQVAPPQRQTRQCNTTNTEKKQDHDNDATTSREKTNKTLEKQDTAHRQRTKGQNKKTKDNKGGGRNTPEAPPHHPATQPRKKKRGEEPRQPQRPPRRHQHVDRHETSVRHTNEPHENGEEQRQHDHRPDEKNRQLETTATTHADQKKLKRRETGSKERY

SEQ ID NO: 977742 - protein, 330 aa, Homo sapiens
NRTVPFCGTFAAFFTRAFDQIRMAAISESNINLCGLPLRRVSIGEDGPSQMALEDLAMYGQSPHQFVFYPSDGVLTEKAVELADNTKGICFYRNSRPENAIIYNNNEDFQVGQAKVVLNETRNDQVTVIGAGVTQHEDIRPLTELLKKDKITSECWNPEPPYKPWTENSSLDSARANKGRNLNGRTIIYEGGMGGWFQMQEEGETWHHVNQQGSHRENKTVGAERARKLVSTGHAPARAVEGPSPKGPRAGMNRGRQTNITEIRARGTRHQPREHYNGHQTTQKRVQTPSRPKAKTRRIKNTRNNTATRHRITKETRREPETAKRKDETK

SEQ ID NO: 977743 - protein, 269 aa, Homo sapiens
METSNKSHDEPEQIGNQDEMKTNDRNTTDQKTSTNMRNQRSNRMSNDNPTSTNRMQEKSNTGKNRKTPGKEKTMHEQDNTKEKNKNKHQWRTTEHKEKNHTTKRNQHNTDSEKTKLKNQKEQEHTHKLATKENETQDKKEPVTQTNASPTNENKDKQETMPTRTRTRKNPKKHKRRTNPNKRTQKRHNRTETDQHQKKKKRKTHNTKTEEKKKRRPDEHEGTDTERKKEHGRDSKQERQKNRQKKKNNQTKHKQTRMNKRQRKQKKDKT

SEQ ID NO: 977744 - protein, 128 aa, Homo sapiens
  misc_feature (54)..(54): Xaa can be any naturally occurring amino acid
  misc_feature (111)..(111): Xaa can be any naturally occurring amino acid
SRGCRRICVSENSGLLQSPCGQGPGQARATLWTHAYRVSGQHAFCIIAHTCARXTYLSALTKVARLGVAPVVHEMPLSGHNAVTRRVSLTYRIIIDTDASWHGNSIGYVGXSSVRSSHNSWWNGRDCA

SEQ ID NO: 977745 - protein, 362 aa, Homo sapiens
AGPLQPRVSIIDELFQDRLRSPGSPRIPTTTCPSALPHRRPHFFFPRVTDICRASLSAPSRPYEPLNFHAMYQPFLEMIHRGSAGHGHTNFHSPDIPDNHEQQNTYEKATMTGLCAGRSATSTTGCLRMKDKCDKCQGDLVLEELYHQQTTSQAKLLRELDELPPGTLRGETRKYKELLKVTYQWTDCYTQHIQSLTWKQQTRRTTTTGMTRESKTSRKEKDQYTTLRGNQGEPKQLNSERTYPEITEEGQKNLQNGNPHTGPDNRKRIQKNAKSRETGRKKQENNHKNTETKEKETEPRETKYTPERGGTRGSSTRQDRARQGKERERHPAEKRQAQKQGRKDKRENGTPAQNGREEKEKT

SEQ ID NO: 977746 - protein, 165 aa, Homo sapiens
PDLKNRSVSGSSIIDIELPGSEQGDLPELKEFVDLFYQLAVTMRGAGEGPGRAVVLADSVFLEHIITIFESRTLDFRGFVRCYRAIRVVGTCEDKGIPGLPHWVWQPSRDGPTSNFQSLARGERQDQQLDLIPLCLFASGVVDNVNLTVLMPRPCTLLLYCCVIS

SEQ ID NO: 977747 - protein, 117 aa, Homo sapiens
MGVREILLSTEVEWKKIFSLVAASFLLPQQKKTHTPRRGKADTLCGYVGKKVEPLSLRLNFCCVSRGRENHRETMGNGPPRDIILSLFLYIGPTTEYSYNFFSKALCGGKIVGECGL

SEQ ID NO: 977748 - protein, 376 aa, Homo sapiens
GPRRQRRSRAPTTHTQPRPSYRLFVRDAISAPPPSAQTQSHTRPSRPMVHQGPLVRRSCLIARSVSAVPGHRRDRRDASKPEQRTNDVRSDPVTIRAVGEQQLSHRAPCRRASYSRRVRRCRRCTAIAASVVARCEPLRGGQGMCRGRFARFPAQDLWSETFLLLRGPGSGPIPRANADVVHRDNKHAAIGKTDRKWVEDALAPRRASKWDPGVYPETETATNRHAKRSADLLPHWDRPTAQAKFKAIPIGVRAPGKHSGHRDRMSERAAPKRAKKCKRGSIGGGRNTFRKREKEARRTEPGQGRNGVGAAAQRNREGMQKRQRPIEPHKMRENRTREAPKELVTRKGRSRRTAEARNRRPPIGAPPKGKPTISNS

SEQ ID NO: 977749 - protein, 108 aa, Homo sapiens
MVSASDSLLENDRQQTHMLDVMQDQFSRASKHHRRALPGPGSSPGSPRITYQYLTLHELQHRRSTILLSQDSESSAGCMPYLIGTSHLNLQACCEHLSLEMIHDGYRK

SEQ ID NO: 977750 - protein, 120 aa, Homo sapiens
NHLLWEMSCVRCAPTSRNLVLVCPPARQAPYDAWLAARLRILLVGVFWPYSLTPHVFSPVDVHLTCNSDFAVVVAAVRTFDVHGASVISRIYGVHASFQMLGTTHGGPTLSSLPYTSDNL

SEQ ID NO: 977751 - protein, 117 aa, Homo sapiens
MGYAGAILGEGPLLSCGWWPIFGHNIHLQKDIKRLQGSNHNISHGGIKWWITTSRVLMCRGRGLGRKFVGYRGEYCAFCRGTNFFYSLGGAFGVKITGENKYSKSIHEPSVSKYMIE

SEQ ID NO: 977752 - protein, 351 aa, Homo sapiens
MVQVNIVYQSKTYIKEESTICNRNSCSTLPMLQIFQETHRTRSGHRQVSLYVLTIPSTSYIVFTNKVLQALYHSFTGKSRCCVDIPCLNTASALTYIIKKLAMSIFIQTSYPNQTGISCITTRIYGNTTINNKKTINKINNRQGRRENEHTRQATKLPRERERTSRETMTRRLTHPRPIPQETKTHKSEEHHRKKKRERARAYKKRRHHKKNQTRSRPTTTAKRTQKTVTRNKQRRENNKTKARRHKNDTRTKQTIIHMSGKKATRSTRPPQTQQTTRSARSSATQHTHKPARGTDTHKTAVSSDSTSTSINHNKKSRQRTQAKATTTQIKRKQNTFQHNKEGSYIQSRRT

SEQ ID NO: 977753 - protein, 106 aa, Homo sapiens
MIHMSYYSLYKTMETCEDGNESMSIFYQEFCRTSVCEWTRPMHSHNNKHDHRSMRDISHEQKAYDVNLMRQKDRCMEDSNNVQTNTYTTVSDGLPHYNQMSPIDSQ

SEQ ID NO: 977754 - protein, 121 aa, Homo sapiens
MSTLGNFQECGQLAAIWKFGTTVSTVHPSGKANATGGTMPKIGALHFSADAFLVATFREGHFFTSEFWPVFQANEGTFNTVDTGQNRSFTSKRRNSASTGFSPVDNHDTMGLLLGRPFVSP

SEQ ID NO: 977755 - protein, 304 aa, Homo sapiens
PLPSDSSIRLFHASSRLSAAATPDLIPTPVAKRYFLYYFLFSRHYMTSWQGDPVAGPAWNFIPVTVPHTSICMSTIQNLQSFRPHMHDCNVRDDRHNIPRRELQDYNSVYRITANWNGQQHDHCNFTYVSKGHLATIAIIAPNNNETSVAISFIPKQKHNFGRAHMRNLAGHNDTTPMHTYRGTQCSNNTAHITPAGTHTRTHTHPFLDPTHSVICEQRIRAHPVHTREDRRTTTRQYNSRLNPIDTLTHTAPMQPPPPRPHPVGDSNPCPSLPPQHDHGSPTLNSTPPASCAMDHSDRDNTGP

SEQ ID NO: 977756 - protein, 196 aa, Homo sapiens
MRRHASERERNKTRRKNKTIKEASKNAKKHKINKKAETSDNALRNKQKRTQHRHIHYHYSPTRDEARTKRIDKRTQNQTKHTKNQTEPDIQKNERKTKNTDTDTETEQPEPNNQHSQSKQKMKEEKERNRERKQQKTRNQGHKQDKKREKEEPRRKNRKRIRRHRNGKEAPEESTYKRQERHNNTNDKQQTTQKNT

SEQ ID NO: 977757 - protein, 411 aa, Homo sapiens
MPEGTTPVGKEIIDRVLDRMRKLADLVTPGLQVLLVFIQQLLVWCALCSVFTSLLMERLSGEIMARSPMLDVHPFTQHPRFPRAVVEPVEHPSSRNHTHPWSHLHQCHSMVSTKAGPSHAPSSLSANLRIISSGLNHTTTAYNLAFLQGNDLVYLPIHLTIHCDYLTATALDTLTDTCTSTFQDRKAMGGHINRHANPTIPTGPNILPHCTIFCLQKGLNHETSFPGSRQDSPNGHAPLEPTPNTTDFGANRYTHRTPETHTAWTSRTIEGTQNAKNNGTPAKQVNPSNKAHTTHTARATTTSSRGTVVPPRSPQKHDTTPTHPPTPGSHGGHKNPTRIHTTAERHSRTPNNRPKPHAAATRKRRAKRRETTAEQPTKTEASRRSGRRTELPLHARPAKANNREHPHQTQQ

SEQ ID NO: 977758 - protein, 84 aa, Homo sapiens
PTRRPRVLTTLYAQLLSDRGICQPEQQVSVKTTPKRQNEESEKTHINIVCHWTLYDSGKSSHYWTSLIYNLLVAFDNKTPMTNV

SEQ ID NO: 977759 - protein, 104 aa, Homo sapiens
MGGAEFILRQRRAGRAAVYINNSCGGARGNSAAQHAGELLSGGRQKDNLSYYCAGGGRGTTYCVRDTTLYPISEEILYKRRLGGGEIYYKSFRRGGIYRGGVTQ

SEQ ID NO: 977760 - protein, 88 aa, Homo sapiens
GGSRALAPSTMKIKIIGPPERKYSVWLRRLLLLDRRVLHLPVSMWISEQEYDESGPSIVHRKCFQADYDLVALHPFLDETPNLRRITR

SEQ ID NO: 977761 - protein, 440 aa, Homo sapiens
TYSKTLLHYVRMQAHASASPRHSALSQHNPSTLERWVDCLNPGVRDHPGQYGKTPVFTKNKLGVVEHACGPSILGEAEDGEDCLNPGGRGCKWAMITDPCTSSLGNRERQIPGPMPPSHGPVIKTKWGWSVVSSQSDNHSQGMKEHYERQEILRHSTGLYHGCTTPQILYYKHTTPWPSHWLTTAPDEDRRTTIASRPDGRREHHHNKPERRMSKEARGQRKNPPPQLEPPKTMERADKQNNWHTTATKHKYTNTQQTKHNTHDTQHKQHPPTNGATNPYKQTHHAKSRKKRDHNIRHRTTTRPPPSNKNKTDKKQENTHKDDEQETTELKRIEQEKTGHTPTQQEDMTEQGHNSTHSGARATRQPHSRGDNTGSAESSARSQDPVTRQRRQEQRQTRRQQHTTRRDRRRTEHKTAENDHTQQQTKRTRARRERTEDRAT

SEQ ID NO: 977762 - protein, 72 aa, Homo sapiens
QLHEGPAEMMPDGGRAELLYLTLLPEADSLRVQCLCECAWSCAACAEHPGPWYAPIDVTMQLLLICAPDNPG

SEQ ID NO: 977763 - protein, 424 aa, Homo sapiens
MVGDERRRADEMEKEKKSSTHAPPHHRERKSHIISHTNISPSQHHYAVSYCSRPRAEQSNRLKRRPDENQHEEERRDAQTTRRTQPAPQERTHPHRPNDHTHRKDAYRETHHAHPYRPYNKTYPPLPSRSEQHSETILKYAAHQKPATQTIRTTRPPNGVHTEQHSSARTTSPPTAAHERVHSSAYERAEHDAARTTRGPTHGERRRRARDRSRTNRASPYRREPASGARDLQQQEREARRGQASAESPAATPPRPYRGSSRARHSSRHAAHSHTREDTQTARRDQRKADESKHAVRGVEPVSDIAVAKTMAHHDGGSRNGRASMRQRIGGAQTYREKRYRNARPLSLASGHRGESLDREQSDRSTGRRCHQETSMLRGRGAQSDSATHMSSRQTKFDIAERSASERSPISISQTRTPSESARR

SEQ ID NO: 977764 - protein, 379 aa, Homo sapiens
SHHGVSISRESAPSSLIRKLPNTKVIQALLSTMFTGSLLLPSYKASEYLRVSLSAFSDGLCYGSTFACKPQAVHGTSRQLSGHQTYPYTYSGVSVPPKRKYCHMLAVQDDRRLGCAKPAALDTWALVVDCGVDLLSVVSPVYLSDGLLRVNIIINKRITKVRKITKRSGGAGDAIGNIALTVGGPPRSGPPRRNPTYLCFAGRNEGDARTNKRERTQIDNKAEEEKGGAGGLTNSTMAKTNVVKKNAWRPRRDHPWGENEDPWNEPKDGENARLLSRRHSDSHRKEILINVPDKGVEEKQHKKAANQKVGLTRHTLIEINSRGTYEQGTTRTSENREQKTKGYYQRRATLYRKQRITNKTTRQKDQTHTHGKTWKQQQE

SEQ ID NO: 977765 - protein, 324 aa, Homo sapiens
RVATRSNHMAERESLCVTLRMKLCYRRPGLRARDGHRHASSSSLEKSYELSDVQVHSPYGNERFLSALRPLYPAFSFLVHGVLWHPRHYPSTSIMKCDVDIRKDLELPTHVLSMAGDHPCNHGHCRQDAEGDQLSLEPSTMKHQDRYAQSLSARYSVCESAAPSWRSLSTIQPDVESSKQEYDRVLAPPISPAKMRSKRTYDMRRVHPLLTKHENEDKRDEIGMEYSETVTVRGQSDTANCAANRETNWTQSKRTEAHGRENHRRADEPRARVTLRVTTQKRKHERRKERNPHSRSTQDHGTREQQETTKHRTEAKDADTATRT

SEQ ID NO: 977766 - protein, 189 aa, Homo sapiens
MWRRRGPEQRAGRGPRWGCTAAGWELAPSPRRNLQRPSIRSEGRSWTEDQTSPDVKAVGHDQEQTWRNWPANTSRRSGRILSSVCSSRTCVQPLAWIRWPLDKGIRSEHAGAWGTSITKLGVTLSKDVPGQLKASDMDGLILCEEPTINQVFAREGASSTIDVSQDDLIRRHQTKTKGNLSHGFGIIPV

SEQ ID NO: 977767 - protein, 428 aa, Homo sapiens
MQGIYANSTPHIQRRRKERSRAKGPEYTCIEHEREEQQGTQKDDRRTGERKDRANTCNTRQIHECNLPGMDDTDTRTTTTEHMENVIRQQQTGHTEQRHNGDMTIETSTPEEYAQPWADTHIWARYHVTTRGDKHTRGHGYNHHEETEETTLTKHPRDNYQTTDTHIRKKRHQQGHRRNTGEHKQGIDKPNWSHNETPNRGQRSRRIKRTERQTHETHERDQSEKEKPQRTECAEADNHRSKRNTHNKKAEITTDKTHDNTEANKVHQTTTGEIEPTHPRNRTQGSNNTRAQHENMRHNETAKEATTHKREENQHRNTKKRMQYTRNRDKEHTHTVKQREKGTAAHIIRDIGATRNEQQGRPRLYTTRLSTTTVVRKRTQHRKQCRRNKTPQRTNPGEVRHTENKEHKRTTKEEETNERTTNTSGVAT

SEQ ID NO: 977768 - protein, 105 aa, Homo sapiens
MQPNQVKDPTGGHGHVTNHNKTTLDNNGNQDYVIRDIGHHTINEKLQQTLNIKKKKNHGTKAIPDGEQRNTQLRIRKLHTDHAFKTASNTTSRDEHPCDRNITSQ

SEQ ID NO: 977769 - protein, 402 aa, Homo sapiens
DHASGLTTSEHRHIYTVRDRGGAIFWHALNPSYVFRSLGPWLPGQCPFSHPRADPRVFPLSRLQHRSQMGTWYIAVPWVQGLLTPRSHIRCDLERKRTGRDRQKLPTQPDASGDLYSNEQPADPAGHTVPETGKSVTCTGEAHTRIPDQDVTVALTSTLNYQLNPSPYKSRLNTISLMLSTTRTVTAHEPALRGPASLGYRQRKLQVTQLTRHWEMPQEVTLTPGTTPTSGEETTGTRETTLHRCNLRRGWLQGARQRTMPAAEPKHMGHKGTTQTLARDDIDQKQRPRKRTHTSNTGKNTYGTEESPSQTADTKKNMATTDVKSDTDKKDDKRPGKMRTKIENNRGTPKQPMESENPETQQQKKRTTKEAKQTQHAQHDRNHHKQTNRTTHKDRRTQASKT

SEQ ID NO: 977770 - protein, 52 aa, Homo sapiens
MRRAPFLGLTGARLTSEHVDQRHVRCYETLGVDNELPATGKGTHDGGEEGAP

SEQ ID NO: 977771 - protein, 176 aa, Homo sapiens
SSRRSVHRNEGAENSGTEREWDGSLPKSSDELRDTSALMIRQTIPHPRGLLSVSSSAKADERKKSRLTYESGEDEEDEEEEEEEAEDYQAIRRQGKRNMETEHLDYVCQGPRHGTTHETGPDLDVLAVMRESGDYTQYDNHRCPGMARTRETSEEKQLEIPTTKRDERLEHIRNMS

SEQ ID NO: 977772 - protein, 303 aa, Homo sapiens
ALGVGAEPDREQQASVTSRSWGHSGPADHLTSCPYGQRPLMRMRTCSWPWHYSHVRAGGSWEETPRDVFLRWMPWFQNAATESKAETRRHIHTHMTLREGDTIQYSYHTITPSDMQCRTTGGPGSGGAEKAQQSETGRAKKDYKAHVGTTPTYHYEEKIKERTRHTLEREPNKKTHNELDAVVTTGTSKLNRWKLRKYSPDTQDSAERRRGRNNEDDTRHAMRDHKQIGETTHNGQAHERHQGATGAIGSQHTRPAESRKMSTRQHPRERHANIGQEDPQPTGIQATTRHKRASQDTQINNQH

SEQ ID NO: 977773 - protein, 210 aa, Homo sapiens
MEEKSCDLGPQVVRELGLRRGGTEEARGELAPGAYPAVQKTSSRPSRTPGSELGDPEDPGEEAADGSDTVVLQSSFPCTPEPVNPEPDASVSVSIQGSSLKALHRLVDQPDRGGNEVSASCRANPRLPVQSTSSRAQGELDQLKEHVAGKDDNLGNKPDERGFRLASHLGPPGYGRRLRTVALPSWSGVPNAHILAEKSERAPWAVGQHE

SEQ ID NO: 977774 - protein, 173 aa, Homo sapiens
  misc_feature (146)..(146): Xaa can be any naturally occurring amino acid
EKVEEKASRKERKKERGGGERRHGAEEEEEDEVAMDGEEEDEWGMRWKMRKRKKEDDEWARRLKRAWQKRRMKRIAESGKRDDENGVIGGLRLHGNEAWGLRRRFFVSGRRVGGEWASPEFHALVVSILDVLLASWCLSVDPGAMXDPVVSVAPSSRFYMSGIVAETTSRPHP

SEQ ID NO: 977775 - protein, 149 aa, Homo sapiens
MCRHPTREGGARPPQRHELLGPEDKQGRSPTLKKSSHLQQQQQTYGNHRQQQRWVCHTIGKNPSRREQTKINQRDDTARAAAVTDTTGRGKEQPRTATKPVPAIGRYVGRSVSTAGRRSTKKPALRQHKDKEANKRGRTDTDSKGTHRR

SEQ ID NO: 977776 - protein, 144 aa, Homo sapiens
  misc_feature (40)..(40): Xaa can be any naturally occurring amino acid
  misc_feature (50)..(50): Xaa can be any naturally occurring amino acid
  misc_feature (111)..(111): Xaa can be any naturally occurring amino acid
  misc_feature (130)..(130): Xaa can be any naturally occurring amino acid
PTRRELLRQSTTFFESDSRVPRLPRVDTCAAAGTGASSFXASRKDRSSSXRIQVFRVPAPQVSRADADREQGTGMAKAAAYRASEPCGTDLRPVVGVSNTEGGDHRQSTRXKRTSPSYVAFSDTERAHRXMRPKKPQVAPEPAE

SEQ ID NO: 977777 - protein, 126 aa, Homo sapiens
  misc_feature (63)..(63): Xaa can be any naturally occurring amino acid
GGHRVTLVIISTMAWGLLLLNSSINSRAQGARGPMSASDSGRASVVVRSSVCTMFVCQRECVXLINVCGKLMLCCTVDVAIEYSVLVLHEYPSKASARGEMSPRETLLSYSEGSVTSVALSEGDLR

SEQ ID NO: 977778 - protein, 128 aa, Homo sapiens
MVGVGETAPGERARETSLRASVRRAREKLWLRQLGILPRTAWGGRRRQIKDREKSILPLFLQKKRHTIQKYYYNNHKHKSVVVALWGGAAKQRERHTSFISLSREVGILYLTRLCLILLYRAGDAPSN

SEQ ID NO: 977779 - protein, 113 aa, Homo sapiens
MIIIGGPLGYGEERTGPGIKEYSVVVLATSVPSYSHFKRITVWCGMDTALLVKCGLEKSPFGLGVHQINFEKGRSRGKPGRCEDIWDADDVVWAKNILSLGGPGYIFTRSSLC

SEQ ID NO: 977780 - protein, 185 aa, Homo sapiens
MDELGIAELELQRFLYEEGVISLMTQEEHLLELGWFTMNKLLPNAVYKGSTGGPRAPAVWAIARSPHSSAKFGPRVGGSLVLRKHYEVNVVPLTHPGEHIQFFHTNDGLFLSWSNVWQMMKMVMKEDEVQKVVTTWNYQVVKTRECGFGTDDAVTVGPGKGVGHRVDSESWGHEESCCNRRKPVV

SEQ ID NO: 977781 - protein, 92 aa, Homo sapiens
QRVRPRVGSEGLPEAPHPEMGAIFPNPPLPIDGHVVGLAVLLEVVVIVELVVAAVMCRRKSSGGEGGSYSRGCVQRTVAQGSDVSLNSLKKP

SEQ ID NO: 977782 - protein, 253 aa, Homo sapiens
MTEAEQQQLIDDHFLFEQWPVSPLLLASGMAGLARRPWYLAQGQIRTSWVWVNDEDHLRVISMEKGGNMKVRLFTRFWTWPHPSIENIVFKSKDYEFMWNSSSGLHPQHAHPTWVTGRAGYGVSDIKLPIWAKHDKFSVSVLKAVADFGTRGTRRVWDTAAVWRGSSTSPMLAALGFSEVELVHDGGWTRREAASSRWNTGLDARARASTELMLARNEAGPQPETAVLGPNVIAWQVAACTLMVLALVSPYLV

SEQ ID NO: 977783 - protein, 158 aa, Homo sapiens
MVPGPGKVITHSLSRFTKPYGCAWAGQGGVWGVEESVAGRGSRGGCELGDGAPTRAQGAQTLEIRETGGVPRARNSGNPEGARGPRRLGGSVGQTPCNFCNSPSPRLFLWTPKLWPGHLSQAQAGDLAGCGRLGVLCIIASSDVTYVRDFLNICAFAY

SEQ ID NO: 977784 - protein, 106 aa, Homo sapiens
MYPPRARQGHTQQYRYDVRRPTARRSTRAGKQTQKRSGSSGRHPNQAERHTDNRRDRHSTATTKPHSLARGEQLPPPTNTTEDTIGPATTGTRDTAEHHAAMTGRQ

SEQ ID NO: 977785 - protein, 72 aa, Homo sapiens
  misc_feature (56)..(56): Xaa can be any naturally occurring amino acid
RLDGWRWLDLTDSYALRMVHNSHSSTIFSRVRMSIIRLQTGALGNQLDLPASLSWXPCSENETVSRRQARRD

SEQ ID NO: 977786 - protein, 308 aa, Homo sapiens
MSLMFTNATLLKCRYFFKARRQMLTHISIQQGYQQLGSEKEQQSSNHNLPEEEGKGVSLGSSGMTSTGFYGSPPGARKAAWAKSSLSGCNQQCKLYPTPKPMARKVNCHGASRAKGEHHSSYQGNEAELRRPKYVPKCGKTFNNTSKLRTHQRIHTGEQPSKCTECGKSYSLKLPRIRHERITGKTHYNDQVQESKRRQPDLTNTNRTHKDRGKQRTKGNRYSKRHASVAPGHLLRHKKRKYKKQKKPEERYTPQQYHLENGGRDRNKRREDQVKYDKNTKTNEKKKQKTPKAKRNHEQTDKENQTEE

SEQ ID NO: 977787 - protein, 351 aa, Homo sapiens
MGYPTGESRNIGAERNKIQTKGQQGTRDEYNKRTVDTVGQQHQAHTPREKHYQNHGETAEPTNGEQENKKHGLPQTPTPYKEELKKAPNKGETPKTKHTPAANNRGVSNPKRHDHTPGPGPAIEQHHLGPTRRDTRTPTEHKIIYPPGSTRDTKQTEHTHQHDQAKEQQKQQRRRKNGKTEKKREGDEDGKQQRREKTQQENNRRDREREKRTKGEERQDKRKTARRKRENTRENEQEANRRREKQNKRERNRSHSNREEQKKNETQNDKSTEREKRYEKQKKHKRAKKRHKQNEEKDTNEKTRQQEKKKPKKKKRGKQRRKRIKKQTRQSSNNKQQKDKKEHTRQNSDGE

SEQ ID NO: 977788 - protein, 465 aa, Homo sapiens
DAGTRGVRWTEACKDFRGIGRHVLERTLLLLCGGCWLTLGRSGTGSMGDPERLIRQDELQETVQSQGKVEFSVEVDGKVQECCQLGLRRDRRLVIGEKPHEERKTLHQSTVARSRGKHEERMPVILEDQGAISSNNTREESSQGVVLSENPCIGPSCAHSSVRRLGLVDQELCIEGCMSGHAVRATEMWAQGAGSGPAHAFAGSFPEHEELPPRSELRGLKSGGAGSTNVPHGVADTDRGGENANDRLEMCTAGTSLPGAASVQGHQEYGSIVPGTGIYSAGKPREGCRHYRKLTVALIQHVAPKREGPFRLLDCYPRSRGSVREALIGRVSTEEAPETSRAMFQHLSLRTRTSGGSTAGRMGQSRFQEDRGHPRSPGERNSYEKGGTNGTGGTGEPGQTQGETGDEEQVEVQRKSGRRSTHKPSGQGAQATRRKDAKEEQSSESTREEERQQTNEHRKHETAHA

SEQ ID NO: 977789 - protein, 108 aa, Homo sapiens
  misc_feature (76)..(76): Xaa can be any naturally occurring amino acid
GCPGARARDYGVVEPSNQGPSQIYFSGELVQVLGPLEVLPFWSDPAPGLTAGSPGSPHDCPHTCYDSTVLRNAPEXRLVQECAAKKPYTPRIAPESPGYRTASRSTSH

SEQ ID NO: 977790 - protein, 106 aa, Homo sapiens
MMTRNSKRPPWDPLMTHITPISTPFIRLLEVPVLRIIGEGALYLSSHYSILALGSNKRMTWSISTDLTLAVEQEAPGKGRRHGRQHKRYRKAPEWEREEEKPPNCS

SEQ ID NO: 977791 - protein, 347 aa, Homo sapiens
  misc_feature (176)..(176): Xaa can be any naturally occurring amino acid
PVLCKDPVQEGWAEDVDLRVNFGMNVGEARGFFNEWENVVTFVLSAGWLTHGHPCFTRHAVRVVPGAVHGTAMSTPSLRGHEALTATSCLSPSPSAGHKHADLDHVTSQQCVSRGDCDKGDGEGDHGELSNAMHTALRTRRGHRVMNGQQRSGHTRGRTTQDHAESSVYAAIRCVXTRLWSIAITWISSATVAFVLRTGPRMPERSTMVPWTPRHPAISLAPELCGEPTSRQTLGALHGGSARDCHHALDSPVLISKVAFTPWEQQKTMTPEASPEKGSWGVAGTDGDGVGHMTKRTRKRAGAQRWYRPTHRPKGGKPPEGPLPPSYEGAPGVASRRHSRGIHPLQG

SEQ ID NO: 977792 - protein, 81 aa, Homo sapiens
MSTHKNNQPPLAKKRENQPKTTEKDPSPPERERHQPNKGPACTHKRSLGQTMLGRTTDEFTNTKMNYQSAAHHRGETNVIT

SEQ ID NO: 977793 - protein, 318 aa, Homo sapiens
MGRVRNSSDPMNVKRTYGQYHLTHVKITTNTKTTGQSITEHGNRQWKKNLDTQTSSTSELRVAPEEHPVLLTEAPLNPKANREKMTQIMLCDRSTPQPCTLLVQACAYRLIQPSGPYHWHRDWTPSDRRSPTLMPIYEGYALPHAILRLDLAGRDLTDYLMKILTERGYSFNSTDEREIVRDIKEKLCYSALDYEQEMATDASRSSLEKSYELPDRQVITLDMRRYQCPEGTLPALSFLGNGVLLRSRNYLNSIMKWDVDIRKEPYAKHKQHEKTTCTRDMADGSKGEKGRNQNMRTRHDTRRENTETERPRDTSTYK

SEQ ID NO: 977794 - protein, 124 aa, Homo sapiens
WASTVLVRRGPLSSVKARPGIGGGAAAISGFGGGGVWVRSRDLEAVCERVAPATELCSCVLCAARKYAVGSPEACCCRRTVRGRWLRGERGSTERVREEQALQSHACPPAGQIHHVITKVGGLW

SEQ ID NO: 977795 - protein, 88 aa, Homo sapiens
FSIIDLRSLHSGEWRERLLLLAQMFGVCLSSGMVARSSWHAHMESLGRGKCKCQWKGRLDGTSVDLALSLRGMIVLLDVVTCFKDYPS

SEQ ID NO: 977796 - protein, 227 aa, Homo sapiens
MPVNCWQRGAYTQVIFLARNKRDVNELVRVTSEGAGLQLLTVICPGSVATVPRAGPLSNGVSCLQASLYCPGPCEGPVPSVVSLSLGEHVFSGSWCYAGAECVVSPEEMAGSPVYSRACVAGIRCVLGLGVCMCHPGAGHFTFQRRGRRLFPAPGPGLLVPNVSEESFSRDRLGSVAWEGALCYNTRVCLSLCPLRGISPPLICSAGHGAAGWVNQLCRFPGAGPCF

SEQ ID NO: 977797 - protein, 198 aa, Homo sapiens
MHKTTKPQNTTKDNKQAKVNQQTANTRTTDDEAHQTKHQRRQTTTDKKHTNNKQTKRDKNQPHKHNREKRKKPETTKKQEKQNNNKQKRQHRQETNKTTKKETQKKENEKRRQHKDKKHQKTTTQKQTQKTPTTTTKQQKQPTANNTPKKEHKHKTTEKQPQNKNTHNKTNQNEQTKTKQKQSTKNNKQKKTTTQTNK

SEQ ID NO: 977798 - protein, 218 aa, Homo sapiens
RGWADGELRSSRRPRPMPKRMLPLRYVFPVLLKVRVSAQGVEPRRVRRGATRQEVSEKTKPLHVPRGARSRLDHVWDDVLCCRPPGQSPRKPGPTGAPEGVPVGRCCLEPQRPTDQEPVGRPPKLTHLGVRVRWSCSSSACDSWGMGHGGLRSRAGASPVAGSGVRTCLGLLAPVCCSLCWSRGIGLSMCDEQCLCTSVCHCSGDLEAGLMDRVSFHR

SEQ ID NO: 977799 - protein, 194 aa, Homo sapiens
MRAPKKHTTREEKARKTNIDKSKSPPGKLATQRQTQTPSTPKNRTRDNKDRPNTHATQETPHTRHRTAEKQHKKKNSKTQRVGTKKKEKPTHRHTKRTHHAGAQKKTKRNKKLQTTHNQRRRHDNEDTKKPTAERRRQREGGGARRAQRADCQRAVADEGAEGVGGYRKRGSRGGGGAGRKRGAERARGVRERG

SEQ ID NO: 977800 - protein, 206 aa, Homo sapiens
MAVRHAACMARLSPKGPLVKSHIQHTSGSLLNVDDARAARRTPKGVPGATTQAQDGGPRCTGSATTTHGHHLGYSRDTDGSQPWCTTETLGLHTRGQRTGLIAQSKGEHAKRYQATPKWTVAQCDQPQVTRPARDYKRTRKAHNPTNRQPDQRPSEENHTNELDRTGAMRAPRNTNSLSRLDPKDTQKNVNVGIPPIPQYGRRGWA

SEQ ID NO: 977801 - protein, 224 aa, Homo sapiens
MWAALPRDGDGRTPGDQRLHRGHYPWGATAEGGHTANHGQRRPSNYDPIERTDVLSTSADPGNNAALTYAETCTKDTLPTTERGVATNTRQSHTPAIKHLSVQSELRTWPAHQHKSSRNPELERTSAPSNQNTVAQRTELDPNLGGDKKRVTNHLATGAPCAQHTVLTLQSENLVGKKVKLITTAATNNSHPTNDYKADQTRHQPTHKRDATHTQHTQTGRTTN

SEQ ID NO: 977802 - protein, 170 aa, Homo sapiens
FPGRWLLMSVSRVIRERDRGTGSVTRELQRGLVRHSRTSTELRTCQGSVPDSQTGDGMPICQGWQYEIRENGGQYVKSDRSRIAMHKAFYHHMWYDATGLQGGPCRRKTDNTLPPCAPSGVVHGDRTSENESDHHCLGLFYIDLTNIMLIQDDKYIRQVKQCILVYNSKQ

SEQ ID NO: 977803 - protein, 192 aa, Homo sapiens
MDTGSLEPEGKMFIGLTPPEDEESDRTTHSALGGLSGSRTVQGELHVKDHRLVVSHQDDYTGGVLVTPGLPAIAASRLRLLARVTWSVLDGVCRLSGWNARGPVSTIAAVGAFLLAMRDLPEGSAIFRAVAPLGGELERCGGRPKGEYPWCERQPGHHKPKRALGFGVRFRYREGEPIEKGAIRLRRGPVGS

SEQ ID NO: 977804 - protein, 403 aa, Homo sapiens
MLYPHPEHLASLLVRYAANGHWIRENLMLETQYALDIARLALDDCGDTLVCRIFLRSLALRRSICRSTRCTQASASCRTVLVRYQVGCARVINTVCVGIHLMDHPYALKSQTYRSHLNPRHEADTPYRHDDTRTLSDSRHTTHLSLTQARATQYLTPDARQPALNGNTSNVISPHRQHPMYFLVQTWQISTHVTYMQTRIKRSSTGQNVIHLEVTFKQRQTIGLTDIRHLEARQQPKSYTQKHITATPHAPTSYKNKLPTAPHTNQQAEQKRTRHTGHNELTQTTNNDAYTDTRRARPDEDQAPYAKNHDSGQTEASIGTDQQTRRRDTKHGGDRRHRDTTKIDSTMPMRGQRPHYTSTQHRHTAIRIEHNNTTGGHKPHNHNMRHRAHSPQHKKTAQHNTPH

SEQ ID NO: 977805 - protein, 112 aa, Homo sapiens
MRPADGRCCMITSAWESMTESRILTILVQSILFSTTIDSVPMVYSGCPEQCKQGSEMTRSMDTHSRQRCEIAQPGRKEDLDYCFLVQALCSTGYDRVHADVIEAPRVLPQAC

SEQ ID NO: 977806 - protein, 144 aa, Homo sapiens
MVCHFLITSKYREERRKSHTRRRPGRGETGRRASRERRAGQRETDDGRRGRRERRGRARTSTAPQAGRREAARGGRNEGARKRDAGRSEEQDEADRDRKKERDEERGRRHNEERRRREREGTSENEERRGSTKTAGAGETGRRV

SEQ ID NO: 977807 - protein, 137 aa, Homo sapiens
LGQLAALGSVGSQGCQTATTQQPASPTNKKLTPKGQSEGRGQQLRRTEEEGEKGRRAGGTYYIALHIPDSCVMETVARDVRFSRSIWELCRFEFPLRLLEDNCDSDWKGKVLTDKVARGQRLVCLSVCYEVGYPYAA

SEQ ID NO: 977808 - protein, 251 aa, Homo sapiens
MMGPCLANRKVVKAPVAREHTSTRGIERFHTLNGGSWPSIVGAQGPCDMGAAPRPVEGKDNAEEIARWPPSNVIRDVTDGGIESRVGTWGIEKGPPVGMGEENRNAGPRRKERQPIGNGTWVSWPNGNPKLTKGPGGQVPIGHVKLRNRTAVHYPKRETRRFQMQPPGGEGPARGTLRLNPKYTHGPPFSKTPIGPANPGEGAVQSFIYVYSKKVPEGTIDQGGSDWRCTHFVVPGYDETSPWETSPRAHV

SEQ ID NO: 977809 - protein, 131 aa, Homo sapiens
MGQPAVAPLMVLGGIGHAAIPLFCGVATNRCGALELANVAPQRSTPRGYGKVRATRRPCSNTADYLVREFTRGRLLLERAGCVFAFAPKTIAVCRRSVYITSSGVARRSLPPGGWVRTEVRKDTFGIICAT

SEQ ID NO: 977810 - protein, 77 aa, Homo sapiens
MALVRANARGVMNKTRPSAESICARTLAWERIRSMLLRQNAHGLEGGNPQRTTSGVIWWKKELQEQATYEWRVQLGQ

SEQ ID NO: 977811 - protein, 171 aa, Homo sapiens
MTQHSRVTLLMLLADQGAQAAVVVGVTRRYGPYYSKRRRILGDSPTHGVATACGRNNLMGLVPIATDIGLGRIGHAYPILMALETSNSGAVAAPAGAPGANMPEGHTARTRAQRGQTLRALGHIDSATVITSLLWLDRLKRVEKHDRSGGGWLGTQDALEPGSNGYGASPL

SEQ ID NO: 977812 - protein, 293 aa, Homo sapiens
AARFWELDTDHDLLIDADDLARDNDHALSTKMIERIFSGDRHYEAEKCRQEGKISYADFVWFGSLRKTKKHRPVIDVLGSCCYGPWTGYGALSSVRSSEYFYEEQCRRRGTSMAIEALAFQDCLCQMLDLVKPGLKGRSRVLRTCKRCKLANVFFRAPSSISGSTSTTRQQEQYLPAQEIGDMRVAPVARRDWRESTRSEEYLTFLRWSDGRPAGEPWVGRVRGPEFSRCGAECWVSLGPPGGLGALLSGGLDRGVRGVYEYAWGAGPGRVFRRLNRVGAVPVPTARACAGGW

SEQ ID NO: 977813 - protein, 141 aa, Homo sapiens
MERRGGGRGATYYIASTSLIPVLMEPVPEMEVLSGVSGNCAFEFPQAVGGKLRLMTRRWERPHRAKVRPVPGGCVESQGWHEVGYPYVCLGLTVELLVLKQSYRDPQDSLCTLGSLAWEPAMPESQGGLPRIDLDQSTMGR

SEQ ID NO: 977814 - protein, 521 aa, Homo sapiens
  misc_feature (108)..(108): Xaa can be any naturally occurring amino acid
GAVPRGPSLALADRWLGLPLYAMLRSMRTEGVSRRVALQVLCEDVLPATIDRQRTRCLQRWDRTRIDTHTRETDLPLAVGGCAPYVHQGAVHMRVCSGVHEWTSIMMXATEGPRSQRCKSSPSARERYPHIRRHWQSGTQSVGDRGVARKESWANHHHFRSESGGMTDGGGYHEGSNPVVMTCTRGRTLCKTLKGRNSVVSESTDHRKSTAVCDTVCKATPEAQWLRLDVIAGDMDVLISLVSAILGRPANPSFGAFSGIGTSRVAPGGDQHTTNLYAPKLLTGRGDISPLYPTHWPNPLTDLEEHVGRVGPGNPRTLTLSLQLYRIHTTEARRDTKALSKQPNGAGSGGNIRLPVNLLTGGKSFVANGVQNTHGNIIRHDQRRNGAQTGGQGYTKDDFHYPLGEGKNGITAAVGHWAGAQGHIHTQLGDNEYEGTARAPGEATTSQKHDTFHGGNMLINPHVGEHPTADNTHHIPKPKNQGAAREQTHDKTPTDTNKETISRRNNHQNTRHKLQQHDRET

SEQ ID NO: 977815 - protein, 152 aa, Homo sapiens
MQRSRAQRSDRKQPRTQKGREKRDSKRRETGREKRKRERGTEERTRRKSKTTEQEDKRQKTEQETVEKPPHNPHERARRRRGSEDRSTRKESNNQSRKENRKEQTTNKRIKDKERKRKNDTTQQKGRKDDKRRKKEKRQTRKTKRRDKGKRQ

SEQ ID NO: 977816 - protein, 108 aa, Homo sapiens
  misc_feature (86)..(86): Xaa can be any naturally occurring amino acid
VQNPVSARQAPACTHPSGSMTFHAVWEEKDVRRGWSTPKGFEVEIRVHRQATGRWASSVVPEERWRATLARSLDSVSDHICDWFKXTHTDHTRLYEALVEKPYTKSCR

SEQ ID NO: 977817 - protein, 89 aa, Homo sapiens
MNLKEATHVEQSQPSHDALPYHFILPCQLLQPQQHSMLLFLHEKRDQTTRLGITSHSDKVTFQPYYTIERRPRLVLFLLSLMNEDILNR

SEQ ID NO: 977818 - protein, 95 aa, Homo sapiens
MKSLSNTLLLDNHRPYVRHYDAQSLHAINDSTINQTRDTIIANNNTDRKKTTNKATQRKQNESKANKEQNKSTQITTLTTKAYHTMHETSKEEQN

SEQ ID NO: 977819 - protein, 113 aa, Homo sapiens
MEGYNATTVKIIIEDKYRGSCYGNHAVLRETRLPKDGSYRLQRPYATWSVVRDSDASKEGSSTDYVHRMELRGEDPRSDQGTLDFAERTDWSWMNYILAKKANWGDGRWNAHE

SEQ ID NO: 977820 - protein, 300 aa, Homo sapiens
MLALAMASLSVIGLAFWVSGDAAWEIRRFMFSAVSPSPEADAELRGVREPESGCVRRVGRLFPWLRCMRQASRRTYRRGGRGLGCRFPVTRNMTMARSYVKDDIFRIYINEKKECRGTTGHRVLRRRPGNGAPNVICCCAAMGLWYGTRYWCSVWPEYDLCSVCEGQGLATGGDTRLAFPSPFGHLSEGFSHSRGFRRVHMDLRVAMMGHGSIQGNCSPRPPRACEVSLAHGESCFWSIRSDPSVDFLETVGESLGVAYLWAGLISMCAGWKGTGDLVQKVGAGKGHAGGLPRAWTLGPL

SEQ ID NO: 977821 - protein, 225 aa, Homo sapiens
MPHTNQRRHSNEHPPQLTTDKTDHEKQQNTQTTTRNTQHRANTKRRPRTNPTNNHQQTTQTKHPHTPPTSNSREKASRHTRRSGETRPARTDTHGTEHAQTDNTKDTSKERARRQRTSPTSSQSRSNRRQNADTSHTRQQTTDNDNKRQRQTATAREQKRSHDQTSDGRHHKRGSNSKLPVRSNQPGTSTDEQTCNTTGTQTKRASHSRAGTPTTKLPKRHRSPK

SEQ ID NO: 977822 - protein, 200 aa, Homo sapiens
MLPKLFWNSRAQVIRLPRPPRVLGLQARTTISTKKKKKKKKQKRTRGGPQQENNPPRGAPNSYQPLTHHVVVEAQGGPHISGGEQLNKPGNRRDGRVLTTPTRFDVGKQREAAEGHPVGRATPPKPSEGGANNQWGQHTTLAGSMKEPAGGVDKQQLDSASSGGQHHAAAKRVSRCDNKLRQARRMHPSDNYLARSGNTR

SEQ ID NO: 977823 - protein, 279 aa, Homo sapiens
SDARWAELLPLLQQCQVVRLVGELWPHGSRRGKDISSALRVKPALVSSSTCAWKELGDVGVHCVLQGLIRAPPCNDPERWASRTVGLTGAPVCGVLFSTLRTHGHTMLESAILPDDNRPWGMLGSACMLLRRTPWSPAVPAGKAWSVEYCKPSRCVSCDGPGLRCLRDKPDFEGCSRLATMTSMRLASVCCARAWSGLPAGSWRRRQAGELRCDYQTTWRDLCGIVASKARWGGGPWGSNKLGDVGRGGAVARAVPTPVPGQGPCGSGSVGSLPRVGGP

SEQ ID NO: 977824 - protein, 308 aa, Homo sapiens
GRVVYRTGNFQARFTKVGRDPCPTYEILLLSSAEPTGLISNPRAQQVPVCSTKVRDQWWDRDDDVPRKASKRQGAVPEWSEAGSAGAADGMWALVNLVIDLPGVSLLAGPGVWRFPSRPIGHPMDCTISLAYGLSPLRDFVAINMPSVEELKWTSRSDRHTSLGFAKHWHGVTHWNRLMARLACKYRMCLELIMCVHSTLGGPMSRVSDESTYQECMKHLDAHGMALGRTVSVIGRTCEWNQLRDHTAECKELRGCSYDIYVKITLENVDVIREWMARGRIAVEIFPWAATRPVAIIDKGQPGFANSS

SEQ ID NO: 977825 - protein, 328 aa, Homo sapiens
ASIIYPTTYVQFLYHGRARDIAIADTFFSCIACVAYATEVELDPGPAGEITGYMATVPGLLKVLETFVPVIIFAFITRLPICTMHQPALEWCWAVYATLLHPSGSRQVLLNLGECGHTVSTHPLPQLPVGAGLAVCPPLMPTPYVLWTLYQFDDECMEARTLVAQRDVSCSRRHAYYVCAWGPATGCGHPDGINLRGVMWLTWCTLPPWFCQGLRLSQEVPCPLQALVLLAARFLSGVLLSSAFSVSSSCFRSLQRFLSVPVVSANQSGGVFLHPFTGGTPGGVGSIWFPGRALFFFLRGSLARERGSRTPGRFPPYLSMPGPHDAKT

SEQ ID NO: 977826 - protein, 83 aa, Homo sapiens
MVNVIRVPAGERPASMIAHAGCGAGALAAARPSVIDRALPGQVLHRGAPGYLPILAFRPAHRRARLLFSQSESAEWMPFSRKS

SEQ ID NO: 977827 - protein, 449 aa, Homo sapiens
GRVGRTTRSGDRRGRILALGVDNLNKDQSPGASIGAPGWYAAGDQMGETVLCLLYDKFQRWDDAKVLVYKLNGGGVLAGTEAMVDFLLALRNKWRKNLFRPPFRQRRHEIQAESTQTWCSWSLTNMGAFFGRRGNYVRPVVKPEIGDEYGGLNKFDKLDGAVKLWFQLGEGALERLDQNSEVVLKMMAEGSKGNVSDKSLKGHGAKFGGDLKFRGERTVRVTTCELKGHRSSRHKGLFSPQNAINISKPSRKTIWVQIRLGGILGADVQELEHGIPWGPCVITRYWGAFTIPLDELSNLVDIKRTIQGFQSNGYLAMGGSGLPGKKFTQGGQAIRHNRKGKNLLREGARAEKGGQGANDGHQGTTWDYEKPPGILNSEDQDNTSRRNNTGPAHNNRAYLGKQHTYEQQINREPATDIMVIPKTAVDKHNKQDERHTQHNVETESHKTRQ

SEQ ID NO: 977828 - protein, 209 aa, Homo sapiens
MSMSAYKLICLAMFEMEVIAVACDMIGPHTLNTRVFIADKRYIMANVYHVVLCVVPQYGCTNCLSQGLKRILHVMIYVVLMTDLKALESYVIKVSLQIPQISSESALRSAIMVKSVQIKTIRVKLLAHVSRWLLTTRMNRHWSFRSLYESFTSVYVKTCGDIKYFLELHADGMHTFVPWESCKTSCMSPPSILILHTGRTLFFDVTNTL

SEQ ID NO: 977829 - protein, 329 aa, Homo sapiens
WPGVQFIQGQHYYTEINGMGGGTREPPAAPPLSWALGVLAGGKKLAGDPHLGGQCTKKPLDRGPDKNLYRPLKVALGRSRGGQRSHTAATGAMGENVRRPVGDRNPISPKGMHKGRFWAQASGGEVRHTQTRQARGTLVPHRGSESATRERGQASYKARTIGGPSHLPGGVTPRPREIARRDMEPIIPTPQGVHHTIPQGDPLGGGHPGGRLGRGERNSLKWAQVARDTVGRHHITTGQLQMAPRAYKGTPTQGPPSSPGGASGEHWGSVRKPKGGLVGAQKPLLEAHSGGSEDSRKRDRDTGQAPWGNATTEGGFQTPPGGEDILWPQ

SEQ ID NO: 977830 - protein, 216 aa, Homo sapiens
  misc_feature (74)..(74): Xaa can be any naturally occurring amino acid
SRIMMCGWELASTVRYTVRWCAIFAGAVCPMKEDGLSTMLNGADRRTASVRSVELDSRNKGSDGPGADILRPEXVNDVGQLSLGLDERTGLVHGKLILSGFSRVKFTVPSVPGVYSAFRALWYQRGDAATWDRTHCARFLPAEARKKQNIDTDACVVPDAYQGQVTHVNAYGPKEPKGGRSDAQRGMGPKGHDGSYECTPADNSGSAGKAGSARKS

SEQ ID NO: 977831 - protein, 137 aa, Homo sapiens
  misc_feature (19)..(19): Xaa can be any naturally occurring amino acid
MAREDEYLGAPVASATSVXLELEGQDGEGLGQSVKCGQDAGCISGGGTYMASTIANDCVPVVNINFGGGQTQGTPSEESRGINWNSDIQLEILVSSPVGNGLEMISSMVASSMGEELVLRRWVKELTELAQSGASAN

SEQ ID NO: 977832 - protein, 79 aa, Homo sapiens
SNQTVHKLTHRVWSCSMGEIPVSRCAGVRQSSLKRSLMRYFLLTQAVSDRKSSRCSTTGPGSGVGEECCNVMIGDSYDP

SEQ ID NO: 977833 - protein, 88 aa, Homo sapiens
GRVVIDPRVRSSSVGLLMCDVASAVPYSPYHVRRVRTIPKLKGWVLRRLNLEEGYDSGSAKVMILAVVRSVTRGLSFDCAYVLYPSEV

SEQ ID NO: 977834 - protein, 230 aa, Homo sapiens
ARLTLSIPFTINEGRDHRGRFGVPSVQGWGSTTITDSKDGNVIVRYAPSLRRGLHREWTLRYDNMHIPRKPLASYYVDYPSSCVAMCIVPMGLASMPCEEVNNLSTLHRSDSKDAREGGLSLAIEGPVQSRISCCTENQDGTMQSCSYLTMCVPGGPTVDSRSKYNEQHVPGGPFTARVTGDDSMRMSHLKVGSAADIPINISETDLRAADGTVVPPSGREEPCVREAAA

SEQ ID NO: 977835 - protein, 147 aa, Homo sapiens
HSARVTAVGDAVPHVGARSQLEGHTKRVCIVAWHTTGQNVLLSAGCRQRDHGVGRGALGLAMLTHGSQILHPDTIYSVWLRADDGGLICTSCRDNAACASSEPRKGTSSVAEQVTVPHEGTRDRAVSKCNVGTGWGKILTTGIQRHE

SEQ ID NO: 977836 - protein, 290 aa, Homo sapiens
HSFFIYETFYKLVKIFQRAPPVMAAQPPTAHEVDGGENMTVGRGKNATLGPGNRSLVGQSGQGKPRAAMCHSTALLLRRGAHGAAPFFTRLRSCAIVRRDQPGSFLAGTPAGDWGLWGAQSRILTHGACGFTVLNGHLYPVSCSVPSGFSCDCPSKRGAGSSTPLGEKSPFPVWMMVASLLPAYPWSSLLIFMETQITTSVIICKKERMLGKGSGFHLDLLLIVAYGAASVPSLACLVGWCHWSSGHSANALTVMSKGCGTGDRPRSRRQGTGGTGCGCLLWPSHTGWRD

SEQ ID NO: 977837 - protein, 111 aa, Homo sapiens
MDEKILTRRAVFEDHDDTKSARLLNVKALKPILRQRLIKSFIAVSRPVQVWRLELKPKNRSDAKKSLGNTSVQRLAPTLRGNGSNSKGKGYAYRRFNREPPLKRVKHQIVV

SEQ ID NO: 977838 - protein, 184 aa, Homo sapiens
MPPAGFATHQHQQVAPPRALQRTPPALSFRVLLLGGQAGPLCLALPTLGHGRRAIWALQEQILGAHGETGVLEEQQAGLSSGGASQRVPPAWSEHGMKNQAPLIVHLHKALCDFMQAAQPLWPHVLVHRGRVDWMEAEVPLSLGGVAEGEEEPMGPGSPASLHPECPVHSTAHILCAIDKRPGC

SEQ ID NO: 977839 - protein, 277 aa, Homo sapiens
MNSEREKIRAPSGQRGQSKGNKRTQADLAPGTIRDRLQRQGRPRRTNLHRIGNDSYYPHMHGGTHMRSTRQQQHIKKKTLPVHLLLVNKLRPQPTPDTKHTTRSKPRQQHKNHNAPKHQTSPPNHTHQTNTHDTTETAPQTTSTQKETDTRPDNTQQHHRLQQTKHRTAKPPPNKQQKETREAARTEENTTKARNHTNAEKAYRKEEKKEQQEKRENKEQRKHETRRKRRGTRKKRKRSVIQEQKIQPGKNKTHTENKKQKARGERAQRDRHDKNTI

SEQ ID NO: 977840 - protein, 325 aa, Homo sapiens
MGGWAWWSSIILWIRIRNYLSIFRKFDLDESGRHECLRDADGALSRQASKAQAKNAVQTLTHHPAYSDPDLAVDLDKFPFAAWMRLETSVPDFSKTSGHRSGWSCDLVTCLMWWQLTMFAGGRDSVPLAVVLLPPRLTSLCLLPHHTMATSSLHVLFLGAEKGSARPPCPLSSAFHHRSSVSGQNCVAPDCASHGLGHGLPGPPSIAKSGGLLCACPVPRDESRVCLSILMWPISSFCRRQPLKSSGLGLLWIENISIKSSQPEARGGAAPGREGPGWKPGFRTRKGPFGLGGARCPGGGAPHKKGRDHRTAWEQLGRPHTPEKN

SEQ ID NO: 977841 - protein, 407 aa, Homo sapiens
TRREEHPVLLTEAPLNPKANREKMTQYHVEKSTVNSPHVHCTVAIHGRVANRAERLMDLYQLDIVDGLQVTGSTLTLLPIIRRGMPLTSIASPCDLDPGLAMDLTDYLMNVSSTEASGNRLYSLGHRARKTGVKDPMTIDHFNRTTSLQVALTGSRPPLEKRCSTAEGRRGLIRTAISMASCHLVGKRALPERALTAAIGHSAIRPPDSGSCLPLRARLPSAFASLALWQLLVANPERTTLQGPISASGDVAQSGQRPCTPTTVLVWRGPPMLPGIADRMPTEITGLGPPQRRIRSNEPLRKRQIPREGTDGVKLGLESNLPTNDEHTPDGYQRPGPHMRPERAQGRPHNNAANQMCNDTTSEQDVRQHRSTGYIGVRNKREEESTQDSHAERTSKKSTTGPGTRRE

SEQ ID NO: 977842 - protein, 269 aa, Homo sapiens
MPVGDRATTDQRGAQGKAGMPSAGSSGSSARLGGGELVTRRRAGPEKEAQGRSRAWAQGGPLGVLAWDAYLRALFAGRCMSCTPAWPVVVLVHVGAREYLCKLGSWHTFKQARSTEVGLIDGEPSSIRSRVAPWVDASMYSWRLIYRDRLQLVGGPCAILLAMVLALSSLPSTGTSSIPEAPGGVTHQGHAWVLRETLYQHFHRTVLKVGEPGFVAIAPGPGHTPKGDPLYWTTVAPYTTPPSFLGQLHRPFDNNTVAALSFPPGTLSV

SEQ ID NO: 977843 - protein, 385 aa, Homo sapiens
MTKRSSDIGSPEMLRVGISSNIVRRVPSFAGGPLRVPEAPRDPRLAASALGRDFADETRVKRKRLGGSMQDSTKQAQGRTCPLGSPLLRPQPYLNRARHALRHSAPGTRPHAPRCPAAPACAPLLALPFTAPRHPTHPSLASPRSLPVSLRPSHPHPHRACSYRDTSPAPPPPLPTPANPTRSLTAPPPTARTPAPPLAPPATTPHPAPPRPQPATTHPRRRPAPPAKRRDPTPRPPQPPTPTRTPPPGHTPPARQLPSTAPPTPPPPPLNLTPAPPSAPPLHPRRPHTPAHTNPHHPPPPPPPPPPPPNPPPPPTHASPSPPTHTSPPTPPPPHSPPILPLSFPLLHPLLLSSLSTHIPSLHSPPPSLHPHLPPPPTQNPTHNP

SEQ ID NO: 977844 - protein, 323 aa, Homo sapiens
GIYILIAVGAVIRFVWLPGASYEGHPGIPVPAVDVLHLPGSSWCVCEVVAGNLGLVKKDQIAKDVKQFYDQSPTGWPWCMMTRNERRKAVVNDLPRDALTAVVPGTLDVLLDHRQLAQEQFVSLGRATCIRKPLLREDCHQEDDDLVLREACTSSALLASWSAVIIDLRVMILSHGAVLWHPEQLRVLRTPQTLATGSSGVPPEVSRRLPMGPSSPVYLTFPVLLWLHVASGLWGSVCPNVAGASRAHVTCRWVIIETAWVLRTGRALCRGPVAGDTGLLGHAENPGPGGVPPPLVHTSHPDSAITTKQKPLKVQRDTLSISE

SEQ ID NO: 977845 - protein, 309 aa, Homo sapiens
MTSFLSVAGEKEDGATHDGDWGQWLAGASRWTHDPSCLGLPDTGSFTEDAAAISTVGATSQKPHLTQRQAPDTYMPPAELLGSHWQSLTVFLSTWPWAILTSFRTDYDSPDGHLSMAQSWMIDLPMHLKFYKMNPGCYTQYGPQYLGRPGPRMHHRSHKHIGTLLLNASTRYPQYTYVWNHTKDQKKENTQGLATCDIRLRPHTEKRTAHTITARNAHDQQIAPETQAQSRDDQHISTRQTQTTQQLRTDTQKQRSTTQRSKTTRKPTKHTTTYHHETREQPAKVERHTARHQTQKNTSTTQPQPNTTT

SEQ ID NO: 977846 - protein, 159 aa, Homo sapiens
MYLKPSIRASELCVYRHVNGHDGDKQLTVTPDITDVAARMPAPSKETVTTECNQSPCHAQNRQTVVETRNGRTTRNWGSGTCIANAAASDLQPPNGQRAHEKYPAHSHADNGAENSRTGSPHEDAEQRVPEDSRNAHNTTSRKKRRVQRKPAVARTPLS

SEQ ID NO: 977847 - protein, 380 aa, Homo sapiens
IYDARTPDQVVVALYGPEGFYMASGDVSGKLSASGYTDSQKGAPVELMSSQSCIAGTIMDIALWLKTVKEDRRVVRGKSKVQRRIAQSSTSLWDSVDSLVMESDDGTKELANQRLLKASVCHQRESRAISRHGAMEKHMSALQSACFDGSPIRMYYVRHIGEQHGAIVNMVERFPLPDGKQDSGTSQCLIGRMIVTILVSGDRTEGGRGVAPLVQDREGPWTGAGSYARYIGQSPKKQTMYSLAACWRNNGDQDWDVSVTSVSGDLPRGSLTVLGQTDGLRIGYGPLSKGSRRGHGYCGQNNPRMACGEGPGNPARLAGEKGEAYLGGTRRDLVLGSKGRKLVKDDTGGKARTDSRARDTTGGKRITRNDRDMMRTHTEE

SEQ ID NO: 977848 - protein, 175 aa, Homo sapiens
GPPGTAPDLFLPHFLGGDGPCLTPQPRRSMQCLANRSLRRGGRHSSGSADEAASEEGAGPCPVRAAVPAASTQYQQHRPSLEGGTESPAERPVAEQQEVPGSGRRLGPESCSRRRHESGASPQTLPRCGPRLPANPPQERGLKIKDGNTRRRWPFPMASLFNGIHLYEQAIDNQS

SEQ ID NO: 977849 - protein, 353 aa, Homo sapiens
  misc_feature (81)..(81): Xaa can be any naturally occurring amino acid
STHRDPEEKQELSGRSEAQSWMSMRELISNNEQLAMLGQAPWGPGEQVQPAEPLYTRLFHPGDSCSSRGQATTRHTFLVPXEQGRLDKTEQVTSQNLQLENLRMKLPKPPKPVSKMRMADPLLMQARAHGSPAPGALQNATKYGNMTEEHVMHLLQNAEPLKVYPTLTGELPGELRHVENAMETIDRKVIESRMHHRLLNDRSRHTLEQKPTEAQRKSPGLEDPHRAECDTAGQGPKPPRKRTTSRHKARQTTKEDDKTKKPKHHTTNRQRHNKAQRREGDEGQKTQQDGEERRTDQTRQEADERRTRKQRDTDTSRTSRQTPTDTPPTGRRGEQEQSEEQQQHQYSKTDHTH

SEQ ID NO: 977850 - protein, 173 aa, Homo sapiens
MARCVVGSSRVTLTLETSHRGLVFLCSPHSRERVHYVVLKSCRLETNLGHQYRLTTHIKEGEMQSVGGLIAYYLRDRGDYFCVDAGVSAYCSSDSVTATPAIFDAGDLMVGPRVTACVRACLILVMAGLCVTRKRVVHMHVPPGPARGSSTAWNDTPGKMGRAKGGARWVGNP

SEQ ID NO: 977851 - protein, 217 aa, Homo sapiens
MGGEPGEAELAVELEIGAIGTGSPGRLEQDSISKKKKKTPLFGPTAPLNHSNEETLEENTFSPKANEKWRALGAFKEKRQGEGCVPGNGLIPQGASHWETAAFFTPRRWNAPLAGNLWAPTIFSWNKLWVSSTESYSRVPFIYPKTRLHECVHKHVCQQPSVSVKERIPIPVASCKRIRHSESKTPKERVHNPLGGSPRAVAKVGSFPKKNPGENIK

SEQ ID NO: 977852 - protein, 134 aa, Homo sapiens
MSCYAAIYFETPLRAGRCSAEKRELKLLQKYLCDEQKELQALYALQALYVTLEQAPNLLRMFFDALYDRGRGEEEDAFYSWESSKGPRLSSRAGGWALICHSFFSAQGSKERLTQLRGGGRELEPWEQMAGYAE

SEQ ID NO: 977853 - protein, 258 aa, Homo sapiens
ETESRSDTPRLGVHVGAISAHCKLRLSGYTPFSVTSSLPSSSDYRVHHQAGLIFGYREVKDGGLHRCKPGGSRSPNRGIRPPRHSQRIGDNPRRATRARRANKKYHNENTSYYTCRTEDTRVREGHTDEKKEGRETETTRQNRERSTHATPRINRTRNYRDNQIPRQYQGKPSQRGGAQRRHNDHREYTEHVNGITTRAKKKNEGKNKPRRHKTKGMGIPRKNDSCNKERRHQATTQRNTPQKQAGGLTRDGERTPDT

SEQ ID NO: 977854 - protein, 322 aa, Homo sapiens
GGKKGGPRGVRGPSRGGGPPPPPAGDTRGDGSWRQPATTLRTGGGRRNKSGGACHKKRNKRGWWGENQAARLGDETNYDSHDYSPPTTRRGGGAPLRMYLRKEEERARGGPLLNTSAQKKNYLGRPGRGGGDTPRLLDDDPPPHAVKDGGRRERTSSGGDTQRRTSVRPEEDDKQERGRLRSRAPTKKRAHAEITYDTSEHSSERHRSPARHPAGARVGDTIYYHHNEYRESSEPDHIGEGRHLSSESNRQYRGDTRTEVGGVQTQEQRNTGRPIGRATTKNSTTTSEKTSNYTEKKEDSSLMYGKQPHTDVGIDEHQPDQG

SEQ ID NO: 977855 - protein, 322 aa, Homo sapiens
MKNTPKTGDGHPATNRTKATQKHNEETMKQKRDNRQREIREQQNREKRTKEKQRKSQEEKKRKEKRQEKRRKETKKNNKENEKENRKRKKKKQEERSNPRKDQRTERRTGRATESKGKRNTKQRKDENKNEKQRKQKEEKNGEKKRKTRQETERKRKANKREREEKKKRAGERETEETKKKKAESKRRGKKEAEENKNKEEKESRRKYNSRKRRGEREREDESRETDRDEEEKKNRENREDKTHTRRTENQRGRKHKRETENTQQNKSTGQKQRHNERERDASEERRQDMEQKNEKQNEGKESTRRTRGSSEETQREKRNEK

SEQ ID NO: 977856 - protein, 293 aa, Homo sapiens
KVVVRDVEGPSEAASALTGGGVYLAPPVSANKEPTETEDYLSGDCGIERVIQLTVIGVGYWSGEVARMTRACRDLESSEMKSAQRTNITYAPKHALRYQPKASSCREGTLRMPRCRGMHECTSSGCTCVYCRKMLAPDTFVAMRVSKEFAILGIQVDKQQCIFHFECRQFFVRIVGALEWRLYELGVARDEMGRLSFASWYVGRWSATTGVCRADRRCCTECLACYIDLASELWVPCLGILPLVLGDRCVVECIVRTWRKWGGWLRRDERNGQPLVRHLSTDSIECYLLSGAF

SEQ ID NO: 977857 - protein, 188 aa, Homo sapiens
MSGEYVEVSFHNGCARTSCNLVLVDSSGDLDSFPRAIGPSIADVKQSSDLLEVDDVLDRLYKNVALEVARWTIGRVLTCITRQGGASRNNNHNRLVDTEYLRNSLDQVVLKRCDSMDSWCRTFGQKSTEGCRRGVSEWVCIINLDRMLECRWFVNEKVRKLIGWRRGYGGGIRELVIRDGYAATGQHR

SEQ ID NO: 977858 - protein, 104 aa, Homo sapiens
MGAPKGLYRGTWSRGDLSTPAGRGGSKHRQTWEHSVGTEPLTVGGGGNSGAQIIQERKNAPRGRHYYHNVNGEQGEQSPKRGGDSWVREVSLGQILSPGRAQPC

SEQ ID NO: 977859 - protein, 256 aa, Homo sapiens
MGEPDTSLRHNFIPDCIQSMGIITYHSPHKIQDTKSIQTCTPVSCNPVMISMVDWRMIIRGTKKPYSLDVVHPMHTCEEISLKDTKDDWTIKKKKKRGESTNHQRIPMPGGPQRKYRTNSPDHYHETQHGEPHNTVEHVINKDKDKGTAQNQPNARKQGTNRDNNKETPTEESEPTNTHAESRHKSDRQTAPKNRTNNKRPLTRYQTYNNHYNSDPTRQFTTHPQQKAERGVTTQSGHNEQLRLTGTPTSQQRPKT

SEQ ID NO: 977860 - protein, 348 aa, Homo sapiens
MGVYQNFMSSAWCIQGGTRQLRPSRELVLEWKWDLDESIIPNHRKLNNSNVFPLVKPVIPSSTISHGKSKVDIELGTQVVDPMIPHPHSLTLKNIDEPLMYGKNPVQLQEKPLRRDKSLPNKYWQTSKDREDLEPDSRYELDTIHRIDRYTTLDQKRYPGGVPWHPSWHTLRTKSKESTNESIRKPHPMMWYQDSRNKSTQSLWTRIGTSHGDGHFCGMSTNQGGLCNHRQCPKESRGRQTAAVAKGVSECGPPMVDRNGTCPGTIHRGATHRRSRSRTKRGTNKPAPEGHHCSAVKPGTDAHKERPEPRKRGSKKKNPGEQIQHKRAPSRHRKKGHTPDKKTAKRKH

SEQ ID NO: 977861 - protein, 109 aa, Homo sapiens
MVGREAGANRARVAVINRTLTSDPKTCTGAYEKQENHVRNISRLDSGAGPNARLVQSRCDSSYSGHGMRRDRAIPHEIVSSHHPPFAERASVGSARGSGSPVGDRTDLL

SEQ ID NO: 977862 - protein, 171 aa, Homo sapiens
MEQLNHTGPKNTRRRPNSTNREKQQQETHERKRKHGPQRTRAQQRTPTKHKRDAKRQQDEHKSNWTQINGQPTANAPSGNTHELGQAPREGRTQTEDRGREHTGRDAHKQEHEQKHAGSRRNKEHRRRTATRERQRREDKTKTAQTHTRRDGETQQSGSTRDRRISDSSGH

SEQ ID NO: 977863 - protein, 96 aa, Homo sapiens
VTRGADAWVDEYNGKSVWHQAEYIYIHIYIRAHTCTEVMLWPRICNIPLGNGSYLWDFRRLEYFFRENSGTQKNERWSLHLLYSSLKIFNFSENYK

SEQ ID NO: 977864 - protein, 491 aa, Homo sapiens
MHRYLEEAGRQGTSRQAAGSQDIRSMGPNQGTKASARLLAMSGRTPVGPWQRVQAVNSVIRQAPSTPAGSTVYVTYPHVALTTRKAQRKSTIASECKRPGRYGTLIMMVMSELLTRRPYHGHWGSQGTLCSHRGTQSTEQAEGRVVEWTGGDYRTVHSLVLSSRTLACPSPRVSAKSDSKQSSNVMIGSPLQRGELSSRRALELSVRRTCEKVKGTRVQLYHLVPGGLEAIGSIIAQELKQDAPIGQVVLKSQGHVRQCYCAPLGPGELRTLGFAIFVLRTWQRSGWLSRCTNNREFRKPTGVSIARQGKPAAKGAMRFYRKRQHKREANWGTKHGPREEQHKPGERIKWETTMEQGKDSTKNTRKRETPCQKSTHKDDPLRHNNIREKSRRERKTEQSNRRSTHRNNQRMSEESKTKNNRKAQRIRGKRRNGSTHTTRTKQKRDARSTKQEHRRNNRKNEQRSNNRQENRTTKAKHHRITQDQPDTNTPP

SEQ ID NO: 977865 - protein, 189 aa, Homo sapiens
MCKLLCQGAKRQHALGETCGPRRGPRGVCCDPGQEAVRASSACFLVWQTQVLSLQDNLFQGDYPVEHSMMMFQLGMLSILSLCCRCPDVGLRIRCPDLCGSQPGSGRTVFEAQLIPSCWDRNPQDWYPGVTLGWTWNGGVPPLTLPWSVSATFLFPVECPLKVHFSGSLKAVLHVSLRMYPVVFPSPTM

SEQ ID NO: 977866 - protein, 307 aa, Homo sapiens
RVGKSALTIQFIQSYFVSDLTDPNYVRSSYTKICSVDGIPARLDILDTAGQDEFGAMREQYMRAGHGFLAGVRHVMSRQSFQRGGQALQRRILRVKDRDDFPEVIGREHKGKIWSHSARSPDSESLCLSSASHHRGLTCEASVKLQSHSVDEAFEQLVRAVLEKYQELRAPTRALPVPPGNERAGLPLRLSCSQAREKASTRSSLVTAAFGPWCVDPESHSLETRQMFLHLGYSQGTKLTIYMPLISLGLFVGLQATVVPSGKSLLVPNLTPGGGKRTQGSKRVITPPQNKKGPAQNTNKRGRQTTK

SEQ ID NO: 977867 - protein, 267 aa, Homo sapiens
MWPGWSLTSDLVICLPGSQSAGMCHALQPGRQCEPPSPKKKKRWVYKPAFFFLFPGLLKFRTDKGKRSQFWITYEEDSCVGGSRYEIDVLDSTGVLVLPGFLEDLVRYWLLREGPKCVRRVGGIGPGKLVKGPVSAGTLHQKKFSFFEGHEGDMTWWRCLGPKRTQRRGKPQRWQLRMATWYFPGPLIMKGISRGEDTWPVMGPDTKTVPGHESEVVADDGGTTINRERVRTGGAREAVLWPTHGKASRKPGLGITLRMGITRNPIA

SEQ ID NO: 977868 - protein, 355 aa, Homo sapiens
MWGAYNRAPHNTLTETKHTNTCGAHTLLDADVLQPKSTTSSRSQLFFTNNKSHNTKQQQEQRRFYTLDVWATRGVSHCVAPHVPGYKTTASSCRLNLLSSSPPQPREANNSSSHNNILVAPPMTTVLWGQEYYNNSRPHICLVNILLLVTGYKTTTPKFLSVGASTNKTEYDIVQTVRGPQQIIGFIPRGGQAHQKKHGFFTDVKQEGSRKGGGQQNKTTKWARTGRQHPPPATIQSSLKPPTQANRRIDHTARRHRKHNTYMRRPRASTTPQHTKHRGRAPKAPHTNPRVAPFSNNHRSQQHSCYLNKKTQRAASNSGASPTRHHLRRYENRTAPNHERDQHTAREAHTRANDN

SEQ ID NO: 977869 - protein, 127 aa, Homo sapiens
TRRMQAWRLGAPKLEPTRPRGVAHEGEAGVAMRRDGVTSVGTWGYRGRLREQHSQAACRRVGLETDPAPSGSPPCASDSQVRERRSGMQGTRRARGGMESLSEASRSSPCAVLLQPRSLCPPDMEGL

SEQ ID NO: 977870 - protein, 375 aa, Homo sapiens
HAVGQEERAGTEMPLTEACKDSRIGGMMKTLLQFVGLLLTWESGQVLGDQTVSDNELQEMSNQGTVTYVPSPGNSKMLSNWGANQHTSIVISNNNEHAQQRKTTAPATIDSKPKHSKQQQDSPKMQHPRANQAEKSCKAAPQEMWQERPMHGPTGAECKHLTCNRPDMKYYARVCRSGSGQVGRQLEEFLNQSSPFYYWMNGDRIDSLLENDRTADAHDWMSMQDNFRRAVRHHSTSSSRQRILQPGAPRITNKYMPYNLATPEDYIFTYPKDPAIERQEERANINQNRAQAKTKAREYQAPVHETGTKNGHTTAHRDTPKYTKAQAAQKHSKTENTTEKGRKDPKGDRETRKHNEEINDKKEKSQAHNIEHTTK

SEQ ID NO: 977871 - protein, 91 aa, Homo sapiens
LIKGGLGGRLYQQGSQTCYEGHSDHTNVRLGISTHIGGLMEMFTESPKPGKGICFKLRLAPTGLLIKGHHLASSINKEPNILQDTVTILII

SEQ ID NO: 977872 - protein, 159 aa, Homo sapiens
MVLGSGGCDLIHPRVEIQSIPDGMREVASGFSPKFSRAALLEGPGATHYLVALPPVGLQRTAHAVGLVVHAGAWFPGVPTLGPELKGEKRKGVRLRAIARADRDYAEVTWSLDFFKNLPRKEGGRQNWRNKLQCFMVWCPGFGGETGHGGGFAVVGNCV

SEQ ID NO: 977873 - protein, 79 aa, Homo sapiens
WQMLGPFGAVTTVKVIRDVNTNKCKGLAFVTMTNYEEAAMVIASLNGYRLGDKILQGFLQRPTSPTNEARIMRFFVVAE

SEQ ID NO: 977874 - protein, 104 aa, Homo sapiens
MQHHQNKKHMDNNKKNTSKRNNIHKKEQKKRDTKKKTEQTINKQQHKRKRKEKQQQSQSSSKKKHKQPIKHAKQQQKITNTNNTSKKQTKTKKKTHTTIKITKK

SEQ ID NO: 977875 - protein, 55 aa, Homo sapiens
MAWAGSRAHVGQAHISPPQVTASLAPCQGSALVLLSSLGESHFHGEGFPWGKEQR

SEQ ID NO: 977876 - protein, 378 aa, Homo sapiens
TSPASITFTTGLEAPGNLDGQGSDPTDTAPDSLGLSPQFRPAGYLTSDFHTPMVEQNQEILLPVRDHISLSILVPSFPPPPTMHEIQAMWGQSLLTTDVHLISPQGEAADPHSPGNCEGRSCRHRSRCLQGPSTNLPQRKPAERTLNSVKATMETDEGELGMNDTQRQTCNWTQTQTFMPENMRRKTYSPNGKREQISMEARSLRKRPLSGHLQHSPDTHTSRNELTPHAPWTTANHRAPTDENRHPTRIPPKTNTAAQTNTANNMKSKQRKRHETPSNTKNNHAELTDNKDPKRKTTNTERPTQEDQANRQPNQPKAHRNTRAPETANDLTTQRQRTHNNPPNERTTHTPNARYKNNKRERHKSRNTSQKRNTQKQK

SEQ ID NO: 977877 - protein, 74 aa, Homo sapiens
MRWSTHRSPRIDSPGVLKPPSWIHIHIQHLRRQDLHHEPLTKSHNRMTTTRERRLILANTTAPPLPKLHTYGSA

SEQ ID NO: 977878 - protein, 131 aa, Homo sapiens
MAFLMLTERKILGIYNYARGPKRCRPPTGVPTSLSLTAIKLLQPKEPLKPGTSTITLYITVPDLGSQHRSFYYEPPLLLYQPPWCNSDLGPPIYSSLALAKSLFDLMSSGIEDEHSRVLTPTPRDRRTGSK

SEQ ID NO: 977879 - protein, 368 aa, Homo sapiens
VSVKCQRLRGFKTAVWSPPIPGHDRGPHWLPPKQHGALPEPLRERADPPCVHPWGHQTGTTEHGCSHADRGGLLPMEACDAEIALAEQHCCAELNGGRGHASRRTDRQAYEPPETHSMHYTDGASHESQNPDTRTHPSVSLWGTHSQPTYTTASTPDGPAFPVQVKVAQPVRGCRTTQAGEPLRPLGPSRRPQISLSQDAGASQEGTGIKDAEQSQSPKGPNEEADWDHLRPWHGQKDRRTDEHTGPQGDTQKTRPPRGMALEIGGRQKRRINAHGHNLTNGCHKLGQEVCRTCGRKKVEWAIGLASLPPQDREQKRRGQQGVEQEKEPTYAEQHLNAQIREHTDSAQRRPPDRARRPRQQNHPGAQS

SEQ ID NO: 977880 - protein, 136 aa, Homo sapiens
MSTDTVCEARREKENQKNNNNERTHEEEGDRAHLLKESHTWVHPKDTPSQKKTKKQRKSEEGENVLTSGRSSEKPKLLRIIHHEENARIKRVKTQRGGGEHSKKRQTDKVETQKRRRRNKKRGHRQSGEEQSKHTP

SEQ ID NO: 977881 - protein, 172 aa, Homo sapiens
MSDAGCMEQSVACRMPGAWMPAARCKDKMEEQEEKAEEESRSRRSQPAAMMCRWKQKRDGSNAETSLWRASSNEERRRKTHDLLPVQISHPCSCVKVSGNMPKSESSHDVEGQREKSENAGTNQETRIQVEIQFQIETKPSIRITLQIKVSFKNPISVQVKIQVCFQIALPI

SEQ ID NO: 977882 - protein, 334 aa, Homo sapiens
KAKREKMTQIMLGDLQHAQTMYVAIQAVLSLYASGLYPGIGDATPGDGVTHTVPIYEGYALRPCHRCVLDAGVSLGPDDYLMKILTDAAATASAHTGPMLGKSCDDIKETRCATSALDYGQEMAHGLAFQTPYRWRRSYETDWTAQVQSPTRANDRREPELYLMSNLITRHFLYLGHVKYLDRAITRQKLTLSTNTQYNRNAVDTVGEAIPRREGLMATAITASCLGSRDRATPTQSQTHETIWTPKQEKWNSTTRDRNYEPGSPEEQPTKTSKGKLKTKELPNTKTTTMEYHNQTATHKQCRSKHRDETSTRHNGSPYNTGTRHTNTPRHKTN

SEQ ID NO: 977883 - protein, 238 aa, Homo sapiens
MAFNLSEQPVLAECHGQLTWTPETRCMMHRNNCLPHELDACAGQSTTTYPSYPDYEGPQVSTKLRACGHETCSSMCAGTYQTPNSRGTCMETAGRHEDRHLQNPEERAQINHTGITTWRDHEYTTETTPKPTDDNTGKTKMDINANPETPEGQQRMENRKTNEDNAEIWPQRTPEEIGKGDKRHQQTKNHKKAYENTKTDDQNGNERTTQANGTKQDDHKTHGQTTTHAKPNIANRNQ

SEQ ID NO: 977884 - protein, 45 aa, Homo sapiens
RVVGPQVAPCGLGPPAHGSFLLMNMLLYVLGNQAVCEENECMLCH

SEQ ID NO: 977885 - protein, 133 aa, Homo sapiens
MNLVEPPVAYASQEEEEEEEEEEEREKDEVETTRGGGRGGAGPCEVDPNEEAKPQVPDYKLHHQQQPEAREPPKAGSEDSGDQASSGVEEEMQLGPGFDKVASVNPTTVTPGDQDSQQPRGRGHKSCQLKGLG

SEQ ID NO: 977886 - protein, 97 aa, Homo sapiens
DWIRCWVWGLEGRGPSALGSQGARACSARPLLVRPHRPEDSDWSNLGGCVTTSPPVLVGLQSSTVGCPPAPVRRAESVGTLCLACICGFLTTSRFRL

SEQ ID NO: 977887 - protein, 378 aa, Homo sapiens
VEASVAGMLAQMQIADEHPDEVQALVLKSGVITMLVGAEQIFGEAIVVRHSVHGNHETLHVVRMRGYSGMVAYYGMLRHVVLGSVDAGRRAMVCLVTHVPEGLCRDFPLDLLMMAVRAARCVYDWTGSHGAALCGLRYNLARLNPWSHLEKSIALLWVRDRPENHTHCCFAQAKATWGTARFLETCVKGRGFEAMDWSRDVGWLRGIARGEGRLVRTKLPFGDDKAALLMPLGGVHRMEIRMGRGDHNGVEPLVRSREECLNTTALVESSGTMAIKRYGERSLRTEKSFAFPRTLIRMALESLPRPRVPCDEVRTVDPREERGPFAGKNPLGDESLNGLPGSVWQDTSWKGTVTGVKPFEKNVQQGSRGETHVGHTEV

SEQ ID NO: 977888 - protein, 545 aa, Homo sapiens
ASDGPVNRVNQAKYGTMCAYSTDSVTVQRHSDLLASNSNSVFRINREESNMQSTSTRHGANDREATGPEMCPGASAPMSFELPRGVEVHYDGWPSGEAVVSGFPGRSWWLGVLGMTASRGSARVGTRGLVGAYQLGRPGDPLGCAHGWVPRGLHMVAGNATPMKEQMGRNVFTRVSHGVDTLLTKVWGARVGLPMAFVESSRAGRAWRRSANWIGNAYLAEATYTPQNRGWRHWEDELGAVWSPQQGERAIFSKSGNQGVASYTEQAGGKAGHRVALREPLNRGGLAHISALGRFTPRGVGAPPPLEWYAPDPPNGLMWSRLIWVRGEANRPGAVHKGTRGQAGNFPHERPPPTRDALGVGHRHSDSGGGRNGHRSTQERGRIPRVGLEIGGSYRIEQQRLAQREGTKRKSALRKDASANPGVPNRKHHIGPPEKANENRLVGQRRTNPGPEIPTHITSHKTRQKEWLEGPTSKGPLGIGTGGNRKSKPKRGDRGKQAHDAARHMSSVSRATRHEEQPAGQTRNREKTTHENHLTQQGKRNNKQR

SEQ ID NO: 977889 - protein, 195 aa, Homo sapiens
MDWSQDSLPPLSPAPGPSQHLEHTLQAARMVWRLGGDVRPEWGSPTYGLRVQMLHIWTSMEEQSLTEWTRSATDMHNQHRSHDEERDSQNRRGVIAILPPRNNMKRGRKLEQMDGTPNKLRGTRPTKGANITLGQRDTMRDAQYRKAREQQERTRREDRTREGKSRQGATQKAQTGRLKKQTGTGKRIQRTNGNN

SEQ ID NO: 977890 - protein, 327 aa, Homo sapiens
MRESRLGRVRLGGGRGVEHRAHVGTSPRFPGVQGGFLWALSASPRGSWEMAGRPTTIGPGNKFFWDDFRGEKKRGSRAQSVGPTRGLVETLSRDPAGTNRWPCGFPKGCVGSVRGGGGAIPQSRGRGRKRCILLLIYGLQENKVHQTLGGAISKRTSFHIPGGLLYGAFYKKENSWMRSSFLRAREDFGRFCTGGDTRGGAPQLFNIFAQLFSLVALTKGSCGRPQSTIFVHTKGEGPWGPPLLSEAAARTWDHLGAQLRTVLRDPPRGALNVGTSCAGDTYLLQKQKGCQRGKNPRGQLGLWGAPKKMGAVKAGPLYTARPRTKPL

SEQ ID NO: 977891 - protein, 68 aa, Homo sapiens
TSSRSRAASIKWRMTPVQRGGPEALVALGWGTAVVPRRFRSGIRGRVAVVDGAGAEAGTSGGRPQDKE

SEQ ID NO: 977892 - protein, 365 aa, Homo sapiens
DVALGFILPQRWVSTYLISLDINDTVPQTSMPLDLPCASPYSWTSEMDLSQARSRRFEGRVAPSCPSASVAEHFPSSRARDNYRPYLLTPKSSELQMSSKAKEVSTITPSFCPLHMAYSGAETRFGAARRDELHMGWSKGIYISTTCHNNTPDWLTPRPRHTLARTNDKGLRHAVALTTPGTRHNDTNPNPLPLLITTITYPKDHHTTFTQVTYPSTGFMSGETTHYQHTWLWPKEETIPRTKSTPPDQQNRPTLNQTHTLRNHQRHRKTPTQKPHRPKGEGGTRGKNKRRNGTAKNGPLKYRAPTRHTPQRSQAGHPGEISRQPTREHTHHTGREPRKYPTAQPRPSTDTAATDNKHSQAQNAP

SEQ ID NO: 977893 - protein, 69 aa, Homo sapiens
MVKPWGNSLTSVHLDLSHVARATGLVQNLVRPRTRRACLTEQSAQIDQLLTGRPKNANAQRTEGELRVT

SEQ ID NO: 977894 - protein, 154 aa, Homo sapiens
MAFLGWLKVNDAPGRVHQRLQIDCGDCEDKLEETGVIHRKHGRDPRGATQRTTTVPGSKTIGRGQRASAQDPRNTKRRHCREEQEEGRSAEDKTDENHEETAGEEQQQEETENGRDEHTARQREQQDHHKSWRRPLQTTQSQRNTETRTEHYQS

SEQ ID NO: 977895 - protein, 303 aa, Homo sapiens
MTTPYWTWMPDKLPWWARPGTMTVVCHLTSSIISGLAKEYIRARDQEAHPVAASTMSLTGTVRYSEALNTTWAKGAEPPRRPERRWATCTCTSCADASPGMGLRGDTLRERYQKIVGHQSATPIEVLCESFPEEMATYLRYVRRLDFFEKPDYDYRAECFFNDSSSSGFVFDYEYDWAGKPLPTPIGTSTPTALPAQSGTKPATEKQGVNSPTGADADTPRRRANARYKRCRGEWREQCVAQRERNRARQVPGAGLNFRDLGGLRGWPKDGFDKNGEEGPADQENGAHTRRTHRKQQNNTQST

SEQ ID NO: 977896 - protein, 198 aa, Homo sapiens
  misc_feature (49)..(49): Xaa can be any naturally occurring amino acid
MWNLLANRRLGLGKTENKSQMSGLQKQNSKKLYCQELRKVIEASDVVLXACWMPEILWVADVLRVEEGIVHSGQKQLVLILNKSDLVPKENSGELAQIIVKKDCEQGVQKAQQQQRMNGTITKRGEGTRRMLLHPDVTPVAKQGRENSGRSGTADASVDTRAQGEPINGAKQTKARGSTGKDHFLERTKTGSTTPGPK

SEQ ID NO: 977897 - protein, 270 aa, Homo sapiens
HASLRYRPREHTQDTHTHTHTHTHTHTYLPGPIPCVAAPKSQRETERGRRGRQCRGPHRAQGRRRDARCLVRAAEAGPGRARARKGRTNPLSGPSWATESPTGSPCVAPAMISESKSTARIVVTAETESPEESKSRASTNISNTHRKRGKHGHLGDAADGCHPQQELGHQQHDARTKVEASTYNRRTDQRLRRHTGKQGDVLRNNNGTEQRTQENNPPRKQGPRNLLKTMKDEIRGDVARQRGDTIDIQNATERLEKTTKNERDGDQHRP

SEQ ID NO: 977898 - protein, 397 aa, Homo sapiens
  misc_feature (68)..(68): Xaa can be any naturally occurring amino acid
  misc_feature (75)..(75): Xaa can be any naturally occurring amino acid
QSGASSLASPAEPYRSDTMGKVKVGSQTGFGSYRDVLGHQRAGFVDSWLKAGIVSVAIEVYPCHCTCXIAWVDMXRKYDSTPWQDSMVTVKAEKREAVSVKWKIPSPMLPGSEIPPRINGGAIAGAGVRRRKSNWASITHHGEGWGYMLLGGSRNGVIISRAPLLMPACASVGVNHEKYDNSLYIIEQCLLEHQDAEHPWGKVIHDNYGIVEGVMTRVHAMTAPRRRVDGPSGNLWVMAGGVSRTSCLLYWCRQGVGRHSWSARNVKGRATGTNARCHCWTEPAARNWQMITPQRAYRVKGPPKGTGKNGKPKGGLPDNQRGNTLYDNVTRGGLRNKHCHEIEVVQCDPNAEQTTQIRRDNENTEEKAHGVTKQPQDHVMNTNSDLLTSTSILSNTQ

SEQ ID NO: 977899 - protein, 35 aa, Homo sapiens
MTQIDNPLRRERTKPRTREQSQLERAQPRHIEQTR

SEQ ID NO: 977900 - protein, 285 aa, Homo sapiens
ESNGTMRFMKLAPGHTAMVVPGPAARRLAGPARAGHSITYPYIPDEAWVLYFHHYFPAMLLLKHVDMAFCVDTLHAGSVPGAWPHGPMVRGIHVAGILSTAPGKLATRFYLIPPSWLYGMVGPHGPGTPKSKWQDYVWLDIMGHYEGHMRKIPAWDPGTNPGEPDGKTAPGASGHEGSSIRQPEDTSCWFTMDPRLLGLPLYIGPTPLASAGARARAPITRDHRNGQQPTGDRNPTVPQRLGKMRANRDGTAVDQYANEKTHETTIHETIKTEKKEQTYLVRKSP

SEQ ID NO: 977901 - protein, 103 aa, Homo sapiens
VVGVSVLQQCLDGCRRSFPTPVRPPTSRPSVTSSPHPRTAPRPPLPLQRRAGTGASLRLSLVARHDAPRPPRMVPGATIRTQRPASTVRSNWSSTALLALYLS

SEQ ID NO: 977902 - protein, 633 aa, Homo sapiens
MGFPLNHFCKTDLVKLYYPTPDPEDLRTECQALTPIPDTRGHHSNDHQMTDVSEEARSLSPNSEVTQVFRHADMMNGRRRLEKSDVNMAANGEERLTVVQHVTYRRENPKTHPDYTEHLTIPCEDSKMTGSTIKQEYYQKVRPMDFQPQNMHKQNLQKGVGTLTYIGLTTDATGTRHNTTTKKQVAIARGTLTTSTQVQKKAGDTAHFSCLVFGCTSHLAQHSEDTKRQAQHNTHSNRTCATQRQTRPIPHVKRQRNNSITQQTHNLDRARSQHKRKHSPNQRKRNPQARNKREQPPKRTNKGTTSTTQNLEQRKNITQQYNGANSGDQYTRDPQFRTHTKYNNGQPPPTHKKKHKRNIHITHNINTHCRQDIFTDHIITQDITATQTYKNHPDQTNKQGDSRYTNRRQAKQRPVTHEQTQTNPTRTQHDNNKEQKSSSSTKPRKTEKKNKRKTTNKNNNTMQHVHKPNQGEKPTGETTQNKPQTKTHRTPTQQTTKTKTKKKDTGRYKQPNEREQRRETRIGDGLTATLEQQQKDKKNERRQKPRTENGSKKQRTYNITECNPRDTTTNTETRQEQSRTNTDEKTDHARPQGGGHTTEDNTAHTLNRRAAAYSTRHNQTQTDEHSTQATGKR

SEQ ID NO: 977903 - protein, 220 aa, Homo sapiens
MAGVSFSGSRLELLAAYEEVIREESAAEWALYTYDRWVLMTSSLQHQEKGAMQDAYGTLLRTTRGDVRLLQCRRTPKLLCQNTVLINWVGEDVPDAREVRCARPPWLRWQSGLPGCPTVIVKRQSRRGRPLDAGATRGSEESLKGSLARLSSPGAATDMRGCQTRGCRTQTPVGSTYTGRHGVHPVETDSGLTDEQDLEEQDKEGQKSCGTEAERKPAWM

SEQ ID NO: 977904 - protein, 97 aa, Homo sapiens
MVPGVPQGMPAETPQGEGGHRLPHAQAHSAEGELEKGSQRKEAKSPVDPARCSEQVDWQLGGCSESQSHTPGKLQKSARYLKKRDTLWSESKMHESA

SEQ ID NO: 977905 - protein, 244 aa, Homo sapiens
DVGIYFLTCISAAPFPGHVLPVKSLKLRRPLYAHLGCAFLWVVVAVAMGPLLVSPQTVQTNHTVVLRCSCTREKVSHHALVSLAVAFKRFPFITTVTCYLRDSSADLRQDLRVEKRLMTKAVRMIAIVLAIFLVCFVPYTVNRIRLRASNYRSHGASMRHRQRILVPGETAITSCLTRLNGATSTPSGMSSLAEKFRTPCAKWLCGTRAQGPDPPAVEREEPTESSLSASQSCDRGAPPGRAQT

SEQ ID NO: 977906 - protein, 151 aa, Homo sapiens
MGEPSAAISRIPSSIVVLRSRAVRARGAERESPRSLTPDHGDEELLVSVLLRCTDADSHGRRCEGTSWRFAAISQSQNPTCRLNSMALVSHPEQRVSTWYIEEVVAVTSSLAHISSDHHCKLVRDLTKSIIPSWYSKVRKKAIAIQSLPWT

SEQ ID NO: 977907 - protein, 166 aa, Homo sapiens
MRLRRMTWRWREAMLLLVKKSRDLAIAMWLWLHAVAKTASEMVLAADNFSTIVAAVEEGRAIYNNPETVHPLPHLVRTSGNVVCIFLTAALGFPGGFDSCCSCIWVNLGDEMASAANCTGVQPSVIWTIYEYTVPGSPKERWIMRVASLSVSWLCGCYVGAATVGA

SEQ ID NO: 977908 - protein, 201 aa, Homo sapiens
MGRCMPSRSYSLLTVPRTPSAGPGEGAIDTIEWSPGRSVHYRIGARPGTVETEQGCGVCPALRLLLNEAPRGMLCYEGSRGGCLPEHLEDHYGEVCRGQSGGSSNCLPKGLSIGKSLVADMKAKTVRRGNRERGRRGVTDRFWFGDGHNASRKPRREEVCVSHGRRPRLSRIRPPLVLAAFGGGEAAHDLYRTTKTHMCVA

SEQ ID NO: 977909 - protein, 284 aa, Homo sapiens
MVHLFHAQLWRHLVLARLLQFADVLGRRQSEDRAFRVRIAGDAPLHGRARAGALTIPCHVHYLRPPASRGLCLGSPRVKWTFRVPGPGRQRCWWRGECRVTVNRGPTGSAVALPAYPGVSLTDVSLGRLSRAAPNDSGIYSLGGPARHRLTAVDAVDGQVQGVVFLYREALARMLSPLLGPRRPVARLEPLNRYPGATLLRLPWGAIACDCCGMTAPDGTGSIPTQEKAVTAHDVPGSDIMGGHRMTYDVSHADPYGNGRYTTEDWRQHANEETHALNTRRNQL

SEQ ID NO: 977910 - protein, 254 aa, Homo sapiens
  misc_feature (49)..(49): Xaa can be any naturally occurring amino acid
  misc_feature (211)..(211): Xaa can be any naturally occurring amino acid
MSTLEVSAGKSDVSLGRADGSPGWTPAGSGGKVRAQRASVGPWVMVSYXGGQEQLGLDCVELIAYEMELWSEPPRRWSVLGRSCAGEAGRASWVGPGTKQALMLDMSTHQRELMEELVPCNVQSTRFKKLPVLEALSAVELRANPAEAPAFKGPERCRLNKLLGGRLCVYEIDLSTALRTRRGCNGGAIARATWQRRDARTCSDGRLGTVXRGRVHVGVVAAPWGGSRTGPRWAQRDGKDGLNPQEGMCEGVPV

SEQ ID NO: 977911 - protein, 197 aa, Homo sapiens
MNRHASESFLSLRPDGWTDMPSPISPVAVWWQVPCRQGYSKYGGQGFVPRLKVTSAQIGGSSGLIIPITSMASLTKCPGTSTQAAATCQVGRRVVEPGAQPNGRQTIASHTTLLPARTPAATYKGRSQELPSGLEDRRRQDKRRTIGHTKSRHHNQSKKTPHDQATEPNAAPTDKAREHMQHRHNMTTTQHDQPHRK

SEQ ID NO: 977912 - protein, 111 aa, Homo sapiens
MAMNGGEDVAPQVRLTFGPYAVGNEGLVNTRHGWGGQRILSSINHCTRLLSKCLAIQNFGPFEYRYQIPQCNPCKCSPWELILLTRIHNVLKMLAKSDDEPISKKEKRTKR

SEQ ID NO: 977913 - protein, 105 aa, Homo sapiens
MADVKRTLKQTRSYTSPIAYIYIFNSTGSQALEKRRVNKRQMVAHNMELIPVTEHFYDYDTAITTGLAKQIRDILHKDILDPIIKRTGANHTIFLNYPSKIAPTF

SEQ ID NO: 977914 - protein, 317 aa, Homo sapiens
MDRIYRSMQGISGRNRRGEGYIPQVNIVSWIFYLDITKRRHNKKESTATGGYGKHRMKLSHTYDTYESIKKEHKQETEEEADKHYKGDKEKEKEKSTETNRMTKREKRRRERRAKKTRGPHANKEKQRTKQAEEKGKKENKKNEKEDKQQPKRRDKDKREKSEAKKKRERREKQGEQEERRTDSAGDNGGRTKPGRARYGRSRETETRRREPRGEEETPGKSKRRERRKTEGQRRSPREAGAEAGWGRERRVRRVQRRTNTRAGKQEPRRAEASTEDNQQASRRRGPGGEARGREANRESSPNESAEHSTEQHRHHD

SEQ ID NO: 977915 - protein, 450 aa, Homo sapiens
MHSMLGTGGLYPYKNSTEKRQEDPYYMTQGISMKITDTQKKLDRRAYNKKYACNGTEIEHPELWRRTTDYRVTHRTDHMPAPRRPMDQRKATAHKKQTLATEERKRHTEAPVPQPCIDSKTLLTPRKGTTNLKQVHSNKRGTHQNTRPLETLQNKQTSHRPPNETHKNTGSQGASTQPKPPTQYKETTPNDNLGLPPHPEPQTPRHPIKLTTEICTNQNKTRYSHLSLPSFSYTTTTTHPQQKHTTHPHKTTTQSTNTTHTSHHTNKKTNTTRHTRSSQRKAQDKEQSRTQQGKDRETRPNDAHRGPTTKREDRKENNAHREEGERPAREHDNKRKTTAEEAEREREGRRRKPEETRRRRKRTDDSRRERGQKQKEERGRRRDEREKRETGQTERQRGAHRGEDIDTKTTAKRRASDGRTERAKRTRKGERRRKPGSGRERGAREDEKTN

SEQ ID NO: 977916 - protein, 392 aa, Homo sapiens
MTNRLVRAGQELIPPGHWFIPFTYHGCVPTAPNGYEKPIPMAEFFKSLRFEVLFTPSLSGPATRWTSAGDLGVRESGKTAVGQYAHMWPHIARKQGPPQTQDRYSKSRHCDVCALNNSGVNTARRHQHTSTQHRTTEQQPHDLDNNHEDNTQASKGQDNERQGNAEDETNKREKQTEDGDAHAHEEEEGSGEEEGRAAEGREENNDGEAGQTQSEAGEGEQSGARADRDAEADRDQASPRGQEGGEARSSHSNKKAKAGGENEEGEDRRDGGGDEGRKGRGEGQRGQEKRGEGEGEPRQEQRGKTESRGTGRAQEQRERRGQQEERAKKESQRGAKQDKKGAAAEGAREREGEQAGEGEEERRKSRERARRTSSEDGSGSREGNTARGKRRG

SEQ ID NO: 977917 - protein, 719 aa, Homo sapiens
LDLSMPLDQYSPSFPDIADHYVSSVRARIPSSLMRPADRGALPVPNTQFHACQCADSKAPCDVYSFRTPASPGLQHVQACRRASTQRVHVTEAPRDLFALTRATTIITVWTGRPDMTIHGDHSLCWAVLCQPHNIRHQPSRASTLLYSSRDWMRMADRMEAGIVWLVPCPIVLFAPTRRTCFGTRTSALPLVHLEANLTLERAWGTVGGRQNENRVMPKVARSLSLGGCSPVRVGSGFEPFQPREGPSSHVCVGQVTLVLKGLQAKYVEGFRCISVPRGGGGDLLPHYEESMPKWGEIMSRDTEVCITLVSKEPVDQKGLVRESQDWWTSLLVPGGPDPKNGDPGIMCLGTAHVSQAEKFTACERAVTNTARALGHSIITNTRCRHAILSAALAYVVSCSYDIQKEGYATHDHTDAEHNDKKHARLTQHTEEHRNRARRDGTTREKTPEGRDERESKRRDACKTKRQSRERRGNDRKAKGERTRTAERGGQRETDTEEGEESSLRNRRPRPSGEKEEGKGRERSSWRGERAERERKREPEQNEDRARREGAEIEDQDVKRAKTTRDEREQRDEGGGQREGESQRRNGEQIDGKQTRQGKRWDGRQKESTRKRTEQKEEKTRQERSAGRRRTRAEQKKNARREKTRKKDTRHRGATNDDSKSRTDTRDKTRTRRQQKREGSEGSGSEQRTNHTRDSKTEERDTKHNTQKKEHPATERTTN

SEQ ID NO: 977918 - protein, 141 aa, Homo sapiens
MSPMPLAPESLPRVNRSSTVAALSRPPAPVVPGPVAVRTKGQRPRLGVALRTDRFDIPAISRRNGLGNPKAIATRRAMGANRRWPIGWHFGRTGGLRVRKGGRDWPHQLDNTKVANLPYKACNAKRAFSPIGRGVFNPSAD

SEQ ID NO: 977919 - protein, 94 aa, Homo sapiens
RPSSARDLGSADGSMPRTVPGSSMKMGSLSADRNYALFTTCATLRSVMRYSGNRLSDTLSHDAQPRSSHTCSTAYTAGQSTGMEEEAVECVLGV

SEQ ID NO: 977920 - protein, 394 aa, Homo sapiens
MAFLMLTERKDSRLYTNYRKGPKRCRPLRATTTRSLTPVTTLQPKSPVKPATVYHHPLHHRPDLSISRIGLFVLDEPPLPNTRSPLVNVAKLEGSYLFVCQPSSLASLFNSVWISGCSYSNISHTTAPVVARYCGESVAHKLQLNMTVTLYVISSYLSKHYITTVGLPVEAVRPNALVRNRRKNIRPWMHVRAHAFDPFRLLPMDYSLQNDARDQAETPRRHYARSGKCPTLAHQAYNIRIQPQGPLRPPTPTTTPEVPSQQIPHSPKTPKTTNAGIGGTTTTTPAPRNPQQHIRDANPPLTTRTTVNPTDNPDTPHHRTPANKNRPSPPGHDYGSPPATHKTHTPTKKGRRHPHGNEPTQTNTTTKTTHTHDTAQTTRHNPPTTPHIAHQQRT

SEQ ID NO: 977921 - protein, 277 aa, Homo sapiens
VNSFENLELEEKHSSRVSYIPHQTEKGGSDPTFSDSKQATEGSLGKVIPPMARTDPLTTPGKPLVPCKSGWLGAPLTINWPEKCSPFLLCLDSPPHNKDALRPSCLGGSQKKKKKNTQEKKHKTKKKTRGGGAAMIMISPAGGARTPMISAISTQVFVGTKGAAPKYERGGATISRGRASHRGRSVYTQTSVRPAWRENNTGDPARGRHTLWAKSDHTTTNRGGGTTPHIGGRTTHHHTERKFNKPALKEEKTYTTPYNKAEKRGGTTTNAGQNTSA

SEQ ID NO: 977922 - protein, 292 aa, Homo sapiens
LEGLGWVCELHRIHRPQDARPWCYSLCSWSPPRAQSAARTRVSPLRVGRASPDPDSTSGLRGWMEEDPCHSKLPVNKLAAACASNFGYDLYRVPESSMSRTDQSCIRVIRLHDVADVTLSALIAWDAGASNENSIIHRALKYELISRPDIHGTYKDGSLTSVTVAPQIEPLMSASRIVFEKKLRIESSLVAPLDKSYGTRPMSPDGCNLVALDSCNAGSSYTGCQGGSMIMGNGSPRFHKGNFPDEYQPECSFSGGGGSFRGGKWGNQSLAPEKNFPSEEFPNLDGREDQGK

SEQ ID NO: 977923 - protein, 85 aa, Homo sapiens
DAWLELALGRRREEESSRDLWTGQDSEATPPAHSPGPTNPAGLVYYASLYGSTPYDRKAGVRVSIVRPIEGELLIKRAAHNVGRC

SEQ ID NO: 977924 - protein, 94 aa, Homo sapiens
MVSPGAKTCVFPLVRQEALAPSWEHRDVRDGQEEEPRRAVGRNGIASSSGPGTGGLRRLGDKGVHTGEEENTENGGPARRKIGDPQTGRKRSDM

SEQ ID NO: 977925 - protein, 87 aa, Homo sapiens
CVVCGIPGVPRGRTRGLEQCTPPLAAELLPPWRLRRTNAVLSVLDEPERGVYPSSASRGPLHSRRIHQNQTYSSEYRMRRVGDHSPK

SEQ ID NO: 977926 - protein, 62 aa, Homo sapiens
MVLAGMGAAMVRSALLLGGLLGEADLLIHRSLVCSAPLLGPAISRLLLSVPGFQIAFTCARK

SEQ ID NO: 977927 - protein, 172 aa, Homo sapiens
MGSPTRHRLTRAVRHQESTLPAVHTAPLEVPPKITGETIAQLQKANSAHTDTRPAATTPHDNGRTGAADKLGTQHPARTHTQRAERATPQTPCGEHLTDDSLRDNPPTPTHTTNTPRPTTPTTNNTTPPRRAHTPPAAAPPRLAPPRPQPAPPPPAPPHPRTTHLRTHDPRH

SEQ ID NO: 977928 - protein, 63 aa, Homo sapiens
MSPSTGPGQSSLWRGCGGGTPLCGQEVKGPCGRMPMCHLRLLSHLSSGLIAQAARLDTLRGER

SEQ ID NO: 977929 - protein, 491 aa, Homo sapiens
MSYLRLRPEGGHNTEEPGRARGIGEITQQSPSERDLVVSNTQYIAVLGVMTKYMKKTLRVWVHLSVRSQGEKLIVIARRRHVLAELTDALLQCKRHDKDALAKKYHRCDDTMKRLPRSHIFHRILPHKQSSQHRTGMFDQALYGAYVMERTTGRSREQVPAVNKALICGGAAPQGTSVEPLVPGRRRLPVRVHLKRSEHFINLLRYARAARREMHARSSDTCPEIRGLSHAHGGSSPSILRIRVTRLVGNGKSFGRHTNATYVCAWETFQSPQMVEFRPPKLCRVNCGTRTSPPVCEAFVDMPPEGMARYYKGPHTSFSHGSHTRGERGDRLFQRSRSQRRYATKVDNAKMGPTVTQRETSLRHTGNSCVRTPLTKRLDVAPTWNHLLFTSYPSATEYQKRNTFKAALTTQITVIPGRIPNLKHNGASYREDTVTFSVALHGFLCGILGPGKGTGTFEQCGHTMRRSARNYNTQEPTTAGGKRHNMGKRRE

SEQ ID NO: 977930 - protein, 305 aa, Homo sapiens
MAATAMCRGPCGIDGKAPYLPVSPSKFLLWGPGRAWDAEQFYVRAAWYLVEEAEWQVEAGRGAKYSERYKHQSSTAPHQVILEGPRGPEGAFSSGAVGLGLTAVQAMLATINPSLDIYKPVSVVSDLDWGVMVLPTGFLLKAVIVDDRRCHWVPLVGTADEVALIRMTADGRLPADQRRGYKTCVNALIRISREEGVLTLWRGVNPYSMARAAVGNAAQFAFLSHPKQANVDSGYFSWRNLVPILWQDESRGTGPTADAVQGDTGKTLKCQNRGRLRETRTKNRLQTGTGQNKELTRERQQKRPK

SEQ ID NO: 977931 - protein, 52 aa, Homo sapiens
MGRECEWIVDWHPLLRICDGAAGDRKPRSPGPQAWAQGSRPVVHSVLMGLLR

SEQ ID NO: 977932 - protein, 295 aa, Homo sapiens
MYTNYHTGTKHNNEAQIIQQKQGNPKEAIKQKSKHRQTYNNTIARTNNPPRETNKKTSNRGTRTSTTRTQAAIGNNKQQKTTQKATHKRTKQNHKQTKTYQKNTETKAKTRTTRGRNQIQTQTTNMDTRTHNTMDHTTATKTTPNIEKEQHTRSGYSDTDNAKRQANTKGETHRSKMNTQTESIPTTKYYYSHTRNKSRQHNTANGTKQHEEQNDNTHRTTIATPKNTQLRGQYTNTIDKNKEEQYNKTQPKHNGTKNRQTTTNDQKRERHKVTTTNKKKHNTKIQTTTKAEQNT

SEQ ID NO: 977933 - protein, 267 aa, Homo sapiens
  misc_feature (113)..(113): Xaa can be any naturally occurring amino acid
MGYTCPQYISYRYLQIHMGAAVLAPQMYPYAVSNSVPGQQGKYRGANRLPSSAGRSDHKTQHKPLAPPDDATAARVLARSGGCHRPYSSYIRLQDLMLDFPRALAYGQWIAMXPMGPHDSSFEQPGGLPLYCFRVKPIVNAELSGPRHIARGHLCQSLYPLSTLLLSSLTPMPVYAHCSPVPTSIHMSTTALNCPVMTVSWDNHVPYWITTAVSLKQCVPQSVKAASVRGGPTSVVSGMHSKSVSPRGLVGRCCWAGFLAFLKEFPA

SEQ ID NO: 977934 - protein, 329 aa, Homo sapiens
MGRSPQIQLLLPVGVVAERRRLRIEEPQHEELQAWTASGARYKTGRVGENVHCGPAKAWFLVEKHWYNAVGGIRAVGDQDSSTFPGCINNATLFQDEINWRLKEGPGGRRKTMCRALPQSVRAITCIMLSDGSKSMASHTIERTVIEACPTSRRSKCTQENWLLVRHNDWGTSHTCSVQPYRFYGLVIAHSSGAVLLGAQDDTRLWGTELRKALRIGGMTQHSTGPRWRALRLAVITMRPADECDVPAKAGCVMNTHSNREAHRHDGLGTQYRCTALHPPDRHMDGRGTTNRGKPEQGTCHGNTEEPRSQKGLTQHARTHRSNAPTVPN

SEQ ID NO: 977935 - protein, 126 aa, Homo sapiens
MWMCFPDGRNCCCAERRHVRSSCRHTPPHGRLPGCALGGVGCDRLSLRIARQYYPLPSGWIYALRRELSPPPSSVLLASCTRGLVTWHRALCYARLLSDCRCQDARIVVTLLWLSVIWGRVRQTLD

SEQ ID NO: 977936 - protein, 222 aa, Homo sapiens
MPGPPAASQTVTRQRGDVGGLCPDFSPSVHDPRCIDDRRPVEYRQINRLGETRRIRQWMRRGRHQSQQGGEHVRRPWCDDEQRHQEQRSEIARGQTDHTGATSTSQHHNSGKHRGSQTKRQTLTHGRKDHTDKTTTQAIETRNKQEALPTGKAHAIDTEAAPDARTQPTRTANTENPAKQTTQQENNKRARTAHKSKNTHTKNDTQNNRHQTGRGKKQQTAE

SEQ ID NO: 977937 - protein, 209 aa, Homo sapiens
MRVTLIVQVRPEEALWACHSEVWARGCSSLIPTLLPVTQPFPPLLRLGQPINKEAHPARSQILLVLLACRAKVSGSDFSSVHDYSGKGEGVMSMLRHPSSLLKAAPKCASCIAPVLPRSLPEIHLWEEGCDGRLVTLASPRKVGLPNDCWGRERARWTKVVAPTQFDREDKAWPRATESHSISKIRKKKKRSHQNTQTHKRRNSHTVYR

SEQ ID NO: 977938 - protein, 69 aa, Homo sapiens
WTLHASRPQYCHDVCLECDARDASVDLSGLVLVIEPPRSAQTCLAEPPRDSGDPSRNSRVLHLARVRWA

SEQ ID NO: 977939 - protein, 302 aa, Homo sapiens
  misc_feature (236)..(236): Xaa can be any naturally occurring amino acid
VVATMPFSSITSTMHTEAAETSAIVLVNASHQEAARRVIATRDDIGSASVNHAEYRNERMCVNAAPTPAADAEISGPLVVPAWWLQRRCREGLRVFAWRRLQEPLSWNALDHNGIVIYNGLGIGVSRRTPAVLPIQKERNGIPHALGSRRLGPEVLHSPAFDFLCPQSRGHCHPRITYHVDTWSRISVGDQGARQGQKYIPRKTHIRRDVLEILYKTRYMSLHLEAREGNHNWLLXTNVVNYAPSVWIVFMVVCHTGKVVFPSREGRKVDRSPAMFYAHIGQSRGYFCKPPAAGSFGEEPGT

SEQ ID NO: 977940 - protein, 352 aa, Homo sapiens
MAKGEFLLSPNVVFMSYLLLEYRGVDVQDPHRLSCPRHSGSWRMVQFTVGRHMPIHTATVKSQHRRGSPVAIASQKKYQISRVVLRVDAILDPGYQNHTSRANIVTFNSTATTGDRRLVPCVMQCTSTRTGGPDSNRDGKPSLSYSKWRKPAVSLNEKTWEPLRAGPVQQKVPVRAKTCVGPVGWDVIRAPRGPDAARTPQQTLRREDTPEGSRSRTHARRRTPGLQRRGATKSKPQSAGNGLNPIGRDKKSDQTHRQTSNIASVEPTHTPMQANNNRGRHISTDAVASHERDHPGIRQHTSSTSSLAVSAVLCCLTNRQRRQHVQHRDANAAEHKAAKHKTTRTEQKHNNG

SEQ ID NO: 977941 - protein, 245 aa, Homo sapiens
PTRLGGCPGRCGGREMAHECLDLPVEWCPADCGMRGMAHEAWTWWSVCPGRRVRGTGSQRLGPAMDGCPADCGVTRDMLTRLGPAVEGAQQGADALRGGCSCCTGVPPVSSDPVLVPPPNPIPMQNSQVTCTYVHGHGGWREEAWSGPLGAAGRNGRWGACVAVPGSHPAFHPVRSLHSCPESAKQPEETAGGFLKDVLMVDSGSTEYRRFLSSGRLEEGDTKELHDLGLMTGGQVAELRLEGWG

SEQ ID NO: 977942 - protein, 187 aa, Homo sapiens
MSPYSFVRPTYRMRECRASRRIRRRTLELANTIDKSCAWRRVQSRCREQTITKKTRLPLYGKSALQCLLDVIDIGLAPKLNHIVTILLSNTEAIYPSWVIISREMANSHDRMSVGRTSYLHAKKAASLTHGLPEMNTPGSTEIYRSLWRRDLNPDTHLREGYRGLEERGTLKQNWPPGYAGQKGYKN

SEQ ID NO: 977943 - protein, 155 aa, Homo sapiens
MASSIGNTSRSCVPIVNSQGLVIIVDPAQVALVALLNLGHVELVGVHQLNAACCIRWRHNPAVIGACCVGHHLFVLTCGSNRTLTRLSSWRTTQLLLDIRHYSVVDKLDTLAGPRELRNIVQLDSIMNKCGATNVECLFTQMQKSSGTPIHKDPQ

SEQ ID NO: 977944 - protein, 142 aa, Homo sapiens
MLVPCGVGRNWGAELVPCGVGRMGGQCWFPVVLVGWGGSAGSLWCRSDVGWGSAVFPVVLVGCGGVLVLCGCWSDGGTVLVPCGVGGWGDSAGSLCVLVVTGGTVLVPCGGVPSCCAEVEGILPRPKEPLTFTVSRRYVVCS

SEQ ID NO: 977945 - protein, 62 aa, Homo sapiens
HAVGDEVLGGIEGGCLDPSCGYREVKPTSMAQGGRREPDGELSEVEGRGMVVGISDGIAGDA

SEQ ID NO: 977946 - protein, 383 aa, Homo sapiens
MGSVISIRTIVGSVCNGSVTRCLCSRFRWTRLWVRHTHRHRRSTEKWLATWLQTGVSDSCWSRLMGLCDKALRKRVYRPLTAGITSSEVKVTDLLTYAVVPSTGIFGGTDVQIYICKRGTESSSLLQSIAGCSTGVAFGDDAKVHQHANRQWDRGLKVLQAVGPGPSDWKLGLISARGVELGVCGAGVAGAPDWGPAGGSVAGWRIPHLCCHLGSLIIGGPMTQTSCRCVGRSRSFAWSISRGPEWEVRLWDCDRPWSPSCLASSGRRYPRAYSLLCACALACGGWAMCHLQFRVCVPALKMRSAGPSASVDRIVHLLSCASCSVHCLHARKSGAERAGVCSLLCSFAAAAYVFMRGVRGHVRDCSCVLPSDQIFALYTCSVS

SEQ ID NO: 977947 - protein, 171 aa, Homo sapiens
PTASGCAERSEGFVAHRSFAVPAATVSTLSVGSRRWWVRNSAIAVLVVVRGPVSWGTAVYFEPQKYEVSPTSRTGLRGTEDTESRKRRPGERAGRFQGVPDLKDAEAVQKFFLERNYSLAEELTRLRGWNMREGRRTIVTNAIAVCGAPAAVTAGRVQQTLPAPVFQMLLS

SEQ ID NO: 977948 - protein, 125 aa, Homo sapiens
MGGYILWWCLCGDNIQFIQERFPATMVPENQYMDRDNFVVHRIIIKTRHAGKSESTQGKIGYVTGVRGPWRFIITVTEPCGKKQSRRHTNIGDRGAGESGHLLRTMKERLQTKSSGDESVHPRIN

SEQ ID NO: 977949 - protein, 230 aa, Homo sapiens
MDVVLVRALYSGGELPSGQELSDPSVPAGVGCAVIDVELMARHVVQPGYPAHRRIVEVFGSEVLLENGDIRDRKVLGDLIFKTDLTGGKLLNDHQPTPRFGKEMMKETFKYFLRGYRYVILDITPAVETKKLAQSTGKHTGGRYNLGNRGHNRWHGVDAEETAWKPKNAKARNPMPRCPDKEKARMARLSRKLGEMECTQRHKYNTGHMSGKAGKRQKDGTKRGKKPMNN

SEQ ID NO: 977950 - protein, 102 aa, Homo sapiens
TTRVMVARRRRSELPGPSDLPPAGAQRESQSGGGGLRRLGEPIEDFPPGHLTMCLPWAASATGISVCWACMGHGPGLVDPQCKLAGRPLCKEEGLGPFGPTQ

SEQ ID NO: 977951 - protein, 197 aa, Homo sapiens
GAFSGPRTGLARGLHLLKNQLRALAVLAHTQAAGAHRPQSAIPSTVTASVLPLPRWLTGLNLRVGATAPPLPMPVDRRVKACSCVSLEKTARAGLQKGQGDTSLQAQARRSPHQRNDSVEQIRWGRRRVVSEHVMQAVSCAGSQPGGSYSATRNRLRRDRVLAPMRVVPPAGASGPLAEGSRLSGRDTLPLNKMDSN

SEQ ID NO: 977952 - protein, 166 aa, Homo sapiens
MSWRLIPQEPQGCYLTITRNNREQSQTKSTRQSPPGEPQLNKRQHLGEAPYRPATAHHPEEATGKHPSLKGPASAYTTRGGRNPRERENNDHIPLSANKGDSNTRKNTTTGPQKMKRALTQPDRVPTHVPHNKHKRSRQHAKAIPTRHRGKEKNTTKHRNNTMNDK

SEQ ID NO: 977953 - protein, 138 aa, Homo sapiens
LLGTGDACCHDRRTCLQVIHLSVDSSTPSDHQLIFLARCTSSMYVIIGRRSGSLGEEERLLMECRILLPGADDVEALIASLRMQTTLARLRRIVRTSEDLGNTRTCAQVGRDNSSTRSNSRSTFAPSNRENPLLRRRD

SEQ ID NO: 977954 - protein, 473 aa, Homo sapiens
MWPAGPPLTQHVCRAAELLCYTNYYEYCYCYYRKHTRKQKPANQMTPLQHTRTRTPTLTTDQTPPRTHTKNTPTAGTRPPPQNTQHHPPHTRNQQSLPPHHPHTAHHHTATNQERAPLSHPATPPPPPPTPQAHTSAPNAHTHITTQRSHEHPPRSTTLDDAATTIRPHPPSPPSTRDPPPNTPPLGRPMHTPLSRLAPLHTEPYTSNALPLTHRPTPSTRPQHYPAHPHPPTTRPTPASPHTLKHRRTTPPTHTPAQTPSRSHQATDFTSPLRPPSTYKSSHHKTTTTPPHHSHHLTTTHSHRHLTTPNQQQLPPSTLIQHTLTLFTTHLVTTPTTHHTTLHNTNPKRYNTTNNTIHKLTTPKTTAASRLTGTRRAGQEPRVSGSGEATVTEDDEQRPDDAPSHAHGYGGRTADSTYPPMRHHTQVDTSGAVVSASEAITATQKDNDATTERGLTISDRRGSEEQKLSGETD

SEQ ID NO: 977955 - protein, 295 aa, Homo sapiens
GRVGGRERDARELVEQMRRPRRPGGLGVDPGVFRLLSSGLPACVSMAAPCGVLAMLHRSMLPHPVLVILIEPGVVLVLLTLARSCIHGWLGLGMLPVWDRGGKAQDAILATSTIALSSSLERRVAHGCWLPETQRRVLPQRDEFPCANCNGPIYPHAYLLHCYFEGLDWRTAILHRTSARTPKMAPVAHRGDQVYWALVHTQKTTLGYLDLVGRLLFTIVNSTHNRGQPGPLVGYSAKGKFLGGIPTKHYHQDEWQIWSLGSLSVRSRLAFILANTRHGKEAMEAWRSPGTLPTV

SEQ ID NO: 977956 - protein, 248 aa, Homo sapiens
MNDTCNYVPARQRTDVTIWSLGTTGPCSLGGKNCPKARDQMWYEDALGFQVDPIISVTCIGNARYQRTADTGVDALPGADVPWLPCWSPLTTEVGVPRGTAILKGVADPMRPAAIWTGTKGEVVDTPGHLLPTSGRVCHCVRTRTKNPQPQMEPQHARKDPRITTRRTTTQQRTITRRNTYTVEHRHTVQHETDPGGPPRTDSRPQTLERYQEPLTANHTTPNTKQQATDATTTALSKEQNDKTANNN

SEQ ID NO: 977957 - protein, 535 aa, Homo sapiens
MAPTVRVLVDYGECQRDGGVSVTSHATVNADETCTVQGNGADWSEALRKSREMHGTIAVGSQRERGTAGQDSPVPMGTGLREPERTCSHEATCLKHTRHQAGQESVRDGRLGSPCLLRAYHLQDEFGVRRFARETTDACWSSQDGDPHAGPEPMASLAGVAVREPTVTGLGLDLSRRDPLLSFDSRCYLVSLGYLGGSPDAGLGNRRLPMTERPAARPRARETSIARTPAQGPAAPRKRPASNSSTTITVFTEDHHAGPRTTVIHVTSGNIGAANAYSDKFFEDDRKNPHRARYTPTNYSQTVDRKSATHEKLGSTYINTTTQNHISKPQAPPTPQKRRAPTNPDKNSFHSTNIGTTHTVIRGGAHARGDSAELGRAHVRGRRTRAGDEERPIRRRVGVFEYGDDELLDQVDGDKCGCSEVRERGRRMRRWRREREQQIDENQEETSIQKDLTERIASNHTQGSKRSHKRGREDQHVSVEDATQQPTTQTTQTQKAPTTTTANIDAHQHQAHNQHLNHRRHNQDTNQHTPSQSTH

SEQ ID NO: 977958 - protein, 289 aa, Homo sapiens
TLAHSPSQSLAAAAGLSRAPGGDPRRRRQDFLQVASEPNPSPGYACSSGPRLLLLPAGEAAGRWARLLLCLSRSVHGRRTSLMMDLRYFAVRICGADLQATCRGCDSAGSPHRSLCHCPSTCWSPPEPAVCLCLGRLRCGSTVDYSLSLWDREAAGAWCAAGGGARTESERGPYPVTSGGYVLLTHPWLNGVSLAADSSLASKRFRVILSTCAQSNATVTLNDCQSTLVKGDGHTGVVFSFYRKGLHAAYALSPYTGVPMRPDDRNGAHNWHPRHINAHTWRHKPERRS

SEQ ID NO: 977959 - protein, 443 aa, Homo sapiens
LDPRRDQPPRSRGARAIRVCCYASSQRAAAASEQSIPQVSEESPHAPRSTALAGRNEEPMEPRQSGSSTDVQRTDVTRPRAKPSLPVQSRLAWTPCGLDDATEDWTMRHAVRGPHGTVCRKCPGLWMSGYLTTPGRKTKSGIDTADMDTGSMTPRSASSRDRHAPHADPRSEHDETRLTTRSTLTHPFGRAPTGPLQTNRTAKPTPAQNPTRHRSDPTQQPPPPRPTTDTRTHTPPDAHPPARTTPNHEQPPGTTTQNATQDTATPTTRTNHTSHPRHHAHTTLYPNTTADNHPYTQNKAHTTDKHRTHKRKRTTKQSSANTPETNKPHTADNVHNDTYTKTQDQLAQQHKPNKTQTQHNQNKRTTHTTHKPTQDKPTRHKPDNNNTQQGTRNNNDDHHNHATQTQPPPPTNNYKTTPITFTHTNPNTHIPKPKHNTKFKHNH

SEQ ID NO: 977960 - protein, 222 aa, Homo sapiens
  misc_feature (139)..(139): Xaa can be any naturally occurring amino acid
AGSRQATPTASSSSTTPGRASGGSMRASRLQQVPGLLHRMANLMGIEFHGELPSTEAVALVLEEMWNVQPGPTSWAAWRTRVTDDRCRVWDIMDEFGSRIQHADVPSFGDGPFLLQCRQRGGPYTAVVWPTEGHLVTAXTKRALTPDDLLWTLTGTHGTRSRLLESWDTWHDCMPLVPPPDMLDLSSCTPEPAAEHYQGHSGRKTRTKLATWTSNPVECSPP

SEQ ID NO: 977961 - protein, 257 aa, Homo sapiens
MNKRYYVEACVPGARCLEQIYPSHDVCDGTGSYNIYKSHGYVERYELELVRRRVQIVPNVNHHFHKHANERWLALGDKSPVRHGERANVDPLTLVHHDRRNADGDAISALNGGKGYANADLRTVERNWVRDFFAGGNLNSKHPEVDLYVGRQRRRVTVAGRHLRRRYPPIERYQHWFVHKRLNNPRPDWQIFPSPSRLDHPKCAARTTYGDFPVIGAQWAANLRGGHRDIHPLRICVRLGPFEPSYTHEERLVQPLR

SEQ ID NO: 977962 - protein, 417 aa, Homo sapiens
QISHSVLPSLRRSRLSLPVASGQNEIARACVSLTSGSRPCVNTCGFCLAGRRRPRSQCFASIVRGRRPDQPGRSVAACDGPMNGLPTSGPRTSPEKHRRASLLTPGIGTPVDVDGQSVTQHETEHVMNDIMATTTLLTRQTLAPMAPRRSHAQVASMSRRPPPEPPKAQTTRTTTDSRIECYDAPFQTTLRVQWYRLAHSKGPLLVSLFNALMGRQRLWVDMIQLRPSVRGTGGSIHECTGLSSSSYPKRDLKTPSRIKVPNSAGRIWGIPVALSTESKLLKPENKPSNLKGIAYNFEGTKGAKQHLRSERPHRRHRKPGGKTPRGAPRKSIQKREEKPQESSYRSSSPLKHIERQQHKDDDNTQPGKRTDNTFWERKKTNQEQRPPTVEPTASIYTTWVVEEDTGLRDGPQRDHSM

SEQ ID NO: 977963 - protein, 334 aa, Homo sapiens
  misc_feature (138)..(138): Xaa can be any naturally occurring amino acid
  misc_feature (150)..(150): Xaa can be any naturally occurring amino acid
MGRVHRDIQSECLSYACRLEWGSVVRVIVLTSKRSANLRTLAQYAGGIVKELTPTVNGRCAVYTINTMIHKITYPKCNAIHDGKATLSSTSHFHLPRRFIFLNNFPTWDMRLEDENMTDEASEMFVRWHELQANSSDXNCYHRVYKAESXLVSSGLMAVGVGSRALITSPRRSSGAGRRVGQGSPGRGHGRFWRNQSHLPETNKLKTPWSCVPRKTKARSCTGGGTGGQGRNRPREGGGPQKRFNGGNAPRVKPRADQHSVCPHEESQRGTAVQTKRPKGATGEPERESHHNEDPKTSGKASCARYGASTLRATRETLKFTGGGAAPHIAHKLQ

SEQ ID NO: 977964 - protein, 301 aa, Homo sapiens
MVAPWTDGGWSMVLLTCCDPRKASSLLTVWFRNIVVREPSERDGSGSTRFGRRLPRGVGLPLVLKVRIMWAPATDPWEEGGPSTWKPIHRTSLDEWGVYVEAHRGMCLVGDIVGLVGAGPVTWLKHWVTIDHLQSHAHNMRCDERSRCTALVVMSGRGGQEPGLDLPKRGAEVLKRLPESDPQVQGILRGGRGEHLIAGDREPAAGGILLDGTGGERPPAWIPMTKSGPERPNQETVVETRGAHDSNTPDTPVDLGGDTTRREDNRSGESTRVQSTIMCDIVAARSHLILSISLPPHKTRE

SEQ ID NO: 977965 - protein, 228 aa, Homo sapiens
MTLATPLTVRQCEVVRPRLKAPISYYYLHHKTSCTHELVPTLRLNQQMQFPDVLNQTTFTGYTTGGYTTVNALNICGAKPEFHAQSPKNYSPKKSLKVGPSIYPIATPSNPSRGPKTKNIDNKNKPNTKTNKNGTQKNGQRGTKTGPPTHRGTQGTHKKSNSNQKHAHPQKTPRRRPQAPMDTDKTTNYSREYNDRTHPTKHPRTKHKRSTDNTSKLRKKTPKLNNNT

SEQ ID NO: 977966 - protein, 182 aa, Homo sapiens
MEAYPRARWQVWMAPRGFLGSTDPHVTYGLCTDGQGHSVGQSSVLAVSRSRGVTRSWTTSLILLDSPGWCTASHGRGANCGKEPLQERPGIRRERVAHGTKVEPHTHDPCIPDSRVRHTGLGQTGRSTSRQPGDTLAKRCLGLTAGRNAGHLPNVKPEVRQRNSQGRTSRASEDTERTTHVV

SEQ ID NO: 977967 - protein, 232 aa, Homo sapiens
GAFSGLRTELQSADMRAKNQLRWPAWPAQVSARLGRSIEPSARLAPYSRSCDSTRLLPRALGVALARALEPHAVVAWPGVLPSRRPDCSVWIMRAERGLAWHDMFVCHVSCPVGLVVMSKDNGTKSEHSSRPGLPRAMAERLANAKMWRATRLVSVRPTDQSGSRAHRGTAKVGTGIYLGTATHVKPRGLAFPLVRYEKIPEDHRDVAYPVISFRARAMVEDQGASPEHGAR

SEQ ID NO: 977968 - protein, 240 aa, Homo sapiens
MRSRRKREKGFACGQAWSRTLALDLGSLSVPQVPGGVLVASRRFFEVNRETGEMFVNDRLDREALCGTTGLLHCILWSRYVENPRGAVQRWQVVIQDRHRTSNPCFTYPGYDMEISEAVAPGDALFRIDERARSRCGEATVLTKPYEPGGRHDGTTYGRQSRWQNTREETGATGTRHHLDACERGPPDTRKRRRQNYTQTTRQTLIPARDPTRDKHHAQRAVHLNLRMCESQDRSNRPAI

SEQ ID NO: 977969 - protein, 102 aa, Homo sapiens
  misc_feature (21)..(21): Xaa can be any naturally occurring amino acid
MELLRPCHRYSSLPYVHTLGXHNVPIFKLRVSTVPDHGNQRRRAINSTINFSGHTSNCHIPNNRAKTTMSNLPRIQPILEHYLTIATRCEVMNVGKGRYATQ

SEQ ID NO: 977970 - protein, 304 aa, Homo sapiens
MRSCCGQWMRTVCMWSALGPRPMQSVCDMMPDEIVVQISQFASSEECEHPNGNDTRRHAAIDRMSATIAGLFAPLEMQSPPELHCANLYAQQLTRTPLPFGNFGALSVTLDDAPQSTPNWTFGEQHKAPLIWSPLVTQETTSLRHRAIDRIHLANHQWTAALGTIESTLRGLNPYEPPGTHENTMVIGPTLAESPLAFGPKDTHQGSTKGTYTPGQVGTPPFLWTTYIPHTVAYSPGRRYSEAHIPKASRSPRPNYYPKALGPKSIGPMGTLTTHPTNDPVKSGATNDAGYSALYAIAHTYPLK

SEQ ID NO: 977971 - protein, 328 aa, Homo sapiens
PRVFCAAAVCVCREDRSRLSLRNVFARFLEEFQCGADAPIFSGACSNNLVARLERLGPVCGDKLVCSCVSLYAAGARHEGGQPVVTIAGTVRVRPVTVSLRPACLVCLGPRSDGGVALTVVPGWSPSGCGKLRRMAGATGREVCLVGTSEGEPPGYSVRQKKAKARQGNRARTGRQDEGGMCGATDCDVPGTSSRCVMLKRAHGKASERDEDRCPVWELVLPGERCCPVVSLVDLVYFRPVGDSKAGEAFARIVGSPSCVVNESHSGIACTGPPLVCCFVGDNLWPWVGCSSYLGAGPYAESVTVPRWLHEGGNCVSIPMEGPFGGVS

SEQ ID NO: 977972 - protein, 77 aa, Homo sapiens
LARHVAPPVSPGPKLFPVHLGPMPLCWVIILMSIMPRVGLRLGYLHYWLVPAAYTSDRSGSPMAAGTMSVVPGSHEM

SEQ ID NO: 977973 - protein, 267 aa, Homo sapiens
  misc_feature (209)..(209): Xaa can be any naturally occurring amino acid
MPLDKGTWHRRPLDNKMTVKGFRSKKTQERINKKDGQFNTGDRHIETRKEEQKGLSQQVGKKPKGPTTRQTGKQGHHGDNKTNTTMGPFTINGVGNNAGARAHKTARGKRGEHKYKYLDQYMPFEYGEDKHGGGHIFTPFLGIEDAQPPGDKMGNSGEYDRNHHHKGHIHNIWDKEHTNPVQRQYTHRKGIQKKDKKSDYTHRAASTGXVDPKTTHERWARNHWTQENDQTRHKTKMGTQRTMDITYKENIKQRIGRQQGELSKQNG

SEQ ID NO: 977974 - protein, 230 aa, Homo sapiens
MASPIAGYRLRVPGGGMWRSFGVPRPSALSGRRHSVGGSPVSCGLVRRWRPCLGGLGLPPLEGIWAHTAQLHSCSLTPFDTLGAAVATLSCLPCCEAFRSPAGPGGSHMVAPPSDRFSGGVLATCGAAWGSPSFGSPQNTPPLLGDPTSDQNDCIIPRIKRNPHLGAAKAHLESSQQFSHATSSTTVGADNRGTSREESGMGLKGKLRANLISHAWTQEEIACDHERHVE

SEQ ID NO: 977975 - protein, 209 aa, Homo sapiens
GQERALLICGGQGDRTKMWGLAVVSQLRKPLPSFCVGQGLAAALLPPRLLRLLGLATGQHCRLRLRWQEPPRKPRKLTEPKTGTSPPRVFAILLTWKVLGKGGVGLSLEPQGLFGGGVGAHGRRAGALAGWAQGLHQGQETRELSIKGRDATRRPKPWAGEGKAPGMGQRPVCASVESGHPFSCQKNRGSPKSLVPSQVPEDSHTRCLT

SEQ ID NO: 977976 - protein, 138 aa, Homo sapiens
QDELSWNRRELVSRLPIMRVAQVSDVSLIVLPPLFDTRESVVQGTGECPWMYIAPTSSYVYFLSSLMAILLFMSFVSSCNDGHAVPRVGLGDGAKAVMWPTNKVPRAAPVHLVVLCCPMLTIVLFLVLLDLPSSAFTP

SEQ ID NO: 977977 - protein, 281 aa, Homo sapiens
MTDLRMFDRMRLDTRAPFYLLGPWPTGAQLPCWGLQPGWPSPLLGNLPVGGAPLGLSLRISPMPFGPHFSLGRLAGGPPLVPPQVPPSGPPNSPGAPPGTAFLPPPSHHLTQTWRSSTKNCPPVVWTPTAHRPCRDTPTHRRRQTRRAPGAKPHLSADTEGTPPSRLKTIVQYGTTLTSHHSFLANTNAPRDPSPDAPPLATNPILSKQLHHNYPRHYTTSTIPLCTQFNTQYQTHATHPQLTTLQKHPDPTHHVLTRHYSRPHTPLKTTQKHHSLHSTTT

SEQ ID NO: 977978 - protein, 127 aa, Homo sapiens
IWEVLDCPFEWVCMDAPVADTSASAAGIPYKGGCAIPLQHMCARISTHRAVCGLLTCHTSDSVARDLVAFSSDGIMIVTSIHRCAMNNDDRFDRYVKRKVARSRAWSYNVKETLPLSLHRCAIGRYR

SEQ ID NO: 977979 - protein, 170 aa, Homo sapiens
RHLGVQCALLGSPIPSYAWNSPGQEAWKVEGVNRECACVSHGAGWGAGGTWAGGLGLAELASVGHLTAYKCMSDWTQTIPSTARSAFGTLSLPLQAPDPQSMACPLDQAIGLLVVIFHEVLRQGGGLSTPLSNEGAEVELIHEGRSPLARTLQDAEIVRLMEDLDRNKDQ

SEQ ID NO: 977980 - protein, 53 aa, Homo sapiens
MAPAGGGESSAGMSHSFLTGGHQTSWIEAYVLSPDMCLWHWWAWASEVAPDPD

SEQ ID NO: 977981 - protein, 296 aa, Homo sapiens
MPGGDALMSLQELHWLELGCFLPGDLVGHVGVWASVHGGDVGTRSDSQLRPRRGILRDSDPSEHCASRGDGWGVRVVSNGPLKFDMMPYLANTSPDGSVNWLLCTTSQKSRLDLEQLKQHWVTWARQTPEQGTAETFLKRGKVPHPRHLEEQDDGQLSIKEQHREMSIQIRETESLDQAAGDHSVEEGCAPRYTGYDCAQVMKEDEVHITEPEDRENWRAGHKKRTDTKEQRNEHKGRPNTEEAPRRQTSTAFSEKRAPNTIAHKTVQKRREATTTAAREHRARTEQKHQQTREHE

SEQ ID NO: 977982 - protein, 456 aa, Homo sapiens
MANEEDDPVVQEIDVYLDQEIWRKKHDIVTYQIPVMRSSRRSDHTERPFTHHRQTTDSKPKTDSKGSAALAAEAQSGTTPATTNTSLASPAKQGADQHKQALQQMGQGGPWTAAETGRKDKDEQNKEHHQKDDLDSATTKDRRTHNIHDAPYTSQETQHKGTSTAEFNTGEDDNGPRTVDKPPVKQSRHRRGNGQGPIPKATLGKHKAQYVTQHEVGTRRFPNGRQDTWDTVGKPPNSRPVLINYRRLKTTRWMQTIYYAGTDGNHVNMTKEGTTPAGGRKTDTTREQQQERGITPTKTAAPCDTKPAGGDIGKQTTYPRYDYRTTHQRQGTQYEDNTGGTRDETKQGNTDGETIGVLTYNKSSPQRETSLAKTAQRKLGTKESSLTSTNHTTTGEDNPGQDNGEHKQRQNDQSEGATPRGQPREKRAPHGKMIGARTAITTTIKIDTTEDYTPNR

SEQ ID NO: 977983 - protein, 264 aa, Homo sapiens
MAQYKVGFTDSRVQGTMDIIHNARRDMGWVEPKNNLPSHGVHPDSLDTKRGDETWVGICRRWERRRLSDERQSTYIFDGPPPQCSVDTVNDMGQVSGGCPRERNIKAKAVPTWRNRWLHYSTYKRGQWTRKGNVPPNALKRLQNPLRGQHGQSRYQKGRDMNRGITLGRNTIQKGTPWDQRETTHRNIPQTPQDTKTKNKTVSGAERHSEQKSPLQKGGPKEYVKSAHTPQTSTGTPKGGDPEITGRPAITIETSAERGKAAGQ

SEQ ID NO: 977984 - protein, 356 aa, Homo sapiens
  misc_feature (29)..(29): Xaa can be any naturally occurring amino acid
  misc_feature (55)..(55): Xaa can be any naturally occurring amino acid
NTAIDPLLGSSGERWRARSGQRRDGVSGXSGGARIDSDEKNLLEQVVDQGAPRLXRQWAEHSGHHARTRAYTPCASLSSPCTGAARRGLLKWRLATNSGSKTRYLPYVVVRRSDATRKYVDMEVGDNYHPTPVRQANAHDYGKGHRANTAFDHEIVARTRIESENWRDISWGRTHLTSLSKPNIGKTSAVGSGAFHGRGKASCAWLGVAHATWLGAAASQRMRAIRYSITVLKTVSGATGQSKCLCDKSPFYDHPLMWHLTTAIRQVISEEALVAEAPLALDWHPHWNPAYTQRVAGLVPLASGATVIRWEGLAPRVKAPGNVGVPPICDTPAGVKLVPGATQLGHLARVPLKADT

SEQ ID NO: 977985 - protein, 117 aa, Homo sapiens
MHYLSRRLKRLFSQCAHITRDVNYGCIIRYLHANGSLKYSLSASSYTSGEAYITDLFLYSENLKHSAVILLLATIAGSLHRLCPPVRPNIILRGHEYITSLLSAIPYIGTDLVSMRV

SEQ ID NO: 977986 - protein, 115 aa, Homo sapiens
RFSCLSLPSGWDYRHAPTRPADFCVFGGDGVSLCGQADLKLLTSGDPPASASQSAGITGITGMSHHTQPNVFKFLKLFLLGVMAHTCNPSTLEGRGGRIHEIETILANMVKPRLN

SEQ ID NO: 977987 - protein, 75 aa, Homo sapiens
MIITPNGSTSGTLTSTTRGGRLQQRFSTAALGGANEENQRNQASGRTSHSGTVNSGSMRRCPTRGTSEWDNSSPW

SEQ ID NO: 977988 - protein, 269 aa, Homo sapiens
PHDDGWQWLVAAAGISEWLLPGGVTQAVAGLGCVVRGCVGSSSRVMRDYDLLCGRRGDLGVPGLCQGWPAQAVEVKVSCGGLRGTFSPRHPRGASLLAPAVNVVLASPKKLMHQCWHCWEACSKMPPTMAGSVAQTVPHDWRKDGTKLFNNHVKILELGPTRGPASGQKKSPYFNIKASFVDDATRFAAVAKMVGTEILLSADHIIICYWIGWPRLPQLQHRKCAFENTWNHHVIEHLLAVNGIPWKKRWSVGGPGYCWGLGVLVASST

SEQ ID NO: 977989 - protein, 103 aa, Homo sapiens
LLVLLAAALCHGPAAAWAQPLSEGARSVPDKNVNRSQSFACAAPKEGGPRLLPPNAAPARAWLVPTWRDEPVCLTPSLSDGLLGGTWAQCRRAIDLAWQLGHG

SEQ ID NO: 977990 - protein, 149 aa, Homo sapiens
MKSPPDQYPAGFTEPVARRIDLDQVPYFACRAYLTPVSYPVLICWYLSMHSILDLLPQDHASSEHRAGVGGPLFDSYMLSSDVHGHLSCILDTSGSDVPPVCSCCPGKYGRWNPGCPGGLRGARGGVGPRFRERGGRFCPEGSPRGIYT

SEQ ID NO: 977991 - protein, 327 aa, Homo sapiens
CGWRAAGVLAVTAAGEGGGVSRAVALAPEALTMDEEYDVIVLGDRSHRMHPVWCITVLCNCVTECVLATCDRTPSTTVGAMSSSITPLCCELYKRFQLLEGPPESDGPMAETGTVDLIPKIPHGITGQLVKMLLYTEVTSLPWTFKVAGGHALSTKRGATDLQTCRPPEYLTASGLPTLDWGHVLTKTRAFQPSSMDVMRQDLRLTHDPQAPTEGALDPPELTQAHALTSHQEKSAPRATASSSELHHEANAPWRATYQSTGNGRPMGHKTRGGMEENGKEQALNQRTKEQDPDGGPGEKDKKTPSKLKPHAAQSDWRQHGAHGRMA

SEQ ID NO: 977992 - protein, 464 aa, Homo sapiens
MGTLAVCILHPIRLLRATVLMLCLACCGFPDTRIHTCMAPVITVHPVQYMVMLNVRQPFVGHREISVEREHIQKANYQSKKIVHGSNCSITSHAHRMHSPMNAQKRRVYIRRLTVNHHPQDLYKEPSPREEHPHRTRTNEEPKTTGPRRTQPRRRGDTHTAEQEDGSERARRQHNKRHAPATQPEHDRRGADMNKRLVVPPDVVEDGGRAGQKYIRRRREELIWEQHEVQYGQERVAGTKPYDDRRLCPKDYTQEEQKERQMRGKVHTELGKPITDEEFDEDIGKDECNIDNKKRRVEDQAIIHEAEHGRKKAAASTRGRGTPGAAGPDARDGGTPGGRTAGTGAPRGGGGRQPSAEGRAEPTRAPREERARQRGGDHATETRARQPRTRRAERQTRGTAGAGRGGGQTAGQSRAECRARETEAPRDRGSDRGAEERERGEEKREERRGPERAATRAGTAGAAD

SEQ ID NO: 977993 - protein, 177 aa, Homo sapiens
LDLQVVLAEPAPGPPDGPHLPIQTAELAPELVISNDKRSFCHCLGRVLTPPERRCWRPVLPGTPVNLSCSEAGRQGWVPNLRPAQLDFIQMPFLETEPGAQELKDCELVALKSQSQLWLTRLGDVTLTPIPSPSSKVFSERGTGVDSEWLRLPRSYAKRAAAERGLSGLLGDKVLLP

SEQ ID NO: 977994 - protein, 221 aa, Homo sapiens
MRRPEDDDWDEQVLQESRAMVGSDSFHVDLVTIVWMNISFLQRSSDNCAESRCSLVPAADGTTQRGSEDSTARRCTHCQSTDGRWQRQRRRLNNREASPLKTKESSPHLIWDCAQQQLKERTSADQMSSLRFISQEECEGPGMNMRGCFRASAVQLPSAFWARLYLLFPLTLAPAYFFNRSGLTGDTTGGKAPYSRGASGRWVLGARWAELGWDKACGLYH

SEQ ID NO: 977995 - protein, 362 aa, Homo sapiens
MDDDICRARRQTTCSVHVQGLASAGATDAPLGRLPPPSVVAPQCTSGCDVSGMGHEGFLCGRPRPMSKTRHPHPEVPPYEHGIVTNMEDDMEKIWHHTFYNETAVWLPEEHPVLLTEAPLNPKANREEDDPESCMRPSTPPAKYVAIQAGAIPDTPTGQYHWHRDWPPVDGGHPHLCHIYERGTATTPMHIHAYGPVLGRDTDLEYHPEESSPGARHTGPPSTGRAEASRAWPLKENGAHRQPCNSTHQKGQRWRPRPPRQDSPTHAGTDTAPHGKGGHGPPAHQPPPHREGSPASTKHHNTPWQGKGPRTPPPPGERAHTAPATRGHTTAPPHDAHHSDARAPNDNNKGRDHDSHAATSHD

SEQ ID NO: 977996 - protein, 178 aa, Homo sapiens
MLLEEEEVFGPEPFSGNLSLAYGCSQSSLSLETLANTHKQPPSEASPTHAPHSLGPVVCFSGYTSLGGAERVGDYPSQDRDFRGQGHHIRPQFFLGEFHDLLSRGTQLLALAQSLGARTKMVSGELEGQLVAPRALTQTRMWVPCMGNPRVIFQMDRTREPGLSWYKPKGDGDGGYNN

SEQ ID NO: 977997 - protein, 376 aa, Homo sapiens
SDPAKRCVLESLRPCGPSATRGPPVPRAILRAEPEDYWPTASHRGCATYAGLRSTDVPQAFDPQARVCAMARATTCQCKGVWLDGPGGTLLALSKSHFYWSVIHGQQAREDLHSSLTKSLPRTGTSDLSVSEEFKDVLEFRTVAKDSEPGLDCGRGARLEVHTRAFSWLIAQRAYTYRGQRTASVGDCCASWISQKGGPFNFEDSSGSCRPGTLTGGQELSSQVWGRPWPVTKRNCSLPKAGELWDRARQFMSGRIDLVGPAFAMTGLAFGRGAWGSPSGTCKGARGGHLRLTSTPQGNLGGHTTKGLCPQVDRKKRKCHEGERVDHSGAETPEWNGPQVHTFTIPFAEPNRDDHSGMLNGLRRADRTYSRATPTV

SEQ ID NO: 977998 - protein, 143 aa, Homo sapiens
ALPGAAGFFRGGRGRWPCRSLEERGDRRYGGNRFEAPGRGGYGGSRDYYSSRSQSGGYRDRSSGGPTGDSYDGLRIMVTPPRVARHAVCLSVGARFTLVPSPMHFSAGTYSGRLSRVLAQKRRICPLRAISIAGRKEPNETDQ

SEQ ID NO: 977999 - protein, 284 aa, Homo sapiens
PSPPVSLRELPTDGAPPAATVRRLAEHAVLNRRSTEGVRYRARTSPALSGQAMAKGADPRCCTRSCAAKSTPSGFTLDDVIQTGVDNPGHRTIMTVGCVAGDEESYEVSKDLFDPQSLEDRAPGAYQAQTIDDSKTDTSNPTTLQGRPTEPWNAQNNGAEASQGAHGPQQIQWILTPPPRTCQPRESAERQIERKPRTERQDPCTNAHGTAEDQARPNTYRSSKKHDWQSGYNRTTLQYSMNNLTLIRKSHEVAPRWQDLGQLDHELRPVVPKDRGHEDKKTPK

SEQ ID NO: 978000 - protein, 310 aa, Homo sapiens
MASGLIHAFRGARDFVIVWELLAFTRASVDFERAPLTGITPEAARGSRRRVGLPLGAFNFAVALQLVPSFPCGVHQPLWKLQGGWSSDSEARSHRGNPVGGGSPQGQKQPPHLCAGQGLDVAGHRRCQGARGLIRHFQETVRPDPGGGGSRPCRERTARVMLSASSGAVLPRGPSRSTLRAPGRGVTQRLGGASGILRGQLLATVLPSRGAEGESQPHDKSRQCTGSGGNTSVPTGAPHQQGTRVPKKNLTNAKRPTSFAALETAARNTTAENYIYVSASKPWKRGWRTKGHRSPSPCTLLRDVNTPQRT

SEQ ID NO: 978001 - protein, 144 aa, Homo sapiens
RTRAVDAWVDPCVRRCVSRSMSFEYKVMRCLHRQYGLCFCRQKHTVQSSLGVSSVFQCRFEENIIILPSAHGFANTIWDSTFHFLIEYEGGWKASHTLKWRLIDYSKMYADIIARKEAYRRKARFKKLIQLCQDIIPRHIRTVE

SEQ ID NO: 978002 - protein, 130 aa, Homo sapiens
MSRTSKTKPLSPLHDRGYTTVNALKSVEQTQLHAHRPRIIPLKIFEIGPYYTYSTHLTLYSEKKKKEKGKHNKHKTKEKELQKTQGEQEHTKMKKATESSNNKEQTTEERRDKDTPGERSHETAKQRKKR

SEQ ID NO: 978003 - protein, 150 aa, Homo sapiens
TARLHSPTASTSTTTCLQLGCVGRLLPRGWCVLVLALDQGCAVLCSAAPAVPNEGIAKSVDGGTLTEVGFKPQRDMWWAYLPEPLGLTNNTGITDKIQRTEAAYYLGSPDNRPPCTADSVHHSTTNLRASPPAQRPKLQGPCSRTTTRKR

SEQ ID NO: 978004 - protein, 124 aa, Homo sapiens
RTRGCSADPRDILATFSRKGTWVSFITFLSFLGFVVFFGKAWGFGPGGMGGASHGSWLPHITRGQIEGSLPSTWNSGDLQLHSTRVGITIYFWCRRRVFPHSVAQGVAHQGVGWDTQNVVPRVP

SEQ ID NO: 978005 - protein, 287 aa, Homo sapiens
FCCEAACIVDEAMLTGVSPCHMMKRSPSEDLSPDRVLDLQADSRLHVIFGGTKVVQTSPQRNAITVPERRVTAGAWPTVLRTGFTTSQGKLLRTILFWRSPRVTAKQPGGPSSSVLFLLVFASRVLGCLCMDCRYQRTPAGNRYDAVSGVLLLILTIVSCLLSCPSSCPVAVNTSLIALAKLYMYLTEPLRIPFAGQVEVCCFDNDGDVDPVTAGGARCGGLRDGNGGEPSVGVLWNLAGLARATRHAAWEPGLVVPLERLLAAVFGLPMDVSRIPGVPVFGALRSS

SEQ ID NO: 978006 - protein, 219 aa, Homo sapiens
MRRLPLPHSSRPVTASWLARCLSRGTLRRVCAWGPAPAARTPGGFLAPARVVPSFLHLVPAGQPAAMVCLPLSSPDTVKCSVGLGSGAPCRACVPLPVLLRHARLGRLPWSDAHNCIPELDSETAIVFLSTMRHVRGRQVALYCAKYLPRISSRTIRMAYIGKAMLQAMACKKMPSMCYLTPNLTTEEVIKEAGTDMHGRTTEDEDDTTKNVADERLIV

SEQ ID NO: 978007 - protein, 109 aa, Homo sapiens
MTLVPLNESVAPDMALPRDKLHKLADVIRRPLSYSCSHRAIVEAGGEETGLQAVRTLPESGGDYSTTPGEACRVVPVTKSYFLNNLDKVVLALLMLEGGASSCAVHKRS

SEQ ID NO: 978008 - protein, 226 aa, Homo sapiens
RHALGPGATRTPSARACDTDPGYLGTMDEKLSNTKIIFVVLWAWALGKGTQCEKIVQSMAAPTSPPRDLLRSDGHGSGSVRGKKLSEIMEKGQLVPFWRHESDMLRELMVAIDVKYFHRGFLIDGYPLEGARKETGSFEQTDWTRPAHAAVVWTRALSTYDASGLLIDVLMPTSERRVERTTEETTQFKRLETYYKATETQSLGFYEKRGIVRKVNAEGSVDSVFS

SEQ ID NO: 978009 - protein, 316 aa, Homo sapiens
AEPWPGVRLCPQRPRGLSPWDASGLYLLAWCCTLLVALWLAGLRAAELGCSVVNVAMGPLGRKWVAWRHGTPDLSPRKGACLCHCPGPVEGQATLKPPPAAPVAGMPRDPTSSNHSKLLVYILNMQRERLPEAGSWQPAPAHESCADAMDTSDRPGLRTTRMSWPSSFHGTGTGSGGAGGGSSRRFEAENGPTPSPGRSPLDSQASPGLVLHAGAAPASAGSPSCTAQDSDYDMFTQDMSGTHRSPAKAAENLIVTAIGHGAGKLRSVRNQIHTSLNNVPDPRYKRARWADHPVLQAQTVKKRVTIDRETGRMKIL

SEQ ID NO: 978010 - protein, 250 aa, Homo sapiens
HAFGPLGPHQLPAYGQLTSPGSCEDSNRAKLPRGIQRNVRTLHCKNHLINVPLHSAPFSPERCTPVYHCVRMIKIMQRVRGEGDHAALGMSSCQPLPGTAAPLPPRAEFSMCPGSPCTHPVAPGRPLATATSIILWAQCSECPFSPCSLSGQSSTCLPLLPRDPFRQGGRASRVFRGIEPAPGWPPMRFRQCAFLFRGVAVALLHPGGHPVPYLVWSTPAATSLKIPPDFLVAVCLLPPLWPAISLVGTP

SEQ ID NO: 978011 - protein, 194 aa, Homo sapiens
QASAKSDVTLDGRRPRGHRRGHNIVFSASWTSREFSMYVVGSHGRTTDAPRSFVPRSHAPLCAATGTQARCTGCEGLYSRRRHLLLDGAERQSPTMLRTHEQSLTPDRYSDVATANHVVHLRTQNEYKKLRRQPEASRTNLSVGVMGLARSAARTDGVVSVARGPTLLKSPNGANAPHERLHPLRTRVSMKERI

SEQ ID NO: 978012 - protein, 421 aa, Homo sapiens
MAYKGTKKSDERDREADTGHAERRITRAADTSTPGKDEHAKQQRTNSIERTPRKRERHGQNTASHNTTTRRSETTRAQILTNRDNRATKQRRTARKPPTRRPTQNKTPEQTETHATRANPNRQRHGQKTKPPDGHTEQRREHKPTPQHPHPERTRTRTTTTRATTPTQRKRKTNNKQTRNAHTHKRKETLTGQHDGTQLEDETGTQRANEPQAPARQQKTRQRTKTPEGRNIAHRKQVRQKSKRRRPRQTNHNNNTGNRTQDKPPQNTDQAQRGGHQATHNKRGKPRRAPTTTPGRRSNLKHTTNTRTEPRARRGTQTTKHHNKDKNNTRTKATTTNSPPPPRTHHKKNKNNGHRQHTATDTPHSRGNNNNKKHPPKKEQRQQHKNNNTNHRRKTTTDTRKPQKENNEYKQTTTKTHPKKK

SEQ ID NO: 978013 - protein, 91 aa, Homo sapiens
LKTSSAAAGALGCALSLGQLPSTLGRPVACGGGPGTGWGLLTGYPLCFCKFLAHSEWAGQTHVTGLSESGGFPSVRGMADYVNFLLAWPLV

SEQ ID NO: 978014 - protein, 264 aa, Homo sapiens
LIILHVAPNDRPSTRMDRLGVGFQDPPVELLCWCGWISASGLGDYLQLLHRPGTVGVIFNGWARTTLPSDEPNAIVSDGKYHVVRFTRSGGNATLQVDSWPVERCWYPAGRQLTIFNQPGCHQDRGPWIRAAPSMGRCVRPLLEWGSMVLAAGSPRATPNVRTEGPPAAWWGRGRPCCSVRETVAPCCWLDIGPTTHLMETTTTMAVAHAPGAGRHTEGQDHPRRADDLLVALLKCQSDDDDWRNVSPVLEESILPFTEILAQR

SEQ ID NO: 978015 - protein, 248 aa, Homo sapiens
MAAKVPSSFFPCRVSRKGYPYQRAPRDSRQGGRRRGRETDAEGPGGSKGPWWAGSWLSRHIGKGRGGVDPEGPPQDQRCPQSGCAGRAATALVRKPGRKERAGAAAGEPGHTARARTETSPPEGTTFTHRAQRGPEVPMEGDVQAPRVYRSRERGRKAPRGVCQQRKPLLTTFPVPVVAPKRVDMRVSMDGLARHTTAGIHSGITVRHRTHKFWLVGEHSSTLGSKPPQTGTRYFSPSPWRPFRLIPL

SEQ ID NO: 978016 - protein, 429 aa, Homo sapiens
VAQPLLTLAAVSAREISVCSCRTEPVHPGGDPSVRMADKLLHVPADPNLRALVHCMQCDQTVPVPPDWLAHGPVPECSLQRLRMMFSERRHDSDGPQLFSSAASAVRRCHCSGCARQCALTIPCHCPRTMLANQPTPAVCYVPRCIILLESKVDLSMIPGGQERHEVLGGLLVGSRYVKGEPEDLPGYRVGTCLAVPSCRLTERHSLSARDEAECPKRLRVSILAVAVQHGIRLEPAGDGMWTRSTVNRGRLSLTPNRAHCTCYCLYVHYTGGDQQTGPCSLDFREAPQFTPHPDRRHIMHDLHYRRAINHLEILARQYQSTNRALRHPQSKNPQPQDPFTAEHGIAPPEQPDTYTYWNHKHHTISQDERTIGDSREYTEKSRTQRTQHREKASHHNREHTQPAKSRRKSELGEPTQATNINSKSCEPK

SEQ ID NO: 978017 - protein, 257 aa, Homo sapiens
LALRRHPSEYSILREELQRPERWTSEASSSRSCDAILGLGGEPQAGAGLTPDEAQGPGCHHWDGDWLSWGADRDDCCQLARTVGRGPSRVPSSTTPQLSPKSGPELAPGDVSPGALRLPMLPRECLIGRTRMVPIQEVLRPQKGPGALGPGGPERATCHVSQYSNTIGKLTLLALGRERSNGRRRIESGEFSMSAVALLHVSTVSDVRRGSQMGITGPGPQLSGNQSRITGIYKVVFNKAVPKSDERKALFKGILET

SEQ ID NO: 978018 - protein, 450 aa, Homo sapiens
MHALLEPSTPPFRHCLSDFYCIFPFILRPLSLLSRVSPSPTHLYQTKRSPKEAHRGASIPPNRPTYERMRDPMRGYEQSRIGLAENMEVTTLGMTGPVNLGKSSMFSLCSSTLIIPEGPILRPHYIGQLTGPYTVTWQNTKNIQGVHSREHRLEPCHNSANNQKITHIPLETMRHSTHNNHQADTNPTQIENEHILPTEVIRPCPNDNLEELGVPEHIVKGMITHRDAHSYHNTRRDNPRTDGPQWAQTGRTTEQLEHHTKNHTVSHSTTWRYPINWFQTPRKNAHHQHKRENQHTHSPHTIHTREPKPNEAHELRPTPEKPNQHTAQVAEDTTKPTTRQPTHQATHQPESTPDTARHTPTATAYQKHPQQHKPRTRLSTATTTSSADARRRNNTTGHSRPPTMKNTASRQKSRGNRSKHTHRERADGLATEADKPERDHGTTEHRQNTT

SEQ ID NO: 978019 - protein, 461 aa, Homo sapiens
EEKKRRTKKKGQEGEERRTKKKESERTQQNANRNNTQQKLKRNERNATRTKRTATQRTNSSNATNTSERKQRNTNATNGTTETDDTDTRTTDTTGHDTTHTRHNDTDTRHGRHHTDTDNNTRHDTTTYDKRGHDTRHPDTVLHEPRHDTDTDTRHRTNDATPTTHTDHRRDKRHDNREHHTGKGRTRNQTDETKHDKKLKDTDDTNTGPTDTKRPKQKTNQTPTRTTPTGHHHDDTGTDPDATRNDTLHEHDTGGHHTTTRDRDAPRPHPDRTHMTRDDRHPHWTRHDSERHQDPSEERTSDTNGRQATRIRTGTNRDDPTTLNRRTGRLEHETSRRMDRHKGTGKRAKDSETDRPRQTRGEDTKATTSSDQWHNESTDATGTGTQEGRKTGTTHLTGTQERANDARQGYGPVKRKARETSQPQDEDTRRHTPQGDHNKNRYPAIWEQRDPYTSQKYITTA

SEQ ID NO: 978020 - protein, 270 aa, Homo sapiens
VGREGGRGVAPSFTSSCCLPRRSTPATETPTRDSTISLFQAMQKGLVLRQHGIRLLEAQIATGGIIDPVHRPHDGACGRGHTSAAYYSDEEMNRVHGRNPDEDTKGNLRHHNTALRNTHVQAADMERCVEEPEDGPCAILTTERGGDRLRVEGDHRRMLRRGGRTRRAVEETTDSKIPGGRQAHGRLNHVPRWEKDGSTAQEHVESNRSEARQTQQSMQCARSLSRDRAERNPRTTANEQSSVRTTIQSRKTAATTQTTTNRAPQPQSKQ

SEQ ID NO: 978021 - protein, 127 aa, Homo sapiens
ARVRRRIGKWERPEIVCTKLQSVHIWMLVEHHAAEPSQISHLSGITTTNPGRSAKDTQKHSHTGGTGGNRSGHGNFCLKKQIRRKQQRSLSHAVLWEPRLGEHENPRGDILGESIKFLNAEYDDPRL

SEQ ID NO: 978022 - protein, 251 aa, Homo sapiens
HASPSLSLREETWEINISCERYSVWDCRLHDAGDSWKGIAVPEPPAWLGLKQAGKPGVCHEEHGEQEHGLYSLHRMFEIVGTHSDTQRCARCLTLSIYALSVTCMTTTLWHSIRQLDSDIILVWHCDAPRASMVIETYTLLPGVTSMLAAASITRPRHVLPYVNPSRGDEAVCTDLDRQVSGGDHQCRYVTPQKPSVIPDTKASHSPSKNKCITTLEHDERGGPSTGVLSTVLECGQTEWKREKWKARHTP

SEQ ID NO: 978023 - protein, 606 aa, Homo sapiens
  misc_feature (315)..(315): Xaa can be any naturally occurring amino acid
  misc_feature (383)..(383): Xaa can be any naturally occurring amino acid
MHGGWVLLRRLLLLLLLLQLLLLSPVMCLPCLMSCAMLPMCMPRCAPSLSRRGTRDVAAAPVSAKVAPALALAGAEQSSVACRQPLPCCAAAQANFGEDVQMHACTQCKLAGKQAGKYDPHVSIRGVHTVGIHCVPCVVRPMGVGPLWGLPDWLVAAISYCSQGTTTHTGELALYIGTNFTEPLQIALHWETQQGWRMRAEHEKALGSHTVDAVAPLNGGNTACGDPEPTRNPERPRNRQQEFGTPRTAPLHNANSERRPTTQIGFAKKINPNYPKSEPVEHTAFFTHEGISSNSFDLVTPLLTTALEEDCCVSXTQNRLTTQRYNPIGIWKHTVVSEPGFINLDSGGQHTQLGTPHRGSSHIGGAQKQPYSRVAAKNRVWEXPPKTSNTTIHTHQRRGQSGRGLRTSVTQRSSFRRHWRGYEKPMDTEEYTAHTEQTPNPMAPSSIYGVEPISQAKAHTYGPTLGTQTNADRHNTTRREPHRRMTPKPKQQLNSPWNRGDNGMGDNGATAYPNVQVDAPSDNTTTPTGRTEKHRYNQTTRRPTRTNPDTDANTTTARRTTLKNREQTARAADDATPPHDDTSCDADDRPHTTHHTIDTQNQTETR

SEQ ID NO: 978024 - protein, 179 aa, Homo sapiens
MVRQNYTLEDLRGRHQIEQINLELYALLRKPVHVLVLETSDDVVLRNFANYFLHQSHDGARRTLLRTPDEACSKPTMVGPNLPFRISKTTQTCDRLGQSWAEIATWSVAINIWDTQNVKSSHLLELHHILATVHKNDLPYCVTSFETHYPVNEHGETPSTEVAVTTVTQTWRNDRQRHE

SEQ ID NO: 978025 - protein, 110 aa, Homo sapiens
LRSELCEIPSGSVPASWHPSPDLMSSSLLSVALDPMIGAPSYERAWIGWKLRCSERHTSTPGTWWSVPWMAWWHADLLGLMIVSHSRVAALVRGTPVLQCLQVGMFGRYD

SEQ ID NO: 978026 - protein, 141 aa, Homo sapiens
MRRTGQSVGLRWSKGACKYQILARGVHITHVTGRGVVCHDFNQQESQSQHRDYPHQDFLMLGLRSSGNATVSFSDSCGWGVVHDWEKYEGFALKFESSLRKELIPKRMGFLMGDPFQKMGCNGGRPGLWERGNAWSYNNDP

SEQ ID NO: 978027 - protein, 180 aa, Homo sapiens
EEKKRRTKKKGKEGEERRTKKKERKNKKERRKKKVKEEERRKKERRGRTKKKKEEERTKERIRNNETENDNELKNEEERNNDKRTDNEGRQTGHENKDTTRTRYDNAGHDNDNTNTYNDTDTTRTNRHGHTTDTKQTNTTETTRTRKRTDGRTNQGRTKRTNLTNGRRTDDERRDPRTTN

SEQ ID NO: 978028 - protein, 428 aa, Homo sapiens
LQILKVSSRCASISIPWSRSTWVDARGDERWDRHERQQQRRSKTDARRPRRHGVTRDETVGKRRHVTRDGGPRTASTPVADDKNEPVTGEQTKRQSELQTYDKGRRQNPRQSTLTPGGHGQSRHRIRLHSPIEDIPIGDMTLPRENRTTRLNIRAPQWGQKHVDNADKEATVGTAARKEEPARKIPTPTGAHTTYAGRHTSVATERHEEQNDRDDDYGTEPQHKQKDKLGSHHQPQHHVARATSHPTKKERLHTYGAACNQQAHTQRRHMNIMGETEHITPYQADDSPSTHRPETNTPKIHHSRNARLRRHQTRESDIEESQESAHCTDPDNRKTDIPPTAQLVDLLVPEPTQTGMTEHTHAVNTTNIDKRGRKHEPLPSCRTPDTDTHPSERQEKQQHTITTTLSSNGEHAHTTPHQQEHTHAKERI

SEQ ID NO: 978029 - protein, 200 aa, Homo sapiens
GVTHPIDYHTTDYVDEIKKIYPYKECDYCHGPSVVGQILPRATISCNPWGKVVTYGMAKLLTGPKRNLMAPCAPVHGGISTADDSFCYTCLLGTNQGLMCGFHLVVLLMDDEVELVSWCGGPPPWTLYNPGSTSNALIIDSDYWNLYEKGESDVHAHTACSVEERKCGQRSSWLPGPETGESRGQGGWSKNPKKTKRNAR

SEQ ID NO: 978030 - protein, 73 aa, Homo sapiens
TGHVRCCLRGVRWGVSSCQKPCSACVWVPVAAAPGVIFDLLPCMSTLLAFLCALQKVLLVPCELVACVGDMWA

SEQ ID NO: 978031 - protein, 150 aa, Homo sapiens
LALRRHPSSTCILREERWGLSVDRELIIESCDASSASEESPKREQDSPPDEAQRPHGVPSREETERSGPEELERQCQDGAVAAARVYLSYEQPPQNETPELDPELPPGDGALEPETPMEPRKPERRRRVPTKVLRTQRALGPLGPGDPAP

SEQ ID NO: 978032 - protein, 112 aa, Homo sapiens
MERNPERREGARELDKKPLNNQHGVTKQRTTDTQTTHQQTNGQKRTHSNKTRNNERRQQNDENKNRHHETTLQKDNKKTANTRRSHTTDTHTNYNTIDTPQKNSPEHTQCNQ

SEQ ID NO: 978033 - protein, 129 aa, Homo sapiens
HLRQRVWPSSSGVYSWHSPGTTHRCCACCREFIRFHQIPNPLAPAPRGVHSSTPGPTPTAIDMNAAAEGHSRECLPGVTSAWRAERHSLLQHVQDPSEGPARAAFGPMAMKFKTTHAPSGDTRACFALW

SEQ ID NO: 978034 - protein, 101 aa, Homo sapiens
ETVFAVLPRLDCGGPITAHGFLKSPGPKQFLPPCRLGLTASQHTGGLNFFLVERDSLCGPGGLIRLRGSEWLLRASVSKGTGHVVALSLAIHCPTRGSIPL

SEQ ID NO: 978035 - protein, 240 aa, Homo sapiens
SCQSELHRALCAAGRFTELQPRGPHTSSPSPNCDLQTVQLPPQCSVTQLCDGQLCAMCWCVDLEDGGEGFLWGAMDAKVGSLDLPPRWLTCLSRVRPASRPVDSASPATPVLLEAAELSQSGDLSLSPVYCLLARSFPQMRVCNVCVCVRSVDSSKASMGVPLGKPEPGVYSKVVTPPKRTDALALSPRRSAALDDVSRFDPGYSSLTHSFTHPRPPNTDLLTMVPNVPALVNRLGEVQY

SEQ ID NO: 978036 - protein, 548 aa, Homo sapiens
SWACQDTPYNSLGRHGEQSSELAKQSVAVSVLVEELSYDHHRKNNHREQQPLSAYCRHSSGWYCRCELLVIGSHSTDGTRHNMGLGGATTTLCAHDKSPPCHVYQHSVSRNAAVVHAEIAIEVAYTYKRYCVTSGNATVTAQDRVTLFFICIVPTPVTTRLERRTPRCEQQDGDARPSPREGDAEAHRQREPPANVACTPKRTTEVHRRNRQWHPANTEDRAHRHKCGCGLAHRRTQGSARPQNYSQRRITWEGQPRYLDESNDSELTIVDATSHTYDPLEGGKPRALTHTQRDSGGTRHAQAPEQANNHADKGDTRDTVTNHPQGGKHHEPKLKDETTRKHTPHLLRLLITVGGEHMDKGTQQTSTATHRDGQHMTHKATTRPAVQKQHEPKQMIDMGHNHRKHGDPQAQAKIQRQRTRSDSTEWKDDKTHETDNVKTRLSNRNTKHRTDRLSYRHSSTNNRSGEHKKRVTTQKEDDTSGIDAITHTDRQDTKHSNWKERDDTHQYTVTMTNNVERPGTDNTTPDTIDPGIESALEVVANACSSSGQ

SEQ ID NO: 978037 - protein, 308 aa, Homo sapiens
PLNDPGVAMGRRPGRCYPGIVLNKPYPKSRFCRGVPDAKIRIFDLWRKNGIKVDEVSALWPHGVTMIMSSCPLIVPGTGCPNFVPIMYMVSRVVATDGFHIRVSGSTPSTIIPRSTKMLSCAGWLTVLQDRSCEVPLGKPQGTVARFTLGRVIMSIRIHSCQRPRSTCDLSALTHGASSSFPVRQKIPISKASGGFTKVQMLTEFERQWWLIQAAHPRWLWGQVPSPVVALWYKVAGALLHHDGLQCAAPFFITQPCNSTTWSKIQRDPEETARRHPRISHRVPKYGYRHSLDKRAPIVIYKNSQESV

SEQ ID NO: 978038 - protein, 95 aa, Homo sapiens
QYYKGSDFDCELRLLIHSESAGGISWGQQVLRINETLREKQLKTTIKAFPGTAVLSSTGQTLGCSYFETEQIPEYGGMIRKVASINRFQVRYEST

SEQ ID NO: 978039 - protein, 129 aa, Homo sapiens
MDGYAIHLEYVPYCRQSLHRKIKTYGPENPEHYRSCPRSRNISWLPRTLLGPDGMPDVVRYRSNPQNHQYWRAHSQQRKENADELTQKPRRTPKEEGATQKQRKHTGDPAPRRTTKQAARTHNKHRRAQ

SEQ ID NO: 978040 - protein, 297 aa, Homo sapiens
DAWGGSRLLRARLHVRTRFFPAIQHAAAAEGGQQAHLPPGAFVCDPGDGENGGSSKGKVQIPGIQLVGSQLELLYTFWAPFADLQLVQGSLRRRRGLGCVSLLFPSELLPRGAVGLQGFLGMQSRPVGNQIGWGMWLLGGLTSSFLSPSPSTITYCFLSFYLQWPHNLFYLFIILWGPEPGIEGAQGTGHGVPSHQSVRVRVLVCVWRSSWGMWMGPGSGVRRPSLVAEAPRVPGSFTHSLPCGVVWLLIGKPHSVVLFPWLLVCRQFGYPVNLSLVSQICLAANKRRGGEIPWGPL

SEQ ID NO: 978041 - protein, 391 aa, Homo sapiens
  misc_feature (299)..(299): Xaa can be any naturally occurring amino acid
MIEVTAGDRSDRPEKKELTCARPNRAERNEQTDEKRQDGDDHRYIYHYQHTETGGAPTLPHDERTFRTNGPHGAYRIDQHNTTTDAARERRDATRENEPSGARTTATGYGTHKQEGGRESERKESREVEDRGRVRSVEGESETKTVERDRGRAVHRRAGQREERERSRTSEKDRDRKDKSTTAKKRRAEEEKREEERRKKESEEEGRGGDEEKAGEEGRREEHARVDEEDRHVVRIADWREATKRKRRMAETRTEAWGLLGVCQRDREQSGQGREGMSEARLEVTDESHGASELHNADXEVRREARRVDKSENEDDIEDRSDRQEERETWRETSTAQSARESECVMELAKKKSADDYGQHNGATGKRLSRRMSGEREAPGRVREEIETGRT

SEQ ID NO: 978042 - protein, 65 aa, Homo sapiens
MPLTATCHPRPVFDVLRHRGSRQLSDEASDLCINLQSANMCAACRVTRNGCGARCGTPPVYAPLV

SEQ ID NO: 978043 - protein, 211 aa, Homo sapiens
  misc_feature (184)..(184): Xaa can be any naturally occurring amino acid
MGEDQGGRVEGFVELAEGGEWGRVEGGSIPWEPGARGKPRGCPGRERGTLALAVQCRTRVERAVAQAARVGIHHCLKTGRRAGAAALRRGLAPLGPGSPIWTLQGLSWPHMSGQVSTYPGLQGRMDGKPANGARKNATGGLLNVGLGPRPVGTYKYYGSYEPIHELRLVSVMVNIPIYSGPWYXPVVPLTNNMHRNPDKQIYPIHHLVADK

SEQ ID NO: 978044 - protein, 74 aa, Homo sapiens
NLRLGYEIVGGVTKSNGGKMKKVLSSAGHLSGAPPYKVLVTVGCQKAGGWLESQVDWRRRPGQANRENPISQEK

SEQ ID NO: 978045 - protein, 323 aa, Homo sapiens
MRGASHKRLQQLEITHKFRIQDPSPEKIKHREKYYKGDATANPKTVDPPEDMRYTESTNKRQRTENGRQLRRTDDHEAPNANMETLCTHHGATPNKGTENPNTRHHTRTITQQEVATGQNNPNAASSSTHHWSSHGSAQAQKQKDTSDEIPKTEQCDKQHNRGSNNRKHHTDHTNTSRDKTIKDPPNNYHQHNRRKPSSGSQTTQEQVARNTIVTPRPDHSRSTKPGPETRLDELTINATQRDTQQQKQDTTNGDEPTGRKDTYKRERSVTNDEIELKNNENKRRTQPRRESEERQNNIRHTERATRRNTQTAGPPYTPHAQG

SEQ ID NO: 978046 - protein, 225 aa, Homo sapiens
EVQATVSLKPHSEPWNVCRASASPTEEEDVWNEDALWQSLVPCTLLQILNGARCDLWHEVAHGHAVWQPAAEGDGVRHASADDWEPQALQCCLALSPGSVPPPAPEVQIRTPRVKHVHEKVIICLDPVTSEYVTAKKLELAPHRTPKLNALNVIPEDDCTMVQSRDKNTRLDTQPRVCTWCCVNRMITAWLALACPPDPDELMDDLPSNDLETDYLFQPIHLARD

SEQ ID NO: 978047 - protein, 569 aa, Homo sapiens
VTRGSTHAVGRRGFSSLPLEPPRFPTFPVPPMTALHTDETHRRRHSAGRYTNEEKESVSVMIQHIAEAHNSRSDTHKARMQTTGADRHMNTLTWTHNEETNSSNYTELPSKSKTGKRKNHKTITQIHKSETQHTDNALTRHYETRQTPGSKDDNQKKTTPDRNRPKATKENNTGNNNSKRHITGENITAQRNRTNDQDTKPPARKRPPNKQTPTNQVDNPQRNTTKKTQHIRAQNAPTKRQHNIHSTRKKRETRGKRTHNQNEKKEKDDDPTMRHQPKKNNEHGKKTHLSEDKMKRHGKRETQQYDKQHTQERKHTTEKHTHNDTKSKPRAKRGKITERIKPQNYRRRDDAQETKKNKTHERTENECNHDTQYTTTTKKTTHEHKTTHNKDENNKKEEETRTAPHTNHQHRETPNQKQEAKENHTKKRANNTQETQTEKQKKDTNTNNAQNEITTKQTQDGRQPITTRPPTENTAAPQNEKQHTKKHTTHNHPARANKKQQRTNTSQTRGHTSKNTTNTETTKEKTTKEKNRKKDHAKHRQTHNDTQKQRNTEQENRTTQHRARSIKKT

SEQ ID NO: 978048 - protein, 120 aa, Homo sapiens
MTTIFALSRITPKDRIQGYNTCTTLVHPMRTTFEDYSDLIGNPQRAPYKVEIREYGTLDFESVSPKRLPGATFRNFATMHNLGTRPRLAKFVFHTGLPEKEDHASRVLMSVYISTVDTSA

SEQ ID NO: 978049 - protein, 161 aa, Homo sapiens
MREIVHLQAGQCGNQIGAKFGGYHVTNMASTPTGHYTMGTVICNWRVINVYYNEAQEEIMSPEAVLVDLGIPGSQWISCPFWPLLVMIFLSRTTFVFCAQFLEPGNKLWHIAGLYQRTWRMHAWCDAVLDLYVRDRDGRQSCDLSFTWASLADPLAGGRWH

SEQ ID NO: 978050 - protein, 79 aa, Homo sapiens
PRVWSRGSGVLVRSVKHGTLCGHTMRGPGLLTLCEMYMCPDSCSLVEMAWVLQEHHDECLDSDHWLSLVCLCAFCRALW

SEQ ID NO: 978051 - protein, 131 aa, Homo sapiens
MNVACKGQSDLHGLSQMRSIMQSRRQWLMVTRLCIRPVESDRHAMFRKPGPARSVVMFMRCKADEGQRERQENLTQESSVSSVVTVNYRERYCAAGAQRHGCDDLQPGTGVALQAPCDRQKATHKVAQGKV

SEQ ID NO: 978052 - protein, 262 aa, Homo sapiens
KRHSATEDFDVGWIRGMLEQLNAELGSVMPRDTAQNPRDAPPLGPEIHFSGSQYTTQNAQRRGEEPTAASQFDGQELYGIMSCGFIGKEVLLFSFLLHYSDSVCAGADVVLVNAALSGCVRYSDLSCRALLVPCMSLGHMVAIYHVSLGIWVFYKCLVKIRVWSRVGGLMCACLDPWGRQRVRSLSPHRALLPFGLRPVSRYSYYFLYSLTVPEGALGWLVRPYSVFSCRNLFSGDPLCPAFLSASIDDPSVAFALSVRRGG

SEQ ID NO: 978053 - protein, 376 aa, Homo sapiens
MDDDICLALSVDNCAPVHVQWPVLLLVLTDAPLWPVFPFHRGVLPPVPPRGLCLAVALELTRTSYCVADEAHQQRDGTPHPAPYPTRCTASSPTGDDTGRKHLAHHTFSHMTLLSWPPDASTPLLPDPTAPPDHPTGAHPAALPRTDPSIPLVLRRTLHHIPTPSVYCSPYSQAAAYSPVTALCRRSPLGLRRLDLPVPPPSPHTWCPSYRTRYCPSPLAIPAAPRTLRLRPPPCLASPPRRSSPGPPLPPPPPLPPGPSRVPHRPSCRPPRLPPTCPARPPPLPPPPAAAAPPAPRSHPNTPTPTRPEHPPKPLNPERHPPTPPSPPPTPPPPSPPPPAQAPPPPPPPPPPTVSAPPPPPPRPPPPPPAHHPPPP

SEQ ID NO: 978054 - protein, 119 aa, Homo sapiens
VITVGLPCGLERLHGCPFEKCCSTEPCLSWPWRLWAWVMNARVPQSQACACGASMGPMAHVDALVSCRRDLGKPSPLLPCVVSLAWVMVQHHTCLWNLCVPKLQTGCQWHKFNQTPRLL

SEQ ID NO: 978055 - protein, 101 aa, Homo sapiens
SNGLQPVRTRPLSPGICELPALPPDQAARSLHPCGRLSKAESLLLQLPVFPSWVCLLLVFCTGVGDGVRFVWISGEMVRRLDLSLYRLFACCIIVYYCNFF

SEQ ID NO: 978056 - protein, 397 aa, Homo sapiens
  misc_feature (232)..(232): Xaa can be any naturally occurring amino acid
MGTSVELREASRACRTLIGAHNKEEDNELIVQRLSVVFEEPLSKTNDTVDTTCKQVGPDTQRVQTVLDARILTGPFLEVTAPTVGQCGNTRDNIHGLRNRDVLQIVRNKGGWTREILKPGRGDLNWRPRTHALTSAPNSAWTENLGDRVGEYGDTRGPLETRRQLKALPPGTMVDYAHTVGSAGTGIKPSSVIHPRTTEAGASRNSGGDKLNYRMGRAGKHFCTGGLRNALXSGLETGTRPPLGGDTVRKWRADNTWGRHTRGQAQIARCPYPSRHSGGHEKTRPNRKDSGAPANCVTQRSESTREWGPPCNAGGHGPAYQENDETMIPDTHDSQPAGIGTIRSTHTPQGGTHTVKTHSTDKVVTQLWRTNAHDNQAVTQHTRKHHHMSGDDNKVNH

SEQ ID NO: 978057 - protein, 275 aa, Homo sapiens
MAFALWLLELERQGLMPLKQEEAEDESGAPLSGPPPHVDLPMAAGVRLACGWMCCPEKIPALRPALLWAAAGALAVLLLTPRMHLQCRDGYEPCVNEGMCVTYHNGTGYCKCPEGFLAGNIVNIETPVQKKLLPEWWDLCGPVPCWVKATCLMCLRLYTDEDLPVLDISSMLGVSTLPEWPEHAILLSRDTYELHLYRSGLTGKDVQWTRCLAVSFPVANGSSCTTVGTSLLQMATGSTGAEAVDGWLMRCDNPRQLASMVVIANLLDSIQIQWH

SEQ ID NO: 978058 - protein, 159 aa, Homo sapiens
MTKRGLFCSRGANRPSQATILKALVDPSDQWAEIVLSIGIYCWPNYRRGGVFGSLSQVVGHIGAIPEACVFRDRFLIAREAGSGGVGLGWVTFAGVGVILTQFKEQRAIGQAKVAVGERPDNVGPPGCFCGNGRYPRWGPVHSLERVRRLATLREFSEL

SEQ ID NO: 978059 - protein, 247 aa, Homo sapiens
PRVGLLRFQAAASVTNDLCDRVVKKKEKPALSGGEKGLTLGVSEDGSGFSGRAGGTLTVTVCDASSLPMHRARSGRAGGYFILDLLTWFPRCMSRVGVETGLLLAQRRGAGRQITLCLGGRSRSRAWVGVSAWNVNWTSTRVAAKDQRAGRRGRLQAHFPHLFPGPTWPVCGAVLAPSEQSGDLEPGDAPPAAGDDSGVGGAPNRGAQGPVNCEYWELNGAGERAIAPIACILTHNCRRAEEKRDHS

SEQ ID NO: 978060 - protein, 349 aa, Homo sapiens
MQARSLEDQAFETRPGQQWVKTPSSTKNTKQLARHGWRYAYKSQILGRPHGRRITYAPGKAEVASELTIVPLHIQTGQTDVRFQSKTTTTTQHGDNPLHATRRSTQTHRHHNGLADAPHNSWQPEPRDIYTWPARKESSCKGDYTAMTYTQHTQNLNEHTKYTIPTKEKDRAKKTAPKVNKSKNTRQEIQPTGTHRKELTRKATNLRALRLGMTDITTNQPHEQHPVTQRHHTHPTQHHKKGKDADNRAPKPPDTNRTTYKAPTKVRTHQTPKTTASSTDAHPRAKPTPSKAQNREKHTPKTTRRNHTTDRVDTHTRREQQRTHRQTNRTKEDKTQNEKKKQPQTKTDA

SEQ ID NO: 978061 - protein, 304 aa, Homo sapiens
MSEKKKKPPSRLSVVAHACSPCTWEAKAGESLEVQEFEASLANMVKPCLYQKYKNWPGMVALSVVQLQLLQIWAEVGESFETREVEVQELKYTMYSYLGDMGETLNLTNKQTTNTQQANDCVTKSTGPPSTDKMPDSVWNGHLEERNDPHKGHRQRTYTAKGHMGRTPSEQGHTDRVHEATERAHNNYTRSKTNDRGDWKKPPRCSEDRRRTEGEERREEAGNRTGKEERDRRKRRRTGEKKQEDTGSKDRQRTAARRRQKKSEKNEKRREKKHTRQTHSERRAGDLSERAKEQERKKQQQGEK

SEQ ID NO: 978062 - protein, 129 aa, Homo sapiens
MVSTSLTPSAPVLWFLGHVLGGNEHSEENRRCVLGGKKTQTCVVDRIGVDANATDASVLRTTMGETARGHNTNDRIRSEGVTAVLVRTFRIVLVSSCVEGSNVTLEHATPSWLQGSVIVSSSRAGPPSR

SEQ ID NO: 978063 - protein, 368 aa, Homo sapiens
MNSERGCAHSDVTPVVLDGHLQGIRCTELPKREGSSRSNERGVPKNHFASRRRTIPSMVSIKKETEDRDDNHKHEICKRMNNTASNESLGYTMDIEHVYPRRDTKYSQWDDPSKGRTEVHGTDTITASTRQEEQPPKGEHKENQNYRKDTGKERADNTVEKENRAARECKRGAMHEIEKNRMTQQPKQVKTTQDSETPKKVQNTTQGDSHTQLRIGASRNTRREPRKRHNHNTSRGQCGPPYGSKVEPQRTHTTRIASTRDNKPDEAQDIERRNAPRFVQEHINDQGSKTRRTHNEKTNCIDNTIIQYFRNTKIQGNNEDNTKREENPTSRERRHGTTERINTVGENTKQRSNTNERQTNINWKGKKK

SEQ ID NO: 978064 - protein, 169 aa, Homo sapiens
MIPERIGDRKVRTRTGRREKKRQRTGPDRHQRVTGATRPLGNVDETRDTVTLHASADHKWGERTPRADTSHPRDHHDAHNETSGTRHRNDAVQRNGTLDTTTEEIIGEGQKNNTQRGTAANADNTTSNKAAPEGRTTTTNRHRAQATQQHRKDKHEQSTSTRHNTHHNP

SEQ ID NO: 978065 - protein, 382 aa, Homo sapiens
PRVRHAVGNDRGSRSVPDEQLKQLAVPAPRSRPDSALEVWVQRLQEVVPAWQVHEWPSPRACWPSSVDARLTRVTIRDRAESNIAWQVTYITHGSHAEEAEAVRGQLQGAQRDGARQRTQELDGLILGCGRDVSSMLPPMPERRRCGPVTPALRWHDTLLLGDRGQQVDPDQPSRRHKTNIVPGVHALPVLPSCVSEHGRRDGPWGYDRDKHITGESDDAGRTIIPRHMGGWKLCVRPSNDGHGPLQMNHDWRGELDYNTKNKEAYRKNSMAAITPARILWHRWGHIHCRKDEDYQRQTTTQERTIIPQKSQQEMAQKTGNTPRMKETRNPQSSEGPEKSHKNKKKTEDKTPRDIDHKSTPREGPETDKGNPQGQPRGTTRV

SEQ ID NO: 978066 - protein, 273 aa, Homo sapiens
WDYRHAQTCRRLRALARELLGEAPERGSRAGAPPWRRGEPQRSAELSRRPARSPPGMRRPLPALLYGCQAAQPGHRIWDLVGWRGRSWLVGWLCEGEGLVLAECGVARRGVAWVSVVRVPASRGLRRECVRWPSPGVVLADAGGGRSAAVPGCSWFSAGLASNSSWCSGRRKAGVCPCAMSGGGPCPRMVGPQPDLHFLQENPSADDPEPMLAGTPRGGPSGPTAYRSPPPAGRHHTPSPRAADRPTNQHALDTSQGQHGPLARTSRMPPTYR

SEQ ID NO: 978067 - protein, 104 aa, Homo sapiens
VGVGGNADGSGGGEDTAFRISQALGIRAMGQALARHLYPEVPRGECDAWCGTGGVIRCSWKEGAGGGTVVGSLLGPTLRGREHRVPRQPFAMVFVYPGQCGACS

SEQ ID NO: 978068 - protein, 333 aa, Homo sapiens
MLLLLYFTAAEFPGIPASRDIDSRRSHDTLLITEGETKVKEGETQERVPECTEGLTSECGTRVPPSDDMITGPLVLSSSNDYSLDTFVALDWCNTCRQDEVVPAMECTNSDFPGHTKLNRPKVQRWREILPERAKPTRGMNTNEEAPKPTPEECGKSGQHGSRGRATQSRTRDNLTRKRTSTGACTRGNSTQNPQKQEVGRTKSACKERKQKKKRQKTKRGRNNHKLLEIGHIHSRAFPGNTAERQKKRKTRTPGRTTQGERKNHKRVILLTVGSTHEAWCMLHDVSENEENDNRNTERRKQYEETPTPNTKETRENKITRGTLELHKTMLDK

SEQ ID NO: 978069 - protein, 186 aa, Homo sapiens
  misc_feature (124)..(124): Xaa can be any naturally occurring amino acid
MLYNGWSRIERGWVHKILIAVKTSSGQFPVKKQEVVNTLINTCSPRGGVWVARPLETCWCHAKRENFDPTEAKLKVSCFPQGTYRRTAAVTKLHLEEQNMVVRKSSGWNYKTFASVSTHEIVKXQIGEKINIMAVYEVTSVTVVSDGKRSVIVVEPQCTLDGKRITFGKIDKVGKEEHDIYRSYTR

SEQ ID NO: 978070 - protein, 87 aa, Homo sapiens
HAYAFEEGDTYSPMMMNGKILFRDELKGFTSVQTSACRDKGSSKDKTAQSLQCFSYLFGDRKFMWKIVISLGLELEIVVFLMSKTYW

SEQ ID NO: 978071 - protein, 108 aa, Homo sapiens
MGRPAKDVLCYSREICGWGQRVDCMHGWVVVGKNLLIGIIGSKSYSFTSSAGGLPKSEHAFSPWSCQEPQEGESNKHTSSLLLGSHCQMSSQPYKWQDQAHIKEVEKG

SEQ ID NO: 978072 - protein, 132 aa, Homo sapiens
MRHVLVAILTYITRRKYSGPAGYGVSPYLPMYASDSYHRVFSYSLLASASSGGQEQEQVEQVVPVPLDRERTPTRGASVDANASFSLTPSRLVSSYLYGAIKFAVTNNLSTIETAAGYNPSTKTPLFDLIRS

SEQ ID NO: 978073 - protein, 104 aa, Homo sapiens
AGAERVLVMCCGCPAGSCGNLSAWVAGDPACHRRCRCTGEPAGDGAGGVAGGGLEPQDVQSSDEMRSPEVVPQRQHELRLTEEEISQQERHVGDYEVEDDTIWA

SEQ ID NO: 978074 - protein, 438 aa, Homo sapiens
HASAAAMPRPFQLLLQVSPRGPRGSQSCPLPFLRLHECQRGHTIPHEPRTTTAVVPAYRSYHQGEPLGESGMNLGGRHTRALKCQELTYPFQGTLETPNRSIRYPLTSKYIRRDLDGEESMEAGIMREHSHGITRNRSENQPLTTDGTRHPFHGHALPTPTQTQNDKTHTAYEGNPDNLTHNNDTHNNARTWHESRTEGRREGLDHTEKHNSNAKDHTHKRRTTSTHPTECTHRPQNNDPRGHTAEHERTHTHKQREGHQSLVTYDKRPKNPEQEQHPPRQKRTSHTIQVEHRPKGTTDRRQEDTGTHKEETKGNRQKRRRRKQHTTKTRIHTEPKMRTANTNKPMPKERETRQPSEQQHKGSQPKENDAANKRREEGTKNKPDNKALQEQKQDKETTHQREKKSSNTTTNTQHANHKKKRATKNQKKKQNKKQTGAT

SEQ ID NO: 978075 - protein, 169 aa, Homo sapiens
LALRLEPDGLEEVITECCGWAAYACTSSVARDIARCWCLESLWSPEAWVNVRALGTNTHRRYQLWGVQPTTWRVHDGWTPRGLRACLLFRFHTSPTALQDARARRRTCDFTRESRGGTASGSRVPGLSFGQSRFFVRGDLVVLGAPGSLEGSGVEMDLVDYGVSDQGAS

SEQ ID NO: 978076 - protein, 259 aa, Homo sapiens
RVCRLEAPDARVSFPQGSLTMGRTPTSHPPSGQRAGRMCDVSPTSQCLQLLEPSDKWDEQDLEDLQILIKVTMENVYHMTSISAAGPWLKFRGRLGYHTPTTCSLGAINIENRKANSVRSAVTQEFWARTLTLPLHTTDNIVTTGEVGDRENDELREKGPRLPGEAIAASERPIASPFGGDLGPLSPLRTRLFGQCIPPKKQLKEKGPLPELLTLRLTRVAYLKEFATGWDKAWTQIKGTLKDFQAPGQGTVKCIIDRP

SEQ ID NO: 978077 - protein, 205 aa, Homo sapiens
MNAIWPGVVGRPGGVVRGNVEEWATDMAVSPSSHARKAEEHVRGRAHLTYTEKAPIPTLWHLDRHKTDETREKEEDNQKLGGGSQTPMNSKAHNTRPQREKPENKHKKHARRTQNRHQTGNQEKTRQEKDPTKVTGPTSRSHHCNRDGIDGRYIRSRKRHTHKPNRSDVEDITPTQTREKTKHKRERTKKKHNNTTHHRNRPTQE

SEQ ID NO: 978078 - protein, 96 aa, Homo sapiens
MTERVGDEEETDDGGGTKRMTVPWDRVTLWRQAIRAPVSPRAGVVPRLWTLTNRVPVPPGQCALRTSQWPPRRRREQLFTLQTVNSSGTSDRTNST

SEQ ID NO: 978079 - protein, 268 aa, Homo sapiens
ARPSTSQAAIIAKDLQGPRDHGGEKIRRSWLWEAPAPENMAEQIIQEILTARIQEQKEDPGKPSDEEDAPSVDDANIRALPRPDQADKVGDKIASRRGLRAGSWPSWANGQVSRESVVPGWGRPKKIATVSRRSSKKEHPDRFIECYMAEQNMVSIAVGCATRKTGRCPFCQPLFASRIFHDGPEEQIRLVTTLFREQHQPSAASHVRRYPNRRNDGGLPGMAPRKDLAYVYVSGPHIKLSLYPSDRRCYREVHVETIRQYKGYLIHR

SEQ ID NO: 978080 - protein, 320 aa, Homo sapiens
HVVAFASRTPVLLTQVDYAGREAEVARLQARFVTTGAGGDREAIQDGRLRDGNIDFWRQHASGLVCARRLEDRMLIQSPTDSLRVLRLNSCTDRSYVRVDGAACCAFRDVPFTEAWSRRRLLRDPLACPPRGPLRAEPHSPVLPRVPGGVALPRRNAPWVTVSYRSQPGPSPGVVVARVPGCPSGGPGWVSSMVGHGRARASRWRSSLLVSDPGRGPEGPPGGPRREPGFDADNSVGIRRAPITPSRHLCKISLQVGDPFLVLHGSVEDEREVHAFIGKAGPNERPKKGGGGRRFPRGAGKVQRVLEAPMGVKGRRKGWN

SEQ ID NO: 978081 - protein, 288 aa, Homo sapiens
SAPCQTGQLCATQRGLQQSWMGPPVLPHFPPLVWDLGGSWAECEAPDRVQWIPSDCSGGSAALEDADRHSQCSLCLGALLPSPWAKTGATPWYTKAWGRLCRHASQRDGAPGVCCLDAAVRSVQGWKTSNFHCWDPENDLPMSPRLSPLIEYGQEVTDPVTNDRHGVRPGPREAVWTAVDRRDGVALVTNDKFVGIELRWFRWKREWKAEFPLHHSQSALTGRTSPRPLGGPGLRDGAPLKDFTGLIGGEGPGFLEKLCDGSFDVVRKGEWTRPQEDSGCDVTAERDV

SEQ ID NO: 978082 - protein, 46 aa, Homo sapiens
MAKARVSGGERWTMGGGSGSPARTVEILRHDPHKLLEVLPGGGPGH

SEQ ID NO: 978083 - protein, 142 aa, Homo sapiens
PGAPTKEHVNVVFIGHVDAGKFNQWRTNNVFEWNGGQHGRLKSMKEKLKSKNRIKLGYLCLGLRHQNSGKNETTVRQYKWVVAYLETEEKHSRILDVTLATESVFPNMIGGASQADLAVAGNLRPGQVMSVETGFDYRRTDK

SEQ ID NO: 978084 - protein, 166 aa, Homo sapiens
MLKARSLRCPPFGGRWERTRGPWRCRELAEGGEGGRWRWDAYRGPGDRGKPGVPRTGKGQIAWRACRTRVKGLGPRQTDGNTVSKTGEGPGHECAYSEDMDPLGTGISHRDPPGLSWPHMSRAGIHLTRLQGQDAGKPGKGERTEQLKGGIAKPGLGPQTADNNKY

SEQ ID NO: 978085 - protein, 165 aa, Homo sapiens
MGQRVPSPLRGSPWSWPRLLRAFSRCIWKEHSSEDRCFFACASLGDAASCMGVLRAGCPVKPIAVAHLFQLSLRYTRPEPAGACALGVSRGVQGWTFSLSPGPEAGARNGCLGWAAVVCAAVNGWTPEGLRGFSVVWPTAVRYPMEICFTLWRSYPGCLESESWG

SEQ ID NO: 978086 - protein, 686 aa, Homo sapiens
TRPPTFPQDMVMFNHRLPPVTSFTRPAGSAAPSAQQGGVIRPSTSSKPPGTLSHARTSAEPRDDDVTRKERGRHCIRPTVHVTRAPAVTTSQEGDTSAKNIMKGYKASQRDTRKDNNTAGTSQEENGRARITKHQHNHEYNTQHHSTTYFRSEQSARAHQTLRTQAFGTSNARRSSTPRGHHITQGRGQHVATTEQSRDTDHTTRHGTHIRPTRKTHTKANYTYPPTTTTSWSRTGKKRETKRHPQGHSDKQQDGNRCMKTSPKTQDHTVCSPDEAPSATRGNPRNRKMWERKNTADKKTRSTNKHKGSTQPYNRLVARKREEEGHKNTRGPKKKDPRDTNDHSDGEKAHKEEPTNTRQREQRPENGRRNTLDDKQSPVYSKCGQREQKMGTRTKVCRNRHKTITAAQNRVREKTRRYQQTYTRHEIPTGGQRTATVKSLHPADSSPTTKANTEGTGEETNVDTIQTHYYVPRRRHRRHTHARMDSTQAVVYEHSGNKTNNKITKDETHMNHNDRDGTTAYARKTSRQKSERRTEMSTCNAGAHAKQRHERHDEDESWQRHAAAGRQKPAEDKTQTSTGRRNSERETKRPGDATAATNTQTSRRCTNTTHTRQQQQDDNEKKADSTPKRHQPETTQQLATRDKGSDDTEREHSREQAMTHTKSTHTDARTTNRATRHASDTSKEQT

SEQ ID NO: 978087 - protein, 73 aa, Homo sapiens
LMPSRCAVSCLLGVLLAVKMCIPVTLSCAWPQRSPASYVDRDHVCDTEVSVSYSPVRGKDYETIVKDISISTR

SEQ ID NO: 978088 - protein, 214 aa, Homo sapiens
MTECARACCTAGVAKYYPSYWKGPPGRNVLTTTIGTLEVRPKACSRDTILSSTRRCAPMREEVLGHLRLLRPHNERCLGHNNLADSTLDDYTKFKPKYPGTIGAFHSPKAWQAKGEQVLSANGEPYLGRPSCCLAICIDPEDLPIKSTDIEQSIALSTKRLYTARATQFVPERQTDLAKRKAAAGKEGAPHRLAPPLEDDNAPWVSPWRDAYLL

SEQ ID NO: 978089 - protein, 204 aa, Homo sapiens
MGPASCPCLDCVCACCMLLPWKIRRRGGSEVPEGKDACHKSALSDAWKAKTDDGKVSTLVFQGCGSMRRDAELGKNLIGPGLRFEEGSPKSGSDECQTLKSRAVYQRQRQLGRGEVGGKNRHARGQRLTSRCTTLVIKSNTGLLQTGSFTPVVSPPGRPEGRDLHKEAGDALPAVVGGDTNPKKREGGPTCEIQAGGPMKRHEG

SEQ ID NO: 978090 - protein, 284 aa, Homo sapiens
SIQYQFLRRYKLADQVTYRVVHVTDGQLDGQGEQLVPEASCHRCLCAPRSCAPFPVRHVIQNPFSTGGSPRGRGLSGWGGNEFALYDRRRSRWWEILPAVSCTRPQSQSLAGWRPVLRHDERPRMMLQNRNTYRRLAPRTTPLLSNEVMEPEDPEMRGEEPSRHESGAESGGDRIERLASSSFRKLIHTVRQDDEQTGSPLEGRETWCKACEEHPDELTQNRAAQSSKTVQKARVEPEWPKTSERANEEAEDSKRTDQPEEKVTRTCARHPHRTPPSKIIHAKT

SEQ ID NO: 978091 - protein, 141 aa, Homo sapiens
MHPMPSVCEIVVAAHTVDCDAGCCVGTLRGVGVGITVVAGVGRRMVLSASVDGGLVVDDARKHYADYLGEYCPGGIPKRLLTRLASLLCETRDWFPHKTLGYSLVAPVRVPIKFQYDYTWQFKRPGWTGYRCSQGGIEHCL

SEQ ID NO: 978092 - protein, 107 aa, Homo sapiens
MPFSFDKNSGSQTLLSGHLDGKRVDQAITIALESAEWSSMGKLEQSSTSLPVDSLVLASKDHLVEGLSIPFKGVLRRHFPRLTVKGEKATRKELILFYLRKTDSSGR

SEQ ID NO: 978093 - protein, 272 aa, Homo sapiens
  misc_feature (131)..(131): Xaa can be any naturally occurring amino acid
AEPLYVLFRAIQYQVDKGPVAAVTGKAKRTLNDSRVCCVDDVEFQPLTSVVVLGVWALGTEPGPAEASSGCCMRCAMPGVLDHGRTSHLHGQRIKVLEPGLQRAPPFSQMPLKCMPIDHCSGCSGPGWVTXTLSDDMIDPRVTLEIHWIRGLRNIACKATTTVPRIVMATCGGSSRFKTCTVVTGNPYSQSPVPPKDCPVGEEEHTHAWEGLADVTCEGVVASWHPWLKKPPERGPEGGRMVRVPTSLPGKLRAPRNGPRPFRKSNLNPFCV

SEQ ID NO: 978094 - protein, 201 aa, Homo sapiens
MAAETNFTCIGDQTRSPSELRSHILEVVALKSTKIGRRGELDPVTAVMAWCKLKNQIRDARKCIVQIATLSQITNNDLTQLGRIQMRTDGRTICVGAPCAKIYRHCTEETELQGFSVKLPRKVMVNVIIWEQIQHQKGSTAIPSDAPSLWSMTLCIIPLSWETMWALRVALKYHLAPIYNLKTREGEKCCFKSGAGRKHKY

SEQ ID NO: 978095 - protein, 202 aa, Homo sapiens
MTSDACTSMRGCQLGRLLVTSRLTERQSQSPIPVPTNYSEREAVSASGRNWKPACRVKDRADTPCQWSRMASEGTNIPSPVVRQIDKAVSDLQYMTWNGTRITRFSPVCTTFCERCLQNYIPDPQYNPLLPSCAAQNLHTCPRKGVARLQNKYLSSTQPDGQCCKNELQAATAEGVFHPGEQSLMWLVVKASHHARNQRGAL

SEQ ID NO: 978096 - protein, 138 aa, Homo sapiens
CSFVLPPDSLNSSPRPECTDVLQRCPTVSVCVGVPVHSTIPQFGPTGEWPGATTCENTCGEACTKNVLYPLETGPRGHGPRPLNQAQSLAEGDIMKYSSDYVDSRKRHNDYQNNSLRCDVHDNTTHTDIMTNSVAPST

SEQ ID NO: 978097 - protein, 115 aa, Homo sapiens
GVLYGRAQLMSAAMGPDLETGTRAAEYLALPPRFLLPAPTASPVLCFVERVSFGQRWSRFSRELARTTGLEFHWLLVPHLCGAPAAEACEPGECMSRSSTHELRGCRTDPETRYL

SEQ ID NO: 978098 - protein, 383 aa, Homo sapiens
EAWRVSTIRLRPCNRNAGAVVCSPSGVRLISPLWAFIQIRRAANYSRLYLCKPGNADNQGSELDFVGHQMSSEDLASRSNRQGRQSLKEHIATVLVEVVDVNDNAPEITGSSVYSPVTEDAPLGTVIALVSVTDLDAGENGLVTCEVPPVVIRYSLTASLTNILHWGRSRADLDRETVSRIRSSASPDRDGGTPITSQPLQYCVFKVYRFNEKPPRNFSILLRRIHRKNTSSAGLQEINLVAGNPKTRSIARTTYLTLEQGGETGHSRGPAKSDTTSVQHLGIVDSLSGPIQHKGRLSQLWHYTEPLTGKRGTHREPTNNNHTVNIIRQSSEVTNASKGKTQAHGHHRNMSHDDIPGPQPTTQSTQCTLVIKTHHKPPRHHAP

SEQ ID NO: 978099 - protein, 374 aa, Homo sapiens
  misc_feature (279)..(279): Xaa can be any naturally occurring amino acid
  misc_feature (338)..(338): Xaa can be any naturally occurring amino acid
MVGQCGRISMDHCRVPKQGTHTKDYHHTFYYYIYNTPPYHKPLFDTTQNGNTATRAEEYIQAPLLIKGTQDPQAKVLYSITIVFGFGLPSTPVNRKFVKAHTGYSLTLDRSAITSSAKSGDTHFGKSGLSSNRVGGGHSGAMHWAIHESAEKVPLIIEGHLSQAVFTCHDGDATQRIPCAPTAGQSVGRYMSRHSNKGATTQERILNIKQGIARNRSRVMTHTRRQMSTLSAESPQQYKLGANTRARSRATETYHCSSEEERDTHRETRGEEDTTQKAXQDDRYMTESQIRHNTSLQTVMRYRPHHDADRGVSVERRGATYVTILPRLDSKRAQRCQXVEDGGTHERVKTLRDPTTLAQHCRQLGDRLDSTSHS

SEQ ID NO: 978100 - protein, 143 aa, Homo sapiens
MATTFLASRCSCLTQVVGATQVGATDTVHQGHLLVWIMCRTRPSSNREGNPHKVELSTEDPNHVRSADLTYAGSCANVSKVQDTPKSGMSREERLKCMTNIATKNPRRAKIGNGRGRQRRSARSISLAPEIVRAQSGCKPMDR

SEQ ID NO: 978101 - protein, 68 aa, Homo sapiens
  misc_feature (21)..(21): Xaa can be any naturally occurring amino acid
MREPAGTTEAVAVSPQAVSEXSRRYPVLKTVHEKYKARPLQCCSSVLTAANGSHCLGDGLGTKRQLGM

SEQ ID NO: 978102 - protein, 117 aa, Homo sapiens
MEDRGTETEGRWPGVVRGLLEFQQPLSKHQIQQLDWTDSPEAPRAMEIIGTERGRSDKYLGEQPKGDSLVSTNQCVWNGATEEVLTPRGILTNKPEKPLGRRPKGKDGAGMKKAKHP

SEQ ID NO: 978103 - protein, 183 aa, Homo sapiens
  misc_feature (64)..(64): Xaa can be any naturally occurring amino acid
  misc_feature (97)..(97): Xaa can be any naturally occurring amino acid
  misc_feature (111)..(111): Xaa can be any naturally occurring amino acid
QLTPEIKSKAMAISSTGYQRQLKYKHYDGSYSTFGEAEYGEGTPGHNNPWASQSPLVVSLDKTXLWRPKGRPNSPEPMSVFRSRKCEKKARSQATGXVNTPPKKGPRPLSXNFNMGGPYSRFRPPKRPKGVPKGPTKEGGKNPQINLLGGPHLGNYCSNRPGQKGAPFFPLCGREDPPCPLPK

SEQ ID NO: 978104 - protein, 599 aa, Homo sapiens
MQAHPGSTLSLAPDASAVCQPSTPVRTDYSDVLALFCDSSIGGCRIHLPLRRFPGFSRPLAMDGDGVIRLHRAGVDPGYTRAELHENNSNLGPWVTLNTLHWWWQLAKRPAGSTRDTVNRSLPAKARLDTSSAHRRRARNLPHKRDPRTHSTHMTMRVHDTILTTATKERDQPASNTPTSHLSTHKMHRAPNTNTYTDPRKHSHTHAPTATIIANRVPPVLRTSHIQMPAQKHPVRLRQQQHGKTHDTTETTADTTPDSHTRLTRAPTQPTNHTTTPDIITNTQPTTNKHHRQTKTTHHTQHHDTPTTKQAGQATHRAPRGPRYGQRQQSEEKRRLNHSYAPYTTLTARPSTRAPPADTERSDRYGERGLTPHSERAATERTTQESDQAQRRHDQRKTHSTPPTHTQNREPKQTTHRTHHKTQTQRIATNMRLPPYATCARPVGRTQPPAESDKRETTPAHTHRPYTNDHNEPLVTAEHKSRADSTTTTDTSACTGRPTRVTPAAERNTHPKHTPPRHHTRTSLAKRQRTQIRKPAQTHKRLLPSKLHRARDFGRRDRSKQIARTTRQKQSETQTRATNRRRAPRLNDTQHEATVEHRQ

SEQ ID NO: 978105 - protein, 300 aa, Homo sapiens
MDSALRQKSLDGPPPSASLACSVVYYVTSNDLTSASPTTAPPSRRTSLSPTSSPDPRRDRHTTRVRMQHSKHYIPTSRTKRSRMQGGSGGVRDGTDARGERRPGANRDAKGWSDGAVGRDRMVREKETGREPRRLEEGRVGIRQDRYYNARNSREGQNKNATKTNKTENTPEQNERQNKPSHNEQGRQARARPTQRKEKKRQEKRKQREAIANHNTRRQRDTKRQPQRQKARSDDIRTHHKERAEARHNSTSDKQNTKRRKQSKTGERQQKETETRSKEKRPRNSESQKQNTESRTTAPE

SEQ ID NO: 978106 - protein, 92 aa, Homo sapiens
ARRRRIDRRVDVIRNVLGCVPSGRPSCRVLRLTRLTCQGAKPRGVPNLNAKVTSDPPDEFEQWCSELLSDRPELHRCTCITLHVQSMQMHRT

SEQ ID NO: 978107 - protein, 183 aa, Homo sapiens
MSSSCDRHMGCRGLAEPRALKVRLHVLLLLEVEIIEPDSTRRQGVEVVRMPPRGTGRRGPARADAAKTSVAHRLNGYARASMSLWTTRGTVGGMGPARMDLVHESLNGIERSQPASGRSTQRTAKVPEPGVATTGTNAVDTEHRLYTHDDGTPWMRKNTKDMQTRNFENVMHTRKRPCKTLTE

SEQ ID NO: 978108 - protein, 391 aa, Homo sapiens
QLPSCYIHGIEQFVTWAPKFRENWAFGAGGQRRTVGERFPTGRLRADLSVRNSSRPSETTVPQNLGTLKSPERRLQMAQTLCVLSLFPCTPEPVNPEPDASVSSPLGRQLPEALHHISPNRQRGNEVSRSAGLALSTPVSIHQRQLAQGELDQLKEHLRKGDNLLNKPDERGFTPLIWASAFGETETVRFLLEWGAEPTESVGNERESGRGTQGQQEAGNTDHCGGLAGWSGVERGTFSIPSARDCDATVPLVVSLRSPGNPGVYWRLIGLCLARGRGPLPLGFSVCITPADGPVMGGHLKESSRQATQGRRKKTNDRSNERDETNKTRGDWTTINKKKVTERVKNTNGVTHLSASRRKKTHKQEQKREKQRSTQTEHTCNRKVEQDDKRS

SEQ ID NO: 978109 - protein, 221 aa, Homo sapiens
QSVELPKGDLGPASPSQELWSPMPGACDGDCVLPAPRVNDPPCECLTCRHVGHVGGRGVAWFPVDYGYRAFWRGPGGVLSGWARQCPGLVKPGPPPFSVCHVVVCRFRDEDTCLVGRHCAWYGGRPPRCGAFTLWGTTSEAPQSQKIVQSPRGGNNSQLVWQCWPLGMGAAVGQLMELQRRSISTLLRQLMGTQEFKREHPFTQREKQVGNCWGTNPPQSE

SEQ ID NO: 978110 - protein, 192 aa, Homo sapiens
MTAGDGRLAEWSSRQLVCSVQSRFPRQPLESLCILKPDCQVLSSPQGMSSSLKALPHTLTQLVQRGNDGCLSSCRRSLDVPGPSTQLAATGRSWSILKEHFCGKVTNLVNKSRRARVQPPSSGPPALGDDRDCSLSWLELECEAPHTGKRAKDPPVVEQTPGGHQHIGGGCACNRYLQIQHSMHRTCGDPHR

SEQ ID NO: 978111 - protein, 246 aa, Homo sapiens
LNEVVEVAKRGGDKRGLWLCVSPRSAKALKDITMDFQPSPRRARPVSGGRVGLLLREQACPLGSASRQLALETDRLQQGPGTFRGTTVGSYEVQDSAADTFTNNEGSYLAHTQGEEAPDRSWPGESSEGGRRRPLPQARAVRRSPVRGRTKFVKDGRPGYEVTKQRDSEMGQQRLLFQIEYPEEIAEGLRPLSSASCLRTSKRIEPPDRRWQYLASWPRALENIAFKVPSREIDRGRASLHHWNRE

SEQ ID NO: 978112 - protein, 84 aa, Homo sapiens
EGSPPSRPLQPRGGQVQVPPRMGAWVPAAARAPGWLGGVGPLRGLTMWRQPWEAPLLHPWSLPESLEPERFRLDCALAVYTPSS

SEQ ID NO: 978113 - protein, 194 aa, Homo sapiens
  misc_feature (62)..(62): Xaa can be any naturally occurring amino acid
  misc_feature (81)..(81): Xaa can be any naturally occurring amino acid
MPRRVHKHVVDESLPNTPSHGCLEQTAYGSSKPSTLLGAPGQQMDEYFVSEIYPQNAQRTNXRFIGTTARISNRAVTRRSXHKNFGVRFFGYRRKLGLVPKGGIRKSPIGVPYRPKGSFQIPPPVGNFGGFGTFLAKNLVEILVGKENAPIAGLTLYRAKHVGKCCERHICASNWRPIVVRSHLTSGARCPSPV

SEQ ID NO: 978114 - protein, 241 aa, Homo sapiens
VNREHGVIHGCQRNVTGWECVCTCQGVMLCRDRDWDRGGRSEAYLDGGCLRCCVAHNCPGVVALEPSTAYCPAGVPQQEECWLAARRVLRGRTMALWESLEALLQKGCGHLPKAEVLVAHGRQVQCGLCRVMCLQQGASWALAFQANPNSEEIWLASREMLESENDEYERWPWKACLGQGRWKHLHPAVPGVMNVLLKLEWVQDNIQDSQVSVRMRPAAPMRTSPTVADEGAHRVGTRHIM

SEQ ID NO: 978115 - protein, 145 aa, Homo sapiens
MGAPIIAPYFDLILVACVPPLHILRVMGSRSPCTLYNVTLIVCDHCPRSPSRTFRSCDIVAEYVVWAGNREEGIGVKCSSRHLSSEKSYIPPSAEMSFLVGNARGSCSLLYYPLYFWLSYISILNWWVPLIDMYLVYSPFGGKHR

SEQ ID NO: 978116 - protein, 321 aa, Homo sapiens
QTAVVQRDADIGVAEAERDAGIRELTCKKEMLDVKFMADTKIADSKRAFDAATSQPSVRRLTSSTAEAQSATELQGARCNSQKTPAGKTTRALERLLHAQEHTTCPWRHQETPGVPTRQLIAYSCAGTAAGTRPTAIHADLPRVKTVNAGPLAHRQSAEKIRKIGRGGSGSSSRRWATAEAERMKLKAEAYQNIGDAANDGLVLEALPQIAAKIAAPLINGRCRIVVLSRRPPVKVHIQTLKRLLSRACLASVACPQQGVDLVSDNPDSEGNGCCTVLTLLPGHFSYEATGTSYKTRNKYTETRARSGTRDALFPKRDHKW

SEQ ID NO: 978117 - protein, 146 aa, Homo sapiens
MEQVEQSIPPLSEETLLPTLERLREDLNRIFCLTPRQVSPLSVGAIKFITTIINDSNPLPDKPRYQSAPLRLIRPESAGGAYVLLSLPGLAAGITIPTKQTANLNTSFFDPAGGTRHPFVYRTPILIYRSPCKFIFYPPRLRSKLP

SEQ ID NO: 978118 - protein, 204 aa, Homo sapiens
  misc_feature (75)..(75): Xaa can be any naturally occurring amino acid
MVCIQSIWVGGFLFPQPQSRGKRIWATARKRVKQTWKGKSESGKAKGRGPDLVFYLAAAFWVAVMYSYYPRLSAXCALFPKVYKCCAGPPPAYFSTIPSMPCPVPMINLPCWMSCAVHSWSQEGMGRVERVCPCSLDAPWCASCLPSPSSVCALSGSLGTCASNLTQGQHGEEMVAGKMHFIEIFYCWEGVFLPQFVCEYSLVL

SEQ ID NO: 978119 - protein, 73 aa, Homo sapiens
APIAQLGQLSRLDLTSNRLATAGSCDPAFLSWCCDADGLSLPPWCCCFSWEPPALATVMLAVAAVRLGCCACD

SEQ ID NO: 978120 - protein, 384 aa, Homo sapiens
MAKCSWEIRRSLTPAASIHSAIPSGTQIVPMEIAIEHFGLIAYSRMALADLFINNIFQYLTVQSYRNIDPYIAESTYIVRNTLLGVHDQTHHTRTRPSGLYMHSHKESYHKRVLNHHRRLLRQDVKHLAGGDSAGTQGWDNVICNILPDTTEYFTQGINPPFPRPTHGTRYPGGHMGPEKNANGAGPLDILGKYMSVLRMDPFGPWRPHIHLVDAQRYRPWTYAYTFMTEHPIGKHMGPSILLHFPWGFQTIATSLTMGPTLEPYHIVQGTVHTTRVGAARPRSRLEPQRTVRRHVRIAGHPVQITRYMVGRQDRTQPPHNLSTAWTIGIQIRHRGHHPEYSDTPPEHAQTRQDHRTQHPPTVTRGEPHNSTMSHGDDNHHTYR

SEQ ID NO: 978121 - protein, 404 aa, Homo sapiens
RDFVGESTHGRHRMQCYVYRKQTKKHGAMSRATAGGQTRANAQTCLRTAGRCTAPSVAHAAAGDMNTGNGHAHGQLHGTESRSEMTTYRHQSSFTISAFDNIKLPDSKYIDIKLISDKMTMTCHCTKYHEYCDMYKYLYDSNYSVLLHNLTRWCDPYDDMCDYYLVMATVKKQNEHQRDVHNPIETTQTKTQKDTSIDSQEYDDSVTTIPPVTNTTYYGKPKRLATIVANLMPSVSTARHKERTNTDLIRVPPIHTSSIKNQTGLKTSGSFSYGLWDCHKINIGTVTDTQIGRPPVDGASYNKFNAFLGTTRQLQKTPDVNIQDDIAKDGRQWERHGKTRDSTPRITTTRAGTNAEVTLSDDAENEGWHKTMGDSENLPRYTKRYEKEKGPPGEDKKKEPEMMQ

SEQ ID NO: 978122 - protein, 216 aa, Homo sapiens
QDRVWTCVFPRKEMAGELQWTQCAVASCCEPGADQPGQLVVNPETILLLSVWECHVLSCAVNCASPGVNVCAVVMAYVEPGVCTCYLFIVKMANHALCNEISEGDLMSLWDTIAPKDLKEEIDIRLSRVQDIKYEPQQSLQMMMLDYYNWKAREIKVADNYLYRMKALDAIRNLMRSHFILKAGSPYLNGQEYTAPTLLDLRNTSTPYKGVRKAPH

SEQ ID NO: 978123 - protein, 187 aa, Homo sapiens
RGVLLWKDNWVSFMDTMLQMSILGSRKHGLYLPTRVTAIHIDPANHRQKLYTLQDKAQVADRGGEQVAEESQLAGGVHISGLHTESARRGSRELQVPILEKFCFTPHTEEGCLSERAALQEELQLCKGPGAGTCRPQVTHAGAEEWLVHLDWMCAQIPREPSQKELPRTCVGCLTGFSSTGNLTAME

SEQ ID NO: 978124 - protein, 467 aa, Homo sapiens
TTNCYVTLSARVTQVSAVRDLQLQTIHVHAPYGIYRHAFEDGFDNCDAGWLSDRTVRYPITQSLLVAMATVAAFQGLRSYAEAQPTGTLRCAIAFARADWGARSLYAGPGPPPDTGRRALHTCRPPGLPTTWPRLGTDQHTGTGLQGLDHLRPGPGWPTASVRIPRIQHRRRRPLRERPAPAPLPHPHYRPPPTPGPGLSHITTTDALRPPYLLSRSLTPPPRSHTMEHPSRPQSLTRTRPATHSRIHHKGPQAHDHSEPPTPANAPHSRTRQPPDFPNEHPGTVPPPGRHTPPWQPSHRHTTHYTNTTPQPTHPQSTPRQAPHTAHIAAPRSDPTTVSHPTAHSQPSDQPHHHTYTPRAASPTNHTPHTNAHLHPDTPDHHTSTPRTRHQRAHHHTTHQRRNTRYQHTHQRHTSPSHAQPHTTAHPRPTPAQLARTVPTTILRPDTQPHDHAAPLTTNHTTPHTPP

SEQ ID NO: 978125 - protein, 207 aa, Homo sapiens
LHNTTPSYSFTHSTNPTSIANPTPARTAGGWCPRPRAPGPSLSRRWLPRPGARPDGQPEEATGPPRPSGRTLRRTHTFNSGEAGLGTDNEDARPGGHRLGPTPPLWGGGQDCAPTCPRPGGPPDALGSASPPGTRSERRCQNARGPRATSEWVHQVTPLEINPRSWRGDTTYTTQRKAHTTESTYTPYPWSRKTADNGLGEWSGRER

SEQ ID NO: 978126 - protein, 114 aa, Homo sapiens
CTDFLIQPSPTCLGERNYGMVLQRERDLNTLQLASASTLVKQNSDDGGEQKLDSPALGSAKEEIGYLRHQVNLRDELLQLYSDSDEEDEDEEEEEEEKEAEEEHEKKKKQRKTC

SEQ ID NO: 978127 - protein, 161 aa, Homo sapiens
MARSEREYNAIAWRGIPWSVISIDKTGRAISVLIYDIQGSLLYIVVTPEEGKYKLCKVRKDLVGAKGIPHLVTHDARPIRYSRSPHQGVTDTISRWIVETWRRLLISIKFDAWYTVCMVTGGANYGRMCVITNGTRGILDLLSVVHVTRCQWQQFDSRVPT

SEQ ID NO: 978128 - protein, 63 aa, Homo sapiens
MKNQESRTLQDNSHSNAVATPDGVICGGRTNDDGETQGRTDWTCCWLHDCFNGRYGEALRETG

SEQ ID NO: 978129 - protein, 119 aa, Homo sapiens
PRVRSGVGSLVVGSWSRDFRNEAQTFAVSVTALKDGVSGVSSFQWVRGLADFKNEAADLHSKCYQLLKVVRTQRVSSSKIYGEDRKNKASTVWKGDLSGLPLLARVASFYSLIVPAHVC

SEQ ID NO: 978130 - protein, 172 aa, Homo sapiens
MAPNTRPYHYTTHTHYPQEHPAATPQQPNTTHEHKRHDAPIHQRGRKSRAKHNPSNTPYNALTTKQTQQRQYPQDDNHRYTQALVITTNEPTATPDYHVRLTTTHTITTPHTLEIAGEGNEQPPVTEWVGANNQQPSYPPGTHRVHRAGDKNHQTRMDHERRDKTRRRSEQR

SEQ ID NO: 978131 - protein, 370 aa, Homo sapiens
GPSSGPHHAWDEEPNATALLCMYDDTLRTADVTHDTWCGGVCVCGVCGGGAPKENATEKGALEGELVGLARISTTRPQGEEEEPPVMSAALVAPITTPALGRGTEERAGESLFGPLVYRARLYNTEETPRLALRVTCGPPWCHNEHSYQPRRGRELSSTRESDPREKERRGGERGGDAACGEGGDKRGKRQDMSGKAHSNARVWRAQQERGRPRGDPTKAQRERDTNGPHPYPKRPMGRPPPEQTGDDSGDTPQQNSLYTTGERTRERTPTRGDPHPYRGTPPKITSKKEQTTETTQDSPKQRAHCVTQAPPKSVASWTTRAPPTRMGPHSHTPAKMANGKNPRTYGAQGEERGGTKRGAHDGQNNRVCG

SEQ ID NO: 978132 - protein, 303 aa, Homo sapiens
GTRHLPGSNAPSTRDPGGSLPVLGHSTAGFNVRPWAMMTLWHDDDWTRQLILRLTMRTSENGSLPGTANIKALAAELNQLAVAKEPTKLVDVYQAELAESCVLRLDQLTVNSARVEVAMGQSGHMDPWTTCECMQLQDETNLRLEAENNLAAYRQEADEATLARLDLERQIESLEEEIRYQRKIHEEEVRELQEQLAHSRSNVELDRGQAKHLTAALTGDTARRLRPWTSATCMQPKSGTDPVCSTADAAARTRSCPPGQPRKPGQPGTRGRHDPRLEDLPGRRIQKGQWPAGTATQEEQHPG

SEQ ID NO: 978133 - protein, 129 aa, Homo sapiens
VSCFSCSSSNSKLTLKNKFVEFDMKPVCKEVLRRMFPAGAEDSGVKKLSGADLLAMAHATGAIRTLQLMALEGPLLMSSRLTIIETPIREPYPCASTHGVVRTDYGTRTVQNTSQYTHPARTPYSDKSL

SEQ ID NO: 978134 - protein, 304 aa, Homo sapiens
PTARIAGRWLSDILLRRFLASVISRKPSQGSDGHPITIQQPMQTPTTAAPCAGPEPATHRKPQPPGTPTTPTARNSTLAHTHLTLLPRHWHPCTLSTATRPLAPTSLQAPPQPRLRLRTSHPTGPPSLRLAGNPPAPRTHLRAPPDADLTPATRHCASRPNRTLTHRAHTRAGAWHLGPPHAARRHLPAALGTPNQPSNPNPAPNLCTRYLATRLAPTARRTRDPPQHHMGPGAPCGAAPQPRATTTAHTPSGPTDGTPPPPAAPRGRHHPHKPARNHPAATTPRHRTTPSLPHHTAGAHHTMA

SEQ ID NO: 978135 - protein, 280 aa, Homo sapiens
EIFQDMVHIRTKPGPVTQYDILFDNLSSAEHLYLYRPAEGPVTSEVTLKKSSEMLHIIVLEDKWNLTEPLPELGCMRRNALHRHRPHQLGIQGAVILVDEPTSGMDCHLQEGHLGSSSAGMKIERNQSCLTHPLHWTDGLTCWDDRIAIIGTQGGEAWHEVADEVTFAGTLKARQHTGDLGITMDLLWFTRTPDTANPVKRNHSSPTHWIPHPNTRVGAKRPHRQWKNAKATERPRKQGPYDNTSPEQQDGTMLGTGQLTEQTGPHTTERRWDKANAEEE

SEQ ID NO: 978136 - protein, 132 aa, Homo sapiens
MTRGDSGWLPVRTPRGQGRETVADTPEAAFGVNDLQAGRYADIRQNSRDHGERSRDRTPLSSSTGSRTTIPILLTCHRASSKILPSARRAYVAALRWRAMAIYYHIYRYMARHAPFIWQDLYVMPDYRAPSD

SEQ ID NO: 978137 - protein, 192 aa, Homo sapiens
MLITPERTAIPCDPEMSDHTCHMARSQTATQSIDRNWTDVDDQIMVKTDCPPEAGDKWCPLATTPHIASTAYFANKLTFHPRDTYKASPVDVDGYHHPWPLVKDGLTLAQILLFDTPVHHPTDGGIAVGAKQHENAITHRLGRPNTPTQTGQAPPTQRRTDAPRSHHHPTSANVTDTQRDHNYHDTAPPTRP

SEQ ID NO: 978138 - protein, 150 aa, Homo sapiens
MSQAGDAALICLDGPPVDLGNVPRWRVALTDGSQHELRETASGNSSPLQRTGHPAPTETQNCVWWKIPERNRQFGDAFSHEQTQEPREQSPGARSRHRQRRQRDSIATDWRWRTLATVNDETQQNKPLIRERNLPVVGCDVRELIEPYDL

SEQ ID NO: 978139 - protein, 235 aa, Homo sapiens
MKFESMREIVHIQAGQCGNQIGAKFWEVISDEHGIDPTGTYHWGQQTLQAGHASLVYYNEARGGKIMFLVRILVDLERWDHGALYAQRPLGADLENQNNLVLGSDLGHGNRTGPTGHIAHEGCQSWIDSVLDVVRKEAESFECLHGLPADPFTGRGTGVWEWALSLAGRSDKEYPDLLIMDVPSGVVAIHPKRGLRTDDRGAKSAPSPCNQEVENTAATYGFDKRGPPKDILLRS

SEQ ID NO: 978140 - protein, 186 aa, Homo sapiens
TRAPEEYQELEAPSEDNSWKNCPSRDLSAWPSQCCPLTAPAEVRVAVGPRISVTCVPSPCHNWWDMLGRAARHVGFGGFSFGPGPRGGELVLHVYASAALLNTAPCLAGPFFASGLLLSKQHISITRTERDSDGNDEARRPRGTESSTGQADIWAQTIEKHPDVKHGPSIQTTLVPGSTQLDSDFN

SEQ ID NO: 978141 - protein, 249 aa, Homo sapiens
CRLGPAERSYAPRAEHTARAPAPLRARFMTVSPDRRPLASPRRRSIGPLPACRDGPSSEGRTGMCALVLHPFGGACYTPPVVVCSGVPMPAGYHAVRALRTACSRPHLTACVEVRVSPASAGHRTTGPRFLINVTVTQKVQMLPLCPRTSYPETASGASDWRVVLRDPCVSTSEPSAETRTLGVGHRGRCKRCWSRSKCRHVSGAQSPWKEAKESLRKLKFVPHSVAEEWLPFDPCATAIGSQLGTDRV

SEQ ID NO: 978142 - protein, 296 aa, Homo sapiens
MVWHLRPDSRGLEDAYGAVPVAMNRIQRCPSSGTPRVGRPVRESWISDDSSQEPPLHAWNHSQIKSAAVIAFNLRPVLVYWALCLCKAKERTSDAWPAGLHSDLVTEVGLLALDDFLLARGSADRTGKLWRRARAWGRALTLRQTWGWCWAPMDLPSGRYCECQPKLCSGMSGERDVGTSVKVLGRIQDSKLLTELAPMRDLGARAPHGADDGRPWVRARRSKDNGEEAGIAEPQEANAVGHRPEHCKAMRQRQGKRAGEERTMGKAEVTGYTNGYRTRETGGATYQQRLGPRWDL

SEQ ID NO: 978143 - protein, 324 aa, Homo sapiens
HCVGDDLAEPWGWACPRLPCCALPSAWAAGAVQCTGHAAPVLVLCSAPEPPWECPEAASPARPGSSPHLPAALAEQPALPSGLPPCSPLLPAPAPSGSALGSYVGTQLSTVRDCEAGRYWAPGKGDTSICHNAVIHWPLHLLPGELVGPAVDHPNRRAAERRHTERYLETFMFGGVMLKLVEHDQYIPMTGQTLLFWWEQKHCWLLKTHWTLGQIWGPGRCKAFYFTPQHKNGCAFVCRIWKLVTVGVQLLNCGFKAVSDIPANLNIRKSKNFPCEDPLVNIQKQKTKTHLVDPIEISNRKSQVTVKATGYRNMTILRKERITN

SEQ ID NO: 978144 - protein, 299 aa, Homo sapiens
MPAAGANRLLLLLLMAVAAPSRARGSGWRAGDWCAEGVGRNGREWRRPVALVGLLLEPLFEIDDSANFRKCGAHCSGAPALMCTVVPVTAASSCEEELGPTPGCGSPEWAVPGPDPKADPGALDVAGSWCLCLLLCPCVLPGGCRTCRDQLTLRRVSVAAYVVGVSVVTATLGAAGALRWQDVDLELFSTSVAVRRPPGLGPETVAHLSCLGDVTGPWRAGTPQEQKSFFGNYCVYIISRGHVLMSSEREERGPGLAVDELEFVRSYCVSGQCGRIVFNQGTMGVLCQIQRDRSRFREM

SEQ ID NO: 978145 - protein, 100 aa, Homo sapiens
MRFVARRQTYISDSVHLRYGAATVGALSWAGGKGKNFGGPKVTQSDNCLPPSGSEGVVNRWGRGYWPGADPLVGCWVYSGLFPGYSRLENRLQWRGVEPL

SEQ ID NO: 978146 - protein, 221 aa, Homo sapiens
MKTVETNSINTDSRQQVNAYNQRQTSLQAKGLEDYIGTQCQNEELRRRKGTRAHCLSTYKRERGVNTRKRDQKGNISGRRISVPTAGCTHQIDNMTDSPSQSGQQFTRGYHARAPAGQQRDTDQRKPNRAEGGQKHCPYNRAPLEVPQEVTRRLHKNEIKNMRHTDGDKQRKTANTVRQNKQGVKHTEERANTTAARNNKQNNTDDNEQQNATTTDNAASE

SEQ ID NO: 978147 - protein, 325 aa, Homo sapiens
LNSQSLYKLVLSLDAARNQGGVREMLHAVVPGAECGTALLTCCCCSAGLVCVVVHGCDEMGSVLHCCWFESVEYVRGLLLWTVIDICASYCCVPYCMCAGTYVLCVMCWLLCAARMDLMWLLTLTAMHALAAVLHLCVTNGVWDSVEARWSQSTGGGKYKVPALEIPPRRKSPLTLDNSETNWGDVKALTRKHGRDWKERGRHWICPLGEDLVHHWNLAQEPASKKTSDSLGGSGKRVGVGTPRTVLDPNLEKAKHEGDLAHSLGGERLPWKGDWWRNRGRTGKGSPGRSTREVAGLAHIPRHEVSNPPKGHGMSGSTKSDREKK

SEQ ID NO: 978148 - protein, 292 aa, Homo sapiens
LAGAGSCLRASARCERLRDVAEPGVSVLVANALWVTELGQPRSICACMLTAWWPLVRELAVPYWVFSWAPCDVCAGLQCPLWALTCILHQTQDSQCLLDSGVWFFPAKRSQNTGNGWKITCSRHCPSSTCDGRYHHLRQGQRYTGIICTKRTRTCSPSGDEDPGKFKEAELNDGNAEGMPEGEKLVNSTPAEVDIFELLKVFYEKFSSLRAEDIEQMLVKQRLKVIQYLGRTTGKRSVVRAKLVTIGSYHLISMEDLYMVYKARNVKADTGDNKHDNGSKRTTTITNRKLPN

SEQ ID NO: 978149 - protein, 283 aa, Homo sapiens
MRLQARPPMMMNEAAAPQCGSVRPDGARIARQHPARPLEIPRGERPCVHGYELSGMRRLDQGWRTPHYTIHQLRSARAVVPARGPRSRVQHYGTQRVCKHSLPTSMGLMSRSIVRSHARFTGTPGTPCHSHAHCARTRAFGRLDRSCHSTDLYACASLSSRAAVFAASTLVLRAYRSLVRLRVQLSRLPACSVGTACPVPISFLRPPHPLPSHSHPLRCSPTCAHTQPPIPPTASAFQSQCQAHNQPFTGHAIFSRAPTLKRQPPRVTFTTPKQHPLAQPPPV

SEQ ID NO: 978150 - protein, 352 aa, Homo sapiens
QVHGCGWKTGIGLCFSDQRWACQSCELGALFLVIAVRCCSGKMFPDLTIGGGPGLCECVFLSSTGARGRVTYCARRICPVRRQSPSSRCSLDPPTRSVWCLVRCRQPPRPPRALMPLEVDPSAIARERGPLGAARLTLSPMHLVPFYCPAHCRRCPCGMGLSACVRLGPTLACRPGRGTGPLADVCPLLLLPPGVHSAFLRQGPHSRVTRARGGALGALEECILCSHLRPELLAAGSVTGQRRDSVPGDLTILARRQRLLPGSLRNKVPTWNLPALDDPGSKSLDLQSPLCHPADAGNHNSGGDYKIPPGAILPPTFLTQPIRGLTHTAHTQAPPNNSLWALRAHPPTRHTH

SEQ ID NO: 978151 - protein, 125 aa, Homo sapiens
MGTSWRWSDGFAMTAGIQRVVRVLRAPHLTSGSPIRAPSMGQCTGSGDSTRRAWFLAQDEKRYTSCRTFNTPMDMRSLMRLSHRCTWSPTGSPLCRSTRRSAPWSCHHRVGLVLTPIRRAHLHAF

SEQ ID NO: 978152 - protein, 167 aa, Homo sapiens
QEVNMNDIPDGHRILSLDSLTNMVLKGFLLSQCTVLCPACWALLDENESIRASLMNLASSVVWREDTGSCGTSTSRDPSSSRDENRFQFLLFLEMVLLAPGFPARAPMVLSFRSGLLVLLLLLRTCSVGDSVPAVGQSFSCCFPLSFPLPSDSGIQADLLIQTVHGF

SEQ ID NO: 978153 - protein, 245 aa, Homo sapiens
GHPPNQACSPNPRLSLQWGAWFWEPYPQMQQHETPHHLSQSGAPSFNPDLYPPPHPTMLLHDSLRIPGLPIILPLLPPHQVIAEPLGSSDPMTTPDSLEARSYKRGGPLLSCTPAQDLEQQGMAALTAHQAHEAPQAWILQAIHEVKAVVGKATEAYENPGKLPHQGLALRHLISNHFKEATQREPEQYGRGGKRKYCPDCPHEDRRQLINTCFGLEGRCQPWRPRHLLMGTTTGRKRGHEEQIL

SEQ ID NO: 978154 - protein, 344 aa, Homo sapiens
MSKRGGRERMGTRRGNTPRGPPPGTIPGGELGGSMVMMDHTVQPGPQERENMRMGDPKNANPKAPPVRRKTERGPEWGDTPIWEATTHQADRARAQGNHQQRGTRSPRAGANNTQGDRTIQHMDKKEDTHTKKRCIEEHQTIYTPKTQESPIRAAKHEDHHRGQPYEQRRTAIRCRQEVHKRPKIKGRKEDMATIPTTETPTRRQKKEQQHAHHEDSMNPNNTIKQPTTKHREKPTNSADNTKPATSTPTTKNKRRTQTTMRAKNEKNKHTQRHTRTIAITTTGYKQTNNQKTNNATKQTKPRRPKQQKIPRKQQITTNHTHPDNPHPHRTKQERKQPEAEENK

SEQ ID NO: 978155 - protein, 104 aa, Homo sapiens
MGAHSRILRRLYSALTQTERHMCSAHGTVFATPATERPGPSACHDLVEKTHITEQLNPTPHNATHVGTTCYKSKEAIPRRKRALRGTGSADKPPTEETGHRTIG

SEQ ID NO: 978156 - protein, 224 aa, Homo sapiens
MGLLMCGFVLVTMEISTRVCPRRGACKWRSLGSLQSLPPEFKQFSCLSLPSSWDYSHYCRASRNTGMATFLAGRDMTWWPIGASLFDQQRGLWPLHRTGGLRRGRRSGRGRLRVECHVTCCWHWTWVFDAHLHLTQRSSHLPEYIQKRYGGQRIRMYLSVRSLHTVWTFNKISLDLYAGAQIEPHLPGMETTSLSNIITLGIKAQSTIAALEQEREVTGSRRQT

SEQ ID NO: 978157 - protein, 203 aa, Homo sapiens
LRSKRLDVDPESHWQEVGSSSCEDTVAPVPYETLNKRFAAAQKNIDRETSHVTMVVAELEKTLSGCPAWTPGSACWTAWMEKLSVLKRKAVEIHPGRGRGAARLVHKRRIEHLKEAEQGTARGGSVVEEGMRMDRLMVEHCCGAGYYNTAGQGWLRKAGIEDLVNIEMFLTGNRRWMSPWRGVETGTCLGLGAMTTSSRLREI

SEQ ID NO: 978158 - protein, 78 aa, Homo sapiens
EGRAACVVIITSLFNERTSMAAEELIQEEHRIVNARWVPHPGKDRTTYHSWIGPTTDEARDTLITRSTSDAETKEHQH

SEQ ID NO: 978159 - protein, 92 aa, Homo sapiens
MTNTAYPSSRTTVPTESVTTKRRNESATKARTSGTSSSRPDRKEKPTEYLPTPPYLDITRIEENEANSLCKLRANSKDTINNQNERPPNRNI

SEQ ID NO: 978160 - protein, 360 aa, Homo sapiens
MDSVQRQTKVVDSEVTDGKSQELMCTLLPVSSRTWAVNVYRCGCEERRIEAELSAPGVPAEGHHLSTAVLDFTARIWLRCAWPDSCRLTLAKSAPWVGDALRAWAPGKARCATKALETNTLHLHHRHNVPVIAYDAHEMTPHYRADSLHLVHVTIPRVPPPRINTPPYKGYIMDLRIKGAARHILSYMLGTNHSRRVNALSSRCAKMWVPRDPGTLHNRGNAQGPTNNTWGIHTTRRTKPRSHPRRSIPARDEPTHILMHARTRGHADRKPPPCQDAPRDPDDQPKRRTSAVAETRHTQGSHRHGNQLSKHQPTIRPPPTRKPRSQTAQTTQESKHHNKGHTRIDNKPTNTAQGIATTQS

SEQ ID NO: 978161 - protein, 253 aa, Homo sapiens
HAYAAGLLPEPGVVGWRLPVPCPCPLCLGCWAVMWTTLPCVLPGGVPALPSRLCFPCPACSCVLALCVKHDNEPEGNQDSKRGDRIGCQTVEGPEQNKDTDESQLAEKRSNRTVHTRGHCSTTIADLTRGSCDELMRTTRSRYVQRTQLTESLTLIQTGLPHCDDGACTTRRNTSQSKTKEDKHADRVTTGKHNVQMTVNKANHEQQSDLHTICRPADEADLGAHPDESMAKAHENQLPSRTTYKSVDERSLT

SEQ ID NO: 978162 - protein, 300 aa, Homo sapiens
MGSAPWAPVLLLAARAACGSMAGALQGPRTPRFQELLLPCMASGPLSTSMRFGIKTYPSADFLVSGHGSGIRGRGAQSYFYTGNEGDVWAFVNNSGFVAVSMAGRSGVGSTGLRGGSRIRTGSRCRSVRKSTLTRNHIGDCWRVEQCPEPELTAELLRRVYDARLVRPRMPPAIAFGGSNRGDAQQPYLMMKYTPPGGRGALWPSARVANLCAEPLTSPNQVSFRDVTVRDFEAGHEDPNAPRGVDGKRVSDQIKGLFPTGNANTRGRMRNRTWQSVSNRNGLTGHNYARKSNGLDMLNP

SEQ ID NO: 978163 - protein, 302 aa, Homo sapiens
  misc_feature (215)..(215): Xaa can be any naturally occurring amino acid
MTSTGCLYPLRWTNSLNCTLFIEDTGQDVSPNHFGPPMDHMFPGRTLRRLGLEGPWSKDDAVACRRRATGYLIPFKRNQLKAVCHIWGRLIIAEGGGTPCDGTPWPSTPQGYVSGARILDRIGGDMRERTTITRGGTLESRRIAHNVCACGYIGAKLTVVGVVERTDGIPCNFLCDVLKSQEAVHPRGTVRLKSPYHKFRGQACMISLHEIPRKXTITLAHTKLVSVETLGLLSSTSLFMEQYPNLKRGRIAEEMCDHRTWFLRCNTVRVPNLPERRSYFAVRLGKEYPGPISTYNLRFNIH

SEQ ID NO: 978164 - protein, 222 aa, Homo sapiens
ETRGGGDGAELLRERRAPACRWCRCCPVSRLPSLGGTADPSCWAPGGLLRSQREHGCNDPGHPLWASPRPSPQLEPRRLQQGKDWRLPQSCAPVECQLLPVILEARQDGVMGHGSRATPQPWSPAWQQSSEHALPTQMDLRAKCLSRPHAVCAASVHLALPIITTGSDADNFRHRNTGGSVATKKVITLGCGARKLFYGFATKFLLDSIGLLPPKLRELVLL

SEQ ID NO: 978165 - protein, 272 aa, Homo sapiens
TTHRRTLYFPRRPLERFITVSILQMASLVQDDDFARFVYGPQPRIECVRANTVTTMPINSSANALREFVTIVTEGVRNVNESRTLSVRDALDCDYEECSLGLESNVSQCLRPGKYAVNTDEDCLISQWDICYWLRCHVGEFLWVPYYYLHMRVGPHIQVEIRPIDRGITCLVQCSMKCTKKSYLLGSTLSNPYLPYVRSHITIAFRIAGVAWGASSSGNLVTAKLLVASNCVPQVVGKNGHAALWRNSPRKKIPLTVNGTCIMNHVGQFQKT

SEQ ID NO: 978166 - protein, 455 aa, Homo sapiens
PTRLARKRTGRVPGSSELRGPCVLHHGLLACPSCLGPMMPACLLLLAFLLLLCAPSAAAPVCMAVPVWSLRGVRCDWLLMCLLACLPSCGPAVCACEHCDDVPDAKLLCCASILIACVSDSLDDADRLDLQYCCLNRTAAVPWMKCLQADLCVLFCTAVVTRTNTPLFAIHLQALMETVGLHGHYSPAPKRMACTSTHATARTATQCNRHANGHCNANAEHGTQEHRGAPDAPGQPRFTKITNCCVTPLALDHGPMITIRKAHGPGIHTASYMGQPLAPLLPSRVEQNPGLRTLVLIETRQANWGAHHDEPVAYAFNLGLDLDLSQRQLVQMGMTYGTLISRECPPGPTEPQRGTLGTKPAPARTLTPGISQREFGRIATGKPHRQHPGLPSGAQLPLWGPGDPQQFQGEPATTETSHKQRQQPFGGPTGATRTQGPPPHSHEPRQSPDTSSREV

SEQ ID NO: 978167 - protein, 296 aa, Homo sapiens
MVWWAWLLACLSGSWHPPLPGSECPLHSLTLWCDFSLCWGTQCWLPRQHPGPVQLGHAACMAASNAPAFAQLTIAAQVRFPVATAKTKAAGMLQLNQTAGPTEPTQCCARRLPVLMLRRAAGCWLDSTHPATSCPGWTVDEVTIWCTMDHVPLVDVHDRSRVLKPNPAGWNADESRLCCLVDMAAVTECPPCARLDSGAGKTGVACAGGQHPGPVAGRIHAGRRRRGTPAQHAGPDQPRPMQDRFGTALAPSAPGPYHPATAALQQPDFCQPPATMNVRLGSIPSTPCAVHTPDKA

SEQ ID NO: 978168 - protein, 266 aa, Homo sapiens
MAYSTNLLADSCGPAPMCSQLVRATHEGLSCAHHASPGAKDAPWAMLHDWRGEGARELHVFAFAPCTWWSVRPLELHQVVLQTPPHDAKAPLSLSSWVPFDIEDGRDRGLETPRGGLLMGKHAGTAGWTATVRATNGNARTRALLGVATLTCNQECSTVSPEQVGKLKGFPWPKSAPLRTAEISPGKPWERMHGPGKAGGGTRAPGLGSPARDSILRYQEPVPETGRALGQNGAERRTVNRRGPSHDIGLMGLYTAPLYHEPINLT

SEQ ID NO: 978169 - protein, 121 aa, Homo sapiens
DAWVTDQPALPNPCSPVNMPARWGCLQTSLPCLTPARHASVATSPQTGPTPLPWGRPRTVNPWMLFPPETLPLEARRRLVPLPPSANHPQDRDGLVQAQGQASRNIVLPGHPRCADDEDGC

SEQ ID NO: 978170 - protein, 316 aa, Homo sapiens
TPSPSDPRWFRRRGGQAWVGGRLCCLLPPPQAAVLGPLPLGNPSLSGGRMASACFLGLSVGACPATLTLTCAQAWHLDPGSCLGPGDGVPIGLWDHRATGPPAAPPLAGVLALTSGLEFPSSSSPTGPRLGLLAGGSTVWVGLVVPGSNPGAFMLNVADEAAWTACLVPCMSTLDVHSDSGSSAAHVLLTISQNIGVRETEAVDKALGPSPKTHPSIRRAWARVRLGLSISTDKVTHILGTSTGGHGKYDASEEAPHGVAQRLWRLASRIAGQISNTLVGRTTAHRARRPTGGPGRITIYRRSGHRRRDPQRADTV

SEQ ID NO: 978171 - protein, 214 aa, Homo sapiens
MAPSRNGMILKPHFHKDWQQASGHLVQPAGAQDPQAQGPAGESASHRPSPRVRPHQAHREVPYSEIHTKVRAGRGFSLEELRVAGIHKKVARTIGISVDPRRRNKSTESLQANVQRLKEYRSKLILFPRKPSAPKKGDSSAEELKLATQLTGPVMPIRNVYKEDKGQSYPEEEKNFKAFASLRMARANARLFGIRAKGRRNAAEPKMLTNKKSK

SEQ ID NO: 978172 - protein, 238 aa, Homo sapiens
RDSSEIQARAAGAGRHALGPGAVEECVPGRGTQVHRALQQVLPVPVSMKQLSRLRIQQCLREDVYSLSSGRRLPVRLANIMKEINLLPDRVLGTPSVQLVQSWYVQSLLDIMEFRGQKTPRTTGLYSQFTDALVTIRNRHNDVVPTMAQGVLEYKDTYGDDPVSNQNIQYFLDRFYLSRSPSECKSIKHNLIFDGSTNPATPKHIVEHRSQCSGLDVVKDAYEWLKLLCDQYYMVPVN

SEQ ID NO: 978173 - protein, 91 aa, Homo sapiens
TRGSSPLPTLSNDPFLGHFLIHQSIFLSCDWIGPQLGGERGRDCFLPHPWAYLLPEVGSQEPHPYHPSMWRKEEIFRAASVAQLDFPQSEE

SEQ ID NO: 978174 - protein, 330 aa, Homo sapiens
QWTNMEKAGKRLIQSSAAGGIDGKGEELRWSLKNWGRNPGNCQHTHRILLGCKEETEYMVILPKIPECVALHSVAVSGNRDRVVKFQEPLSLTRDRDILYRRTIFRKATCIITDDTLAPAVDAVAVKVGKSPLQINVSQHSREGWGNLEEMMKYASDEATLVWTQKLSDEMMVSLLHQWDKLGLLRRWTDPEQLGKDGLSMEGSGLDWIASDVMWEYFRYQAGQSLAWSSGNVSHGRKELVCGTLMPRLNHFHLEPVQVPINVVGLTSAYGCCPKRLAFTSHGEDWWAENHYPGGEHGKKRGRIYVGKNRDGKRKQQHRIAAEKKRVAEE

SEQ ID NO: 978175 - protein, 99 aa, Homo sapiens
SPSSRQSVEDNASEPSGKDVDDVQEKPKDIIQFTAEKLSVGEDVTVGGVPSVWCSVSLVGTTRNNFEGKKVISLEYEAYVPMAENEIRKIVMTLDRNGP

SEQ ID NO: 978176 - protein, 117 aa, Homo sapiens
MRCRPKVACVKQTNLMYTLFGTVYVPRTVGWTSRFLMERVRGCGWNNVLGFTCSGIPHYGLFDHLQCLKLHDLKFACIYQALFVRVLATLGFLLVTMCGCGMCEQKEDEDEEQKARY

SEQ ID NO: 978177 - protein, 368 aa, Homo sapiens
MADITRTYLSSHSSCFWVAESRGQTVGMVAARPVKDPLLQKKQLQTTSPLCVMQHRREGLGKAMVRTVLQFAQMQGFSEVVLSTSMLQYAALALYQGMGFQKTGETFYTYLSRLRKSPMINLKYSLTSREGDLSSLSSGRQSGSDGFCNSNKQTQLLQVQTTNPHSQAHLSNVYRGWAWGNGYSDVSQGFLRYPLANINAMYTKYHNMNYSKYPELWILAGYRIKHGQLRKAMDLTRYMAQYRECQGTQWHMVREEGDGHDAAQRASPGQGSTPHKPITKRQGKTNSGDQNGQCNRRGTRAPTVMRAKISSKHEGETNKQQWVKDTVSKQHNLKDSTAGSRANICEHTAHHETVNSSDALSIAHNGRG

SEQ ID NO: 978178 - protein, 291 aa, Homo sapiens
CWVDPRKAECDPEACNPEIQDATLLRNCQAPDSDGNNERALECEQSDKKQNLEPNLPPSTEATNEQSGRPTGTPRSWDKGQHGPARVTQSNTSHFKTHDSRGYRFHVTIYPGFTNRQNKTRGGLCLEPYALKVYRKHQVFKSGLLWEWRERRHEGTPGISSAAGEMPAGTGQLAWLLRGARLCSGVFAGVTHFSSGRGGGITAAIPIAQRGASKHGEASCWVGIVPRLQVHQDSARLTPWKSGVYEDGNYDQMRSHAGIRWSPFQDTGVLRRKPVKDPEKVHEAEACDPQG

SEQ ID NO: 978179 - protein, 77 aa, Homo sapiens
QASLYGGGEEGPQYAWNSVNSELNGQHGEFSKTLFTLRMERGSWGYSSVAEAPCLQCARSWVQSPVLQIERKNIVLD

SEQ ID NO: 978180 - protein, 323 aa, Homo sapiens
PGGAGFPTGLKWSFMNKPSDGRPKYLVVNADEGEPGTCKDREIMRHDPHKLVEGCLVGGRAMGARAAYIYIRGEFYNEASNVQVAIREAYEAGLIGKNACGSDYDLMFVVRGAGAYICGEETALIESIEGKQGKPRLKPPFPADVGVLDAPQLWPMWRQWLCPPPFAVVGAPGCWLGRERNSGTKLFNISGHVNTPALLEEEMSVPLKELIENMLVVSQVGGTSPAVIWWSSTPLIPNWGVNVLMDSMAGAGQNGWTGARCNDRREMEAPGHGLQLGSGGSPRGVRNRGPLEERPYPGKRKPRGGGAGTRGDGEGRTPREKCT

SEQ ID NO: 978181 - protein, 134 aa, Homo sapiens
  misc_feature (74)..(74): Xaa can be any naturally occurring amino acid
MPKDPVNRIRQQQDSRTNRKHRRTKTDKTIQKPYQMVTGPEEREHREQYRKRTIDATCTWYHNNDTEEWNKSNXMTTHDRPMRCTTKANRSTRSQQETYQKTTKNRQKKLTQEQKREKKENTNRRKPIEHDNNT

SEQ ID NO: 978182 - protein, 117 aa, Homo sapiens
MQLLTIWSSRTFSLQIRMSLSSVCVHYKVYPRKQTNTGPPKKPEGPVYQSRFRSRALGGDIRSRAVTGGRESARAGTTTSGHWAPSNTRKNRWSPFREPRLYTSVYHYKCYNNTRSH

SEQ ID NO: 978183 - protein, 303 aa, Homo sapiens
CGVVMLLLNFSSKGRGAESAKTLTPKLVSWNIVMEPFFKREVFDTYLSQLASVMKNMEESLYAYEILGVPKPKESTIWIVKARRILSENLEDIHVYFGDPVSLRSLAAGRLNRNTYNLVPRCIPQKQPEDVQAFVTEVAYKMQLLQIENLALSPWLLVVTILLQNQLSMDFDALVEKTLWLKGVTQVFGGFCFADNKLPEEVVQSSILLHSNLAAVSKTRGSENDSWKLTVVTGLCRNIASSCVLTTEPVLHICPPPSAWFADEPVRKRGSGIFPEVRGITSPGNTRRGRAAGSGEGENPQRG

SEQ ID NO: 978184 - protein, 306 aa, Homo sapiens
MIIGSIKDEMEPSFQEVSFYYSEENKPPEPEELEMELEMEPENMESVPLDPSASSASLPLPERHSGHKAENGPGPGVLVLRASFDERQPYAHMNGGRANERALPLPQSSDLLILGHTEARANSNVCAPTRWAGGRGGESRLEQSIHKPSLYLSGSSDLPLLANGRRLSLAENTTLGNLPFLTNVTHALTYLLYPRTIKLTMGLWTTLNDNHLIASRTLEKVSLFRCSGLILLPLPFRLLPSSLPRPGFLFLCFPLARLQVAAPGKPAASYTTATRGAPGGSASVPVLDVALGPFAQPFRYCRRLAP

SEQ ID NO: 978185 - protein, 127 aa, Homo sapiens
MCSKPHEAHCPSCHAPHQGTTHGLSSCPMRWSMGDWWLLLPEGGGLPGSYLHVVGWGPIACVQHSEEPGQNQARSKALEIQTTQGACHRHNTWWLMAWARLEFPKLVEALTHKVSKGPSLAAFGPVM

SEQ ID NO: 978186 - protein, 244 aa, Homo sapiens
SEGLVDKRCGVALVAQRAGPGAEVWNGDCRAAICPCCCNFEGCTGRGGMQTMDKHEPAGEHAAEPGPSEDLCGRVKLAWIPPVDLPAVELAVQSNHYCHAQKDTGSHPDPEKQRARRKLYVASAICLVVHDLAEIIGGYLAQSLAIMNRRMRTCYGYGQHAHEPLRPLGVFPTSHQDMNFGWHRAEILGALLSVLSIWVVTGVLMYLAVQLVDSGDYEIKGDTMVDHFGLALVGVNLHNGVGPP

SEQ ID NO: 978187 - protein, 171 aa, Homo sapiens
QIDQLLIHQQVELLEVLTGFETNNKFEIKNSLGQMVYVAVEDTDCCTRNCCEASRPFTLRILDHLGQEVMTLERPLKCSSCCFPCCLQEIEIQAPPGVPIGYVTQTWHPCLPKLTLQNDKRENVLKVVGPCVACTCCSDIDFEIKSLDEVTRMVRSPSRVWLCERGLHGFG

SEQ ID NO: 978188 - protein, 103 aa, Homo sapiens
MAKLTYLKTTNSKLCSRTLNTKWKKIHQQTEVSSVNPPKLWDQFPLGAPYRDPGRTSALFFFFFLVDVLNMFWGCEVIYYIPIEIKKKIISTTLRALTDRQEG

SEQ ID NO: 978189 - protein, 135 aa, Homo sapiens
NVDYALANQNDMGGLSPMIRRMSWSPRCSSKPQLIRSGNVGNDRGQTFIGKSDQHRTYVRRFSRTMPCVNHIFLFISSSTRSSRSGRPWANVHVRYAAVHLTAAVAPRVFTWDALSLRPLKERQLLIGICVVPIR

SEQ ID NO: 978190 - protein, 195 aa, Homo sapiens
VSSIMDRSELGRRIAEIDADDCGGCAAQKQKVSLLENNLEQLTKVHKELVRALMPISAVNFLQWNQLTSSSTLRDVTSFGISTETKLPDKCNLMIANAISKTRSHNGQQSGQRIWTEEGIPHRLLNLFVPGNIQQLLQLTQVQFVEEVHLYRTARQWQCEVEEANKCNRLYIPTGVYKYSKYDEDMVSSSHSMNI

SEQ ID NO: 978191 - protein, 276 aa, Homo sapiens
HASEEEEVAPGTEPGGLGCREDGVVEPRCPLFLRLFCLCAPGSAIPAVIFAKNSDRPRDEVQEVVFIPAGTHVPGSRLQCTYIEVEQVGKTHAVILSRPSWLWGAEMGANELGVCIGNEAVWTKEPVGQGEALLGMDLLRLAWNGSSTAQEAVHVIAGLLDRYGQGGSCREDQSLLYHNTFYWADRTEACVLETVGACGLSADPGGARNISNQLSMYKTFSEHRSSEPCQAGDITGRGDEGSQDKQSGFVAIRGFRKAVCFALPRPKLVIPCPKPR

SEQ ID NO: 978192 - protein, 133 aa, Homo sapiens
MAHLMTVQLLLLVMWMAECAQSRATRARTELLNVCMDAKHHKEKPGPEDNLHDSAALEDEFLLFHEHKARKHIRTFLTCTVQLEPLGTMTSECKGTLSKDTWLYGVSGNGDLVHAGAEVGKRGLGVPVQSCHG

SEQ ID NO: 978193 - protein, 166 aa, Homo sapiens
RKQGVASCEAASAVLGGQKRHQRRERTEVRQLSSETDLESGVRKAALVMYWKLNPKKKKQVAVAELLENVGQVNEHDGGAQPGPVPKFLQKQRRIVERLVRRGFQNFFALDDFVEITKKYAKGVIPSSLFLQDDEDDDELAGKSPEDLALRLKVVKYPLDAIMEIK

SEQ ID NO: 978194 - protein, 120 aa, Homo sapiens
MKNRFLVLGLVAVVLVFVIIGSVIWLPYTSGKPDTCTSRAGWHDAKRCSEMARDILQEGGSVVDASHRKPAVYGAHECHQYGHRGGLFFTIDSKHYRNGEVIHARELPPGGIPLVTTPDL

SEQ ID NO: 978195 - protein, 81 aa, Homo sapiens
YGIHHQPSLLHSGTANLSFLMSYFNEREDMWDNVIFQTGGQKHEAHPCCFAGVPVIVIIIFSCLVSVCVRIGTRYCSAPFA

SEQ ID NO: 978196 - protein, 281 aa, Homo sapiens
VAESAARSPFVSHGAHWNLCEILFIEVAPAGPLLLHLLDWVRLHMCEVDSCLADVLGGDNPSKHENFWDLVTVLVLQGRLDEARQMLAKEADANPSCAGMLAGSCGDRVVRTMPILSWLVILRHLTEWELKVAALAEECERHLQDNTFAANPRLESLCKIMLGDEAAFMEQKELLSNWYHFLVTRLLYSNPTVKPIDCTSMPSPAKTCFLGGESSPEALDNILMAALSSNISPGDHKSAASPEALVVRNQLTELLVTADSPVQKVSIGSKGENPPGGYGQT

SEQ ID NO: 978197 - protein, 213 aa, Homo sapiens
MGGASIAAASCAWLQEKFRQHNSGIHDEEIYCKSCYGKKYGPKGYGYGQALATLNMDRGERLGIKPESAQPHRPTTNPNTSKFAQKYGGAEKCSRCGDSVYAAEKIIGAGKPWHKNCFRCAKCGKSLESTTLTEKEGKSTVKGVRKELWAQGIWYGQGAGALFMLSNGVNPVSTTENLHYQMRWVYGLTTGEQQTWMGITSAVGAGRQGDLGI

SEQ ID NO: 978198 - protein, 123 aa, Homo sapiens
LKTQRADMITEYLSVTALLPNDPEYNTVAKQVYSQTCSHIRIEKIARIQNPDLWNSYQAKKQTMDAKNGQTLHAEATLPWDRCRIRATRHSNWLYPQLCRKDMLLAYGKGTYLAVNANYTAND

SEQ ID NO: 978199 - protein, 133 aa, Homo sapiens
EDVGPCLDFTVQELSALVRTAVEDNTLTIEPVASQTLPAVKVPTVECNNTNTCALSGLARTCHHRIRLGDSDSHYYISPSSRARITAVCNFFTYIRYIQQGLVRQDAEPMFWEIMRLRKGMSLAKLGFFPQEA

SEQ ID NO: 978200 - protein, 43 aa, Homo sapiens
DPEQLNRNQSLGKSKGCCQENTDNFPEVGRRGRQAICHQIDPE

SEQ ID NO: 978201 - protein, 168 aa, Homo sapiens
GSRLMEEKQILCVGLVVLDIINVVDKYPEEDTDRRCLSQRWQRGGNASNSCTVLSLLGARCAFMGSLAPGHVADFLVADFRQRGVDVSQVTWQSQGDTPCSCCIVNNSNGSRTIILYDTNLPDVSAKDFEKVDLTRFKWIHIEGRNASEQVKMLQRIEEHNAKQPLPQ

SEQ ID NO: 978202 - protein, 67 aa, Homo sapiens
STVQVFEVGASEQGEPGKSCQGQEGCAVWSPGAFTPRCSKTHLPGFVEQAEALKAKGVIVVACVSSR

SEQ ID NO: 978203 - protein, 96 aa, Homo sapiens
YISWSAEVDPITPIDIPAIVSTQYTQDIDQNQAGSELIATFRGHLKALTVKTLSRRARRIGNSTTGTVRVTASSTARRTQRMSGSFWLYMCSISAL

SEQ ID NO: 978204 - protein, 158 aa, Homo sapiens
GRQRPLRRGPRSGAVLGATRLSSSVVMADYLISGGTSYVPDDGLTAQQLFNCGDGLTYNDFLILPGYIDFTADQVDLTSALTKKITLKTPLVSSPMDTVTEAGMAIAMALTGGIGFIHHNCTPEFQANEVRKVKKYEQGFITDPVVLSPKDRVRDVFE

SEQ ID NO: 978205 - protein, 99 aa, Homo sapiens
LVQDIHKLVGVKFTRITPIVYPATVCTQYDKDIDQNKQDQIMATFRGHLKALTVKTPSRRARRIGNSTTGTVRVTASSTARRTQRMNGSFWLYMCSISA

SEQ ID NO: 978206 - protein, 340 aa, Homo sapiens
  misc_feature (83)..(83): Xaa can be any naturally occurring amino acid
  misc_feature (106)..(106): Xaa can be any naturally occurring amino acid
  misc_feature (141)..(141): Xaa can be any naturally occurring amino acid
  misc_feature (323)..(323): Xaa can be any naturally occurring amino acid
  misc_feature (340)..(340): Xaa can be any naturally occurring amino acid
MCRACPRWDGPGICTFPHWRYGKLQKISNVETSVHVTETLENNLYRHYNNSNGRGPIRRYVVGTPSGVTLTTRGQPLPCEMRXNTDNNHWELMGAADTTAKDITMXADRTHNRERWWGCPTKINERRTCETNTTHAHHSRXAIDGRPSYEIYTQEKLALDEAGTDNVAASIDYDTRLGDTKRAPRKEQHHGGRGGHPTNTGRADKVANNTGGDEQAHANGGTRLDANNTGGNVVQPTTPSDIDLHKKKEVSYTDGEQSDNTIQRDTRAETAKHGTRRSLEMNGETDARSRVKTAVDAAQTRTHSPPATYRNPSQNRRTHDTDXQQQRKSEMTALVNQLQX

SEQ ID NO: 978207 - protein, 37 aa, Homo sapiens
DQVNDSIVTVSTLWRGMPCDQAGMGYVAVGDHEGWPV

SEQ ID NO: 978208 - protein, 222 aa, Homo sapiens
TVSGAKPRGSSVNSAKKGTCSSRSTATRLCAMTVRLSSTGTVTMTTRPRAPSVPGSREEAVTIPGTWPRHGCLEHWRTPGTVSTPPAGACWPCPPDVHSTLETSPPPPQRITPKTPRNQGPKRKGLGAPGNKPTGGRKNHRGAEYHGICEWRWQEIEGSKTRAWAPSRSDTPLGDDRHLWVWVHTTQKRVGKLRHTNGKKTLQGALKQPRHLWHNRNDPGHR

SEQ ID NO: 978209 - protein, 68 aa, Homo sapiens
KRGVKSESEITDKVYVNTHKVAQSGQGHKEEHPWDRLHMTLPLITLLYKDLGVLTPSAVSDELIKLYL

SEQ ID NO: 978210 - protein, 173 aa, Homo sapiens
SVLLRLHAAGLNTPKLHAFSTGHLLVKDMVRTGLLMNLMGVLLLSLAMNTWAQTIFQLGTFPDWANTHAANATATASSLEQQHSSNLLSPAGDFVLGWAFFSRRLLLSLAARSLQADQAILSCNLIGGSKQGHPPVVSWSHRVTVCKHLSLSFSCISKPAISCTSCLWPVEQA

SEQ ID NO: 978211 - protein, 121 aa, Homo sapiens
MQSVLCSNDAKYTPVTEKLSVSHSISHSAIATTKLNGCTFLSADLLLKGLNLETETNHALSVYFEKTIHKKGAKRQFPMGGTFSWRYCKAKSVHFISCPLTDSVVPPLSCTGSGSSFGSYS

SEQ ID NO: 978212 - protein, 201 aa, Homo sapiens
MKELAYMKALYERKLPVPKAKDDNRHAVIMELINGYPPNVRYIMSKTLHQYMMTLLGLDSQPEKPWDWFMEISMNSVSWLDTDDTYPVMNNGEVVSRSHQKARADIGQRHVNGIRNELTGNALNNDRREYTTVGNKKRGNQQERQHTRESQHKTASHRQKNKPLKTGKRHNRHTEARQNTGRNREAQLKRCREQEAASDKP

SEQ ID NO: 978213 - protein, 86 aa, Homo sapiens
YDRGASVQLKRVQRRKSKSHMASLYRLLCVNTAGSDTDPPGHIPPPDCLLTIHTCHLILNPVPNFSTLKKKIHPKPTSSFCSVYSL

SEQ ID NO: 978214 - protein, 298 aa, Homo sapiens
SKAKGRVRRRRLRAKLRAIEKEPARTSPKLVGNSGPRRQQERNAAQRRQLPGDASIDRTVSTFPSSGCEGSETATGARPLQSRQRQDPGHKSSPETPPDVAGAPGDRVHAAPCQGERDAPWQPGRWSSLPGSNFSCKPFGPNLSRVHRSPSGSGVERLIYSEMSERKEGRGKGEGARKKDWDPGEARGPTKGRPRCPGNGPPQNWKATLRAQGVQDCMGPQGSVSFGCETKLLRYVPHSEFTWFPDLGSELEPVGNKPTKVRDPEAAQGKVQGLNQESVPGYSGELLQGTESMERLCL

SEQ ID NO: 978215 - protein, 85 aa, Homo sapiens
LVDYAQPLSKSWVMFCLLIRSLQRASIGVWWWSIRVRVRNWVQSRRLFKEMTKINDVIVAVTMACSVIDCVLSDELKYQLIIGGL

SEQ ID NO: 978216 - protein, 44 aa, Homo sapiens
SRYLPSRCRMDDREDLVYRRKFAEQAERYDEMVESMKKVAGMDV

SEQ ID NO: 978217 - protein, 86 aa, Homo sapiens
KDFGPFLQLGSRAVLFQHPLQSEYIIITTTHTSTTEPFLVDGPTLGAQHLEAGGSLTRHVTQEFVSRTLTTSGTLSTHMDQQFFQT

SEQ ID NO: 978218 - protein, 72 aa, Homo sapiens
  misc_feature (20)..(20): Xaa can be any naturally occurring amino acid
  misc_feature (59)..(59): Xaa can be any naturally occurring amino acid
RTIAHFSCWVSSEIDQTELXGALNHHGDSVVIRLYTSTQLSAFHLMSGMPFPKRVSHLXFFVTFKKKSYLIQ

SEQ ID NO: 978219 - protein, 66 aa, Homo sapiens
MPQARLTTVRQPMGRRAPFVPRSPCGQSGSVVPNTRARSDTLAGCLGPHQQERVQAGQAVHLDPQP

SEQ ID NO: 978220 - protein, 152 aa, Homo sapiens
RTRGSGLSTLLGILYEDKERQDFIFTIYHWWQAVAIFAVYLGSSLPMKAKLAVLLVTLVAAAASYLWMEQKLQQGWSRGSRCIPKPQHKVRGYRYLEEDNSDESDMEGEQGQGDCAEDEAPQAGPLGTEPAGPCRKPCPYEQALGGDGPEEQ

SEQ ID NO: 978221 - protein, 137 aa, Homo sapiens
HTTVVYDGGYHNNLLYMDSWDAQRPTRRHSVKTTSSPHGKSHWASATVIKHHCKTTIIIGFIVKIGIIRLCTSFDGRLKYKIKDDLYALYYPIGFSSNKNNSVSGMRTAFLEKLDGGLSVLSKFFDFSTFDPNNSSC

SEQ ID NO: 978222 - protein, 37 aa, Homo sapiens
LQPEVRPHKTSENTHRENSMYVTDVGRTFYKNSDLIR

SEQ ID NO: 978223 - protein, 100 aa, Homo sapiens
VDLLGWTQELLDLMQRERGKLDGQDRYDYGFFTWGSHTADHAYVQQDFMPEDSSNTFTNMNQTTTCGLDSGPPRLPLERLTRDVYPWGPSMCAPCPPHHC

SEQ ID NO: 978224 - protein, 168 aa, Homo sapiens
  misc_feature (4)..(4): Xaa can be any naturally occurring amino acid
VTLXSRTLGERIGLLAFAEKEYRREKEKKHFPEFLQPCLCDSYYYEDGGMKPRVMKEAVSTPSRMGHQDQEWYDAEIARKLQDEELLAAQVDMRAAQVAQDEEIARLLMAEEKKAYKKAKGAGDIIFGQKKASTRVGAKNSYKQQIPSQKRVVNLTILRMKGQHGHHH

SEQ ID NO: 978225 - protein, 99 aa, Homo sapiens
AEYLCIPLSSNSTCAVVIVDLYVESVPEQVLVRRGSCLITKLMWKVSQETLSEEASSQATLPNQPVEKAIIMQLGTLLTFFHELVQTALPIRQLCGHLC

SEQ ID NO: 978226 - protein, 220 aa, Homo sapiens
AQPGVLFFADDDNTYSLELFQEMRTTRKVSVWTCGTVGGRRYERPLVKNGKSCGWVHRMERRQAFAIDDGWVCVVSLQVILSNPKAVFKRRGSQPGCKNLTFKADNNQLKNWNQKASNCTKVLVWHTRTEKVNLANEPKYHLDTVNIEVYRQDQQVRTGSLERGLLPIQVLFLCLQPFLTADGRRFDSYLEMLQKIVLSSLCLDCVSELEEFVGVKATCH

SEQ ID NO: 978227 - protein, 299 aa, Homo sapiens
LPPILLGKLGSDPQKKTVCIYGHLDVQPAALEDGWDSEPFTLVEREGKLYGRGSTDDKGPVAGWMNALEAYQKTGQEIPVNLRFCLEGMEESGSEGLDELIFAQKDKFFKDVDYVCISDNYWLGKNKPCITYGLRGICYFFIEVECSDKDLHSGVYGGSVHEAMTDLISLMGCLVDKKGKILIPGINRCRAPVTDEEHALYDHHDFDMEEFAKDVAALRTLLTAARKDIPDAQIGDTVLYLLEIRRRFFGQGRRLCSPERGRQFSSGRARHDTEWYETVSTATLRSEAQSPGSARAAGL

SEQ ID NO: 978228 - protein, 143 aa, Homo sapiens
LLALAGKAKTKGLQSGVDIGVKYAEKQERNFDDATMKAGQCVIGLQMGTKDKCASQSGMTAYGTRRHLYDPKNHILPPMVPLHHRASQMGTNKCASQVGMTAPGTRRRIYDNQAGHRDKCDYSSMSLQMGYTQGANRAVRSSD

SEQ ID NO: 978229 - protein, 130 aa, Homo sapiens
LLVVQEWEHFGHLTLLHELRTGVFHTFLNLLDKQTGQDHSDYELVCGISTSGPNRNLGTTETCGVCIASPNPSVRCGTTRVGLLATVLSIIIKQMLLHDHHSWSQLKATSFKLPSGHPEFSARHDKGNTS

SEQ ID NO: 978230 - protein, 167 aa, Homo sapiens
QHGANVNAQMYSGSSALHSASGRGLLPLVRTLVRSGADSGLKNCHNDTPLMVARSRRVIDILRGKASQAASGSQPEPSPDQSATNSPESSSRLSSNGLQSSPSSSPSLSPPKDAPGFPATPQNFFLPTTSTPAFLPFQESSEALAGPYPLPQLQEAAETDGGADPDS

SEQ ID NO: 978231 - protein, 109 aa, Homo sapiens
CIVMLMMMQFSHSSLLTQRSVCVSIGQGLRGMDVLRHRCSSSQFLTPGPVSSPSWVIHFDSFEPFGGAVSGSCGFYAFKEFLQTREFLLAALCVSPIGDLRQYVLQSTY

SEQ ID NO: 978232 - protein, 183 aa, Homo sapiens
MRALYKDTCLQGGPAQADSPQPARVLSRPQAAAASTRLVLTDADDGLNPFSETPPAGSPDALLPYQSEARRHTFLGGLPGLSPLPERLAPCRELLHFYPGIVNPRGVFTLRGVGVPPCFVSGLRGAALACVRELLYDGAALAPVLTLLSRGHVRDPWMGSLGALGSSGTPMGGYYGDNQVGFR

SEQ ID NO: 978233 - protein, 148 aa, Homo sapiens
MLSSTTPQHRTAHIVVGGPKLYVPKSDMAPVNTGDSSLEYVGRASTIVTGGPDSSITGVNPTNWQVVFTVFPQSVSKCCRIVSFTVVTRGRFDTSVNYREQLPRTFGYHLRFTYCLSMAVRVAVIMFESEWDPDRLTAWGPHNKQRII

SEQ ID NO: 978234 - protein, 41 aa, Homo sapiens
LVVSLVGLDRVPESRVYMEPLRIRQLLRPFFLLADLLYDEE

SEQ ID NO: 978235 - protein, 154 aa, Homo sapiens
GNSSDYCPGNDHESPLYALDRKAVAKDNFEILVTFIYTGDSTGTSHQSRSSYIPREILWGHRLHECIGSEEKYYKVNCVAGLTGSVEVYAPFCSAKQLDWEGPTSQQLGENVPCPRILQFLTGNTRRRSFSAVCCGDAAVRTQRRPSVSPQDEL

SEQ ID NO: 978236 - protein, 245 aa, Homo sapiens
GSVRLGSPISVQFGSVMLRQFSMLRARSPLSAADRPEPRCCPPSHQRGASPQASQTWGLLQARSSLSNEWHDAVSRKTFPTVNPSTGEGHLPGGPKGTRRTVEDAVKAARAAFQRGLALAPRWMRSDRGRLLSRVADLIERDRTLPSGLWLTLDTWHSLIVNLYLVDLDMVLKCLRYYAELGWTSTMGKNHSHRRVTICQTIPAMSLVGVCGPDHSVELPAPDASMKLGQACNRDTVGRMQVADK

SEQ ID NO: 978237 - protein, 147 aa, Homo sapiens
KKGKKRTQDDLMNMMIDDSAASTSFQTQPGQPQQGYIPPMAQPGTAPVPGAPGMPPGIPPLMPGVPPLIARNGTSYARHATWIASSEKYTQSFCGENIMMPMGGNDAPWTRNTTSDAWNATRYAPTCSTSWNSFHDSSTGCFSARYS

SEQ ID NO: 978238 - protein, 139 aa, Homo sapiens
MSYCRQEGKDRIIFVTKEDHETPSSAELVADDPNDPYEEHGLILPNGDINWNCPCLGGMASGPCGEQFKSAFSCFHYSTEDIKGSDCIDQFRAMQECMQKYPDLYPQDEEEEEEAKPVEPVEETADTKVSAAKEQGTSS

SEQ ID NO: 978239 - protein, 180 aa, Homo sapiens
FDVTLPGSWRPTHNKQDFADAYGVSVTCSEQCGSPGRQYCKDIAIVHRGIIHFWYEFGYLSVNWNHPPSTDLRLQIAVMSYGNPHHHPVRFVSDMEILPFHAEFCGKTITLTPGFAPGTLILNRTGVRLLNKTQKVPLGTFRKDMKTQEEKQKQLTEKIRQQQEKLEALQKITPIRSQAD

SEQ ID NO: 978240 - protein, 259 aa, Homo sapiens
AHQDGMLQDLSAGVFFPPCSQHRTLAQVPDNDEQLFQTIRLKVGFSWPPTENQERTPQPMFRTRVCLQQEQPFKFSYGEKCLYNVSAYDQKPQVGMRPSNPPTPSSTPVSPLHHASPNTAHTPKPDRAFPAHLPPSQSIPDSTYPMDHRFRRQLSEPCNSFPPLPTMPREGRPMYQRQMSEPNIPFPHKALSRSTTTQSMNIPPWLAVQPAKVPPPLMIKQEPRDLQYDSEGASCNPLYDGRRLPGHSSRTERCCLRRS

SEQ ID NO: 978241 - protein, 91 aa, Homo sapiens
ILQVISKSSPRLACFSQSVVLTLSCVNFYHYRDHAMDWVRQAPGKGLEWVSTITASGGSTFYADSVRGRFTVSRDASTNTVFLQMTSLGAA

SEQ ID NO: 978242 - protein, 146 aa, Homo sapiens
QALIPAEQSGGVGPIPSYTLIVVNTRFYCSSPQSAYKHAGRKIGRESPRRLTPDSSEPVTNARAPAVGRTLSYAESGALGARGSLLPGGPVSLLVRDSRHLWHCWLLAPSYRDSEAQGERTKQELLAGLEIKEGYVLTRVHRTLRT

SEQ ID NO: 978243 - protein, 161 aa, Homo sapiens
LGKRGIFRPVSCLLDLLPFTLPVEHSYEVRKKKKQLMPWLLVSFVGLKSRSRWGAGCWGLGLGGLDLAYGVERLYLGVCVGGLVAGIGLGKASRKMGFRGRQAFAVVGRVLCDSGGSCSVRILDSGRRPGPLRQGQCPLGTIQPPSVVLVTIQQGTFLRVR

SEQ ID NO: 978244 - protein, 35 aa, Homo sapiens
YARPEYQHALLCDCDYTGLQCRWRKMKVGACVFVC

SEQ ID NO: 978245 - protein, 235 aa, Homo sapiens
NRTHKFLEKAEGLCKISGVIGPYRETVDSGEKKVNEIKDIRGPEAQQRNHVKNIGILFEEAEKLKPKMSQKEMAQVEVKLTDTASQSNSTAGELGALQAEAESLDKTVKELAEQLEFIKNSDIQGALDSITKYFQMSLEAEKRVNASSHRPQQHCGAVCPHARQSRRSECGARVSVQGAARRNRHASLDERGRQNCKVSTCRLVAQMTCGTPPGLTVLKVNGGGPNCRTDEGEQK

SEQ ID NO: 978246 - protein, 34 aa, Homo sapiens
HIFCWDQEEDVETGQLDQGKATMDDEQDIEQDRE

SEQ ID NO: 978247 - protein, 263 aa, Homo sapiens
MGYDVTRFHGENVDEDLICPIGSGVLEEPVQAPHCEHAFCNACITQVVLSATDMSRWTVCSDGKPICAQYLRIMRNMLSKAARFACDNAVFGCSAVVRTGEPSCLNLSDCEHKPKRAVTCEQGPVGLGGCPKDEADRPLIGLATGLNGCTAKQETHRLREAGQESSGLKPTHTLGRGENGTPRPAKDHTGVKPRGYTRSFGNRGERTGDETTNTRGEQPITERKHAEEDQNTQKCAEKSDGGRDTLTYKSSTEQPAMTEPVTA

SEQ ID NO: 978248 - protein, 88 aa, Homo sapiens
DVLSFKPDDGNSSYVQSKPDIQYAPRSEQEPTTLERIISKPNVLSDSVRSSHAPRNYIEDGESDGFLRCLSLNSGWILTTTLVLSVVV

SEQ ID NO: 978249 - protein, 79 aa, Homo sapiens
MNSSDTMYWGGAERLHGNQRKPPGFLETVREQISLKNYDPQNDKRFSGTVRIKYHSAPIKFSVCVPGAPQQHCDETTGR

SEQ ID NO: 978250 - protein, 41 aa, Homo sapiens
ASVVVGPGSGCCAVSELRGDGAVYAGAVLCLSFVVVGPCSV

SEQ ID NO: 978251 - protein, 136 aa, Homo sapiens
SNRARYRLFVFPAVSSVKPACNTRMGRKERESLSAAWPGMVPAHGFRLEEISLWRIWNMARKENQNTLFELQGARKSLEVPRGDSADGEGGTLRSHREEAKEQHQKLWEEQLAAAKAQQEQELAADAFKELDDDMD

SEQ ID NO: 978252 - protein, 246 aa, Homo sapiens
IKNSSVIYLVCLSEKNIEIALDGLSGPYNSNGQLGRFQILHMIFVLICHARVGSSHSLENFTAAIPSHRCWVPILDNDTASDNGSRILSQDDLLRISIPLDSNLRPDKCRRYIQPQWHLLHLNGTFPTVTEPDTEPCVDGWVYDQSTFLSTTVTQWDLVCGSQALNSVAKFIYMTGIFIGYIMGGHLSDKFGRKLIFTVLFTENGPSLKTVCSFAPLLPQSTGHFPIPVRDFFLQPGGTKTGFAQY

SEQ ID NO: 978253 - protein, 36 aa, Homo sapiens
GEGSRAPDEAESMGTTVKAGTDGTVGGGLEVGLFLS

SEQ ID NO: 978254 - protein, 465 aa, Homo sapiens
MVRGPLASATCVHQARPLPGALCPDFRGCPAPSVFLMVWKTHMAIPPLHPRDDATPMLWHPGLCGLHSVPMWTLLGEAQSPLTMGHVHSSDGILTEFSQLVPHSLLQMGHVPIALVLASTRGRLTTDGSPYVIPWTLNGLPSVDYEDSSSPLITVKKPSSVHLCLPTEYPIIHLNHLARAMALETSSDIMGKQSSVDNPYTWLVPPLYEPQNTPKATTGSLQVDTHMAYGKPMHGYRATELVPYGPCAMKESTAEICFCLAVVMHHSCPRELGGLGQGIERGHQEQRQQGWAWLGRPNIKRCPPPNPETQYKSDTPDAIGVAQRPTSQTTRGTVHAHHSPARSDHRGVAQDEQRHSSRTERPDPPPREEENGDKLPPQPYNKTTREQQHSTDNEDMQTPEKRRERNKNKGSGVRKRSLHIDSGTTERPARQAATPEKDWPTQYKSRAQYRKPSTNIISLPQNEAT

SEQ ID NO: 978255 - protein, 192 aa, Homo sapiens
YSKTIGTSYPDCQNTTTALFLSDRQKQQKVFLYGRWVSTTCLSTHHKLCTFILKNPAENSDSGTGKTELEKKNRKGKYKENGSVSSSETPPTPAPPDEINPPPHTMKEEEDDNWGEDTTEEAQRRRMDKISDHAKVLTLSDDLERTIKERVHILFDFVTKKKEEGVLDSSDTEIVAEAERLDDKTMGPSGPN

SEQ ID NO: 978256 - protein, 75 aa, Homo sapiens
  misc_feature (3)..(3): Xaa can be any naturally occurring amino acid
QQXMTTELFHRQALYLPTCISRHGCHCGFTAPSESLISLIAIEVIVGVLRWALDEYFRTEERIKGLMHGTDLPSL

SEQ ID NO: 978257 - protein, 328 aa, Homo sapiens
PGRSLMRSRKLTGGVRSSARLRARSYSSASLASARDVTSSTSAKTTCLASSSHKATDRRTSKKFKYDKGHLVKAELQKLDPKSDISSLPKVAPVAPCENKFAEDSAEAAVSVPESREPPQGCSTPESEEPSVKAENGLSTEPSSAAAAQEPDDSSAGQAEPVPRTEEVRASVLQMDSSIFLDDDSNQPMPVSRFFGNVELMQDAATASSSYPSMSRQRIQKNALQRQDDEDDAEGKSCGRLQPVSKDRMASSENTPETRGHQGTAWQNAQGTMLARRRGGEQRKTRKSPGAGEKTDIFQRTIDPTERNHREKKPLMKEEHTRRGRICK

SEQ ID NO: 978258 - protein, 204 aa, Homo sapiens
RVFTQRIVLCWTRARETGGAEGTGDAVSGENLLEEALLSREHVLELENSKGPSLASLEGEEDKGKSSSSQVVGPVQEEEYVAEKLPSRFIESAHTELAKDDAAPAPPVADAKAQDRGVEGELGNEESLDRNEEGLDRNEEGLDRNEESLDRNEEGLDRNEEIKRAAFQIISQVISEATEQVLATTVGKVAGRVCQASQLQWQKE

SEQ ID NO: 978259 - protein, 78 aa, Homo sapiens
SRDLSVWHHPGHLRDLMLGVAEVIAMPAAVLLQFLILGLIPGLGFCPAADGNLLILGLDLSDDAIQVQVADVVHGEDH

SEQ ID NO: 978260 - protein, 68 aa, Homo sapiens
GSPREEGCPLPPEGEKHRCAQPAELGMHRHCLLLLQHTISPAIRLARRAWAFAEALESCSLSSPSCLH

SEQ ID NO: 978261 - protein, 207 aa, Homo sapiens
QQENRILWERGQVETGGAEGTGDAVYGENLCLEEALLSREHVLELENSKGPSLASLEGEEDKGKSSSSQVVGPVQEEEYVAEKLPSRFIESAHTELAKDDAAPAPPVADAKAQDRGVKGELGNEESLDRNEEDLGAEDGWTMDAEADHSGGSDRNSMDSVDSCCSLKKTESFQNAQAGSNPKKVDLIIWEIEVPKHLVGRLIGKQGR

SEQ ID NO: 978262 - protein, 285 aa, Homo sapiens
MATVWDEAEQDGMGRRCSRCPRKRLSSAQRLLDSEIKIMKSEVLRVTHELQAMKDKIKENSEKIKVNKTLPYLVSNVIELLDVDPNDQEEDGANIDLDSQRKGKCAVIKTSTRQTYFLPVIGLVDAEKLKPGDLVGVNKDSYLILETLPTEYDSRVKAMEVDELATEQYSDIGGLDKQIQELVEAIVLPMNHKEKLENLGYPSPPQGVLMYWAGLKQGRLCLPEDCACQNKGNFLKLAGPSGVVPDVIGKGAKLVGKLLAGQGKAIYFSYHWCRGPSSTGKGATE

SEQ ID NO: 978263 - protein, 150 aa, Homo sapiens
MALVQESEATLQSTYSDTSAQPTCDSGYGTWNSGTNRGYEGYGYGYGYGQDNTSKYGINQRLDMVPHLETDMMQGGVCGSGGERYDSYESCDSRAVLSERDLYRSGYDYGELDLEMEMGYEGQYDANADQFRMRGTDPFGPRAQGWARNA

SEQ ID NO: 978264 - protein, 95 aa, Homo sapiens
AVTLKNLTGLNQRRGEKGTRVLGGAAVDMKGFDKMLPPIEQDVNENTLKNLESYDSHKAGNHNALAAVLTWNWATSSVPNARPGLLMPFALQLCV

SEQ ID NO: 978265 - protein, 47 aa, Homo sapiens
DHAVVILRERKCALHLEAMGLSNNFKPLGYANPVHLYTHTYECAHTY

SEQ ID NO: 978266 - protein, 108 aa, Homo sapiens
  misc_feature (8)..(8): Xaa can be any naturally occurring amino acid
MEGADNQXAGEQGRPVRQNMYRGYRPRFRRGPPRQRQPREDGNEEDKENQGDETQGQQPPERRYRRNFNYRRRRPENPKPQEGKETKAVDPPAENSAAPEAEQGGAEE

SEQ ID NO: 978267 - protein, 71 aa, Homo sapiens
EEAKSSDRGGEGREAQQVTWRKPHTDLLMLLTQAGCALNSGSPPGIGPCYENHGYQSEHICPPRPPVAPNG

SEQ ID NO: 978268 - protein, 111 aa, Homo sapiens
MITLTSLGTTAVHGKMCTDVQENKCSWLEVQCLQRATPKQYQILKENYGQKEAEKVARVKALYEELDLPAVFLQYEEDSYSHIMALIEQYAAPLPPAVFLGLARKIYKRRK

SEQ ID NO: 978269 - protein, 82 aa, Homo sapiens
MGETIVGIYLQSSYNKQRLDQPLEASTWLKNFKTTNERFLNQIKVQEQYVWNTRDSTGERESSGRKWLNRANTGEGTPTMQC

SEQ ID NO: 978270 - protein, 337 aa, Homo sapiens
EVEQPGGGLRAGSRKEGSGRRAPLPALLSAGGTVGGQSRMEKLRLLSLRYQEYVTRHPAATAQLETAVRGLSYLLAGRFSDSHELSELVYSASNLLVLLNDGILRKELRKKLPVSLSQQKLLTWLSVLECVEVFMEMGAAKVWGEVGRWLVIALIQLAKAVLRMLLLIWFKAGIQTSPPIVPLDRETQAQPLDGDHNPGSQEPSYVGKRSHRVVRTLQNSHPCTHGYWGGPQQREIGRNAAGGLSRATKTLGVAGDPWPKLGHLPGPGWTWPAWEYGRTDLGAPLVQCWVRHFSTRAPAGATTLPQTAGSPRGRHPGKYREQHGFTSSRATLSHVTH

SEQ ID NO: 978271 - protein, 107 aa, Homo sapiens
MDETASRRGRLGSQLLNNDIVYSRGGNPGPWLTTQQGGDPNSYRDEAEWRETTLAGPESPATTSYSWAGALRLHYAGKCSFGSGDYKIHVPLTSRSWKRMQICFHGD

SEQ ID NO: 978272 - protein, 116 aa, Homo sapiens
LSILITPGIARHEVYLRAQAHAICKYGCDCPGSRPGCATAVRKHELKELHEYQMNTEPGGREELAVTITKRVSMNRMESVWRKGSKGNQPISSGLTQIKDICLAIQKITFSCVGPS

SEQ ID NO: 978273 - protein, 156 aa, Homo sapiens
RDPGRGGYRQWMWSEEGEVSSSADPHHPLQTRQNTIWWTSILFEISPNLYQDLLTLRIVLLNFTLDAFLLQCGQIHLPSGAFSMSGSRQTMWHARGQVSTTDDLTDLLAHLQIVLVVCLITIHSSHLLLAFLFLFSGSAITCGCGYYGWLAPSETE

SEQ ID NO: 978274 - protein, 163 aa, Homo sapiens
EREARRRGKAEEQAVRQRELAEQELEKQRQLAEGTAQQRLAAEQALIRLRAETEQGEQQRQLLEEELARLQREAAAGTQKRQELEAELAKVRGRDGGAAGQQGEGRGESRGSKQVRKSKQRLEGRCRAGSVELAGGMAARLACLGWNEAKTGSGSEAEEDRGR

SEQ ID NO: 978275 - protein, 77 aa, Homo sapiens
LSAASNLSRSPRHYIDELDVYDLAQQKSAQMSGLGDYVIEDSKCGYFQAVPKESWLISTYLGILLCFLKSPNIFQAS

SEQ ID NO: 978276 - protein, 138 aa, Homo sapiens
NPSSDLLTKGDLEAYCNTHEGKLLDKGIHPLTQSDSLDGHSAITWNTLLILKGVSKLPFAVSNPYPLLLVNIGAGVSILTVLVPTINTEGVTGTSLGGEKFCGLVLSAYRARRYTEEALEMASRGDSTKVDNLVRCRY

SEQ ID NO: 978277 - protein, 81 aa, Homo sapiens
CHQTTESHMVENVYLVLLQWHMDVDLPSGKALVSLPESFSVGPQQMLIAQNNTVHPMTMDSSSDLSKELAIRFSANLQQWQ

SEQ ID NO: 978278 - protein, 115 aa, Homo sapiens
SAEGRGNISYLRMFLSLYSKRRAMRIVFLKVDLRRISGTGSSSSTSMADEFVCLSLFSPNLTLDGFTDGHLASTLANLCQVSSREAISHFSQELQVHILRNWGLAQVSLNGLLGT

SEQ ID NO: 978279 - protein, 69 aa, Homo sapiens
MASPDDEFSDFVIYSDEKRVGEGTESPGGKRGYILRDNNHSRAVGQESSQDCLYKEAKYQDLDLHPLLE

SEQ ID NO: 978280 - protein, 171 aa, Homo sapiens
MSANFGLCWKYPNPSQIWAHSVLSSGKFYGDECETIKVCRQARCARFYALSASFEPFSNKGQTLVVQFTVKLEQNIDCGERLMKLLPNSWDHTDMHGDSEYNIMFGPDICGPGTKKVHVIFNCKGKNVLINKDIRCKDHEFTHLYTLIVRPDNTYEVKIDNSQVKSGSLED

SEQ ID NO: 978281 - protein, 133 aa, Homo sapiens
LINPTMRLTLFMYMDKRNNCSSMISQNRNYITEAANHLCMWYAWSMHCQPIPNPLHITVPSIFQATTLWTASTYLLHRSCQVSTACKFTHTYSHFTSLHTSRQTQLPPTPQPSLALLLHAPSQRTLFCTLTSL

SEQ ID NO: 978282 - protein, 59 aa, Homo sapiens
MQNVPMDEDPAPRHAVKRNVHRNNAHEDINKPLAHSNEILLCNTNMRSKYRSTKMMNID

SEQ ID NO: 978283 - protein, 198 aa, Homo sapiens
TGKPLEVSCTLSRLADENFKEYTESPPSEYDKVIQLDTICSGSLNPYWASMKNLQPHVIALRRNYLPALKVEYNTSAHQSSFRIQIYRIQIQNQIHGAVFPFVFYPVKPPKSVTMDSAPKPFTDVSIVMRSAGHSQISRIKYFKVLIQEMDLRLDLGLIYALTDLMTEAEVTENTEVELFHKDIEAFKEAYKTGSLVD

SEQ ID NO: 978284 - protein, 110 aa, Homo sapiens
GPQKVILEPAPRVIGSRSGLSSRTSSLASRTSSEMTLDRSETSLIAQKLLPDIWMSYLKITDEESPTTPLLDDMDGSQDSPIFMSAPEYKYMPPPTYTEVDPCILNNNVQ

SEQ ID NO: 978285 - protein, 30 aa, Homo sapiens
MAAMAYRTSNAQSGNVYRRSKARVITEEEK

SEQ ID NO: 978286 - protein, 52 aa, Homo sapiens
MVAPRFGHYVCTLVRYEGGGGQMQELRRVRAGVMSDKDHMVTMHDVLDAQWL

SEQ ID NO: 978287 - protein, 202 aa, Homo sapiens
LTQLSRTEMNVEEDMKKPKKKSQFKSAVVTKEGQMCDIWKMIEHKREKIQRLREENDIARGKLEEEKKKIRRALISGPVTLHISAKAARRTNKGSSVGTTDAGMYLDFENEKLDRQHVQHQLLVILKGAPKSKKSNNTVGILEKLHEFAITEPLVTFQGETGTEKKLPPHQKVPQLHSMKAWWNVPVQYTDPALSIGTACHV

SEQ ID NO: 978288 - protein, 69 aa, Homo sapiens
MDHLHGRDHITLSRLTYMSGRLVRSDCPMRENITLRGLVLPVGGIQDRVLAAHRAGLKQVIIPRRNEND

SEQ ID NO: 978289 - protein, 60 aa, Homo sapiens
YSNYITSQNAMNGLGRRSTTSNTLAAAAALYSKSIFQNGMRRRDARPRGPETRAETSQQE

SEQ ID NO: 978290 - protein, 105 aa, Homo sapiens
MFDIHTALHPPICVQKAAFRKLVANHALLHSRALHREILVGTQTRISREKAVTEVELFLRVCKCPVIDVHNISILQLTFQHHRMMRQKKKSEGLCPRFLLKLCCL

SEQ ID NO: 978291 - protein, 71 aa, Homo sapiens
LEDPVHCAMKASFIESYSICKVGLTRVTKHKNNIQLAKGADEINNQERIYSCTSLIQLNSLQYTKPINNVV

SEQ ID NO: 978292 - protein, 128 aa, Homo sapiens
MSWYHQTRSSYRFIRFALDIRMPGVTPKQSDTYFCMSMRIPVDEEAFVIDFKPRASMDTVHHMLLFGCNMPSSTVSYWFRDEGTCTDKANILYAWARNAPPYRVPKGVGFRVGGETGPKYFVLQVHYG

SEQ ID NO: 978293 - protein, 53 aa, Homo sapiens
LDGSRRRTMGVLLGELVPPSHDLSAHGDGPRLSRLGVKLAGRRKLRRRRRKLR

SEQ ID NO: 978294 - protein, 150 aa, Homo sapiens
RSRTSVRITAASTSSPPPVISLRPLDIGLMKRAEQRWSTIVPSHRARLDTLYPGRRGSTFNTGGSPQNLDVQLASKLYPTDRNLMKDSEDRLIEREVPGDVIPYAVEGSDHEVPGQQGKRILGRKTKWGTIEVEKTTHCEIAYLREPSHQ

SEQ ID NO: 978295 - protein, 35 aa, Homo sapiens
YPLNTFHVSAILARSHIISQYPTHVDLFVIAPPCL

SEQ ID NO: 978296 - protein, 112 aa, Homo sapiens
MVTSGSLMFRCWATEAAPAALGRWPTPPEMPGTSRRLNTRNEKAPVDFWLRWGLTPSWTQMRRKAMTQGLSSSNIMVVGHERPWVNPPLINTLFKSKISRKCVQPTSEERIP

SEQ ID NO: 978297 - protein, 146 aa, Homo sapiens
  misc_feature (39)..(39): Xaa can be any naturally occurring amino acid
MSPVGPRGCRGHLDVLGWEWGAVSGLKVVQMFRARNTAXFRGHLHSCPTPRSRGSRARVLPGRSGGQTDTSPLPPPIGYKLRLPPAVRRPPSTASPLEDPPLASAGYTMLQELQQEVICSVGHDVLRNRRGDDLILGSPDQQYRTW

SEQ ID NO: 978298 - protein, 168 aa, Homo sapiens
PGHVELFLLPERWGAATADGKLDKLQGIPLNAEVQDPEPEHEVMTQDALCARPLELLEAEEDCKMALRCSALSICAGKWHDQEAEHVPEGRQAHAHATLDTPVAAQASARAVGLHVSQEGQVVVLAEQQQDDTPHPHRTHQHEVEGPYRIHGQLTPLVREEGVLESLD

SEQ ID NO: 978299 - protein, 102 aa, Homo sapiens
QTITLNIEVWNYFFDIISKHTVNSNDPQITVNSLKQGCTMAVMQSMGQIEIHGSATVRITFHFFPRRATVYGAEVNVLPFEDYWHTFSFFTSLIDWKQPADH

SEQ ID NO: 978300 - protein, 193 aa, Homo sapiens
  misc_feature (165)..(165): Xaa can be any naturally occurring amino acid
  misc_feature (175)..(175): Xaa can be any naturally occurring amino acid
RDGSRRLTLKHIHGLLVPEHLTYDAGMLQNVPLRPPPFKQCTTVRPSPPLYSSCHLSTWRMSFKKERLDTGVSLYIGQPRNWNCCTIQISILGTGGIVNAEYPADDVLFQVSRDKFHLDGAVSVYSVFWPVLWTQLGRIHIIEHNYGCAVIIQDQSPKVFHCVWXRMLRDYKSCXLFIAGHEGSIDVVAALPI

SEQ ID NO: 978301 - protein, 222 aa, Homo sapiens
VLSQRTRLATHQETYTGQGIGEEEQLSSKKQKTENVFVDETPYSCNVTYIPLMDNADSSPVVDKREVIDLLKPDQVEGIQKSGTMKLKTETDKENAEVKFKDFLLSLKTVMFSEDEALCVVDLLKEKSGVIQDALKKSSKGEETTLIHQLQEKDKLLAAVKEDAAATKDRCKQLTQEMMTEKERSNVVITRMKDRMGTLEKEHNVFQNPMHVSYQETQQMAM

SEQ ID NO: 978302 - protein, 118 aa, Homo sapiens
AALLLLHALKAMDYHWIETLQSDTKRVRKVLWTTASRHDSYVNPKQSRILNPFFMEIAADKLLSRSMHLPQTIEQKPTTGLLAITLAHYLSTRADSGRFGYRNTYYQKQTIHYYEQIT

SEQ ID NO: 978303 - protein, 167 aa, Homo sapiens
  misc_feature (31)..(31): Xaa can be any naturally occurring amino acid
  misc_feature (40)..(40): Xaa can be any naturally occurring amino acid
  misc_feature (46)..(46): Xaa can be any naturally occurring amino acid
DPFTGSVISELISMKYLAGSRGGSLRALEYXLRSSVASKXLKVVLXLRFPQQDFPSEQILLVEEQDHRDGCSAIFVPDALEEVQSLLQGGVVWFVLPDDHVVAAAGHHEDDGSHIVEALDPLAAFIALATHVKHVEVDFVHLELGLKDSRSQDTAAKQVLIARHIVS

SEQ ID NO: 978304 - protein, 69 aa, Homo sapiens
ESPAYCTVAITPLLGKRHCAGRSLQPFRARVFYINRRAKFLKTKLDSCSYMKIVYFYELLKHTLLFPSV

SEQ ID NO: 978305 - protein, 115 aa, Homo sapiens
MTLEVEPSDTIENVKAMIEHRDGFPPDQITMIFAGKQLEDGRTLSDYNIQKEPTLHLVLRLRGGIIEPSLRQLAQKYNCDKMICRKCYARLHPRAVNCRKKKCGHTNNLRPASVT

SEQ ID NO: 978306 - protein, 172 aa, Homo sapiens
ILEYPLLVLYPENCITFMVEHCFVSILHFVLGVAVDFTSVVLLVQGLFSQIFHVRVFHPVDAVPVPQVRGPLLIIVTGVGRLSGVGSSSCIDIDVIRQVVHHGPRLTGFNVEHHLSVHFVFVHVMDGLIQVLYMKIFIGKNQYSSRSMVSEVNEHVILGATLQDYAGSYALH

SEQ ID NO: 978307 - protein, 77 aa, Homo sapiens
MACLLVLIVAPPSSSNGPFRGSSSSSLWCGLHCRYCDPAGGPRLAVGSGTPGPHPPRWAREVKCSGKALDSAMWRAD

SEQ ID NO: 978308 - protein, 100 aa, Homo sapiens
SGIQRKEGFPPFYGNGGTRLSTCIATAEFQAAEHHEVVAVEEADLIEGEAKADTRNKQNFGPKSQFKETKSGNYSIITTQGLLKGKIVLLFLNSLLSSPP

SEQ ID NO: 978309 - protein, 130 aa, Homo sapiens
RNLEQTADEDADNNEEDPEGSSEEVVDEDRFLAAPFLKMRSDAPAGESRTFLKKMDDEDEDAEDSDDDEDWDTGSTSSDSDLEEEEGKQTALASRFLKKAPTTDEDMTAAERNREDIAKKMPDRKSKRLD

SEQ ID NO: 978310 - protein, 173 aa, Homo sapiens
LRGMERVARENSDFQRQKLEAHQGLLAPQEAKQKVEKEVQAREANLQAECSRQTQLALEEKAVLRKERDSLPKELEENKREAEQLRMELAIRNSTLDTCIKTKSQPMMPVSRPMGPVPNPQPIDPASLEEFKRKILESQRPPAGIPVAPSSGGGGSRPEDQGMARLGGLRRMQ

SEQ ID NO: 978311 - protein, 99 aa, Homo sapiens
MTDLDEQEDESLVTTVKDEDENSTGNKGELTRNPDLHEDNVTEQTHHMIIPSYAACLDYNNVHAIDRRVLPYFLNGKNKSKIPENYLAYRNYMIDTYRL

SEQ ID NO: 978312 - protein, 64 aa, Homo sapiens
MPFPYCQILNSQIQFPFLPPGGAMERRALTGPGDLGDVRGEPLVIGSLTLRKIKGPKSQPRHPE

SEQ ID NO: 978313 - protein, 143 aa, Homo sapiens
SRGSRILTLKLYAVSAFFFTALETLSIGDMSQNGLFTDGVQIQWLEHRHHSELLCKVANIILLTAFKNIYPSRLGFMILLLQKCKSKGTAGTLAGGPVSIEQGSEPMAVTMLEGCCGPKDRLNGECIGVSVDSMWLPLEIPGT

SEQ ID NO: 978314 - protein, 43 aa, Homo sapiens
  misc_feature (1)..(1): Xaa can be any naturally occurring amino acid
XSASFSSANLHACEPCGNPIQVHCRRLFGLDEFMDNHLNSEAR

SEQ ID NO: 978315 - protein, 161 aa, Homo sapiens
MCLITIFIRSISMSQCVAGYGFRRVNLIVTTEKFSARPKIELRCVGLHFFLTNFYCFLVSLLGVRHSGLFVVSRCHFRKIPKIISFHFQVEHLTFWLCSIGNKIFVQQLQNIIADVLQICLYLLTGLFAHLLLLLIPLCILLKAGDDTPEQSGGAYHILVG

SEQ ID NO: 978316 - protein, 151 aa, Homo sapiens
DSIMSQVVPRSHELVLIQGPVIRVVLKVLCGQDVPWSLDSRVVARSLTPGYNKALRHRTVKRPDQRLIELSMSQVPAKFPEEGYTKVPVPVLHKGTRAMSFNGHSRPSSAEDQAEVIWCTDKPLRSQPPDAGHPLPICFCVLIVCRPCNQY

SEQ ID NO: 978317 - protein, 105 aa, Homo sapiens
LLIGPGKPMCVESFSDYPPFGSLLLCVDMRQTVAVGVIKAVDKKAAGAGKVTKSAQKAQKAEMNIIPNTCHPTLNQWWKNGLRTVGFNGPFKFSSKRLVNDNNAS

SEQ ID NO: 978318 - protein, 122 aa, Homo sapiens
LHVILYACEVAAVIWGFVNTDQIAKDVKQFYDQALQQAVVNDDANTAKAVVKTSHETLDCCGSSTLDCFDHLSAHEQLVSLGSKIISTLFKEACHQKIDDLFSGKLYLIGIDAIVVAVIMIF

SEQ ID NO: 978319 - protein, 122 aa, Homo sapiens
SVPPVLMAMVCVDLSCSLIQITGHRGRSDYYNAVPAIQEASGCIVLARGSCRCSVCSLAERVIRQHLQCLAILNMFAALAEISHASSILDEPPKRPEKKDCEFFTLRSASANSAIASASFPE

SEQ ID NO: 978320 - protein, 44 aa, Homo sapiens
RFPNEPELSKRAKSVSVELVWQLLAWWARLSFCSSFQLPLAYST

SEQ ID NO: 978321 - protein, 84 aa, Homo sapiens
MVLTEVQVLLSVSAGNERATANEIKDEYVETLSKIYLSYYRSYLGRLMKVQYPFEALFRSQHYALLDNSCREYLFICEFFVVSG

SEQ ID NO: 978322 - protein, 114 aa, Homo sapiens
MSHIVFLGYVRFERVPGGLVVGRSVPYSLRTHPNPQEAPTHLEATFHTSSSSTTWLDGPAGKIMMVAQPWDVMWDCVLGQIQLCSLLTISQGKQASDGAGSGSVRRGAAAAVFY

SEQ ID NO: 978323 - protein, 98 aa, Homo sapiens
MSVIWPISAPSCCYIYFLVLCSCNKYSTLYKGAADQDVSCILAFGYNVVLKSTIMFAFTFVSDRSILQGTEEHVLIDCKRTFTLNGRQQSLIDSKLPK

SEQ ID NO: 978324 - protein, 60 aa, Homo sapiens
MGLNLWRVKSGTIFDNFLITNDEAYAEEFGNETWGVTKAAEKQMKDKQDEEQRLKEEEED

SEQ ID NO: 978325 - protein, 125 aa, Homo sapiens
PPYGRSWTTPRSRWSLTTFVQVQSPADCVSAVNTVLIREHRAVTQDAPIPGSPLYTIKAFIPAIDSFGFETDLRTHTQGQAFSLSVFHHWQIVPGDPLDKSIVIRPLEPQPAPHLAREFMIKTRR

SEQ ID NO: 978326 - protein, 118 aa, Homo sapiens
MQSLLPAPPTQNMPMGPGGMNQSGPPPPPRSHNMPSDGMVGGGPPAPHMQNQMNGQMPGPNHMPMQGPGPNQLNMTNSSMNMPSSSHGSMGGYNHSVPSSQSMPVQNQMTMSQRQRET

SEQ ID NO: 978327 - protein, 82 aa, Homo sapiens
MGPYLENTSLYISVCGVQAQSQILQDNSEDQDLPDSQYDACEIDMGEWLWLAVYDHLECKTCYVIVYGSGSETVTGYNAFGS

SEQ ID NO: 978328 - protein, 98 aa, Homo sapiens
LPSFVARLVPVGLGTGQPDKSIRAESDVLWEFFLTVPISSPDLIHHRSFLSRESIYIYAFQSTQLTVFVEITFSLHSCKNPVAPGFNEIMRTIVIKPE

SEQ ID NO: 978329 - protein, 38 aa, Homo sapiens
KLQQARQLKELLQTELSGFLDAQNGCGCCGHMSLQELD

SEQ ID NO: 978330 - protein, 135 aa, Homo sapiens
TFTHRRRLRRRSSGLYDNRPVCKQWEEFREQYTPWVGTSAPKAVGSNARMDVTDKYKYPEGSDQERQVFQKALGKLKPNTPFAATSSMGLETEEQEPSIIGKLKVAGMLAVGKEVNLVLLLKNLSRDTKTVTVNM

SEQ ID NO: 978331 - protein, 99 aa, Homo sapiens
IYKIITVYESCSVAIIILYLCDPPGVLYIRCTSLYRERSDWYTMLYNPSPDYVTTVHWTHEAGYPLYTIVFIYYAFCYGINDAAPDSSGEEDCMWVREI

SEQ ID NO: 978332 - protein, 153 aa, Homo sapiens
AYLGAAGKAKMIREPTIGVWNLAMFSLIQSYSGYVGAYSVLRGTNRIAYNLEILHNGESPVDCDGLAGKIRIVSRALDLFSDNAPPPELLEIINEDIAKRTCEEHQLCVVAVLPHILDTGAAGRNSYLEVLLKLADKYKKKMWGWLWAEAGGI

SEQ ID NO: 978333 - protein, 37 aa, Homo sapiens
RVGKGCHWRGYKTEYLVDNKVHARRPFGRTPLADLWP

SEQ ID NO: 978334 - protein, 107 aa, Homo sapiens
MSYPISFLVCEVIVHHRRHSLQGLHDDPVDLVEQLAGHLLAAGALQVEPQVTHCPLAPMDVVVVFPVFLDGDVGKMNEHVVQLTGTRGVFHCAEPAKPKLVHVTAQW

SEQ ID NO: 978335 - protein, 71 aa, Homo sapiens
MERNRRSVEQVSMNRKVRASQLYPGGQGRLEARGWTKHPEERALLPERGLRAVGLRAGGSTSVLVALPAGG

SEQ ID NO: 978336 - protein, 137 aa, Homo sapiens
LHEDIVHIISAIQIEANGIHCHSCSLWLPHSSISSHDSPLGENITIVMVSISALTVVPSRQVNAISTTVTLNKTIRAFINVRFTAGSSEALWAGTHISGNTGSSIPTAIFAKCFACRSIPCIARLANTVVSSNSVEA

SEQ ID NO: 978337 - protein, 107 aa, Homo sapiens
MSTTCWRHLISLFTTVTFRHRWRARECRQPETVVILSRLPRSDGKCRLQQLHPGLPVSAPPPPIPRSHIPPLLPSNPSALKAGCTDSILYANDTYIFLAITFLLQKN

SEQ ID NO: 978338 - protein, 91 aa, Homo sapiens
MSKFTWLTLLASVSRVHIYRFFDYVSHLHEESVRGSHRRSNTTSSPSSSSSSSSSTAASVKSSRSASDRKFTLINIIVFLFIFLFLFLFIF

SEQ ID NO: 978339 - protein, 140 aa, Homo sapiens
IAISCSCAQPRDPASDAQYLPPLHRIGTAALADEFVVSIWPKLNYTLLITALWRFQTEQVSKDMPYASAEPEQMDRLEEFPNTCKMREELGELSEQFHKYAAQLGEMLYMSVPAVAKLRRLLDSLSREALPDILTSIIRT

SEQ ID NO: 978340 - protein, 34 aa, Homo sapiens
SRASSIIDELFQDRYFSREPQDNYHYLPFSLTHR

SEQ ID NO: 978341 - protein, 50 aa, Homo sapiens
YERQIDQRKKELEHKFDVLDENQSKLSEDLMEFRRDASMLNDELSHVQPR

SEQ ID NO: 978342 - protein, 129 aa, Homo sapiens
TQDGSAHIPHYLMTSSLSDESLGRRRVLNPAEELHHLIHAFHDDEETALAMVHVLIHIQDADNMGAARSLPVMVYLLPGLGAVIQELQGTLLSSAPMEALQHFAVHTQAQHLLGQLVVVDHCVLLGLPP

SEQ ID NO: 978343 - protein, 73 aa, Homo sapiens
MVLSLPGKAVGQGSLDILLLLQPSGSPSSRSQAFRAEGLQGSAVGEGQRPGFQQWALVNGIEVDGRLLLTLAS

SEQ ID NO: 978344 - protein, 132 aa, Homo sapiens
YDFEGERPLVVIEDAHELERHGKQNSYYRYASFQDVHVMVFVGFGFLMTFLQSYGLSCRVASTSVFGVFGIQWALLMRCWFHFLDDRYIVVGVETFVNADFCVASVCVAFGAVLGKVSPIQLLIMTFFQVTL

SEQ ID NO: 978345 - protein, 128 aa, Homo sapiens
MCAMCRALQREHAKGLLQMLMATGATELVDMPPRAVSPACPRAVGCYCEHGGAVLSICPCGARCSCVSFSIYSAWGEHCEHLIVRFDGFFGIFFGVLGGLLLLGVGTFVVLRFWGLLRGQVLLFPELS

SEQ ID NO: 978346 - protein, 101 aa, Homo sapiens
  misc_feature (86)..(86): Xaa can be any naturally occurring amino acid
DDTIGSPEVPLELHRHVIVQKGSGIRMMMDDLELNIHVPAPELQSCIIAITGLAANLDRAKAELLERVMDAQAEQEDRALRSLKLXVTVDPKYHPKIIGRK

SEQ ID NO: 978347 - protein, 128 aa, Homo sapiens
  misc_feature (5)..(5): Xaa can be any naturally occurring amino acid
GAPEXRLDLYRYVFGQKGSGIRKRRVLFEVNIHVPAPELQSDIIAITGLAANLDRAKAGLLERVKELQAEQEDRALRSFKLSVTVDPKYHPKIIGRKGAVITQIRLEHDVNIQFPDKDDGNQPQDQIT

SEQ ID NO: 978348 - protein, 120 aa, Homo sapiens
PQVPLKEIFYQKLGDLLFRDFWGNHLQEFSALALEFYEEIKKYEKLETKEDRVPRTREIFDSYIMKELLSCSHTFLKSATEHVQGHLRKKQLPPDLLQPYIEEICQNLRGDVFQKFIESD

SEQ ID NO: 978349 - protein, 73 aa, Homo sapiens
IPNWSGRCMDTHHSQRSCGMQHSILRHAEHIYLIFSLNKNNHWLMYQGWEVGAVEERQKAELKPSKTMMPNVC

SEQ ID NO: 978350 - protein, 54 aa, Homo sapiens
LAVLISAMHGDMAQKERDCDYEGVSVLGSSRVYDYQLTCLARGIDVQQVSLVHQ

SEQ ID NO: 978351 - protein, 78 aa, Homo sapiens
MLLQNRALGFPIRFSFGVFFSLFHVILILFRVIWILPVKQTVRDFSKEMTTVLLNVKVDSQTLPDSQAVIILLKGPRV

SEQ ID NO: 978352 - protein, 38 aa, Homo sapiens
YSTEEDDTAGILARRGGSPVSGPAGANLSVARLLVPAP

SEQ ID NO: 978353 - protein, 45 aa, Homo sapiens
MRQLCICGSGMSEVLLLRRICCMLSHCEMAKTRLQVHFLTVNTPP

SEQ ID NO: 978354 - protein, 131 aa, Homo sapiens
MAQGVKYYQRCTLAIRCRIVSAIYRACMHLRTVSRCNRIHPGEVIQFVQQDLPTQELLQVFSEVLPGLAIRPRIVAIDLLEHPPSKWSARVLGCRRYKEYYPPSHGTMGWGMVPTKGSVLEESQTSPWSER

SEQ ID NO: 978355 - protein, 67 aa, Homo sapiens
WNGQNSYLYVDSTRLKHLPESRKRCTGPDTGEGSLFGWGRLAWGQNGLSTQTRWAPPPPSSSLAYST

SEQ ID NO: 978356 - protein, 34 aa, Homo sapiens
FLEEQAEKRGISGPRKPYTSGRTTAFLSGSGVNI

SEQ ID NO: 978357 - protein, 49 aa, Homo sapiens
QVLAHSLGACSLQQGPLGVQNLVLLLQEPHLVDEGGKLIVGGLDGSVAH

SEQ ID NO: 978358 - protein, 78 aa, Homo sapiens
MGHAVQLIICVQLFVRETPSSLHLAAMSCPFLWSLVICSFFSSISSRTNEYFIMIGDANAGTDGHEHVSDSLRGTRMF

SEQ ID NO: 978359 - protein, 90 aa, Homo sapiens
VEDISKVNSEGALHDDGADIIEACDVRLKEDDKDVESVMNSVVSLLLILEPDMQEALIESLCEKLVKFREGERPALRLQLLSNLFHEMDK

SEQ ID NO: 978360 - protein, 143 aa, Homo sapiens
DSRASRPRVAQMREPDVSQFVLTEGNPRWEETHLTYRIETYTPDLPRADGDHAIEKAFQLWRNDALLTFTKASEGQADIMISFARGDHRDNSPLDGPGGNLAHAFQPVPGIGGDANLDEDEGCTNNFREYNFIALLVMNSAIL

SEQ ID NO: 978361 - protein, 63 aa, Homo sapiens
MLAGLADSRISKILRRGRDAVLYEGTEGGVRYALGISKYNEKEILRLQNGLEIYQYLRTYEGT

SEQ ID NO: 978362 - protein, 52 aa, Homo sapiens
MCLNSQYLVYRLISWKSFKNIKQYYPSEFERTKPYCYVKYSIANFTNLNPIG

SEQ ID NO: 978363 - protein, 46 aa, Homo sapiens
QLVSACCPDSTRYTNRAGRMDKDRDVTVINTKISYLQFSTSFKRLS

SEQ ID NO: 978364 - protein, 88 aa, Homo sapiens
MSAVRCRGWLRATQGRDGHGGLVCGAGLSGCSTLTATGASITPSATIAGSWTKIKADLCEKSAIYQLEEEYENLLKASFERMDHLRTY

SEQ ID NO: 978365 - protein, 94 aa, Homo sapiens
MSTPCRGGHIARADTCATLEKCATCSQFQLERILRAMGKAYQPGCFTCVVCHRGLNGIPFTVDATSQIHCIEDFHRRFAPRCSEYGGAIMPEPG

SEQ ID NO: 978366 - protein, 142 aa, Homo sapiens
ALDDPSLGSQVESTDMDISSRGLLLGLTLCTDKTENEVAPVDARPAADRGVPTRTGSGLTNIKTEEISEVKMDAEFRHDSGIGSSSSTHLEYYAEACGFTPHGAIIGLMVGGVVITTVHRNHLGDAEQETVNIQYIMVWWRL

SEQ ID NO: 978367 - protein, 41 aa, Homo sapiens
TLAGSRVASNRITGSEIGQLIMLGFVGLVVRSAHHAWLCWL

SEQ ID NO: 978368 - protein, 97 aa, Homo sapiens
NKGSPAQRKGGTSGATSIMIPGGFMPPQASGLRSPQVGGSERDGMRMHRGECDWRYFGRRLTGSSVLASLFGGGLEESVPGGESAPRLTEHSCNTRV

SEQ ID NO: 978369 - protein, 101 aa, Homo sapiens
AFAGRWTKEVTISLAGSGRGAMATCTSPSVDFIVPWNTLSSHPEEEPEPQVPHGLRVQDHALPHDPAATSPPRTSASGWTGSQRRTSTGTRPSSSPALRTY

SEQ ID NO: 978370 - protein, 128 aa, Homo sapiens
LTPCALQSLSTTQVQHRSSGIALSVLLDIIVQVTCRTLLCEFRPNFQHVHFTAGDHDSDQDLISRPLALHGVIQPISKIQGLVLNALNQVQESIFQVSFNLFPDAFQHVIRAVTLVPIKYFLEVGHAP

SEQ ID NO: 978371 - protein, 84 aa, Homo sapiens
GHNEAWTVMIGPVICAVCQLLVINLTPRSVWPLSLIALIKRLEPGCSGRCRSASALARLQNLLLERGPRKKSMITDSLMGREKR

SEQ ID NO: 978372 - protein, 45 aa, Homo sapiens
MKGGSKEYWFVLTAENLSWYKDDEEKEKKYMLSVDNLKRRRYVKD

SEQ ID NO: 978373 - protein, 59 aa, Homo sapiens
ELEAIIEEADGDGGWVDTYHTTGITGITEAVKEITLENKDNIRLQDCSALCEEVGMLKD

SEQ ID NO: 978374 - protein, 84 aa, Homo sapiens
MGVSKYGMSLQENSSLTRVDHTEVVRDLTNAPDGKLDPGVSFKRQNSQSWDLKDDGNMMKVLRGHQNWVYSCAFSPDSSMLCTV

SEQ ID NO: 978375 - protein, 72 aa, Homo sapiens
EHIRNILLKHIRSQAYHHQRESIYWKPRNLLHHQNASPWSEPADVKLELTAYALLAQLTKPSLTSKGDSEGH

SEQ ID NO: 978376 - protein, 100 aa, Homo sapiens
CLQDPFDWRALMHAYVLTSFECKRLKSTNLTKMLMLDKRILCSPASKLPANRMDVAGNLCVLIYAVYCPLSDIEELKSDQDVDVGEENSLLPTSKLPANR

SEQ ID NO: 978377 - protein, 131 aa, Homo sapiens
MITDTLHNPVRRWPTGKNIGRIVQEAEKYKRLFMITRGPRCHPRLHLNAFAFIMPGTVEDEKLQGKINDEDKQKILDKCNEIINWLDKNQTAEKEEFEHQQKELEKVCNPIITKLYQSAGGMPGGMPGGRR

SEQ ID NO: 978378 - protein, 91 aa, Homo sapiens
KAGRKNLNKAAESDVSTAIELYRQAGLTAIIISGSERMTLLATPKFCIQRWKPSNRCPYKELASDHIIKDQLASKYLYHGQTLETLGGKKL

SEQ ID NO: 978379 - protein, 153 aa, Homo sapiens
IDNTQLVSAVDKSTEKENKITIQNDKGRLSKDDIERLVQEAEKYKAEDEQQQRDKVSSKNSLESSSFNMKATVEAGETSQASHSRMRHKQKILDKCNEIINWLDKNQTAEKEELEHQQKELEKVCNPIITKLYQSAGGMPGGMPGDKEVGYRA

SEQ ID NO: 978380 - protein, 89 aa, Homo sapiens
CWHRLTYSTSSRDWIAWSENGWSGLSLSAGGDAGVLSPVDDSGVGLDGFLDPLGELAEVRVDTRSVGPGTRVISPGHESLQGSHCNTVS

SEQ ID NO: 978381 - protein, 203 aa, Homo sapiens
MSHKIAAVCLLMSCLIATAYSAAKVPISIYYESLCPDSAKFITEQVYPAVKGELRDVVELTFVPFGKSQFVTQGSEVTFTCHHGPNECYGNKVHACAIEHIQANSYQVEYTRESLTMDFINCLMKAGKNFPDNVYPGQRCASENHINNWENIKTCANSTEGSVLLRKAGESTMRLKEPLTSVPTILFNEQFDKKVNDRAQVNL

SEQ ID NO: 978382 - protein, 86 aa, Homo sapiens
VCVRKRDPVMTPKIQVGAYCNRELYTVLLEEESIRVYPRNQTTCSNTLQTRSNQAPRRCEVGSGPSPQEYFAPSTSTQCVQVTYQT

SEQ ID NO: 978383 - protein, 64 aa, Homo sapiens
MAPEPRGGESLFQRRAGVSRPCTEQFTTALLFRCKKSTIALAELQEVQIGHAQLQRIGELHVIC

SEQ ID NO: 978384 - protein, 154 aa, Homo sapiens
MTRHRYRRSLMTQPNGLTPSWQAERLLMQTLPVLGEGPENTRSQLLIMDRAADPVVPSYCMSSRSRPWRMICWTYEQDTYLAMIQHGLSEAREKAVLLDEDDDLWVELRHMHIADVSKKVTELLRTFCESKRLTTDKANIKDLSQILYPVGWRH

SEQ ID NO: 978385 - protein, 70 aa, Homo sapiens
MCGTADSNRAEATPNGYCQLLELKPPPTAKTTAIGVAASSTQAYATADTTGTAIATGDGGLQQRDVAFRR

SEQ ID NO: 978386 - protein, 65 aa, Homo sapiens
GSVITSIRSVSTDAHVSTELVQAGMHRSGEYTSDQAPSLRYEDVLTVLTWSTELVQEGMHRSGEY

SEQ ID NO: 978387 - protein, 73 aa, Homo sapiens
MVESRAEVSRKSSHCNQQNIRASSVGTSLGLAEVTFVTHEHDDDRGFSMVIELLQPSLHHSIGLVLGYVKHQE

SEQ ID NO: 978388 - protein, 110 aa, Homo sapiens
MEDGVSAFVTLDTANKKVFLGRDTYGVKPLCNAMTGDGFLAVCSEAKGLVTLKHSATPFLKVEPFLPGHYEVLDLKPNGKVASVEMVKYHHCRDEPLHALYDNVEKLFPG

SEQ ID NO: 978389 - protein, 33 aa, Homo sapiens
ALERCSEQRHPLHQKAGGTMGKKQNKKKVEEVL

SEQ ID NO: 978390 - protein, 111 aa, Homo sapiens
RYHTPMSKTHPGNLQMQEWPSEKSSSDYQLRKAGTTLKQTSQRISSSVMILPNGNGNTHNYIHGAKWGDAKETKNPDVTTILQFPHWQSRTTTFMTIKYPLKSPECLREYL

SEQ ID NO: 978391 - protein, 93 aa, Homo sapiens
  misc_feature (80)..(80): Xaa can be any naturally occurring amino acid
MKQQSSCNPLTGQCECLPHVLAVIVQLVTLDSTICRVGKAVRECDCHALGSTNGQCDIRTGQCECQPGITGQHCERCEVXHFGFGPEGCKPCD

SEQ ID NO: 978392 - protein, 39 aa, Homo sapiens
PRNTQRGVHQREYTSAAEPSPTVMSTSLGSNLSELDRLL

SEQ ID NO: 978393 - protein, 78 aa, Homo sapiens
PAHWDLDCCLDQYNDRICAILDIPRYKSRIQTGPSALFRLLRIQELTDFKALADGETASTPSSNCTSQAGDMETLTFS

SEQ ID NO: 978394 - protein, 172 aa, Homo sapiens
TDTRKRLWRRRDASVVQNIGAPNHNGQVLRVLGISWVTVAGAISPHQPKSRFPDGPGHCQDILVHDRRRSGVIGRRICFLTESAPQLRLGLETFWLYFFQINGGTAAKPQEQHVLEPPVKVTELLHFRHKCPVLLELLGRWYQLPTSPLQLLREVAHLFLLLLVVAQQLLIQ

SEQ ID NO: 978395 - protein, 176 aa, Homo sapiens
MGGDACELLFSEHTSPNHNCQVFEYYGISYGLPVAGAISPHQPKSRFPDGPCHCLGYTCPCQAQERGNEDDVFASSLKVLRNSGSGSRHSDFYFFQINGGTAAKPQEQHVLEPPVKVTELLHFRHKCPVLLELLGLLYQLPPSPLQLLLEVAHLFLLLLVVAQQLLIQSPGHHSIF

SEQ ID NO: 978396 - protein, 166 aa, Homo sapiens
MLGMLRSSSNICATQIITASASSTRNLLGLLVAGAISPHQPKSRFPDGPGHCLGYTCPCQAQERGNEDDVFASSLKVLRNSGSGSRHSDFYFFQINGGTAAKPQEQHVREPPVKVTELLHFRHKCPVLLELLGLLYQLPPSPLQLLLEVAHLFLLLLVVAQQLLIQ

SEQ ID NO: 978397 - protein, 164 aa, Homo sapiens
GDASDARSDRTSVPQIITASSSRTGITMGYLELVPFLLINPNPASQMDLAMVKDILVHDRRRSGVIGRRIGFLTESAPVTPARARDILTFFFQINGGTAAKPQEQHVREPPVKVTELLHSRHKCPVLLELLGLLYQLPPSPLQLLLEVAHLFLLLLVVAQKLLI

SEQ ID NO: 978398 - protein, 122 aa, Homo sapiens
MCVRTKVRASDSVVGRRCHSYSQRDHLGDADEETCTHPFISGVVEVDAAVTPEERHLSKMQQNGYENPTYKFFEQMLNKTPATAASEVGQQKPLLHYPSVSIYRIMWEETNPFYDLLIIALR

SEQ ID NO: 978399 - protein, 108 aa, Homo sapiens
SKRVRGWQHYTMNGDRWVVKQWLAVQLQRLRGGGLVLHLLKELVGRIFVAVLLHLGQVALLWGDSGVNLHHTRMNGCVLFLLQHHQGDDDHCRYDNTAHHESNDGTFV

SEQ ID NO: 978400 - protein, 121 aa, Homo sapiens
SQSAVPPGQADCPAKRLALGSPRKTQENSSSASIKDEKGDEVVVELVENGKKVTVGKDDIQKMNPPKFSKVEDMAELTCLNEASVLHNLRERYFSGLIYTYSGLFCVVVNPYKHLPIYSEK

SEQ ID NO: 978401 - protein, 115 aa, Homo sapiens
TSRSRSLLRACLLKEKKSSSTGVGRPSQAAGDYQGDEVKEQTFSGGTSQDTEASESSKPWPDATYGTGSASRASAVSELSPRERSPALKSPLQSVVVRRRSPRPSPVPKPSPPLS

SEQ ID NO: 978402 - protein, 142 aa, Homo sapiens
GIRLLEAQIATGGNQSEPEERATRLTVEVDYKRGLFDEEMNEILTDPSDDNKGYFDPNTEENLTYLQLMERSITDPQNGPVSLPLKEKKRERKTSSKSSVRKRREVIEDPETGKEMSVYEAYRKGLIDHQTYLELSEQECEW

SEQ ID NO: 978403 - protein, 69 aa, Homo sapiens
GEISGQGLHLIETVSGDDLSLLLVSVTSVPQIITAKFFVYLESPWVTCELVPFLLIDPNPASQMDLAIV

SEQ ID NO: 978404 - protein, 49 aa, Homo sapiens
RRQPMIQLQHLPSKGANFGRHVEHQRHYRRVFISIDDEAHLFQASPAIP

SEQ ID NO: 978405 - protein, 86 aa, Homo sapiens
MSDWQNPLLGYMLAMLEFMILPVGAANVSRGSHAALEQRFTTYLKNVIEEKYGNDATNVGDEGAFAPNILENKEGLELLKTAIGKA

SEQ ID NO: 978406 - protein, 155 aa, Homo sapiens
MLTKVAPPMADCHVSDMEQRSDPKLKIPGLNSPIPESCSFGYHAGGWGTSPVDETGKPLYGDVLGTNAAEFQTKTEEEEMDRSPWGELVSSDEESSGEEEEEEGDEDKPDERGFISPGERGLITPGGFSSVPAGMETPELIELRKKKIEEAMDGS

SEQ ID NO: 978407 - protein, 97 aa, Homo sapiens
WSPSNIISKGKNKDAIMCHIYLHRNKVTIENCCVHHQSMRMASDVNATQSYHTLSHQNSHRITGTSPPITWRLQHLAVFPSSPFPASSYDFSETLVS

SEQ ID NO: 978408 - protein, 72 aa, Homo sapiens
KSEFLGEKYIRRVSDETRLLLVEDLKPRKMNSSLEGNDIELVSNSAALIQQATTVKNKDIRKFLDGIYVSER

SEQ ID NO: 978409 - protein, 81 aa, Homo sapiens
MRNVPSDGRKCAVEYVWAGGPIAHGLPAHHSKGDASPVIIEDNRSKVLGEPENTEDTVQNRSLVALLVFCLLVSTQIIANP

SEQ ID NO: 978410 - protein, 37 aa, Homo sapiens
MAQIRIDSEKVLDVEVELDGLRDTVKALTREQEKLLG

SEQ ID NO: 978411 - protein, 37 aa, Homo sapiens
MTSRDPNCTTYGLPSLHNFFLLFIITELSVSQNSPLL

SEQ ID NO: 978412 - protein, 96 aa, Homo sapiens
NQTRDQDMLYGRKLDKITSIERPPRKTEWNDWKIKGKRRRGRRWGRTEDGRSRQVTGEEEAGDDDEDAASATGKRAADDDADDDVNTKKQKTDEDD

SEQ ID NO: 978413 - protein, 52 aa, Homo sapiens
MEIMTKRSNYTPITNVPPEVTVLTNSTVELREPNVLICFIDKFNPPVVNVTW

SEQ ID NO: 978414 - protein, 107 aa, Homo sapiens
LGSSPGEPVSESAQEQYARVEIGRFVLGLLFLGAGLFIYFRNQKGHSGLQPRGFLSCSADDTFKEELSAPALQDEKLSLLAVILPQERAFSGPGCYWFSNCRKCPPL

SEQ ID NO: 978415 - protein, 92 aa, Homo sapiens
MSAGCQLEDSGVMFSDVHSACNMRDSSSDSPSPLAVVIHQKLISNEVLGPGHAWVLSGLGSSILRSSVASKFWKVVLNLRFPSKEPHEAQEP

SEQ ID NO: 978416 - protein, 34 aa, Homo sapiens
MAVVDVYSPLRCMPPCTSSCRHDEHRCMTSKYLI

SEQ ID NO: 978417 - protein, 76 aa, Homo sapiens
SLGDTRHTDCGCQSQLLHMRTQCTTAPGAGTLEMLLKPERLTPGSLAELALKPRRLLLWLLMVVDVLAMVPGDERA

SEQ ID NO: 978418 - protein, 156 aa, Homo sapiens
TGYVLDTALLIVLHRAVGDGHHLKHVIAVACHIGVDLAIVVLGIQMISRWAATFMPQQRLREATTTWIAPELKSCSTRRRSMGLSPSCREPTPFSSVSLSVLSLSFSRYGIRSFSVQCKNLCRWMSAAQVVRMSMAVRRVCLRDGTKTMTGFLGEC

SEQ ID NO: 978419 - protein, 86 aa, Homo sapiens
DRYTSRNICMHRVSDITWSERSYAETRYHIDNICCDVAVLTADRPGCRRNRYESSALRCHSWVPHACRWPAALITRQSEQEFGRFQ

SEQ ID NO: 978420 - protein, 52 aa, Homo sapiens
LRLGSVSWGKEAHPELPLPPLHKRRGTRWLVVPLLSCKGLGFLRSPVGKLDV

SEQ ID NO: 978421 - protein, 63 aa, Homo sapiens
VVGTVGWVGSPGVVETFEEHVQIHQVRDDIGLAIVQGLQGRQVGPVPLDQIGRLLNRLADLIE

SEQ ID NO: 978422 - protein, 107 aa, Homo sapiens
LGSVTGTVSVIQAGVLQVLGRTWALSYNLSVHSISYERGTCICETALAISKSLPSLIYSRLSGRCLRTLSQLWTTVDHLADSGGSSLLSLYYPGGTALPLRSFRNLC

SEQ ID NO: 978423 - protein, 105 aa, Homo sapiens
LYVEGLRVKSRDKDFILQWSSYEELLFRLLSQAVNHDSRGGGFAPSSDSNLLSQGLDITFLHQNRSEGHATLRNGPVEEVLGQWRQNKNRDTFSSLLTLHKMVTD

SEQ ID NO: 978424 - protein, 123 aa, Homo sapiens
WLSYVITEGHYVTDNVEEGSFLWIASSLDKFLNCKTLRGLEALFTALRASLVLDLRASAWSARSFLRALSAFSLRMCSMRIRLFLNTFPFTFRYRLCYMWRSIFLDSRYLLSSRRKILILLIH

SEQ ID NO: 978425 - protein, 46 aa, Homo sapiens
HARVLEDPLKSDQAPAYRYLGESATVLTCRRNLSKGGMQRSGEYTS

SEQ ID NO: 978426 - protein, 102 aa, Homo sapiens
TCGYQGDERSLVLADILLLMREMYVWILAWIHRGEIVSGENEHITSIYSCPLIHSQLILFVHAVSMSPFDRDVRLISLGSRQNLCVNEDVKSLGTVQLINDR

SEQ ID NO: 978427 - protein, 139 aa, Homo sapiens
DPLNDAICFGLSKKRLLDVIKINHQRVRPYVYKEPKNLTTLVSSLGGKLAFCRSICDSLFQEERCPDEEEGGFRYKGEKPHNDSRCQGSEGDVYRGIHPSCGIQMIQKHEEVGRVLLVATATAQETASGGWDSSHQGPR

SEQ ID NO: 978428 - protein, 160 aa, Homo sapiens
EATELLLHRASRIHKFLIGRGAGNNRKVRDSTGARSSFLRLRQGPGTDHHHWKGGRRPRGTRRAGGLDPKPGRERASAADSAGAVMGWLIFHLFLTLQDNVVEDSMLVDPKHQRHFVIRRGQVLREIAEEYGGVMVSFPRSGTQSDKVTLKGAKDCVEAA

SEQ ID NO: 978429 - protein, 35 aa, Homo sapiens
MIKLGLGIDEDEAAADEPNAAIPDEIPPLEGDEDA

SEQ ID NO: 978430 - protein, 125 aa, Homo sapiens
PAPEESVRGSPGPSKDTKDLSLEETSERNYEAAEERASPMNAEVLKQLAEKREHEKEVLQKALDENNNFSTMAEEKLTHKMEANKENREAQMAAKLERLREKYQHIDEVRKNKESKDPADETEAD

SEQ ID NO: 978431 - protein, 157 aa, Homo sapiens
  misc_feature (1)..(1): Xaa can be any naturally occurring amino acid
  misc_feature (44)..(44): Xaa can be any naturally occurring amino acid
XSCHPVALMKEPLQFRFPGTSTSATLTGLTRGATYNIIVEALKXQQRHKVREEVVTVRNSVNEGLNQPTDDSCFDPYTVSHYAVGDEWERMSESGFKLLCQCLGFGSGHFRCDSSRWCHDNGVNYKIGEKWDRQGENGQMMSCTCLGNGKGDSRVTS

SEQ ID NO: 978432 - protein, 177 aa, Homo sapiens
RVVLEVTCVIQLLQAEGAYLVTEYLSLSSLYHESTVLSEVHNDLHSAKKGSASVNSMKHETNVCIADLSDNIANERNVSCPASPRHVSDVTDHRKYITSTQQVNHPVQQCLLQLKLLHHVQLGVLSLKKLNKQLQDLGVQELVAGADLIQQRQVGQAYGQSAAESTLVLIQSNPPTS

SEQ ID NO: 978433 - protein, 199 aa, Homo sapiens
NQYHSSSWCLIGSAASGRMPSEGTVSSSEVWVLIKLMDCLRHSSWKHCTASRGASATPVSESKHLILRHRRPDGLGGLLLSEAAFIHSCHLCQVKGADSRARYAVAGRGKNGQDHGPAPEADHARDSLQHVEVEMGVSGYRAVEPCLQEGRPLLLQHAGGASHVVLAHSGHAGHHHLLQVVKLHRNLPEEEVDMAAPLQ

SEQ ID NO: 978434 - protein, 115 aa, Homo sapiens
MVRCSITSIRRRIVLHDTWSNKTLNLGCLGPRFLTFFSIRAFLQQLADIIFLIEIEKFADAANSFGAHAVRHCSISQSRNILLSFFYNNQVENAQICIHNATMKLMFSFRPKYST

SEQ ID NO: 978435 - protein, 95 aa, Homo sapiens
LYQGMVCTYKAGSRYEDFRQCRKHPSAASHIQSDERRSFIFQDNPWNRSTWSGIKCDRDKENMAYTAECLRGDVDILMEFLLNVTTAPEFRRWEV

SEQ ID NO: 978436 - protein, 105 aa, Homo sapiens
MRQGYFESSHLLNHLFTGHVPQVVHSQFICMDTKRSLKVMDGNILQVFFPKLNAERFHPPCCYYGFLWVFFHSSQWVSSISSGYRAKLTTGSSRTLSPQILLMEI

SEQ ID NO: 978437 - protein, 177 aa, Homo sapiens
YQLGTHSVLHDVIGHSNPLAIWFNSLRELTRQYKQVLVEICYLIELLEHLVAVSRRHPGRTSWSTSLALRGSTICAFTSNLQRRRPLNSSIFPLPLRRAPVTWATSAPRPSLSRRLGPSTDAPVYTHTWRPEKKKSFLESGSSKTESSLRGSAGHLSAIRKGPCGRLPLPSENRQYF

SEQ ID NO: 978438 - protein, 129 aa, Homo sapiens
SHGAVSTLGLHSSKSQQMINFWPLQSPCCVTCAYLTLNSLFSWKHLAHNGTPQPASVRTTGHFCTSVAGKCQSLSNLTPHPTSSVAPGILHLFSLLLTHPVSSNSGGRSAYDIRILRAKGTCRDHWTHH

SEQ ID NO: 978439 - protein, 136 aa, Homo sapiens
DYVAPLILQIRHQYRLLSSGDGAMDLSSLYDDLRLLKSPEVLSHWTRPLQRSAECPLRASPASSTTARVITKQYNNPAGLYSSENISKFKNALESKTAGSGVEANSRPLDHAQPPSSLVIDKESEVYKMLQEKQEL

SEQ ID NO: 978440 - protein, 110 aa, Homo sapiens
ASHYSLFVMSGAGWEDRLWCRRAGWASPAPLPGDCLVEDTAEQGLVAGDTEQVALAVAHVVLGRLAGDQDANVGLIHLAAHEHHEDLDACPLSYLHGLLDGSGRGALRVD

SEQ ID NO: 978441 - protein, 179 aa, Homo sapiens
EVISTGHHNININVVDEHTPMCEGSVPPPLDQYVKFDAVSGDYYPIIYFTDYCNLQKDYYPINESLASLPLRVSFCPLSLWRWQLYAAQSTKSPWNFLGDELYEQSDEEQDSVKVALLETNPYLLALTIIVSIDHSVFEFLAFKNDIQFWNSRQSLEGLSVRSVFFGVFQSFVDLLYIL

SEQ ID NO: 978442 - protein, 154 aa, Homo sapiens
RIVLSRYYVPASETLSTWSFCHRQPSLLVQNRVAHGTCAEYGVHADVPNLGSFVPIIREHMGAVGTPTNCVNPTVVGLASAQRAHLLPSLPVIDVSGAVSTGCGKSVPIRRESHTVDKAAVVANCELELEWGSLKECRAVIIASRGQPVWPALL

SEQ ID NO: 978443 - protein, 165 aa, Homo sapiens
MSPLICARNCEIVSVQILCTQHSETLSRWSFCHRQPSCWSRTVEPMVTCAEHVVHADVPNLGSFVPIIRDQIGAVGTPTNCVNPSVVGLASDQRAHLLPSLPVIDVSVAVSTGCGKSVPIRRESHTVDKAAVVANCELELEWGSLKECRAVINRFPWPAGMAGSA

SEQ ID NO: 978444 - protein, 154 aa, Homo sapiens
TERRHTVAETADAFLLAYVALHSLCLNGFHYISRTAAASEHSSHVVATGADTSASLNIKGTGTQPAQGDVDDNAIGRLGNQMGEYATLYALAKMNGRPAFIPAQMHSTLAPIFRITLPVLHSATTSRIPWQNYHLNDWMEEEYRHIPGEYVRFT

SEQ ID NO: 978445 - protein, 91 aa, Homo sapiens
MEIMCPAVITHEIIEIIATPERKYSVWIGGSILASLSTFQQMWISKQEYDESGPSIVHRKCFQADYDLVALHPFLTKPNLRRKQDEIGNQA

SEQ ID NO: 978446 - protein, 106 aa, Homo sapiens
TSFSTREQLAQFFVAERSSALSDDVEKDIVLYNYTHRVISADLAHVIVCRHESFWASLQQRSPTASEREDMAELCEIHPSNILRVLLEDRPRPKDRSYREGGFNSI

SEQ ID NO: 978447 - protein, 69 aa, Homo sapiens
IDGKLINERRLMTAMALYTKVNGESDKNVSRTPGIVLKTLDPILITIIAMSALRVLLGAVCGVVLYCAC

SEQ ID NO: 978448 - protein, 47 aa, Homo sapiens
MVALPDIIFVSSGIEKWQRSSKTPQEMARGSTISLLGTEEVILVELF

SEQ ID NO: 978449 - protein, 37 aa, Homo sapiens
FICRIIKGEYKYLLAKGGIWCDRVESHCSSKLPLLAT

SEQ ID NO: 978450 - protein, 45 aa, Homo sapiens
MSLLPPRATGIIASSPAPELTSAGTPLTWHNGASDNSSPSNKTDF

SEQ ID NO: 978451 - protein, 66 aa, Homo sapiens
RTVISLVQRNDKSLYKNVNVQNFHSQSWQGWSPFNALIHRHRPELIEYDKLRKDDPVTNLNNVLYW

SEQ ID NO: 978452 - protein, 118 aa, Homo sapiens
MKCIMAGLWTLADRSDGRSHTAENAKLETLQIASKPERRDPGSSRIRNKGAWTEFQEENRGRGETVFEEALVAEEFLKASKTPKPKKCQAGKHSPGQQAGKQTLIWPTPGQTRVKPQN

SEQ ID NO: 978453 - protein, 79 aa, Homo sapiens
AEIVAMNMDQGTYEDYVEGLRAVMTREEMAPSWVLKSGMFLSHWVRMMTEEEVEMLVAGHEDSNGCINYEELVRVVLNG

SEQ ID NO: 978454 - protein, 47 aa, Homo sapiens
SIAEKDLPLSSLLQPQSVDWLLLWSYSLFQVWLNPSPPPDLSPRSKC

SEQ ID NO: 978455 - protein, 82 aa, Homo sapiens
LAYVCVDVWLRRIEKSESSCSAVGGSHAIWILVYWWRLAESLEKPHQRAFSVLYFPVYALSHLTLRFLLWSVVDDLDMSFEC

SEQ ID NO: 978456 - protein, 79 aa, Homo sapiens
WVSCIRGTLLQLVTTSLGASPSPGPNDRLIQKCNTLRGQTNRHTDIITLLMFLAVPRASFHSNHAKFFPALPSLSLTTL

SEQ ID NO: 978457 - protein, 87 aa, Homo sapiens
MPQLHMGNDYRCTLVTLSRDRLVTTAPYSLSAHAITTTIECYSKYYQTSFRVSVLIDVYNDRSFTVFFRFKIGSRLFLEWARTTNIG

SEQ ID NO: 978458 - protein, 140 aa, Homo sapiens
HHFDVAIGLQTAEHDRFHLTSRDCNIASLVNAIKAEVLHLLFSLGNDQSSPCSFMLWPPVFCCFCFSAIPLSYLHLLSSDAHHTHQSRPRATYHVLCSLCEKAWCIKLPLLEKRLIQAPVLHPAVVNVLSGGQEGEIVEL

SEQ ID NO: 978459 - protein, 127 aa, Homo sapiens
IPIHYIRMFWIREILDNVHRAMEEQTDGDKNRCIMLEQKWQQDVVREEPESSKNCLDWESEAELGSIDDDGPRHGRDAAPPQCEDTLFPGDSHQGVKHIFVATALVSWKPAIGSHADESHFGWCSHN

SEQ ID NO: 978460 - protein, 105 aa, Homo sapiens
MALTYHITTGVSKRTGVRHPPGSEEITLRNSCSMDSYEIEQGVSSPGQSVTLRSRNTDLISDTSSDFRKLMVPWQQGKKAEDGSVINYELIDQDARDLYNARVKR

SEQ ID NO: 978461 - protein, 121 aa, Homo sapiens
GKRPALNSRPWGNWTLRENTLHTRSGQAAARDIVQIVPYRRFQNAPREALAQTVLAEVPTQLVSYFRAQGWAPLKPLPPSAKDACTGPPGLGSLGGCGKSSILCPRGPSGPQPNPSHSPQC

SEQ ID NO: 978462 - protein, 88 aa, Homo sapiens
MRKHSLCLFLGENQRPNNRSSWPPYFMRANLKKLLNKTNKKAVGPEGPVLPTSQGVSCRRLLRNWFCSPSPLAHLKSYHCRSAPPHEP

SEQ ID NO: 978463 - protein, 51 aa, Homo sapiens
MKTPSAPWHKKEMPQTLHVQKLVGSGSGEGQSGSDRTSGEPKGLGEQTQLL

SEQ ID NO: 978464 - protein, 133 aa, Homo sapiens
EEKPPGIVHYSGRHETQVLHVSCPLGGGGNFGTLTNLQERIWHVLVTTLCYPCLLGIPNGLDNCPKVPNPLQTDRDEDGVGDACDSCPEMSNPTQVQGDGKDRGGMRVLMDEAPALWMESGQITLFRVIKRRW

SEQ ID NO: 978465 - protein, 122 aa, Homo sapiens
MTISPELEQAGINVGDHCGQQLPETQTPFFLWSGPLSCKRGTGSMRELVEVGPRAIPDIKRPQWVFTCFSQSGGAAMKTPSAPWHKKEMPQTLHVQKLVGSGSGERQSGSDRTSGEPKVLGE

SEQ ID NO: 978466 - protein, 133 aa, Homo sapiens
EIPLELELNGMIYFQKLRHAAEEVWLQGPRIESEEMQPSLDLVLRSTHLASDDLYKLSMKMPKALKPKKKKNISHDTFGTTYGRIHMQKQDLSKLQTRKMKVPNKRPAERITEDHEKKSKRIKKKLMELSQPL

SEQ ID NO: 978467 - protein, 60 aa, Homo sapiens
ISGGKTRMLTCRRTLYRQACTAAGEYTSTRLHLYDIMDVNTVLTISTELVQGGMHRSGEY

SEQ ID NO: 978468 - protein, 89 aa, Homo sapiens
TKAVLACRRLRDVRQGARSSSAAVDARSHPCGPSLLSRAALRDNHTDSDIQEKLFVVPADEAQARIPYARVNHNKYMVTERATYIGTSN

SEQ ID NO: 978469 - protein, 59 aa, Homo sapiens
LIGQINFSGLQIAYQVCRPVLDMFNAVTQPFFQLHIIQTACADQRVQHRRMFATTAGTR

SEQ ID NO: 978470 - protein, 36 aa, Homo sapiens
PRCPTDVIQYRVNSEWFSSTMAKASSARAARRIMST

SEQ ID NO: 978471 - protein, 127 aa, Homo sapiens
DQANDTVPLLFMRNVCDSHDEVVCTENLTPMAEALALNSKAGLSVTDEGQIIDSTPATTPQADDISALICKKCTLFYISWELRQTLSVVFAAFITVQGTPEWSLFRMFSRTLTAPCPLASASRVSVD

SEQ ID NO: 978472 - protein, 38 aa, Homo sapiens
NLEDLWRRLEEARSVATKRSRKKMAALECEDPERELKE

SEQ ID NO: 978473 - protein, 101 aa, Homo sapiens
RPNPTCILGQLLFKFFLCQKSFIVIGSFTSDIPSDCVWGLTTVERRAENSGDLRPWRWLLHLRGSRGLDVAPSANRKPWHLPEPWSQGVRAGLALSSCREL

SEQ ID NO: 978474 - protein, 114 aa, Homo sapiens
SKTFCWSEGPIATALLRQTCSDMWGNGQPPQSHMGQACEAVGCGTYNMGLVGPPSIVMKLSPSEQQLCLSDAQPASQKVLCDHRMALLGSGCQEPFLHRVEGQWGWPHQISHIL

SEQ ID NO: 978475 - protein, 49 aa, Homo sapiens
GEDIKGHICSCYARGPTSSSVPWKRQDEQLSLQVKTLYRGFPRLSSILL

SEQ ID NO: 978476 - protein, 113 aa, Homo sapiens
MIHSSWLNLLGLCPPAPGHQETFCIKEPCASPSGCESPHRPSLSSLCSLSCHPTASSSNSVHFSRSPPASTMAPIPSALAVWEPAGSSPQLSSAPADSSFLYPPSLRSSLPGL

SEQ ID NO: 978477 - protein, 61 aa, Homo sapiens
SFRAQGITGARSGDGGSRGPWGQSGMISGKDLSLTSIHIAFGEVEFGETDVVLYENGEVFG

SEQ ID NO: 978478 - protein, 75 aa, Homo sapiens
  misc_feature (9)..(9): Xaa can be any naturally occurring amino acid
MAVAGALSXSCCYVFDQHRGPFGKMYGFALQLLLMLKFKSQGEGPTCIVECLLLKHMIVFRFEIAQVSGSGGGSE

SEQ ID NO: 978479 - protein, 74 aa, Homo sapiens
EEEEEEEDQDYYLGGLRPEPENVMSTENEEILEAYDEDYDKELYPDIHPPPSLPPSRAVRPAPLVPKELYTSHL

SEQ ID NO: 978480 - protein, 67 aa, Homo sapiens
IELGVLRAGAQRGVSSSMPSPGTQALASAKVLKPWDGMAGQAGKGTSQCYWGFFVGSGGIIWLIDDG

SEQ ID NO: 978481 - protein, 95 aa, Homo sapiens
KHRRNRNHDLGKVGLASLIPLFLPLCWHPPRASFPVKAPLASHKVKQCGAAGNMSSMVYGPFQKGQNLTSIYAAPPLLSHLGEFLSKALLSSESI

SEQ ID NO: 978482 - protein, 46 aa, Homo sapiens
AGSIAVCSAAAEVSLLYNSQFFSQQGNSTAIVYNSRYFFLPIAIFL

SEQ ID NO: 978483 - protein, 35 aa, Homo sapiens
INTPKKMTDYAKKQGRIQEPKQLLQNSYALSNQSS

SEQ ID NO: 978484 - protein, 34 aa, Homo sapiens
NLINLYEPLTVGMRQSGSYSPLTTLIFSQWHVVH

SEQ ID NO: 978485 - protein, 111 aa, Homo sapiens
EAPNISRLSWLSTSVIECKRRYSTHGHKSQKKAFTKYCTTWQDEDGKKQLEKDFRSMKNYCQVIRVIAHTQNAPDTICAKKKAHLSENPGDRRHCGRKAGLGPRKDYKQQG

SEQ ID NO: 978486 - protein, 35 aa, Homo sapiens
CLMLVLELEEALRFLLFFCEGGGELSYSVFQQFLF

SEQ ID NO: 978487 - protein, 37 aa, Homo sapiens
LTKTLPFSSFPALKRQPSKALLDEEQPCFPVPSLCYY

SEQ ID NO: 978488 - protein, 178 aa, Homo sapiens
ECRGALSLPAMQRSSAVVGAGALIQRAPAVRRRKRRRLSLQYTKKPQRVAGGAAPSKPASGKKGKAESSNSSSSDDSSEEEEEKLKGKGSPRPQAPKANGTSAVTAQNGKAAKNSEEEDEEKNQAAVVVSKSGSLKTRKQNEAAKEAETPQAKKIKLQTPITFPQRKKGRTNGHHPHS

SEQ ID NO: 978489 - protein, 153 aa, Homo sapiens
MFFPAEPSSEALGVGEVLHVKTESLAPPLCLLGDDPTSSFETVQINVIPTSDDSSDVQTKIEPVSPCSSVDSEASLLSADSSSQAFIGEEVLEVKTESLSPSGCLLWDVPAPSLGAVQISMGPSLDGSSGKALPTRKPPLKPKPVVLPLSNCI

SEQ ID NO: 978490 - protein, 171 aa, Homo sapiens
GSDELADQTTTIKLYQEQILNYYRANEVQQFRYSRPYRKGDTDPDNGSATLWLDRTPYTTAYTFPGILKWFAVKPISTEEISPLEHAIETMELTNERISNCVQQHAWERSLSVHPLSMLLSGIVDPDVMGGFSNYEKVRLVPESPEGFKDLGVCVPPSVPFATDKFISYSC

SEQ ID NO: 978491 - protein, 176 aa, Homo sapiens
MSIYCDLILIEIHAFSADQILTQYDSINVIDINKVVKYVPGLQTEDGSYAGDIVAEKLTQDSLFVRWQLWLCRGSLMLLNVEKAIEFVLSCMNLDGGFGCRPSSESHAGQIYSSTGFLAITSQLHHVNSDLLGWWLCERQLPSGGLNGRPEKLPDVCYSWWVLASLKILGRLHWLD

SEQ ID NO: 978492 - protein, 35 aa, Homo sapiens
GSATDAHEQAILRLHVNNVLSSLMTQATVKLEHAK

SEQ ID NO: 978493 - protein, 84 aa, Homo sapiens
MESLMLATTKMMASHIVEALDPPAAYIALDTHVKHVEVDFVHLELGLKDSSSQDTAAKQVLNRSEHSQPASSRRSCPGSTGHSQ

SEQ ID NO: 978494 - protein, 103 aa, Homo sapiens
MDFISLLEKDKRLPEYTDMLGGSQVRMTSPELEGMKVGDRAYPGPLSVNSIRWGVLLWTSSPFTRQQIFKLCGSATLSLVTKAGPRGQKVSKVFPSSHCFPVL

SEQ ID NO: 978495 - protein, 183 aa, Homo sapiens
DAEQEEEGSWLTLKTPVWRLERDLSVVSKGHLDHKNLDASILHGGEAEGSGQVWDPELPCTPALSQTSDFQTCTSEPPPASRMGAWIQWEITWEYGWQTAKGQMSVRLQNKSLLTQRRKGLRIKQERLDGGRRADGPKNKGQNENTASAKEDRGCLSPGKEGPFWPRTEAEASGYNQVRCARR

SEQ ID NO: 978496 - protein, 77 aa, Homo sapiens
  misc_feature (61)..(61): Xaa can be any naturally occurring amino acid
MEKNALVLDPERSRERSGDLESSIGKWVEKDLRVPQGSQDLLSPDLRVLPCGSPVSRGEDXGSRIVKGKSLFPVGIL

SEQ ID NO: 978497 - protein, 78 aa, Homo sapiens
IDLGHEALAISCFAFVTFDDHDSVDKIVIHRLQTLNDNLIHGVMVVKGYKGKAPFLATASVSHDFNHFNFSILFKIIS

SEQ ID NO: 978498 - protein, 63 aa, Homo sapiens
EKCTYPTDNVLLPCLILLSTEGPARIQTFGVCAWLRSQWGEATICGIMTDRLYVRIPPRWHSA

SEQ ID NO: 978499 - protein, 69 aa, Homo sapiens
HINQLVPSDRARWVTSTVLELPVENSDQVSRSCVSVKPARSDPEIWPQYVPPCFRQYATDIGFIKLRLM

SEQ ID NO: 978500 - protein, 76 aa, Homo sapiens
LAGPWELGFCVHAAHEGELGFLCARCLHEGGSWGSCVHAAFSEVGAVVPVCTLPSQSGCWGSCVHIAFTSWEHFVG

SEQ ID NO: 978501 - protein, 72 aa, Homo sapiens
KTPHGIEWLSPKSCLRTCTAVLTFNGINMVPPNTTTPPLKTIIRFLQGPLPPGTHLQALTPVWRVAAPMGPS

SEQ ID NO: 978502 - protein, 128 aa, Homo sapiens
MRIADKLVGEHLQGVCVDGIVVITSRVIVGYTTVSILHPGMLPIFLLNPNPNHGTHDGLAGGHTPSPVTFLGILDPLLTVDLHTVGPQRGDGSVDDLLHHLRVPIGFLQLSSRDPDMSVCRNVLPRLV

SEQ ID NO: 978503 - protein, 33 aa, Homo sapiens
LGNIHGITRPSPRRSNSPDKFKRPTPPPSPRDT

SEQ ID NO: 978504 - protein, 106 aa, Homo sapiens
LLSSASYPFKSFENKALRSVSSPPKISIVIRSYRIKLRGGGAFVDLRKTPAILRETSEGTSYYMVRLVFRPYTQVDDRFARQDRYGPPPEFPLASPCPGIVHHLSG

SEQ ID NO: 978505 - protein, 76 aa, Homo sapiens
VNVEQGRKQAQIMAYRKEKAEHHKSSRQERPDAVLATANANELKHIRILAAALTHHNGDATASLTVAEQYVSAFSK

SEQ ID NO: 978506 - protein, 46 aa, Homo sapiens
GYMDPKDVWLSYLAQQRSMWRKATRGLMERKEERYKRHRQKQKHKD

SEQ ID NO: 978507 - protein, 129 aa, Homo sapiens
MVGRRWRSSLAPRGHLEKSSSQPGDDRLLWALERADYIGAVTGKCADSKRKRRGRGGRLLPSRARRFQRKPSPSSSGILQKENKFPKTVCQLNRDLHGWQKRWTQAKWSTALQNKGRALKSPAPSPPRP

SEQ ID NO: 978508 - protein, 69 aa, Homo sapiens
QVEPWPKSVEWERARAGPESGLPLKLILSLLMPHLSLLTFIPSKHTHTAGYVPYMSFDHEPGGPWLGLP

SEQ ID NO: 978509 - protein, 87 aa, Homo sapiens
TVTKLALAVLVHPIFYHEHRSFYGENVKSEIHSRKTLFFLGYLSSPSPRAAQATAMLLHLTLCSPETLGRYSTEYVLFLSLSGVTCA

SEQ ID NO: 978510 - protein, 39 aa, Homo sapiens
IHVQDVSFKSANEEIGPVSTVNSQHGFNTKTADPREYVL

SEQ ID NO: 978511 - protein, 149 aa, Homo sapiens
WGIDLRKIYTGSRGGAGSGESGVGKINSTLPIHAQVSSCHDSRTTIGVEFSTRTVMLGTAAVKAQIWDTAGLERYRAITSAYYRGAVGALLVFDLTKHQTYAVVERWLKELYDHAEATIVVMLVGNKSDLSQAREVPTEEARMFAENNG

SEQ ID NO: 978512 - protein, 135 aa, Homo sapiens
GAMKRKVEVEELLWMIFRTGDGAVAAVDCLLNGRQAFLAEVPDSEEGESGWTDTESDSDSEPETQCRGRGRRPVAMQKRPFPYDIDEILGVRDLRKVLALLQKSDDPFIQQVALLTLSNNANYSCNQETIRKLGG

SEQ ID NO: 978513 - protein, 41 aa, Homo sapiens
MLRWGFQEFYIQGGDWGSRIGTNMAQLVPSHVKGLHLNMAL

SEQ ID NO: 978514 - protein, 42 aa, Homo sapiens
ELAPDKMNIAAVKLLVKARAEDDDTIKSQEEDQPIIIKRKRG

SEQ ID NO: 978515 - protein, 167 aa, Homo sapiens
DAEWRMSYQEKVWSQRSKTTVEDVRLCRDSKHPGTYAVYNLSPRTYRPSRFHNRVSECGWAARRAPHLHTLYNICRNMHAWLRQDIKNVCVVHCMDGRAASAVAVCSFLCFCRLFSTAEAAVYMFSMKRCPPGIWPSHKRYIEYMCDMVAEEPITPHSKPILVRAVV

SEQ ID NO: 978516 - protein, 135 aa, Homo sapiens
MGRQSSIVASHKISQRQSNGIQNKLNVSPYSLDFTSCTVSLNYMTVLYEDSINNMEISTLKAIHHFCQQVRPFLWKIFSANNANCITYLLLNLLWAAKHQVHYVGFDGHSIGFTNFVGFIFNNSPVPFNIVLECY

SEQ ID NO: 978517 - protein, 55 aa, Homo sapiens
LSRFSTSNIIRGYPEEIARAFHITNDFTEEEEARYAKRTSGVKRSEMLCLTLNTV

SEQ ID NO: 978518 - protein, 117 aa, Homo sapiens
MISEDIFSYARQIKSQDFPQSHEDFIVDANITSLSAMREWSGSEPMSSMEDYSAQHESMIRLSEAMARMHCCDEVQAKHVKEAFRLLNKSIIRVETPDVNLDQEEEIQMEVDEGAGG

SEQ ID NO: 978519 - protein, 66 aa, Homo sapiens
SEIEDMLKVLQKMTKEEEEDSDEDYSSEAEESDYSKESLGSEEESGKDWDELEEEARKADRESTVA

SEQ ID NO: 978520 - protein, 69 aa, Homo sapiens
MRDDPLTSPWWMLTRDSCVKLVIRYCYDYGFEIEIFHNLDFWAINFNPDVGSFSLMRSKLSVIQFSNCI

SEQ ID NO: 978521 - protein, 114 aa, Homo sapiens
LGLDPLLPSSTAFAMIIDTLEEDIAALCPSRTAASRPPGHLRLVVPASQCGSLIGKGGCKIKEIRESTGAQVQVAGDMLPNSTERAITIAGIPQSIIECVKQICVVMEETLSQS

SEQ ID NO: 978522 - protein, 147 aa, Homo sapiens
VTPGYLLVWPIDEELNQLLQEFTIAVGCVTKIHSELVAKSGDPKVSLEAIITPPPGKKGKSPSQKKPVSKKAGGKKGARKSKKKQGEVSKAASAGQHNRGHTFADGFTVLSNKSLFLGQKLNLIHSEISNLAGLEVEGHNQSLSKDE

SEQ ID NO: 978523 - protein, 41 aa, Homo sapiens
MEFPAGATGAFCFPKTNSVPLTSPSVCCVTDFLFLFAVCRL

SEQ ID NO: 978524 - protein, 44 aa, Homo sapiens
MSGRSDGCDSPCSCAWPPVTPSESNPPVKCNDIPIDAGKKIFPT

SEQ ID NO: 978525 - protein, 38 aa, Homo sapiens
AVVHNYSAVVLGTTANSSTFRPSALEMPLPRKRESTDI

SEQ ID NO: 978526 - protein, 102 aa, Homo sapiens
SDKARLLELNHSPGQAVLRRLLSLCAPFARPPSCWNLVNGTVVPLGEMRGYAPFSPDENSLVLFEGDEVYSTIRKQEYNGKIPRFRRIRGESELYTSDTVMQ

SEQ ID NO: 978527 - protein, 111 aa, Homo sapiens
MCAVHEGRSCIAVACVLKIGETPHIRPRASWNNANVLARYASICQQNGIVPIVEPEILPDGDHELKRCQYVTEKVLAAVYKALSDHHIYLEGTLLKPNMVTPGHACTQNVF

SEQ ID NO: 978528 - protein, 130 aa, Homo sapiens
MRDERWQRVVGMRYRITKQPVVYHPRVLLCSARVSRGIIREQVHACAYSLPRVFWEEVNEPVIFSGRVSAGHCALPLPARPVTASVYGRLARLRGCLEDSYPSALSAQVFLDSPAVGCGLETRLFIEAAL

SEQ ID NO: 978529 - protein, 88 aa, Homo sapiens
NGSCRWGKLVQVCADTETMAMSEKVGVKLVLDIDRNEGKHRCGQVQCVSISRQSVCGRVTWEELWMEDLESSTLEVNLEHLVIAGQMG

SEQ ID NO: 978530 - protein, 108 aa, Homo sapiens
MMILHVNVDLMERAAKRTRRLQGSNSDGEKATKVQDIKYNLKEAIETIVAAMSNLVPPVELANPENQFRVDYILSVMNVPDFDFPPEFYEHAKALWEDEGVRACYERS

SEQ ID NO: 978531 - protein, 69 aa, Homo sapiens
LPLLFCHCSSSSTWMGLPAICEHDRVFLTRNRLVVLQLSIAPSPLTIPEVEMGHEDPPGEKLTTTGQQP

SEQ ID NO: 978532 - protein, 66 aa, Homo sapiens
MSFLLRGQSNGTSCKVLLTDLSVTRLSKAKEIGADLVLQISKESPQEIARKVEGQLGCKPEVTIEC

SEQ ID NO: 978533 - protein, 33 aa, Homo sapiens
MVISTDRNTGFVSENPPRKLPRYYKNIGLGFKT

SEQ ID NO: 978534 - protein, 110 aa, Homo sapiens
VCPRPVPTIALSGPSLSPTVFTRVPSWYGHTLILAFHVRAWAIWYPAMAPNPAVSPLSRVFFASWRFVLESGIDPILRGLMATPAKLNRQNQIAVDEIRERLYEQVMRIG

SEQ ID NO: 978535 - protein, 104 aa, Homo sapiens
PPPVKRECRDAQYVGDVTSFEQIALPVLRNADCSSVPVQRACVIDEIGKMELFSQLFIQAVRQTLSTPGTIILGTIPGPKVKPLALVEEIRNRKDVKVFNVTKE

SEQ ID NO: 978536 - protein, 69 aa, Homo sapiens
KSLCRLAKPAPPKPEPKPKKAPAKDRERSVPKGEKGKMLMLCKDGEEPVQKIGDAKDMTSALEMLNVCL

SEQ ID NO: 978537 - protein, 34 aa, Homo sapiens
MWYFINGSYEDTKGTVSAIRGLLGNKMLFKRHTS

SEQ ID NO: 978538 - protein, 103 aa, Homo sapiens
IFEEPEDPSNLLILLREIILTYLCPDCDVHATAGRYIAHPWTTLTVQWSRDLEHRRHDPYETYQVHDYLSEQALFPVRERLQYFDKFECAWNGSDSVIMTVVA

SEQ ID NO: 978539 - protein, 145 aa, Homo sapiens
  misc_feature (31)..(31): Xaa can be any naturally occurring amino acid
MQVTMFRYVGPERGTEESKGFFQNLVLLGRXDAGAEKIFRSNGVQLLQRLLDMGETDLMLAALRTLVGICSEHQSRTVATLSILGTRRVVSILGVESQAVSLAACHLLQVMFDALKEGCQKGFPRQRRVHHLWILARELEGPHQE

SEQ ID NO: 978540 - protein, 152 aa, Homo sapiens
MTLSGQVVALGGRREPMQHRVATLLAANEDFPSGEGVQGVFEVHEPAVIHGEPALPEAFRLLGPRLLHVAFLQVVPGELWHQICVAGPWECHLQVVEASSSECIEPVHNLLPVLMVDEDVTGAVVLQVGDLQAVGVGDLGRLESGVQVLDLH

SEQ ID NO: 978541 - protein, 182 aa, Homo sapiens
RGSPTVHLLAVYFFIRILESVLGPPCSWYLTLAMDARRHCVQSRRLFISFFNRLLMKSLAIVGDLINASSSMSPVAEVTLAKVSLSLSPMKGERPLTEDVADDPDAPHVCGVADGLIVDHFRSHKFWGAKEDLQRPRILQPPGQTKVDELDPGARLVDTHDVLRLEVQVHDALLVDVLHSLR

SEQ ID NO: 978542 - protein, 136 aa, Homo sapiens
RGCKRIETAETQSCTLDVWLPSALLSGRGDVPCVCGSVGLEMAFCGKDVDFDGYPDEELPCSARNCKKDNFIYVPNSGQEDADRYGIGDACDEDADGHGILNEQDNCVLIHNVDQRNSDKDIFGDACDNCLSVLNN

SEQ ID NO: 978543 - protein, 126 aa, Homo sapiens
LSSSIVSPFGLRRPRQVRKAPRGSDFITPDASLCPACTPVQYNTVYSYSKSCRDGSERDAPLVNKVVTLLSPSGNLHLEANPDTGVLTVSWERSTTPDITGYRITTTPTNGQQGNSLEEVVHADQS

SEQ ID NO: 978544 - protein, 120 aa, Homo sapiens
MDRRESDLAEHSIDIAYKLLRANPAKQSVFPLGEIEMYVLDTEEFLDEPRKAGVSYIEQTSMKILNSPQCPLWAREGEDSEVKKAFGHLRGSGPQLLKKQRAQCIGVSAGTAEGCRPCAG

SEQ ID NO: 978545 - protein, 48 aa, Homo sapiens
MYSVIRCKEAQRLVKAIGIVVLDSSRPTHFFRMVHTLKSLLLNMGAGS

SEQ ID NO: 978546 - protein, 75 aa, Homo sapiens
MPLTGSKSHGNLQVCIRNALVVLPAEDITQQPGFSIASPTGAQQEKMYETYQPFQNSTRNYDESFFEDQVHHRPP

SEQ ID NO: 978547 - protein, 151 aa, Homo sapiens
PDPGTVMEQRAEARVGRWDPGRGRWGQGEGPAERFLTWRSGPFIIHPMVTEQDSPPTPPRGNSAAASGSAHSSPAVPRSGGTQQPSHPHHRDLRPRHFVERPAYKTSAQTDQGPTNAVTGQGSPPKPGLGTRHCSGPGPGTEHSVPKTSFS

SEQ ID NO: 978548 - protein, 107 aa, Homo sapiens
CTMDPSHCAHVRRPCCCFNVRSRIDIALAIYHVIMSVLVRSSSTQIHVTHAEAFCNLSQMGYLRIADVISILLLITMLFIISLSLLIGVVKNREKYLLPFLSLQIMD

SEQ ID NO: 978549 - protein, 124 aa, Homo sapiens
VRPRPQVRDPIKLDGHRLYSTTPGLQICETVNVHTPLGTHVNTLFWQPELTHTLEASFIFLTSVSIRKSHMTKGHADNGFFSMRLFRLEAFALRSHDVKAHRLKWSLGGRNSTSGIPGLSWLSL

SEQ ID NO: 978550 - protein, 46 aa, Homo sapiens
RLYEDPHSLISMRDLLKTLASLGNKSLLNRFVTKLWYPLSPSPEST

SEQ ID NO: 978551 - protein, 52 aa, Homo sapiens
HDLAILLARPLRSALRLIFGSDVVLSVGSPVSQRTIILEMTPDVKNMNTWLL

SEQ ID NO: 978552 - protein, 118 aa, Homo sapiens
TIYALVYMSECWKRVWMPFVTWESPLPCGLCSLICSTTCDSLGVYPCREFLPFPDPCCIVTYKSASLFPGVVIWGIKKTQVLLSHPQTNGIKIRSWGIGVKRWGHWSRIDTSENAPRL

SEQ ID NO: 978553 - protein, 70 aa, Homo sapiens
MSTTDHKAIATSSRKCRVDTDSPCTKTCLHYRDWEIFLFWVTNYQGERVRITFQTALTITHQCGERGTEL

SEQ ID NO: 978554 - protein, 101 aa, Homo sapiens
MIIIRTLRKDIAKYNKEDDIEDTMEESGWKLLHGEILQAPPVPHDPQLTARNSGIQSDSRMILIVILVAMLGMLSPSIRVALMTTGCFLFMFMGVFGGFSA

SEQ ID NO: 978555 - protein, 34 aa, Homo sapiens
HTGKQSFGPIKLKSTCRLTQKFSEVLIHYPVWRE

SEQ ID NO: 978556 - protein, 127 aa, Homo sapiens
SETLRCKRGESSPGTVSPIPSMKCHSNSVAYSGDFVKFIEGIEVEAYVRQVCKVPVPIGASWVLGTKVPDAYAESFSGLSRACGDGNVHARRRFPKSPLSELPSPSDIVGGCHWPNVTRDEEWHEIT

SEQ ID NO: 978557 - protein, 65 aa, Homo sapiens
PAPDFWGRVRHRGILAAPGGLCHSSFPRFLENTLVDVCAYAGSGNVLKVQQLLHICSEHFGSKEK

SEQ ID NO: 978558 - protein, 101 aa, Homo sapiens
MSLLLVVLILSTSGWENSVLSTSTSISSRSESERSEEIVDPMLSIRIVPSSEDPAAVPVATLKISVLFQILELVLAFSFSFFKFLDVCFGFCEQTKCCVPG

SEQ ID NO: 978559 - protein, 113 aa, Homo sapiens
  misc_feature (1)..(1): Xaa can be any naturally occurring amino acid
XHPAPYSRSRISFLKIAIPLTIPVGHLGSSGAGEGHQEHHRGPGPGLLQQWRETLELSLLLPPRLCRLRSGMVRLAWMVALGLSPSFSLAKQWLLRIRCREDFTIRAFWGCTG

SEQ ID NO: 978560 - protein, 121 aa, Homo sapiens
MQRKGKVPVLKAEEEGVSLGVPLRTTRVERTGMDTSPYCQAFGAAGRVARLHAAEQETYWAVCAGPLEALEIVASGKVKRNKGQAGDGGRVYHQDNLQFGSKERGTRRAGERCWIRRQSLD

SEQ ID NO: 978561 - protein, 131 aa, Homo sapiens
MPFEGFCAVPGSRKGLLLLAVVASPRWALLQEPQWGWSRLPRARGSLETCKDLMPLTQFSKKLHFARAPSREVLRCATRGHRWPRSLGIVRALGLLSGEPEGSSNPGVLWKLQLVYMQMRLLKSVVTSLFS

SEQ ID NO: 978562 - protein, 55 aa, Homo sapiens
EDPRGALDSSGINFPGFGGDQLEIQLTEQLRSLISCCDVIKFTEGEPKDLNVLYR

SEQ ID NO: 978563 - protein, 156 aa, Homo sapiens
PVFRVKVEKWQEQYRKNEDTRKAMARDRDQRQRLIRSAVGEAQKGSLSGELHADDEGSFQLLIGDEHHHVPGTQSEKGGHEPFVEGSGPPPSGTHGIVRTVASATVLAQVRVHVSRLDHVYRGGDDSGAEACPKGRSEVTREVICHEVGFQEGILD

SEQ ID NO: 978564 - protein, 100 aa, Homo sapiens
CWTLLIKQYCRESGCATLLEATERRRYGTSTYKIGSAEAESVEETPENLQDFAEKPAFTAERMYDVTPPGVVMQLACTAIACSTLFVETSLRRPQDKDAK

SEQ ID NO: 978565 - protein, 42 aa, Homo sapiens
THYWLTHYWLYWPHYWPFLGFVISPFGGYSLEEQNQEKASSG

SEQ ID NO: 978566 - protein, 81 aa, Homo sapiens
RFTITCGPTDCCLSLMYFSQQALRRQSSMKAISGFRKTRLESSNSMTGRMCTPITSSFYAYSHALSSESNENLSRCIWKQP

SEQ ID NO: 978567 - protein, 181 aa, Homo sapiens
  misc_feature (94)..(94): Xaa can be any naturally occurring amino acid
TGSWNPPAAVLMVLLSSLCLLLPDEDALPFLTLASRDPAKMGKLSASKRGLDRYVVTVLIYSCPSIYPTVLPSATCWPHMLHTLLGSTLVPGPXLGCPRSWQTGSSVPSVPNDLQVTTPSLASPASPRWALRIPIAFGTLVQLVRSFSRRTGAGSKGLQSSYSEEYLRNLLCRKKLGSSRR

SEQ ID NO: 978568 - protein, 65 aa, Homo sapiens
KAVSWEKLFFNINAHEAAAMRAVYQAAALSPAFKVKPFVVRDALVYPILVEFTREVEEEPGIHSL

SEQ ID NO: 978569 - protein, 56 aa, Homo sapiens
VYSPLRFMPSLDKFRDTVSTVVDLPRYRFSWSLVDVYFTTGGMPPLYKSVEREPVL

SEQ ID NO: 978570 - protein, 80 aa, Homo sapiens
MGVKYEHYKNIHTLLHLALNWITEIDNSTAYRRMSKYPRHHSFNLMTPSYKLSGRSYAIISSISDIGDFKRGTVIERLTH

SEQ ID NO: 978571 - protein, 59 aa, Homo sapiens
LNADTAYRSMLQDREDQSILCTGESGAGKTENTKKGQLSDDEKFLFVDKNFINSPVAQA

SEQ ID NO: 978572 - protein, 42 aa, Homo sapiens
  misc_feature (14)..(14): Xaa can be any naturally occurring amino acid
MTEACMHALQDDVXQRLRCRPTCGAPSTREHRAALQISLSWS

SEQ ID NO: 978573 - protein, 68 aa, Homo sapiens
EYHYLLAINLNNRDISLTSILQVLHARKKHESETDIHFSGNNSEKPVVIEKDIHIQDNRDEHEHNLHL

SEQ ID NO: 978574 - protein, 72 aa, Homo sapiens
MTIYVCGHMDNLCTSSTIFAAAHLIGWYDPKVTRVFHAGLGVVLGEDKKKFQTRSGDTVRLMALLGAGLKRS

SEQ ID NO: 978575 - protein, 41 aa, Homo sapiens
DRDGHNGGEDEVTEVVLSNKIPKMLRDLTCAYYGSMGFFPW

SEQ ID NO: 978576 - protein, 75 aa, Homo sapiens
MIKTIALGRYELDTWYHSPYPEEYARLGRLYMCEFCLKYMKSQTILRRHMAKCVWKHPPGDEIYRKGSISVFEVD

SEQ ID NO: 978577 - protein, 94 aa, Homo sapiens
MSSSITYQACRHMDSHQTLIFFSAHSCLLISRAPALALDFRSVGGVSQDGSCGHFQAVPLSLWLVPTVPHCVSVLLLWLPSRPSLHSVCSFLPK

SEQ ID NO: 978578 - protein, 144 aa, Homo sapiens
IADFLSIKRRLADSEIVLKAVIVDLKPTINGHLGCSFCTPMKEPRHALLEKAYSKLLGCYEALGGLTITELLCLHDTLAETVDMQKGRYTELVEEKYKLFGELYKTFTKGGLICCSIESPNQEEQEVETDWGLLKGHTYTMTDI

SEQ ID NO: 978579 - protein, 161 aa, Homo sapiens
  misc_feature (154)..(154): Xaa can be any naturally occurring amino acid
RCLAFIDLGASFLPVRSSSKPATWPGCRGDQREEAWALHDLAWGSSNIHSASTHGFCHWFSSPSTLKRQKQAIRFQKTRRQMEAPGAPPRTLTCEAMAQIRYLHEEFPESWSVPRLAEGFDVSTDVIRRVLKSKFLPTLEQKLKQDQKVLKKAXLAHSLQH

SEQ ID NO: 978580 - protein, 122 aa, Homo sapiens
  misc_feature (118)..(118): Xaa can be any naturally occurring amino acid
MAIPEATPGGLWVPKAGAKDWVQCRCPVSWLKRTGCRSSGGGRQRVSGELQVTPVLQPVAAEPFPEAAHELQLRVLLHEPSSRRGVQSSGLRVRITGFRDACPPHTDSALNLMKQGLXHNTP

SEQ ID NO: 978581 - protein, 125 aa, Homo sapiens
SAFSLGEYSKRCLSPRELRSGSQQVLVPLYLPEHQDNPYRCAASLAFAQGSSIPTVSSPGVAEVFASWRHGVQQVCGRPDIRERIISASLFLRFLCPAIMSPSLFNLLQEYPDDRTARTLTLIAK

SEQ ID NO: 978582 - protein, 38 aa, Homo sapiens
LGFLLHDAVRGDGERGQVEGNTTDEEGTENGHLGGGPL

SEQ ID NO: 978583 - protein, 140 aa, Homo sapiens
YGLCQVLPGKMMSVILRLIRTVVLSLAEMEIFSSMDTLAVGSGEKESAKPIMSEVFFVILSKLLTQSDDLSVHTTGPHRPPPLTPLGTPQAVPSTLPQSSCVKCCFYVPELTLYICPISGDGGHADASLGAGVLIMRDKL

SEQ ID NO: 978584 - protein, 89 aa, Homo sapiens
MLHASDYKYRLELLQLKVNLAHVTLGADQVFHFGYEHHSRPLEPLYGFQGLYKLPSQGQVLGFLLPGFCLSSDPLIRVLGRDVFLLDYN

SEQ ID NO: 978585 - protein, 113 aa, Homo sapiens
YAINEETRYHHDQVVLVQLMNVLAHDILGADQVFHFVYEHFGGPLEFLFGFQGLFKGPSQGQGLGFLLPGFCLSSVPLIRVFGRDVFLLGYQLIKFPLLLFQVGHELPEEEND

SEQ ID NO: 978586 - protein, 142 aa, Homo sapiens
HREALSNCYSQAGFLDLIAGSMVSTGLWTLRRVSTSVISTTQVQQRFLVVALSVLLDIIVQGLAVLSLEFRPNFQHVHFTAGDHDSDQDLISRPLALHGVIQPISKIQGLVLNALNQVQESIFQVSFNLFPDAVQHVIRAVT

SEQ ID NO: 978587 - protein, 89 aa, Homo sapiens
TRIFFFFRDLHGGCQNLVPFELLVELPQCLSVLGICIFQIIRRLLFGLLFIWVYYFHVILHMIEVRDIELVQIGGVLEGDDVLPEEEND

SEQ ID NO: 978588 - protein, 48 aa, Homo sapiens
RTLTEQATEIVFARLLVSPQSFLLRPELHNHRTLQVRHEDRAFVLDLF

SEQ ID NO: 978589 - protein, 106 aa, Homo sapiens
MVPDLTCQRSRPSTPTVIIGIDTGIGRILGVVNIYWVDPSALVIWVVDLPGLPLTLVLRVLNHWGFPLSVHLFIPVLGLLSIRVRDMLGLVPVLRLGVCGIIDLGP

SEQ ID NO: 978590 - protein, 77 aa, Homo sapiens
KGNMNPCKYLAQLVSSSITQLAPATLFFLLCTPHMLNSHLLPHPSSPCCPGNIPYRTCSLALHASPIALSLTRFRTH

SEQ ID NO: 978591 - protein, 51 aa, Homo sapiens
MSMYLGVNPSVLVIWVVDLPGLPLTLVLRVLNHWGFPLSVHLFIPVLGLLS

SEQ ID NO: 978592 - protein, 187 aa, Homo sapiens
AIFMQSVYQAGWIVIFHTESIPTRDDVRSYGVTREYDDLMDPSHMTESASETLHPEKENASLSTICTIDVSMIMVKCWLIDADSRPKFRAVASSNSPKWPRDPSATPCHSGGCKECICHVLTDSNFYRALMDEEDMDDVVDADEYLIPQQGFFSSPSTSRTPLLGSLSANSKHSTVACIARNGLQRC

SEQ ID NO: 978593 - protein, 125 aa, Homo sapiens
MQVSSAVMGIVTRELMLVDTCQGGKGSAVKIFNRHKESQQSRKWQLLVCDKKLIDKYQKFEKDQIIDSLKRGVQQLTRLRHPSTSYCPASFRRIQVNFYKNLHSRLPEQIVKNNLIFEICFKYCQ

SEQ ID NO: 978594 - protein, 90 aa, Homo sapiens
MKCRDISPWGNSPRRRSLGWKRKRECLDESDDEPEKELAPEPEETWVAETLCGLKMKAKRRRVSLVLPEYYEAFNRLLGRRTPRGHFASR

SEQ ID NO: 978595 - protein, 64 aa, Homo sapiens
LACLTTTYVVVKHAHVDHDYVVVKHADDEYTEQGRVLPSPTQGREAERVLTGSYVVVKHAGTDA

SEQ ID NO: 978596 - protein, 33 aa, Homo sapiens
CFTNHIEVQRKEVQARAVFYPLLGLGGAVNMCY

SEQ ID NO: 978597 - protein, 159 aa, Homo sapiens
  misc_feature (67)..(67): Xaa can be any naturally occurring amino acid
  misc_feature (81)..(81): Xaa can be any naturally occurring amino acid
MGMKALGHDAKALDFMSETFHAIRKMTCEPGPVEDTLCSWTVVYVTRDGLIACLLPHAQPSEENFRXQPSVRVAQDAQGPXHGRQLPAVQPTLRRRPEHHDSSMHKALGILAGPNLHTPVLEKICSICKAMDTWLNADPHNVVVLHNKGNRGMKALDMK

SEQ ID NO: 978598 - protein, 78 aa, Homo sapiens
FSDDDCSLGLSSIVYLKRYTLDTARVNPSSLLDYNKTIQYHLLFKLPTGKFQSKDVLLSYKNLNWVLTHLLHVLQIIK

SEQ ID NO: 978599 - protein, 141 aa, Homo sapiens
VAVFEFPLLLVQSVIYSHNWTRTKRSSLAICGSRSNSNSLLKACGPTVVYVVSVYAQNPMRRESRPLVQTVVTTIPAPTDLNVHSGHDPRSLSAQWTPPNVQLTGYRVRVSPKEKTVPMKEINASPDSSSVVVSGLMVATK

SEQ ID NO: 978600 - protein, 76 aa, Homo sapiens
LRALLLRSSYDPTVDAQDACELTNDEDREAKGLKDYLEPLFRSSCYGSVLKNATSIHEDAGLILGLAQWVKDLALP

SEQ ID NO: 978601 - protein, 143 aa, Homo sapiens
MCTVESLAGAPYTRNSCAYQQPDLRAEVSIQRRVNSGCMQNPSLWRKPSPSPRELQNHTEPQRDVWTLFQVDHATNRTQFGEKIHNFGLIQEKLARMVMLQYVTESMAYVVSANMDQGATDFQIEAAISKIFGSEAAWKVTDE

SEQ ID NO: 978602 - protein, 105 aa, Homo sapiens
MLIRPAVRRSFPVTTTLNHSELKDGIHPRKLYCKPKRTLEETNSSSGHSSQYKTADTYQKDELPQDHDRSQQQTAYYAYLKTDFRTLHSQQNDHEPGTHFRKMCL

SEQ ID NO: 978603 - protein, 85 aa, Homo sapiens
MGPCEGEPSPLLLSSKKMVDPHGVGNLSLSDTVACCKRIFVRSSFEKWLVLKASCYISSPFDLKNERVRLDMVFGRHVKSKEVDL

SEQ ID NO: 978604 - protein, 70 aa, Homo sapiens
WRMPDGVGQMDLEPEVEEAATPYGTWSGVGGGYSPSSGRAIGGGLSSVGGGSSTIKYTTTSSSSRKSYQH

SEQ ID NO: 978605 - protein, 80 aa, Homo sapiens
MTVHGSYNSYILLKSGTSVNIHKINNCKIFNLLGDAVQDLVHLHARRIPVVADADDDHAVLLREDGLVHLPAVVQVRGLV

SEQ ID NO: 978606 - protein, 121 aa, Homo sapiens
MTPLFAFQIFSKDLFRLQVQGDLHGANPGSVISLYHKSKIAEELKDPGTPNQFLRDFLKGEVQFGSWFEHIKGWLRMKGKDNFLFITYEELQQDLQGSEERICRFLGRPLGKEALGSVVAH

SEQ ID NO: 978607 - protein, 113 aa, Homo sapiens
GLRDIRSSLSPHYPPDANEMTQTFPGATSPYNSENCISRSSISLTHSTAASLIVLIITISELSSSDSVWLPLRSSSLSSSSPFISAAESPSASISSVSKLGGWTGIWTRGDLY

SEQ ID NO: 978608 - protein, 87 aa, Homo sapiens
MHFLDTDWWMYTQTWIILRISYLGGFQLLGISLEEHGGHRLQGFCRPLVKPVNGTAVDQGGKLPQTSSEDLSDGAHAQHHVNIAAHT

SEQ ID NO: 978609 - protein, 125 aa, Homo sapiens
GADDTDRGVSLTIGDRSGRDKYLHKHDLDHICTSTPGGRKTATSSLPSGSIDDIYNYSYPNTSGAFDNTGAMKSVDETLMCSFQILKPDDKNKGKYGQFSDLNPGGRPITPPRMFAEDTLESLLL

SEQ ID NO: 978610 - protein, 62 aa, Homo sapiens
ELESGVHKGPWPKFYSVEMKVCLEFMVLRTSPVMSKSPGACFNALSSVTRLLPPELPFAILC

SEQ ID NO: 978611 - protein, 34 aa, Homo sapiens
RLDCMALYSLKEVQRELFLLSITSQGHKVGFAHS

SEQ ID NO: 978612 - protein, 62 aa, Homo sapiens
MDGTPILCLFTARLQLRVCTLTLDSGKLPPCLCAMFFIHPDYSASLLPDWANLYASSKSCVI

SEQ ID NO: 978613 - protein, 71 aa, Homo sapiens
MLRTGLSSSSTRCRGSDSLRMVGSIYDSLIDVFLDAQNQSYQYLEKLELLNSYSRTFRPFSKISSALAPRT

SEQ ID NO: 978614 - protein, 76 aa, Homo sapiens
SISSRIPVSDVGICQCFPPSSSHPPGRNTALAVSQDGDHGQLRVLVIPALAIEIVCCSLASWIATRSSSRISSLLL

SEQ ID NO: 978615 - protein, 107 aa, Homo sapiens
MKVDRGLTVYKLEKIDSSMITFQMALQPLYPPAIRPLLPVGQEELPLPSGDPGRDLPIRSTHQQGPRSCPWEERHCRFRYSLDGHNWARRVFEPLGRPLDSVLQQLQ

SEQ ID NO: 978616 - protein, 107 aa, Homo sapiens
ERAGGTDALSDLMIWRCVDTKLKEDPLDVLDNWMISSISSILLIATILIRLLSIGTAQACFWIMIHLKGTSEPAFVFPAFVFRNTKAGRGILGQWCSHVLNVLVPSH

SEQ ID NO: 978617 - protein, 118 aa, Homo sapiens
QVDLAIRLYTGILSRIQQSQGFQLRHFLDLEKIHCLPDPYSEYRICPLDPISASFALTYQDDLYLMECLQEVMLYIQPDHTLVIVIHIIDAHFHHGLCYKKPIIGSYIEKVNILFFSV

SEQ ID NO: 978618 - protein, 70 aa, Homo sapiens
ELVPVLLLLLIEEGVMLQRLRAETVVISMSGALSMAMDDDIGEILDLLGFLTGCQVKARVITTPPRFQFG

SEQ ID NO: 978619 - protein, 145 aa, Homo sapiens
VDSIRIPESDLSRVMGIPPAVPRRFGIAFLVIPRTCFLIICNLRLAFFFSEPILVQVLSLLRPSCAVSDIYNPCGAIRMPPGPSLLIMASVPKTNKIEPRSYSIIPSCGIQAARACFEHSNFFKVNASGPAGHSAKSIEGAPRSD

SEQ ID NO: 978620 - protein, 123 aa, Homo sapiens
ALGVLSDGTQPVDHVDDEALISSAKMGYPMLSDLSMTNTTCRAATALLTVAAPAALPHVGHDVTLRETGAPGRPDSPSGPETPLGPRGPGLTRVTRIRRLSFLSFPPRISFQAKVASVSLGAA

SEQ ID NO: 978621 - protein, 52 aa, Homo sapiens
LIGTSHSRLPGPWLAPAEAPDFLFLERSRNFCHQPFSFVDEDLLHVVDDLLA

SEQ ID NO: 978622 - protein, 94 aa, Homo sapiens
ATPDLTVSGVLGLSLYTTERDLREGFSKYGPIADVSIVYDQQSRRSRGFAFVYFATVDDAKEAKERANGMELDGRRIRVDFSDNKKTTYANKRL

SEQ ID NO: 978623 - protein, 97 aa, Homo sapiens
AQRRVIVVLVYYTAVELTFKLTVDVILGGTAGSASVRKLLMSLASSMPSAQAQVNLGEWGYDLRGKGGTDTGSRHCSGWSSHTSSLLLGLSEVVERR

SEQ ID NO: 978624 - protein, 69 aa, Homo sapiens
RGRMHEDDSRFVAGLHHHFVSSRTGGRRNVRHNNPFRSGYVNLGRGEGIRADRNFSQFLNPFLLLWLSE

SEQ ID NO: 978625 - protein, 95 aa, Homo sapiens
VMKAWVMVHIALGYDESCGVGRFYLNVGWGRITNGNVSCSLCQKPKAGTISNVFVGWIQTDSEVFMAAPVHSSHRFTSSPSHLPSLCDIWLLVPL

SEQ ID NO: 978626 - protein, 60 aa, Homo sapiens
MECQHGCSRVEGTCPVMCMHRIGEYTSTKAPSFRAWAVSTVLTCLTELVQGGMHRSGEYT

SEQ ID NO: 978627 - protein, 120 aa, Homo sapiens
MLSTVCCVLLMYCVVVGYFCTSNVLVLVFLPCCKTVESCLFTGLGSIEVCVSSVRFLLRTICIFNNSTSSRPSRRNERGLVSSPGASLRSFLWGGPSELALECVHLAAHGLVALRGLILP

SEQ ID NO: 978628 - protein, 123 aa, Homo sapiens
STCGGRATYHPRHQEAPMRFTCFSQTGEAAMKTPSAPWHKKEMPQTTPLQKTDGIWLMGRGSAAVIGLQSEPKGLGEQTQLLSTLRHETPGEVGSTGPSGLRCLLVGLVPEFLEGGRHEVRPL

SEQ ID NO: 978629 - protein, 117 aa, Homo sapiens
LAALYSAVVHHVTSSVRSHAVLRGFFLVEARGGRSLVGMDKLCASNARDGDTVLVASGGTAETGLMICIGSTSSFTLISGTGGAKTEERLPPTVTDGGGAAANGGDGWSDGDRSRNG

SEQ ID NO: 978630 - protein, 80 aa, Homo sapiens
MSTQGVANKSTQTMGSTLQLKPLQITPAVRTVPQYKYAAGVRNPQQHLNAQPQVTMQQPAVHVQGQEPLTASMLASAPPQ

SEQ ID NO: 978631 - protein, 85 aa, Homo sapiens
LNTDIAIYGQVSYYIEMNITCYTVMSGAKEPSSTYSLGPLPHITDVFHVIFSYNATKGNHTTESDIPQNQVCAFYLRTATALNSG

SEQ ID NO: 978632 - protein, 112 aa, Homo sapiens
MKTSSHDLMLIRYVRDLAKITDVVEGPGADPARSQYWGPPGYASRWGNIEPEEFLRPRSLQCVSHHLLSNDMCARAYSEKVTEFMSCAGLWTGGKDTCGVSHPYSQHLEGKG

SEQ ID NO: 978633 - protein, 161 aa, Homo sapiens
TSVIPAVQSAAHKMNSVSFLRVSSIKLCHADMRWRLTYCKTPGGAERPLSSMLPQPEAEQVVPSAGSWVGRPRTFTTSVILAGSEQAEQHEVMAGVCIWSKALMLQKAHIVERVWEAVADRDPLACVFRLKQVVPTQPDLAIPGEEGGGCMRREKMGKGMD

SEQ ID NO: 978634 - protein, 100 aa, Homo sapiens
MARSCTASVGDVMAALGQNPTSAEVLKVLNKNNLDEMNVKVLDFEHFLPMLQTVAKNKDQGTYEDYVEGLRVFDKEGNGTVMGAEIRHVLVTLGEKMTEE

SEQ ID NO: 978635 - protein, 35 aa, Homo sapiens
FTVRAFMPYKFTPAHTHAHMEMEKGGSRHEGPRHE

SEQ ID NO: 978636 - protein, 88 aa, Homo sapiens
EYEIRGLRTLLCRLCGEAGIAEVLEMGQTLDRLERLVSVVIPLTALGGGSMMGIGDGGQGKRLVSQAVVVMVQMKEEVVSGCAGEEEG

SEQ ID NO: 978637 - protein, 47 aa, Homo sapiens
MERWSSNVRPGERGLQAHEQQRNNLWGGGQHLKNNNDKKPHPDWSPV

SEQ ID NO: 978638 - protein, 159 aa, Homo sapiens
DLKRTPPVTVIRTLAKLRENVLKPLNTILATADELYPLSVFLGYCQIQRVGSKLFFDKRDNSDFDLLTVSETANETTLKMKVIPINSPRNLAMEGNLINHNFLPTVLENGEGKDTISPNPKPYVEAAMEKNEIASVAYRYRRWKLGDYIDLIVRCEHDD

SEQ ID NO: 978639 - protein, 41 aa, Homo sapiens
  misc_feature (30)..(30): Xaa can be any naturally occurring amino acid
PRGFMSMFRGLAQADGTLITCVDSGILRVXHDKDKDTSSDP

SEQ ID NO: 978640 - protein, 106 aa, Homo sapiens
DLELTGLDIETEQIIEKDCLITDSDLNIKAEGPNLIIKQPDELLDSNVRLVKEHHGKSGLTKAVKESTITLQQAEYAFLSFVTTADSSRALYHLQEIQLHEDEEVS

SEQ ID NO: 978641 - protein, 183 aa, Homo sapiens
EDPHRWMQWEAELHELILRFCVNVPGQQDLRQASAEMSLLIIPLGAHPVAKYLGSVDSKYSSSFQDSGWRDLFSRSETTSVRAKLAVAGRVMQYVNGAALRHTSFAWPEAMLTGRRMIPDEDSYQKFIPFIGVVKVGLVEDSPSTAGDGDDSPVVSLTVPSTSPPSSSGLSRDATDTPPSSPS

SEQ ID NO: 978642 - protein, 151 aa, Homo sapiens
MWSGTGKADYRRIVPIACCEGRVFNQTHLHHANEGNKLLIGVFIRELDVGMSAWCRARDAECVVAAPLTYCITRPATSSCSDTGGSERLNRSLQPESRKELLYLLSTDPKYLATGLRTEGDDEEAHVAKPVGGLVGQGLDKEPEDGAQVAL

SEQ ID NO: 978643 - protein, 166 aa, Homo sapiens
MLRFFVKSLANKTSDWLGYLSLLIIPFGSHPVAKYLGSVNSKYSSSFLDSGWRDLFSRSEPPVSEQLAVVWKVMQYVNGAATTPSFPWPEAMLTCRHMLPDEDSYQKFIPFIGVVKVGLVEDSPSTAGDGDDSPVVSLTVPSTSPPSSSGLSRDATATPPSSPSMS

SEQ ID NO: 978644 - protein, 176 aa, Homo sapiens
AQVAACGTQSYLSSILRFFVQSLANKTSCLAMRIYAILIIRLVVSRCGQILGVCRQLIQYFLPGFWLETFCSVASEPLLSEQLAVALEGDAVRQSGQPTTHQLPVAEAMLTAGISEPDEDSYQKFIPFIGVVKVGLVEDSPSTAGDGDDSPVVSLTVPSTSPPSSSGLSRDATATP

SEQ ID NO: 978645 - protein, 74 aa, Homo sapiens
MFCSGQALWSSTHGEVLIRNTRDSSCHCKITFCKAKYCSSNVHEVQGAVLSRSGRVLHRLFGKWHEGLYRGPTP

SEQ ID NO: 978646 - protein, 55 aa, Homo sapiens
MLRSWSSAKYELVIRWSLSHAINMVYPLGSSRSCSLNFFETMLSALANRRIESSD

SEQ ID NO: 978647 - protein, 117 aa, Homo sapiens
MKLLYIYNRVIVGASYSSLPLPYTAGFQAHSSSDLYSHRACTPQPERSVRMLLTINGSTSWFAGGTAGLVHKLCHHQLLEVEISGLLNHRDLPCSLLLRHPLRMSLFPVDPCMPIRL

SEQ ID NO: 978648 - protein, 68 aa, Homo sapiens
DPTYCSSSSTNEGLAPHPGYKQGRGGAFAITEATYRSFIDAKRIQGHSGKEFAIMAPPKKNKSARVFP

SEQ ID NO: 978649 - protein, 84 aa, Homo sapiens
PVPCNNLPFNPYQSPMHTTEPTPKWLFHPEKAFPGNGGWCRQRSTHQIVEGIGQLFDHLQLPAGWHQVATFSQIHVYGPQVYKF

SEQ ID NO: 978650 - protein, 86 aa, Homo sapiens
DSRGPLFTPDMVYYTKGKGCHSHSADGPSEYGGGDRKLTGPVLYDLTAVAWIQLKKNMAQCCLQNLHKHQLVYDGSDEKQNGLEDK

SEQ ID NO: 978651 - protein, 74 aa, Homo sapiens
LVLALTFLKSGAATIVDMVPGEPMCGELSNYPPLSRLAVRDMRQTVAVDVIKAVDKKAAGAGKGHQVCPESSEG

SEQ ID NO: 978652 - protein, 57 aa, Homo sapiens
RVYCKNGGFFLRIHPEVEYDGVLLEELTLTSSYNFKQKREELCAIKGVCATRYLAMK

SEQ ID NO: 978653 - protein, 132 aa, Homo sapiens
TTWICSTSGTIWHRNSCPGLHLSSLKPAPPTCVCPQSTAPVYACNNHNRFNPEDSTTYQSTSETVSITYGTGSNDRHPRIRHCPGLKCISETNQIFGLSETEPGSFLYNAPFDGILGLAYPSISSSGAHPVF

SEQ ID NO: 978654 - protein, 108 aa, Homo sapiens
YIHGVKSEELKHTLCLLHHSISAMLNRVIRLPVWHHPAHWELCATPYSAAGSVHAALLQWNASSQRTMLQINKRELEHVKKNFSKGEGISSESFLISWTWLQKLFGLE

SEQ ID NO: 978655 - protein, 161 aa, Homo sapiens
  misc_feature (27)..(27): Xaa can be any naturally occurring amino acid
MIAEDAILPMINRMLLLCDHIHRQSLXKSTTRGSPGRMTLNLVPIEQLSVHMCIFAFRYPVKARALLLPPRLEADVVFSSRTSSCCAKYNGLSFLLMFPHSVLEPFEGLHAFCSQLQSLISISFPGFGVFIVSFSSLSLAISSCIKRFSCSRSSFSSVSET

SEQ ID NO: 978656 - protein, 58 aa, Homo sapiens
RILIICSKLSTLTACIHGVCARCSTPCTGSTVYIPAAAAASAGLLLCSHALPHRNPFK

SEQ ID NO: 978657 - protein, 111 aa, Homo sapiens
  misc_feature (1)..(1): Xaa can be any naturally occurring amino acid
  misc_feature (21)..(21): Xaa can be any naturally occurring amino acid
  misc_feature (82)..(82): Xaa can be any naturally occurring amino acid
XFLTLAGTGDWTPLMVKTMSXRLLMAELLTTMSPSEFSLAPMSLLDVGNGAGWSGQQRGACVNNGLAALSAADGLSVHGDAXHGDLPVTLTVTGTQFRLPVWREAVYQCGE

SEQ ID NO: 978658 - protein, 109 aa, Homo sapiens
  misc_feature (1)..(1): Xaa can be any naturally occurring amino acid
  misc_feature (14)..(14): Xaa can be any naturally occurring amino acid
XTLAGTVYWTPLMXKFMSDRLLMAEQLTTMSPSEFSLAPMSLLDVGNDSGWSGQQRVAGVNNGLAALSAGDGLSVHGDAVHGDLPVTLTVTGTQIRLPVWREAVHQCGE

SEQ ID NO: 978659 - protein, 66 aa, Homo sapiens
TVRSDSLLMLVMGLLGLVDKRGVGVYNVSGWPQRRRVASPVHDDAVHGDLPVTLDGNRHPVQTSSV

SEQ ID NO: 978660 - protein, 79 aa, Homo sapiens
APVLTIFGGQHGAHVSTELCTWEACTGSGEYTVDLAACMRDWEVSYGAHVYERNLSREACTGSGEYTSTMEACMHARVL

SEQ ID NO: 978661 - protein, 38 aa, Homo sapiens
ACTPEAADYDITNVLEGIGLIEKKVQEQHPVEGCGAWL

SEQ ID NO: 978662 - protein, 34 aa, Homo sapiens
MTAPPTSPASKGAEYQHFIQQCTDDVRLFGIRIH

SEQ ID NO: 978663 - protein, 37 aa, Homo sapiens
GPEIASSRSGTNASSMWMHGDWKNIPTWTRYHESISY

SEQ ID NO: 978664 - protein, 147 aa, Homo sapiens
AWAFDPGWSLQNVLQGTHGFLTGHLEVIGVLVCPLQVHGSIQVPIANKDGVHFANVHPDAFHHHGARGIPPPSDPQHNQVVAALRGGLAGAGDDHGVGAHRVQHVHHPQGFLLAVDLPATQYLGLKLFGRVNVCKRDHFFLVDGEEA

SEQ ID NO: 978665 - protein, 60 aa, Homo sapiens
  misc_feature (45)..(45): Xaa can be any naturally occurring amino acid
MVSVTVVPNLEPENRSGIPEGLSMSLYITVTRGLALASVGTNKHXWLGKTSAEQVILAVC

SEQ ID NO: 978666 - protein, 81 aa, Homo sapiens
YSNSSRMAARAPPFLLVQALSVTQGGQAGHVHNTSQEPGFPRPLTPRAQADQVQQAAGNVQKLCDGLLQPQGGGGRTQLLV

SEQ ID NO: 978667 - protein, 166 aa, Homo sapiens
ALEDPTMLHLALYSAKQWQPSPKGVCMAKGLGSHFTFQAGGVRGLGGTPPTPLPARGHDFTFNPKSCILVGSDNASSQLSIPNGVMTRQGRTQAPSFQLVTVASTACPCPGDNPSPHDGAAKVSSPPGPQQQTEPSTPGRTEAKSEAAAVAGKEQPAQAQGSPEVI

SEQ ID NO: 978668 - protein, 100 aa, Homo sapiens
GGWGARPGPDEGGLARSRRPPPKSTETSVAEPTGEKPGGAGWDGEVLGKKLEDRGSDKAYVVLGQFLVLQKDEDLFRECLKETCGANAKQSRDCFGCLRE

SEQ ID NO: 978669 - protein, 43 aa, Homo sapiens
QGAEVLLDSVMPLSDDEQFSRKQMPHERDDGEYSTAVLQVNKL

SEQ ID NO: 978670 - protein, 117 aa, Homo sapiens
SAVGLVTIETDREACTEASEVELSVNTVTGAATCSRSSGNTSDTCLYLHELRTGVYHTFLNLLKKKLAKIRVNRTCTVAYTSVAQNRNLRNTDNLRRMNCFHKSISNDVAPQELEYL

SEQ ID NO: 978671 - protein, 154 aa, Homo sapiens
PRRRRKEPQYVASVLKCKSLRIHEGEEPEESWNSLGGKKDYQNTPLWKPKMKTIHLGYKGALTKVEDDVIEEIPGEYTQDDLAEDDVIELDSWKQIFIWIGKDANEVEKKRISEICQNVPYETRTLLEETRGHQLSSKKRAMSHPHSQAGPGLG

SEQ ID NO: 978672 - protein, 75 aa, Homo sapiens
KWCWCAGFRSLIAGIVYLDHLHCCPCGREEITPKSSQEYWAYSLRASLAMMLISSVSLRQPRHTAAPTDPADGPV

SEQ ID NO: 978673 - protein, 97 aa, Homo sapiens
ALGNWYVSDLVPRHEAYMVRWLQVLAPYRTTRDAPTASAQSFPSSRVRLEYDLTAELIDNCRCLLGSQLFHFGLPVLHNFFLLFIITELQYLRIVHF

SEQ ID NO: 978674 - protein, 90 aa, Homo sapiens
AKTKYFHTVLSGNEPVLFLKVLCFILREVPLASANSSTMFRLVVLRLTEVQYLMILGWYRCFKRAISLTQSCLALGSIISKICPFFRASV

SEQ ID NO: 978675 - protein, 53 aa, Homo sapiens
GSFQCQCLSGYHLSRDRSHCEDIDECNYPASCIGGDGINTIGPQIFLPQEIGY

SEQ ID NO: 978676 - protein, 88 aa, Homo sapiens
QALQCKRNSKRSRPRLVLLRPPVATLILRVSVMTSTSSFVSLAKKVCCNFTSKTYFMSQQSIRTCTDRGYQALPVFLLLQYLLHSSTL

SEQ ID NO: 978677 - protein, 43 aa, Homo sapiens
EVHGELTDVMVVMQAKCRSIHWFIRKAKHRQNASSESNSFKMP

SEQ ID NO: 978678 - protein, 130 aa, Homo sapiens
MGQPGPWITHDPSRPYAEQYRIDARKYSTPCFSYVSPWTCGANTEILAERTYRLLDDNMDQLIEFKAFVSCLDIMYNGEMNEKIKLLYRLHIPPALTDNDRDSQSPSEESSVVNIETPGLLGNPMVMQLI

SEQ ID NO: 978679 - protein, 88 aa, Homo sapiens
SHLATVIMSIRSNAAEDKEHVIEALRLVPRYKFPGRQKIHISQKWGFTKFNADEFEDMVAEKAVIPNGCGVKYIPRRGPLDKLRDLHS

SEQ ID NO: 978680 - protein, 56 aa, Homo sapiens
DPCDQVSHLAKVIYAIRSKLQNKEHVIEALRLGPGSKFPGRQKIHISKKWGFTKFN

SEQ ID NO: 978681 - protein, 176 aa, Homo sapiens
MSTSGRGLMAGRVTSVGAVLQALPSAGGLPLCGVMAGCTTVPISKGSRPIDTFTDSPRITKPGSIDSNNQLFAPGGRLSWGKGSSGGSGAKPSDAASEAARPATSTWNRFSALQQAVPTEGTDPRRVVQRSSLSRERGEKAGDRGDRLKRSDREGDRGDRLDRARTPATKRSFSKE

SEQ ID NO: 978682 - protein, 78 aa, Homo sapiens
ALIEMCLEAGTAEDVMTVLTPLTEKDYEGEKRVPRALQAHKMAWPFLEPVDPNDAPDYYGVIKEPMDLATMEERVQRR

SEQ ID NO: 978683 - protein, 115 aa, Homo sapiens
MSASVVSCHFAVLRRVLELELRSVRSCWSAYHAVYTELTGALQFGYCLLVGTFPFNSFLSGFISCVGSFILAVGLRIQINPQNKADFQGISPERAFADFLLASTILHLVVMNFVG

SEQ ID NO: 978684 - protein, 107 aa, Homo sapiens
MCWKRHYEICLTDNCRLLRNAWRKPTYSSIKCLRRLSLFSEWKHSKKALTWFDIKDFGSGGLRRGKCWGCFPVSPLVLGTLHVNMVGLNPQLLAVSLLNQYLRAKWN

SEQ ID NO: 978685 - protein, 73 aa, Homo sapiens
LGLYECGRYLRTPSLRRVAIEDEDEALDKRISICSSDKRIACEEEFSDSEEEGEGGRKELFQPSIKAKESQRQ

SEQ ID NO: 978686 - protein, 85 aa, Homo sapiens
YQAVGRAESMCRQTFIVRESDINAGGFFPNGYAFTTGSDDATCRLFDLRADQELLMYSHDNIICGITSVAFSRSGRLLFVGLQHM

SEQ ID NO: 978687 - protein, 125 aa, Homo sapiens
LIFITVIVKVPHRLLNDNDSNRINLFVNSLDCWCLRLSIALRRLDSFTSKPANSVRIDPGSGPTSSMNTLPNSSKERRQGPSSISWEITIPIKLHCGLEDVRGGPSLSVSAISASKPLFNCAARS

SEQ ID NO: 978688 - protein, 135 aa, Homo sapiens
CYTIQLVPHRFAGTLMDVSWRQEERGCTPRLPCSHVEVQAAAEENPVGLAVLDEEKEGVVGAEAGDESGTPHHHDGSCGGCSLRAFLIDLHKRLVHDLGQRQVCLGHSREVCLAQLEGISHAQVAQDTLHVVAFL

SEQ ID NO: 978689 - protein, 117 aa, Homo sapiens
MKETIIALAWEAPGSKSAVLDERLRGYLCLSTSVKNNGKIELIKMFDKQQANTIFWSPQGQFVDVAGLEEYERCLSVVWTLRTARSMTIAKNYNGYPDVEWGSYLALRFHLCVLVEP

SEQ ID NO: 978690 - protein, 107 aa, Homo sapiens
MLTSSLTPLASGFSSLVCSSSVSSSFSSGSFSFSSSVWTLLAFLQLEEYLRPPSPSSSESENSSSQAIRWSEEQIEMLLVRVVFVLIATLLRYGVLRNRLHLTRGCG

SEQ ID NO: 978691 - protein, 38 aa, Homo sapiens
NSCPAELPNIKREISETEAKALLKERPDAEHIIIATRS

SEQ ID NO: 978692 - protein, 131 aa, Homo sapiens
SSPPMKRSTNKIYNDIAACLTQHKYLKHTCTYLYLIIYEFTTYEKCLTTISFVYGVIFIFHPLHVTVISFLTFPFILEYILCQFIFLLLNILEGKVFFSGCLHMIPKAGYVPLSFWLKFSLQPSWVLRFGS

SEQ ID NO: 978693 - protein, 123 aa, Homo sapiens
MRENIQRPKIAWSITGERYCADDEGTGKIIHFIKYDTGNLCMVIGGANLGRVGVITNRERHPGSFDVVHVKDANGNSFATRLSNIFVIGNGNKPWISLPRRKGIRLTVAEERDKRLATKQSSG

SEQ ID NO: 978694 - protein, 96 aa, Homo sapiens
EVTAFSKRNIVKISCKDELCPLLFSHSFGRERKAAGKANMDENHLEQLSRAGNLIPTYTGRSALTVEEFCYQKLVCMFVDSSGEWQTFFSFSLSPI

SEQ ID NO: 978695 - protein, 68 aa, Homo sapiens
FNYANEKLQQHYVAHYLRAQQGERMGEQEAGPSIGILNPFLTFQPQVPGSDVEAFCSFSFYIYIDKVI

SEQ ID NO: 978696 - protein, 85 aa, Homo sapiens
MMMEIAVMDAGPSLQVLVMMEIVGLVCGALPQVLVMMEMAVMDAWALPQVLVMMEIADIGAEGIPQVLVMEIAVMDAGASRKCWW

SEQ ID NO: 978697 - protein, 94 aa, Homo sapiens
VLEEYSNTREREKHNYNRASAKRLVAHLYQNVCACVRQPSQGPTCGIKGTSETGPWVVTGDLLLLQSSQAHATYDTYGVFNSFQHQECHSHKPL

SEQ ID NO: 978698 - protein, 125 aa, Homo sapiens
ITDDAACTGRRHYLEKAAAQRKARLGENSAFLQFNWKADVVESWIGEKENSLKTDDYGRDLSSVRTLLTKQETFDAGLQAFQQEGIANITALKDQLLAAKHVQSKAHRGPHASLMKRWSQLLANS

SEQ ID NO: 978699 - protein, 73 aa, Homo sapiens
MGRARLRSSPTAVLDIQVWVVTATFSTAGDINVVRAEGVTQVGMLAHGGGCTASYHIALVFRFVSAGGYQTLI

SEQ ID NO: 978700 - protein, 141 aa, Homo sapiens
RGSPPHHCKVGMVFDLDDFNTPMCVCHDRASCPSPIGDLDMVCCNDNMTFYSSCHFFVTKCTLEGTNKGHMLHLDYIGPCEYIPPCLDSELTEFPLHMRDWLKNVLLTLCERDYDNNLLTEKHKLRVKNIHDNDKRLEAGD

SEQ ID NO: 978701 - protein, 115 aa, Homo sapiens
EKQLVLITGLRTYGGLLRWRGGVTTLTCAMAETFSLCLFSRAFDLCTRGADVRIRMNADPRESVFTNERFPLRMSRRRMVRKSRAWVLEKKERQQAQGRDVRPDTQYTGRKRKPR

SEQ ID NO: 978702 - protein, 146 aa, Homo sapiens
MLGYARSDRREMIQEYYFTLHLDVPVASASRCVYTFSDKKADMGTGRFSKNPDPPDGLVLIPDLKWNQQQLDDLYLIAICHRRGIRSLRDLTPEHLPLLRNILHQGQEAILQRYRMKGDHLRVYLHYLPSYYHLHVHFTALGFEAP

SEQ ID NO: 978703 - protein, 80 aa, Homo sapiens
MSGLRLLIQVRVYLNPEQSGEIMYDCDGDEIFHVDLAKKETVWRLEEFGRLASFEAQGALANIAVDKANLEIMTKRSNYT

SEQ ID NO: 978704 - protein, 161 aa, Homo sapiens
QIVSELGDGATREWESVPPVAVGIGVTVTRNTSHVLGVAHVGLQTSGCHQPGPPDELLGTQASTRQAHRRGLHQHSRELGVTEGLVHARLEEALQADDGLHVCLVLSELVELLEHADHILGKLLWGAVGRRQLLLEAATIRSDPGATGLVQEKAERQQLMQ

SEQ ID NO: 978705 - protein, 72 aa, Homo sapiens
VECTELNAELLCVACKLIPQASASSTGWAMKTFIEHLPGRLWEGSTSRERGSTGTQLCKALVLEQLTPALNS

SEQ ID NO: 978706 - protein, 157 aa, Homo sapiens
KQLLVNLSQCDHQLFLFALFTKDIDILFPEGAEEEGVNLGQPCPLDQVIELPEGGVSGQWLDVLEEVLLLGLKELADVGDEERVGPEGADVDPDHLGGVDDLAQGPHEGPVHPHQLLRLDLSCLVQHHADLVLMVLQSLDHFRELIGDVQLVGVEVQ

SEQ ID NO: 978707 - protein, 66 aa, Homo sapiens
MSRAINLTQKLCTTVIAAEIMYDWSQSQEELQEYCKHHEITYVALVSDKEGSHVKVKSFEKEDAVN

SEQ ID NO: 978708 - protein, 71 aa, Homo sapiens
  misc_feature (51)..(51): Xaa can be any naturally occurring amino acid
MKGCAIGSQPLWLFPALFDLSIGDSSLRGSPLSEFSRGSCWAQPPQGPQSXRCLGQACGGQLEAAAVCLLV

SEQ ID NO: 978709 - protein, 104 aa, Homo sapiens
SRPIPHAFRLMAPPGASAVSAVGVAANACVMFVPENLGSVGLSFLEGCTEGAEGAGKWGRGWKLIGWWWLPGLKRVVDVKRGILPAGSVLDHSWVLKGVGTRMF

SEQ ID NO: 978710 - protein, 139 aa, Homo sapiens
MTLPSYLSRTSASHLLLHTRCTKKISSLFSSSSSLSLRLTGNPVTYTLRSLNWLDTWIVVIHGTSSNGWSCIRSRHSSMLIVLLLMLQHLFSHFGVIKGDQSRARVAEGSGSANWKLQTYAAIRVLLGVSSEYQGDLGH

SEQ ID NO: 978711 - protein, 126 aa, Homo sapiens
MSLTLLDKYHWLPRKENGLEASVVGSHNSSFPEVIKLHITEVNVILHGKLAIPAVPRLSTTPMVGKAPPTYRCRGATPKRELPEKLVDALLTEGAYIAEQISSCCALMADMAEYPNPPLPNAVSST

SEQ ID NO: 978712 - protein, 122 aa, Homo sapiens
ISQQCNGKYDCVDGSDEASCPKGDVRTCTKHTYRCLNGLCLSKGNPECDGKENCSDGSDEKDCDCGLRSFTRQARVVGGTDADEGEWPWQVSLHALGQGHICGASLISPNWLVSAAHCWLMN

SEQ ID NO: 978713 - protein, 120 aa, Homo sapiens
SQHLFLHLTDSSDLQFVQHLTPTLRSVNQALLNGKPAFTTHQSGMSVEPNMEAMLITGFRATQALLGLWVLTNQVAGNEATMGTTHKGHMACIKVFLLEHLFHCKLDILHILVAHIAWEG

SEQ ID NO: 978714 - protein, 174 aa, Homo sapiens
AVVIWVMPVSDLMRFDEIFLKTRVYLYGYVSHQEVKEIFMHSGLTQNLLAHIWALADTRQTGKLSKDQFALAMYFIQQKVSKGIDPPQVLSPDMVPPSERGTPGPDSSGSLGSGEFTGVKELDDISQEIAQLQREKYSLEQDIREKEEAIRQKTSEVQELQNDLDRETSSLQEL

SEQ ID NO: 978715 - protein, 141 aa, Homo sapiens
NRNTAITRKDAIPGAAITGQVLYRARPFNPPKSTTALYSCNSTPFYHIDVTYQKLLACNRRLLIWSQALVLPQLQQLPYPPGACDFLAWRRMVFRRMVFAYGFSFNMILKFFSGFFFRTLDGSSCVVLEGLFGSLGFSRFC

SEQ ID NO: 978716 - protein, 158 aa, Homo sapiens
FRTACNYCKLFPWTLSLTVVVSYFEVGLCKLNSIKLGHLLTQFHFAQDSPELGLVNAGEEPAVGIGKGLAEKKALEPAYRATTGCMMPNVGNTQVLAEGHYIGISKAHPLHHLGCCLWSTSPQLLIAHIVGNGVALKHTESIITLKCWDLAGKENAYK

SEQ ID NO: 978717 - protein, 196 aa, Homo sapiens
SAHLGLLASLPVEPFSLRGVSFLPLVSQQYFIASYRAIDSHSDTAPKTARQLGLVKCRVRNQRWVLGKAWRKEGSENRLIEPQQGADNCDVSQCHSCAQQKSPRLQVSIQQPQNSPHFLLCILSGLFVVVHDAQGGEHPGTGWGHYIGISKAHPLHHLGCCLWSTSPQLLIAHIVGNGVALKHTESIITLKCWDLA

SEQ ID NO: 978718 - protein, 43 aa, Homo sapiens
LGMETKNGIPYWIVTNSCVVPSGDCTGYFLIERGTNMCGLAAC

SEQ ID NO: 978719 - protein, 169 aa, Homo sapiens
VRRLERLDHLAVVFRQKASIHEGWTDGKEAMLKHRDYETATLSDIKALIRKHEAFESDLAAHQDRVEQIAAIAQELNELDYYDSHDVNTRCQKICDQWDALGSLTHSRRGALEKTEKQLEAIDQLHLEYAKRAALFNNWMESAMEDLQDMLIVHTIEEIEGLISAHDQF

SEQ ID NO: 978720 - protein, 153 aa, Homo sapiens
APLAIHSMQVHKETIDAVLYAIPGRTDIEVGIYGMEGIPDNDMHERRRLLEQKTHESQKKKQQDDSDEYDDDDSAASTSFQPQPVQPQQGYIPPMAQPGLPPVPGAPGMPPGIPPLMPGVPPLMPGMPPVMPGMPPGLHHQRKYTQSFCGENI

SEQ ID NO: 978721 - protein, 39 aa, Homo sapiens
TVTKKAKKEQQRKTEEKEGHREKVEQNSNTAVRNVKCHS

SEQ ID NO: 978722 - protein, 38 aa, Homo sapiens
SHITSSIQGLATIHAYNKGQEFLHRYQELLDDNQARHT

SEQ ID NO: 978723 - protein, 78 aa, Homo sapiens
RPSVLGRSRGPACGSEGGTSCFSISFVDATVCVGVRVVVSGMSCPAALGFSTACRLVHRSTSMMQFAASAAGIFTRLN

SEQ ID NO: 978724 - protein, 80 aa, Homo sapiens
TGDLGKEIEQKYECGEEIVITVLSAMTEEAAVAIKVMDKITGSQGGGGGSRDPLNLIMSPCRGWPGSGPVLMWTPPTEFI

SEQ ID NO: 978725 - protein, 82 aa, Homo sapiens
SLSVQKNYECVVGLKGRQNGGACGAVTTAAVCSAKKASYSYEGDEHGDTELDFSVVWDGDFPIDKPPSFRALLYKCWAQCAS

SEQ ID NO: 978726 - protein, 75 aa, Homo sapiens
MHLRQETEVELYNEFPEPIKLDKNDRAKAWQKAAVAEGAVRVEHRVLHKPRTHVGLQHNSPLLFQDKTYIGSSHY

SEQ ID NO: 978727 - protein, 61 aa, Homo sapiens
MRAVGEPCVHGPGSIRCSVIERVSSRSHTEEDMQEKLFDFLHARDHCVTHKLFNNLKYMCG

SEQ ID NO: 978728 - protein, 137 aa, Homo sapiens
KEPFTDQDTQNMNRKVNKDEMQREHHCEMAPGTGRTRCGLRTQADWGRCLHTIQTEDRVWSNAISPLHQLFSDRDGLMRALLTPENWDLNSGQLMTHLGSAFPPGAGVLDVMYESPFTLLSCGYDTYVRYWDLRTSV

SEQ ID NO: 978729 - protein, 50 aa, Homo sapiens
MDQREFMLTPPPSGAYLQSPDLLKNFQVQRDPKDPVMSPCELPASQAIAG

SEQ ID NO: 978730 - protein, 48 aa, Homo sapiens
MDLTAQQLPFHTPSLWHQYAPYRKGPKQSRRCGLNPQRHCGPPAYIPF

SEQ ID NO: 978731 - protein, 52 aa, Homo sapiens
MVVTLFDSDPITVTVPVEVSRKNPKFMETVAEMGAARRPVRYRTCNAPALGT

SEQ ID NO: 978732 - protein, 117 aa, Homo sapiens
AREGIGHRHLHKWTYRTDLRWLTIAAFLPEYLTSCDGMDANQKSVLGRNFKMDRDLPSFTQNVHRLVNDLRYYRLCNDSLPPGTVKLYGLLLPGDTDFCCCHLRQPYLPPQMSPRWA

SEQ ID NO: 978733 - protein, 70 aa, Homo sapiens
DVVIRRNQERAHQITDESLEGYEENPGEAIESQDAGLKTITMLDDQKEQLNRIEKGLDHINKDLRETEKT

SEQ ID NO: 978734 - protein, 83 aa, Homo sapiens
MDFSLTVSRSPYSGCRLCFTYTRKCGQLEVDYSPSDMQDSSLSHKIPPMEEPSYTQDNDLSELISVSQVEASPSTSSAHTPSQ

SEQ ID NO: 978735 - protein, 69 aa, Homo sapiens
MPKRGAQVRSRAMYIVIVQVTGLAKAGGAMLHGDEGSTQVEPARCGRGTRQWGAGPCWPNCQCTVKMYM

SEQ ID NO: 978736 - protein, 124 aa, Homo sapiens
LIIDITRFVWTIHPQKTATLLISDERGRREHCCRAGTVVASGTVVGVVLYTGRELRSVMNTSDPRSKIGLYDLEVNCLTKILLWLPWVVVSLVMVALQHFAGRWYLQIIRFLLLYTNIIPISFA

SEQ ID NO: 978737 - protein, 117 aa, Homo sapiens
EPSLYPRYRSLTDNAVPVIYQVLPVLWCWYFHNDACVTLCSNTNEQLTSPVTIIRGYLREFKNSHSEVPSLMVLSSPSPSTTPPPLWERSASSACRNPSAPHSGFFSQPIPLLCFPP

SEQ ID NO: 978738 - protein, 71 aa, Homo sapiens
IVGSDHDIGHNELVINSYVTATIEPLARLVPPPLVYKEGNGGHVLSQLQGSLVLLFPKTCSNYFYEQYRYL

SEQ ID NO: 978739 - protein, 42 aa, Homo sapiens
YTGVRERIRVRVGVTPEYEHESMTVYQIPIHSEQRRGKHQPW

SEQ ID NO: 978740 - protein, 78 aa, Homo sapiens
LISLGVIPFSFRSRPLPVTSIHACISCASSYFIPRLLTSGVTFMAVRRSLYPQTLTRDEGGDIIRHCWVRSAGNMCRT

SEQ ID NO: 978741 - protein, 121 aa, Homo sapiens
DPLCIANPFSISSLTTGDRQVVWSAPNGALYCVVYHKSQHRQLIAVFRTFLLLQPASWMARLSATLSWKAVVGFSLHSSTSSRSKSPLSRKPLATRPTRITPRRVLVMCSVFCSPAPSLLS

SEQ ID NO: 978742 - protein, 116 aa, Homo sapiens
GTSSITDMYGLNIRTSSSVPQNIQVLCDLGMVSIYLGIQLYLHWHVLHTLGPKIREEFLTGKGRGTVLTLALRGGCSQAGDSLIGLVADVQPPTGPVSLGRELQQAALPEQKIEDE

SEQ ID NO: 978743 - protein, 46 aa, Homo sapiens
MCSLLVAVRRLLKDRLRRCIVCTQNSPLSSHPVVPLSELSTLCANS

SEQ ID NO: 978744 - protein, 97 aa, Homo sapiens
NGSRHALELLRAGSVRKPPEESSCFERPCFKWYTSLWSECTKTCGVGARMRDVKCYQGTDIVRGCDPLVKPVGRQACDLQPCPTEPPDVSCQDQPGT

SEQ ID NO: 978745 - protein, 44 aa, Homo sapiens
MHCTFHKHCLLIILLLAVLLCQDAKRLGSSLNDCAAPFTSKNHD

SEQ ID NO: 978746 - protein, 34 aa, Homo sapiens
YFSDMGSHWEMGERRLERLSYLCSDTACAVPQRL

SEQ ID NO: 978747 - protein, 105 aa, Homo sapiens
MCLSRMYMRPTWRDDGTSDAVGHDDSEAHTASMHTWLQNSYWKAWFCLTFLRSAAVLAMIMRKVYEDETWQPQQLHAIADEGRGDDIVHKEGTLVRQEDALQPDG

SEQ ID NO: 978748 - protein, 136 aa, Homo sapiens
GGRSPEEVRCAIAHLGPADSHAARIVTQRLEEDRHRHLVHVRDRLIGQAPVCADLHGRGLTLLRTVTHAGSVDQQGHHAESLLFQWVEEDHKPGRGIQLDHRALWEGVVTEASVIHLEEGRLRVTVVGLLVPQHQH

SEQ ID NO: 978749 - protein, 105 aa, Homo sapiens
MSSADYYSTEVLLQADTHLEGKGVFEGGTNVLGHLLQGGAPTPFDRNYGTKLGVKAMLWLSEKLREVYRKGRVFANAPDSACVIGLKKKAVAFSPVTELKKDTDF

SEQ ID NO: 978750 - protein, 87 aa, Homo sapiens
QALQVMDVHMDCWKPFPGAKCKSPATLLTSKKPYTWQPSFFCSCIFWLKPSRRHCSIVSGFLKAQPLRRYASRTVFTGVTALDIFCL

SEQ ID NO: 978751 - protein, 84 aa, Homo sapiens
MTPATEHPAGMRLLERWGARGLQDSDCLLVGLVSSPCLRVRRHELRPLGRAVIPLQVLLEAEEQRVHTHAIDAEETVCNQVGAN

SEQ ID NO: 978752 - protein, 111 aa, Homo sapiens
DTEQAVKPGLSLISRACVEIVRAQLHTGPTAEPTSDSTVVSLTAPQHKGDGGSETVTLWGDTSHHNGSLMDAAAVVLLGTSEHVLGRAHLCFLSGSTSASKKTHSFHGSGL

SEQ ID NO: 978753 - protein, 49 aa, Homo sapiens
GPPKSQCHEELSVKTIFGRHLNPKATEEKMEAIELSVDPTSNKRQCLVF

SEQ ID NO: 978754 - protein, 119 aa, Homo sapiens
KCQIQSLKEDHVLFLGLGKLLFQVINCHNQFSNRPLCKFSTGLSLLQFVRQKFHFFFIFVLLYRILFRCNLQRYQIEDNILEFFFQVTTFKFRHLRTLLCPLQLTLQDDQLTNYLLVFA

SEQ ID NO: 978755 - protein, 45 aa, Homo sapiens
EVASLLLDDEELEKKLRLGQEEKLATGGNQLSERAQTVCLGSWDP

SEQ ID NO: 978756 - protein, 77 aa, Homo sapiens
QRLVGVSQLRQDQSLPLPKHLYYPGENTFTQDRLLFDDGLIVFQGWRQALAHGESLAGHLCMLGWSQAMPGQLPMSL

SEQ ID NO: 978757 - protein, 62 aa, Homo sapiens
ITEYWSSARCSRDRRNLYREACTVCCEYTSTRLQLNDYLEVSTVLTCRWNLSSGCMHRSGEY

SEQ ID NO: 978758 - protein, 165 aa, Homo sapiens
LTYTYIALLPFETRFRPAVPMWDACVVRTVCLPPGGLQLPDWTECELSGYGKHEALSPFYSERLKEAHVRLYSSSRCTSQHLLNRTVTENMLCAGDTRSGGPQGKFARRLPGGIREPPGVSERWPHDFGGHHQLGPGLWTEGFPGVYPKVTNYLDWIRDNMDRDQ

SEQ ID NO: 978759 - protein, 36 aa, Homo sapiens
ALSLPLAFLFTFSSTTWDSPSCHKGFVRDALRLRCL

SEQ ID NO: 978760 - protein, 35 aa, Homo sapiens
SLADLAGASPGTSGIENELRGSAPPWTPVPLVLSE

SEQ ID NO: 978761 - protein, 71 aa, Homo sapiens
PCLVLSSISRLSWDVPATEAAPPPPEPVPGLHSAPATGPVVWRTLFLTDRLDRMLPEKDTHPRHGTMKNGV

SEQ ID NO: 978762 - protein, 44 aa, Homo sapiens
LVAGCPCGLAAAVQFLRLLLPAATPPRWPAESSGLVVFKGWIVG

SEQ ID NO: 978763 - protein, 74 aa, Homo sapiens
MRYHLHYHLRSTVERDGPIKTSALQCGMCDATGQHSIPSGDITSKTPNGLIFVVDSNDRERVNDGPGRADENAG

SEQ ID NO: 978764 - protein, 149 aa, Homo sapiens
RYRAGFSGLDGEGAYEDAGRVQMAGFLGAQKCSPVLDNTTDHGVPVDVSFSTILNILAVHEEIAIWRGWGRGASIGLGNRPAIVTPDIRLHGLVALENLDGIFDFEPLSLPPNANRIFPILQQLRDSQYIHVRFVLAILVLFEDAQEPA

SEQ ID NO: 978765 - protein, 107 aa, Homo sapiens
DKAKNILVLTVMNEIKYQFCGLSLRSDSSSSCKELSCSFSRIYLLFELIQYSLKSVLESQIFHFHDEILLSLCPVLGLLELAFHVVNLVLNSHNQLIGSFIFLVLYI

SEQ ID NO: 978766 - protein, 111 aa, Homo sapiens
MHDQMDKRGWYRGSSVQGLSSSEVVVHDTVITDLMELIPSTTVRDPDDQIDIIVGDGDDHIWDIVGSVQVTLHSGSHGIHGAAPAGCKSSGNRDEGEPGSHMAIDADTGRN

SEQ ID NO: 978767 - protein, 124 aa, Homo sapiens
MCEHKYGNAPRVRIKGHVAARFPFIPMPLDYILPELLKNAMRATMESHLDTPYNVPDVVITIATNDVDLIIRLSDRGGGIAHTDLDRVIGYHFTTAEAKHNRNPGSAPSLAIWTCIVAPSQRLA

SEQ ID NO: 978768 - protein, 162 aa, Homo sapiens
FAVAVRVLGLRCCRYTSRSLRGPESMDDVPQPLGWSHGSSWSTVRILSPCPEDAAAVPGWSRAVRIPSVGVPREPAHHPVRVPRSTGVLFARPGCFIFRIDPGMGQRQAGLVRLINKLFKTTWLNVESVLLARKLYNLTKSLQVDILALGLHAPKLSVLVMA

SEQ ID NO: 978769 - protein, 34 aa, Homo sapiens
MIQRIDLYSARFYSFSVLQDTIPGGDKKVMVAIP

SEQ ID NO: 978770 - protein, 86 aa, Homo sapiens
MMEGRSRSYSVLEIHICWKVDSEASDGAVDPHGVLALRRSSDLDLHCAGLPGQLISFCILSAMPGYMVVPPDSTVLAYRSLRMSTS

SEQ ID NO: 978771 - protein, 42 aa, Homo sapiens
YSWTNISKKQLTWLVNRLAGQKDFLRSRLLLGLQRSALENLP

SEQ ID NO: 978772 - protein, 77 aa, Homo sapiens
SPGCTAYTSTIPKGMSHSLSSCTIYHMEIIEEEAFLAWKEDITQEFPGQGKALFQVNQWLTWLETAEEEDIRGRHAD

SEQ ID NO: 978773 - protein, 137 aa, Homo sapiens
MSTDRGAEEDMDECEQALAAEPKDKDPFAHLPKSTFVEDGFKRKYSNEDTLSVALPYFWEHFDKDGWSLWYSEYRFPEELTQTFMSCNLITGMFQRLDKLRKNAFASVILFGTNNSSSISGVWVFRGQELAFPLSPD

SEQ ID NO: 978774 - protein, 129 aa, Homo sapiens
YGEREAYTPGDAYKRRNKVCACPMILRKEMDECEQALADDPKANDPFAHLPKEYLCVDEFKRKYSNEDTLSVALPYFWEHFDKDGWSLWYSEYRFPEELTQTFMSCNLITGMFQRLDKLRKNAFASVIL

SEQ ID NO: 978775 - protein, 63 aa, Homo sapiens
PGVARPTKHGGGGSAQSYAAPAQSTNEDLSDQSSHPTHENHHTPETKKRQSQLETGKEVHSYG

SEQ ID NO: 978776 - protein, 100 aa, Homo sapiens
SQDMMVTWIGRMMREKVIRRCSEPALHRTEQNHSSSLGGPAHSWFQVSPFLAGLKGRLYPSAFTYPDIISMSLPNFYQCISLFHTVLLILSLNRFAQKET

SEQ ID NO: 978777 - protein, 68 aa, Homo sapiens
IEETFGGAHGVWGVNDDHVECRLILYHELKTVTHMWGQLRARVANGHAWQELLGDLYDILVDLTLDHG

SEQ ID NO: 978778 - protein, 50 aa, Homo sapiens
YEFIRTIASSIFFFLSSMRSGVSIPDGTDEKPPGDDKATVCRGNKACLIW

SEQ ID NO: 978779 - protein, 59 aa, Homo sapiens
RLQLNDIWRSARCSRVDGTLSREACTGVVNTRRPGSIYAISGPPRGAPVSTELDQGGMH

SEQ ID NO: 978780 - protein, 62 aa, Homo sapiens
GQTQTWNMRADSMTDDTPLLKINTELNKTEAETVEMDIRIGIVEHTLLQSKLKEKSNMTRVG

SEQ ID NO: 978781 - protein, 114 aa, Homo sapiens
SPMDQLQNVVCENAKTSQTMELVPNFQGIVGTSVSPCALSLSCAHPQAARGLATSSSHSLPSGFAPEALTFTTTQPQGWGCPQRVGNALDSERLHPLPLSLWSHLPLFQALSRC

SEQ ID NO: 978782 - protein, 124 aa, Homo sapiens
LAFLIQVLEALCGPSKSAVSSALGTSSRPPKLSNPRDGIIGKQHREADRGPHATRLLSVMKVSASSGSVSEARVATDIFLSASARQTVLSWLTQATRLPLAEKQTPCTQPQLLLDSNRRIGLQG

SEQ ID NO: 978783 - protein, 69 aa, Homo sapiens
YRKKTGSMECVETNCRYKRMLAIEICKHFELGGDKKRKGQVIQFYNFGIFFFNFEEKMDEAIEKLPEGK

SEQ ID NO: 978784 - protein, 128 aa, Homo sapiens
ERSAMSLHSLEEGEIAVWVDQARECVCTHESLVRVASSERYIRSESSGGVVLANKPRPSPQVTRMSSQLPVEAVRAHCQQNSQRCPKSIGIGPPVPPEVCLSIHAVLEHQPAAPISLHVAKTRSGAAR

SEQ ID NO: 978785 - protein, 35 aa, Homo sapiens
MLVCRSSCLPGDLHHAILGLDRQLARSRYMQGYEL

SEQ ID NO: 978786 - protein, 80 aa, Homo sapiens
FIDLAGSPCMFGVRRHVLKRRVRARDERRSRERASPIARGPSLCSHHLYNLFIIDLAFSIDVSLPDHLIHLLMGQLLPQV

SEQ ID NO: 978787 - protein, 126 aa, Homo sapiens
  misc_feature (125)..(125): Xaa can be any naturally occurring amino acid
KPPQNNVKTPQVRIFKTAQDGPGKNQRGELSGRLRLLLAEATALHVALVFAVPVLLVSEVAPVGALLVAKHPFVVLHQAAQLFGQLQSQVLLSSGLSAAHHHCLCWLVQGGHQLLINDHFADDGXH

SEQ ID NO: 978788 - protein, 112 aa, Homo sapiens
PRHNFKTPQLKMFTNPPEDSERCEGMYLYKKIQVLFERNASLHPKRFTPEAMPTHRNLCFLKTPGKPVSMPHFVQATFRMIAAESSTELKECAEPSTRKNLMNSFEQKISRL

SEQ ID NO: 978789 - protein, 64 aa, Homo sapiens
VETPPETTLNLRDKEFFGEGDENYIQDRFNLTGLNEQVLNYRQALDMILDLEPDEELEDNPNQS

SEQ ID NO: 978790 - protein, 97 aa, Homo sapiens
MCVDWQCPFEDFAFPPSVSENVLKISVKEQGLFHKKDSANQGCVRRVYLKDTATAERACNAIEDATVNETAAKIDEAVISETSQTPIAILITDLRGS

SEQ ID NO: 978791 - protein, 84 aa, Homo sapiens
MKDCIHPSDWCHSPILVHHPKSFDVVLKVPWCLVLGDCLQHGQKVLKVQHLHIHLITLGVPQDLEHLGVGRVLAQGPHHIPTLA

SEQ ID NO: 978792 - protein, 130 aa, Homo sapiens
TLEYRWVCLTLSKSYRLTSNMYYQRAVKPRAYLHDGSTGCRVVEEELKIPAGGGPRSQAKVYMRFLPRIIALCMEQVYPNTLPERPSPDVKAELIELLFRTLHHNWRYFFKYTVLASVQRGIAEEQMENE

SEQ ID NO: 978793 - protein, 107 aa, Homo sapiens
EDIHEVLKTALIHDGLSRGIREAAKALDSAKPIFDCCASNCDEPMYVKLVEALCAEHQINLIKADDNKKLGEWVGLCKIDREGKLRKVVGCSCVVVKDYGKESQAKD

SEQ ID NO: 978794 - protein, 79 aa, Homo sapiens
RHLEQHVAIPVAAMMTWISSTGLQAFWDRGYLEGHRAMENLGLASNKNMTSLFLKGAPGLPCVTQFFPSVCPAASLFLR

SEQ ID NO: 978795 - protein, 109 aa, Homo sapiens
QLRYVSLQHSCCTSFVVCGSLKLSSSEAFGSPEAAAEPPQPTAVPLELAKEIEMASEERPPAHAVEIMMGLKTTDMAPSKETEMALAKDMALATKTEVALAKDMESPTN

SEQ ID NO: 978796 - protein, 38 aa, Homo sapiens
SAESQNKRRESWHYSSDIMSFELLSEEIRYSFHTMQDR

SEQ ID NO: 978797 - protein, 66 aa, Homo sapiens
EHTECAISKDGSVLSLGTTRNSAPTEKDEYDRPVNQVTWSQTQDSEVGSRHVSSIMEVGRCRIRMG

SEQ ID NO: 978798 - protein, 85 aa, Homo sapiens
GSCSMPGVVRVCEPCLPLSEAQASGVELERQQEETVLKNIVSFLYSGPKEVGKQGQEAKSHTALGIIQSIVWLTPGPGLVSLVNT

SEQ ID NO: 978799 - protein, 64 aa, Homo sapiens
MQHENLIDEAFNTQITALIMLYECEDTHLGEEVDEELECMWLTQQYLFDRLAHEIEALKSFSKS

SEQ ID NO: 978800 - protein, 156 aa, Homo sapiens
MGAKTVIANHSEIMKDLSRLSTYRDSLSGWWLLWKRLNPWADKVKVPDMAEIQSRLAYVSCVRQLEVVKSSPYCEYLRPPIDCFKTMDFGKFEQIYDVGYQYGKAVFGGWSRGNVIEKMLTDRRSTDLNESRRADVLAFPSSGFTDFLFVEVALGY

SEQ ID NO: 978801 - protein, 85 aa, Homo sapiens
MRAPLHETKDFVHLLALEGCDLGIALGFGDTENGTYVFGGVPELLSQLLQVPQPHLESGLLLLKGVEGGIQWELTWVSGLFVEVA

SEQ ID NO: 978802 - protein, 153 aa, Homo sapiens
ERTDVRACHTWLLYISVLIDGDCVKLTSLFVSAKNVRSFLHTDHYHQICLHEFSMAYTKYVGDSLQPKTYGRSSVEELLGAIPQVVWIKGHGHKRIVVLKKGHEKSCEFTTVSPLALMKTSPQEGERILEVPESHTASELTLGADGSGPSHTE

SEQ ID NO: 978803 - protein, 52 aa, Homo sapiens
SGETEIMFRVLLQLQYQGSNGSAGKGNLEENKVTMTLSEHLSIQLPSAYDWV

SEQ ID NO: 978804 - protein, 156 aa, Homo sapiens
MHNEQDKREQGDVKDVRPKTAEGQSYSNQMRKKKTAAKENKSHRRERKQQRDETHRGTHQTKRAGQPAEQPHTITSPRHKTRQDKHKRTEEARTGASSTGHYRTDEQKSTRKQSSTSEQKQNRRRRQQTRQNEGQQKLHEKKRKPSRENEQKKNKR

SEQ ID NO: 978805 - protein, 33 aa, Homo sapiens
FEENEVLAALIVGGIVGILFASLPDPTAHVPYE

SEQ ID NO: 978806 - protein, 86 aa, Homo sapiens
VTPDRPIPAMLLFLVMCLSFCRPPGGLLCRLPLCADTRRDWYLPCAKCNAHSIAYRPLLTVITVWFLDILKEDSATSLVLAASSVP

SEQ ID NO: 978807 - protein, 77 aa, Homo sapiens
GRKMGSRAPDSRVSEEENLKNDPKKKMTMCNWSLELSVLEDDGHRTLLIRDKDSCGIATQGTTFILDDDAIEADSER

SEQ ID NO: 978808 - protein, 69 aa, Homo sapiens
RLRNHMAVPFVLSRGGCHALYTFRVADQKTDGILSDFYRNYDVMQQIWTRDRAKAGTLFTQCKSNSCDI

SEQ ID NO: 978809 - protein, 60 aa, Homo sapiens
MYGGQHGSSRVRRNLYREGMHRSGEYTSTRLHLNDIVVVSTVLTCRRNLSREACTAVVNT

SEQ ID NO: 978810 - protein, 103 aa, Homo sapiens
MSSQIPCKNNSTEVLAPAVKSPGPIRTCRTSIHLALCWAPYGDRDDVALECVETNSSRNWRVISRRGHTDRLLNMRNSVPAETLFQDINEVQLKMSGEKPQTP

SEQ ID NO: 978811 - protein, 406 aa, Homo sapiens
MCATVCLTTPRETVVYNIIPRSQIKGCANIYYHRRSSGTQYDRQGAHFYTTTRRHCVATDLPLFIKPPNVAILQHTLQFSRPFLVVSYPSKNFSTGSWGYEHSSSGIIIPHSLISPWGVVTSSPSNLEGRYTTVEVENGRYHKTPKLSAPPHLGVHINPISLPNKGRRNTTRPAIIIYITPYSHAPPNRSPDSTLSSVVTHFIPRGGQHQRVVYHPRKANCCLGGAPPDRINKATRRPRKKEGSQSRANTCGSLTQNILVIKIDGGHVHQTKRPEPFLPTCATAAIFQTDVLLFHATPTRLCGCVSRASRQRLSLINTPQRRRGALTTYTLLIRKARPILSITLRQGQPVGGTHSHSSPQHVSIRCSGSGRQTSLKTDPPQLYLRHARGRAHSTLTKQEERTCVLV

SEQ ID NO: 978812 - protein, 122 aa, Homo sapiens
MWSSHLHKFRGSVVIGGNTRIIDPVEVLSGVEGSFGTGAMDVPAKRVEEGDRSCLLGCFRKREVLLALMAETAKEEKEDILPYTYCTFQRHKGLGEDRETGLTGENKIFQIKKINLEVPVNI

SEQ ID NO: 978813 - protein, 134 aa, Homo sapiens
MEITALVPSTMKIKDHLLLLRRKVSPLVGSGGVHPESSIGPTLSQQDRGIERSKGVMTQSSGPPICPALNIGSEGEEYDSQWLFTSLFFEQNLNIALEKRKDRGYGYGVCICDEFRYECTSLGTIIGVLESAQF

SEQ ID NO: 978814 - protein, 306 aa, Homo sapiens
MTDDRLHMIGDGLMGNDWTNVDGMTYLYITYRRLNLRQKTTVGNKEVEENLNKRFPRRRHNVCRKSPPTTSVGTLGHNKKHNVSGEGVTPQGSGGPLTQQTAGNDCPLKSGLGDVNTDGGVNGVTPTTKHNVNTGFIGPTFNTTIDHDTDHLTPQTAPHDHRVGPRRAPGPPPTQHGPHSDHTNASGYGQQGGAATDTTLTMPNFCHIKTRIDHRKGATRGAHTRNKEAERGTTHQEDKETTAPGGDETRAHGVDDETNKLHAEVRTRHYGRDNTRAELVTQHRACYMTDDTRRNNKLPPTHIREW

SEQ ID NO: 978815 - protein, 109 aa, Homo sapiens
MADIQEQDLMVLMSQYPTIIEPDGTMYDDEVACRRVPGKGTCKISPERNQRGSHHGDDHDGFTVRRSLSTNTVSRAGVLLSNVEGERYTRKRIRDVMNGSKGSGRGSGW

SEQ ID NO: 978816 - protein, 55 aa, Homo sapiens
MQTQLPLTPTLCLCKWATHFFIYIFLSVLWGNSNSDNLGSCSAPLLRSTVEQADE

SEQ ID NO: 978817 - protein, 397 aa, Homo sapiens
LRKCGFCVWPCISSKHKQGTCFPLSTFAACFCHVVSTKCSPSACQTKGQTTYGANAAHMQTSSAHWACQHRHTSHLFNPGLHLGSLQPQHTNTQLQQLLHPLGGVGSNSINPTRPTHSPHPRHPPPHKHPTPTPTQHHHKPPTPTPPPPPQPPAAQTAPTGAPNLPRPATKRPHAEPSPPRTQDTLTTPTPTRPQAHTREAPPQETNNPRTYTNTHGGPKQGTPNQQPHTRHPAPQRTMRRTTTHDHPQLATITNPPAPHPTTGPPPPTCPHTPAPQPRPGHNGPHMATRAPPLYPPHLCNTNKAPTTQPPPHQQGRGNALDTAQIQHPRGSHDGQRPNTPTPPHTRPPANDGHPPRGGAASANRRPSWPYPTPVATHTTTRRPHHGHTLLPPDQQQ

SEQ ID NO: 978818 - protein, 356 aa, Homo sapiens
DTDLQRLGSRAMAPSRKFFVGGNLEDERAEAESGWSSSAPLNCGQGAGRDRGGFGAPPTAYIEILPGKKLDPKMAVAAARPATKGLMGLSWGQISPWHDQQTAEPQWTGSGGALQKDDRHALRRDVNVQLAGAPDQWPQAYGTQRDLGRIPPPCHWRAARLALTRGQSGHSPGPKGAPQTQNTKGHSPRSSGERNLETQKDRTLGPNWSTTVVDATRALGKRPRQNAPTRGPSSTRPRQTASRRTGLDPTQRGPHQSCGAGPNSATPGLTHNRQSLLRTWRPNPDNRTLGHSTARVERQEPPCARHGKPTTTSERSRETPHTRHTVAPHRPHRTAPRKPRSKSRPKNQRPGRTGQS

SEQ ID NO: 978819 - protein, 93 aa, Homo sapiens
KPRGLIPEPHALILCPGTSSVGPARATLTAHSQVCWELRCVLLPGVAGISASTVAKWTIDEADIVKIMSVKLGPALKIYNAILMFKNADDTLK

SEQ ID NO: 978820 - protein, 109 aa, Homo sapiens
MVLEGHLDVGQDKGSQALAKLTSPRDRRCASLDERIYEVVRPLVSLLHLNCSGLQKFEELMALRNLVGLSERLRQKDPDGQKVVPMIEGYMFEEIEMIRGQHGVMCTWH

SEQ ID NO: 978821 - protein, 61 aa, Homo sapiens
PISVEYYILLSKRMSDIQRTKYRIWEEVWARVNAWKHLDAIYFDSSRKLHMNNGEQNLDIR

SEQ ID NO: 978822 - protein, 258 aa, Homo sapiens
MHHIIIIHSTYHHIIIIHHHHTVLHVLVLISLSKSPTPIQATGRIKPHICIIIIQRVYSKLKRAAEGMKLLFKRTKKRFKSNWGQMRVLDNGVEVKHYINKVLLELHDKHGKKLNTGVLMERRAQKPSSIDDGQPPPIALLEEMKDTPSSHTQLSIREDDTKLAKSPMYFQTTTFDPSLRPRLLQVRSHTNRKARLLHSLLHTFPRFPWISQKPNGVAARIQQQVMRAKTSIRNTTLDDTLSESNKKQPPKLAIAQQP

SEQ ID NO: 978823 - protein, 113 aa, Homo sapiens
EPFCFSLGYRMTWVSQCCPLRGAVTVRYSFTFMFSLSCFRSYCMRHPDVLCMRTYMWPLTLCSRSELFSIQEQAPLSSYQAAGSAYPLEVCLSACSVEPVPSIYHRSMSRATQ

SEQ ID NO: 978824 - protein, 58 aa, Homo sapiens
YQYSQLEISKRPKSIRRTASITLVILQLVLKADAYSDTHQSGGSDIEMDEQLINRPKH

SEQ ID NO: 978825 - protein, 117 aa, Homo sapiens
MAQINTTVWTTIINPILLTLCLITQAKNIKHITTTLTSRHRRAKKVTKRQQKNYSCAPELLQKKGFGHQGSVLAAANYARGPCVRVVDLQTPVNWDSGGRDPSYWLMKLSRDETCSL

SEQ ID NO: 978826 - protein, 107 aa, Homo sapiens
MAKLVISPGAIRQQLAAFLEGFYEIIPKRLIYPSYTEQELELLISGLPTIDIDDLKSNTEYHKYQSNSIQVSCCWNPSSYGPLTLGNASKCEPNKPVVLLEEVACRR

SEQ ID NO: 978827 - protein, 80 aa, Homo sapiens
MDLVVVRGKNGWWWWSIRRIARRSLDGVGTGREKKCLKDAVDNGCSCSGSEYFYQSASVGDSVDVSSGKNKFCFCIYLRS

SEQ ID NO: 978828 - protein, 72 aa, Homo sapiens
VARLLLQAGLTWFLATIWLSGESIDKSMHEAAERGNLSWLRECLDNRDECSVAEKKLEALPYTGLDTGDTKI

SEQ ID NO: 978829 - protein, 92 aa, Homo sapiens
SAGCGRWPPLTMDRGPRLYDISSWFAWGSVHWCKLRGVEGVRKGQVLVAGWNKGSAVCSVRIADRRLLGSDVNGLFVTRCAQDTLGIIIVAS

SEQ ID NO: 978830 - protein, 113 aa, Homo sapiens
  misc_feature (1)..(1): Xaa can be any naturally occurring amino acid
XRTRNLNKVLCIYVVLLQPARSGSLSITTVVNDYKNNIKSISPQLIYSFWVRFPNPWGVWLGFWSVGATEGKPEVKEKCLAFFQLATARIKVTALKMSTSTLEEEKNLITEKK

SEQ ID NO: 978831 - protein, 55 aa, Homo sapiens
MVGSVSAGTVEYLYSRDGSFYFLELNPRLQVEAPLYRDGGLMSISLLHTLQIAVF

SEQ ID NO: 978832 - protein, 351 aa, Homo sapiens
RVLPPLAAHLGSQEPGGRKTGSGHVAQAGLELLCSSDLPALASKSAGIYSSDSDFERMFGMLYHSATLKTSHVDVARPQQTNKNTHKNTLLWGGKRTHKENVFTENTMVEGRLGRHCWGQSDTSGDNKVAHKEEDTRAQVQTELVELSTPKIKKSRTGMNTTQAVYDKPNIHESGANTEGDKKGDSHNKERTPQRRRHASTINSPAVRGETSDSTASRDRQTEVREQTNESKEDAESRTEQTNGDTQARHKKSRNEAREAKHERSNTQTSEGQQQTERATNQNDTKTRGTNRHTQSRRHEEDETKRQEEEARAQKATTPNRRKRKHESAAKKKKTQTDNQREEGKDRNNET

SEQ ID NO: 978833 - protein, 70 aa, Homo sapiens
PPNTGISCPATFCVACLSIQGTVPPHAGYPTGGLLRSQVPPFDSHEVAEVGFSSNDDEDKDDDVIEVTGK

SEQ ID NO: 978834 - protein, 33 aa, Homo sapiens
MEGTCSGCERSFSFLEICDELEDSSYDHHLEGD

SEQ ID NO: 978835 - protein, 81 aa, Homo sapiens
GSGTAGVVKGSEQLSCDESNTSEVIKGMIPHQPTALCRQKLNEEQLTLHNATLFTCTSTNRTINNISLFTKPPPNTSPHSH

SEQ ID NO: 978836 - protein, 53 aa, Homo sapiens
MLVDRNSTVTSTWAHTFLPTNSLRTPAQNYYHLTSRRSPRLHTAADTGFGKLL

SEQ ID NO: 978837 - protein, 108 aa, Homo sapiens
GRATVYAGITCVVGGESVGKLAVLSQLHKQCISVEKYIPTVCDNYAANVMVDGKPVNLGLWDTAGQEDYDRLRPLSYPQTVGETYGKDITSRGKDKPIADVFLIRLFR

SEQ ID NO: 978838 - protein, 57 aa, Homo sapiens
MGLPDGITMLCNCVFTVCRPSVIKIDEVAPPYRKGHGTRDEEIAGTHIQHSQGALGK

SEQ ID NO: 978839 - protein, 73 aa, Homo sapiens
MPSSMFSADDLWCSISFNLAVSITIIICFFYPYMEGASTVRAGLPSHLICSLAGMCLDLAVTWPSEEILPGKL

SEQ ID NO: 978840 - protein, 244 aa, Homo sapiens
MTFLLDILRASPVLIVCSLRVLREAFIPKRRNSVTGEIVLIQELAPGLGRLTAYEFAKLKSKRVLGDINTAWLWRKPAANCKGLGATGSIPLWGQLRTREDFYSSAQDLVTGRNGRCQYSTYIMLGSLYIRFVCYQDPQIDTPLTVHVLALFGLQGLFPAMTRIRMPYVVCSGSGLSRSSLLVMFKQVRGWFSPWPSPASILVHPVAIRTVSTRVGPGRGDGVVLAVPSYRGRRTPGVTLSFFF

SEQ ID NO: 978841 - protein, 39 aa, Homo sapiens
MYACGALQLLVLVSGPGLSLSPASLSNLLILGLDLSDDA

SEQ ID NO: 978842 - protein, 259 aa, Homo sapiens
MARLSPPNIKERRGGVTRQACLEQTPKKDAGKRHIRRSLQHAVVTRTVQNMKITPASGAIIDPDYYIRWPSASKWSPNARHTRHSDTLAYDSLLGPSISNPSPDQNPRSRGNAAKQTLISTGHPVREQAMQANIMLQTTTTHALHSHQMQQSCDNSGRTKTPNRPTAHLKPRTNAPPVGSASQNYRPPKRSSPLTRIRRTVHTGHQGTAQQRTTATATSAPTTHPRANPTRQERNTHNTQQHSTPTTHPTTSTTHPAHQ

SEQ ID NO: 978843 - protein, 132 aa, Homo sapiens
GSRRCHCLHVAAPGGGVMMQPDDWRLVVFITCFRDKIPNLELCKAGLQSITAGQKVISKHKNGRFYQCEVVRLTTENFYEVNFDDGSFSDNLYPEDIVSQDCLQFGPPAEGEVVQVRWTDGQVYGAKFVASQ

SEQ ID NO: 978844 - protein, 191 aa, Homo sapiens
MQDTGKERGREKKSGARHTKKEKRREQRNKTKPNSDHNEREHRRRTWTQGDETRDPGATNARRGTREKANDTTQNKQRNTRKRQAPCATQKDPGKAQRRPDEHDTRAELRGQRNRRTEADEAPSWDEANHKKSNESSTRERENTRQLTRRNKTGRKAKNKSTNTLHIHTHHTTKATHSKVSSTTTHNHTTT

SEQ ID NO: 978845 - protein, 51 aa, Homo sapiens
EEELRERSGRMGTNIEQIFRSFVVSKLREIQHGAFHVKEVKASVNGETKYT

SEQ ID NO: 978846 - protein, 118 aa, Homo sapiens
RDLSADVPWIALSLGLRDASAYPGLELVSFLNEKKKNVEAPSSLIIGLSKCAYRFEANDEIRVESVGCDRWLMSKDIGERGVPGWRTELHVSLAGLGALTSCIQDPRNVRGSPRPLHL

SEQ ID NO: 978847 - protein, 128 aa, Homo sapiens
MSCHGSSYQRESLQAESLNFKKTLQEEKAELLRTTLMESEENERSNEEHAKCSSIFDWEQQTNFNTVVSKRENETRKCNKMILVDEVETYNAATGTGERLDEESLSGRSSSLASGKEKAVKKNVSKSA

SEQ ID NO: 978848 - protein, 78 aa, Homo sapiens
GEEYRAEGKRVSHGMVSRIFQMLCLEMVECSVQSPLVYRVFIPVLQSVQPELSVTHHYMEMFGRGWNSSSRQFSVLFG

SEQ ID NO: 978849 - protein, 121 aa, Homo sapiens
MSANYYSRALLKNSPPSYVKLPDVVIASHIIGKCLRASPYPSRILIDVPSKTLRLSILSLAMNLLNYNIHGTELIIFYIFFETHLSPPWYHHPRGNQPERLNAGTYFLFYTLVGSFPYSSH

SEQ ID NO: 978850 - protein, 143 aa, Homo sapiens
PGLASAVCQKRVVPGSAHRGVRGRDAWREEGTGRGPERRRRCSDTPGLLECITRRYKPQLCRAPRRSAPGPGLGSLVALWHRERFGLALRGERILALNPGVVAPAGKGWAARRLTRVMGLRDRREIERPSASSHPRGGTTTAN

SEQ ID NO: 978851 - protein, 143 aa, Homo sapiens
TVRRSRGSVSCINSVGTDTDPGTLFQPPTASDSPLRLANSGVPSSTAISCFWDLPDNRIVVSSFLQTIMSSQIRHDFIPPIVKAAVQQSWSICNLQVIINHTSLWASISTAMTVALEVRPPKFLSAKLVVESNAPRVLATAVS

SEQ ID NO: 978852 - protein, 295 aa, Homo sapiens
RSNHHKGASRSRAPRTSNRGLPGSGSKPEAARETRRCAGPSGRIGHAHFRSAPGSASATSCGGGLACREAGQRPGGRIGVRSVRPEVGLAAGRGTRQSAICCPAGRAPVGSRPLGRFCLGDTGDRAQAAPSSEGFNLLFAASALRAARQFLVGAFIQNVGRRLGPGIRLMFGPEGPWPCGPARAFGGRRFVGRRNPEAAVLTSVGVRPPGWGGLVVLGAPEVRAGPKAAMYWGGASAASPGSAEVSGPLLSQAVGAPPEPWQLCREEFIRGSPGPRPGLGLGCCGGARAGEFPHA

SEQ ID NO: 978853 - protein, 70 aa, Homo sapiens
PQPGAAINGGAGLGRRGRPQCSWVNYRAHWSSGVLLGTDHSSWQGEPRLAAHEPLLTQNKECQEVIAGYP

SEQ ID NO: 978854 - protein, 70 aa, Homo sapiens
ARSLTAGLSLVASEPRRTGQDDHGRAVAIFANMLGVSRFLLVSLYHYVAVKQSPRSRIESGAFSAQGSRT

SEQ ID NO: 978855 - protein, 218 aa, Homo sapiens
HFALQLLQLQPDRERAKRVQQLAERVAGPPSGHHTDSPLPAASPYWADPKGNKTLGAAVQIVYFPPNHMLEPLWAKRFGQAGFTFFPHQQPGELWGSYGGVSGWEKLLGHAVGTTPKSSCAGGRLRIFQTSRVTSKYRTVLNVSGGPVENQIYKGGCAVWSDFHEKQWGNTWITLWEPETRNWKTKIVSRFGNVTFDTTFLTKPQDRNGVKLKSSNKR

SEQ ID NO: 978856 - protein, 37 aa, Homo sapiens
MRRQGKRSNKTKSSQADGPEDGSQRHTVGNKRKRATT

SEQ ID NO: 978857 - protein, 144 aa, Homo sapiens
  misc_feature (32)..(32): Xaa can be any naturally occurring amino acid
GRNADPEARAAPLVVGSGSVGCRDWERRSELXARITGGPSCEECKPGTSISSVKTVDNEIPKPRMERRRVYKTAFKKIKSGCIRVCSISCLWEKGTGCQSTSSEKQQMIPKLKTRCASKDSGARVYQGSLQRGSSDELSGRPDV

SEQ ID NO: 978858 - protein, 157 aa, Homo sapiens
GSLSEGGRSGGSFKMRLLGGSPNVRRSLAECLSATHDGVCRPNFVVRVSPHDQRLIYRLIASTASCGPLFCIKGFARILLVSLEGFNTGRGVVWRDGNHCCAFQLTPCCVPHGTFLHFDNGDDEHFTSSPSKQNNINEQPVKAVLFHVVQLFYKILR

SEQ ID NO: 978859 - protein, 210 aa, Homo sapiens
MLVGGHHGPTQRVQGANMGTKRVCPQEENRGATRHIGVRGFSPHYIKHSAAGVTTESVSGEKHLPRGRSYEGATHAGALSRRGAQRKKHEYTEQLKTGRVGTKMEHHTHKTQKGNTDAAPTATKSHTNRGNHSENNSKNNERKHQPQHDNNIEPTTKKSTTSEREKPNSHNTHITKQKSNREKHRHPKREETPRKNRNKPPTHHTKRKQN

SEQ ID NO: 978860 - protein, 143 aa, Homo sapiens
MYARPFIIISLICFLVACNATIYLDSSQQKHNEVVSNLRGSGIETTVLNNRARHHPEFLIAFPDSPTAVLLHKQIDGQTIPSLTIKIQLGHPNGSCTRSDYNRTRVRINLTSCHTITVPSFNTLETGDVAYSLGVDQSDVGSP

SEQ ID NO: 978861 - protein, 125 aa, Homo sapiens
SDMLFRCCSHPYFRHDTTVTHPLLILPNWVLDLKVMDRPEGPTLSPVIPTDHRNKDDIRNHLMIIEICHPTRILHFTSNDMISDRADKSMVICDDLYHHSFCTKTTTTVITTAFVNEQGLHRIEA

SEQ ID NO: 978862 - protein, 109 aa, Homo sapiens
MPAWEIRQGPSWDAISKTYWYRDPRPHVEADCDSPSLPEFSDFTDHLVETMPDSPCSGFRFQVWLTSIGFFCMIQSVYVTRVTVDTLQIPMRKRLLEICTGLGRSNAKI

SEQ ID NO: 978863 - protein, 196 aa, Homo sapiens
MRLSYDINGLPRRRSCEAAAIYLQSGIDVDDTRHIVTSGSIIIAIPNRGLSVIADSYTRTEAQYEMICCSVSESWALHLYLFHRIVACSCACVLRKSSSLDIVLRRDVLRCRPQFDYVLSIGAVLAIIGGVRSLISPILRTMTARGNLRRKSDFAIIFIGVDLSLLPTNLARGIRNARRYSEYADAYSRVKHPMIL

SEQ ID NO: 978864 - protein, 171 aa, Homo sapiens
ARTKAAMGLETDEGGRTALHGRRLLQPPQRLEYADPRSSRTRDRTGIPTVNRISSWAFEDVIAEPVTTHSFDKVWICSACLFEISKYVKCTMFLTVSWPIPLAFIGGNPLAPPSAVCTIWISMPFVKTCLMVLPSVQDTYGSKCDQMSSLLHLCTTRRTMLSSVSLRLSQD

SEQ ID NO: 978865 - protein, 144 aa, Homo sapiens
ERAHRAYLGCVFSPLLFVANAPILACPCKSHPNSALCPSIQSPISISHLNGYPVSVPRRCVLAPCALSVPLLASTHGAARRCKSSWVTSEDPVSFPEELSLAFVYGSGCPARDRAQFKDQNEMLLRAFCVHRYDDRCLHGFQST

SEQ ID NO: 978866 - protein, 257 aa, Homo sapiens
MPSEIIYSPSRCGSGRSDKDALAHIVAIVGVLIPYISSSGPYIEQREYVVLLKEGDDHHFPPEFGRRRKSARVTTESSCRDSENHRVGGRALLQRDHQKTTLVNSVVVDKTTKSDEEMVVVASVEKKLCPRPLWVFQVPGGCAPQRPNICEILWRHIQIREGERYNDDVPRTSLHISRRGGREGRGRGFTRKGPSKQNKPWTEFKGLIERWESPNKAFNLNRQGNSSNKKKCRRNKMREKGHCRHPQLLKQPPPEYK

SEQ ID NO: 978867 - protein, 135 aa, Homo sapiens
EAATVESRSRRLNLLVQSRDVRIEVLVTKLAPEHMTCKMREDVISSIRNFLIYVALLRDHVQLHLRREIVERWHMTAWEPSRIWTCADYGRARVYTGSDVLRLHGEIGPRTRCRKTLRVDVTTSACYETSCGSGS

SEQ ID NO: 978868 - protein, 70 aa, Homo sapiens
HGRQSRLSGARLSRVDSYLVYWVNLLYRILVRSSDSTSQRTELIMTYFLCATTVIATWDNQLARGEESMS

SEQ ID NO: 978869 - protein, 275 aa, Homo sapiens
  misc_feature (77)..(77): Xaa can be any naturally occurring amino acid
MTREGGSSRSTRMNSDWSFKYTRTGDYCDAQHISIEQDILCLSLLPVSSIDERVVLIVVVGRTQSELSAKMSSNGHXDREVYCTHIPQSTTGCSQIAPRRMKQCLVLLLLAPCFINGIGLDDSVDSRLHVARVHRTLSDAKMTCGFQVWRRKCLADGGRGFQMKRVTKKFCGGNTPCPLARNDIMVVPRLRASNKAEFLEPTFLAGFPTTNGWFLNCVSQAPVPGCKGGRGLGVKDGAVDVEVCQTNCAAPGGQGPGGRGTPVVEGQGFFPREDS

SEQ ID NO: 978870 - protein, 278 aa, Homo sapiens
QLREDPAGSALSASSSVRDGTDPGKSHIQALDLTSDFLSDYETLRGPICIGHHPGLTEGPAKRADNGWVSASFLPKPNTVRLPRNAARDNVIHNHTVGTGQPTSKSALGSNIVVTLAGTLPKHLNLLLLGAFLIFGPRRLSIVGPSMRKVPGCSPTFISRRNFGPGREIKVSVKEQTHNGHPVDAAMTNTPQDRGAGRPGTPTPRSHQGHQYQNETTPKAWHAQAQDEREKPTPADGTGPNGTTDEGHKVGTHCAATHKAWNYPGHPFRGTSYQLPPV

SEQ ID NO: 978871 - protein, 238 aa, Homo sapiens
MRQRQTTHDRKRTETHTQNKHQEPQKEHKQNEEPPQQAKLHNEHNNSTNSREDTHDPGARTGAARREGKTTGGGTERGRRTEARRKQRKGASGHERERTDEEAETERERDEREEGPRQTKSREENSEGQTPSATERRTQRRAEDREQTDTERREDTGRRETKKEETRKNRKRNRNKEKKKKKKGEKGDERDKERRGTGEQRRRKGRRKKEQERERHRGTREKDEEERRADPSSETRKS

SEQ ID NO: 978872 - protein, 250 aa, Homo sapiens
NPGKGWEPCDCDRSVGRLHDYDKHFTILFKRHSTYYLRVGQPLPLTADLFRETTYKTTHCPLWCYQRSALSTDRSNTAHDLLTRRSHTRRYVAAKFNTTTRSITVHHSNNDLRVDRALTRHTRLDLSMGFTPQTVLSPSHGTLLHYWSTHALSHNAILPTCLPHGFNGGKPRHCSSRSTLGMDTIARETRPFAHPGPLSWVYVGTTTWVQHTAPSSQDTGPFNPPQHAFHVGKKANSLHRSLRRMDNQLG

SEQ ID NO: 978873 - protein, 136 aa, Homo sapiens
MHSLGSDRYNRRIWKIPASRGKAESLVVAKPRGIVDVARNTGMGSGHTERTGHHKARSWNDNQEPTGAVEALHFGGAHYTKGPIQDSDLKLPVTDLAKPKVNEVLTAISRNKDTQTGFQGHCTHSGQGVFTGGYAK

SEQ ID NO: 978874 - protein, 227 aa, Homo sapiens
MRSVGCGHYHGMIRPCVLTCVVPQETRTPENTPWREEVTSLCDLPGIRYRIGSDRGDRRVIASASLLNGRRVKDSGCYGVFVNEFKIGSAERGQVNHSSGGSKHRGRGPKGAGKACDSVCPGHSLSTVCNGTSRDNLVPGFNMPGSQRYQWCWAQTAQTGRHEENRRDVQGWSAWQRMATQKVEKSHTEYYWGSLTVGFPEKDAGMESPGILGVVNNPGLRERGAYS

SEQ ID NO: 978875 - protein, 272 aa, Homo sapiens
MSRYKTVDITHGYSCAVRITDALFHLNKIAFGKQYSLDEPMVQWFRDEHPKEFDKNKLALKRLRHMRPYHWQEYGRALDIAGTSYTEGLHKENVEKSQTALPRLVVLNIGHSNCWSLVVHEMSHLESNRCQLGIYFGEHTTIGTNHNSGELTANTHIGADNVLDIEASTDQRITHNPIVKTRKGTTKPTREAITEPKPYCREYIENKRHNTEDTSRIHRAPRARDPTQATRRDRRRPYDHNKKGHTTERRQTEKPRNKMRQQQRKDTKNGPT

SEQ ID NO: 978876 - protein, 168 aa, Homo sapiens
LRTVVAAAWALERIVSCWLSGWEERREGSAIFRRDPRKDECCQRVSPAWGECVQPPQMTIWDLAIGRQQTWVMNEENTKVLENLWVQEMKEHTGRLDKLRRSQINHLTFRTGEEAPDNNYLNELESQYHATVWTVHYPGQISATFVDLGFSEVRKTMWEQVDVAGDDD

SEQ ID NO: 978877 - protein, 318 aa, Homo sapiens
NSVVATAQTQTSLVLVRLAWLFLRKPVSDQTRLWLTTRRNFDNVEHLNERPRDRNETTTPTCLPNDNDLQQEQAKQRELVNDGVAPSKYALVPFPQRMAILISTFFLAGFTLGKHAHRGRHHSLNDVCCPLSHSPDTTDNARPAPAFSPSVYLSGWQGQDRPCMSVTDDSAGGQTWGGHRHVHIYELKPCWPKAVLSGLVTGTSNQSGHSPLQVQLHSTSWAVAHTFSNYCTSHEVFNTIDPEHATQTDSYGEIWPWPPTTPGTPPARDQATQALPHKGATPSKDTPDTQRRRSHTKHRRGHQRLEKQHEPTRHVAQT

SEQ ID NO: 978878 - protein, 223 aa, Homo sapiens
MWCRGPHLHTWLTKAPVLPGKLPALTLRPGPIGPTCLPEGLLPWQFYTRALQFLATERIEGVDTMYTGRGINAYTWALNYNLPGRGSNTLVATALIYLGALWDLLFMAQKSPPCGPKHRTNHFMGDALHFVAKFVRGRPGFGTHWNSHAQAWEVGYGHTPSANRRTGHLGTPRIPQWHNGLGYTRSWKAERQRNKRCRQRADNGKRSTRQSPAGDSIRGTGHE

SEQ ID NO: 978879 - protein, 105 aa, Homo sapiens
MVRSKADECHQALTANRGGMFEPHRKGAWYLAKLVATRLLTTRFLSRGKSWKTSPILQEGTPVWHAPQTPKMGTRGIGDMLVGCTTYKTLREKRIRFVKRWEGDG

SEQ ID NO: 978880 - protein, 316 aa, Homo sapiens
MLMALPTESSSSGCLAIIANNISTKTIDSWMSDHGAQEGAGDPAQVHSCSTNRLEGAADTFYGIHGHVRFIKRQIWQEITRSDKPPCFSYLCKRGKMEVSEDGTKASAATNCNSHVQDHRRPWEIVDRTLTVVHPSIILQGAVYSWGTINQHPDTSNPQETMQKDTTYFGNAERLPFPDIFHNTWLRYSWVLLAHYKNSFLGDQHMMRTGTSHARTIAGRTHSRIAWTHGHSRHVNTRVPRGPEASTHQSGANVNNRGEPQGDPPHKSSRSQNVACPKTIQTETYTDSSPFQQQTMHTHHSAHRSKPNQSMVASTQ

SEQ ID NO: 978881 - protein, 44 aa, Homo sapiens
MRNKATSQSAFPRKGYHLNEYYTTPTQRTGLATRHKKDLHWRPQ

SEQ ID NO: 978882 - protein, 69 aa, Homo sapiens
DVISYSNTKKQIQACRSSLSAKEVIWVIISGDSRYGRETALITMFRQGRQERGQVVTYPVVSHPEFAYV

SEQ ID NO: 978883 - protein, 43 aa, Homo sapiens
MGYLEEPPEDRKRGAASKKGPRVEQTYPTGTPGGESTNEGRGK

SEQ ID NO: 978884 - protein, 299 aa, Homo sapiens
CLGRLCHRAAISSAGPVAVETSSTPIASSTTSIVLPAICRGSSIVVPSLLAHPSLLSLLHASSSSAFNQVTNNTALPPSATPCWAQVAAQHRTKSVWASRLVAQPASSATPTGQQPQGLAAQLWYHSPRVFWTRQPFVAGLSLVGSRRSSAASVFCFSSAWVQFRACFRSSLFLQFPHPPGQVSLGPLKYQELPVPLMGRRLSQQQETAGGPRNGPAWGEQVGQGRPLVDPVHQSQHLGPGLASHVGRNGRVATPIAEVGQHLRTRGHTQGPGGHRHNPSGGATHNKGSRGSTPCGTPL

SEQ ID NO: 978885 - protein, 118 aa, Homo sapiens
FLSPRRLEAARAREQREAPRCLASPEPCRRGGKPARARTLVGAPGAGLSLLTRAGGLRLSALGSGPRPVQFTPPAPSDSFPSVFILPAPVADRFRNCLQFVRGPWVVFPNFPEAPFFL

SEQ ID NO: 978886 - protein, 112 aa, Homo sapiens
MFKALKNMNWEGSIQDLLGVVFFQVMEIRPYTIHKCVCCPESDQWVEVVMMTGVWGALQSCLLRLCGTGGCKDFSFVTCETIYGCAKSFITFKPLLMVGAGEQGYGFSIKVS

SEQ ID NO: 978887 - protein, 67 aa, Homo sapiens
YRHIDVPMCAINENEVPVAIAGEGQGTSVVKREELFILQANVRGALYHENDACVKIVVCAKTVHSVT

SEQ ID NO: 978888 - protein, 81 aa, Homo sapiens
VPQLFLRPPNNPPPNTNYLILPLTIMEANAISSEPLSLKKIYLSILISLQISLIITFTATEVIIFDIFFESKLSHLGIITR

SEQ ID NO: 978889 - protein, 71 aa, Homo sapiens
AGASAITARRAADTVRTGLGARHLGRTGGTRGMSHDKSFRVSGDNYPPPQPLDIRGVPQANSLPTSMLKSP

SEQ ID NO: 978890 - protein, 67 aa, Homo sapiens
RERKIGERHAVVESQCSLSHGEDLNEIHDDELWVGHSTRIWKTVSRHLRLLSMDRMVELVRNLLGML

SEQ ID NO: 978891 - protein, 116 aa, Homo sapiens
MCGGAALGPRKEGFLRTNRGLGRAAGPEEVYKEATWRRSRGRTRRKFRATKEIGAWEFSPTKLEKRPGGQRTRRVFGKHSPQEGVRRSGHQRGLLTNTGGPEQRPGIIKLRPGGGM

SEQ ID NO: 978892 - protein, 115 aa, Homo sapiens
MKDECGVTFCCKGRTYSRLDSPRECERGRNFGVGKCSVKVGWEEHHLEMVPHIEGYKSVCAELLRDCRKIYTCLKVVKAEQEVKNEGDREGSRISRWKVNLDVEGGQCVLRIDFT

SEQ ID NO: 978893 - protein, 81 aa, Homo sapiens
LPVSVVTMKAVAPLLGPGGSLNSSSSGGEQDYDYLNDWGARVQETLRDMYGGGDDLNFRVNWLVDEYEQFQRDIPNKHARS

SEQ ID NO: 978894 - protein, 110 aa, Homo sapiens
MKIIKWLENVCLNKGHRHWAYLMQKYEGANLSTFLKDVKRNRQRDHFLQFFNGKKNTFKRRLHHTRNSLVSDWLLTNSKTNRTLKIEVILSEHSDIFCFLRSTIIQLANN

SEQ ID NO: 978895 - protein, 72 aa, Homo sapiens
MFDKSTKLRKQNSYEAGTTDFQNFGAGIDIRTPSLLSKPPDQQIRNPFKYHSLSAFIKVNLHKQIKLDDTQT

SEQ ID NO: 978896 - protein, 182 aa, Homo sapiens
MGDKKEPRQGQKRQAETCRSTKAEGIVASAPFRNSADALLHAAICDVSERHLHQKNLGSILSWWHTHSGTHKYATPTPPRKDDSSDQTLPPQDNRQSPAGTGPSAKIQLPSWLTKPVVAASQDPADTQTCFSDGLSTTRNNFSENNYVGAAAHKCKSTVGHYVYTIGPCRSNGSEPQQKNPR

SEQ ID NO: 978897 - protein, 376 aa, Homo sapiens
LLFPWCDSVLRGCSLEQRSFISVRLLSYLSACRHPMERLRLDMDHEPPEAPDTYLFGCELNGRQTTYHLLTVDKDETLTHQITLLTDTGQFTGLVQQDRRCTIGSKQTATDTYRTGSPIKVTLATFENGLYRQKDFPLEEGFENNNTTDGSIRLEDAAFQGPVAIITMRQQHSSQLVGGTACHQSRHDCTARSDSACANLLQVIHLGNQPDLATLEKRELGNEYTHKVTQTFNKICLACMAQTLHGTAMTMTCNDRDCHLHDTALSCNTPEHGHVMAPCTVDGNKTFKRTTNISCHPCCDEDKHLFISAATIQSRGHKQSCDAQDAFHSIQKSVETTVTKNANFLEHHQQLARSGKKTILYRSKLGDNHTPDNTQK

SEQ ID NO: 978898 - protein, 409 aa, Homo sapiens
ALPDSRQHQQLPRARPRCRRPAWREASGQGPATRRQQQTVAYAPKSGRRNRTRLKEQKGKLNTEKDAEAHEKPSREQQEQQRAHHEKGPQETIHRDKKIEPTDDTHTKDTRAHHREKMNRRKQQTKEQPRRTTQKKKRRKWRKTTNNRYKHGATRTHRRAKRHQTENTRGTKVTHPPRLRVTNIQEQPQPAEDQQTEDKRKQKEATTRERNHKGDKANRNKTHTHRREHNERNRKRNTKTTRKNHQYRHTRGCNTAKNRGEKQRERQPPTGAQPETKRQNEEHRREKTPPARRTKPNTHDGRKATKQRTHRADKPPPTVDQQPTDATQHGSEEKKTTKEEGGHTNDGISHTHEETAQKNKQKRTRRETKKINQTQTYNTEEGERHTTPPKGERQQYHAEGDNEEYHAST

SEQ ID NO: 978899 - protein, 86 aa, Homo sapiens
MGSPLNSGLARGYSSFDEGSRKDQVYKAPGPLHVKGRNSKDGGSRVGLRVNRAGGRYRENYPPGADPANMARGKYTPRGGALGRTT

SEQ ID NO: 978900 - protein, 74 aa, Homo sapiens
VSTQSGHYGRDAIPKTYTDFAVTLNVVYCCILSGVDNKSPDIVTYYSGKKESIMAYIGSGLSYDSQLASIGCIV

SEQ ID NO: 978901 - protein, 184 aa, Homo sapiens
MLSRDVDEYLGRGVRTRCSAYYGSGPTKPLLVAPCQSHTDLEHLESILSWQLRKTRPAVFRGGNTAMLLLCRETVDSDIPGCACPDQEYLRWQGPGSRGNHQARGLPEKLRRGTRDAQRSMHDEVTADNFSGRGHGALAVEMSERPVPPNTRDGRLYGAGSRLETARQRQIKRPNLEKKTVGNT

SEQ ID NO: 978902 - protein, 115 aa, Homo sapiens
AVFQSLAKCSKFGDDLYSGCLAAVLGTKLEVQFWHKTVGILPSNCSDIWQVLNVNQIAVSLDQSAQRFKQLQRTTPNVCVSPKGPWTCVGDMNRKQERSNGVWAHLLLPRCQVLW

SEQ ID NO: 978903 - protein, 98 aa, Homo sapiens
TGGQDGGDSSIGRLTRRKSEAVVRLVRCPSTHACLGRWSYAVSWWNYVVTTTIDQACANIANDGNELSLLEILGIESVLKNRYVFVEKYKIVVEELGS

SEQ ID NO: 978904 - protein, 261 aa, Homo sapiens
MGGGAGRPQSEYRSDTSGQMELVPQRDNSGNRNTWAVGFSPHKKTAPRGGDRAVCAKTNTHREGSAEETRGGFTTQGGVTREAQTDYYKNIGAPRGGEYSKLDDTMRADTYTRPTNDRQKSAGEKQHRETENSTKRGNSVHEESQEENRQTTSTSTEQAAEERQDERRRAEGERQRQDDGNERQESTSDDSRRRLQRKRAQRRDMARRGERAERPDVTVAGRAGSEHNADDDRSAESVRELRRDDIDDKCNTETQPADSRR

SEQ ID NO: 978905 - protein, 102 aa, Homo sapiens
  misc_feature (43)..(43): Xaa can be any naturally occurring amino acid
MEGWGSQSIRKNDEQLTGGFKQRETCPVEERHGKDLKQNIKAXKADEEAIRQPMEESYIENQSSIPQMKKYAGLTAKLKNEEAKGEMKCDQDSVKKNLTKSD

SEQ ID NO: 978906 - protein, 126 aa, Homo sapiens
  misc_feature (19)..(19): Xaa can be any naturally occurring amino acid
MVSIDPQKLGAGKIPQPKXAIKSVITSSYYGWFNSPEEGSTYEKSSTIFTPLHQDRLLLTMSPDERIFHQWARIPDHTCFSHSFRLQTCVSVTKNIASRKIKTLEQYLPGSGSKESLRGTRGKFCV

SEQ ID NO: 978907 - protein, 35 aa, Homo sapiens
TKNKNPHKIEKEGDCIHIGPSLSEDERSELGARKR

SEQ ID NO: 978908 - protein, 86 aa, Homo sapiens
MYSCKLSRLAARVPERVGTARVSWAARLRPARVSWAAPPRSRGEAPTGRRGPTCLPSASTPGSRSLAPAALVHGADSTAGTPHRGR

SEQ ID NO: 978909 - protein, 187 aa, Homo sapiens
  misc_feature (97)..(97): Xaa can be any naturally occurring amino acid
  misc_feature (106)..(106): Xaa can be any naturally occurring amino acid
MFKLETVKDKPQEEPTTWTGYFVKVLMASTSYLPSQVTEMFNQGRAFATVRLPFCGHKNICSLATIQKIPRLLVGAADGYLYMYNLDPQEERRSVPXMKQAPVCDXQSWKRPIEDSWTSALFTTSAPIDHYRTIRASCCKEKALPQDDSGVSSEVGALLLGETESQAPLRSGMKDKRGTRHIDFFET

SEQ ID NO: 978910 - protein, 70 aa, Homo sapiens
PPPPPPPPDRKKKKKRKKGKKEQKNKKKGKKGKKKKEKKKEEGTELNMGQEMESKEYNCKEKLILKVNKS

SEQ ID NO: 978911 - protein, 107 aa, Homo sapiens
VGALNELRTEHRPCTNQLCACNRHLEECPLDSSLCSDHSCSSRAPFQSSTTSLVPVHLRRRPILPPTSPSPSPALAFWKRVRIGLEDIWNSLSSVFTETQPVERIQR

SEQ ID NO: 978912 - protein, 30 aa, Homo sapiens
VPAPARGPPSAPAAPPSPSALSLSLLRVVT

SEQ ID NO: 978913 - protein, 180 aa, Homo sapiens
DTEIKDDAATKDDSPEKKPKKMVVEADIEDIKKTQQRSLMDWSFTEYFQPKVLLQVLQEAHQQYRCVDSYYHTQDNSLLLVFHNPMNLQRLQCEHWNIALHSNVGFRNYLELVAKSIEDWVTQEEAKYQEAKMAEELNRIRIELELKATVKTSASKIPGPKRSKTNKVSSKTELSDQEKD

SEQ ID NO: 978914 - protein, 131 aa, Homo sapiens
MTGRSSSGSCSDPFKRRGKPLADPQSEEMRPWQVPPWPLAARFQHSAPFSSLHLFPAWQLFHWTGPACTWTRLPGLPTPALCIFEPGTANLWNWVGLSLTDWQLGPKRPSSKFHCSESTSNTTSNKAQAES

SEQ ID NO: 978915 - protein, 164 aa, Homo sapiens
KLSAFAAVSLVLSGLLGMVAHMLYSQVFQATANLGPEDWRPHSWNYGWAFYTAWVSFTCCMASAVTTFNMYTRMVLEFKCRHSKSFNTNPSCLAQHHRCFLPPPLTCATHAGEPLSSCHQYPSHPIRSVSEAIDLYSALQDKEFQQGISQELKEVVEPSVEEQR

SEQ ID NO: 978916 - protein, 72 aa, Homo sapiens
MSQGWLGTLSFPLSANVLHPRAPRSTVQGEHEHPQSLRPSPAQLFRGAQNLSPSLALVASHCPPHSAGHLEV

SEQ ID NO: 978917 - protein, 109 aa, Homo sapiens
QEFGTSCPEGEQEPPQLAPSVPPPGTVDSEPRVSPVAPMESGIFPDKYSLQFGFGPFELPPQWLSETRNSKKRLLPPLGNTPEELIQTKVPRVNRVERKMSRNNKVSIF

SEQ ID NO: 978918 - protein, 44 aa, Homo sapiens
  misc_feature (12)..(12): Xaa can be any naturally occurring amino acid
VDPNLDLSIREXVHRILPVAAIKGVVTRFIEEKSSFEYGQVNHA

SEQ ID NO: 978919 - protein, 77 aa, Homo sapiens
  misc_feature (30)..(30): Xaa can be any naturally occurring amino acid
RGGGVVKHHIANANLKAGSLMALTQGPDQXRLSLGARSGWRHSPSRSMLTPPWSYPRLVAETFAQKMDALTNKKNED

SEQ ID NO: 978920 - protein, 129 aa, Homo sapiens
NQIDKPHNDPCKKTARYEYEMEDNNQYNQGKNNSIDTCTNKILKRMETIINTQTENTLPPGQFTKTTFYTICKTYSYLPPPLKETVFPSLPTEFLPPRQDPHQSLRQRTQAPAVAQHRVFNKKNKVNKR

SEQ ID NO: 978921 - protein, 135 aa, Homo sapiens
  misc_feature (32)..(32): Xaa can be any naturally occurring amino acid
  misc_feature (91)..(91): Xaa can be any naturally occurring amino acid
  misc_feature (125)..(125): Xaa can be any naturally occurring amino acid
  misc_feature (130)..(130): Xaa can be any naturally occurring amino acid
  misc_feature (133)..(133): Xaa can be any naturally occurring amino acid
QHQRALPVDAHQAHGPEVPDRQQEGGVVQGHXVGPEHFPKVEIGEEEQQHQWRHDQPAMDELVAAELVEHIQEDGHNHDDADHDEGIQHGXEEALAHRGCVLSEKSVDELAIILCGEAHRLDGGXIIRSXTEXQA

SEQ ID NO: 978922 - protein, 136 aa, Homo sapiens
  misc_feature (90)..(90): Xaa can be any naturally occurring amino acid
  misc_feature (96)..(96): Xaa can be any naturally occurring amino acid
  misc_feature (121)..(121): Xaa can be any naturally occurring amino acid
KKKENRTKGGKTKEKKGNTKNGRPERKKRPKDEGRRENTQKRNEETPPTPSLTPRDFEKPRPGKLPNLKVTTDGPPDRRLPPNSSHNQRXRGPLPXKIGTPRVGGETEGGVGDGTRDRKGXAGQTVEGGKAGPGTL

SEQ ID NO: 978923 - protein, 118 aa, Homo sapiens
LSSLPRLQSLRVPAFFTESSEYGCVMDDQTMAVATGGGTSSPQPNPFRSPFRLRAADNCMPWYCNAFIFHLVYKPPQGGTVRSAPGPAPRPPTPAAPPVPARRRRGEKKAARGPRRRR

SEQ ID NO: 978924 - protein, 131 aa, Homo sapiens
MPSEVKKPASMEEKDSLPNNKEKDCSERRTVSSKERPKDDIKLTAKKEVSKAPEDKKKVSKAPEDKKKRLEDDKRKKEDKERKKKDEEKVKAEEESKKKEEEEKKKHQEEERKKQEEQAKRQQEEEAAAQM

SEQ ID NO: 978925 - protein, 181 aa, Homo sapiens
GDRRRRCLELITRLRRSLLRASTFCRRLLDGCQCLTNRAYVTVPLLGVPAKSGTDLITASRAWQRCPHDARILGCSLQLFLRARHAGNGVTECGVRPSGLDGALFQFCLRFPCPVGLLCRRHFELGSRFGEVVQLLLALVRARALESLAVCDGLIQCAFGLVEPGFCRRSFQQPPILQRGR

SEQ ID NO: 978926 - protein, 121 aa, Homo sapiens
HSSLSDRARTCLKKKKKKKNLPWVSDFLFVCLVFCLFLTELVLSVKQPGQWLTPVIPALWEAEAGGSQGQEIETILLNTVKTLSLLKIQKINRTWWHALVIPAIWKPEAEELFEPGRRKLQ

SEQ ID NO: 978927 - protein, 109 aa, Homo sapiens
IVTIQLTCIMETSKVSALVRKVKVIICMTGQVLSYGPYLGEEMSEVRFKHSSTEILLSVTGEQYGRPISGQKEVHGMAQTSQNNYWKAMEGIFMKPSELLKAEAHHAEL

SEQ ID NO: 978928 - protein, 128 aa, Homo sapiens
  misc_feature (2)..(2): Xaa can be any naturally occurring amino acid
SXYVIADMVADGLGWAILPVNIAEFGDLRPHLRQRACEGLALPPLTVRMLWLEGLAPGAEALWMRQRLAELLALMATAERSGLARALRPCSGAGSGCVFGRRALFRSCLACGQHAQGPHGDTGQQRHH

SEQ ID NO: 978929 - protein, 141 aa, Homo sapiens
DKRQGRLAFAQVVAGVLAHVLDGARVVEPVVHDLECGADPAPVFGGGSLGRRIGAREYRAQAGRRLEQLGCLVADHLHVARFVDVRIVHVEELQHLAFGNDRRRFGQDLHHAHLADADHHLERARVEVIAYQHARRVAEQR

SEQ ID NO: 978930 - protein, 127 aa, Homo sapiens
MPMRNAVKNRGRADGRRTYRNCCQREAPMLTRRDLASRSAAAKPSMSPMAIGKNVARAITRTLGSNPKPNQMISNGAMAMIGSVCDTTKSGTNARRSHGEKSTATASSQARTRETAKPTRVTCSVAA

SEQ ID NO: 978931 - protein, 65 aa, Homo sapiens
MSSRPQMYRATGDRDKRASGRKNLKKNKIQSSSCPGHIGLEAGPIMSSPPQMYSATGDGDKRASG

SEQ ID NO: 978932 - protein, 78 aa, Homo sapiens
HLELKPIEDVGKLLDQGAFERVYLCYHVDTVRELAVKQVQFDPDSPETSKVKITAQITLSHYKKLYSLLFFNIKPLPF

SEQ ID NO: 978933 - protein, 125 aa, Homo sapiens
MTKKQGEDGGPVGSRGGGASMTRNNKPRDTEHRKRVHQTRDERGMIKHVDHSKGATGSLSMNKERALKSYHRANICQFSHKSQYPHKPGQREYEPCQLLLSSKKKNDQLFKGVRRVAKGNRHCHY

SEQ ID NO: 978934 - protein, 79 aa, Homo sapiens
SIITITIREILPIQQAGKNMSASVTVVCKQCPLFRKGLNYIIMGQVGEDGRGKIMPNSFIMMFKTKNQKLLDALKNKQC

SEQ ID NO: 978935 - protein, 140 aa, Homo sapiens
MGISVCPYGGGVNVAGVTLQSLNPAIATDSDKEHWKNVHKQVVEGGYEVLNMKGYTSWAIGLSVTDLARSILKNLKRVHPVTTLVKGFHGIKEEVFLSIPCVLGQSGITDFVKVNMTAEEEGLLKKSADTLWNMQKDLQL

SEQ ID NO: 978936 - protein, 108 aa, Homo sapiens
MQVASTLQQPYRKLQYMASNPRTQPWQQGSGNGMPPWGHTNRLLPPLCTMGGRCCVEHLKSSLQDRMPLLSPAPIVPLNARSGGGKREEVGRKVMKTPGHSLNKLDFI

SEQ ID NO: 978937 - protein, 107 aa, Homo sapiens
DSCLVPLSHLETSYFQPEEQILQELNKISLDPELKIGGSRYDLTSLVPGNLQPGTETGNHEVEDAQSLDDLDAFTQETLDRMNCHWSRTQVLPNNISGWRNQRGKLK

SEQ ID NO: 978938 - protein, 106 aa, Homo sapiens
MEHVNGLFHEASTGGVRVPIKLHPIIESVRQGALQGAPHQLAAESHQEEDDVKEDADSQAHIRTVDEGRFFFTCLYTLASTSVGSYFFRIPAYTEGQLQHQPRGTS

SEQ ID NO: 978939 - protein, 67 aa, Homo sapiens
  misc_feature (44)..(44): Xaa can be any naturally occurring amino acid
  misc_feature (61)..(61): Xaa can be any naturally occurring amino acid
NVFPNQTEGKRLLQTPGFLKLLLNAPPKNPNYLPLPKDNQDPIXHPHSSDPHPGPGLKGFXQLPSYP

SEQ ID NO: 978940 - protein, 103 aa, Homo sapiens
  misc_feature (6)..(6): Xaa can be any naturally occurring amino acid
MGVDTXYVPPPFNPDMFSFDEKLCSAPAEEREVGQMKLLINLIKRKPQMTEEQIKTIADGFTAMVDKCCKQSDINTCFGEEGANLIVQSRATLGIGAYRHGCQ

SEQ ID NO: 978941 - protein, 168 aa, Homo sapiens
AVVVHINAAVQVHGVRGAWLVAELAAVTEGVLGKIVVVVHVGGGGPHENAAVNHFAHGVQVAAFLQVQHLPTHQGWGARVAGCLEGTEHGIGFDGDVIVHVQDVGGLFCGCLSSAVGATHGLIHDAGVAAGTAEVTLLVHEQPTFEMLRSIGEAWFVSPRSAREFSSS

SEQ ID NO: 978942 - protein, 92 aa, Homo sapiens
KDKPTYDEIFYTLSPVNGKITGANAKKEMVKSKLPNTVLGKIWKLADVDKDGLLDDEEFALANHLIKVKLEGHELPADLPPHLIPPSKRRHE

SEQ ID NO: 978943 - protein, 186 aa, Homo sapiens
MSYVDGCVIAVPTANREQFIRHAKAAAVVFKEHGALNIVECWGDDVPKEQVTSFPMAVKLKEDETVVFSWILWPSREVRDAGMSKVMEDPRLKADANPMPFDGQRMIYGGFELILNTWGQVFTDGRCSLIACCRVGPTTEPMQDRYENSAKQGHDAICLKNRRVDNPAGWAKFKVDAAANLVVVVD

SEQ ID NO: 978944 - protein, 30 aa, Homo sapiens
EVYMWVGTQTSQVEIKLSLKACQVYIQHMR

SEQ ID NO: 978945 - protein, 175 aa, Homo sapiens
LQVNSRMEPESIEICPYNPHHRIPLSRFQYHLASCRKKNPKKAKKMASCKYNACHVVPIRKLAEHEATCVNRSSVEEEDTLGPLQVSLPQPQNQDTLQVRWLSNPDIWNVDGANCHPMFVLKILFPKNLFVKVTSKSHGEETNAQKILRLGPGRQTSSRRKRALKCVDGSRISSE

SEQ ID NO: 978946 - protein, 137 aa, Homo sapiens
NEINPECRGMEWNGMQWNGIIRNGMEWNGMQSNGINSIAMEWNGMERNTLESTRVEWNGKDWNGVEWNGINPDCRGMEWNGMQWNGFNLNGMERMESTRVEWHGLEWNGMESTRVQGNGMEWNAMEVDPAANLVVVV

SEQ ID NO: 978947 - protein, 116 aa, Homo sapiens
TDSSAQTAQTVQHRQQSTTQTAQQSTAQQRQHSIAETEQHSTAQTEQHSTPQHRQNSTDSTAQHRQHSTDSTVQHSTAQTAQHSTDSTTQTARQSTDSTAQTAQVYPAANLVVVVD

SEQ ID NO: 978948 - protein, 37 aa, Homo sapiens
HSSFDFHLGPLAERPRGIVTLLTVVTVHAAANLVVVD

SEQ ID NO: 978949 - protein, 79 aa, Homo sapiens
SPIHLYVTGPPVPVEAENGSHVLLTQLEVEDLERQEFQNHHLASNLFDLGNLHYYGVFWLGTRRRKRAGVKITMATVCP

SEQ ID NO: 978950 - protein, 121 aa, Homo sapiens
RWHLWGIRGRKVPLVNLLLGLYPVTEGAIMVAGNDISQVTPDALRRRIGVVFQDPALFSGSIRKNIAYADRFIKRFSQQYDTLVGERGIKLSGGQKQRISIARALLKDARRRGREFSSSSD

SEQ ID NO: 978951 - protein, 110 aa, Homo sapiens
LSLRGCCQDAWSLSGKQQVAKENQQVAKDVTLHQALLRLPQYQTDLLLTFNQPPCHSRSLGPENLSCPPWSLSNFEQLVTSLTLHDPNLFGPQYKKVETQRATEDSGTQL

SEQ ID NO: 978952 - protein, 36 aa, Homo sapiens
HLPLTHSTLSTPSPVTHSTLSTPSRRRGREFSSSSR

SEQ ID NO: 978953 - protein, 136 aa, Homo sapiens
SVCAVVCCAVLSVLCCAVLSLLCCAVSAVLCSAVLSVLCFAVCAVLSVLSVLCCLCCAVLYCMCCLCCAVCAVYAVLCCAVLCCLCCAVCAVLSVLCCLCFAVLSVLCCLCCAVLSVLCCAVLCVDPPANLVVVVD

SEQ ID NO: 978954 - protein, 122 aa, Homo sapiens
RRYIQRRIARMLGVPRITVRMLSDPFGRRVPIRGDRDKAVIGAHQVQEDRFIMNNVLRNPFTTAPEVRTRLFEVRNLSVSERTARRRLPERNLTAFRPARAPELLTQHRRGRRGREFSSSSR

SEQ ID NO: 978955 - protein, 94 aa, Homo sapiens
LLQMKSTFEKKMQRQHELSESCSASALQARLKVAAHEAEEESDNIAEDFLEGKTEIDDFLNSFKEKRTICHCRRAKEEKLHQVIAMHSQFHAPL

SEQ ID NO: 978956 - protein, 114 aa, Homo sapiens
MALWPTFRVEVMYHVWPLVGGWYTCSWHTLAEVAGCSLSQLGLVQHAQASVQQLCYKWSHREETSSRLRNQVCAAFGAPVHASGVVWHCRLLGCQEADQQDGVDTPANLVVVVS

SEQ ID NO: 978957 - protein, 66 aa, Homo sapiens
IITTEPQVTLDVAVLGTGLRKSNYETKVMEYPPSGRNTEQLIDSFFAASQTTKWPINQENQRNQIR

SEQ ID NO: 978958 - protein, 138 aa, Homo sapiens
FAFLTLGGPASMIGFAIARDYNPLSRVGTATGVVNVGGFLATTVTALLIGILLQATGGNFRIALLVVVAMLALGASRMLVWWRRARAHVFAAEARGEEVPVRIRRHRWDRAPEEAVAAALSHPRRPGSTAPSMRPGRP

SEQ ID NO: 978959 - protein, 101 aa, Homo sapiens
TRRTRARAQAQPEMADSDPGERSYDNMLKMLSDLNKDLEKLLEEMEKISVQATWMAYDMVVMRTNPTLAESMRRLEDAFLNCKEEMEKNWQELLTETKRKQ

SEQ ID NO: 978960 - protein, 146 aa, Homo sapiens
GLESCELVELAWNPLEGVSRRTASREAEHQQDYYSDWDHYSSFSIFNKVAQSLSGNGCWKLAESLGLSAAPTAQNMLCIGLASPSILNGHKSERFKRQENASHSLNCGPGSGERVTSIILYCSHNDFQQIGVEGMFKSYHNIGPNV

SEQ ID NO: 978961 - protein, 109 aa, Homo sapiens
MSDTHVPIREGITPHCDAGTPHPQRIMRSFNGWRSGDIEAAIVWMPGKIGLDLFTGSDIVRFHTGIRITDIRVLVHVIGRCQRNTRCHPLITGRITVDHGFRVRISRRD

SEQ ID NO: 978962 - protein, 140 aa, Homo sapiens
GCGGVGSDRRFGRAWRVGGRKHAGGACRGCQRAACLERCDSVGTVVRERGRGSVMPGSQVSGVHDPAGAAPATGASQPRPSSLQQLLALKNRVLMELQKHGIGKQATTTGVAPAPAPVPAAPRPAANDTSAPAAASTAGE

SEQ ID NO: 978963 - protein, 138 aa, Homo sapiens
LREEGATRRGRRPKSDIAKAAAAAAAVASTSGINPLLMNSLFAGMDLTSLQNLQNLQSLQLAGLMGFPPGLATAAAAGGDAKNPAAMLPLMLPGMAGLPNMFGLSGLLNNPITATTGNATTASGQGETEDGASKAEEK

SEQ ID NO: 978964 - protein, 72 aa, Homo sapiens
EEEEEEVKEGQLQPPEFQAKRPDSTRRSQNSGGSDSDKILPDRQRTRNQVSSAQSQRDGILNLIKIRLLKPK

SEQ ID NO: 978965 - protein, 81 aa, Homo sapiens
TRQVAQAGTHSFGRTSAQMDPEMSPRTLFGTLFGKKADCNLGRCRQGRGESQMPPCPLPLHIRVLCVLCRLIYSLPGLEFR

SEQ ID NO: 978966 - protein, 120 aa, Homo sapiens
RNSARGKTEASEPKKWTGTQFGQWDTAGFENEEQKLKFLKLMGGFKHLSPSFSRPPSMTIRSNMALDKKSSEMLQQSLQQDYDRAMSWKYSHGAGLGFNSEARKVFYIDRNASKSIKLQD

SEQ ID NO: 978967 - protein, 145 aa, Homo sapiens
FKVGTEEDKYRLTYAYFIGGEAGDAFDGFNFGDDPSDKSYTYHNGMRFSTFDNDNDNFEGNCAEQDGSGWWMNRCHAGHLNGQYYIGGVYSRDTGTNSYDNGIIWATWRDRWYSMKKTTMKIIPFNRLSIDGQQHSGGLKQVGDS

SEQ ID NO: 978968 - protein, 51 aa, Homo sapiens
FTKVEMYNLFNAQTSGIEEPSETKGCRKKANSNISGFLNDEDQNKGFVINL

SEQ ID NO: 978969 - protein, 142 aa, Homo sapiens
QRPDPGQLLQLQHLVGLQLLHLLCHLCRARLHLQQLRAHPVLAPVVERGQFRPLPVDLRWVHAVLLVQPDDGFGAALGARAHVAGVEPVLLAQAQRLAVQEGVLSQHLVNALLAGVQLLREQRVFALQVTARAPIAAARHPR

SEQ ID NO: 978970 - protein, 55 aa, Homo sapiens
QRAWGEIAPADRLLLMIDDSVEAGDEWGDELREILRKLPQGLSITVVRNKIDLSG

SEQ ID NO: 978971 - protein, 73 aa, Homo sapiens
QGLEPHRPRTLQQTEWPPSCAILGHWAHRVSNIRDLGTQAPVLQECPAHAPPPPISLPFGKDSLLSVLKILFC

SEQ ID NO: 978972 - protein, 106 aa, Homo sapiens
RRRRHQHQGVATIGHALNNGTLATTEAVETKNVFEDALSLFEHNHSKNHQKRLFKGWLKIHRFHEKNRKQAFPSGPEGQQRITKRGSIPERPTAMGGAGRLREFSR

SEQ ID NO: 978973 - protein, 38 aa, Homo sapiens
GILTSGTAAAALCFESANVICQSEPLCSPSWCKKDTES

SEQ ID NO: 978974 - protein, 169 aa, Homo sapiens
LLRGECGQWRAFASRDRKAMVVWANTGGAGQAMCPGWTLSLPRDHTQPQPSPGPHPWTQPVPNPALHLALALGTLIVVCDLEAHPQNGADVLLLQGCMHRPQTQGGPRGILSQHGTAHIQDTSHNHCPAPQPATSPSAPRLPGGHAMSCPGAVHRDAQGEGGCSRCCAA

SEQ ID NO: 978975 - protein, 75 aa, Homo sapiens
MRSIAPVVRFSFGLTVKEAHSEKRIMGSSQGIRYPVARSKVPSTRHPLGIGHSFSPGPRYTRRGKGAAGSPTLRP

SEQ ID NO: 978976 - protein, 50 aa, Homo sapiens
PSRISKPMGVCDSLGGGIQEPKRGGRQAGGKGGAQVEGYYEIASIKPVAV

SEQ ID NO: 978977 - protein, 40 aa, Homo sapiens
RRKRCGSARRPLTFDLRLILSLQPPLPPQLTVSGHGGLAA

SEQ ID NO: 978978 - protein, 52 aa, Homo sapiens
MARGKPKEEGSWKKFIWNSKKKEFLGRTGGSWFKILLFYVIFYGCLAGIKCS

SEQ ID NO: 978979 - protein, 152 aa, Homo sapiens
MSVWSSTAYRSHDVKTSHVRQLERTNSVASPRKGSPSATERSESPDTQHSADEPGTRNASEMSQTQQAKMLRNSASVKKQEQAVAQRQEVDSGLSGAGAGVGGQLLNGTGSAKVLDLEEVVVAQHGECVDVAELCTLIQLIVNFKLCDFYLN

SEQ ID NO: 978980 - protein, 40 aa, Homo sapiens
RGAGRCMNLEFGELRWIRVETLQACVEGAAFGKYAGVDLM

SEQ ID NO: 978981 - protein, 42 aa, Homo sapiens
MVITTPSRAGAARFGTKQSDIEMEGEPPEAAQILNKVSTTPG

SEQ ID NO: 978982 - protein, 87 aa, Homo sapiens
PRIRHEGKRRESMSFNIFPMNVTISYGSLTASNKLALNLSKNKRMPGEPTGLKEELNDKHGYNGNQGSSEDFGLRNLLTITLSAPFS

SEQ ID NO: 978983 - protein, 60 aa, Homo sapiens
LLILSGKDVPLTCKYLVIGLLETISRGYVHSHLPVVSPVMEQILKEALGSAWALKGQSQL

SEQ ID NO: 978984 - protein, 152 aa, Homo sapiens
MWRYIHTEQLTDTNYTTTIGIGLEPRFGTREELLLIDQQRKWFLEMKSTTGEDAVNIVEMTTKGLEYYVNLVYKVAAGFERIDLILKKFCCEENALKQHHILEQTLLLKEESINAENFTVILRDCHSHLTFSNHYSDQSAAVNIEASLSKTQ

SEQ ID NO: 978985 - protein, 110 aa, Homo sapiens
MQPLREPRPGSSPSPGCDSLFEVLWFLVFAELLNTTTFPGASWGSWLPCTWSSHSLTESQCLFQHLELPAPLQQPACLTVCSGRTPWLVVHTPPATPHLVHPWQVWDPGW

SEQ ID NO: 978986 - protein, 130 aa, Homo sapiens
PRDPEAQPGPSAVWEPLRPLCGAGGKRPRGLLGILTRVRTLEPALVSPTGRAWEGTVWPGASSVPIGLRESKAVALNFSPKLLCPESGKQEVVATGKEESALGAGQRLQAPRPCPSHASPGTVNHPPTQL

SEQ ID NO: 978987 - protein, 90 aa, Homo sapiens
ILDAIDLSEVARAEVEIIHPCHLSWIDQKIVRVHQQDMFLVPKLRNSHSGLQSNYVQGLPGISHVLKLQMRTTLQCLTESCELKQAFPLL

SEQ ID NO: 978988 - protein, 98 aa, Homo sapiens
RHEGWSDLFLELCPGAGLGYWRGCSHLSATLGVHNSLLWFRGSKPSLESGPPAARARSWPFPLDCRGRTVLDLGVGSLGVSLGVLALWEEGSTYSGER

SEQ ID NO: 978989 - protein, 74 aa, Homo sapiens
MDNTWWGIRLPDSIPGSLYHGVWMLKTWSHRWQGPAPGESTSAPSVLGSGAHRACSTKGHSEDLLPRDPGPERG

SEQ ID NO: 978990 - protein, 72 aa, Homo sapiens
VYWNMSCAPIFSETTLINRVCDLHTLDIVRFVSAARAELVTCWVFSHPSWPKMFQFFSVYAACEIDDYGTQK

SEQ ID NO: 978991 - protein, 116 aa, Homo sapiens
SDLRLKPDYGDSSTDQEATAWAPELTSSPCTDEERSHETSAQSGNRALFVTSCLSGGPVMKALPDWAQGIQKGQLVFAIVCCFSITSSPKQHWMNASRGSHNSFQDLVTIVSVPVQ

SEQ ID NO: 978992 - protein, 85 aa, Homo sapiens
ERLMIIELKMKILENQIFIRWNKMNLHGRSDIQQSFVLKKHRMRRHESICSTLTELYIDFPQLMSLRRGDLYRYWRFTSLKPSHR

SEQ ID NO: 978993 - protein, 66 aa, Homo sapiens
AHLCSLGSWAALLARAVVTGLMAISTLTLYVAVINVHSRHDVSDNDVPSIPASLQILVKKTVIGNV

SEQ ID NO: 978994 - protein, 57 aa, Homo sapiens
VHNAQNLMQSVKESVREPEAESIKIGTDAGYTLRWLQKDSLVPVGTQLGLTGTESST

SEQ ID NO: 978995 - protein, 68 aa, Homo sapiens
CYLRDKVVVGTLLWNIYNRIPIARKIIMDGEQHEDINDVAKLVNTHEEMKPHCGIGKRSTSPERRLNG

SEQ ID NO: 978996 - protein, 128 aa, Homo sapiens
RLEGRRPSKGLMDVTSQGFAYHTDQSTGSLSLTTAAKGIPSTLLPDTWAHPRASCGCPVTALPHCPGTFFRGAVLPAFRTAGGVGGGLPSLSLTFHADGPGAGLSRGCIVLGVTSTYYGSLTLPTGVL

SEQ ID NO: 978997 - protein, 110 aa, Homo sapiens
NVRLEEEIAGWRRRRPPREVTVGPDLPPWGPDLGLGAGIRGTLFPSWAQRGVRTEVPSQDSPGSCELPSGEHVSPKPWNDCFKVRKGGQGRDGGRFWLTERTHKIMFLPP

SEQ ID NO: 978998 - protein, 95 aa, Homo sapiens
ARGDSVRQTQEYQRIMDINSRMEQVIATYRSLLVGQEDLDNNLSTHKAFEAAACAVCAVNWRVSSGSRDGKEGTITPGCSPDLPIKIYASREKKK

SEQ ID NO: 978999 - protein, 43 aa, Homo sapiens
MACWGQHWKLFNGQTATDLLKPVGFAVCHMSLEDRKHDILLSL

SEQ ID NO: 979000 - protein, 89 aa, Homo sapiens
RHEAFLHFTGGNHELCVSSAPGHVVMLDEPTWQELRAPLGAEVVSEQQEIEAFSSNNCKELNLAHKMSELGSGSFLWLKLNANLASQTP

SEQ ID NO: 979001 - protein, 44 aa, Homo sapiens
HCKANYARQTIMQVWVSCMMCSLSCSRLYGCQTSIDGSRNVIPG

SEQ ID NO: 979002 - protein, 143 aa, Homo sapiens
PLHPGESLPFHSVYYEDEYDDTKDGIQVVPNDADFDDEMITRRPFTILQVLRSKVPREGQEKDDDVEEDDADEEPPKPDHFVQDPAVLREKAEARRMPFFSKKGHRHDSSTAVAGSPRGLGQIRETTQRRPGVCLFVGLTLAQ

SEQ ID NO: 979003 - protein, 85 aa, Homo sapiens
RHEGRSQALLRGEAAEAQREFERGASGPEVLWYPVHPPQLLARVLSPSLPRASGTSRLLQVRGLVSPAELELVLAHECHAPLLPP

SEQ ID NO: 979004 - protein, 175 aa, Homo sapiens
GTRLAGRFDARYKILLGLGLTSLSLWEMTAFTTDISACDIVRTGVIQGLGLGFIFVPLSTMTFATLAPRYRNEGTALFSLMRNIGSSIGISVVITYLAQRTQANHAVFSEYIDPASLAVRQAVESGAMDLGTPLGLSLVDAQVTRQAATLAYLQDFRLMMWVTLSAIPLLFLLRP

SEQ ID NO: 979005 - protein, 65 aa, Homo sapiens
QVQLVHVGGVLDAMVATKVAPVSTRQHAQIGDVLPQDERWTARSPSTLDRHIGARHRDCIKKATA

SEQ ID NO: 979006 - protein, 37 aa, Homo sapiens
MQIRNKAGFWHMDMVSFSTVAKFMNQPVNVETHVIAS

SEQ ID NO: 979007 - protein, 55 aa, Homo sapiens
YDRTDETDAEECDPEESYSTGVTTVSIFHVLVRPNSIDCKFNSVYVHINKHISSP

SEQ ID NO: 979008 - protein, 35 aa, Homo sapiens
  misc_feature (34)..(34): Xaa can be any naturally occurring amino acid
RQQWKMRHQMEHASSTLQELLGECLVVILLNECXP

SEQ ID NO: 979009 - protein, 113 aa, Homo sapiens
VFICIKKKEAGSWPRLLSQKTKCPWLKTDFNRWKDEDDSEPDMDGNNFSNMLSQMSNFGDYGGDDGIDGHLDSDDEDLPDLEMPNADANKSEENGTEEEAEKKTPEKEASSAN

SEQ ID NO: 979010 - protein, 81 aa, Homo sapiens
FGKLRHESGSPHAPPHHSPTGSNARAPLDRGGGYEVDFLRLVATSHQHHYTGTETPPLSQRQSDTGHRSRDPTERKRAASG

SEQ ID NO: 979011 - protein, 39 aa, Homo sapiens
WQMEICVRRVPQQLSEGTVCSSDGNGPGLNNKQSQLHGG

SEQ ID NO: 979012 - protein, 131 aa, Homo sapiens
  misc_feature (112)..(112): Xaa can be any naturally occurring amino acid
DRAVPLAVMTRNRKAELRLCNKLVALLPTLEEPQERFEFAHMALALSITLPDRLNERVAYHRMAAMQHRLGHGELAEHLYLKAMEICNSPLELDEETLSDVKVYLVLGDSIXYDLKDPIDAPRKKQNNVGA

SEQ ID NO: 979013 - protein, 149 aa, Homo sapiens
HTCQSLPEPHELAGKSKGLPTYSAFASLLQGAHLDSGLGQGAKHTFEPHRSLVPPMAEQFGVERRDDMRGPPDAVGLGDQALAHGIHEVADMDVDGSVGTLGVVRRLGFRCHIASGNPRGLKAGVMVVGVKSRRRHGRDSRTSVTTPGN

SEQ ID NO: 979014 - protein, 69 aa, Homo sapiens
NVQTWTREVLSSCSFEVLLNHHIHQQWNAKSRTNRRKPAAKPGQFQSPPQIQDCRNGQEENHPLLRLLL

SEQ ID NO: 979015 - protein, 69 aa, Homo sapiens
GTRGAPPFRDTDGTHLIRITDYMTLSSPRVARMQGGCWQGWFNTDDVNRLKTMPGPQLPWRVVAMGLLS

SEQ ID NO: 979016 - protein, 127 aa, Homo sapiens
  misc_feature (8)..(8): Xaa can be any naturally occurring amino acid
  misc_feature (58)..(58): Xaa can be any naturally occurring amino acid
RHEDRINXYDWGDDVDSTAAPASRGPSASVFLRADPCGYKRAHARCGVRVQVSEPASXTAESTLLCPGDHPRFLTVWPLGSVAAPLPPSDLSSVVAACSGAPRAHAEHQEVNLGSNSPRGLGRCCPF

SEQ ID NO: 979017 - protein, 84 aa, Homo sapiens
PAGLGGLALEAMWWANSETEASLGGTEVPEPSCTHAGRVPYLRSFLGRTCVVRRETGARGKEEPVVPGRPADARLGMNKEAFWL

SEQ ID NO: 979018 - protein, 36 aa, Homo sapiens
RLQAFGLTQAWSPSKNLALAGGRTHGTLNKDRIEDA

SEQ ID NO: 979019 - protein, 43 aa, Homo sapiens
SRLSAEERQREEQLVSFDNHEEWNQMQNQEDEVSITEQDMERI

SEQ ID NO: 979020 - protein, 77 aa, Homo sapiens
MAAASEVLIMNPALRQTTLMSSYINVLRIPSEPPAPVVHKPWVWGDGVRTHHLISLTPRHRLGFCVEVKFLLNVSFQ

SEQ ID NO: 979021 - protein, 137 aa, Homo sapiens
PFLTPPPLALPAAVQVAVGARGEARGAWTRFPVAVLAVFRSGEERARRGSSALWVPAGDAACGCPRLLPGRRYLLLGGGPGAAAGGAGGRGPGLIAARRKPRATLEGRVDAAPAEAAATRTAGALQRRLSPPAGQGG

SEQ ID NO: 979022 - protein, 141 aa, Homo sapiens
PRRRQRDSLAQRQTVRVGGGSRSSGIRDERRFRESGSPGVEGSEMKAGSGAPRRRVRCLGNEDPRWKGAPGSVSGAPRRLLSGREPRVGVGKLFVKFRKGGDTACAAARATESRESPPPRRPRNGTPGATHAIPWRAGAAA

SEQ ID NO: 979023 - protein, 48 aa, Homo sapiens
MELRAALVLVVLLIAGGLFMFTYKSTSEKIFRFQDTGLLLRVLGSLFL

SEQ ID NO: 979024 - protein, 129 aa, Homo sapiens
FPCPAPSQDNHPISRAAPALPAAVPAWCLSPGQAAPAAPRPSPSPSPSPSPAPAPPFARPGTSLPGKGRRGPLGLRQGAQAHRVGCVGQGRQPRGDLAGAGGRSWRREPGRQGGSCGGSARGRPISMRP

SEQ ID NO: 979025 - protein, 85 aa, Homo sapiens
RHEGPVGGKRLHHVEDGGLVQRPALDEIQEGFLRLGRRRTAQALMVHGHTVARYVRHEARRQTVRRYGPIVLHDVGTVAELKLSL

SEQ ID NO: 979026 - protein, 53 aa, Homo sapiens
MVTVLKEMFRYPCLSSPDWVIIETQEQVTTVFDHRRHAHDGRRTAQVPQPCSL

SEQ ID NO: 979027 - protein, 61 aa, Homo sapiens
MPANMYRVGDYVYFENSSSNPYLIRRIEELNKTANGNVEAKVVCFYRRRDISSTPSTPSRA

SEQ ID NO: 979028 - protein, 163 aa, Homo sapiens
AFDNRVDAERLDGLHTFHPAHRAECLAVQRIADAVGIGFHRHIDVVDHRDLRLGKHRIGELFFQTLGSRLHEAGMERCRHRQWQGALRTVGLEHLTGLVDRRLAPRDHGLRGVVEVHRFHHLQSAGAKCGLGLCAASNHALGVHAEDGGHGAGTDRNGFLHGG

SEQ ID NO: 979029 - protein, 138 aa, Homo sapiens
SEPELAPSTSVKVLYRLQLDGHADWRAGEGRLGAPGQVQVQGVCVIPSSAPSSDAAMQGQGTMGCLWDLPTLFQDPKAAWGAGKRTACEPGNAGHERAKLDPGDRENDPQGPCSAWAVSELSQRPGCLEAVIHRKVCG

SEQ ID NO: 979030 - protein, 57 aa, Homo sapiens
PRVHSRSPPVVAPAPKASGSGGRQGSVWRFALAEAQTWVRSLASLQLPSPPGTYPAA

SEQ ID NO: 979031 - protein, 67 aa, Homo sapiens
GTRVIGVVRAGIQWICGTVTLLDDAAIIHEVRGALQGYLQVMGFTSVLMPPEAMYHVPERQAGRLRT

SEQ ID NO: 979032 - protein, 113 aa, Homo sapiens
FFPFFFPVPFIFHPLAPNWGEAPPFGFSQTGFWFGVPWPPPAPFPPWIPRPRKGGELFFPPGGFLVATSTGFLRSRFFPRPLKLLKLNFVKALRKEKVKGKLEVGKEEVKRAR

SEQ ID NO: 979033 - protein, 104 aa, Homo sapiens
RHEVGARLRGIPETLGQVAKPLEKYPAPSKEEEVGVDGHSEAPEKAAQVGLLFLKLLGKVEIVKNSLVALAWQTALHHLPGPVYIFPITHSLEHPWPTPSCVCW

SEQ ID NO: 979034 - protein, 123 aa, Homo sapiens
LSRIPFDTCVAFILSYRLLVEPHHCWMLFPSCTMMQSPVLKLSHDTDSSLARTTRRPLTWMSVCTTTYLGISFVNLADYTSVFVMQARLEVAEEGGRLEAMGLMLVHGPAVELLCHMHGEVGG

SEQ ID NO: 979035 - protein, 131 aa, Homo sapiens
RERCCEPMRMCSRAPECGGGSQSHIYGSFVCAVFSTHCESCGGYLVETVSICHNIYVPRKYLHTQPCHEDPYTEVVSVILPRGETHVAREPRDGENPTLTKPLSCVTQGAAVSTKFFCVTHCGAQRNPTSR

SEQ ID NO: 979036 - protein, 46 aa, Homo sapiens
SGPSGPRGPNKMLLMMALACASPFPEEAPGPGGAGGPGGDLGGARP

SEQ ID NO: 979037 - protein, 97 aa, Homo sapiens
MSEADYHRDAGTTDLRPPLTETIDPRTTALRPPLTETIDPSTTALRPPLTETIDPKTTALRPPLTETTDPRTTALRPPLTETIDPSTTALRPPLTET

SEQ ID NO: 979038 - protein, 135 aa, Homo sapiens
ILPLLSISAPCICRQMLKSAPTQPGWQLPKATPRHCFSPSRLLCLPPSRASVSSSQFCPHSVSLFALVCGQSPGRATGNSSCPRSFPSSCLHPSHATNPLLCGNAGGSPAHPTSFPSSCLHPSHATNPLLCGNAA

SEQ ID NO: 979039 - protein, 149 aa, Homo sapiens
RFALLAGNLGRDAVQIALALAGELAATVRVPLDHLDGFEGLDGLAGGATVGPAEVGRSHTVALAATVDAADRPDAGRAVVVQAAQDRGTADVEPVRVGRGQLLELGGLDQIHILRHLQLSRLLEEKGNTLNHFVLINVLYGDSRHLHCG

SEQ ID NO: 979040 - protein, 102 aa, Homo sapiens
SYWPLASPHACQTEIPFPLCSICRHRPTFEGSIQQHFLGNPFLTSQGIGTTPFLQIPLGPPAYTYVTWSQACLPYQTWAPWDHSNSLQTDTGSGPKEELHTH

SEQ ID NO: 979041 - protein, 131 aa, Homo sapiens
  misc_feature (46)..(46): Xaa can be any naturally occurring amino acid
IRHEESTPDELPSDAEEQLRSGDQQLELSGRRLRRLPSAVCALSRXQKLYVSGTGLRELPEEIEELRELRILALDFNKLERLPDGLCRLPRLTRLYLGGNRLLALPADFAQLQSLRCLWIEGNFLRRFPRP

SEQ ID NO: 979042 - protein, 73 aa, Homo sapiens
YWNREYRQQESRLVMSPAGPLPPRALPLVWIRGDLHFEEQYGLGASNVHSVPSFTISSMITISNSNSNSNSYS

SEQ ID NO: 979043 - protein, 65 aa, Homo sapiens
HEDLPHDCGNPKRKSICINKISEKFIHTTPVPPRCRHPPRECRPAGRQSSVRTQRGTAGARVDRG

SEQ ID NO: 979044 - protein, 122 aa, Homo sapiens
  misc_feature (28)..(28): Xaa can be any naturally occurring amino acid
QQKRRGGLDPPPERPKKLVLISHLNPSXTLTPSTSLNPHGFHSEAPPPGSVTIAIPRQAPDDRCHLRQPGRLEEKGGAGWGGDLASANQQGRLEAAVTRPGRFCRRRNHGLGARLWAAGAGG

SEQ ID NO: 979045 - protein, 104 aa, Homo sapiens
PNLPFPLPKVNLVGPPWHFPPREGEEEEEEEGGRGKEGVGKPEGGEEGDLLPLDGSPGEAKPQVRGFFFPRSSPAPGAPKSRLEGSGGQASSGFGVGGPLGPRG

SEQ ID NO: 979046 - protein, 63 aa, Homo sapiens
MYSKEVNAMGPPPPAPRPQPPPLQPLPGFFSRGDAESGGDSGSGGDGGQVRCARGTELSIAGG

SEQ ID NO: 979047 - protein, 153 aa, Homo sapiens
MASSWAETAPGCDGAAVSRYGFLSLWEGTSPHSPEPQLEGHRARQAGFSHPLTLSPMGPGAAVNCAFSPPPPPTLEPPTPLLPALAAPGEEGAGSWQPPQPTPYKAWARPQARPRPARRRPQALPLSRAAASPGPDQSGGIAMLLRLLLAWAA

SEQ ID NO: 979048 - protein, 61 aa, Homo sapiens
ACCHTIVGDRAMWITTAADPRMAILKLLENNPIRLMIINVRRLCEKLIPLKFSHLWNSVTR

SEQ ID NO: 979049 - protein, 44 aa, Homo sapiens
MRDRHRHHDEHHQHTESVTTSVIGCRGSWDLSCRRVNITFKRGG

SEQ ID NO: 979050 - protein, 56 aa, Homo sapiens
LAGVMKYRVLRGLRHVWGICVRDRHARTIGRRGRTVGVTKKKKVCRPCLVINSFYP

SEQ ID NO: 979051 - protein, 143 aa, Homo sapiens
  misc_feature (21)..(21): Xaa can be any naturally occurring amino acid
GRLQNQAGSRCVGVYAWMVDXRGCVWGAALWGLELQSPSFPVRDPLKGLRATSHPPLAKGSREMGAGTLGSGLWGWQGRARERPDLPFARHRGPQERACGEPGADGPLGARTSGGVGFAGEQSPLRYLGQADRGGGAAPCSPR

SEQ ID NO: 979052 - protein, 48 aa, Homo sapiens
IPPLRGSTEWGRRRGEKGRGGRGRRRRLWTRAGPFPWITTQMRRASRP

SEQ ID NO: 979053 - protein, 119 aa, Homo sapiens
PRPRRGGRDFGGPSQFCPPCPPGFPPPVAPGPPWVFPAFSAFPGGVEFVLGGAVTHCPPPLSPGGPPRVPPPLPPPSPRGPWRAPPGELPEGGGGPFGNVASPPWPVAPGTPGLGGGWV

SEQ ID NO: 979054 - protein, 137 aa, Homo sapiens
FHVVQGEVHRVAPELGLFRNHPLGFARAAGVELHRQDDALAVAAHDHEGFRHIALLVANAAQETFAQEVLHVHRLARAQKLRSNTVWAIVSSSSPPVLTWKRQSSMPLSQPEYTRLKSSSFSATTTTPPAKSLYLRP

SEQ ID NO: 979055 - protein, 96 aa, Homo sapiens
EGGEQVFIIQYDDLRIHSERIFQWWGDGDRRGGINTVRLLMCDVRDSYWCGCLYPCQMHGDYDGAFFFNYFENFLSVTFTCLYLNQENPCGFCGSV

SEQ ID NO: 979056 - protein, 76 aa, Homo sapiens
AGPTPLQPQVSAPRARPDPPAATASCEPLRQALTVKKTEQSCSHGAMAVRSPSQAVLCAPAARRCPPPHSRGARRP

SEQ ID NO: 979057 - protein, 160 aa, Homo sapiens
EFVQEFMEAAVRRFGRNCLIQFEDFANSNAFRFLDQYRHDYCTFNDDIQGTASVAVAGLLASLRITRTKLADNRVLFQGAGEAALGIAQLCVMAMKRDGLTEEEARQRIWLVDSKGLIVKDRPTGGISGHKHLFAHEHAPVGTLLEAVRELKPTILIGAA

SEQ ID NO: 979058 - protein, 120 aa, Homo sapiens
PRIRNEAELCESLFGRLGPDFAGDRAAGSAVRSGAAAEEPRRPPPRDTPSQSSPDPDPDPSAAGRGREGERLPDRPERAAVQAGKRRVKFTSGPRAARGPRARLGQREAREAEVRVAAAA

SEQ ID NO: 979059 - protein, 78 aa, Homo sapiens
KRLVAASTKKKKGSKKVTPKPASTGPDPLVQQRNRENLLRKGRDPPDGGGTAKPLAVPVPTVPAAAATCEPPSGGSAA

SEQ ID NO: 979060 - protein, 42 aa, Homo sapiens
HSLTPPLPTVEFLNFPPPLGEHSIGSAAGGEEYRETTGTGGG

SEQ ID NO: 979061 - protein, 56 aa, Homo sapiens
LEAHLPHSPAPSRKPELHREMPHSQKVVREMHTLRAEALYRLSLAQHVRVRVLWRP

SEQ ID NO: 979062 - protein, 37 aa, Homo sapiens
GTRSQQSQPQSSQPNYSKAWEDYYKKQSHAASAAPQA

SEQ ID NO: 979063 - protein, 106 aa, Homo sapiens
ISSPPPRALLLQRPCPTSGLLPSWLPFPSRPPVSASPSLFFLLGFLGFPRRPPLTASPPPPPSRLSSSLPTASPPHSRKPDSRGCPSAEETPGPRAQPLLEAPQRP

SEQ ID NO: 979064 - protein, 37 aa, Homo sapiens
MAVQCIKLTFMGVFMTSSEASLWNIGWYLQREASEEA

SEQ ID NO: 979065 - protein, 36 aa, Homo sapiens
ARGHHPWIRRPFFPFHSPSRLFDQFFGEAAGGVEKK

SEQ ID NO: 979066 - protein, 180 aa, Homo sapiens
DIPSEFQKTVTRLYKLWMFYALVMVVNILGGLVILIHSGEFRTFGLSIFYAVLFTPASFLCWYRPAYKAFKTDSSFNFMMFFFIFSFQALVTTIQTIGFPGSGTCGVIMAISQFSSGWGVVVGLFLMCIALAYGTCAAGNIFMLTKIHQIYRSGDKITMGKAREEFQSQFMSNSIVRDAA

SEQ ID NO: 979067 - protein, 43 aa, Homo sapiens
SEAWFPTLVPTAPQLIVNEGEQREEKEQEYGGRPSTEAPPRRP

SEQ ID NO: 979068 - protein, 150 aa, Homo sapiens
  misc_feature (122)..(122): Xaa can be any naturally occurring amino acid
TIAPSLYPFLPSAGGSALTDFDLIRVLLELVVRTYAQGLATRLSCLAYRAYLLIPFDSTALDNISLSPTRCAAKNHSTTISPSCPRSNQPSVIITHLHQSFAVRYLSKTPRLAQEISTRRFXTVRRETQRRLLVLMGVALYLVHNHLLYV

SEQ ID NO: 979069 - protein, 345 aa, Homo sapiens
MAYVNANYDYRILPLMALLIVSNVINKPHDRRHDHSNPPGHIESVLQITGINPYVINSSENVFSILCCDGFLYDACCILSARPYALLTHPIYGRALGLPVQGTYSRINAPIESQILRRQSGSYLCYSWSTRNAPVMLTQYVKYETPSSETNTDFKKLAALLSKCYNWGAHTCYPSVQSLRGTLEVSLHHFRLGIYGSTFPCSHRLSTDFMSSLASTLSAVVCCIRQQYVTLLSNITLASKPAADTDISYDCWFDYFWYVPTYGEARKKNPKQTQLIHTTVSAPPRKTPRGATNRHPRFEKRPKEGPKKRRRQTRGVKKEPLPIRPRGCTRSPQCAANQWIISGAV

SEQ ID NO: 979070 - protein, 254 aa, Homo sapiens
MMKTLLLFVGLLLTWGRVGRSWGTRLVSDNELQEMSNLVSKYVSKEIQQCCSTRGETVYKTLIDENNTKSARHWFSNLEEARVGRRGGCPNMRPGNRVEAKLDGAPEVVCTVRTYAWPSGKECKPCLKCALLKFYSDAFAQVCVRPGWPAKLEEFLNQSLALLLLDALVTVSNPCGMNDPVEDAHAWMYCRNISDGASKYHRRLFKERLSTRERQEYVTVTALNLPTELNLIPSPNVEMIASFRERDYTPVHPS

SEQ ID NO: 979071 - protein, 47 aa, Homo sapiens
MPQNPTVAYTGILWTNDIIDDLRIYSELEREARPDKPKTVKGPPDNA

SEQ ID NO: 979072 - protein, 193 aa, Homo sapiens
DAWVTTSTTLSWALLLMILHPDVQRRVHQEIDEVIGHVRHPEMADQARMPYTNAVIHEVQRFADIVPTNLPHMTSRDIKFQDFFIPKGTTLIPNLSSVLKDETVWEKPLRFYPEHFLDAQANFVKHEAFMPFSAGRRSCLGEPLARMELFLFFTCLLQRFSFSVPDGQPRPSDYGIYTMPVTPEPYQLCAVAR

SEQ ID NO: 979073 - protein, 48 aa, Homo sapiens
MAIADTEHALTPSWAFCIACFLLFSHGLTWTPCPEPDDRMEGGYGQLA

SEQ ID NO: 979074 - protein, 151 aa, Homo sapiens
MPPTRYREERDYWTQTQQNLQEKNPKTQGGRPQLFRDLSRTGKSRVHVTKELKDLHGPCVREEQSGPYGTDPAKGYTQRKRNDKKVRAQGRQDTTTEKKAIGKAKQGDRTANDAKKTEAPTWKGNHEHRGTEQDSGRTGTEHHTQKLNNGR

SEQ ID NO: 979075 - protein, 221 aa, Homo sapiens
  misc_feature (32)..(32): Xaa can be any naturally occurring amino acid
QEERAGTGCGGLEGVLRRPELDVLDDTTLLLXSVSLLADLGRVSQRAWRDQYWCSSLVNSMYTVRSREAMIPIHVLGMFINACHTGLHGGLTDSSSRTNSKYREMRMRLVSGQGYKKPKEEDRRTALEMRPGNLIHAVDLAVSVAVMSMSGPLGRVEALPETDLHEVLRTRLQKWLQAWFGRQLEESLNQSSPFYFWMNGDRIDSLLENDRQRRIMLDVMQ

SEQ ID NO: 979076 - protein, 233 aa, Homo sapiens
ELIEKVRRAHQETFPALWQLGKYATNNELMNNVSLWIIDLWDKFSVISRDHRCIRLRLWSSPRHGLRRASPPLTIRQTRCTAPHRLSCLARSMILRASWTADTPVARDIAVILSRERADRMNADPGCTKRLCLRPPLSQTMSLCRSRNASSLHPLEDVMTVGRRGLAGTPSHHAARSCESTRLGTLADYARDLVWTMRAGTPVHGRRRSRGLSVRKSGWPQPPPRVYAQGMRR

SEQ ID NO: 979077 - protein, 70 aa, Homo sapiens
ELREPYYKPEPWGDARISSPSSPEEDVMVGSLTFSVDYELSRKEAPELVTTPGVPTVLRRCMEVTQTQWI

SEQ ID NO: 979078 - protein, 79 aa, Homo sapiens
GKADAADQGTTERTVDETRQSVRTSGESDTEAAHREPGWSLGEKSHQENKCQVTEPASKHGGASIVLAMSEQDESTEYT

SEQ ID NO: 979079 - protein, 300 aa, Homo sapiens
MGYDTIWGATNQHQENRETRGGHQREQRIPRPPKCELSPQNKTKGERHTRKAEIIHDTTAPGKQNRKKPRRKCTQNNRKGTCGPTNVGDCARKKKNTEEEREGQNNSEAPQGNNKKPQLKKPPITNTRPLRIEPQHKRNKQPMVEELQHAQKRPKLAPKQLADDIDNTVRNQHPPTSKYDARKGARRKKENQQRHNHQTKKEEVKGRENTKDERAKTTKVKRIEKRNKANSNTQAKQQEQRQTRDHRQNQTHATDKRTQTRTKRKKETQRGEVNKNRWTGAQHKQNKTVHSEQTHTHNTT

SEQ ID NO: 979080 - protein, 130 aa, Homo sapiens
MQQSNTPQMEERTPRDVRRFCQQIIFVTPERKQGGGPPTRANNSVVWHPPPTYVGGTPRLLHTHKREANIIGEASTMWGKHHKTPQQVMRGGATSTPSGGAISHQHKDEKNSWVALPRKSKKAAGLGAVN

SEQ ID NO: 979081 - protein, 333 aa, Homo sapiens
PTRPGEGGPTQRGPRRRHPARPGPVLRGHARQGRGRARGSHRRSTRAQGPEPPGSRASEPRGCAAALMAWRPHCASGPAALQRVHPGLRPVPGPPAGPRVFLPDPSSPREAGAGARGRQAGPMMGKAELGSEGGGARRLQREPGTPMAQDGSGAALERKRERGQVTPKRHRWAYLAGPEKGPHRTRDLGKREPYKDPKQADMAKGVPEHPTRPDGAKGGPMSPQRRNRDTQKGPPWQRDQNHKSHRTGNGKPEHPGQPKPLKEPDEKQGPTGGPQKVTGLTRNTRGSTAGQEERHAPGTGPGPRHGAGPREAHNTGERQGQEGGSQQRSKTTG

SEQ ID NO: 979082 - protein, 296 aa, Homo sapiens
LFDSQSGIFLCVASRGHIAETPGEKVKVGVNGLGRLVGRLLTEGLLVNCWYKLDMCVPYNDPIHMTVNLHGFDIVANNELPASWAKFPLVTDAEAMSRRGKLSADRSGKIAPNHRCFSGRPRSSRQKSKWVLMLASDVRSVESYWSCFNQPCERRLGLQFAGWELIRVYHIHDPLLLTAPMFVMGVNHEKYDNCLRRSSADACCYESKCLATPWSRSSMTEALVSWKGLMDHRVHAIHFYQEDCGWPSGETGREAAGAHQKNILGSKGAARVVGQATLSEGKLVAGRLSPWHVSWG

SEQ ID NO: 979083 - protein, 251 aa, Homo sapiens
YTQVLFLIGKEKVTAQGPMNLKQKGKNFSPPSWEREIMYGKGSPGSGGERRAQGGQWGVGVLLPTSFTLVPYTNTDTVQVPGRNKARGFLTEGHKGKGEDTTRASKSHTGQRVSHLYTRGETHSKAAGHVVTGCADREVVTPVAFKSELSPPYQLSGTREHMVSRDHRLQGEPGQQVTAHEGGWRGGEDEPPIYRGGGAWGTTPNCVTSGKVYLRTPHPERGPTKTATLCGKGCQSPMKGRGLHENPRDRV

SEQ ID NO: 979084 - protein, 178 aa, Homo sapiens
EPNSKLIHRDRDWERERRLPSSPLPPRHLKAMSRSRPMTVSSRQDEDEPEAMQTEFRMDKPSRCWECSGGGSHSNILHHRRHMTTMENSLKSGKGAAAMIPGPQRGTEIRLFLRSSGKMSSQHYGPRGNSNSHTSHKGKGVLKGSKRSHTGEIRQTGRLASEAKSSDMLYQVCYENDH

SEQ ID NO: 979085 - protein, 373 aa, Homo sapiens
MHNHNPNTQKNHTRTTNQKNEHNNNTQNTTTHKRKQQNQNTTQQKKHNKKNKHKKKTQKNKQRKKKQEAEQTKNTQNKKQKQKKNRRKNKKQMNKRTTNKEKTNKERDRRARPRTKREQQERANQETEEATEATAPKHETDTKKKEQTNSHTHKQKHQDKTHKETTHTKENQKQNKQKKAQRTDKTKSITTTEQNTPNKKPKPKNNRPNNTKKTRRNKESNNESENPQKKQTTTHKRAKAENKTKTAERHNTTEKQKTQQQKKKNKQKKTKTKEEQDNHREHSRRSERKREEKKSRETKHTKKKKKTHTTEAHKHQHHQNTRQHTHTRPTHATTRTQQTRETNNKHRDTPRTNNDTEQRVAGKRSESNKHESN

SEQ ID NO: 979086 - protein, 256 aa, Homo sapiens
MRLLPRATRQLKLRLLRAEDEFRRPESPSKTTWTKVADPRAVRGAARQEHAERLTRLDDVIQTGVDNPGHPYIMDLRAAVAGQTTESYEDVQKDLIDDTQSSEGPARQAYKAQAMSTRDRSLQDPTTLTGTERQNLEKPKAYRLTEKHQPRCRNRSRKTLTWNILASPPSNMQSRREKQQEPITRKSHSSDREQPLGPQDPDTERTQRTEGPEKLTTAPKTEIDQHSARQPKKTNTKTDTNINRKEKTQQKNNPPE

SEQ ID NO: 979087 - protein, 260 aa, Homo sapiens
  misc_feature (91)..(91): Xaa can be any naturally occurring amino acid
QASAGLAHRLAPGALFVWVKVCGSPRRMRRHCDRQKANLADPLHIPSLFQSRVHSLPRLAGNDPRNMNMDKGRLGKEGAVVNGSNVNLLTXKGERRCHEDQYHARFSPWMNAVPCCVGTSFLVPFRPPCPLRGSSFLPIRFSSHSPLDVFGIAVLSFRQVGTGRSTPGWTKLLSDGLSCWTVLPFRQTLESEQGGPAGGPSASPLRYPRIPSRVYLPRFGVLLQGSWLEGEVDPCVRPLARRCASRFRAVLAFVGDLASK

SEQ ID NO: 979088 - protein, 123 aa, Homo sapiens
MKVVPLMGVFNHALSLTKRHRGPLSLATLAAYFPAANGKQGEKDKEGHVDQGLREQEPNGRANIQTRGVRNTTEKDKRVYHKAGITDKSGDPSKKERGETKNSYNDEKKSLQRNSGRQTQERT

SEQ ID NO: 979089 - protein, 126 aa, Homo sapiens
MTARVCTTLCLEGCAQGTWSQPPTRDCSPVHRNTTRDHRHIVSTAQSFRHQIPRTYYESSITQQYSLRLQYTCGQSATSIQLSGPKSVSIPCQSSPRQAVLEWVGTHVKRRTHGPQSIDASIALQL

SEQ ID NO: 979090 - protein, 165 aa, Homo sapiens
MILLQEKKLLPRIQYQNLTLRSWLQKKHRQQEAERRNKHKTDTTCIKLQIDSDTYKTVVCATHCCQQRTISRSLQVTTKSMQEVHIKTQEDIKLEKALRVQPSSESSHQLPSTQHEDQSRGTGELLRITKTNRARQEEKNLQRTELQVDISEASIQNRSYKRLTR

SEQ ID NO: 979091 - protein, 202 aa, Homo sapiens
RCHQVPAASEVPLMEDSRWAAEGPPKRPGGSSPLNAVPCEGPPGSEPPRRPTTCPPHDGDRKELPPGAAVCLPGPHVAHELITKHTGTEDTEPWPQFVPSRSDHGPPKSRFGSQVHKVTSEHIQPYVARETRLKSQSKETNSDQVTDGHSMISRRLGSVLPKCCCSLLSHNPENRGFQGTVSREPSSSGQRLYPEVFYGSAG

SEQ ID NO: 979092 - protein, 248 aa, Homo sapiens
MLVMDAPNRPPAALERPWTLTETWAGSHSMQVFQTTSACPGPAAGEPTHSSSDGLQWTTRSTVRFDSRRRESERGAAGAVDRAGGAGVSGPEHTDLQDQTHRLTERACGTCCGYYNQSEAGLITHLQSMYGCDDGAGRAASSAGITSTPTTAQAYIDPETEDLTLHGPRPDTDELRSASATWTRRARGARTQCEHDSPYPGEGDPEQSAQPGLQPKLHMSTTPEKPPPPERRAANPTQQNTHVTPPTT

SEQ ID NO: 979093 - protein, 249 aa, Homo sapiens
PLRSEAVISRWGGHSSADVGVAEGEAMLKVYCVSHCLEAGPANAWAHSCTGRPGWKDRLEGTGADVRPWARWMRLWGRCGKCICSKYLHYSRKVLRSFTLEGTSFLSLSLFLDLGLRLRNARRMCPGRDPTRAAKTKVAYLGVSQGTLVTCLQTTSMEAGEVEGSGDESGKHQLVSLRCETRRRKQPDAYVNPTSPLPPPGSHPRKRDRNQDKGQVRIERGETELADRHRATCKRKVHGGNEPGFWLTT

SEQ ID NO: 979094 - protein, 246 aa, Homo sapiens
MNTSRPTDTEPNTLKARNNLTATTELIHAQRLVGVEPGSRTAQVTGEGHYAEIRPAESLSTYVCSGTHINKTLAPAAKAAARQSDTHDHATEPRYRTTHRRMATQPTGAQRTYLQQPTRLKTASTTAQRHPAHNHRSPMSSNKTTTNPHKDPKEQHITTQTPHTPNTPQQTNPPNTGAAPNRPATQHTDTHTETQRVRPHTHQTQHKTPAKRTRPTPETKQDSTKNAEPQRKTQPPTPPNQTQYPS

SEQ ID NO: 979095 - protein, 159 aa, Homo sapiens
HASPTRPSPSPSRHHGRRSDPLMMPKIVKKRIRKYIRTIADRYVKRKRTWRIARGIDNRVRKTIQRARLLSAPSIGYGKQQKRTHALVLPQCACGNVPWSDEGQMELEGAADVQAHLTCAEIASQGLAPKNRQANRGKSCPTWPSTSHQGPEVPGLAAR

SEQ ID NO: 979096 - protein, 172 aa, Homo sapiens
PRRPVGGAPSRCILALQLESPVWFSSDFTHAYTLSPSSRSERLGLWQLPFDRASLLMASKFPGYEHTRYWPYERTSGWSDHRWSQRWSSPTVSTDHAGSTRATKQGSNKRRQRRSMDPSTCCGRSSRCPTTQVSPLIHALVHLASLSRRTRSSLWVRTRHVGHVGGSAANQW

SEQ ID NO: 979097 - protein, 126 aa, Homo sapiens
MRAGKEQHPILTHPRGGGAGGRPTPNNRAGRPKTAYSPEQRTNAHLSQAGPPTTGGPTTLSTTLIYNDTGTTQHGGVTHTQTTAMDNNTHGARATLRKRRAILGDKTESEHKTVTSTSPNIKQHRG

SEQ ID NO: 979098 - protein, 252 aa, Homo sapiens
MGTQIVLRTKFTQVAIPPVPTEVVTFHEYRASPHHTTVTKPAMDWIYLDLRIPTEDTMSLITPGRMSKTIDLPLVETGHVEPPRRIVGPRGGNNTHHSKCKGNGTHHMAGRDRFIRHIPPRRKRRYRRREHPMGLQTDPRGIKQHRAVNTLRTNSWRANSRPPGRMPGHHNIRQRHRDRQRPYTAERGASNRATREHTENQPTTSQQSANYRRHAINKNTEQERTHTTKVRAETSQHDPKQLVYQQDPIGGP

SEQ ID NO: 979099 - protein, 225 aa, Homo sapiens
MAIQMMMLMHGSATRKEIWALVGFCDEVKEMPMESLVPAQKWTPRMSSLPWNLGEPMKKHEVPAKVGCGTVRCVKFRVNGGDHRMMTKNKTVRKKYSTLFDNNVRSNGCRSPMSEEWQEVGTRYGSVPLAVHPCWRRVSALSLVCKQCMTPHLHLASRMPGPDRSRDVSQGTVDFCEKCARSWWVIRTRKAWSKDEAPSRRSVGLLVDKAAACWRDPVPEAGDPE

SEQ ID NO: 979100 - protein, 158 aa, Homo sapiens
VSEAHEGVKPVGTFLYGHSCPRSRRIRYIYSSALRVDREESRSHLGTPGSHKDGILLCGCSGLVYNEALQPSCSSGRRELLPGCNRIMEASNHCNSYVKAEEITCATKSHVVSCSVASLASFAKIVPSPFFFFRCGMSVYLCKYDVYVLLRYVIHFTG

SEQ ID NO: 979101 - protein, 240 aa, Homo sapiens
MRSMTTASRSSANDSCHHQLFRTPGAQVNAMTYLGNRGRDCMTTVHGINVTHKTVDGPSGKFDVMARGVPPRTSFCLASYLAHRLKDVEPRVISLIRSLGDSSTCPMAVALCPLSDRGSGRWTGDPARHRWDSCTDIVMTYLRKVVRNKAVQRWAPIEGGNLHGHYNLSTKGGLRLTFHEPTIHSLSAWDRMEACVTSSIKRRELCDLCSMLRWVDERPNFVLRARRVVSPHGPNIGTSM

SEQ ID NO: 979102 - protein, 153 aa, Homo sapiens
PSLRKSQEGFRRPENAAQVWHVPCPRSAPAEHGGASDTQNEMHPAHDGTPGNPAILEDPPVVQSWKLAGFRALLVGIGFQSSQVLLAGKCRARRGWAISLEAPEVQPPTPLQGPGGPRTATRTNKSAILGTESWKETLIGFGNLRRNARHPFY

SEQ ID NO: 979103 - protein, 134 aa, Homo sapiens
MNAAEQRSDWGSSQERAEENRDHEGERAAEDEKGQARHATTRAAQEREGHERRETREGRKEKEGAHTETSGQRETRREREGETKARKRDEREEGEASASEEREQRERKRKNNNARTERQERSQARRRRRRVLRE

SEQ ID NO: 979104 - protein, 344 aa, Homo sapiens
PRVRMDEETHHLRCSPLLRLRQGEMMVGGSWRPGRACLGVPGDPPSSPWVRVPPLTRRTSGLVFVPVSGALNAGFKETRASERAEMMELKVTALPCYIEKVRFLEQENKALAAELNQLRAKEPTKLADVYQAELRELRLRLDQLTANSARLEVERDNLAQDLATVRQKLQDETKLRLDAENKLAAYRQEADEATLARLDLERTMESLEEEIRFLTERSTRQEGRELQDAAGPDSKVHVETDGGQARPHAGPGRENPGRKDEGMADQANMPGKAAPVGHRHQGDGRTLTERSAGHGNRRQTQHGQATQTKKNRGHMPALEPANGGGFVDEREETQATTKSTTEQA

SEQ ID NO: 979105 - protein, 141 aa, Homo sapiens
TRSIFLCRHYGSSSGGYALGMEYLRQQEVSYMRDLDCSKLRVRDDMTGLCCGLRPLYEKILTGGDYLPAKAAVRRRMPVKVDRHRKCCETESTQVNSDVWAFGVTNVGTSYSGENDSLVLGSRTMRCMSYLLHGQQVEARP

SEQ ID NO: 979106 - protein, 150 aa, Homo sapiens
MIDTAASSHYNARATQKHAERTHTLQPAQTYINKIMTRTVRTPITTEATRKALHEDAKYHTHNSAPRSNIPSYTAATEENQHDTQAKRLLRTTHTEDATRHSLLYMEARTGEQTPSSIDTTILKDALVELHQSSNTTPHWQRLHRYNGKC

SEQ ID NO: 979107 - protein, 164 aa, Homo sapiens
MASTQKDNKRWQLDLVPAGLTRSCGVCACPGLRGFSRGYPVARAHRLDSPVINSSPYSANPWAWFCEQVFGPGIYHLGWDVASSGAAQPCTYARSALTGYPPSGVHNVYTEHTGLPVGRDFNAASCVSLGHTDSWYTTGVLLKKPIRANKNGGASHHNALTNSC

SEQ ID NO: 979108 - protein, 132 aa, Homo sapiens
MAGGAGLALALWLLMPPVEVGGAVPSDIQDGEFTIPVAVRGGSSVSTSPCRSKQASRPNTMVIGGAGLDVDFKTGEPSGRAVGQTSPARLMGYTRWSQRRPRTTNCAIDNSYRHHLQKSMVTYELLYDSLQG

SEQ ID NO: 979109 - protein, 200 aa, Homo sapiens
AAKAGGSRALSRQSGLSGRQVARGSVADATRTGPVSYKKFREASWRFTFYLHALALPVTGRSIVDKPWFYVHEEPVGRDIPDTEHFPSQVWGLHELKVSFQLVRCSSGIASDVKRKDFQQEQIIHHVATIILISFSWLPITSELGLYSWLCMTLPITCLESAKMFNYAGWKNTWKQASSSSSPLLFIITRLVILPFWILH

SEQ ID NO: 979110 - protein, 159 aa, Homo sapiens
MNTTRVADTHQHRAQTHQGHLNHGRSGELTNQTDGTQGPGSNKNKPGGTQHERSTRQTLQGHITDKRTDKRTGPHFGQTQQSSVTHRVDHTRGHRQQSLETTKRPGVKRTNHPTTKKAGDGRSHSHTLGDTTQHTHAEPAATPRRTQRRREQTTEQKAH

SEQ ID NO: 979111 - protein, 113 aa, Homo sapiens
MSLEIGQQANPWAGKRRTPRLTTQKRARGPAQRRATEHKRPPGTRPAYKGRKEGQLGDKAPIGGETGPAWGGQRGTLEQGTPSDTTKTPRASTHTCGPDAACPSWDTWRESDR

SEQ ID NO: 979112 - protein, 225 aa, Homo sapiens
VRAPHSMEQLLRAELLHRYPCGPSGGPVLPAASADGPEPTTRTQGPVFVKVNLEDCSARQMLEGGGGQALDGPPRCTGLRAVVPEAHEVSSTCLGGGAQPYVMEQFELMNELEQSSIKTWTSKMARICIFTTQQAQGARSHREALRNTGGARKQGEGVLTPSDTGGTKVRAFHNWMDADLRGFQSRKGGTELGRDLTLGPDTVYNAPRDHPGNPRGPHSYGHPIQ

SEQ ID NO: 979113 - protein, 105 aa, Homo sapiens
METQATKICISQRQPIGQEKILCSTPLAQMCRGTPFGPQDTETIHNYGEPNTEGTQPRVPTASQQLATKQHGHEREDKTNGERNKGDENGQREQTTINRNTQSRH

SEQ ID NO: 979114 - protein, 512 aa, Homo sapiens
  misc_feature (512)..(512): Xaa can be any naturally occurring amino acid
MRTATRQSFLSDRSLRPYDVSACTKSLSGQCRYECCNSERNKFLRSDDDHRLRKRLAYTIRHGPLIGSYVRTPYGSTSIKNSNINGVPLVRRQGIFKHSMRYYITACATPVHMDVVLQREYGFCSYLMENTLPLSQLILYTREVGCIALPRHNPNFGGVWNAWSRMHANALMGRFQPWMLFLNPSEWKQMAGWAIHNLATGSWEPQNRGSNRYSSLRSNFLRLVASRSTIGYPYNWVLDEIQLRENVIGQHGGPSYRFISRQKLYIPNWKSKRNLAFYDNRPFGVPNVIQIPKCTKPFVWFDPVVPFRELPDDPTKSQLAQSNHGRSPETERGGKLEHRYRGQTLWWGDDQRQGGASPMKGFLCPLPYFLGGSPTVSVGAQRTLPLEVRKSGQSSPGAYVPCQVVPHVANTAPVVGPSKLARLGKTAGTNEERKRKGGEKRAGKTHKSTMRKLGTAVTHEEGTLHHKRSSTQQGAQIETKAPEESQERKKSKHRKTELRRTHNREVRVNKQX

SEQ ID NO: 979115 - protein, 311 aa, Homo sapiens
AKPYTPPERASWRSIDAGHRHVWWGSVMGTRVDHAGILTRAYSFHMDMSGRVFPVYSRCYDGAGEWAGKVLVIVNDDVSARAVPEALRAGGTIQGFLGILLDHACAFTVVELRPRGTPISHRAVWSCFGSSCWASVARDLVLSRASSALGSDLVMWLLASDWCVELGSLHSEHGPLFASLLVGQGVLLERQPNVPGNRSRTPRGSCVLPLMAELAGKRLLRSRRFWHYSSGLRSMAGRLSAPSDSRGRCLCAWPIGIVASTSSLVFDTMGRLFPGVVVPSRAWIRLPFWLRGLWGLDRGAPLGRKPQEPHV

SEQ ID NO: 979116 - protein, 59 aa, Homo sapiens
MSRSRTVLATVHRDGGSRSNNKRWSAWEGRSWRCNPGGAVQGRLARRGTGRPDGVAHPW

SEQ ID NO: 979117 - protein, 39 aa, Homo sapiens
HRNLCLPGSSDSPASAFQVAGITGAQSETPAWTIEGDCL

SEQ ID NO: 979118 - protein, 104 aa, Homo sapiens
MRHNSGRMDIYGGRALICHDEIPKVLSKTRKRGIYPDIVSAPPRGRNANLRSALESKIEFTLWEPRKRSVVVWLADTFRRIAYASNGGSKGLLMVPFSGTFTHL

SEQ ID NO: 979119 - protein, 107 aa, Homo sapiens
MDAPGEGGVYRALQLPRDNTAPTDTHSSLSGPKRGYAIPFFSYPHNKEPVGGHLINIHWVSMGDGFSRGPMDLALSLTCSCSGLRNRVPGWPTLGLAVGHIKSDVEG

SEQ ID NO: 979120 - protein, 302 aa, Homo sapiens
QLVQTWPRPGCPHGLHGWRPCLGCFVGSRFVHGLWVSAGTPVCIRPSWHPAHWVLGPVWGTLYSAMGVSGSYLVCERWLGGFTDNAVVPWVLYTGAAGPELGHGPPSSLVPDKWVCALVVSPAGQWGLAAGHYRGLVPMVSLLAARLLYPYLGLAGLRDHCQLRAVMAGQSMAGVRDGGCQSECPATGTASAPSVAITLVNVVAVRFHDHWCLLVCQGLARVVHELLGGPLKPHLEQCLCFLMLNLFLTWIKADKFGRYEKKGAQKIQGRYARLQGQKVKAAVTEERTLRARERQTKMHGYK

SEQ ID NO: 979121 - protein, 126 aa, Homo sapiens
  misc_feature (102)..(102): Xaa can be any naturally occurring amino acid
MGENELSRIQYVSFCPICYHDLKECHEYYDVENDANGKSTEEVRHWPVYPKQMSTYMCLSVVTVVADSPVTDRSRENFYWASQFKATVGSTQGSTLLVCELXGMEERLYASSPAVWGVVTAQLCYR

SEQ ID NO: 979122 - protein, 273 aa, Homo sapiens
VTRGFQRIVESVNVIISHLRRRAESGPMGNIMIDPCPRYRGLRVLASTGVAFTLKQCEPEMYVSQDSTAKGEGHVRGPAEPGQDKYEDMMKKLWGDRYLDPANGKFSKSAHQTLKGRSCHDTFCQLILDPIFKDDSAATHDITRKTATAQLTDDNREHQHWDQPTDKDNEGKPRERRLVMQPHGWPDGRRLDCTMTHHTSCHSPDDETQEVPAGGRSRYQRRTPRERRRLANAAHYTTQEHPQRTIQKHDSEPQLVTTYRKRPDIGQGTTNTE

SEQ ID NO: 979123 - protein, 165 aa, Homo sapiens
MTLSISGISRMVLWQAGFVNQIVTLGREEGEEEGLRLLWGESLPLQRGFYPSQGGGAAGDPSAESSDPPLITWPVQKRSCTPVLHRCARNNHSRVRTHVPRESMMWLQTCPHGTIANLRLETPGQAHRGEIHSTKDLTTTPALTPPSMHLAYLTGGIHSRDKNRG

SEQ ID NO: 979124 - protein, 326 aa, Homo sapiens
LKRYGSASAIAVAVRDRSDDTENQLQHDDADRLEHMDRLIEIRSSARSVRAMGVRALMLVGYTSRYDEAARCPFFALHAIECSTNDIQGTKYCSASSGFSHMDLPVLMGLMHVREDIDKKGQSHTSPLKAKTSHTGNRRAGRIRTQTVKGAKPIGEPRTAWEYTTRPLSYKRETSTMHADSTGKANALRERLDKRTRMRPTRMEKAPLMCDTNQANRIQGRRKPLKGELAETPGPSEGTQEAKDEELRTKNPGDKEANSTQCIATTPVGPEKHTMGVKSNEIGRYQRYNGERKTPNNTASHRTKTTKHKNSTRTTNQGTTPMHKSW

SEQ ID NO: 979125 - protein, 159 aa, Homo sapiens
MMCHVVGAQDTGILESGGFRSDLGRRHQCHLPSCETNPSPLDVVGPQGLDEVIPEFTCTCLPPGAEPSEHTIAPYFTETGAFKLEVNLEHSREGASVVLLCYFFLLFCRKNRKIMPLLLLSLGVWGGGREPSQTRFMQRLPRHRVRRTHPHSPAAFTPF

SEQ ID NO: 979126 - protein, 230 aa, Homo sapiens
PEHGFCEQPGECRCLEGWTVPPLHGCPVVQQQNDSGPGARPLIPPDALSLGLGPCDGKPCANGGSLYVRYPGPLNAPATRGFYGLRCEVSGVTCADGPCFNGGLMCRGCRPVTLPTICHMPPVYPRLQLVRNEGWTGAACRTCTQWRQLWPCDPGAKPMALCQMTRRPGLRGVPRLRRNDHVTELHGARTLEAHKKPDTMMMKATAATPTDRHLRTMGIEQADKQLTIEG

SEQ ID NO: 979127 - protein, 393 aa, Homo sapiens
  misc_feature (184)..(184): Xaa can be any naturally occurring amino acid
MVSGAPGHNALNGRLQVGCARQVLSIQTCSLVHGEEQGGAGDATGENMLVSALLIRTPSLEFYSIVASMSRQIDLFELRCCAFVDSLMTRAIESLWNHLDPTCCHRWMGIRGAQGRAMIRGSALDSLSSTTFACDPQRNFHIRGGADTSWDANYGGGEPRHSGAVRQTRGRFAFNLRSASKSIXEQAQGGFIERLSVDFVANSNAAQKAGLSRWAQLEMATPCVSKRGPVRHAFPDDSGLPILTGTTSGVVALWLSLYPRWLEGLEVRGLGPWYGPHFGGTPKGVGLAVDGPQTKGNTGCDHGTIQGISRADGGREIPMRHHRYTAADGLTTGDGRETAGASCAENPKEGHTVEDWCPHDGSTRVGDPCTHSGISPGIQDQQHRGESKNLGGN

SEQ ID NO: 979128 - protein, 74 aa, Homo sapiens
EMELVAQAGVMGKVSVHGNLHLRGSSSFAGRSLPSNWDYGNGPPGQVNFVVFYSYKRGFHQFLKLRDLEGDPPT

SEQ ID NO: 979129 - protein, 340 aa, Homo sapiens
HALALNGGPKWEQTGKLGWRTQCGEVGWTLGCGLGILERKWKTLRAGQGILGAELTGRLWGMGLETVGVVLEDLDGMWLQGPWPLAPGPRVVPVGILVAWKDGILERGLEATGWDSEGRQLKFQPAPPVHRGPALFSVARSAVADCATCRAVLGWLPSPSLATSTTCWPPAEPAGLVLGSPRVTWTFLSRGPGRQRCWWRGELRVKVNRGLPGIRVGNCLRTPASAHRRLPGAELSWAQRIGYLRCEASTAIEYRQPTAMAAKGTRANKHHRRRAPPGKDIPTPRGPTDRMWPAYAPQNGHPGHRHIAAQPEAETPRKHPGNYTTTNEATTDTQDTANTR

SEQ ID NO: 979130 - protein, 177 aa, Homo sapiens
MGGNEEAAGCPLQGGCALGLLPARGALGPGVPGQEELGAGRPLSPACLEATSGLLSRGDKDPGRAQAKCPIQSPLGISAHNCLHFWAPKTPCWLPGAPCGKNGRQVLRRSHRGAWSALFPGWPNTFPALAQGPSAGCSLHRCWVHPWGKGLGGYHNHNAKGPAPGPRARGRSYPEPA

SEQ ID NO: 979131 - protein, 365 aa, Homo sapiens
MRWVFEDNYYIRHYSYSPEDRARTDCRDALNFITGRIELHGTVWLNRRESNAGLASARGCARFGCWASSAPGELFEVSEGPTTDDVSGSGTLHCLSRYLLECTYYSDIMFPGNDIFIVGTWPCTLSQKSRGNGDSVTIHATRLHYTEWLVGSTDMKGQIHRRILSEWRVRLSSVGQHRPRACVDSLRHESSISKSVTHGWVALRGTKSTRKGLTDRRHKSQQISILTPPIHGVRKASNDSLIPPEPFPNFMVWVPSATGQSCVGYELVLRGMGWKGYPRSRTLVSFPLPGPSACSGSSVTAGGLPPWVSEGLGVPSWLVSQRLRCGGGPATWVVCVFLRLAWVPCRTKGLNSLVRMASCQLFVRP

SEQ ID NO: 979132 - protein, 163 aa, Homo sapiens
MRVDFRVFPGLGEGSFSGAQDNSDGPCPNVGENMTGMKVGHTGAGGRAPSSWLEDVNPGASTFGGGSEGTWLDLDQAPPKSSRFKPRTKGPEVYLRASASPGSCGTHLNCVSPQVRDVLECPKEAHTSFPSLKWRALVSLHMWPGHGGKPLQRRESPSRRAGI

SEQ ID NO: 979133 - protein, 231 aa, Homo sapiens
TRSAYTKVADDAGAAGGPGGPVWAWAWGTAGGFRGGFGSGIRGRGRGRGRGRGRGRGARGVQGRMDNGVNCPVTKLGRFVKGHEDRSRCERDLSLLPCHKRNQRSLISSVGTSLKGGGPEDYASAESKNRAGERTKVQGIGGYRGLQLDTSGLGELSCSKEVDKRHPSGAIILGQSSTSSPCARSYLGEQRFYKAPNLYLAKRVTGRESLVHVYASSLDPKGKWHLLPHLA

SEQ ID NO: 979134 - protein, 195 aa, Homo sapiens
GGRVQQVRLPISGPLDLQPRLSVPVRAEREGPGVAMLVRWAGVVRAGVGVAGWDRGFSIEGDGSHRVLKMENEKAGSVHTCATVGTRPWSSVRFHRGAFMSSRVCVLDGEHRPGVWPFGGGGKRGQGVGSREWSSGGSRCGAGVAGPLAFPTKEGPPWPARRSPLVCSLLRQGVLGKPYNGLGSGLWNDGAGLGL

SEQ ID NO: 979135 - protein, 132 aa, Homo sapiens
RSEPALRALGLLQVYQRMIDKAEDVCLSERSPGTGGAAGGAHWLNLSSSHCEPNACTFLRISKSDFYENHARTDQCGCWVRLHTVESAVMSPFVRQNGLRHLTVTCQLVALWTARLYRQGDRSELAIKSCIN

SEQ ID NO: 979136 - protein, 230 aa, Homo sapiens
MWVLLVEWRCGPSRSNHPVPLLQAQWRLQKPRLVSDLCRKRGRTVARSGSVGWRLNELSDVIRMHARESAAVTAWLVRASRGAADRRRGQLCLSWGALMSASQVVQELHCEEAARCWFEFLWMPGQVHQSPAQHGLPRDPQHLKHTAWQQPCDSHKTPRSRHGDSTYTQTQRVHWPEGPSNKTTHAENTGQSRGPLQEHNPEVHKMTFHRLQYTASKSSRNLTWYRPWTN

SEQ ID NO: 979137 - protein, 187 aa, Homo sapiens
MDNSAIPILESISHNRVYDLMYGSGHPNGAGAIKGSFVQPIKVLRDLSCRPEYSRSVTIYFKCLPVRKDRDIKGYFRKRFARELISSQQLVYTQSHPKERVFPGTQNPFDTPTEETTRKAGKKDTSGEGQTKQSTGRITGPSEKYEKTKTHINTEQGNNREGQNTSEEGKTHKDRTKEWTITERIKN

SEQ ID NO: 979138 - protein, 101 aa, Homo sapiens
GVNLCDASTCVLCERARRQLHHHCHCCVLNLDVPCINHEMVTETSSLHSHCQTSKRHSNARTLWLHERRRRIWSTLFLNEPTRLGNALESLRTFDLVPSTQ

SEQ ID NO: 979139 - protein, 305 aa, Homo sapiens
QNTKWRMTPCAAGMALVCALVALVMGEPAVCFLLECFWHVCILWAWVSRACGLWCLCGPMCLLCSSAVSAHVPRTRGVGLPYSTNANVASFEVQVTMNDQGPVAGLIMIYLLPQPNLPGTHVRITRNFSYRLSVGPTSSERSGGAFRQSNLVAQRSHDMAGNRDDQSADSHPGGYNRAHSIALCRTFRRRAYSNLMSQPVTLHWELALHRLGIHKMRKSLRPIHGQFPDREWPLHSPCAPNAYLSQFEIPPREPSKRKGLTLEREETNRALLGHSAHPQPIQEYHYCETGIDHGPSNSRGSIATP

SEQ ID NO: 979140 - protein, 223 aa, Homo sapiens
RRRGPSCWLLADTQWNGWRVPGVPETPVLFPSDALVTLPCPGADALHLSAPRAGYNGGSAIRSLSVRPPSPGTRAGSQARPLSGPRAQAGLVHGRQRSAQRVSRGHPLQKSGPVLATVTCWLDSGNPLSEDHRGVSLTNPNRIRPDLKLPSPLWLPSASYIISSLNLKGDFCVLTQTSPSNTKVAGVSPKPYWVCIHLCLQTSESDSFDPILHTPRKFCLYFN

SEQ ID NO: 979141 - protein, 111 aa, Homo sapiens
MKLQSMHLYQLPMRCSGKVLLFVIDLRIVPPGAGYQYYEGFCMGQLCANGPELTHSLEHKWLLGRNNFFSLTTFIFHAHIPYRNTNPKIQLTKEVTPCVHFLNRVKSPGTS

SEQ ID NO: 979142 - protein, 339 aa, Homo sapiens
HRHPRAEITCCPADPCPFLPDQQLEALTPAMAPLLVSPQTVQTNHTVVCLQLYREKASHHALVSLAVAFTFPFITTVTCYLLIIRSLRQGLRVEKRLKEQGQLRMNGIMMVGTTLPVVLCSLRYNMIKRCRTMLAATSRSHGASCATQRILALANLLTSCLTSLNGALDPIMYFFVAEKFRQLPCANLLCGKRLKGPPPSFEGKTKRELAECQVRAVSGGAVQAERSNVRTQQTQQEGICPFPGSSQEQLKSHEMAHIPRMARPALKETAKGQRNLEAVMVQVYNQVPGGQGPEHPKRATHRPHPEDPAGTTPRGSKRTGERTGRAHRARRTQAGGTIS

SEQ ID NO: 979143 - protein, 76 aa, Homo sapiens
LHSESVRITDHPWTQQVTDQKNHYIARETSGSLLHVARYCLDVHYESMLRKICHGIVSVPGHYTHYYPPSGTPLVY

SEQ ID NO: 979144 - protein, 386 aa, Homo sapiens
IFVSGTKMEPLQPTGDSDAERLWVMRKYQCGLSPCANGRKDGRVSHFDANEIHPYMTMLEKNINIVRKRAEPDAADTTRRQIVIWTPGLTPTSQETGREETRSIPADDETGPRWTMQGCDGPDEHMLQDSSAAGHDPKDGMLPIQPSTCDHTDRSPGIGRGRRNDHDDTGNKGHHNHGNDAEIIPEQTARCQNMAEGYRNAWDSGTYNANKNNKLRKKIIDEPMRGTYLTSDTELPQNTPKMEGRDMREHTALRTEREAMTEMTMRHKSQLDLRNQHTESNKKRRPQKDDMRKMKKARPPTHSKETHKPKTGTSERDQNKTRGNKRGKERTKHRNNKATERNTPKYDSTETDPEHEQKKGEPNGYIQQGKIRKTRRKKKQQQQVRK

SEQ ID NO: 979145 - protein, 120 aa, Homo sapiens
QRLPQSTMPWSLGKRLGLTEAEGQTGAPARPLKGSRCSPSFQALVGVGGPASMGLGSSHRRTAACPGVGPVPCPSLPFPRVSHPSSPCGIGLGGRARLVSGTPGGAPVAPRDMSDEVQEG

SEQ ID NO: 979146 - protein, 304 aa, Homo sapiens
MTSEEDRTMKKQYERTKGEQGPCERQTGIGTTWGDTMKKKEAGGHPLGMKRRDQPEHHPHVGAGCHPTNDGDTRKQSQRTQGRKFRESEPVDAAKKHVTQRNDTGVTKKGGWNDQSTETYGASREQGTQIQRTPSEWITNKKINNELIDRTGNKGATKRAREIEDTQRQRAPPTHHADRALDRKQHKAPKTRDDHTPPANNTRQEDTQGSHTAKKEETEHTQRQVGPTTPIADTTKSRALPNTRQHPEKHNEHTTGKATQSQNHTTRTERGNDEEVQTRSRQKQNDNDSRRRATEEHKAQTARK

SEQ ID NO: 979147 - protein, 240 aa, Homo sapiens
  misc_feature (147)..(147): Xaa can be any naturally occurring amino acid
  misc_feature (149)..(149): Xaa can be any naturally occurring amino acid
MELYSRVRVRASCCKRVKCRLSSLNSWILRQMVQLSDLLCVVLNAIRIRCDVDDPGERAMRQRYCWTRKYADHLSIKVPLVDQRCCYRAIDRFTCSDSRSELDELEVVSKYLNIPQLYGISHCVLIDRLSAWSNMCEDRSHTVDSIXCXGVGIGDEPRGGFVLSNDKVTWIDEPKLRSHKALPFYKGYTIEIYLSIIDTYTSTIIYTGNWSQENAVQETGVMHGERLPSVAPYKVETPRV

SEQ ID NO: 979148 - protein, 379 aa, Homo sapiens
  misc_feature (290)..(290): Xaa can be any naturally occurring amino acid
MSAPVAAAPVVSFQPVEAMGTRGSPPEKVGRGTRYHPTCREPRIRANIQAQESVRPAKSQFYVQGKATQVTFCAETPKLLPGAPWGKRARSIERSHTGSQVQPSPQDGHTTFPGSGTGPRQGYSITKVMGQPKGKGLRGVHTSQTQKGHDHGAQGPRRQGPYTKTTCMGSRALKAMYISPGTTIHNLGQGRTRESETKRCWPGHGRMRCKGRRDGDHARRGLPKELTSKPWVPLEHIPKEEAEEKEAERPTTTSGSRGIFPRNLGGKKGQEHRETHQEKAPTKRHPKEGXIQQTRSKRKWTQKKPRKGQTDGRSTKDTQEERTNDTIRKTTRRGKTTPEKVRLARIWRNNSKKEKKTHIPHSTRNQRIQTKEKEKQPTY

SEQ ID NO: 979149 - protein, 105 aa, Homo sapiens
MVRHVDARSGSGFIAALDVRTDPEPCRLTVPAAPNACGDPPGDHCMTDGVHQDLQRVLACEQVYDLERHAGPMRTRHDTSCRMYAAVHHQLHVKKKAASNQMRNT

SEQ ID NO: 979150 - protein, 176 aa, Homo sapiens
RPAVMSERLQSQEKEKEWQRKSTSIFPPDKKKNKALSFRIPGTQSLQAVTVVGAAAAAAAVINSPDRVSGPEGSLEPDHGRIQPYHASARARAVLLHVPRPVYFHINQIPEGGPFPQPTVPRAALTEMCRQYTCLLVKGQRCADLIYQLTTVFEQKKWHHEQMAPGYRAFFSNAPT

SEQ ID NO: 979151 - protein, 138 aa, Homo sapiens
MLLLWRPEESYPSTVRELVASLPRRLDSLSPNIRTHIDTSSPASRSTRCLCISTHETSSAQDARGLLRGDPRSPPCSVGIIKDGPLRVRHHCPRSASMVGPPPERQINLRQQFRAENNLCISLLAYALPTSIPCIATT

SEQ ID NO: 979152 - protein, 191 aa, Homo sapiens
ASSEESGEHIIAGAVLSCTCEICLKDLEEDHACIPIKKSDPVCLVPARRVIVKSRTCSASPMSPKKHQAAVTVNGAGPFPLIGLGRGHPITYVQTGGNKNQIQVTLQTPSWETSCLTPLGHKGTNSGHRQLERPRWSLEGAPWQTGLPRVGYTGGPPIETGATTGEPPKTSTHTNPAQNFNTQNGAGFGPR

SEQ ID NO: 979153 - protein, 235 aa, Homo sapiens
MAPRALLLSALGGVPGPDRDLGLLPLHEVFLTRALSRPRPRRAPVHLRWATWTTRSSCGSTSDCLRVRSRARPAGSVWWHAREGAGVLVTGQTQKYKRQDMADLSEPAVTCAGYYNQSEDGSHTLLEDAGCDLVPDGAASSCGCDQSCATTCKDYIALTEDLRSWTAADTAARDSPSRIVRQCGPVPVDAAESPTCHRAVRASGSGDTWQNGHRRRCSAQKSSWMTTVTHLKTLV

SEQ ID NO: 979154 - protein, 57 aa, Homo sapiens
MGYYDHMPIPEGECDSAVHVVTALIDNNVRCELQVANGRTNVGWVTNMLDNAYNPSI

SEQ ID NO: 979155 - protein, 618 aa, Homo sapiens
MHLLNRRCPVSSCMISSGPSRPRMLQHCAQRDTVRTASRFDVEPYHPSWVTLPLPSTIASTQWDIDKSVAAQITRWALAPHRYPQADCAQRIVDPSRERPVAERHAELQPTLRARVGDKERRTGHREKRTQASVHRYSVPTRQASGPSPQGTAADSSHEQCERGRRSSRSEGLSNATHRIEAIGADSVHPCSNAQDCNLKADSRLEPICGPRRYRQRHTTNNSEQAIPPTIYATPQRGVHTTMGAWKPSPLDPHWGEHRRCSMPTPSHSNTQDGHTTVTIDMVRSRNNTHGMETDPVAWLPIFHQAEECGLSTPGIESSLAAMTTLRNRNQGLSPLVTVVQRNDIPTGETGQTTQIDTPFSNTQDPQTTASKEKRDSQKLEEQATLSQQEEPATQRQHAKTIRNEHNQCSNCLHSEGDTTSRISAPLRRAYTPTVHTSEHTSPVVRSPTTEATPTRRATTQYTATRNHQTALTHSPSHSHTQSINQRHTRSPTTSNKTCSHHNTVPRPQHTKTTDQRHNRKVATEDSRATHKTTQDHSHTNRPQEPAREKRSAQQEQSSSTPGHSNAKQNQQEHYKQKTRGKNIETTTQTQKQKQREDSRNNYDTRHRTHTPTPQPNT

SEQ ID NO: 979156 - protein, 112 aa, Homo sapiens
QAGSLGSRTPWFPGYGPQCPVDLAGPPCLRALLGGLGGYWRALWSGHEKGRTMNLGPLNFSGAQVTDGIIIVGDEILKGHTQEHQTPVFLCRTRERSLWVQVCRVLSWYVMR

SEQ ID NO: 979157 - protein, 356 aa, Homo sapiens
DAVLAARRRLCSRRHRRQPVRPRLLYPACCSHSPACLAMGAAALACPCDMCALLLAPAAMATKIDKDGLPVAGCTTVVLLDDGSAVILGDFEHMTGSTICPLAEQGAEYQALHPACAQMTVRLYGHSCASPPGDAMSKRSKISPHHVDSVRTSAGCKRAKTGDGQDPGDRGRQTFAKELGDPVTPTGAGVTDSSSSEPEESAERSQLQTPQTDTNPKDPTKPPPSTGQSDRHPGGTTDRTATEYTNHTRHNRANEQATRRQGHEPVGTTQHNRQKYLETVQFQSRRAMNVYMKIKDNNPNKEEQNGKNHNEQQTNTTRPRNPDKAKHTEHRTEETTKTENRNMSTASRDRPNTETP

SEQ ID NO: 979158 - protein, 148 aa, Homo sapiens
MRWALVGTKVRLSNHGTVSHSLRMKDHRARSSFDIKNIPCVAKHQKRGPLKGHNVHAHIEHGATLLYNAADRTLVSLLCPKQGARLASGRTLAEGMAKIRRDCKSDGRIREWGHKVTARCYSPGPNFSRGMTPRETRRYMITPQAHSG

SEQ ID NO: 979159 - protein, 265 aa, Homo sapiens
VSVFFGWSLHRGRNGGRCLKEETVPSVVAGRSRDRILCARADCRSFNPKECEAVVAWTSDAAITALANAQLEHCLAGQCDMAKYFTPGTPNSVVNVGDECHAFKGERNHCECNGSTRGPCCGRVRYSAMECPLEEMVVSEPDVERRSVTPATGAGPSVYLSVSQCMRESTGAEDNPTKVVFSDSSVWNAAWQACNLRGPKSIAQVSCMRLLLVPWRQGSVGGDRTSRIIAIHRGMAQEERLQRYQQFKDFQRRIRGGTNLFVPGD

SEQ ID NO: 979160 - protein, 379 aa, Homo sapiens
RQLEDPRTRPGSAVDRLADGSEACDRGGHVACNQWTRVMYTCVTCAPVGRAPQGEPCCMWLSGIGSTPSGVTALCEDYETLRQIDVHIIQCSVLDVWTKLTPGEVCHPWASSMWYPTCAMDTSTDPHRRHRSSIWGGRNDTEGACNVHLCLRRQYAQVVHTPRCPGTVYLGPGNGHSACVLGKIMYNIRRATSRQCGHVSTNDIHKLAPSNHDTWTSYLYTGQPDRWRDFTTDHNPGTGQWYVQEDVPNRKEPIHNNNEITGTEIRALTTELQMAGLAPNQMLTERQPGPHRTMRLPSGQQDNKQGTQSDRSNETSLTPGPYTGGQRRNSDQLGRERQTRDDDDCSTTSAYDTTPRPEKHLKLHENATPKRKPHTPDKQ

SEQ ID NO: 979161 - protein, 197 aa, Homo sapiens
MIDELNQAIAKCMEDRGVDRTLNYTERGIKGNAQHGTLHSQSTCQRPWNDSGKEETEPEVRCKDRLPSVDPKAKQSTVTSVVYEKVEVMHTRGREGEGSQHKIQLTGEHEQYISGTAPIKRTKYQRNNNREKSDKYENIAKPPHEMEEARDNGETEISTRKEVRIESNAIDPRNAERRRTRTRHTEHAETIKQHENQ

SEQ ID NO: 979162 - protein, 52 aa, Homo sapiens
KEEGSSDFNMCWLRHWPVATVDVSGPERAELEVVASLSLGAVGTLLCGTEPG

SEQ ID NO: 979163 - protein, 127 aa, Homo sapiens
MSCSRLPCWAPGPGLSLPGPSCASVDQGLCGRCLGMLLCRSGEVRLGGRTGGGVSRCCMLCSRNSYLVESPSGCVGMNCAETCPMNSVQIQTPIVWRVLKQISRSEEEVLAGGASANVECVVAPPRK

SEQ ID NO: 979164 - protein, 438 aa, Homo sapiens
TTEVALTGAQDVSWTRSRRKYNTDCVQGYDPQQSPGDPGPRMGLTALTPPAITNPKSGSTLYAWIDSIREAIIQSIASRTQDGLYTLDYPEAPNAQYPVTRQHRVNRTHTYQDSIKHRNPKAPITECLGHGDQIEIEIPSTPWSSMAYSYAYHKPTANSGPYRQTYPQRTTTIETRYHHIPSAPHPHLALDHTPQQPKKDAHIERVGNYHGEEHNTRPRHSHKLKLGPTSLRKTHAPHTEHGGRQIADPEVYPRSKTEPPRWTVLRAHRKLPKTSETFRGQTSIPLRTRNMHHNRTHIGTHRYSILTTQYTNDLHSQLRDASSSPRRNSLRPPTGKEQRAKQTKNSHTTTRDPHPPVERHSRVRTTRHTHKQHEQQVKHRNHKEQHTTPEDAVTTTAPHSTTNTWYHTYTGNSTTRNREKTNSSAQRNQMRTKTRNNN

SEQ ID NO: 979165 - protein, 68 aa, Homo sapiens
DGGVMAEAEAEPWCLRPSDRPVRGCGLANAGSASVSPTTPMPVGCENACDILRSASPGDACTSMTWPW

SEQ ID NO: 979166 - protein, 120 aa, Homo sapiens
MSDKLTYKVDDIGWLPGERKALAIAENRDAGHCCVCGSGTRHPISVKGARYRWLSAPDLWKTAVLIEDPRSPWVLRCPVVQLLTSSPPRTHAWRVAHMPKAGYSRAVLPEKGAKTGIDGR

SEQ ID NO: 979167 - protein, 74 aa, Homo sapiens
HVVRSRCGICCLTGLARKPPRELQSKAMESLNIGDGGQGVPYMGGFFSSIFSSLLWNSRHENLLIFGIRWSRNI

SEQ ID NO: 979168 - protein, 246 aa, Homo sapiens
LQCTLLEDYMAVILPPHALDGPSLWTVGRDIACSPPVYPAANAACVAKCDWTYRKTVRKPEEVTSGTPVGLYSVTRKLSPVMDNHGCLRAGNRRGRTANQEPAGLDEEPRGSRERRERVQREPVARRKWRRGRRPPVSRCTDRKDRKRRAEGSGSHGMEAREIERTGPLVKSLRRRASKMGNPRRNQNAGPRGAHVGHFQLTQECKPESKGPVHIREHPKRKARRFGRITQFGTIRPDSADIHFQP

SEQ ID NO: 979169 - protein, 103 aa, Homo sapiens
MASESHLSSEALSGEKLYLSILLSYKSPDYNLHSPQELIIFDIFLRDRHLIRDLGYQSTLMRNSTDLLNRMRHTSYCNTLGRVLTLFIWLNFKFTTPRLTKYY

SEQ ID NO: 979170 - protein, 76 aa, Homo sapiens
CAGLGITSSVRCTIPPAAVGVGALRGSSRISESVGLALARNESPTESAAPHSLPWGVGLPLDLAIGVGGVLDVPAP

SEQ ID NO: 979171 - protein, 260 aa, Homo sapiens
GNERVRSFLNNQWLMPVILAVREAEVGGSRGQETETILAHMVKHRLYYNTKISLVWWHAPIGPSYLVRLRPENGWNPGGCGLAVEPRWHQWNSHAWRQAVRTPSQKTTNKEKKQQGGDPTQKNTTTQERHKHKSIRKTPTGIYRETKGGAHKKREKKYNKRKDTGPRNTTHKTSRDLGTQTSGQHGAENRGERTTKNQQAQANNRAKNTTNTGNNSHNVHTHTRRRRPSREHQTANKRESDHSRHEKQGPRRIHEGPLYN

SEQ ID NO: 979172 - protein, 223 aa, Homo sapiens
KETDLLLDDSLVGVYWESTYSRGSPCVVQDGIAEGPELWNQMAQCLTCSLATIYHLTALEALGGVTSSTTIPISHMTRPCAGGPCNLECWPDFLKIKNYVDNSRPTKKQKHTNNKKNRKTHNKEKRNRNEGGGAHDHSTTGGRDGEKRAERRRKRESSTTDGKNTERNRRRETNTQRERQTNRAEHDIITNTSTSISSTQNNHIRTRQKHIHYNYTQLPIIFK

SEQ ID NO: 979173 - protein, 265 aa, Homo sapiens
MSEPRGGRWDEDEQWSVVVECEDCELIPADHVIVTVSLGVLKRQYTSFLPDQGCAIKKVAGIHRLGHEAPSTYIFLEFEEPFWGPECNSLQFVWERTKRRSHTLNYPPELWYRKICGCDVLYTAERYGHVLRRLDLRVDEMALVHEMNDVDWGWPMMSQMIWTEMLASVSPGNPRIPETSWNLDARVLEGSRPLLPWLPISYHAGGLQWRGCGRSLSRPPAVHRGSSKVLGPMQVLDRGEGNPSCVPNPPTKGSGVRQAGRLAAH

SEQ ID NO: 979174 - protein, 114 aa, Homo sapiens
MEDLAEWLNALYWSWVSLGGGDGFLTGLARARPVPTCQRRDLMAARALACRRPARGVAFQAHSVVPGPSWRAKRGHLHRLVPRGAGCAEVLMYETWDLVLRRNEKSGGAVPAGG

SEQ ID NO: 979175 - protein, 194 aa, Homo sapiens
PSVLARAVSACSLRHAAAGLSACTRRRPPEDGDKLRSARDHPSPGCSMAQLFLPLRGSTMVLAHELLQLYRCSGKRDTLTGDRAFRVRIAGRRATCKGVLRLAPITIPCHVHYTAATDEPPGLCWALRRVKWTIPVPWAGRQRCWWRRGVRVKGELRPTGYRVATDLRTQRTHQPNDLPVLLSGRCSHKRTQVY

SEQ ID NO: 979176 - protein, 252 aa, Homo sapiens
TLSGRVWVLVTSLMSWWQPGVRGRMSGGDGPSHQPPGSSRRPARMSGCRGAGVTRAGRMGRRRAPSCPGSFPLYALQVDPSMGCHRWGGEAPPMTGIKNGVHFLQLELINGRLSASLLDSHDTETRATMNLALAVWHPCCRQDAHCQLLRFQATSKQDNKAETAGSKEQGPRQKDWEQAPSRRTNMWRRKPQQRGAKNSRVEEYGRRCRQDISSDPLAERWVLHHDEYLLAVDGTDGKSVLERASWEGLELK

SEQ ID NO: 979177 - protein, 100 aa, Homo sapiens
RFPCRNSLEEYLCVLRPRTKDDVACSVCVFLLPCVGKEGTVWIEGMGGSPGSNEGQDTSSAKRRVSSRAPSPPLFLVSRVFQNSTSISFRVFWDMLLGRL

SEQ ID NO: 979178 - protein, 174 aa, Homo sapiens
MAEWNVRSAPLENGGGVLTLVSLELCALRSGCPLSSQYLTTKEQFHQFLECQMGSENDFLVKPECSDDPAWQLTLVLAPMSAEAVILTSDGLGTMTGCDRGMMLDVTCMQNALVDACYKTITKEGSPGETQHQQVPSAHNDRHASQKPTRPHDTMSIVVPVLSIKVPRRRVKRV

SEQ ID NO: 979179 - protein, 117 aa, Homo sapiens
MSDILTKVHALSALIGYPTDCGMANLSVVDLCWFTDVNAFALIAHEMGAKPEPDEGTRPARNSDVIGENTILINPEDHRLEKKRNLNGLCCLIPAWYQPSWAGNQLSGNQWMELTVD

SEQ ID NO: 979180 - protein, 74 aa, Homo sapiens
HALSFCVKTHDRYCNYMVDPIWQSAMAVSGMDVIVTVGLEESTPQFMNLTRRVRLLDSSTKLGLSCIKKTLIFW

SEQ ID NO: 979181 - protein, 245 aa, Homo sapiens
MGVAVFVRCQVCPPRLGFDTCGQPDAGQACRALGRPRIGIPIGQKYISLAMVGQICGPPPKSGLVPPIVRRHVFEERIEAHTRNAWVHWRQHRGLCASLCAQLDAPRDTNQFGTERPRCGGVYQILMRGPLRLPPHFYGVPRNIPYKAVHVTQGSGGPQVVLPSVCGSRSLVSPPVSHLTGSQGETVVVTTRRKSDLLVNHNPTIDAPLYSELENDSYTPQYCVLHHNERRASRQLTTADRRRYT

SEQ ID NO: 979182 - protein, 69 aa, Homo sapiens
MHEMCHEHNQLQLTVTPLNSRAVAHTPGSASPLLDYVCVDTYLVRMITKGTHWLVTGAAYSDKTMPTTW

SEQ ID NO: 979183 - protein, 293 aa, Homo sapiens
MTSEKLRGKPQEDPVTMVAIAGGGEDGSSARAYQRTGGQSPRGRVDHVNGCSGTRRNPQASLVARHVWAGKLWRHLSPTPNGAEVFILILGVLAPSKSYRLKDRVEASRPARQSQGRCFSTSGGEDDGGWRGYLTGREWHHGSTTILKTQNGPLSQALIKGPRLEPPYGGWPLLCWTISGPHGLTQAAPKLLVPLPMRGPLKPKLFDHGHGVCSPPEAPVLGRGPKGWTKQRPKHSPEGPIYTRKAGACERDRYYKKPSSRGKRRLAELRRNSEEISEAPDPVIRHRQKCWGS

SEQ ID NO: 979184 - protein, 137 aa, Homo sapiens
MDLSRHIHTPEPDREEGAGNRALRQEANRTSPALTAQAGPPPCPSHDHERRPTIALHYLPPNNEDTGKKDHTGQMKPATALPTTGQVIRTPIKQRQGHPQEKKSTKKNKKTDRHTQECAQHTPPPKVTPETREKTKT

SEQ ID NO: 979185 - protein, 127 aa, Homo sapiens
MALTQRTGAPERDCLTTLAPQNPTHTTRDHRNRQPRQGVHREHRTPHQPQDTARTADASTQRERPQAPGSQPGDTSQETACRPTARTQGHPTTDQAQSEHRNPTEQAPGQRNRGDKKRRARDQNSKE

SEQ ID NO: 979186 - protein, 280 aa, Homo sapiens
NCDSRVLAGMNLREISDYALEGAVERLESLSFYDIAMLARVPSAGDWNRCPGSRFSMSLRTMYPRPCAGTVGRGRLCLTSACRTCTWSVGNCNTTKRRRAGSPCDERYALCERSRAKLTIAGTIDHITLTAWSFYYTPHTVHFTHAILAPSSCVDPSMASNKQTATADVLCRPMARTGVMYPCPESLAGHEERPTQLGKRTRSPLARSAGRFAACGRSGTGVGNRSVVPAFHSEPCKVTSPLVLREPLRERVPAALRGFPLQGLPTFPGTDLAPGHQLVS

SEQ ID NO: 979187 - protein, 163 aa, Homo sapiens
MTRGLPVYGPSSCDGLGWHQHTFGFCISVDGDNGKHMTHWTTRTVRVCTGALHVAACECPVPGLVAAEEPPDTQGTQFPFDQQACTGAGPGTPGVVMSSKLGDDVYLDASPEDLPCQTLRCLLVLCRRCGYHGDGAWPGTEPHSLLLILPLSSDTTTLARLTC

SEQ ID NO: 979188 - protein, 255 aa, Homo sapiens
MTTIPRAQLIASLVTCTVNPGKTSLSLKVGTVTVTADIPTPSRMEAGDKGGSGYVVVTSWCQIDPDWSPVQCLPEAQSEPVLTHIWVPMNGTFPHHHTPLKTKRFLPGTITIRNKNTHYTFLLEFIASTFQKHHALMVYRHDYDDIADQTTRAHLTHHGGTSTRALVHILCPWNLTSIDTLNATCPTYNSTGVIHIYLLVQERGQHNEKEPEPTHNNGRPVNTNETPNTETMTTTRPQEVHTDMRRPKTRGDLTQ

SEQ ID NO: 979189 - protein, 197 aa, Homo sapiens
  misc_feature (112)..(112): Xaa can be any naturally occurring amino acid
KLPPLIVVAPGMPGPRTCLLIVQTAFPHELEGACSVRVGSWLSILLCDLNCHLPLGQEVNLCTASTVRVCMCFDGEGDLYAPILTTHAMPWQPSNSVIKTLRLWPGVGLTRXDVIDGGSMIVGLPGYYPYLPCGVDGNLLVAHGHLGRPDIARTIAYRLHKGAVREEVARKEITPSRGRLGIDLRPVGLAGKVKERE

SEQ ID NO: 979190 - protein, 105 aa, Homo sapiens
MQFHSINAPHTRPTKSNALNHIPMMDATDLDRESAYHGQLTLPMLFSQLWSFLISCVVHSLLYNLRSFGRSQDYFCTPCTTPVLAPYPSKLGGDWSLRSSASNHG

SEQ ID NO: 979191 - protein, 128 aa, Homo sapiens
GCDVVAYGLSMEPCAMTLHSFALTSIEAAGEGTLTPGGIVRDSMEGRRDSMLEMAKHCYTIRSPLRGLMGDEEEWLIHVHAWSIGVLRKLAAAYPIRFTCCNLQARLVTTLRRRSACPVYPRRKIHYH

SEQ ID NO: 979192 - protein, 79 aa, Homo sapiens
  misc_feature (49)..(49): Xaa can be any naturally occurring amino acid
MDKYTLAYDPGRYEIDIPVEVVTVREVVSEIDILEVVKISRRSSIDEIXAQGDRSHFQVIGCNNVAGSGNDEMAPRVIH

SEQ ID NO: 979193 - protein, 125 aa, Homo sapiens
TCLDDWAGSSPRRVSGVKIAPIQRRHIVFRSTARDTVAERGGGVPPDLAPTVCPEGCHAGECTSLVGDVVRFHVEQSVDVLDTTPRRSRRDPIPSTSPKTRTLDIQVTAPGGQASRRHQAGPVSG

SEQ ID NO: 979194 - protein, 71 aa, Homo sapiens
MAPVLTSLALYEDKDDFNWWGTLSHNPGGGKTMTHCKNATLDHRKRGFKHSEQRKVGQVCTGHKKLPTFSS

SEQ ID NO: 979195 - protein, 273 aa, Homo sapiens
MALSVTRESTYQGHHSTDVSKDRPIDSGDNPIVVTLRSFFASSRIVCLRPVYHSSLAPYPPDVGGQMAPKQATHLAESPLRSPTPRNTIRITRIRSIKSAEAQHSLIERNNRKQIIQALFITMVLGLYFSPPYKPQSSSSLPSPLPRQLRLNIFGSHKASTEFTSLWGQLSSLSASSATNIALYIQTSLGLEAPLILAYETCESMRCLVYDEVLQKEETRHNAMKAGGGAKRTQGADQTIGRGQRGEKEEGKPGKRGENLGAGPKGGKGALAP

SEQ ID NO: 979196 - protein, 49 aa, Homo sapiens
MVARRSGVRGVHGCAMKCTVFFADSGAVNGLERMAQVCGCSPDGERRGR

SEQ ID NO: 979197 - protein, 341 aa, Homo sapiens
  misc_feature (75)..(75): Xaa can be any naturally occurring amino acid
METAAAVRRDRSPMAPGPAPAQPILTKSKAPLVATHGAPLSNCGAESIPGQWAPSKYTCAKQVNDTVRDCVLWMXMMCLLTLYDKVPERCGDLNQDCCVVYLSSLNGVTENQGGVKPADKGGLLSVQTKDGHCLWTLAIATPGGEELIVCMVLERCARCPCTIWYRKTFIRAWQFCDFMPYVSYFHGFRSQTCGLQVPPALCLQGPHRLCDMSAKRNSSTTVSRICPESSRQHEAPAETTLNDSEPPRSKKGWLSEHRWAKERLRDKEPRAIRIHETDNIMSQKAPDRCDEKTIRPQAHKRRNNSKKEDGTQQSKKKKEEQEKDRTNRSNNAISKQKTAQQ

SEQ ID NO: 979198 - protein, 115 aa, Homo sapiens
MRKIRGPNKTSGTNPGGVKPAIGHSVTNSWGRTQHSVRSKKESTYSTQDTTEHEDNKCRKQVPEHSHHGREQHEDETQPDRHTTQLREEPRRTNRTARPEKKVSRHLLSCYIILD

SEQ ID NO: 979199 - protein, 119 aa, Homo sapiens
MYVTFLPVRKDGEIRPTFTESAFPLCMISSSSFSINGPTQSHEPGVGTSFRKMETSVKLTCAAHPKMRIENQRRHTIKRKGAKPGDNKAKARYNVKKKMYMQSPVRNEQPTSTKDYDLR

SEQ ID NO: 979200 - protein, 245 aa, Homo sapiens
  misc_feature (2)..(2): Xaa can be any naturally occurring amino acid
  misc_feature (201)..(201): Xaa can be any naturally occurring amino acid
MXTRCEVSSMGRKRPGGEGIAWPGDNGRWGRSIITEFRRSDKGGRCMDQRGALEARALVPGIIGKYAQRVAQEPRWLDWRDWQAKSIGGYAETTLGDFACVDSGPGDGKFRRGPPMEIDRCRGRRSRPDTEPPIGKPWGGHITPNETTGTTLTASSKKQQRPGSIRNWTGFHGTAFTERKATNGHGVSQRHVRTQQPMGRXINWCPTGDRNARRTPRWAIPRSLDGAPLYHQTDPGIYARELELN

SEQ ID NO: 979201 - protein, 78 aa, Homo sapiens
MVPFRLLHRTKFYSSTENLKLIKHSIIKLTAKNYSSPEATIYMTSYSKLVRKELFEVHLILKPVSQRVKIADPTGGSP

SEQ ID NO: 979202 - protein, 319 aa, Homo sapiens
SSQPQHRGQRVRQSHMVETLAEGFESRLHFILTECTCVCVCVCVCSVLCMQRPWVCVIWHFVVASTRARRTCFPGEGPGGTAGVAPPSSFHKSPWPRDSRAQACLARVDDGEQALSHITSFPLRAPCPAASNLWEGRCLSRIRVCVVTLAGAETQDSRGCARGVPSELLVCHVPACVGAIQVQLFLVEIITTPRETCDDIKRVCNSGESVVRKIFGVGEHRGGATSACAARDLSQCLAQNTFNTESENPGPDVDECTPGSNQCDSSAICYNTGVKQTAVRQGGSQKGTPKTKDMCGKRIPTDRPDKTTTIRKRREPKPR

SEQ ID NO: 979203 - protein, 200 aa, Homo sapiens
SKEVVTGIRGAIILAKLLREAEVLVARGVRVTVNEAYRFRVVLPVYPASLTDVSLALSELRRNRTQVIYRCEVQHGHRIDSSDRCERSRSKGSSFSTERALPAYAFSFSGAQDGLCPYRSPSLATPETDSMSGISLGWASESTVSAGLAVGIRPVRYPMPDPPTRGPSRRHGWTYPGVPELVVCVDPDDALLMCTVMRKT

SEQ ID NO: 979204 - protein, 233 aa, Homo sapiens
MTLLILGLLTNRLTIYQGWARCTTRKASIPGSPQHRPCPKRPSIRDNPIVIYAREVLCVCAQDLLWSAFTHSQPKPPTPHNGRRARGPANRHRPQRKSPVRSPHVAKAALRVITLRDQEYRISLSSADSREVEKESRKRNKVRSTADYKFDWVSIVTLLRASEYCESPFTISDGIYRLNMFVVATGFQRTSRHYRLNVFLTICFIRQLIFHFTSKASLGLRSPPLILASVDVV

SEQ ID NO: 979205 - protein, 214 aa, Homo sapiens
MLRHEAYTQATAYVSEQCIMTHCRHARTRSRCTPWLPDDSLLNCVNTVRRTVMHDLEWGCRSEFIPTTMQSGIPGEMARSLRELGTPENSFTVSCARMMYEAPVRGHWNPLLVLDPWYPMVQLRYCGPRCSLHVYPGDAGRESPDQRGSTHRGEGSSVAGKSFTRVLGIYRSILDWLRHRIYTENYGTTPCVMEDAWYDGNTRWPKMRESGKGS

SEQ ID NO: 979206 - protein, 69 aa, Homo sapiens
STCGTIRAISVTSCAVVLISDAMAVSASQWLAPDDRLSRRVRETPKEVFQSWVIAPVTRVQRHHYTASL

SEQ ID NO: 979207 - protein, 85 aa, Homo sapiens
  misc_feature (18)..(18): Xaa can be any naturally occurring amino acid
  misc_feature (26)..(26): Xaa can be any naturally occurring amino acid
MVLEQPRKQQRSDLKWTXLTSNNDSXRQTKVAIDFPSFVGWVPQGPRANQKTSSTGSSLLPITWGPPSCYQNGTFQKHQNDASAG

SEQ ID NO: 979208 - protein, 101 aa, Homo sapiens
  misc_feature (10)..(10): Xaa can be any naturally occurring amino acid
  misc_feature (13)..(13): Xaa can be any naturally occurring amino acid
MSMTCPALPXVEXLRTVVAHITYDCAASEERAMRQQQQCVSQNGQGGGRAQGILLSAHLHVERTDQSRRTTSWRQEKITRTKEEALELINWYIQKDQSGEE

SEQ ID NO: 979209 - protein, 180 aa, Homo sapiens
LRVGASGTHRARGFSDVKGADVRLRRPRVTCLFVFLERPWCTLSDVASARIYGSPSPVTRVPVAVAPSQDFDSVQRSRPPRLRNEDTKVLEHRPRGAVYRGPRAPPAGSCRSALKPPWLLQGSFSGVQRVPVQARLLFGRRPVQSAGRLVSLSLSCMAMVQAWPVFRSGLLCADDASWTS

SEQ ID NO: 979210 - protein, 291 aa, Homo sapiens
LRYRKSSAWSMELPARVNLSAAPVPESLRVPTGATLQDGPGWRVQVLAQVLALEKERVALSHSSRTAELQEVEKELDRPDRARVAELEHGSSVLQSSTMPSMISIPIRNNYIVQPACGRALPDLYAFTDCMWLRSRSSGTGQAAPSPTQCPGWANEIVLLYVLGHEPMDAVLINDNVAQVPLSLKDTVLLITSASAGPQGMAYGLAYAWTGSCMGFRVTNLADFGSRINASMVIPYLGPERDTLGWPVLVPARPFVGELPGLAWGNAALPARFWVATDAPCGVSREPWGGL

SEQ ID NO: 979211 - protein, 176 aa, Homo sapiens
MSKLPPKRRELCKGSGYSPARRNDDVVNDVPEKRHPTIEKEQHWRTPIQSKDKRVESEKRLDTHNRVNHTVTQEECPLAAKVPQGDPKHKQNPRVSSKSRNPIRYEPQNISKGYAKRVRFHNSIAVKVPFRTVDGGGVTVRYHRYELYRTELDNDTQTRNSQNMREKYLDSKIIGA

SEQ ID NO: 979212 - protein, 293 aa, Homo sapiens
ARGTKKPAALCRVNGDVGMGLPGPMQGPAECAAHGCVLVHRQDCVHVTLESIGCCSCVRPYDACCVMAVWMALKCLRTCHREAWMLMDNSSHLSKLETETSGMKEVLKHLQGKLEQEARVLVSSGQTEVLEQLKALQMDITSLYNLKFQPPTLGPEPAARTPEGSPVHGSGPSKDSFGELSRATIRLLEELDRERCILLNEIEKEEKEKLWYYSQLQGLSKRLDELPHVETFSMLMGLIRQPLEFEARTIRSPDGRAHREPRTTLVRGDKIRDLGLGADVQELMEGRTEEKGG

SEQ ID NO: 979213 - protein, 263 aa, Homo sapiens
TSSRSARMCYAGVPGWQQQSGSLWEPWGGVTKRIVLCPPWQKRSLCMEAQSRSRLEKRLPGMWLPGRFWSTARCRGCRLLRAVTPWVLSQAPAGVRRAVEEQKPQTMTCPYSVDAPCCGYTVVLLTCPRVSQWPGGLGSCFLLRTWRGRAFWPCAGGLCFEGAVTRLFPQALPSRRQPPGDGARSTIVSDAGRCAVTNARRDSRIGALGDSWRCREAAVLWTSVYTDLCFTCLCRLRQQETRPWPGSPLHADAGSGLSGAWGP

SEQ ID NO: 979214 - protein, 172 aa, Homo sapiens
IKRTPFYGGKKGGLISRDMERDLIPNPRGTKNIFFSKERKGGAKKRGGAKQPKKFLAAGYFTATPSEFLAPSSYSVPRKTTLNPEDPHKHTMQQGGRGPTNSPGWGKGGAGNTGVGPPATSALRGYPLWGITPVVFVPLCAGCVPSGGEEAVTKVIRGGETRTRDSAQGSTS

SEQ ID NO: 979215 - protein, 67 aa, Homo sapiens
STTVASVGRCCVDYCALYRTAGPRFAAGVLDWRRFVLRVCDISKFHDNAVDISVPHGTPVRAPRVIP

SEQ ID NO: 979216 - protein, 168 aa, Homo sapiens
DAVLDVVRKEVESGECLQGFQADPPRWGVAAGSRKWARCSSVGSGRSSADRVMNTFSVGAPRPEKVSRHGWCGPYNATLSVLQLVRRMRMRPTASTRRLLYDGLCPHPQADHPHLRGPQPPGVGHHERGHHCLRFPGQLNADLRKLAVNMVPFPRLHFFMPGFAPLTS

SEQ ID NO: 979217 - protein, 113 aa, Homo sapiens
MGAGCRKTHNNRQGRTGHNVEPERNEEKQGKRPQTPPTPSDTENPPLKQHKTRNGHQNRSKPKRDRTHPTHTSTATHENTNRNNKTKKRKTAQQQPPTRTTPPTHKRDTIKTH

SEQ ID NO: 979218 - protein, 261 aa, Homo sapiens
AGVWLAVLWPMAGWPQVAECGWTAVAWWKGRGGSLQCADPPCHEAPRSLCRMTLAVTACISDALCVKRPVGWDLSAQQIEERTRELIEHDQSACMTRKAPRSFEDVSYESTLKALADVEVTYTVQHGISLTSPSMYPPPRDIRTASTEADKKLSEFDVERMSMREDVYQRIVWLQEKVQKDSLRAAGLREYLAAAYIKLEPETMGFNLPRETQDNITTHQEEAETSVTDFNKNLNEERPSDTEPQELRGLPTDFLNIPEKL

SEQ ID NO: 979219 - protein, 462 aa, Homo sapiens
  misc_feature (431)..(431): Xaa can be any naturally occurring amino acid
MVSCSAGVRWPRGRLSVADSAVPTVPVEARTEFLVAYVIVSLNWIGVGGVGQKRKSPITKDHVTGGEAGLLEGIEKPGRYPCNYRARPYGRCRDSTWRAEATTRENPRYWAAKHRAVMTTAELLNVNKHKDKKVSDREDHRRGLASPTLYKIFAQANLSGEKRPLYAEHCAQDRNAEGHTGTTYPQCPQRDATPQPRCGAQRGGHATPRRQVQESGLKRIGGKAVPRQEPRWGRPHSHGAQGDRQKTTPLNPQRRGDQTSQTNTQNRPPEPNIERQQDHNKATDKPTQTTSEGTKLAPIYITPRERHKRSRISREKFKRHKSRFNHSCSADINSSYHSRKRKRPPYDTHKGMETHVHTHRGRMAEQDAVSIVRNTEPQYNIERTSGHSTGEHGTTASNHNWTHTLHPHRRTDPQRVLSDNRTSSGIPTNNXTEKQGTTTTRPKADPLARGPKPHKPPTDAHT

SEQ ID NO: 979220 - protein, 279 aa, Homo sapiens
WKWLYINGILKNLGFISSGVIFPIAVLIEFRRKPSGRARGSPQARSLSEGKAVPRSSVRGWRPHPSPRGPRYHKNRGAEFYQEGGKIGRVAAWKTAALMTVDREHAEMRRLCRRCGVAKRRASSGGEETGGCDEIDAPTIGAPGPRYHFPPRREKKYGKDGATRITRGGGVQKGGTTGSQGRAKGPPHRMRGGQHYNAEETHFRGRYRERRAKGSPGEDNGIPRGGPIREDKHTVRGFVPQTQIRDTRVERQEHSPQQESAPGAHPKAIHERGDTTIGK

SEQ ID NO: 979221 - protein, 272 aa, Homo sapiens
DAWAASLPRHPRRGARRSGLRPAAAIGGPPAVSRDLRFGLGSGFLLPRRRSSALCGGPKGPRVNSLPARGHESLPRHPGPRRAQNGPGGRRFPQPMPENELTLAPAHPSGQGDWRPIDEGDASGRGCPGGNASSHSVSERKSMDRSMRGQSIEPKPDLVDQAPTRNGRGVLGAELAVQSDCAGTSPRKPRHCNPDYKPPEMKGGTPLRMGTRHRTWLAQRPRTSVGLNTQGGKYNQLDNKYAEEQRRITGALPTFRAVSTPGHALGYRAPVP

SEQ ID NO: 979222 - protein, 235 aa, Homo sapiens
DRGRFSTNHKDMEHYTYYAAHEAGVLGYSSKPPYSKPSWASQATFVGNDTLSYDTVIRQHALIALVSNTSSIDNYHIYHSTEAFCANVGHEVFPKVESGASRMMAVCPAVRQTIKLRTLYSPLVFLTPCSASAYSGGRTQEQGEQSTPPVRRQVLPPRGSLGRPKTSVLLVQPLAGVSSIYRGAKGRSFITTIINIKPPAITQYQSAPLRLIRPNHSSPTSPISPSPSCWHHVYY

SEQ ID NO: 979223 - protein, 165 aa, Homo sapiens
FTVQVCLINQLPGTSHCGTLGPPARERCRPASHASPEPTSAAHAYLRVTVMGLFWEHGAIRACSCFTPQLLPSKGLSGHLLHRSPAPSVWAPTATLSLMMPLQTSQVSSRALPDPAHIPSAGLCWSHEGHRALIPLRPGPSCSPPHLPSAVPVRGSCCCRALCDF

SEQ ID NO: 979224 - protein, 81 aa, Homo sapiens
MRRIDSEYNNGNNCPLYIPHGATPQIINRLLGKPPQREKEQDTFEAHSPPQSPLAVGYALDTNYTRVTPYEKRDDNDITNS

SEQ ID NO: 979225 - protein, 93 aa, Homo sapiens
SRSSLAQGRTTLEGAVGLMLLQCGTRSLPPQEGGRGAQGPLCPTPSHDQTMNQMRTPEKHSVTVDERDTNDEADPTAEERGEPADRREQTQET

SEQ ID NO: 979226 - protein, 60 aa, Homo sapiens
MCRLQYVVHSCLREKLKPKWRIFLTHLLPWDGPGNILLGKQPKLVIGGRYKEQYEAPSGS

SEQ ID NO: 979227 - protein, 302 aa, Homo sapiens
GVQGRDGFPGRAGRPGMNGLKGEKGEPGDASLVIWHEGECPVPQDLQGPQALQGTPVYDSRVCLAGVQPARASRSCQGIRALQDPRAPEGEVGPRRSEQGQSLAYRAYLADSEGSQMNGRRRGDPRLIAGRDTGEKWGGAPAVCWTGALSRFACPVPSPTRGAPRRTPSGLARVGLPEVDNRKARAYQRVGAPWATHMETSAKGEPNRSTLGNTKARRNKEDPQEYHGANTLTKTQTGETPTPKTQGEITNGGKRIIATGLNHEANTVTLETQHGNMRGKKQGTARNARKATTEAQSQRGED

SEQ ID NO: 979228 - protein, 225 aa, Homo sapiens
MIQRHPCPPPYTQRTLTRTHSYPPPTQAAPTPNNTNTKKNNHNITNQHTHKHYKKNNKTRTHTRQTKQTEKHNNNTQTTTQHITNTTQSPHKNHKPTPTHTNHTKHPTTQTNNNSKQHTQHHTYYPTLTPYHTNYKNYTAQTTHQERTTKHKKKTTKPQTNRATQKPIQQPSTKPNIIETARHKQDTPPKPATLSTLIYQTQATTRQTDTHITRNTKHGLDTPKP

SEQ ID NO: 979229 - protein, 82 aa, Homo sapiens
MELDTGVTLRGSDWIKRNELWKLLAHKTGLPGPCTIPPPPTRKSANTDTTQRTLLRQQQALTPHPPPQVHTLADIIVECKNK

SEQ ID NO: 979230 - protein, 171 aa, Homo sapiens
MITSHEEALLVIVLLSVQMGLLVLAGFGCEPYSGRGTPSSCWFCDRQMEACKRLQNRRHDEDSAAVVGLLLTWESGHGPGGTRRLSDNELQEHCPIREVKYVNKEIQNAVNGAETDKDFIEHYNTKSARQLLSKPRKKARRRSRMPLNDHHGTQRQKLNGAPRRCACDHDG

SEQ ID NO: 979231 - protein, 101 aa, Homo sapiens
PAQAALCPSHSPPKKPPSVTNQGLREGELCLPHVVVPPWCLLGTVSVREKAEASVVTSLRRHVDVPDDDSLDTKEQEDPYVTRSRITSVLLSLPYYSHRAQ

SEQ ID NO: 979232 - protein, 461 aa, Homo sapiens
DAWERIPSEPRSQVTAAVPVSRLVSVPPSRHITLPLCSSDHDPQPGNARLEPLTAETGATGGIEGGRRQRTQNGARHSLGESERSYVKSLKTRLTLLCAWTLKQDNGSTFSTSLPICSDPLDRTRDKYYHRYDTPGMMSKQALGRRDTYTLTNTSMILAPRDMSNRTRFNVSLRQSWRNTKAWDAGNAARVEQERLGHIHNSTLVQEWSTPGDLAQSNWLVLHQIHPIKQGLTIYGTVGQQAHWVDRTLTKKATATATNHTSNIATYGSEVNKEQDPGAKRQQEDTVGTLTPREKTTHSPQWQAPKHNPRLTGHRSQLGKNTIHDQQNGANRTPVETRHNSMTMGHTIVPRTGFPQTENQNVPPETLGPTIDDDYPKRSTKKTPKDMWETRSQGKAKTEPHKPTDHGSHTCTANQKMRLTPHSTLSTHLSTHEHTTHVGSNTDAGETSNTNKRQNGKDNHR

SEQ ID NO: 979233 - protein, 101 aa, Homo sapiens
IHVGSVLHSVTAHDDSMYASLTLERASCAWLYSCPCLVLNLTCLEGCQRVCWHHMWETAAPTAGPARTQCAADCVYETQLQSSSTSPFCCRTICDEISHDM

SEQ ID NO: 979234 - protein, 270 aa, Homo sapiens
ADERYVTPAALALPLLSLPETWPSDVAVSDGVINGFNDMKVRKSSISQRESEEAAQARTVHFCLSERQEEHHPAGGQGDPGGRCGPDMSTTPTPSIVKDAGSIRTACILPSMMQYYENQWYRQATIDLVFIFMEPPESAPPRRVKNELMCQVSKERHQEESDMGSTHEIWPANVLATRRSRDRCTPGRPTAGGGSADISLEGKALCRAPSGPLTWSSSGKTPTTLPHCGGWQVHAPLYLVIPGRGWVVIPSRGRGNPLSSNDGQKETTST

SEQ ID NO: 979235 - protein, 81 aa, Homo sapiens
  misc_feature (73)..(73): Xaa can be any naturally occurring amino acid
DKVVVDEGQDREVPEENKPPSRHAGGKAPGVQGQMAPPLPDSEREKQEPEQGEVGEEAWTGPGLVMDGWVIFXEDPLEMFP

SEQ ID NO: 979236 - protein, 175 aa, Homo sapiens
MWRLSRGVRVARGVSTGECVYTTAVCLPRGVEGCGAPCEEESLPRGSHTPLSLWRHNAVGLQPLSSQSIFCERGVSHSLWFSRVSPVVETPQRISLSEREIGGPPLPTIHKKSGAIWGGDPPRERGESIIQAQGKRGKNGECTKKNAYEYSEDALWGGVWDHSPKKTRRETATPE

SEQ ID NO: 979237 - protein, 248 aa, Homo sapiens
RVGQVAACFLLMWGTGDRSGKASPSDGLHLMLYTAESGGSSWFVGAAILSPDRGSSFRVAPDYGYAGFQADQHLGSDEDTAVPRGAKSNGSQVGVISVEDANVSVHLAARGDKTPTPRTAVMMVCPHCQPWSLESPATGALVGLMSQVFTVLLQLVAMPASTHVGTTEGTSLTPGVRPVRSPRRTCSCGDLRFSLGCASVVSPALVPLWVKAAFHGLYICDCCGHPKTHVSWRPKVQGPSDCFTEVLP

SEQ ID NO: 979238 - protein, 283 aa, Homo sapiens
GRVGPRPGHARARTHTPAASHNRTHTYTHTPANKGSGHPRCQYDASIINKHITYQGHTYVQAKTGQRRITAKERTHIEGELLSPDGTHTIHYTHNNKILIIHKQTVNNKHHLKQKSKTNTLSDTNNKHTHKNFTTKTTQQTTKTTKAGYHKMASHVIDDKGGEHNRSNELNAIENRIIEITLTTTSQLNYDKISYKSHSQYTATNINHNYIDPLTTRTEKREKRGRRRDETRRTADNRAKIHTEESKTRKNGGRDSRDKRQAKLTTSRNHNDDAHTRRAETQN

SEQ ID NO: 979239 - protein, 181 aa, Homo sapiens
AGKKQLPRRQCGAQAGGDERGRMPHAPRCVSPPLNPAVPYPPLHNDELVWVAGHVSLGDLPRMWNPALRASSSSLRLLKGPRRAVSRCPACTPGARGYSLMFAYVIGWMSAVLKCCSRGHPLTYPGAVPSSQHPMGDHRQPRSAMEHTMDAECSEMAGDDRSFPGPVPSKQTGGANCLADP

SEQ ID NO: 979240 - protein, 212 aa, Homo sapiens
RDALCCIAGPHCQKLEAVMVPLPVPCLAGSEQPVPMMNEPLPCPTPAMGCGCPAVCCPRVVLSASAPWVREGPSARRLGAVTALVPFLARLQRLLPPGAERPAHLCTGTLGDEDGAGESEYLGYRGPQRHLVLKSGQNDRTGTGETHDVTGTAGLHDTESSAKRPVTRGQRSSGAEKTVKPESLYQYIQWRENGRKDALSVANGPRVSEGVP

SEQ ID NO: 979241 - protein, 427 aa, Homo sapiens
PRVVGRPPRDEAECPVWGWPEQWMGPTTIHGPLQERPLGPPGTQEMGSIHDQMEKPEQHLRTRRPMGHDPKPRSKPTPRTRHRRLGEGQGPSADPDKTVHEAASNLRRPPRKRQNANNKSATKQRTTRQRPHGSQKHTTDTQTQALTLAPKPITNEHINAKMQDTHERNAQRKRKRMTTNTTKKEENNRLETPSKKDRPQTHKTKQKTQSNTRETQTTKRRHNTEDNKKANKRHKKDEKAQNKKEPKPITKKKTQHTRRPDEKNNMKHNNNKTPLQTKTPSAKTTGKKSTQKNETKKQGKSTEEKEDKTNKKQHQKKGKRHNNPNKQRTKQTETTTKTRQTQKKRNKRTKSKEHREKHKRHRAEKTKKRAEEDKKQNTTQKKRTHHDTSSPTRRTLQGTYSTRPPRRQPSTADRTEKIKHKQKHDTN

SEQ ID NO: 979242 - protein, 282 aa, Homo sapiens
MVVVCGGDHCAHPLLRAHPWLLHTRSAVCSGVLRTCDVLGAVGGGLCCDVTSCAVMLCGIGRGAPLGWAGVTDLLLCDQTCDLHQRMSRQRNQARCVFISLTTQGAGINLCATLANNGGGSAAGADAAYIIEEPVSTSGICSPRVEHHDRRKNERPPSREALCSEMRAAVQNYNSDFIYQLYSEEGKGSDDGRKNVLGHMQTGWGTLSIWIETLEQNLCQSYGVITEKSKEAVAKGTTLTTDDTSGVREKPKKSTSNLWTDETETDMSTATRESEDNEALVN

SEQ ID NO: 979243 - protein, 233 aa, Homo sapiens
MAAVALMPPPLLLLLLLASPAAASGPSARDPFAPQLGDDAELPAAVPDLRPRARSPPGGAWRAASESPYDRACSRSALASCGCRLFSICRFVAMKLQAQMPPKLSVKPACVEAYVKEAEHAGLERTAAGAMPAGCLSPEQEEKGPGGSKVGPSPSCDCVIATLCKVTLSSQPRGFCLHPPGHTTLQTDNGKVVVFQTQPISGEPRIPGGRLKRVEVSWEANPEALEVNVDLYA

SEQ ID NO: 979244 - protein, 262 aa, Homo sapiens
RLSAEKGRLDRTLTGAELELAEAQRQIQQLEVSTLKGQLQQELLKELSTLLPTLRPPREMSSCWHLENTPDAWDRGGPFILDSPTTPRDPDPIGGHQAGDGTEEDASAWTVTEDRVLQLQAWQRLPSNTLTGPATPLHRSEPQAKIIKVPSLERLSRSHGWEESPGSRGQPLEHGIDGKRRRGNSAQGRGTRGPRPMNFGYPENLIATLVYRANVIEENSYSSGSGVPGTMTTIHNNGNMVQKRGIMGDTKPLMYNDNTAKT

SEQ ID NO: 979245 - protein, 331 aa, Homo sapiens
PDVGVTEMGRLGFLTRKRSEEADRGKVKSYPKDEPYMTVHLTDFLGEKDVMSHIVREVRQGGIQVKKKEVVEAETIVRDGSRSGGWWDIGGLCGNPVRGLEYVFSDMSLLDRLPVMECYEEFAIKNRNKGLELKDLYQSKCKEMGGMRMGKKELEKEFRRAGKKYWKSIQVMVHTRRCALLPPGPDEGPSWMKIQVNGGTCGREAGRAARGLEEQGTCEARSEGHDEMDRGNGVTRARVSKGAPAGGLPRKTHEDHRGRAGAVWGMGSVCGSWGTVTYGTTRDIRKTAADYSRVLKRLLSYRTWCDTQTANRGDEKEPRRKKKNRTRNKEE

SEQ ID NO: 979246 - protein, 275 aa, Homo sapiens
AALDPVPRTGAAWPARHLASVPVCLTCALARCLVNGRAAQRNVGSAEGEAGVPQDSDPTEAKPGDALDPELCILLLQMPSVVNYSVPAASCLGGQQTCGWMVAVPGAETAVAQYLPTPLLAGSPCRQTCCSAPVNELSWQGTIGVPSYSNQWLLCAQTHPKGPWENIPNVTGDKNSRDVRSLLGVHLVTCNSHRVANRLHEPTGNRPHWTKLTTGPGDAGTRQVPGTYKNLGYNGKQKAPPGGQGEQHSDPNSVGVPDPLGIKAGEFQKAPERSH

SEQ ID NO: 979247 - protein, 238 aa, Homo sapiens
ASEPPKAGFKPTPLASNDRFSKNKKKKKQQTKQKNKTTNNNNNNKERRGARARQNSLSPPGGGRPVSPRATHPVSLSSEQPTRRRALTYIVVCARSSISIYTRHNGNLSAASGNLTNTRPPSYQRAPHHTRRERPTSERRLLISQTNKTPPITLSLLDGGARATPHHNSQALDTLHYNHTSYISYLYLITHYSAPLSSASFYNILIPNHLSQQSVVLTSRHEPCDIHHHQITTTLTQS

SEQ ID NO: 979248 - protein, 343 aa, Homo sapiens
SLEGAWLLFIGAVACRPRQVAAPCPGACVCYNEPKVTTTLPPAGLQAVPVGHPCCQPAHLPARRTASRMCQCQLPCLPQPHHPVAALECAGPELDADAFTWPAPPEEQLDLRLIYATSSGLWTLDKFHGLGRLQKLQLRAGLQELGHGALFRRAWLAPEIPLHMQDNAAGEATGMIDTLPAKRGQPITTHSSLERANLATPGRALKTPPYRGLHSHSTVITTGPRTVLGPWYTGMPSCETFGRLIDTFYSRLANDYNQELAHLSAWPRVLVAVKELDGHGNPCFLACRAASYSTGRDSKKSTKMHNDPEAGRRYVNCITSLQVAGYYSNEENINNDPDQNKKR

SEQ ID NO: 979249 - protein, 222 aa, Homo sapiens
MLPPTGGCRSVEDVRGAPAEDPRVHHPGPVKNPQFPFRMMDVMLEAPVESELYQTKPVPTWHANQLGCSKAGNCADGSRLCCSMHADAWLRTLDAGMVAPDDSSACDYLACLSACLPRVLTLLWGLASACGRLAQGVCLAATSAFSPVVGSCQWPHDLDTFHRGGPQATRLRCMTTSDATLPRCLGCLPASLPSVLHFIARDWMVTHHMLGSRHCSDTAGDP

SEQ ID NO: 979250 - protein, 226 aa, Homo sapiens
MRRRCMPGADVLDACGSHGLLTGELTRGPFGMVGCKGEGAPDGSWERSCDGHLSKWPLVSTEDAVTLLGPENMCWGLMAGFKARRDEIQSEVKCHLVLFRIPSLWEYPALSEGMKTRDNRRHEWKGTHGKGPGARAERGKKLTWLLCQQGSHVCTPSMRQLPAMAPCAWHKRCQMACLCFPLTIVFLFFTWFSLFSNTECLIRLKLDIALPSDCRVTDGLKTLFST

SEQ ID NO: 979251 - protein, 101 aa, Homo sapiens
  misc_feature (13)..(13): Xaa can be any naturally occurring amino acid
  misc_feature (76)..(76): Xaa can be any naturally occurring amino acid
  misc_feature (84)..(84): Xaa can be any naturally occurring amino acid
MGDLTKNPTGFGXCKQLYGRSGLSTSVAGGRGSTLLRCLDRRGTAVMAAMESTLGAGIVIAEAYDSSVDCWLLGSXFSGLIPDXRYPLGYYALRVWGICGV

SEQ ID NO: 979252 - protein, 69 aa, Homo sapiens
  misc_feature (27)..(27): Xaa can be any naturally occurring amino acid
  misc_feature (55)..(55): Xaa can be any naturally occurring amino acid
MTSFSWPAAAAAPGRYDSSDPWGVAPXLVASISSGMAGPNVRPARRLHQVPIVRXPAAFPSSRQGVRTG

SEQ ID NO: 979253 - protein, 405 aa, Homo sapiens
LNHDVLQRSCSPGGPVRRCLVTLVMAHVCLLPLWGDAAPEALVKARRLLELVDGAWGRALVGLQGGPFGLYAPGRPSSRSSRPLPSLYEPKEVRFGGAQRLSGAQVVSPIDTIQPNDHNRNRQIREHRDTQRSTQGDKKTRTTFQGRKPECEDLGTKVPNRLGANSRHGQEGNPNLRAEDKPGKPRLQREHIEEYDKAASQQINHRGKKPKDDTDKSQMARHRRGTNDRLVEDNNRTMENQFRKNQRRHSRGQAWRTMNENSRSPRTVEKEDTREKKEKKRTKKRTQKERGNKREEQKNKKRRENKKVKKKTKKEKEKKKKKRTDKKTTRKRRKNRQEKRRRKEEESEGRRKREETGKGTRRKRERRRQKKTRSKKKRKEGGRREMTRGRGRGRELQEGRGEKEH

SEQ ID NO: 979254 - protein, 355 aa, Homo sapiens
  misc_feature (92)..(92): Xaa can be any naturally occurring amino acid
VAKRGGDNAVVGARDVSLSSAKALRPSHSGPSSIAHSGAQIRGSGGCGSLSRPDVGNPADRHGDAPPSETEPWYDQSEHPINGPRYCSMNEXTWGSCDEMRESSCLDEHSSNEMMGSYAERAIRTGDEASSTEPRRRRRHADSEAQGRPLVLVLCHVRTVRGWRVIATLGGTDQAVPCALTHTREPTPGADVGEYRALGMDALALSLALVLMLCMIRLNVAFIAYVSSAVQVFMAVLMHDVIEASGTGAWTELLMAVEPYETIAFKVPSSRDRQGGGRVLDTLEPGRPRQVFLQFHFTDGKKAQSVKQGDNMKGPLGGNGGQRARGKAASHGPQPRGAGESRATATGSRQEEAQE

SEQ ID NO: 979255 - protein, 482 aa, Homo sapiens
SSYLGGRARSAGGDESGAQSASPDAGEPTDITRATHRTPCTRELAGAGHVALGDLSSECRNPPLRASSSSIGSEGPGELSDAQHAPGQGQSHISVKPDTGRRGLVVTRARGGIITHDFSAECALISTGIPMGDQTRKAQSIQGLRKTVDQMKGRNWPGQKDTITMGPRYPKDRRTERGLRNVAYAQAHGSGTDRPSHTPYHKKTRKNEQTRKTGSREQHGKDTAWHGHHQKRNSQPLIHRGESKADARGATTMTWYTECNLTYGELPPRVMEHMGIVTTGCGEENDQRGTPHGNSRNQAPPAREKVTHIGRASGAKTRTTGANGEQRPDEKTNPVGQQPETKRTTLATEEKREEAKDSQHNEEQQRHTSKGKTTRHREPQRHTSGKPHTWSRTRGEIKEAGYDDERQTRGKATQKERARAETAEQHEPTRRAKESKKRAKEENGRKKQRIHIEKTEKRRAKQTTANRTQRRTETKQRRREEA

SEQ ID NO: 979256 - protein, 147 aa, Homo sapiens
VRAAIQTRSRVTLQEWNDPLDRDLEAQLIYRHLLGVEAMLWERHRELSGGAEAGSGAHEPWQSPRVYSYGPGCYRVLAGPSREGPEHPSPDAAPQPLRAQHDYLETSRRRGTRHYRLHPLLEVTPDHNALRENPPPRKLLKPPNTHH

SEQ ID NO: 979257 - protein, 100 aa, Homo sapiens
TRKVPGLSLLMGRQCLDSSSSLDLPSSPSHRPTYAAPDYRRPGELIIKDDTSVLTLNTRTRNLKYRIDPMIVITDIPLLHTQSTKHTMNNINIQFNTKSK

SEQ ID NO: 979258 - protein, 234 aa, Homo sapiens
RSALGSGADAMSAHLEWMVVRNCSRSLIKRKRMSYSTEPNTLEGPGRFLPLQADVITAGNDVWAVDAWYAERLIGVVVVINVGGSRPSGNAWHPRYVLDHHTNKKCRRAHASAACRHMIRKEQSIDPTCALVSWGVGDHGVGESGPVLWGHGPPIYLVASMGWDEGWMSWLCSLAPHHPVVGLGGGWCDVYEVLSLALFPRPQVAIRGPERILGSQTPVMVRKNAGPWRRPMSS

SEQ ID NO: 979259 - protein, 227 aa, Homo sapiens
RFKQFLCLGGRGCRDHATEALLPGSSNFLCLSTPKVTADIRGVTLLTPMAAFIRIAITEQTGLAEHKCKAQEIRLSEDHYADYTGKAQPQHIEHSHKKGSIKRLNKEVIARRTRRNTQSAKYHKDVYSKKGEPSDDNSKYRQEHEEKVTPTNTVGGKNPPLGRHLDTYRDGQNQIPHWRKPNSKNSTSKNHRGIWGDGIHRKLNPHYAIKAPQDDSHSHSGLVERHM

SEQ ID NO: 979260 - protein, 237 aa, Homo sapiens
FFFIFWGFNQLLFLDFHVGLWVFCWKHAGYMWVLESAAVQPEMHRPSRPPPRPSDCARHRTDSAWCPGALATSLGPLDTHNIQDCVPVVPHHDRQSVPQGPRVVQTDAAARMVEVSVSRVLERVGRRCGLCPKLASEHRDDPARQGPQPAWARQRGANTCGYGKLCYVTGGNTSTVSWLHGALGVSFKYTLIGCNLTKQNNKQKTKYITDKLTPQFEQIPKAIPVIPNDESNRPRVL

SEQ ID NO: 979261 - protein, 135 aa, Homo sapiens
MIIEQEKLPDASYSNSARPHTHGTDPEGTDVRMNEPEQNLKNRTQGNAVSRYYEKKDQEAKMGKLQDVRNGSERGHVVIACDVGCEQEVEVTVWSVPPGVTISCASGAVLEASAGAVGSVQRRSEKGLDGKMKHK

SEQ ID NO: 979262 - protein, 272 aa, Homo sapiens
MVGEQFYNTAPTVGSKVPGSRTNTLTTLKCLLRYVGEFKINPIWQLGLGRHNHRIWCCHSGGNVFLTPDDELCGGRAPFQRGANLPQPLQIRETYTHDDASSPNVSDNSNIQPSLITRRCAIKWRRRAAVTLWTKYRTSTAVQTHNHGAQDGGPHTPRRHYHMSIPHAPLYYHISLTLPPASYPATTSTTNFSVCHTTHSRYHHSHTHLSLAAQHPPTTPYQLTTTILPPPAPTPPTTPTTPHPHIPYTPTTFHPHHPHPHPPLPLPLYYTP

SEQ ID NO: 979263 - protein, 227 aa, Homo sapiens
RAGSGAQVPSGVSTVRAGAVQVGLWQAVGSHQRGTPWRTPPSPLAEGSVVSVDFAGPRRPSGLDSATTNVALYCVCAYCNDHSCRARDPTYFSFSRGDVIAISPKMLASRGRCSSLGCVSGTCSVAMFQKAESVARAQLHGDMPGVSAQLISLARCVCTSGPGWWRSASSGRRGALADSLGRHNSMREGSAFVHASGRQPPAETQDRNGPTLTLARCICRCGSGGVR

SEQ ID NO: 979264 - protein, 411 aa, Homo sapiens
HASSGPAIEREHQGHRWASVRACDTSYLTARSLESVDAKSESEPEHSLQSQQAGPSGTHVHVTGTREATKQREENPERTHTHESYNETEEDMKHRETRPCNSKPNNKDSIQAPRRGETHQEQEEHRENIENTKRTHKTYTKRKMQDKEETTTSRHDNRHEHTHRATHTKRPQEVEHHTKQNKHQWITQGLRKNKGPMNNRHTNTRTQMATRGTEGKTTEHESHATVTQEKDHTIATAKHYNNTPTRGGDSTGQSKDKRDSSNYNHEMSNNTPEDETKSQTAEAATKDRKSTHTKSKNPNEQRIERNDHRRTNQREQTTQASHTKRELTWITTRNNKQTTKRKPNRQQTEHNTKHDNTPPEKKQQKQTNKDNNTTNHKQKSKQEYDEATPRRSKKTDTTQQRHKEQQTHADR

SEQ ID NO: 979265 - protein, 266 aa, Homo sapiens
HSPSCRAGPFLAELEKSTRHLWHRVLLPQAALRGAQRTLKPGRPRPQCHGPPTCYIYDEFLQQRRRLVSKLDLEERRRREAQEKGYYYDLDDSYDESDEEEVRGPPPCVAEQPPSKLDTSSEKLDVFATFLAGPPNSRKEEFGWAQKRRKRRRIAGEREARRPQQFKSKRQDRLHRGLALSNPLQPDEMNNSPKLSKKRRSSWSIFKPDHISAGNEARPQQRLVDIGPCLEQEGHVSRQGRSLTNLQGRGLAASLIETATRSSLGV

SEQ ID NO: 979266 - protein, 501 aa, Homo sapiens
  misc_feature (50)..(50): Xaa can be any naturally occurring amino acid
MAEWLSRPRVTQAGSQGASREETSEPVRRALWRRRKWLTRELTYSWYSSXHDVVHVAMDDIEGDSRSIEMICVSAETNGSDIAGRAHSQSQQINLMGALPCGRRLQRSLRMTRRKMNDEVHVPWGTRLCQRQPRQGLRRLEENKTLGPHAHGGPDHSSGSGGGPGILGLPCPMVPGPSWYQVGSPALPGVERRGNSQYGRHRGRLAQGRPAMGAPCQGALDMAEGHDHRGSRDGQVSDEGYSQEPGGRKNTRGDQRDIFVANGKPWGGKGPSSSDPIGANRPNTYRHAYRREGNASWADKRNDDIGKDMRHIHTLTPEGGESSEEAIENNHDKWQRHTELVMARGANRLPRDEPRSQGREGDKKDTRMIGERAQSHEQGRHAERDTNSVTQNSVSQNQGDTCETQESTERLPASTRELVVDSHWAQAHTGKRPRSKTTDTGAGNRERHTKSKEHKRRYDTRLIDTQGNMRQRESKQNESNRTERSAKRARKQENTKDKLST

SEQ ID NO: 979267 - protein, 154 aa, Homo sapiens
IGDVLRVGTWLMNCRGGAELFKLKEKETQAWGGVQEPSTGDNIREFLLSAQIFRIFIALWNIFMMFCDDVCCSGLLNPSRMKRRNSTFPGCRVSIPPFLMTVTNVCGPEIAEQSSQKSPEALWWVDKSVRQGVHGFPATSLLFKDSVTFGSLIS

SEQ ID NO: 979268 - protein, 374 aa, Homo sapiens
RPPFFFFVWTDVGPLYYWGSLYMWNRGPPHPKPSVPRGTPITRYTSPVKRSPYKITNSKKGAKEGRPDRPKGWGSSGVGRQGHGNGHEGRVGIRPQEGTWRPQPRGRSPDSRERRRSHKPPGDWKDMVVRRIVAYNTYQEVSAGAMATEPEMGELRSGGGALPGNVRETQGTTTNTTDRQRGRETHERGHVAPERRDTVPHKKRTKYLVAFLPVVAFVRPQSSEDRRAAPQQRRETHKNPPRKSPPKLAPMGGTPKGGPTGGDAPKAQTKRDSPLGAPPREQPPKDKLGHHRRNQSGEGERHYAGATREEQKPGWRAKHPQDEKPTNDNPHKTPALCYPRQLTPCQMGEQSHPNTRPTQTSARNTEYDSKDRQR

SEQ ID NO: 979269 - protein, 237 aa, Homo sapiens
RGGPGLAAAAFPRVAAVTGGSAQAPAALDLRPASSNPTAQEDRRRGQALMLVSGRRRLAHSSAAGSEGVPFQPSRDMRLVQFPGTPPGVGLTWAWQTREWWRGVSSLKCLLNPITTRRRCRECPRDRVEATPSHVATKSPGCPVASPTTVGGNLSGVQSHESDKVVCVGAEFMWSHCKELERARAKEPIIFSRFESIVGPYDEVVLPTLEPGGRLRSGAGRLIGKRAAHQGPDAMAT

SEQ ID NO: 979270 - protein, 77 aa, Homo sapiens
DAWVEPRVEDAWVMEMLPRSGEKSMTVNKQESGIGWMEYPSASAGRLTLQVLAYVTKRHDLSHIHGEKHDQKARDKI

SEQ ID NO: 979271 - protein, 47 aa, Homo sapiens
MAIEAYPLTIVPRLLTGASQVVAQSLALCSFDAGLLSCNGLISGGRP

SEQ ID NO: 979272 - protein, 174 aa, Homo sapiens
ERRRAQLAESAAERRCMLGFRRYTVQPRGDKVVQQSEKAGSMSYDRDRMREGKKWVPRYSRQPLRRHYVIEARTDRIKSKDEKPTPTKRSRKRHKETIDTKKTKAQMMKLTPHKRVNNKATKTPKDKPGNKNKKQNRKTKKTTPRKEGDATTKKKVNKTKQRAQKTEQQKDHNN

SEQ ID NO: 979273 - protein, 372 aa, Homo sapiens
MATVSKQRAFYPPTDPRAMEVIIHRLLSMFHPRSLCEDPTETHQGDCGPDLTCHQRHYYYTVMYRIHAEFQLSEPDRLPLFWLLPLTQFTVHIITSPKDDQPRTDDYRDLRDTTNHRSHELVDNGRGPKQQAKQHKQTTKATVDTHREQQYNTRLRASEGDQARHTHTMAGPIQEDSPWRNCKDGTSKQETKKDQPRTHNRGRRTTEATEIQQERNQTAPLTHRAQDTKATHRKEPRDDLGRLTSRPHTNTQGSRQQGTDHPATPQPAHKSIGNTPDDQQEPGRKIAPTQKPQHCRNHRGTTTGRTSQTSNTEPHRPNEVKRHATTTRGARTIPQSHTNEEKRKRQRQRKEQDHKTAQNRATHEEQTNANKD

SEQ ID NO: 979274 - protein, 253 aa, Homo sapiens
MELRLLATVRLHDQSYTLLCVAQTKPGQRVSQMLISTPFPKVKAMVRQTSGTQFIDTDTEVSYSCLILQRKIQSKSYVKVTRLGACEACQDCPVISAGRKLLRGYKDDMAVEAQQKFNIDKLDARRVYEILRLLVTDMSDAEQYRSYRLDMSRKTNSHIRKSREICYDETTVSTEEDVTDEPMELSWTEHGEHSSRLLDIRGYDSLGRKHSAVAAAPCRGGTGANRRAQVIRWGYSHVAFTDTVSLEKGAHHK

SEQ ID NO: 979275 - protein, 229 aa, Homo sapiens
MGPHVGRGFRTWDINPKGCRDQSGEDLKVTSPTGSRNTAACSHRGVNNGDEGYLLAAENCKATFANIANTCHNMKDVRKRPLISSPPNRGQSEHRENQGNRTRDNLGIKKGSPTRGSSRREDQKRQREPVIHRTRPSDGGHPNLIQIGAHTKGARGPPNQQQPPQRETSGVYGAQKKSYQSANAKQCNVEKKTQDTKENPLGVQQIKRHKIHAAHTHARHKHVTPNRRQ

SEQ ID NO: 979276 - protein, 70 aa, Homo sapiens
MREQTECSVKRVGDLPEEFESNYQLMPGTAEGRTDDELLDQWGGWSSLNVRRWVNGDAQARVLRNHSQRQ

SEQ ID NO: 979277 - protein, 128 aa, Homo sapiens
YYALAPLILETRERQLQKEKKVDRTCGAGEVPKFEGELPLASFGLPLSCQQKKVKNVTQIEPLRLETDEEEVSLKVTDLDSTSWKKNCDSGQKQRCINGSSKQRALSQEPFVPKKEKKIMLLRAFLVL

SEQ ID NO: 979278 - protein, 105 aa, Homo sapiens
MRRWRPFPSRWRKTKAAAAGPGMLGLARSPDSVGLLARGQTVGACAGSLAPPLEDSPPPGGSLHPEVKTARVCALVPLDQHLHRLACVQWHSTGLEVGVVSARLC

SEQ ID NO: 979279 - protein, 102 aa, Homo sapiens
MLNLVKPAHSSKGKEAIQGPLIGICRAVEELERWTPRLKVAAAYQHNIPYMNVKGHNNLVTDPATEQNERGDKSRNITSAFHPPRLAASGNNERRNREIYHQ

SEQ ID NO: 979280 - protein, 221 aa, Homo sapiens
GQSGKLSGNLLRVSGVPTQNPTIRAGSSTGTESGGFTCEIQRGPLQEAILEVLKEGRGRSQNLRVRETEAVIQQAPLGHLRRAAPLQQCAGRASQPVTTRVSATGTPWSPPEPECGGPENLINRAPLCQTVKTGDSTDWSSSGHLARSSRGLHSLGGDPAGNGDGTVTSRGLPNIGQRIGNSKVSRSTSSRRHYRTHLRLKRISAPAGQEQRMITARGPTE

SEQ ID NO: 979281 - protein, 35 aa, Homo sapiens
EPMLAASEEAYRHPPTSLMCLEPKKMGSSTRNKPF

SEQ ID NO: 979282 - protein, 91 aa, Homo sapiens
MALGSIKYKPPTLLPECLKPPALPLELGGGRKKGSKDRNGTNPGGDAPQIEGALTVVQPIGNPTQKQPQVDEGTRKPGMSRPKKRTLSYHT

SEQ ID NO: 979283 - protein, 61 aa, Homo sapiens
MCTKGVKFNPPTAVREERYKEERNEEGTEKEKKKEYRQETTRSKMNPGEGGQTTNERIVQR

SEQ ID NO: 979284 - protein, 188 aa, Homo sapiens
MLKRVSEPARRVYDPPCVVSILYAVPKSGEQQEGRRNTETNERGRPKRRTGTRETQEREHNETHLRERKTTATTQPTTTTADTQTPVTTKRKKPHKEGEGTPPQAQQKAETTEKQTAGWYQQKEGGAPQREIKTELRHAQAKINKANRTTRGVTARGSAKTKQAQQRREREETTQRGSPDRGGTHLVG

SEQ ID NO: 979285 - protein, 110 aa, Homo sapiens
MNGGSTAIRGCPDRISRRGYWSPFRPYWPIPLAALGTCGVWARGASLAVTLPSVERNPFEAQSDALAGFPRGHCGAPGKIASVTVYAEAGTRVAPGLPARGWPPLGSSPS

SEQ ID NO: 979286 - protein, 322 aa, Homo sapiens
MSVFPVALLYTWTMATWRDWCADLTAGVLSQAELPSTVDAGARRVEDVGRRASAERLIDGTLAWPQEAISSEVSVASSDRLKDEDGGWEFRHDEERSAYEPLVQTSVDFSDCTSYSDSDEACSCSSTGIACIRVAPSRELVRQVANHVGSFEHDGRSVNIAADILLRLYERPFWWTGLLLAYVQDRHFSSRTLDEMNIEIIREHPLQGLTGSPSTSSGPYLGGTTVDAMWPYFWEVRKQDAAPFRHRLNSYGQKLSQERLAGPLIAPGGGGKPEGPWAHLVGQKRRQRHTRREKPEHKRAHEREPPRKHTRSLDTKTDAAHD

SEQ ID NO: 979287 - protein, 175 aa, Homo sapiens
MCDRRRNYAYDISTQAIRLRRATEESGTSPPSTDERDPRQTQSRLRRPNGHSELGGTPLSVGTFRPAVRISYLNTHNTPTTGWTQSLPLSATTSTRGPTPTARPPCGCTPHHNNMPPHSQHNVGGNTTKGGDSAHTPRWAHPQPVHWGAPIHTSRRDTPAVMYTPTHKNSATQWR

SEQ ID NO: 979288 - protein, 131 aa, Homo sapiens
MLYKFMARRKEQFGWPDEPPEEFPSASVSNDLPFQNLNLSNGHWEIATQRVPHYDQVELSWRGWVVSCVYKPVESCFADRTISSRKERNKNAAQELATLHVVSWQHACQLSTQQSNEPSGQSGLPAARRTD

SEQ ID NO: 979289 - protein, 355 aa, Homo sapiens
MSEGVELDRYIVLTWGVSHRSPEFNNTDQIDLYDDVLTATSQPSDDRSSRTERTSSCSPGAIYPMPNNNEPCKCSIPTVDCVIDRAAVYVGSYFLVETRDQELIHVIRSIGVYDVVDVEISKRIEQMGSPTGMPEVVEPLKTLSTHLLDSYRDSPTGDKGDREAGHREDLKQNEAQYGTNTSRALPQTNGRRRQHTPRTGPHDGGYPGRTKTHDTECPQNKDDKRENPRAHRPTIYSSFSFSMKQKHKTKTTQTKQTKRKTCNNKHTVQKYNKNNNNNIQTHNEKKRREEQKTRGQTERRAQTRQQTRGRQTKATKQNKKSRRDTNERNNRKNERKSEKRKEQDAKRDRTNNEKK

SEQ ID NO: 979290 - protein, 107 aa, Homo sapiens
MFLSQDASGARFTQVCGFRFPAFSNTVLHQGEIRCTEENQNLPTLIKAINNYHFRPSFDRIYEKGTNYRGITHGPGTEEVQGENGPLQDKTSCSRRATVLNRIVSAT

SEQ ID NO: 979291 - protein, 124 aa, Homo sapiens
MKPFYRTIYQRPLSAAGAAGAAARAPAADEHGRTCSALQRPPFQGSREKPWGSDPPTLRKNISPASSGQHNGHTGKPARRHTTVKITNRTESNKQHTDNTEGDTQTSNETSHSPKTISPTERKH

SEQ ID NO: 979292 - protein, 353 aa, Homo sapiens
MAVVHVKCIVYMNNASRPCTHETKASDTRMDGAGAKDPIVIQHGDHVDTDASQLTHSHHHMDTRHTDHQKGGPIQKLVRGRPHPTTSQRQHDGHPNAHESHATWNTSHITKPTIPHGNLAGKLTTTPPALAPPRDPYAATATPLTHHQQRDTLITESHHTKEQTSQRGDHQEETQAPHHNCEKHIPRTQNKQQPTHTEGDKAHYGTATTTEIRNASGVREGPTTHPAPTHPWGRPSSVALAHTEDPHSHEPTRRKRRLPPRQHKASLPMDRPHTTTRANPPLNSTNGHDRTNKQERHVHQQHKQRQSQTDSTIATHEAKQRPTHKQPKHNTAKGHRQHDTTHPRHTKDQSATT

SEQ ID NO: 979293 - protein, 497 aa, Homo sapiens
GRRPIHTCAAPGLLLVAWPGVGPGAYWVLCETRARACACSWGSLEWVVLLCRLGSLVWTEDGVHRVDRMEGVLRCSASAPFPRPVMSSLANPRKNNQGGRLEEHDNPSMSPYKLRKPECTWGTKSGLERDSEEEAALLGCDYSTSGKEGNYGKSQGGPFLWEVGWGAYGIIGARFNDQLAPPGGPGVGHYGAQFLGGNDFVGYLGVRPLTHMELTATRTEGIEGFTYKIPHTRLVPRQSLKDIGETFTRAPVRVLWVTTQCGKSTEGFQGLPWKMETHQPYGITNSSKLTNSVCKTEGKRGDLASIGAAHTCAPPIWRVHPLRGQYVSPKEVITISNNLKHCATLCDTLPRDPPMTRQNNTHQFTRQEPTFGAPRANTNMIPEAHRWVPPQAHGNPARQHHKATGHYSQMGKNPPKVAKAPQTMGTQRPTPPPQEKKNRKENTPPRKRGPAPPTNKTNGRTMVPPIVVRHHRRRQHPPHRGTDNIARTAQRDLPRNN

SEQ ID NO: 979294 - protein, 89 aa, Homo sapiens
MHLGLCRRTGKHGATQWTIVRKGGRRIHLCEGRTGHKNPNYTSPLGAQKWRQWTMFSSKNATTAPNGAPDMGNTKIPVAEAGQDPRRPY

SEQ ID NO: 979295 - protein, 277 aa, Homo sapiens
RVGPAPRGYRSMLSDAGVPGVEEKMHWLPPATPPAAQVPNAPVAMECASVPECDYWESRGSRYVLLRCSHLGGAPWNIAGLVLRDVWACHRGAARDGRFDTKCLASCTLWRTAFLGPEETLPGHGQLRTGSPAGPDLGMCAHGRKRLVVHLLTARVRPTRMTATVGMLARANQYARSQQSCSSRRCRCPLQKHRLGSDSTSWWQPHTPKHNTELAQRTRPGSTELNATPCEKNPTRDTQNCPPHRDTHPENTADRQDDHNREQRQTRSTDQNRHANH

SEQ ID NO: 979296 - protein, 436 aa, Homo sapiens
  misc_feature (297)..(297): Xaa can be any naturally occurring amino acid
HAYGRPLSAAESDGWPGRREPGAGLAVAQLNGCALVLCLAPAPVPCPAVPCVDSSVVPWDVLGCDVPQCVLAVLWIVLSHVMRDTTHSDWCERVACCDLTHFLLLFRTVLPDVALVTCSANHDGKTIRDVQECFNVMTTCRTQADLDGYDCEQTYTHEESPERDSRAASTTTHYQLASDLTIEHAARCIAACIAHVDPSHMCNARTPLTRAPQAALLRIVSLGTQHEKAAGIPKSTPHIYRTRSAHSESLIQDQDTHHQHTHNQTHPSTQAYAELTHARTDDIDAGTTRTKRTRSAXHNKNTGDLRARREPRTKTTRGEATQTTQTPENDNCVIYSLRSVAAKNGMDKHGWDPHTCERRTYRDHNGQATELSQTGRAHAGHRTEQSTPVLGAPPSAISTPERGHASTTACKSHAVPRRHHTEQPPTDPPYNDKTTS

SEQ ID NO: 979297 - protein, 57 aa, Homo sapiens
LSRPVAGGIRGCVVRGVWVIERGAGGAPAQCPWPPALSIDIEDATQHLRDILRAGPA

SEQ ID NO: 979298 - protein, 475 aa, Homo sapiens
PRVRPALPQRGTPAQSGDTRQGWATSTFPLEAVASCGCSGHTEPSIPGIPHAWLLTNLTSTQHGLSGTVWVSTFTSCHQARHKALSHLAPYSGTLINHELNYFGVTLDNLTHHSDSLICHADGPLCSMHPLVEHGLSTHSVIHVVGQQHVEGHYVTYTLEHETLASTLVPYLQSSLAHPRERLTGHYTQSQDHRQAVPRFNAITSRHQGTNFADPKGTDWVVSPLNHNKRHTTTQPQGGTTKQQQRQQAKKKTPVQTAHANYEEKDDVGCPPHTRAERLDTRARRLNATHERRDDQQTHEAGEPTHHKQRLTQRTPPPTRSHEHHTQARRHVAAPTTPTQTKRHGPHKREAPPQTWEAPAHDASVVTITATHRPKHPERANTRREDKQRRPPTRALTIRPITGDGHDNIPPTARRRDHQRRSDRPQRKDTNHIATGRTTADEAEDHPPRTPTARGAPTDKARPTTRFTPHCEGTN

SEQ ID NO: 979299 - protein, 181 aa, Homo sapiens
  misc_feature (141)..(141): Xaa can be any naturally occurring amino acid
MVVQKLWTGVMDIGSNSLLCVVAHERWRGRHAHWFPVIDRGPEDHSKNMKKEFLHRMRSPYRRDTGPNKGPWADCRSTSIINIDSRLVPENSLRLDAPASHPPEWGDRGPSTTKTSTTTYPYPFPQMIPQWTNRNTARPWXLVHQGLREERIILAAYGDFPFPPSEFYPNIAKKAAKLLLV

SEQ ID NO: 979300 - protein, 234 aa, Homo sapiens
GIDCIVFRGLPGRPGRTPRECRSTPQPRSAAVAWQRGAGSEKKECGPGRAEWEVSMACVPWNVGLGPACCDCEWGCLVLLLLLWLVCPCHVPRWDLRTPCVDAAVLLPFVVPSLPCAGRPNAPNCQCPALGSCSAGPWRPVTGASLLSETRHVVAELMGRAVFGPGVGRAAGVSFVGDAAVDRSRRIPTFGSQLTSNVYSAERFHVTPVCNYRRQAGGDNGHYGTEAQVDDAQF

SEQ ID NO: 979301 - protein, 56 aa, Homo sapiens
MPNARLDTTELQDRRERVAHKRVNQRQGNTKNERGESIKKGSKLERRKKSGHKRLG

SEQ ID NO: 979302 - protein, 174 aa, Homo sapiens
TSSRSRAAALFFYVFIFYFFSPGDILIQWETQRWGESDIKSDKNVWYTNIQEAPRWREDLWWEEKAGGTTRWAPVGNREEEERPPPPRVITTEETERDARVATGIYTACVHARGHPHNLPHSGGARQRKRSLLRETTMTQRREQHTAGRRHHIKRPTHKRDARVERPSRDECAI

SEQ ID NO: 979303 - protein, 221 aa, Homo sapiens
PKRDIFFIQGKRQIEETPEERGAPRGGTNPSGYTPLPKREHEGGGRVAPNTLYSGSNRGPLWDPTLVWVRATPMRGEGPHTLLRVGHREDSSGSHPELCAQVRHKSASLLPPQEREYICGGRRGYCVVAQNSEESATVRRGVHTLVWRAVVIAKPSQSEAEVAPQTSGDTCGDTQKNTHQQQLCSRERLEVVGDTREEAAHKEWGHHAEINRVGGVRRGVQ

SEQ ID NO: 979304 - protein, 513 aa, Homo sapiens
RALSWRTAPWMCKAGFVGDDARRAVLAASIVWGAPSAPRGVMREAMGPRMCIRMLGGRRPKQQERHPSPVNVAHRRKGIGRRTHGDDDAEDTRWDDQRPVRTIELAVVDSRGSKARDCWTRGPPHGSPQRAKHCRRNALDRIEITGYVTTPCRHYRALGTLGPWLTYSDARCCEYTLDIRHIHGAGNSTLASPVKYRERHRALEPSEEYQPRKRHFGWPTSRYREVGEVNSDPIRTRAIAPNPIVGIHWEPVWRMGAVWYTWAMDPKGITWTTISGRQLRNGRSKHKAFQHEAQRSTQNAWGTNWDAEWTHHSQEDDTPMWTETDTAPTGTVAHSPKEDMSTGERGQTHEGPTPLATKEEQQNTDPYTREQGDTDHPTCSNRQHVNPEHTRSKQQSKHIPPPGATVKPVGNTHKSNPATPRSDKGPQDTSEKDTEAKTEDRGEATRVTDMTEEHRRHGEAAEKTTTERTRDKKERSNQASTNEDNQQRRHRHEEQTNQSKEKEEKQDKAKNTH

SEQ ID NO: 979305 - protein, 225 aa, Homo sapiens
VGSGLPRGRRATTLEARSWNGGGWEETPAGREPSWDVPCTDAGGTDAGDCAQTFTTLRKLSGSTKRPTGVGLPTCSLWPGREALHPALPAPDCCHMVCNDLHVCPEPATGRGMLLTLCPWGTPNPCTFAYSNGAAAGTKARGCHGRKPPKMMQVSSSSGEAGGLGALLAEEASETVSLQDPIISGGEEPHRKVGNAGGCMLWSYPNIVPGTIHLGLELAELACET

SEQ ID NO: 979306 - protein, 430 aa, Homo sapiens
GPWMRPRSLFVWRPMGRVSRSGGCSCVEVNAAPAILLTVRCASPCDEPCICHAVTPVSRVLIRVDVKHRNLVFALWFPHVGMTRRQLCEHNLNLMDTTRLHHIDVCLYTVSNVVQQCIQLDLSMLTSWEYDTAMYEGTRTDDNAHNGQPKATCTRAPIGSSRPTTHGKGNDRPNLCLAGDTLSPRARLAAPHIGHATDRGLPLPGVKYRLIHHGESPLTRNTTTIPPNVNYSLITIPIATTITNRTSQRKGEEIGTRPQRGTEAPITQSMIGTLRRCMCHLVKFTLRHEVPLFLCAPIRTTWRPRRAGVYIDDAIELVTTRKTVNADGHYTTQRNKRVNIGQRRNRQHNSQRNRPRNETLTTMGMSARQRNPYLPQSYLRNAWAPRSKRTTRTQAQGYSTSIKLTTTRGLDVTATTTSEGGITTDQMGIT

SEQ ID NO: 979307 - protein, 353 aa, Homo sapiens
  misc_feature (252)..(252): Xaa can be any naturally occurring amino acid
MQVSKRMLVGGVRSCTNRMCLEGGADPAAGCWAQMLVGSATVLPRPRCDVLTRQAAAVLCQRKRLVAVPEGFPTETRLLDLGKNRIKTHNQDEFASIPNLEELELNENIVSAVEPGAFNKHLTTSGRWVSEETRLKLIPLGVFTGLSNLTKLDISENKMDPAGLHVQDLYNLKSLEVGDNRPRTKNYYTVPSDGLNSLEQLTLGEMQPGPPSHTERCTTCMASIVLNAQKPQKYNDNYREIILTKGSTELTXFRNIPLAHLEPQKTKILYKSHKLTYPAKPKLGNETRGHNRAGAPPKENIAEQKDMQQTPQTQKTTETEDAQNNQRATNEVDHHDAKTSKQNHSRDAPENTT

SEQ ID NO: 979308 - protein, 92 aa, Homo sapiens
MYKGEYEAGGEKKRSLQAAHRKRLCDRGKCARAGDRETKESKSHGAVIEEKRTNEAGENPQREDTTPQKAVEGQTQSDHTDQKYKLTLTEED

SEQ ID NO: 979309 - protein, 256 aa, Homo sapiens
MQGPARGARESLARRDQSPRTGLNIQSQGGYDDGQTTGEGMEGQGGPHFQGRPIAEPFNTRGEECRMRGSPSITARDPKSGGWGPAETGEMPQRGQGQGRKKGHRGGGPPAMARKATLGRGSKGGRRWDSPKSHHHYTRDGGPSGGTLTQPDTRGTHRGALETRGKGYIGGRLPHKNKGITTSRRLSRHIGEYKKMGEVAEVAKAQHRDDNKTPRGQRETRSAQKLWTPRGAVANDACKRKGGRGVYENLERTIVK

SEQ ID NO: 979310 - protein, 300 aa, Homo sapiens
MAGKSKVCVAPIHSSFSQGQEKAKRALNLFIRTCVPCDVGSVVHLSHVDLFFHNCALPIVNISSQCEPNTSRNESGPQFRETRVEARKISRKRPSPGGIGTRWTDNEKRPREERHNKSYVSRAQGICDVRALRVTRYVETACVKSSYTSEWPSSTLPLLKGSLLNTPEVDAVGETRCGKCGSHNYPGRISVLRGDQRLAVVHNVRRRSPHKFYYVAKGSDGIGKGPPKKFFTKNGNIVGLPNKVWDHAPPLGCVGVFHPPKRPPVGGYIISNTGVVSLATWVMTVGVQGRHPPHFREKEE

SEQ ID NO: 979311 - protein, 106 aa, Homo sapiens
PSRMGVKVWVHVPEHIYAAPGQKDFTSPGGGYRRQCCLAAHVDPTVPSDHVLGPVEHNDYHTDADLAGGEQLSVWPREPVCVEHVVHRIRESCSGRGRIHHRIAGR

SEQ ID NO: 979312 - protein, 58 aa, Homo sapiens
MMRFSEIPGISEKRIISTQVQVLRQEHAAGQPLLQLMNSIGAVKNWVEIRLRAVGLNH

SEQ ID NO: 979313 - protein, 556 aa, Homo sapiens
MTESACDERWVDDTRIVDTIDVSPMTLVISHDTLTPYLEPRQPIIIMSSDVTDIVMSRPIRTSHAVDPLIYLGGEPVPFINHGACMTPGSASLDVMDKHIDTQEKKATKVTIQGNIPNEVKQKDTQEGDKLSGNDQGKGSPTHKDAMGEANHPEKSSTSQRKQRARPRQQKNTSKCSRATGACTRTGKNAKTNQCKTKWRSSTYNTTVYMATCPNKDKKRDKDPTEPKTDPKDNRWNIKKRGDRGHKEETKIRGQIKAINKEEERRTEKKKNTNTQVYPLFPQERRATDKQNPARGKPKTKENTLTHPAKKQRHKHTERNHKKDIDNEPQSPNTKQQHKPPHTDNTNARARQHHNKNTPTESPQKPHRTNTNQNNSNPHTTHTTKNTATAIQQHHHTNSATQDTPTRTQSTKQNVATTQTTREYSQNTTQTTHTQETTSRRQTHQNSGRTQRHNKQNHTRAHNKHTQEIHSKKTNKRQHTTKTHNTRKITQRSTPDENYEPLNISTPKTTHSNIYNSNNHKHKTNHSTTQANYNTRHKQANKRKAAREHSHTLHPY

SEQ ID NO: 979314 - protein, 365 aa, Homo sapiens
RDAWGKKGAGVGAVGAKWMTGPWNRQSRPNMLDAPSTPCCKNDPTGVEALPLNGPTLHLAGGLDARLPGLLQNRGKLGSLQASHGEAPEAPGPQPHRPDHTALGALLQKPEMRGAEETTLLAPQRGVGLGAEGQGPDAQVPGLGPWQPAGVGTTGTQEKVLHKSQSRLPAMEPLKSLYPQEPSRVMELAVASRRQQTEDDGGGRPGLGESSKGSRDNAKPVWTACPTNKPVEAQELTAGPLDVNGVTRVELSVAPETKPVQRRRIDCRTRPGKMASGNITAKYETRDSRTAHVKVARPREEGDRNKDKTRDDEKAEQRGLTITVKKQSRQHTERQKTEGKSNGKKSPEAHKIEGSKEKRSRKQRQ

SEQ ID NO: 979315 - protein, 207 aa, Homo sapiens
MGSPYDHAFMIAPMAPLCFLLRLGGGWDFSECRLGSLILKSKGPRSLRHVVLLAFACKLEGTWKHTATTGEKRRDGGGARQSKTEIITRCGEGGAPRGSYSARFSHRGGSRGGDNPKKVRHPLRERWEISREEKKRAQNESNRGGPSRAIARCMATGQRKQQLTEYATTLVGAYTHKKAWDKNKTVEAADKRPAGGGADNEGGEQTP

SEQ ID NO: 979316 - protein, 153 aa, Homo sapiens
MTKACGHIHLHLDSVMVWRPWGLCSVVLMLELRQSTCCRASCNMDVLALPQAFLIQKVLGGAQEPTFLTSFLMVLLLLGPHCENLCPSATLAPLSVDVGSYWLPLSQSTHVGGGALSTSWVDIGSHAALKFAGARKRMKAHTSKYLNIVTSRK

SEQ ID NO: 979317 - protein, 337 aa, Homo sapiens
MAGAERCLCRLLLLAPALWSLVQHYTPRAFPAYCCWRVRELALCTPVPEIPPHRVPEQPSHYQIVMRHDLRVITPGFCKYPYTQYELAPVSPYVGSHALRSNTLYVRPATRTHSLSAYKSPAPFIRERRTPAGLDLRWLPRVTHKTRHCSEDKGNRQEGRPREGPGKDTLQPDDGQTVNRKADLRLYKSLSNGQGHHSVHAGCRLVKQNLEAYEEQVNSPIINLDNLNYTQMARGGIRISCMEWCHNQTTKEQYETQSVKWVPLQEQLHTNGLAKEVTLSADTKRTNEQEHPRPQEPEKKGENKKDKQFKNRHRNNGTQNTTHMQERERQPKTAGDT

SEQ ID NO: 979318 - protein, 236 aa, Homo sapiens
DAWVSADWTVDSSMLWIQVPPTPKSTASKGMHPWVEEGILGPLAGSCIPERRRPQASSVGSSSSGHACHLALPRCKPPRYSCVELGHPIIEYRWRSPCTRRSLPQECPRVAMHILWDNRVQSSHYYLGSPVRRIRTGSSVCDMTLQAQLCVTALWLKRMLHQEHEGGREKEHMQVVGATSFWPSLWVDVSCGNKGIDIIVGLGRGAYRTAPRQIIGQASITCKDVVHLHSTWRLTI

SEQ ID NO: 979319 - protein, 107 aa, Homo sapiens
GRSPSCLLRNWQLFLPVPPLPPESQPFSPREAEEASPPVADPPVPGILGLQPASGPYSWRSPEGATSSVASAPPWTPQTPEMRLPDPLPTYGKQKHSIGFPGRSFII

SEQ ID NO: 979320 - protein, 138 aa, Homo sapiens
FLVNLQYRRLYRSMNSQYLKLYSHRNTRSYDIMEMYTCAAISWRDEWLVDSLKQKMAGAAPDLVYVNVGGTRGEQDLPALVKGVLPHRLSHGSRAPATIGTQPRKAPFSCHSCMFSRLPETKQHKYVMTTCNPDSTWP

SEQ ID NO: 979321 - protein, 103 aa, Homo sapiens
MSNRKQTETNNYKHAYHNFHVGLYFTLLRASEYFEVSLHHVRRNLRLNIISSHRTTKELSRHYRSTFLTICFIAPGTYFNLNTKTSLLAFEAAADTGIADVAD

SEQ ID NO: 979322 - protein, 342 aa, Homo sapiens
MSPVTGGGLRWCNLPRTAWALPAMLLALPVEPGIARLQARLGGYRLCLLGGARRIGVSFRLEEPSVGGFRWLLPPPPPPPTASAVSARWCEREETREAGRPPRQRGHRTCVSTSGAHIRRARGEICRNNSNCWIFDLGGDCPWPACRGGSASVHSTRKCVRVCMYVCQSRAPPLPHVNPSSDALGTDNQTEWHIVCGGAFNCLQDKYHPSAYSGPTEDPHRNSMSAGAHNRHVAREDYVQTTYMGDGETTNRTDAPVANGAQHQNTRHSETQPREHTRNYTRATQRHGDRIHVQRNPHREQQQKEQKKQGTQMLSNRSHKTKHRPKRRKPPDHHTTPLAPTA

SEQ ID NO: 979323 - protein, 151 aa, Homo sapiens
MINDLLFPHDTNKHEYSTRQRTEARTWNRRESGRNARSRVAAEQERAGRGHGRTTEDDNANTAPHTNPRDTTGVGDGGQLQDTKTGAGAARARYRQASTSRRNKHNSTRPQHSTRQPKAAAEEQTSDNTTHNNKTKTKKTEAAQHNVIHLR

SEQ ID NO: 979324 - protein, 236 aa, Homo sapiens
  misc_feature (125)..(125): Xaa can be any naturally occurring amino acid
MNSYRYQGPRRFSEDVLTPSVMRYVLEVHYSQYRSIDRGCLGREAHTLRSNTGYRPRTVRIMPFGAKLSSTKVVPSVAGGAIGRVGIAPIFTTSRAVLKDLPPGAYFGVARASAAQAWHPCLLAXSARSGLLLRSSLCPVGNLCCSLGVPGGPFGFPLRLGNDLAGLLGSFLCPANLLSGGSSGLSRERASQGRIAGCRKRSGLLHDVFADLAPHGGVAARLWVQPRETSVLYLCA

SEQ ID NO: 979325 - protein, 126 aa, Homo sapiens
MKVYEYEALKVLGKLGGPRGFRKAVWERALQWIIHLNLKNVRNDTIKYQRELWNKTIDAMNDESNEIKKKREAKIVYLTSDGTNYMKRARESVRISEKSSKYYHLIGVLSERQGKELEEENGTGVT

SEQ ID NO: 979326 - protein, 416 aa, Homo sapiens
GEDMRNKMDSEMRRLQDFNRDLQREIGICKSPPGKLKTQEAQCRQSVTCVAKAAMHRENIKRKQPKCRGYEGGEKGYEKAKAQEGPMGVKRAARRQGTKAATIRTEAQKTQVWGNPLGDPGKTHVLCNMRTHPERYYRGRPTRSEKKPPEKKSAPGGSEDTPEVGSDETMCGFFWGTTHTPNEAEKTPGGNPAISGGDDPNKLFGRGSAHSTTQARGTHHPRKKTKDDGEERRNTLDKKFFTPPDIISGGGGTQRTEQQSRRHDNAPRENKEQKHNLFVRGGTPPHQNRGSTHTPPRHKQQKCRRNHASGWYTGQSTTQTELQTDNNKKGGEKRDDINREAEDEHNTTNKKEKREREEEATQNRDKYSPHPPPRGGGERSKQNKQEASGEKPNHTRRKPPQQKGGERKTHNNTERE

SEQ ID NO: 979327 - protein, 117 aa, Homo sapiens
MSQKQDEENPDGGERRAREQDTQEINEGTSALTKQLQEAPLKAKLSKAIGHKPGGSALSLMTETPEHRARSSSRLQETTTVAEAQMNDITQVAQRCQRSQHIDNLVYLDESTILTAL

SEQ ID NO: 979328 - protein, 100 aa, Homo sapiens
MSDRDISKLGCHPPIKRALGVFTRITRSSVETEGLRPRGNTRGRAPKSTSTITPQYGHGKTTKRTSTNRAAEKNKHARNNSTNTEKRGDNETDKQTKWGN

SEQ ID NO: 979329 - protein, 141 aa, Homo sapiens
MDCVASKRLWVSYIPDVGVSIPIEPNIDPHADRGINVGEDGSSVPWRPMHRHIVRVRRTPNHEDKEYGYNLCSHIYGRDFTLDTNLSAPVLSVLSHHEAPVTTKVRLDSTPSIRPQSPKLRTDSLRHGHITPIGNFPSIIP

SEQ ID NO: 979330 - protein, 204 aa, Homo sapiens
MPGEISEDPNIYRQAPLSSGVHASSRPERGRQCLDAGPTQLRHVSPLMGAKEEKASFPPFHVGAGPPVIPEITSRTFSQDSRDLLKPQDPIRSGPEKVGAPPTGTRAGGANSLQDPERGGGTPRDVGWDIQDEARIGKGVTTDGGDQAQGYPSSLMATTAAKGTGALGPTGSICLKANLNRHSTGERELRLQTKRWEPPKIAEN

SEQ ID NO: 979331 - protein, 231 aa, Homo sapiens
HASVVQLRGNWLQRAHRRDRTCVTVSTLSSCRRLKPVDCQQHEIRDLCGHPSEGLRAVRMRVGIVLGRLSRVQWELFTALKVREAEDPADFIRCNSGMYKMPALLGTLLIHDVRLTVAVEHQLTAMPSTVAKLVLKGTRPLWALLHFKEGTRESYWGNQFEIALVCLPRELTCGTPSRFLRNWNGGAYISKRSSLYQSIKVLPAEITVKMDKPLQRGHVIHKLQSPAPCEG

SEQ ID NO: 979332 - protein, 249 aa, Homo sapiens
MARVESFCDCKKSKFTDTHGPMKKFGRGAWAPRGKGFFRNPLLGGGGAARPGGFRVKHCGHKTPCAPKKNPGAQNISASGVSLHQIIKKPRRARTTGRVLRNTQHPQKSRSRAANRSPGSIQTGAGSQSNAPNIYNSAPRREGEKEKQREALASTAQKGATKERRSKTTQPQATQVTRRPNEPTRKANTPAKRRRRHTETTKTHNDKENDRQEGQPKPKPHTTPATGKDENAPEQRNESSRKKNRERSE

SEQ ID NO: 979333 - protein, 160 aa, Homo sapiens
RRRRCAANGEMDPVAEFPQPPGAARWAEVMARFAARLGAQGRRVVLVTSGGTKVPSEARPRALPGQLQQRAARCKPSCRRPFLARGYGGFLFLCIGARSCLSPLCPPFPTPDCGCPVLRPSGPSPFRAVVSLEAEGECTSGLAEALRSYQEAARAGTFLQ

SEQ ID NO: 979334 - protein, 125 aa, Homo sapiens
MTAQNGQNGWARTDGRTEARTVTGDGTQDGRLNDEERVVSYRAKRAAEDDEDDDVEYQRMKERRTRMTRTARTGEVEYRKKKGGMGIVDRDSGLRNCRLAPLIEGHAGNRGVPGNMGVHATKLGW

SEQ ID NO: 979335 - protein, 323 aa, Homo sapiens
MLWMDEVNLQMDAQERPRGCVLRGIQSSMNSCNGIERHEDTMARARSRFSSCIDVGKELLARSQYAGRGRSQRMLSQLQARRQETAEKWQEHDGLASAGMEVLVVGNEMQGWHEAWLCIQEPLVRSAELGCTVEKIESLIKRLRGLLEVSSGSVRSDTVRWKHAYCTKKSRDQGARHNTSAAAGTLEHIPAGPETTRHMGPPVDLWGGPTGFVHTRGKATSAEEHTDQRGTHGCQRRFVPTLRKASRLHLCATHRARGHTAAPREGGEAPKGRRKRNLEEERRHMSSLAIHHHSLNSNSKLYSKLVAIKKATDRNTKALDYGV

SEQ ID NO: 979336 - protein, 104 aa, Homo sapiens
AGLKRWCWLAGRMNSESKNCAWLRVLSLQAWATACDGRAAEQFDKTQMIKEARGPLPLLSKAGHQRSANAINTHGGPREGEARPAASFWAHTTRMGAFTFWSYA

SEQ ID NO: 979337 - protein, 373 aa, Homo sapiens
DPRCTVAAGPIRVWLRGEQRGHVMPLVARLHLHFDLRDDDDAGRRMGPSGSLVSGCPVGLQWKEGFRVNNLLRADEDIDDLEDDPVVNWGECLGLLRFTRLLWQPCGTNVTGVSRLWNQHESKTGCEMTPETVALQSSLHAPWPKLTESTETQNTDKHPSKSMHRRDSIRKHGLPQISTLHPKKTDTTDTTHMGLEPYRGPGLPLKRPCESTVHLPVLSHTTTLNIRDHMTLAQGDTKGMPGDKHMSGERKSATAHEAHTVMNTPRDGTSGHGPTHTTTRNLGHTHTGNHTVRSNGGQLGDQTQKDYHYKQRKGRPQKRETPETGTDTRYRDGQSTKRDPQQTRGTRPKTAYTRDNRPQGHQRKQEKRKNKNK

SEQ ID NO: 979338 - protein, 215 aa, Homo sapiens
QASRRVPWRMPPLPSHGPVELPGITLDSQLCSCRFCVVVTPVLLPSGPRPALLEVCARVTHGAILCSFSLFEPLGSLSVACAPNASGTLMLTAPLWRLPMCREALFMNRAKAQCLDLCWARVGRVSHVDSVVMPVAGLCSHVLMRDAPLLACGVSTLVLAGMGPGYIARIIPPYNDHRHTPSVNTHLEITEYHSQNLGKTMPLFDYISNKMMQST

SEQ ID NO: 979339 - protein, 128 aa, Homo sapiens
CSGTLLSKEPNPPIDEVISTPGVVVRLVEYLKRKENGQLHVRISLGTDEILLLGHSRSDPNVIEAGAVPIFIELLSSEFEDVQEQAVWALGNICWQISTLCWDYVLDCKYPSSLFLQVIFKANTPADQ

SEQ ID NO: 979340 - protein, 48 aa, Homo sapiens
TLFAKKLALHSGMGATSPPVMMASPCLSAGRVLAKAFPVLVAHRGCAC

SEQ ID NO: 979341 - protein, 123 aa, Homo sapiens
MTKPLHRLAQLVDHRADTAHRQQPSSAEDHTLQVLRRRLEVTISRELKPQLSIPFSDQLMLRATNIVCVCSHKPSVVVAADRYPVYAIYTSTAHVGDVTVLTLADIEMAIRRSDVSTSLFIER

SEQ ID NO: 979342 - protein, 246 aa, Homo sapiens
LPVWRVRSFQCLQGSMVPPTETLPTPRERNLASPSPSTLVEAREVVGGNLVVLSYLEVPRGESEETGSSEGAPFPASSHTGPLRVPVELEAPSEDNSGRTAPAGTSDAGPDQMHDPLTAPDTRMEMADGSPTSGGPDVPRPLTTMVGHAIEEEEGVQMPMYCLAIEEEDHVATCKAHHASCKHRHGDDLHRDSTEYKTQNQHDRKQERRTKEHRRRMDNANAIQNQRIQKNQKETGHQTTNQVTGK

SEQ ID NO: 979343 - protein, 76 aa, Homo sapiens
HASHARGLQLERWRRQMPQGLARGLDLGTPRRARGGGSGASAEGARDAEALLLGSRTGEAAGAPLVCRHPCGSRLI

SEQ ID NO: 979344 - protein, 359 aa, Homo sapiens
MGAGTGHPQGKRMAMAATTQTEKTTNARSPMSEAHQNRDPARERPIQHSPRGTTCTEHPNTQPSPSREAQYNTGEHKTYTPQNRELKDGAYSHMADQHKSPTKGAPKQQHAAEQHNSTITHLSPNRRAQPKQSTTTQGNTRQATPTKKRHELDERIATHQRRKRREQTAYRTDCEQATATEPDKSPPSSTNPVDREDTHTTHVDNHVDSHGPGIKTTERRPTKANRGQKWTTHGKRTQQINRKGKDQKRNLRLRETTTQNQKATHTTQTSNNTTNNDTTNDTSQYRQDQPTHEEQTANLNRDATERHKRTRKHTEQTKQHQGIEKRTTDHPRHMTHPHKRDHRAQTAITKTPPKQTAEP

SEQ ID NO: 979345 - protein, 112 aa, Homo sapiens
ASVTMSALPSVLGFSPQTQREGSLGQMGLVPASGGLVRVPLCGEMGDERLTTCQVWPKPPGGPHSGELGGRGEEPPTGICLPATWPHPWKSSGAERWIGRRARGRPQMEEKL

SEQ ID NO: 979346 - protein, 184 aa, Homo sapiens
MAPGGGVGNWGLVPSLSFLQFGTLLCVPSPFVGLGLKKAPQVWTYGENFTRFGVGPSRGLSAPKEIDKQHKGQPTYNITTETHFFLLEHKTYRRRPLISNKTAFRLKTTPLPQMRQARGGTPTDKRFTGQDQWSRTHAGFPTQENTPGATKPQNALWGESSPEIIETRPRWNTRERPVLRNKTR

SEQ ID NO: 979347 - protein, 116 aa, Homo sapiens
MRGEPSARESVDSKEAYNGPVAHVIMQDDRLGPEEECWYHSNEPTRDCTLQWPTARYIYVTKKLLTLYTMYNVFPLDMSAYYHNGSHPWCSQYLHTRRVYTLTSSLVEQWDSLYER

SEQ ID NO: 979348 - protein, 477 aa, Homo sapiens
DGVVRWHGTHDELCRLPKGVLQSSGGPICAPFSGQCASVDAGEDGRVTLTCVPFAAPPLPPRWPSCLALCGSHAGLQERMIDITNGTIQTMGWLREGVTAHRTRGCLAMTVKSAVAPLQQMTEESTKQAPQCRGAYRDHIGNRHDALVATDCLGRSGRHTDTFLLVLFDAGGVWLKCGPRSYAPLAGALVSTEYEAQLGGTWAYLAPGGPAPSFGVGLVSRPQRQPVRTRPLVAALRCRSGGGQSRRSPHRGGNTHSQNTENGGQIAGHQNTREREGESGPGVRDHQGGRQLEADEQREKFTPGTMGSGSENPPTGGALREMKDSFEAKGLKAAAIHTGRAHCTPIERLWGFESSPRADFESKRTDNMPRDGIVKRITGSGRATEQEMETHQWANRRMANTHTENHPAVNATQQPPNYTQRGHTLIAPRIINHQKKAENSDEGDAPTGERRSTNTMGRRNKHRDKSDPRHASSHPQT

SEQ ID NO: 979349 - protein, 300 aa, Homo sapiens
SFPSGVVSKRSCRLLRVPLLVLTPFRSVLVFRAESLFFVAATEDPVVAMWAARAAAVVYRVMEEQDRDQSARILSEVCLMSKIFAFFETGAGKKAQSVDEFPRFVGTLGVQMNYEAVSSLKPWRVGRNMWHISTTGEHTVWWAKIVFPESRVRVHPLPTVIPDQQDGLCLCLGLTGSKTGHAEWLLESPMAPVGPGFTLGQVSCSFAPRCDPGHVLGAGQAVKVLGAKITFKSGVAVKPLIETVVEGASNVGVVIQVGLNGPDRGQVSFNKIFGKKKNSGGNNWAKNNMFKGSVHMRWKE

SEQ ID NO: 979350 - protein, 368 aa, Homo sapiens
GYDTQSVTSNAILFVQDSYGTSRRRQAPCWTSQETSSSGTSYSSEFSKRLLSTYICKGAGQPAVELAVQVQGVRGHQTLETPYFHAQTTTITSYKSTGEYPYTRPRSELTPAWWQLHTEDCMSASYRAAHRARRSRPYQRSMVKVKDNIARDESTNVIPARELKTPRHTGREQHKSTGAVPHRAPTPLGLRHHTQTRNPPKAPGPLPSTPDPTGDRTQPRTKHRHQKIHSTHPTGKTRTTRKRGGTPVAPLNHRNTREKRTIHKHQRVHARPRRTKWTPDKEPKADHNTHAQRRHNHRAPAQSRHRARGTAQHEVAPSANSSDKRNTTHQRQTAQPHSAKETERNHAHRRTTAETATKRSTQGRQEDT

SEQ ID NO: 979351 - protein, 268 aa, Homo sapiens
GSSVSLGFCPAPRHKLRGGALRLPGLRGRAQQGARLCARQGAARPNRPGTCRRMVPTRFALSRKKSSSNGQRPGLQAPGAGPQFRPSNCGRLGVEQSRAYFQFTMLGLRLHTLRTRLTLTYWQENPARLDPRTWSRNWPWGKPEGVWPRLRVGTQSNFSQLGASLYQGRTMFAQDTTEFFPIFIWFRAPRGGVGILFVGNSFLVAPFRRCGLPFPQRLLWLSSHQKMGGGGTFTHGFGWTSYATSPKVQKRWQGRGSPTVGDCYGSGI

SEQ ID NO: 979352 - protein, 67 aa, Homo sapiens
ITNEELYLSILSLPTNLLNYNIHGRRTNQYFISSFEIQHLFPHLGLSVDAEWRHTHVQHTPCNRSAT

SEQ ID NO: 979353 - protein, 59 aa, Homo sapiens
KRRKKKRQNKQHRQKQKEEEKHETTQKEKAKKNRRTKERNKNKKTKAHKRGEGEGEREE

SEQ ID NO: 979354 - protein, 494 aa, Homo sapiens
  misc_feature (225)..(225): Xaa can be any naturally occurring amino acid
MIAGEINTEDSTSDVLFPAHAFVALIWELTAMDVAGEQQLDVEHNLFKQRLDHTMASPGAQRLSGMSLGKVEVTGVWSPELPWNPDPAVKTLAMGAEARRYPVLVPPVKDVREALRRRGLGFKKPEYYLSIGGKRLQARRSQEQKNDGCRVRGSWKQQGGGKLHFACETLQQPCVRHDCELGYNNSATLSARANTVRLSQYSHIIYCRAHTVVLASLLPPSSLSXIREQQIITQPNTTNQHNNTHTNNTHTKHKRHHNKLQTNYDQQAIQPYHITTNKSNTNTNTKQKSKTRNITQTLHYNTIRQPVQAREKRQRRQRENDGDNEEKKRKKERQGAEKRGTETGHENTRDDRMTTRRRMEKRYQGEREQAEQDNTNRRAITQENNTEHHNAEQTREREKIEAQKATRLHQSHYNGRRDRPTAREGGYRAASPSAQRQDTTTERQTRARTRKRPTRREQAKKRDRKASGIEPHTRTAERRQRGRRMRTSNKLKRR

SEQ ID NO: 979355 - protein, 288 aa, Homo sapiens
MAYVALARGRPGSLLLIVPGVASSTSGVRRGFRERTWLPLRISAMQLARASGRAPPVVEVHGVTDGAKPQMTNLGASNGRPEQSTSLQGLQKESGQSSVLRRGTKHSDTNKHTTWIVAVPCWPDLHMEVDQSRDMDVKSEDYYEHELRDKCEGANNTPVFIQRESNGTTAACLASLNLRSEETRWRNRYWLLGPSHYLNTSVLIDAPLNRVKDDYGEQRSTKCRATLYLATVRGQTAGSCSLVSALKSPGSPASNWQSISSNNVLKKLSRWLVSKNCTRQVRGEEKPP

SEQ ID NO: 979356 - protein, 262 aa, Homo sapiens
MTPGATANTRVCSERTNSARYTACAVEQPLGGLPYSFVSYQDPHTSSLCPTPRTHDTPKSTATHDHTQPTQPDTNHRADPLQARDAGGRRRARTQRNHATDAPTTKENSRDKTPATAVKGGQTTKEIRHEACGGQRWRRGNEQRTQGGDTEERDKRRPGERTSRARRSSRRRTRRTYETVCERQQEQKRRRKHNESARNDTTTESARSASTPPSTPHRSGSKKQGTHSTARREYTAHAISGRTADQQQLTSGTAKYDCRTHT

SEQ ID NO: 979357 - protein, 139 aa, Homo sapiens
MDGLPCLWCLVLGCGLAGGGLCVLPSAQRTGSALAPEARHQRQPRGSCQRSGCPSWDQPFAGAVTKNLKSERTLVDALRADVVDRKGPLVTLKQATGSTSDRKTRRADVKFSVLPELSQSLGLKEQELQVVRSIWERKL

SEQ ID NO: 979358 - protein, 127 aa, Homo sapiens
  misc_feature (35)..(35): Xaa can be any naturally occurring amino acid
MGWNKTKKHPNNTTRHNNNCVGRDGPQKKSLQHPXGGRAPTRMATGATVSQKESGEIQWVFPPKKRRGDRGCRNNQGVAVTGFDRGRCISAGAPATTDQHGEEKRRRRHDGREDTRRYERGHEQWQE

SEQ ID NO: 979359 - protein, 434 aa, Homo sapiens
LPPFFPAAGEEKKKNKTKKKNFVGRPWDPCGKGFLINHSRCGRRGSTVQVYRGTRVGQKRGYPREENTGHHANNRARANSLHHNINKAPRGHNRSALLGTKISKKGGESQRGAQLTRGAPLQHPRGGPKARSPRILELYSPRGRGDQRTNSTHQRRGEDRAQRDGRRREGKGTRNGRRERRRREGRRRRARAKRKRRQRGRSEGKREKEGQARKDSKQSSTRREREREEAKTRGAGVQGDGRHTRRDQVGRRRGKVTKEVGGRARERASRGRHRGARRARGPTEGGTATRRRRPHGTGGGGAPREGGEGTGERTGGAGRREGRREEPAAGTGGGEGAGGGGARETGETTEQAQAPEGRPAERGGGRAAPANQPAQAADDGWEEETAADDGRAATNRRGAWTTAPHTKGKEPPDRRRHTADATIERAAGQGGSRG

SEQ ID NO: 979360 - protein, 176 aa, Homo sapiens
KNKKGDITTDTTDIVISLEIIMKQLYAKKLEKLQEMDTFLSPYESIEIEPRSKLENLNRPITSNKIELVIKSLPTKKCPGPHGFIAKFCQTVKEELRPILKLFRNIEDERVLPNSFYKASITLIQQQTDKGSLNNNNNKTYRPTVFYKTILNKNTSKTISKSTSKRLYIMNKWDLS

SEQ ID NO: 979361 - protein, 107 aa, Homo sapiens
  misc_feature (53)..(53): Xaa can be any naturally occurring amino acid
MPGTTRFCRRALTDQHYARSTWPRLPVYVAIPLIRGKSGVARIVAHLIIEANXCKEFFGGVAFVHDAPVQRTWNTSTRVVSSFAEGELRIDIGVMKADAYTCGVPRM

SEQ ID NO: 979362 - protein, 116 aa, Homo sapiens
GIPPSVLNYKSSWCVRSGFIGSEMPASQLQKFVLVENKPRDVYSTPQEGPCWRWKLKENLPCKKNMKKTQEFSKVREERGYLIGSQRKARGTLRIMQEMQKAAIEKKSMHDQEKSE

SEQ ID NO: 979363 - protein, 100 aa, Homo sapiens
AIILAKSLQSSPMRHEATGENNDRYSPRHCPVVNGDYGLLRLLVSWYGLISLPPRASLVLSSSRRPCCLSKSAHDGHGYVDGLDVTHHQARWSVLAHPWV

SEQ ID NO: 979364 - protein, 117 aa, Homo sapiens
REQLQRRGSIQRRRQQFQSVAYFLLHQNSHYAEEKSLQRIREGKDGFQSNLNRSPQEGSARFVRETLFHKKCETKQEKKYLLRKEPWSKSISRGANGKKGGQSRKLEKEAQENDSCR

SEQ ID NO: 979365 - protein, 126 aa, Homo sapiens
RSPNNPPPNTNYLYSYPSQSWQARRHLIQVNRTITEHTIRLTISYYRKIVAIAQSAPVECSKHVTTRSTNLNLITFDSLASETTVIPTLAIITLMRSKPGQKRLNAGSITSYSSTLVGSLTPTHRT

SEQ ID NO: 979366 - protein, 206 aa, Homo sapiens
MGKQKTQQQKLQTHKKTCVCGGRLCGPPLGKNNAFYKESPIPRGVGRHAGGAPKVWRTQLRTMCGGKKRGREAPTRGRKPPGGGQMKAHKGGAQEEDFPSHTPDDITKQKPAAARREEGATQPPRGKRGMVPLVAEPTKTTLSQTKLMQEEESRSHQGDEGPPINTNRGGEAFYYTHKHTRGGRRCPPRSGGETSSEQYLLLDVVK

SEQ ID NO: 979367 - protein, 168 aa, Homo sapiens
CLRELEILYLYQVFVRNMIRSLSSQISDRLRDTSPDMYPPGIIFSRHILLLRTLPITRIMGVKFAFIENLASELPDSGRIYSTRREWQPYIGLDNLYLHETYTTSFSLGFYYRLVMIVALGICVEHTYIPELSQQTRESNERLLKMINSVVTELISEVQEARLNDAVG

SEQ ID NO: 979368 - protein, 109 aa, Homo sapiens
MDMSPLMAPELSCTVCELKAEQEIITCKVVEMTENVAPVDLVRHRSVPGAVCKVLSLPPLLKADGPCYLRKVSAKLIVSTGGVLNRLSVRPNGILAWGASEYDRATSGS

SEQ ID NO: 979369 - protein, 273 aa, Homo sapiens
AEGWEGCAACASPWSPTDYEPGFVGIASARNVTNAVPQGRQGDRILLYACPENCDYQQEATTGASMSTRSRTMLDRIDPDYREVGPRTPMLAADPRTHPGAKRCGTRRAGVLSQVTTVRRPEGRQCAFLLTVVHTGPKCGGHRWAPEVTSFSPPRVVIKTPKIPIVKKKIDTRKPHFVRRRLSPWEEAFLSQTTLWLVAPARPVWVLVGPVVPRRVSPTRGTLWPASLVAWWFSTHLNAPGAPAGFVDHPRVASAAVGALTGVQERNIRRRGR

SEQ ID NO: 979370 - protein, 102 aa, Homo sapiens
MFESPLTCLLAVEILGHRVLLLTLIRWRQKANMNLQHVDSGTSVRIAVPKIYEISRDHRTHSPLLVEMVLKDRGGSYSKIADFYMRTQLNLLKSFLGDLVTA

SEQ ID NO: 979371 - protein, 36 aa, Homo sapiens
MAHQQARPRDTSTGHTRANDTKTDRAHTNTTARRKR

SEQ ID NO: 979372 - protein, 306 aa, Homo sapiens
EAASLHGGGGVQCGVDPCSGGDCWASCLVCPGLAALLVRLCRIALGWELGTAERHGGSSWLLIAVPLLSSECSAQVEFPSSLVGCVQQWLCYRFPSRLHDISWFRTTLGMSRSFFTVWGAISLHSGSMFNGASCNGDVSQVSHRSAGFRDGPIPSYPGGTSVPLKTGSWWYLPGEYSSTKVTQSMGFLRISRSAILFRLSSRGCTKAEELPRLLLVPTPAGFRDGGPGLPLARPDFRGGGVPLAWSGLRDIAFRHLRCPLPEAPLEGGLEGPASPRRAEVLRRGSRFPRGRDVSLGARGGVKGLAP

SEQ ID NO: 979373 - protein, 154 aa, Homo sapiens
MAQLFLPLLPALCPGPGSCCFRAAVLDGDSSEDRAFLLRICGRRSTLQGVLRVAPVTDPLLRSTTCRSPAEPSGCAGLSDGAHTWHISRVPRTGTERLLGGCGEWALQCEQEAYRFRVVLTCVPSVVTDFSLALSELLAKDSGIYRCEGPQRIE

SEQ ID NO: 979374 - protein, 264 aa, Homo sapiens
GWSWCLGPELDLLVLVAAWAPCCWAAVCLLMAAVSFVDAVMPMCLCLLLCAMNVCNGCDEWIVLLLTLCFVCCLCCAVNAPDEDALSCCSDAQMDACGNLSCSVVCLKCTLDVLAGLATGLLLITLEALLVAVYYTYPGAIGAYPERCKHALSKALCLTCLWLLPWELVDCGQSCEGQHFFLVCSAMLDDWTSYDDGHRQSAAELTCLGQWMQLAELRGRHPQLLFESGEDRMLLGHMHLTERRIQPGERAATPTSPGSLPLEA

SEQ ID NO: 979375 - protein, 107 aa, Homo sapiens
SVSGYGTHYYSRKVHILLNGKLKTLMGTVEFIAAGKHMLAVTYSFSQASQNRAQIGIILYHDPQDVDFHVSLGIYRAYHYTYVWVTSSTWLSDMGISSEFRVIHEVD

SEQ ID NO: 979376 - protein, 160 aa, Homo sapiens
DYTRTCDDSRLEKQASYHYYSDAMNLRGPKEPFYISIMQIPWLAPDKGEACLEGYPVGAQCREALIAKQSGHANLDNHFFHSKLNHRICNSAERGSAHTRSHVSPLSELRVASPEYLERFVPSGNKTRHMAFLRSYTCSSSSPYSRGPHHAYELGGARYA

SEQ ID NO: 979377 - protein, 85 aa, Homo sapiens
MGGLSCPGLKGCLLLARGSVPACIGNIPGLTTFLTLDTVHALAHGLGAPLGKRQWRLVVVDHTKSALGLSRMGRGPLATVIGAIF

SEQ ID NO: 979378 - protein, 294 aa, Homo sapiens
ASLNMAAFCARPLRYRARNSVRTRVDEGGGDGGGMVASRKKLRDLLTRRLTGSNYPGLSIEPFDSHWVLCIEEAASGCSPRGSPRRTAMSPFDVTSAQKTCSDVQLNRPNKRSAMNKVFWREMVDVLQQDFERADLSGGVISGAGRNVHLQVLSLMDMVRTSCPPNGDDVARISWYSVTSSLYAGELQRHREVPQAGGIAAAKGGCMAEGGLVTGCDIRTVPGCFLQGEEVAVRWCEVGHGPAKVSDHSGTEGYAAEEVKPGQGARVPQRSGATGNKPGKQVAEGHNEGHQEKH

SEQ ID NO: 979379 - protein, 127 aa, Homo sapiens
MQIPRAALLPLLLLLLAGALPGAAVPGDLRLLCDCLLTCLGAHNLQDADCMCMSSSSVQPDRRYSVVTENDDYTITYRQKLLTRLCARHKQLYRKIDVTPETEQGSNTEPVARQSLTTLRCAQHVVN

SEQ ID NO: 979380 - protein, 148 aa, Homo sapiens
MEHPPYKTIADSHRHQFTDNRIAIESPHDKNARTNYITGVNTKMDKPIQSQQFTTANRQIIVIRYITKPGSQASETTAQCDDNHGPPIRPYHPNAPDEKSLRLNTEQRTKHATTEANPATRKERKHNKNPNTRLRNHYELATDHSKTD

SEQ ID NO: 979381 - protein, 190 aa, Homo sapiens
MSRIGVPRWDWQGVDLGSLWNLGLRGSKAEFLTSLRSPWSKDGRYTGRAGHNKAPQVKFFGIILKAERMGGFPGHLVGPTGGHLPHPSGDPRGSTPRHADLSHKKGGRLNRGVTVQRPPGTINSSHFNSNNYAEVWVPGVVVERNGKGEQRTTTVGTTQGGGQSQVCQVMYKNRPVEQGENPFFLRHTIR

SEQ ID NO: 979382 - protein, 110 aa, Homo sapiens
  misc_feature (87)..(87): Xaa can be any naturally occurring amino acid
DPNERKINPTTKINYYTVTHRLSPLPYRNIFAYDETFGLTPVVACMIPPNIIIRTIPRPCHYSGSTLYNRLFINSPTSFEQSKLCVXSSSANFTDSHGRYQLSLFSLPLP

SEQ ID NO: 979383 - protein, 135 aa, Homo sapiens
GCRERGRRRISEELGRQPLPRTLPGSSTYLVPRAPSCRPSEQQPPRSPYPERSQRRREVAAPHAQRITGNRRYKQTQGYRLRMTLKKENWYSNEDGQEYAQVFKMLGNGRLEAIVFRWCTRGYVTIRGNLENTTV

SEQ ID NO: 979384 - protein, 75 aa, Homo sapiens
  misc_feature (71)..(71): Xaa can be any naturally occurring amino acid
RLHGSEAGWGVRGFLALGRFFKQSLCQQTQVFPFLHYEERSRDQKLIRKAKEAPIQYPVWNKRVLAAIGCXMALL

SEQ ID NO: 979385 - protein, 84 aa, Homo sapiens
TYCWRDDMGGKQVVKGGRKIYACRDKGVCEDLCGPRSSIDIEEYSDTEVQKLPGTNSGRNGNDKWVNGKNVFIRNKDISIKEAV

SEQ ID NO: 979386 - protein, 116 aa, Homo sapiens
  misc_feature (32)..(33): Xaa can be any naturally occurring amino acid
MISQANFSLPSQRLPVLRSLANKASSNKFNYXXTRDWPAGGHLVAPFSIHSMSVGKKGRWLSGARHSKKTLVLDSWPLDEDRRVNSRFLPIKAGGEPVLGTKPYLVTTGTSHGHPT

SEQ ID NO: 979387 - protein, 153 aa, Homo sapiens
CHMQRKYVYQDATSPIIEELITFHDHALIIIFLIVLPLVLVCRFSLSIAQTTSKKVLSICKRLRQLENRLTCILPAIYPSLHRRPIPTHPLHNRRRSTIPPLPSNQWATNGTGTYEYTDYGGLIFRSYILPPLFLEPGDCDSCDVDNRVVLPM

SEQ ID NO: 979388 - protein, 176 aa, Homo sapiens
DPWGLDATAGEMNAPPAFECLALEGEKKIPISRGTPERYPMALFYSTHSTNEETDTLRKLQLNHKFHKKNAQRCLFVLCLAKVSPPTLWGGNKDYFSPEVAKTDGGGFYKPPQEDRPYVTKGAVSPESSYSERGPRVLERSGFCRVLADIEDQAGEGELGGSGGRAGGALCLRGPC

SEQ ID NO: 979389 - protein, 316 aa, Homo sapiens
RTLREARERSGTDPRTPDVCGGVAAMSLVNSFLKGLARVRACREWKCWAALVWGPCGKLCWGGLISGAGGRGRQQGSPAGSRLVGRRRLAGWERDMPHPKAGRSSGRHQGEDGLAQVTKSRDAPRPPARQKLFTLSQSVGRGQRRRDGRGRTSFAEKLLVAPGWLGQTGPWQGQAPREIFMTPFLNKVVTQETALHSEATALLGTLDHNCRQVMGAGIDYRNHRAKRGFGGHPKLLVDNPSQAAGHIQSSFDTWTDRDLWQEETPGCLEHAGFPCEELLKEITGASKGDLLEPTNVARDQAAKLDSRAPGTPRAQL

SEQ ID NO: 979390 - protein, 301 aa, Homo sapiens
DDSVRVYNASSTIVPSLKHRLQEMWRLWPGNPLVPLSWLCPATSRAFLSGPWCLPPLSTATLFWCAQSAVSPCAYTCYQFVTGPQWVGGCLELHPWMLLSGYGMSQAETCVPFPGFEEVGDPTARGAPDGSKILVYHFLAGCLASLVRPRCGLVTRWHTLSGAVQIVCWSQMEAIVVTVLGRACDMLARFVPNVVVRAPGGALARCKSAPIACERVGPQILTPDGEGQLRGAPSMAGPAGTPAGVYREPSSAVQQLSFDHNAVWPLRSGRAPAVFQKARGGRTRIVTCGRMSFLSASSLFM

SEQ ID NO: 979391 - protein, 31 aa, Homo sapiens
  misc_feature (29)..(29): Xaa can be any naturally occurring amino acid
MEVPEAIAVLFQRGSQGVRLLKLPPAPWXNC

SEQ ID NO: 979392 - protein, 85 aa, Homo sapiens
MVNRLQTGRQPRGFPKGRPPAALAPWRAGGFLHNNKKLPAGGKTGPGLEHNLNEEELPEAPHTRGSQSTRGVHKRAPDIKISPGR

SEQ ID NO: 979393 - protein, 148 aa, Homo sapiens
MNTRPTQSSTTSTHTNRTQLTTNITSTTTYQDNHKHVIQHQHSATHTHNNTSYQPQSDRRVRQESTRKQRNRHRRDREQEHRQTSRAKAETDKYIEEREERNQDEQNKAERESGDARTEQTRQNDSGRMRRSAAVAASGGTERLTDHG

SEQ ID NO: 979394 - protein, 203 aa, Homo sapiens
MGIRGGPKERIVARDYAVWFLSTNKKRAPGGRPAASQSTIPKRGSRRGHPGSYTTALQGEVRYITNSARARGKNTKDMSRDEKEKQLSEQRGEATENQTRENNRRARAAETEEATELGDQYKQRGYTGERKGGHKRRDKHKKQGKKTQKGSNNNNCKTPEQETSKRKQTTGKMGKPEKKEPTAETQTTKAREHKTTPRQRENR

SEQ ID NO: 979395 - protein, 250 aa, Homo sapiens
  misc_feature (47)..(47): Xaa can be any naturally occurring amino acid
  misc_feature (189)..(189): Xaa can be any naturally occurring amino acid
VLCHSRSEVPAPETQPAPTTNPPRPRFASLSAEPRPLPPAAAHGHRXPSRSLCPPTCPLLLAPLSPQVWFARPGATGEPGRRLPARGATVDYVPTPQPYRLWGTARLPPPSTQAGSLLTAFVPSVAGGCIGHGGLPLCRGGLAGRQVVPRGVAGLLAEGPRGGHLSSGVGPRRQFQQPAEFQENTPGPXETGVHAWQDAWNWTRLRQVTVDQRLRLHVGQQTGNKDSVFDRKSEQDSRAQGKFRPWGDPL

SEQ ID NO: 979396 - protein, 175 aa, Homo sapiens
LFAQARVPTEMGNVSWHSIMLGSSVVTDETRTWHEGGYKKAHWGTALKANPFGGASHATGIRAATKSGVKPKQGQIPAIYGSVVRVQLYHGNAQGKITSLWLPQLTELADTFHCDGKLMKFWMARDSGSQRDSGCGVIFLEGPDSKVVQVARGIIFGPYSTGTARKAQIHTYHWR

SEQ ID NO: 979397 - protein, 206 aa, Homo sapiens
PRSWRRRSESLDFISAPEPASLPAAVGTSAGWEPHLMVAIRKKRGDRAGNGAVWEDLPPHRLQQRIKFPGGLRSPTCLGRTYIADIEVDRQSSVELGSVGHQQARKTMIDAASLLPGTLMSSSLCFSIESPDSLEKHSCEVTPEVKHFCPNVPIILVGNKKDLGKTSTPGRELPKMKPGARRSEKGREHGNRISALGTLSAQQDQG

SEQ ID NO: 979398 - protein, 181 aa, Homo sapiens
MNRQTTQTRVEGARKKQSKIEQGYKGRTPNRVPQTHIQPDGRITSPRAKPSNNRDKLVRTETKKQANKRIDTRQRTNENKRKHEVNTTTQICVIQQRTTTTADNKSANTETLTTKKREKNRKPKTTGHTHEETHRHGYNTGRSRTTQHTATPNEQNKQHKQRKRTQATRITTQTHQKNTGV

SEQ ID NO: 979399 - protein, 297 aa, Homo sapiens
MLARAGGALGPFAEGLSTGFWPRSGAGLLWDGPRKPPGGTGSVQQTESARGVVGTQNGGRISHREIPWKPCGLGHNSLTSLGVVNDPGIPEFMGGPKEAPSTGKQLGSTPPGWPLNDRGAGCGETPPCAPMWVIIFRGTKHARGAKVSLLKTAVGRTISWGTLFYTTGGPNTALKRGVVGKRGPPAVVKFLVARGFTTHQRLVKDLQKKEKPYVGKELQGKAVRGKNRLFVLSGCHPNTRLPSRGAKRRRRTFSPRVKDVGPRGHIVGAAMFAPYFQQPQKWPVVFDNLEAREQRIT

SEQ ID NO: 979400 - protein, 290 aa, Homo sapiens
  misc_feature (253)..(253): Xaa can be any naturally occurring amino acid
MTPTHEDKYTTDFTTLDKIMKLCMTVSQEFALSVLVVAAVYPGDMSLSTHSYRFVRTMTQTVQASTTHETHDRDSNPIFQSSNCCTTCTLVTPDSINTNVTERCEPNIFALRHRRTISQEPHGKRPLLNDDKKLALPEDEELQLGGAKADRSSAARIDYDIRNNTQPLHNITPLEGSFEAEHSRSTVGNYDGMTIIQATDFDDFCATAEEMISRYGTYNSQVTLHTTHVYHTSIIARQGQEVKVYQRMQTSSXLTANTARMYVEKSNHPNKPLNDSSLLTVNAYYTACPT

SEQ ID NO: 979401 - protein, 423 aa, Homo sapiens
ALFLSPCRCSSLSSCLFVACVCVFVLVLFLFFFSWRLVGAVVLFGGPSVWSAWCGVSWWWWVFAGLRGRGGVGALGPSCSRGGRAAGWNPRLVGRRVSAWRGHVSAGRELLAVCECACAWRSDVGPGGDSCHQWLLVHRGGGSGCCMDVWRRRAGPSWLIGVLVSRSWLPAVRVACVGGGGGPRGGLVSGARSVLVVGVVAGGVAAGVPLCTCARAMGWVCCGRLRSLGTGKCQLGGRGVEWGYGVGVSVAVVDVRGLYGVGVGYVVVGSGSRAQRMGCCHEGLVLDAFAIVVSAVGGGLVQGGISLAACGVMWCRLRSIAMVCVVFVAVSFCCSYGGRRVACGGRPQWMLLVLCRCGCVEASSRSGPCVVDVIWARWHQMELSCPRVRGQPGPSERSSLDCPSNHAGVTVSDMIVDQTHEIE

SEQ ID NO: 979402 - protein, 52 aa, Homo sapiens
MVPIFGTPLGIRAKDARDLADLSEKKGSLEENTKKRPVKGRESEPKEARHNI

SEQ ID NO: 979403 - protein, 319 aa, Homo sapiens
VSSRAFLLVSLFLLVAFCSAVVRFLYYMLVSRVRLHAHVDPLRLLAAYFLFSLIVLSIAVYSRVGSQCVFSVARCRRYCRLCAVQLVVAALVYFFLGVFRVAAHVMAYIAWFSCYLDLLVFYSRLYFLGLLVSLLWQPMFRFFGGRCLVGSWLPLGLRFSAFGILLALVRASDSTVCWLLMLSVSVSARDFCSHELPAVSEVCSFVCRGTASWLSGQCSVCPMLCERSDDRGLPDLSSPYLDIPCSRASIRYMSAMERFRYMDNESHNLRTATSGLGDAAPRYMLSLKSLCYEVDKQDCLQMFASTGDRWSHDNLGFQD

SEQ ID NO: 979404 - protein, 115 aa, Homo sapiens
WGGEFSPRAPPPGGGQGGKGKRGGGGATYKGWCSRWGLLLLLCGFAWGPFGEEGEGVHVRRETFCGRVLADREVAGALWCWLAPSPWCGISFRGWGVSCVYTDFPMNIKRGGFFF

SEQ ID NO: 979405 - protein, 107 aa, Homo sapiens
LLSPSFFPSCLLSLSLAVVCRSASGACRSSSWSFVFLRLALAVRLLLCTVVRLCARVWVFAALFGAVALLWRVGVVLSRSSRLFPLVVSRCAFVVSVLLVFGRLFCV

SEQ ID NO: 979406 - protein, 497 aa, Homo sapiens
NGSLSLFSLFYVGGETSLSLSPPSSLPRGAIRGAAGGTQGGGAVGVVRQGGTHRSGPTTTTLQGQHGGELYEETRNKRERAHTTPERKKKERERGRHKRETTATHTEGRRKGTHTQERKTYHPPSGERSEKIKRRPTKNTNRGRTHNIRKERGDPKKNEPENTPCEGKRKKRPRKTRREPSHTERILTLEREEPNPTETQTKQTKKTTQRREDRTEKTKEEAINHKRHRERDNTERERRTNPRRETRRHTQDEERKNTNDKENKKQRANPKKKKNAPRQNKQQREPTRQTKTTTTRRKQTTQANTETKHQIRKRHTTKKAKNKLKNTNKETITKPTTHTKKNKTRRRLPKKQKHRACSHPSKKTDHTTTKHMNTNTRRAKPAPVGHTTEENQNKGEDTHEGEEQQQPQPGQSTHHQGDRRDNKQRRRNRADKNQTTRMTNHKVMTQPVTPEQATEENLTHTTTQQRGGTKKEHTFDKHDTTKDKEDKTPPKRERIPP

SEQ ID NO: 979407 - protein, 205 aa, Homo sapiens
ANREALRLLTCPAGRGGPGANGPRARASRPLRGFPGWRRPPAPADVDVPEHDLGSAAAPAVEGSWDGLAGGSGQAGPPMGTRRAGSQPNGALRPPAPRFTCAEASGHDKRTARLPRQEEAQPEPAAPWRCPELAWEGVTGARPRELGPVGRPRSLSVTEGFLPPRIINRVHFLANRVTSGARRRGGGAAWPEKARSSYPITDCHA

SEQ ID NO: 979408 - protein, 290 aa, Homo sapiens
MSQDLSSVAVCVQLVSGWIPGYRVYQSWVTCPPYDSVLCLTQVFVLASCDVVSMSIWCFAVSTGSMDVIACCTGPFRRSATMQSLGLLIPCASHVASFQSTSPYRHRTGCLLGCVQARGSLRCVWVSLGVHLGASLEDIRPVLCGALFPDDGDDGVRVLSSRCRLYGKGYISNGRLSITLTAQILLIAVCDVLASGWLSAEWSLNGPLGLLGNLWGTHGYMWCYVRSVISTPGYGVSPDPMLAIRPRGTFGWSCGALDRWPMWWMGLLLAVVVRPGPWDAGLVTLTWRRM

SEQ ID NO: 979409 - protein, 40 aa, Homo sapiens
MAGPGQNSSRRALGQVFSEPSLLARCKPGGPKGGENRNRN

SEQ ID NO: 979410 - protein, 117 aa, Homo sapiens
ACCFSFSPSRCLGSARLSAGLRSSPPFCWHCRLLHRHASPVHCFALLPWLCSSRCRRVILYHYSISSPFSSRGFIRVLGASWTGSCLRVSGRPRALLSSLVAPCSAITSVPPLCAFN

SEQ ID NO: 979411 - protein, 87 aa, Homo sapiens
  misc_feature (71)..(71): Xaa can be any naturally occurring amino acid
MWSLGRLYVVRVLYNNVVYPAMKNRAKGPAEYNQRSNPETSADLPFGKARKGVRMGIGIVVEMNIILGPRXHDGRSNQRCPCVGQRV

SEQ ID NO: 979412 - protein, 266 aa, Homo sapiens
AYTQAFLTQAAEELRTPLWIGLAGEEGSRGYSWVSEEPLNYVVLAGRGAASSRGGCTYVDVDWGHGRHHLVCDTKAAGWLCVGLAVGTPSLRRRISLPMAAVPWGLVETSVGWIPFRVGTCVSFHMVAAAGPQGGCRQARAERAGGAVHVVSVDEMENVLSWAAACRAMRGKVAGRLAGDETSTLGIGLLVWQGITVVELVQRVGPPGLGGPSDAEPQQRATGFRAKLGYGARRFGATSMGVAEGFLVSGQSSSSHTGFQRTSGWC

SEQ ID NO: 979413 - protein, 292 aa, Homo sapiens
LFCGILYCSCWSDTRCVVVCAFWLLSFCVVLAVSSSCCLVLLLLSFWVCPVFLCISSVCLCVHVNSWFPVGSSVSCVASVCILGVSFLFLPFLPVLCVHWYVTVSRLSALELVPSLDRFFCFPSVVGMRNLVCVPGASLVFSVSVRDLPHVPAFGAVRPSRGLVLLRLLSSHLSRSVAFHGVVSLYLSFHVTHVGPYTLALLIMARDSRLNLPRSPVAIRPSSLWYVYGWLVLVLLGCVGFAWMDWLSPCLGHACLGSMHACLPLFGLHVAVCVACGWKLTDAPYWWSTPCA

SEQ ID NO: 979414 - protein, 385 aa, Homo sapiens
  misc_feature (81)..(81): Xaa can be any naturally occurring amino acid
  misc_feature (188)..(188): Xaa can be any naturally occurring amino acid
MVTSEGGSRRGLRWAKLHRPRGPPRGCGSWRRGGGIQDRVWRPPNRGTAGGGAERAGRKPRGREALATFGVARRGVPQGAXRYSNSDGRPAGFADAGALWHWRRGGPPIGGKPGVNCARTKKQWGPHLCRKYGALGDQKGGLALEFVPLASGSGHRGGHSGACPKWFPIVAIHLRKGGAHNGAGYARXTFLCESPLCEPLNQANVPLSTSETSGAEGVNCVDIGERMGLYGNLILKPLGGCGVMSNRTRHKPSWVDIQPIKGGTVTQGGKEGGQLFSYKTPLKRGCWAGEAPLKKKPPAKKREERGSPQRDTGVFAVMRGRCTRGVPTLCGAEKGAHPREVLTRHEGGTIRCIHSGGVNTRHGGLSHTEKTQGQIRRGEKTPTRE

SEQ ID NO: 979415 - protein, 310 aa, Homo sapiens
ALFCAFSRAVRLWSVVLSRLPFRLFCFLSLPRSRVPLLVPWLSVRSGGLASPGRVVPSAAVGGSVRVSALLCLFSVVWFAAVFAGRRLSRAAFDCPLLSLLAAFSVCCRSSSFFLFLFRSFVFCLVPSLVWVSCSLYLFVLLFHLCSGVCLWSCRIAMLVWFNLPIRTVLAIRCTLGGTGRHQSDLYPRHADGSLGPPEALAMPRWRSVALAAIADAVLRGSALLGMTVLDAEHLSLVGVSPQKLCLGLGPSAMSLSRPGETEPIHSVSYDHVARLPAHGPSHRWPLEGVGERPSYLVQSPQAEVLTAPA

SEQ ID NO: 979416 - protein, 82 aa, Homo sapiens
MVLKKEALPKRPLWEAPECTCGDPRKKEEPWGTKLPRANGAFHQAAQTDMWGTNTYQRGTNHRVSRTTRDDIERGGTHYPQL

SEQ ID NO: 979417 - protein, 344 aa, Homo sapiens
ALFCSSCVRVSLSSLFSSFFVFPLVCLAVVFCFVHLLPTVFGCVAVQSALCLFAFVTLACTLFCAPVPVARGHVHLDLGPGFLVHPHPSALAGLRSPVRCRDGSCHRAFPVSAWAWSDLEARPVWVSFPFARPRFTPGRRPSGLRLPWHLPAVRSPIPLCRPLVSSPAATQQVADFQRHGRRRCSDKLMCSTWLGSSRNDLALPRSTKLALVSLILTPHIMTRATEEYGGDCTRCPRVNDDKRGSGSRIPAQPTSDQAEIGYVHPHWLCEPPCWAVSSGSGFLSLFSLGPADWAKECPWSSYRGQHTEIFLDIQIAHMCCTTPFRLVDLELSGMGVGPQMLGPV

SEQ ID NO: 979418 - protein, 396 aa, Homo sapiens
  misc_feature (98)..(98): Xaa can be any naturally occurring amino acid
HKRSHSPSGSESEEEERAPHISSAPPEGVRRRNSHRDGHGVVQARRVRRRLELPVDTGGGCVLRLCRYEGSSLSSRSMLGSAASLSLSRKTHGNPNKXRRAKEGESTCKIVTLVSCKRWRTSTAVAQRHAGANGKTPSEEEKQGIEEHRDHGDVSQARARDVPLKPVPQRLGATSQRGERLGVWTSVEEKVQRECRVELGEAERGTVLTVSWLHLTLMPNELFLLCSGSVVEAMGSLGHRSCVLSLGTIFAVDLDRGGSTYWLKGEPQSTSTPFVGGPNQGYALACSNGSPTPWNCRQSLASDPGQRMGVYGKVRGGLMPFRMTLVITRGSAGNQSTGCCDANRGLDKGPGSQPARIGAGTAVNWAYETTNFSSPRTSGDGQLCRYITSISRTNRN

SEQ ID NO: 979419 - protein, 500 aa, Homo sapiens
  misc_feature (61)..(61): Xaa can be any naturally occurring amino acid
  misc_feature (102)..(102): Xaa can be any naturally occurring amino acid
  misc_feature (383)..(383): Xaa can be any naturally occurring amino acid
ALLVPLSHHMRRRRLPGLAICPTGHLVGPHYSFKHDMGELARSPWQMRRDRSSAVWIGPSXSWITDQPRRTLHSHAPHTASYDLRDLRGNPRRQAWSIDSLXITGPLEQRRSRRCYDHTIAACHTTWQNVCTGYVLRNAELIPLGLYGGVDSTCERNAKAKCVKAESRGAAWRRADLLVGAYFASVLYPRYHLRWSEIDPIGFPPSPVAQAVGGLRRTLSCESLRGPVPSPIVRRRIDLLVATSVRAMHVALRLVGDGPEDAPQGFPSAPIHESLREGGAAAHWHGYGGPDKAWARGREQRGAGVSVEPAIGLWIVNPRVALVAPPCSPPGHISGFGALGRGGRRRPILARGVGLFARFPWGAIPQGAQNKLALGIESLEFRXLWGFSLGPWSPTGRVWRPGKWRVGSEAAGEGRGPKGGADSGGQSQNMALPKQAGYHRGGESGQNNVCDPRTTEGSYHREFTPTGYKHMGKTHCQTQEARNDTGEPFEHTTGGRGTGA

SEQ ID NO: 979420 - protein, 442 aa, Homo sapiens
LLCDVPRALLYSFYFFCAFCALLGSGVVCHYSDFLFLSLAFLFLEVVSLFLCLLMSLVCYGVGCPRLLVASVVPSAVYVVLGSRSAPIFPFFVPLLCFLVCFVCSFVSRLGCALFDVSCVLWFSFWVADWGDLDCRQGWCPGLCLVPVVLFSLLFGVLVLCSRVGLIGVLRCMLLLWRPVSVVPYVSSVLFRFRVPFSFGRVLGLFVFSCSPLACGCWLTLLGATGSVCCPLGYLSSRLGCCLASFRSLLVVQWPVMPLVSISPRAIVSVGGVCIPVFVVLPCRVLGSLFVPWSAPAAGRVGIPCSVCVARRPQALIAGFYSSLVVLFMCPSPASSPFLPFTRSLDDVRCTSSISLWCSRLLYASRSRLFAALNGMCAPESSDGHVECETGAVACSWCDGHTVPRPLHPLLLPRNAYSLALLLLVLCSKVFLCQSRCSSIVQ

SEQ ID NO: 979421 - protein, 437 aa, Homo sapiens
GLHPPRGKETPCCNKVSSARARLQDTRAQNVAYQRGHRPDDRERKIRKRRRRQHKEDENETKTRRRRTKKDEAGDEAREKEKERNDGEHTRRRHGTKEREGERREREEQREIAKNNEEKTHNERGWRDGERSGRNNETGEKSNKRKREQAERETEDRKTRTDEEKRTHEEKDAERRRREREKKNETTRGKGERNQPSTRAEDGEEQPQTKTQRKQPERGGGQCGKSEEEREGTGESGEEMKSEKAERKRAGRESIRRRREEQKKREKTEKGKDARRNANERVETKQQRRQTRVEEGPRQRDDGEKEQDERGRSGGRAANTHTNTKREEGGGGGATAETAEAAQRTEREMKTRGRQEQRGRREKGKRRRRDTRKRRGRQEDEASAGAVREDRNKEERRAKQRRRDTKTHSKTATSNQRQRREEGGEEREEDQGSDDIR

SEQ ID NO: 979422 - protein, 125 aa, Homo sapiens
MYLEVGQAGLELSTLLGGRWGEQISVSVRSFETEAGDMGPVRSTELRVLRSAQVCRRAAGGPASLASAEGERDIQHGTSECAMRKQRRRPYELPRPERQAWVAQDETATSEHPKATENEDRAWGD

SEQ ID NO: 979423 - protein, 295 aa, Homo sapiens
AVVFSSGWFLLCSLPFFVWPWSPSFFLRLFLSCFVGPFFLVLFRDLVSLLSFVLIAALSFLCRFVASCYVGQVSCLSLYYAVLCVLRVWTRMVVPVSPGLVLFYAANAVVVSLVARCLLSSMIPRFLPAPCPYPSSPPAHPLGQQLPVYELYLLGCNVAIWLWFGHSGKNDLTAITDIHALLDLCQPVSMCGYAPRALCCRIMLAPPIVNGKKRGMPGPGVPLEPDVKRADSFLFLCVFCPASFRIKLDAQRISQSLAWGQESSQQDVRGLRASGLVVPLKPNSGPWPLLASLAL

SEQ ID NO: 979424 - protein, 125 aa, Homo sapiens
AVTAMFPGSSPWRGRGHIWVCRQCVFAIATKRGGALKKGPYALGHAVYERFLCHMDWKARGTCVMLGHLSNRQRRVHCYLWWALGSGTSKMLQCRILSASDSMMPAPSVLSKAPVLYAGAVFYEL

SEQ ID NO: 979425 - protein, 182 aa, Homo sapiens
MSLELLVMKALSVGAGERQYRRGGTLRVHMYPGCSPECWICDRSSGMKDRLEFWCTDVKSMEMLVEHQAHDILTVGPPGSPSSSPLTHLREAFARPTECWLLRRSDIEFRVGGFGILSEVQTVLALMTGLSLMGAQAHREEVFFDGSLLQRCGRSQGLMVITGEKERGQRTGGPLKSVYSEV

SEQ ID NO: 979426 - protein, 490 aa, Homo sapiens
  misc_feature (443)..(443): Xaa can be any naturally occurring amino acid
MVVELGVVPDRRSTDGLALQHLGWNLHAVYASTSEGQSLPRESVIISNRRVFDAYKDAGEAYMCDLRIAREPALSCAWFAMNYRQFAPRGVIEVNATTSFHVGGDHCATLARLQLVGTSGCLACRASTWDGRGTPMGFWAYMVRYDARRTRQLLVAATRAPHYVICGGLESRLLPSHADVNVHLTLVKASGHGALEVSGSGGTCHRPCPLVGGKARWSVTLPTFGARLGPFGAWFLYQPFGFAECFRLIFCCAKFSPQLMPMGSTGIAGFFNFRVGAFQFIPPLEGAFPLWVGLGLPISHEPQLAFGFFWGALHTLVTEAPGGMSRPIPSWFPDRRFSRRCQTDGERQAAINASRTSPSLGIVFPLSRHGRGWGPWTRTHGGSHSLPTTTRGFQEVHTSVRCNFQRGLSFARATQLFWRQGRVTVSLTVPVDLLSEKPPNLLXQDKGLKRELTTKTRHNYKNKIPNTKQRGVNNEVKTERDDCHNISLVR

SEQ ID NO: 979427 - protein, 363 aa, Homo sapiens
  misc_feature (214)..(214): Xaa can be any naturally occurring amino acid
  misc_feature (219)..(219): Xaa can be any naturally occurring amino acid
  misc_feature (235)..(235): Xaa can be any naturally occurring amino acid
  misc_feature (239)..(239): Xaa can be any naturally occurring amino acid
  misc_feature (268)..(268): Xaa can be any naturally occurring amino acid
  misc_feature (279)..(279): Xaa can be any naturally occurring amino acid
  misc_feature (292)..(292): Xaa can be any naturally occurring amino acid
  misc_feature (356)..(356): Xaa can be any naturally occurring amino acid
MYGTSSFVKSQMSFNRSAVGAPLHGEWYGRPHHREGGGNHCEGPSNMKNLHKETWRTTRMYPLRLYPKHWRIKPTINILIFPKKGHLRIPFVGTHQGVNQTVIIGGRKLAFDREQLCDGFGMENGPIYTSWLVFMDSSRHSGAARGARRYPATGYPPQQDIPYQIYYPRGRVSLLDDKWVDSTTRILRYMFVLAATSRQAWYVMRRTRMDDAAXYKEMXTYESERVTPTQRQRAXDRVXHPFINIFGPAGVCVFHSTYRRRGPPRRDXSIITYSDQPRXTMSDRHAESIHVXNIEEQIPYTIENSGDVRTVVEMCVPRKQRQDITHGQQAEGEKVYNGRYRQSAGAKHTNKYTSEXSHTKTFE

SEQ ID NO: 979428 - protein, 334 aa, Homo sapiens
PARFSATLLLFVVVLGFLSSDIAVRFALGRVYASRVSLFGVLVCGLARAVASCWSCCRAGPLRFSSGGWARVARCPRLVILFAFRWAALVTLPLPVARWDVVPCAIDTLVPSVVTPRVLFRLSRVVVSPGAMCFVLLNYAMCSSSRLCSSLCATPWWVPWRVHTGCLRMGCPRRCSFPISSMVLLTSIPPFIGRTSFGADTCASVPSQTRQYRHYGFSLNALRMPLVFRFSSFSAQSPSRMPQRVQACSEHPATQTQWYYKSRSLSRSTPTQPAEACSIHPSREAAPGCCELVEGPGWTLHCGSPLQTWLAPCIHRNHEWPQNLSGSQGLTCGG

SEQ ID NO: 979429 - protein, 220 aa, Homo sapiens
LSCVSSEAVSRGTSRWSLDSVAAVSDWSPVMACCPRSQLRCCQASASKCRQSGEHLVTHSLQNLLPTCRMSMSAASPIPRGQVPWTSLTVLLGARGAKSIKMEVVFCDGRACCIDVGSCEFAEARAYGRTGLVRTGGMGAHASVQPVDVRAHGEGWRTVMWLGIRSWPVDGCGVLNVVSGRQVWETSVRGAGLRPPKRSTVSRLLCGSWGASEMWTLYAG

SEQ ID NO: 979430 - protein, 432 aa, Homo sapiens
FFFARPSLCFPLPCVVCFVLVVLALGGCVFSVGRSPCVPVVACLSSVLCLRRPVLSFPFFGRVLLVACVLSGLLVGSVSSGWGLRLPVRVGLRALGAGLPSCSASFGFVWCSRRPCTGPCSLLLSSVAGGRGMFVLGALPSCPLGAGGLSCAGAVLGLCLPVGSRFEARVTLVAGCGRVVPAPSVVSSCSARVASYGRRSVSVSPLSRACDAFLCAPEFGVWMLRVVNPGAPRGDACVCSGCHDYWCSRACVLIVASDLESPQRKHKCHYAGLRVKFIGKSSHLKAAPENIYTGVEARRLQSGRTATKKFCALRDVAGRVHTVTHTGDEEVLAAPSVEIALHALADLPVPSTRRLPRQSSTLGMLQSARSWGFAGPGSLERLSAAPTSSSPTISPVQLALSPPQSSEHCLLPPPREFLAVPFVIRIEKRELD

SEQ ID NO: 979431 - protein, 189 aa, Homo sapiens
LASACLLLCCALFCCVCVSVLCSCVLLVARLCRSRLAVSCLARSLVSARVCLCSVRCVALPSSCLSLLSCCCRSCGRPSLSRCLAACSSLSCLSLVRCSSWRRFNSVSSVDSVVPWLGGVPRGAWWSFGLGVCVFRAAGAVSWRFFGLAFCVGSLPRVGLMGVGPRGLPSSRCVARRSLLLLRALAPLV

SEQ ID NO: 979432 - protein, 135 aa, Homo sapiens
MGGETRTGTLIEAVGRGAERERTPQALRIARRTKPLVRRPDWVRADNMTRGAEVCARWGCGLTGGPPILSSSYLPVTVPSAGAGTCLRAVCAAGINLDGYLEDLLTARVRCDCQRLCVFMLGQLQFACTDAVDAP

SEQ ID NO: 979433 - protein, 182 aa, Homo sapiens
MSSQVVGIEPLYIKAEPASPDSPKGSSETETEPPVALAPGPAPTRCSQATKEEEDGEGAGPGRAGRWGSLVLGSLRKRVWLVCGDVAPGATIGVASCEVLKAFLQEDPPGGASSTACPGSNECGDHQGGDRNAWQGWRFNKVLRGGHASTEGVRLERGGGGGRIHSGGGRGPTAFRGPYRLG

SEQ ID NO: 979434 - protein, 268 aa, Homo sapiens
GQPASALACARRVQIAQSTMGNGDRCGAQRIGSYGRLVTQWLLLTLVKWISLSITWIAVRIEPSNYEWCYIVAQVCIPPTGRIVSQWRTIEGLRKAEKLMIESDGRCRINICPGCEIPPKSSGAMLALSTSWSPLDVFHLHDGGRLGLICRGEPTRGSIIIVSPSGAVPLRFVMGVNRCRSMYNRTQDRSAMHVHAHNPTCLVPLAKVIHDNFGIVEGLMTTVHVHHCIQKTVDGPSGKLWVMAGALQNIIPALLGCKAVGKVIPELN

SEQ ID NO: 979435 - protein, 530 aa, Homo sapiens
MLLTRIILTTWTPEHGGHGHRSSSCIVASNRTQWSELIGLDGATLMEPWPGSRGCAALRVGLVLAYKTGPSQGCTSIGTTQHRKETWQVASIARGRPYSLTQAQRRQYYELVRYVIGNQKAGSARKNPTREAQIMHVALGIMEHLLIRTCAEHHYTLNPQEYKRHVSMANSEAWIISVRTTRPPDRDLTLPHHNSPIQVQFQVGGIHGTWVKASKFPIRKDIDWNPFIARRQSAEFGRRNNHPPQYCRNYTDRSTHQHSSTLGSHGTWRHLKHIPNERTRSTGAHAYGRASTTWVIGRIWVTTIGLVRRAPIWIMADHTPMNRRSEGKQAAGNPGADNVQLWDSPVSSIGASRKKGLSPVGEHRGIGVRAPCWTTTESIRSSAIRTSTTKGSDTHFKYPNGAAPPSPGHNHEESHQRECELTTQHKTARRTATNKTGKYGALRDGVRITRRGIKTIVHPGKVETDIQHMALPKGSRTGQQTTRSAPDPVIVAEGRPPKKNYQQTTDRNHPATISDRCEKNQPHADNAAYG

SEQ ID NO: 979436 - protein, 166 aa, Homo sapiens
GCLCCFVVVVRSLCVVWSVLCRVLCWYSHFASLLLRCVYICLAIRLGASVAVCFVLVSSPFCCLYQWAQARVLSVSLCVTGSAVSAILVWRVAGPWVLCSCWLLFRVGLLVWSPSASGMSLLPCFVFEKWILTWFYMSVLIPSLRWACWVPVWPGHITRTFWKRHG

SEQ ID NO: 979437 - protein, 459 aa, Homo sapiens
MASLVLLVGPAPVALCVSRCCLFVAVVVVSALAHSGLFERVFVVPCCSQFGGSLLLCLVWWCGRLWSPCSSFAPRGLFGRVSLFVRSVVDCIGARPRDSSILTSLWVPLFSPCLGSLLVCVGSRVSSRWLPLRGPLLHAFSVSLCPPVFYPFCARALGRVPWRVSWGVASGRLRLPSQGGFPVLFVASPLVACLGAFPGSLRVCACSFTAVCLVVHGVSLGAHGCDPPQGSEGLRLAWSCGGLLSSALDVLPCLACCPRVPLVAGPCVFFAFVFLSGFGLPAFCGDRFLPVAQGSWGDVPLMRTVHRDSSWASRVCGCLPCGGRPLARGSCRGSRTSDPLVSRLLGALPLRFPRHPTQSSTASEVAEIPRRHCSFRGGRDNPAKQKATHYAPSGRADYERFCVRGSIELVSSHVLLRQRWRIGHSIGPLDHLYSQPSHKAVAWRAARRAQRNALADTVA

SEQ ID NO: 979438 - protein, 218 aa, Homo sapiens
WAPGKNRFNGGGFSPPTKIFKKGGKEGGGGGGGRGTTPPPERTRRALLCEPDLRRRRTRVEGRREHERRAQHYPRAQHSSPTGGSRRTGESSKVLPIHIYISQAKTRSKKKTMYSTFFSRGEKKESTLTIIMMEQKKTAGGGGRRTAWGSLCRGGGSEKKRRVNEERRKRRTTKSFERTTQLLRCPHGGGINGAGAPLTGRRVSIEENAQYRALVVHR

SEQ ID NO: 979439 - protein, 501 aa, Homo sapiens
MFAVVATYHGFAAVFLLFTFMCFACVCGALYRSSSVYVYLYLRLSVRGALPSARSASVPRVSLCLLFMSFRCVVPSFGLSRLTFPLLRLLCVSSVASCRFLSVCAPRCCVLFFVVLVRAPSAFVRPLLSRAVVSVSVCYCSHLCCFRSAFAGSLLVFVAFCFLLLCSPSRVLSLCVSSSWLSYLPFNEWIWSSDPFCDASLLLPCLCHASVVLLWCFAFIVLAGVYSCLPVSEFFGSPVRSPFMGCVLLPDRMWIRCSLLCLCLPLLFPLLMCLFSLLRVIFLGVLPFVCPRLVALRLHVSSVWCIFARGLRIFRLLSPDRLVLGFWSDDDWALGMAGLLAIACPVRGPPFLAPEISLGHPRGFRWTHLAMAPCMLWSITGLCSGSEVSLMLRACGSIPICPWIGGHGQVGWAASVKECWSGCSISVPLHPGPIMCTPVPGWPAPTAHVSVSSLPALAQPHATLVPVALPDVVSRLLPPGAGLAHPPLPSTHSPGCFIAEF

SEQ ID NO: 979440 - protein, 272 aa, Homo sapiens
  misc_feature (1)..(1): Xaa can be any naturally occurring amino acid
XAARVGCVLRVVSFLSSFWFVVLSPFFFRSVVRRPGYFPFFAPCLLQGCSYYRVYVFALYGSTPLQCVLAPLAFRRACGLARACTPRLAQVPTFWIFAGSRPFLCPESADELPRCVVRLTCPSLVCTLLARTRTPVPRVRAGKSSSGLGSPGPAHHPVASTTRRPGPSRCARVRLALSPTRITCWSTSARHTGRASPYPCTLWRTSCSPATTHVAQDTTRAGPHTAGVVARVHRRRAGPAQVAAHRATHPRTTARSRAPSRTGPPAPQPLCP

SEQ ID NO: 979441 - protein, 119 aa, Homo sapiens
LFVFFLSSCFLFFCFSVPVCDRFVSCVLSVSLVVYHFVASAALSSRSSLVALLRSVSVRLVGLSLFSRLLSVPCGVLVLFSTACFVVLCASVCVVLVVSLLSCSCLVLFLVRYSFPFGF

SEQ ID NO: 979442 - protein, 216 aa, Homo sapiens
MMSSPYQRRTSVNIITRMTRETVHTVIERCPKPVISLPSHGAYQLAEVLDLVHRLSTSGYCPQECFLSRVKEVHRVVLAANGSEHPACASPQVHLGNQSLVNELAFILSRKMMARRGPGQWVWSVRGVPRQRGHAMDAALATWRPRFPVKSPVADRQSTNGQPSLYFTCDHSVAESLNLRGVLEHVACCRPIDLVKYRSRPRLRTRKLKTVTFSKL

SEQ ID NO: 979443 - protein, 314 aa, Homo sapiens
FLGGVVCGSVFSCSVPRGGRVALECLWLFLRVFAGLGLLLCVTPSWRCPRAWVVSCVRVRFTCSDSRGALVLAPLSPVFGMGLRGTHCVGPVFLRLMCVRRFVCVWWLSGVRPLSVLRFRAPIVFSRWPFVSPCCLGRCGIPRFPCVWRPLRLCIEFVGTLFPGCRSLGHEWFVKAPEDVPSRRKVTTLWYSRCLTRDWAVPWLLAFIASTHAVVWFPWVPDVGRPRAPLPPSPPVRTPPFARSPVQLRPGNALYELTLGCNRAHLVWLWTPVVTKINVLTETMRCRSMQPASSVDQPRACSAHHVAPPKSTGR

SEQ ID NO: 979444 - protein, 136 aa, Homo sapiens
RTAQGDDRKKSVGYLTSSRSMCSFVTLVFFTSVPHGYLCRCVFSVIPYPCSCSSVSFCRVVSLLFSCFSRCLFLLIVYVLCSTLLSVVRAVVRCFRACSSVPIVFFPVCCCVFSLVVVLRLRLLVLSVCFSVAVSA

SEQ ID NO: 979445 - protein, 249 aa, Homo sapiens
MSFVPLASGPVVPFVCALCAAPVPVNALARFDISLMFDNTEIAVLISLIALWCKACRTQLTMEVLAPFLRDRDPDTIGDGPCTMWEQLSTRAKVLEKFTQTMTVIEARLFCLLNRRMLLSLTSRQRTWTTSCTDLSDRDDSRLHREQLFAVSHRQAPGRERIGTSALVKSTHGLAILRTPRTRKLPRTHPGSSDEQPWRSTAQEPRDYYTSETEYEKSDNVYCFFSKNITVIDVSPKPLTGESKTSDLY

SEQ ID NO: 979446 - protein, 136 aa, Homo sapiens
MLWCSMFLVIVRPGLSGRSGHCVFSWLRCRRASDVRGAPSFLSIPTLFSVGVSRFPFVCLLSVVNVIVVALFVQEACVPWFLIFLMVAVRVTDISSSFRLLVQTSMLVYCRPHHDLIHVSPVERCPQTTRAWIYDG

SEQ ID NO: 979447 - protein, 446 aa, Homo sapiens
MDFGASCIVCGFFVSAFWSGLCVVLFVPGFAGLSHSFYGCLCRGGVLLLICLCCPCSSFWSCCVLCLVLCGFISISGACGPHVGLACFAVLVVLLLWPVVHMCSGCVVSIWDRRMGRLVVWVVCHLWGVSAPGCSCVIDVCVLSPVGHWPGLSWSLREAIVVVVVCRAMSTGCVYDPVWVVAPYGALWALFGCMLWGPRRRGLCVMFVVGIWIRAVLCSRGGYGVVPWVMARDVGMRRDGAVLCSLCAGGCPWQVSAMAAGLLALSRCVRRRCSMLTSVEAVPALCLQDIASLRRVGYRVSGQCASLVLLCLLGPSLDFACSSPSKYLFVCVGWYRQCRPVGLVQSWPLGKGVRAAVGSPRNSSQKPTVLIKQTQDVIALSYGLVVQYSQQTQLLAAGDAQGTVKVWQLSTEFTDIIGSPGRLRTWTAWLAVVCGLRGPGKLRWEP

SEQ ID NO: 979448 - protein, 103 aa, Homo sapiens
QVTRYEELAMSKDRRLDNATWLSEWPFNRLNQSETIPMRHWHGQDHLAGLKAKNGDPIMFRDASSVGPPDTVSVKTRRGEIPVPLPLKEDFRLILVKPIPFCL

SEQ ID NO: 979449 - protein, 254 aa, Homo sapiens
MNVWAWFALAVVLWWASVLSVNTVKVINCNALLIEGVTVGVCWLCSQVQNSDAKPTPCKRTRGHREGKDPPLTPAATASSSRHRTASKGDSANSPVGLRSRRRGSGIRPQEHCAAVPMALGSEGTAWGNSCLAKVIGRAWPVDVGPGAGPGQMSALLVMTPSDYKGGKTPPGLSARALGPTTHSDCAVQCRFWPYVLEEHRGRPEAHSSSVPHMTTHASRQSDPEASYVTTHTPFPSSPAVTWRVSHDLVVLFS

SEQ ID NO: 979450 - protein, 577 aa, Homo sapiens
GRPLLEASPEPAPAPSPRVAERGCPPQPCRASGAARAHPWPAAWATPRATAPPLPPTERTQATSTHAPLSCTGQQPRQRKQQHPRLTQPPLPASHPPSIACYPAAAPPCAHPDPAASPAPPTRSCLPSLLPSAATPAHHSPPSSSLFSPPSRPLSARGSPLSSRLHPTPPGCLAPRAPLAPPPLLLALPGPRRRAPPPPPVAPASAPLPSYCYPAPRPLPGLVPPTTWLLPPSPPIRPPPRPLRTSSWPPLAPLSLPAPPAPRPLPCPPPPGPLPPPPSPSPAPPSHPSPPLPRRPSPAPGSLTPPPLPLSLPPPSPWTPPPPPLPTAPPPQQIHSYPHRTGATAASETHRRAATSHPGRGASPHAPMPSPASPSSSPLSAPSVVLFSSLRPPCRAPQRPPPPRLQTFAPTLPRPPLPTHRSLRSFWRLHTTLGPRTHPHPPRFRPPHLPRPPTPPPPRTPPSHSHTAPPPTPTTPLQPHASPPPLPQPPPPPFSLRPLTSLPSPPSPPSPLSPPLPPPTPPLIISITPFPPALSPSPPLSLLSPPATTPSTLHSTLPPHHPPHTPTPHPDPPSPPP

SEQ ID NO: 979451 - protein, 67 aa, Homo sapiens
RLWSKYRLVGRLFGVCLVIGALVSVLSCVSLVCFSVFDVDRLLVWAGLAFGAGICRLLFLPVLCFFL

SEQ ID NO: 979452 - protein, 330 aa, Homo sapiens
SPSLEESAGRGTAGQGPPTAREAGHDCPRGPTLMSRALATAVIKGRPSPCCPHSRNYWDSASPPHRTVNAHVQHSPPMPGLCSLERLGPQASGPATSLFSRGLDPSLPSRSHHPMQTLAPSGDTAFYSRGQPEANVENNQAMEFEVCMPVCLVTTGFSVRTPAGYGHTRTWDSGKVGTILSLSGAPTKAGKCFEEPGLSRFLCLVSRVVLCPMPHSPQCVHSLVHMPLGGLNTQSCPEADTKRFAPDECQVGSAFTPTLPRGAGLPRVCLLTDLDEVRGSPIRAALRIVILRSFACGFNFCILVITSLIQDALYRTLFGDAHSTFEFSYY

SEQ ID NO: 979453 - protein, 282 aa, Homo sapiens
KRPLGPGLSELNLREYLYHRPVGCAPALENPAPRQFAIGPGLQDVRPQHATGDGHARAGPISHGGHHHDQAPTKELTFLLLLTAPHPPAAAPWRGGRGYWSGRAPLHAPEGPTRAALGFSVLTAAPSPSYPPELQLRFLRNGLADGTGQGDFGPNSDGSFHASVVTNSTKVAIEHHYCSHCADTWGWRSPLKGGAGISSQVLRCFVMGIVIGVLLLTAAAVGGALLWRRMRSGLPAPWISLRGDDTGVLLPTPGEAQDADLKECKCDSSHRPLSHHAIHDGA

SEQ ID NO: 979454 - protein, 140 aa, Homo sapiens
FLCSVVGSLSVLVSGVGSSLSLVFSVGSFAVASVLVTFLCFVCGCCCVLLSGFAMFALFLLSRFCFVSSSLFFCLVFFVPLCFFCLSVYDGLCSCSLSLCSVCDPTYLSRLVYIVSLCLVFMFIIVYMLLFVWLLLQFVY

SEQ ID NO: 979455 - protein, 148 aa, Homo sapiens
MSHAPLESRGETAQNWNYDQPRVASPAWGEEKKSTGNRSEPVSPYEDEKRKKERVQKAIQERLVEKYRTVHFGKTLQEHSSKFQLCRCDGYYRYLKYSKLAVTQERPAVLLTVLKGILLPALVKSALVLSCRHDQLRYRSFLLVIMFT

SEQ ID NO: 979456 - protein, 134 aa, Homo sapiens
MGIPMVYILALYTAGGGMNRSRMSACHSGCGYTENEELRIRSTCTLDYRQRRVRGSEYDDFAGRIHGGSVLPKSLQCKISRCFVSTVSDFLYGCADETKKMLAGASVADTLVMSSSSGDRDGQITRSEDRDHPG

SEQ ID NO: 979457 - protein, 165 aa, Homo sapiens
RRCAHSVFLTRRLPDSFLSVSARLCLCLALVLCASCAVVLVVCFPPLRVCFCCCLLWLSPSFLALFRSCAVSWSRVPLVSRPPVFSPFVSVIFGPGRSCVLRVLPASVGICVWGSCLSHVLEWGSRIELFTMSFQVRSCWALVYCWMIVCFFPSFPITVIIAFTI

SEQ ID NO: 979458 - protein, 144 aa, Homo sapiens
MTDFGVSLLAHVPKIGLTVNHAFCAPFAVSPHATSQTICEDSLFVRVYCYNRRIIVNTQRQYSRTVQGIWLDTSTYAAAEFISAPGILLKFQSFGSILVCFAIVYASWYWGLMRERRGLELRASEKTLHGCSCHSEEPKLLSKL

SEQ ID NO: 979459 - protein, 169 aa, Homo sapiens
MPYIRREVCHLDQYRNSRYLEDVRLWKGSSLWTDLLDLTSCVYWTYRRPIISSQRFYKENLGQGWMTQKLMRMKVYVHHWLLCLPSLRYCTRSEKWVRFKYPKLISYSYMVRGGHFAAFEEPELLAQDIRKFLSVLETAMTHPSPPACHLPPTSALQAFLGEDTTFSEE

SEQ ID NO: 979460 - protein, 263 aa, Homo sapiens
MVSAPGPCFPRRTLYHRVTALAALRHPGIFRLELHGYMHRAIAQGHQSNDVGPRRAPRTRWSSGIRTRFKNLDRMHVHCQPRAFTRASLCIAAMKAQLNIVLMCSLWAPCLEGTIVCCLVGASLVDTWQAGLRASGNLCPTVISHQALETQEDPCELLPSGSKKVISSDHTEPVDWMLAGLEVRRISQNPSLIELAGRSHHNIRAKRNLLATSTGCGHESCGAFLLDGGNHPASSGIAQSHHSRRDDPCWHSKVGLICCPPGL

SEQ ID NO: 979461 - protein, 83 aa, Homo sapiens
MLKKHAVTTRNKTSKSSLVAFAEACEPSVARPERTATGHAPTRELGPWAWVREPPGNQEDGRGAGNSFDAENPRGRRPFEDPV

SEQ ID NO: 979462 - protein, 111 aa, Homo sapiens
CVDPVVPSLAVLARPWSRALFALFLCMSPGCRTRWLSVVDLRVMVGHECLARPEAFFVEGRLWSSVLAGLGGPGSGLSSEHAMRLVPVSVMDPGAPRLSPCPHPGSPQPIH

SEQ ID NO: 979463 - protein, 315 aa, Homo sapiens
QRSFLDIRCPVRCNIKAKRCYIRASLISRVPAHACGKHICAHETWLIVIGREAPDQYTLVDLHLPRPCADERQPSPIHVYTVYQCCMITVTETEVSKHWWTAFAHESVGQKALPGMSLARDQDCRAQSVKDRIWPRLGTSGYADLKLSIVLACTDVGRSDFTRSGTPLGERWRYDPMMALCQVIGFLGTLSSRIQHVQLFGAASGEPVSKQDHSSPALNKSELANMEVYPSREGPCGLQIECRVNERYSKTSVRLYPACYFRIREALDLTIFVRPRPGTLLGTAKGIVPVEVGKHGKQFLSGYVQRQGSPEQGPG

SEQ ID NO: 979464 - protein, 191 aa, Homo sapiens
MFPPKRAQGERKPSTRRYAGRLGGKTGGGRGTYTRPRKGQTRARRPPEGPWLLRAPHITENTPPSRGPLNWDERTPKVHENEPFRHLARTRVTRRYFGQQQTAIRTTEHHTLSATRYPPEHPSYDTPLWGRGAHHSGIATCDTADPREPGATTCRAPPINTPGDTGAQNTPTREAPGPQGHRAIIADVERR

SEQ ID NO: 979465 - protein, 306 aa, Homo sapiens
LCVLPECLETVLLLPNSCQLSDNVVPPSRAAAAPDNNNNNCEGAVRLKQFLGGATHEQQQLALIHGTGNTGGLNNVPSIILHPQGDPEKILVMHNNESGPESSRRQFSLVDTPFRQQEKMGQIIVRWWKLHTTARDQLALRSRTKTLYTGTRKEVEGSRHEQVRDWVLTTCPGRTRKISPREFHFQNTLNVLCLEAMRHKWSHEERRYSLRRTLKVFNSISFSFPNVGVGLGINYGKDGHTSAALMGKKGREMVCLDVGSTDVLTGPVATTTPVSSLGAPFYLGVNSLRRHIQRRKGCSRKGLRTY

SEQ ID NO: 979466 - protein, 394 aa, Homo sapiens
GGVSSMLCEDTGGRAVARDPAKDRAPIEASRDGLSGSRTFKIRSGDLTRAGEGAYRSNDSKADEGVEVVARSTRRGSSTRKELNTYCLVAKESMHAERMDPRNATWEPDSGQYGTWMEWIGYVGFRSIGVDPTEHEEPRVTRGSALTEHSPPERALLAPTRSGGPTERCYSTVPFSADTGHPAQPCKGQFGFLGAPLSRNCPRNEVYTERKSPTNTKRKFTGFLQTEKSTRREWYRRVPRDYLDSLPGVCMELKPTGGANTDCEQDPKRTHHKGTATQGLDTGAVQVTLHRRRPERATGSALLDDNSREGATLDTGTKRTPNASSTRRATFSQSRMGQPAPQKAAATPIRPRTGGTKTPCESQTRDNTWRGGKTPVEAAPNTNEESRWGYQGAD

SEQ ID NO: 979467 - protein, 482 aa, Homo sapiens
MMLLLTVPFSNAMQHNPDTNQDTIDESTLASDELYHSEQDVPTIPSCPSTYNANPGTPGPEVSLCLPVLTHLNHLTRHVYFVIPLPGTPRHDPFQPHSLGSHTRTTQCHQVSVRTHAYWAASTSALSCIHSTLWKPRFKLPDRWTFHVYPSCDDPPCELDSTAHYAPPLGKSFTPWLAPTLEQSAALFDRVAGPTGTPLNLVSHGILPQHTSNAHIQLTMGRTMGRLGIGAITTGPPGQTNSHPNANLIRGENTRYPARSHARVATHSHHPRLAASNGSTAFMGQEILMAYYGWPHTTPLGARKQHPPRVRVPYTITTTTAFTNTYKLFIPSWGVLIRPLAAWRDSLNGDKLPPKQPEQQMARTSTIVPCAAGRRNNPPIATPPGRNRPQTTYAPSRPAHGTTIRQPQVGKHASTAIWTAPNHEPLNAPPRGQLNTTPNNRHQRSQANTINIDSDISTHLRKAASPCHSRATATHMLEVAID

SEQ ID NO: 979468 - protein, 58 aa, Homo sapiens
REAKKVLVGGGGHEVLVIRSSESRVRSEPPPPPQESSFGGSRPTVDKAATPELRHRLR

SEQ ID NO: 979469 - protein, 212 aa, Homo sapiens
MAGPGVWAQAVGPKGPSGSSGEKTEQEWDELFGGHIEKWEKFICKLYHYEGHGLFGVSEERYMRWDSKGVTNLDSVVVQNNRRIGGKKMSEGWTISGIPKLYLIPTFPYEGGLASLGYIRPPGGYNELLSKHFRLLYTWRSSGVRHNTRRFTVRAYGEHWHITRGKSDVYLQEATWVLTRFFPSTTPRVGNGTPKEDLPWELMARPEDVRGG

SEQ ID NO: 979470 - protein, 184 aa, Homo sapiens
VRGVRVTASGIPGCPGVRRWLRHSARHALGVIDVWKPNVWEADRDVVNWDCATGKTEDFFSIWAGSPMMYRSHRLRVKSCLGIRIIQPKVFDLTNAGAHVDFDVANGASWLRMIAQFAWGLVKTILLWQYTGTEGNVWQRLACDTHGARTHGLAHGYVQGTRLCAPAPYVLGSAGARDSEAGST

SEQ ID NO: 979471 - protein, 125 aa, Homo sapiens
  misc_feature (43)..(43): Xaa can be any naturally occurring amino acid
MSPGRKDSEVLAALAGPGLGPSPEEIRLAFTIVPRFVSYHSHXMPIANNNHVRPLRGSNPMHVGFIVVKDEWWDEDAQREYDPGESFHVHEAEGRDGERRPIYRTVPLDCSREEAMVGVQVFEDL

SEQ ID NO: 979472 - protein, 212 aa, Homo sapiens
MDLTFDKDLEWSQQLDDPHVCCGIPNAQGGVGPLQGILGTAGYEKDGWPRQALGQVVDGPQGWLMDDTQDFALSMEGVSGATVLGHDEWRRGGQSSWRIKNEVKLEAFLGRSGLVTSRDESCSFPGGPNRTQAFHAALLLLLPVGPGAMLEPGPARVSTRTARHEARARRPDVFLQADTPEAGVPVGRDPGKGDMAPPKTGRHQGNKKNGTR

SEQ ID NO: 979473 - protein, 183 aa, Homo sapiens
MPPSMPVVQNGEHWAWPPLSTEIGLTLFWGSESRPAPDSRATLGARLLVQVREALAGRQATRRARLGTSSRPHEAQHPRGGVIGEQPTGKQSGPVATRRWSVMKVRATQGWFTEARSRRRQLLVGISQANGAGGVKPGQGELRGVEKQTAGPAEDMRVRDLSSPRGVEPRGGGASPPLWGGNA

SEQ ID NO: 979474 - protein, 102 aa, Homo sapiens
MPAFSQDTPWIYIESCPSAFSRKRVVPTVLFRGRIGGPKRLCPGDTQENTSGHSAQRSLSVVFHYLAVVKRPTKMRSVTGSVTPHMSTCECVRRHDSISWRI

SEQ ID NO: 979475 - protein, 317 aa, Homo sapiens
LTGTLTGGWRTGERTLGRTRGARAEEPHPAAMSAEVAHSEGVDESEKKNSWGPRKGEPNMRSGDPLGAPDKAPGTTGSYNDRARKHPVVSTDFLRGNIKEGRCLTQWPPRHFYFNINSSLEAGTIGAAPKDHSSLCALLCNFPMELTPEKVGADQGHGGNPLGGNTVRSMVLLPQGLPRKFVERFTYNWGRNERELLLAHVITRYVGDLSGGPGCCKKGGQRALEFPQHRGKGPSLPGRRWWTRPAVRSPTADEAWLTEATTSGGPQVEITDVRGRGHGPKTGGPDSEKRELRGKRGAVYNVGTTPGSGRTQPNSHK

SEQ ID NO: 979476 - protein, 57 aa, Homo sapiens
MPCTSIHVSELKAIRRKEASHLGTVNGLAGAPERSPRQKRSTPKLPKAPTCTEVAGQ

SEQ ID NO: 979477 - protein, 262 aa, Homo sapiens
VPGKRDSKVGRSRSRYSTEGNVARSRSTSRGSENAGAEDKGPRVLRREADREESEPGSENTSDTGKDCFPGSSQRMTLSIRTILLFPPYLGTRDMDNERHALDGHTQETDTATTCKHPHCRAHMRNRGPRHFYPVARTTRHFFSTTRAPTHHQRQCHRVHCSSAPLRTMKQRSSPSGGRNNKAPIPPLCGNLHRTEQKHARQTHHTGGRAQQGAYSLVVNTNLVPSINLCARTSNHILWFPYSPFTEDENTSVKSWRTNQLS

SEQ ID NO: 979478 - protein, 120 aa, Homo sapiens
MCVCLKWGTKIYGKKNSFGLGKLNNGAKRNFGRTCVNSQSHFYIQRRKTNLWEFQDGPFLRKGWKENSHVARVFVDLEQRHSFNIWWGLNAGTQGVFVRAKENLPSFFPFFPKEKENTIM

SEQ ID NO: 979479 - protein, 299 aa, Homo sapiens
WGRSDSGGEEGVGNPPEMALLERPENHLERSVGHIDPLSPGWKSRSYRILLAELVRSTRVPGTVTELLERCPLAPLLDVPLTTRRQAEQAYSSCKPSPARDQDNGLRARRITPQLLRACAPHVPNMTPDDTAGTIAGRTTPLPGSKGLAPTSAQRETQASGNTGIASPETSQTAGPTSPGQPSGTNCWRRHIAQRSEATSAPCGQFECNPTCAQRCPLEQLTVLPTGRHAWQLSGPLSPLGPPLASPLAPANRVYFTLALNLTTADQGGKSGTATGSAAKAFRTLSHRLKRLSGFDHIT

SEQ ID NO: 979480 - protein, 299 aa, Homo sapiens
GSDSVARGATGESRGLKAGSSGQAASVDRWVSGYPVSSCRCGTCGAGGDGHSPASPELRSRETPMISLCHQTRRRFAGCVSPEGFLESPRALQMFRCYQGCPKERPVTPSGGNGLEASVCGRHFNGGESWTLGWKPGSICDHLGVPGTGDHSGWDFLRRAQGHLSGHNGTPAHRLVRIQEMTDSPRLRQIEFHIQTKAPKGRKLLDRFLHPGPHIQLPKVPYGSEPTVTNSRRETVRQILTLADGRMYFDKTLETKRGLTVERSEQRYSPLASTSRTSGTERWHTAVLRRREENAYDDG

SEQ ID NO: 979481 - protein, 145 aa, Homo sapiens
ADSLFGLSPLHPGEINSHVAHTKPVGGSSHGTHEIWCRDSDRGTFLGRSIPHPPALLLCEKDPPMTSGPQDLTSPRIISPISNPLKTDIAREPRKPRRPINGCRGFSVTLTVEEAQECQASEPEVSNPYPLVTGGTHPDGRFLPQ

SEQ ID NO: 979482 - protein, 174 aa, Homo sapiens
MCSTTASSLFQGRCVTDTGRPDGGKIIIAGPGDPQEGGQVYSVPMGGLDGKGRPFAIGRSEALNLWICGMVTTGEGMPKDRVVCNSTASVPRFWRHGSGNGLQWRSDPAGYHGESVEEGRLGRQIQFACITPRIWISWQNADGHYTFLNTETLQGETKNVRGTYTAENDAGVSK

SEQ ID NO: 979483 - protein, 211 aa, Homo sapiens
SYNAAVDTVEEAKEPVEVTSLSSAGTMSPKWHLPDWGTGRPPVKNYKLLENMNKLTSLKYLENDKIWLYNISRNLYRTLTPRNMLDCSLIWIRLNVIEEQVAALEQAAYKWDCLFKNTLERQVQERWRSDEKLIFYWDRVFYFFQHVERNCSNNNRKSLRLHCTGEQSSNNGNYCWSITGTSQRSEQHWQARGLSLQTSLEDRNPVRILQR

SEQ ID NO: 979484 - protein, 32 aa, Homo sapiens
MADCIPTTKKSSGRRQKQCFKKGSNPKGVNRA

SEQ ID NO: 979485 - protein, 141 aa, Homo sapiens
MERSLDLTWHIDKYWLIPVVHGALVNHHRSVDILITPTWEEAPLFPCVHVRGETVERFPVNPETEQHLEEPCSYLRFSVVWPMDFHSEERCRNRQFLRSVVSIRNRVLSHGLLEDRVLTLFPCVLPRRGVVPYRRRGEREL

SEQ ID NO: 979486 - protein, 124 aa, Homo sapiens
  misc_feature (24)..(24): Xaa can be any naturally occurring amino acid
IPQEECRVADEHSQLCCVWMVTQXCPSLGVSLRTPSVGSWDVIIYIPIDALVCPLTDVCVASPKHRICAGCQLPDSPRHLIHRTWPCRLNVSSEAEEVHGGQFAHFLVLPLFAHSRILVSRQVF

SEQ ID NO: 979487 - protein, 174 aa, Homo sapiens
APDLIPCLQTTMWTTEAARVPCNVDSLSPLVDLSVPRRQFLWHRLTKVRCAKPWKSTEHTYRVSALTRECLITQADRSAQTRILVPSSIDPYTGDWDSFTLLGPVIVGLTKHILGNSVPWLTFDRYPKPILSQCMGRNVVGLLPIPHTHTPVGRSHSDYSMWPRPLEAPTTLKP

SEQ ID NO: 979488 - protein, 216 aa, Homo sapiens
MLFYVTAFDRDRAIAKITSYQPRNSTSLILKIAESHLDWARKKRTVNREELLKQAESVMQDLRQLTGHCTKSSMNNELLVQVSGLHWRLMRLYLRNYRELTWVLGAGEASNSSAIHKGANEGTKYYSKPPGPVMRFPWVGQQQPSSYRTAFKMKFRFKRKFNGKAIMDLRLVDLPLGITLVEMRCYAQKLHLASHELVDIRPVVARSVITYETWQT

SEQ ID NO: 979489 - protein, 33 aa, Homo sapiens
MPCQVQGQGGDLGFRGYLKPPFLDCPNEDVGAD

SEQ ID NO: 979490 - protein, 99 aa, Homo sapiens
MLTCLQPGGERKVKACCCPAGGSKNGPSCWESGCFVLGLNPQGQGPGPSEHKGPSSVYVGIGDVLRVGMSCDVIQSSREVGAKLDPYVVTVRYTGYESK

SEQ ID NO: 979491 - protein, 235 aa, Homo sapiens
GSRDVETRGPGRRAVRGRRWGCTVGGGSCVPSPRRKLAEARYKERGTVLAEDQLAQHVHSECGTCSRDPNWEEFGDADTPSSEDPEAVHEFRVQIPRDMCARQLAVDPAWLSGRKALWSEHAGRGGLLLTNQVSEDSSIVCREQLRAIVNVRCDDFGVNYIKQVLTGTGAKFGQDVRSKMTLVRAIKKLLALGTGFGIIPVGGHLPHSVVFQLSSIWIHTGVLQTGERRMVRDCQ

SEQ ID NO: 979492 - protein, 113 aa, Homo sapiens
EVHPVVNHPRSYSSVQATPSIQLVAIANLCRCRGAQSGPGLRFRCCVCALCARSGFVASYRVEELASGVFAGSWVGVSTWPHRVGTRVAVAGTIPGHGRLCTSLRLLALWARS

SEQ ID NO: 979493 - protein, 31 aa, Homo sapiens
MARAKADPGQDSCKRVGTRGPSVDGILQDST

SEQ ID NO: 979494 - protein, 128 aa, Homo sapiens
MSMRATSYSVPIKQVPSQRTGTPLCGQRKSLSFRDLAAQDIDHALVPQQVRCFGRRKILGEAKIPAAGVVLWKLSLPSNRGLTTVKFLLPPKRETTSTLGAHQDKPARHWHDHVWNRGFPGTSVTSSH

SEQ ID NO: 979495 - protein, 143 aa, Homo sapiens
SVRLCVVEHYIDVCAACDREWPSRSVSTFEARAVSSGCCDTINVSVLAYRLVFLGGVSKLVLLWMCVCVSLARTADAVVSGHTTRECWRSAQSTKHGEVDAWPGQRVVGSHRQSCVACRHLPLSFLSSPGQRALLLGEAARIL

SEQ ID NO: 979496 - protein, 115 aa, Homo sapiens
  misc_feature (79)..(79): Xaa can be any naturally occurring amino acid
EWEGGLRQGGGIFMDLHAAYKARGSKRMVKLFDSLLLSGSMTPVCYKTVKLCIHCYFDCVSTGVCSLLPHHRSLFPWNXFGSSFPMFPQIWIWCAIGIIYSREIKWEFCVEEELQ

SEQ ID NO: 979497 - protein, 270 aa, Homo sapiens
MIQESRYTGVTPQAKAGNNKLESRSSIEMGTMASQKPLTLSGFRLCEPHVNSPTWQMLIWAQLQVRKLDSIWLLWPVVLNTHARNGDSQWRTRVEAVGAPGVTGLITSGVMDTEPRRDSEAEFYEEERHGPSQESARMTCVRVDTLKALHMRSLSPIFELAGPDSRDNAGRITWSASGVRGTETDDAKDPAGTPSWFNVPHARDRMSSRTEGWSISCGSQASDHREIEKRMNGLQRRNLMQVGKSPRPVPRVRSPEWPRRTNHAGAGVTC

SEQ ID NO: 979498 - protein, 146 aa, Homo sapiens
MAWANGLARPVAVHVALCCWMLLNPAACSSHVLSAVAADALPGTAAVAAGWRVVWLWALGLLHKSRGRRGLGRAQFRAKFDRRVLLVTMLGSRGPPAAVMVGSLNCIVAVSQNMGIGNERGTCPGTVRNEFTIFPEELTTDSSVEG

SEQ ID NO: 979499 - protein, 173 aa, Homo sapiens
MRTCNIRRGCSKEIYLNRLIGGVSQYIPKINSLIICVANDNAAVVSTAHEVTQEDENKGAPQEVANLIFHMRLRKIWCGIAMAHLRARKWFLAKCLCDRKDLEAPRAIHWPPCKNFTWDTSKFVCVWPHVEKSITVERINIEARWWGLWGEGGILSLDNRRQWITWKEFLKAK

SEQ ID NO: 979500 - protein, 61 aa, Homo sapiens
MSAPTGRYLSHFERFSKGQVFWRRPIDAGSPEHLGLKKSQDLQIAGNCAKPNRFSTVTMDR

SEQ ID NO: 979501 - protein, 166 aa, Homo sapiens
ADSTLSQLSDSGSDSKRGISGVDAGEAVVLSVPRPRKAARSSTKSRRAEELPRETRGPQMGPSITRLDLRVEPTVHSCVRCERRSAGQHHVAVADRGVARISMRASPCPRIVDYSERRLRLTTVRQLKVGHVILEVNGADSFVGYRSDRGGRPSDYRRVPSMTNGP

SEQ ID NO: 979502 - protein, 141 aa, Homo sapiens
SGRSSSKSSHCDSPPRSQTPQDTNRASETDTHSMEKKNSSQSEEDDIERRKEVESILKKNSDWIWDWSSRPENIPPKEFLFKHPKRTATLSMRNTSVMKKGGIFSAEFLKVFLPSLLLSHLLAIGLGIYIGRRLTTSTSTF

SEQ ID NO: 979503 - protein, 200 aa, Homo sapiens
EAARARTVGCCWAARGREGAGLRSPPSPSPFSLAPAGPRAGAGHWGHRGRVGRGPVWAREGLEDGLGRTREGGTRKGAGKGPLVWEHTTAGRRRRRLNRENALAQGTQERLARLGRSPPQKGLTGHNRLGERNPRPKCSPWNALEPGDRKCTQGGLDPMTGDHGTQQEHTQQSKSCTESGENIHRGIGRRRSNKRLRDPV

SEQ ID NO: 979504 - protein, 248 aa, Homo sapiens
MRVWDDHSESSQPRPGDLEELACLVLTPEAVVSLQLRMQVRQNGLWLLGLDGMTRKPTGFSQIEAIEEGLLMEIAWVRKGVCNTARCSSMKGPGMGRPGRQPAGQHVVGHLKAVAVGAIEKQYSAGSALDDGGISAGRPEDAARYACALLSSHGLAMMLAVSLEARNLDGRLSGGDRPGCAVSFASQGHWAIAWSAPHERRPWDVEVRFGEGKRLSTKEGGCRLRKKSDIQEQVLWNPDALVGKKGVR

SEQ ID NO: 979505 - protein, 177 aa, Homo sapiens
RLQSGADPGVVRVSGNLDKRFSGWYDADLETRWVHEEARGGVQALGDAGYEFDYPCFTLSASRMKRSRDAVLGLRARIAELQSVVCAAEVCEGRGVASKWSRARIGGVYTRISDKEHEAAVLETVADVAHGVTYHRRRRPYDVPTNLAEWEAHDTLPFYTSNIRIGGPRRSSARCSQ

SEQ ID NO: 979506 - protein, 304 aa, Homo sapiens
GGFPAPAVSRPFAGHQKFLCASTGEHGRAHGPGGRECGAGDSLLFALFLAVSPRLRWKELQGSRDARIPRVCLSRGAKLSPIIAWHGLLRRTVRQDRATNAEPFDTENVCVYQAKRLQGEQMRVHDLASKMRPEPDACKLHWYLRDHCNLATHGEGQPRHAEQPAYEPGSCARGWSRTPTTKGTTPITMRNLTLLDSGLYCCLVVGDQAPAIGAQGPWCHGAGGADRPKMHHPTVWCTHPPPRRVKTSRLPAWLRVPGIGKNPLASPHPGPESTRQGTELQTAGPGTWGTMARHFQGMKTRLKP

SEQ ID NO: 979507 - protein, 311 aa, Homo sapiens
FLAPSELPPPSPRSSSPGPGFPWPLRPPSLCDLYEEEEEEDVKMGSEDVVEEENPGGPPGLFRQLHNFELGGDYVRSNNTIPVKQDRLEEPYEENQRALTKHNPLALVLPYRDNPPLANQLSCNDCWIIQASPATDGCTLQSIQYCHRRRCDIQLSAECWHRRDNGIWDYQEKPPSREHIKIMPQPKLGHDQFCLYAKTTLWSYTILDDMPSENGDDPDNETAWVAGYTTSDKKPLVLFCRERTLGGTPLFDMEARVSVDQCMSYHTYMVLGKTWKSSETKPHRGGLRPNVGHTTGWGGLRTPVHEESRRP

SEQ ID NO: 979508 - protein, 175 aa, Homo sapiens
MVSSTVGAPAEIACQLYYSSINPFPVPSCSPVRRGYSVIPALTCDGNAKAWEGQDGEDQGPYRGGEVTLDEGATLDLTVRISPSFYEKHCVRPEHASELEATLTVLTPGYVPCNVEMLQACSLIRVPWDTPDVSPRAPVSRGYAAQLDLPHSSPSGWFPEHLPRHKVVRLPSTNE

SEQ ID NO: 979509 - protein, 309 aa, Homo sapiens
DKGTGGVEGGAEGAGPGAGSERAPGARVRPGGRPDRLDTRGRRPGMGGTTSARANLLWVPHRGVPIPSLTICSTRQGRQCKRLQHNGRRHVVPKLAPSKGHKKAAKGDTRKTCGLEGTPGGRRYQGGEAPEGFSGHTCEGPRSNTNKGVGKCPPCEKEGPKLPVRNVTQRGRGKQRGRATNGFKRGARERVADKRRVGITREAAQEQRFTEGGYPPPPGLTKAQGGVGPGAQESGGETVGETSSVGANHRGTRRESKGPLKEVRTGGSPRERPQLTGLADACRADTTKKRAEAPGNPGSAGVRPPCRGV

SEQ ID NO: 979510 - protein, 144 aa, Homo sapiens
SEPCGEICELRLTCGTMISSGGTPGASASSAPPAHEVGHDVVWYRWLLLTVWGAGGAVVLRLSHSGPLRTAVMHSILLNIAGRLCGLIDGWLFPVGRVMRMTRDHACWDKQPIVLCIQGCACYGTHLARGQKMGGCDSSVVPGS

SEQ ID NO: 979511 - protein, 228 aa, Homo sapiens
MALEGKPKELADCAGANMLGPTGSPMIVFKDYFTPRGPGVGARRSPTAKEATHGRLKEVGINLAHVRPGTVGGTFVGQRGHSPKELQGGTFVDSRQKWPFPFPRARRNDKALSTRRCGGSQQKPPSTAKGFGQSLPLDRTVGKHWGTRRTLLASGQDKVGTWAILTALVVLNGRHTGQNPSSGPLTFPAGIFTQVPINVEDQSILSQVGKIIPVEPSMGQIHRTSENT

SEQ ID NO: 979512 - protein, 150 aa, Homo sapiens
AVAAAAGRVRDKMKLIILEHYSQASEWAVTYIRNRIIQVKPRPEKYFTLGLPTGVPHVVGYKKLDVNTIRMGTLSFKYVKTFNLDEYVGLPRDHRESYHFLHVENTSFKHIDYPPRKNPNSDGNAGRPTGRRVMPCEEKIKVQGGIELFV

SEQ ID NO: 979513 - protein, 191 aa, Homo sapiens
VQVFAPANALPARSEAAAVQPVIGISQRVRMNSKEKKDLWNSGLRCLGITMMVIIIVHSELGIILGYSYKRGWKDLQNETSDDQKVCEREMQRITLPLSAFINPTCEICGGRRLSWSTHSQIPVDPQEGTTPLMGQDRDSWGPEPSSQVGRSRHAEHWCRSRPPSYQLGGTYHFVLLVKTGIHSPAFCGES

SEQ ID NO: 979514 - protein, 315 aa, Homo sapiens
DGRMDILVSECSARCCSSSAASSSRVTEREDPNKPMGVIHYQTQRSLGSVAPQQFVRGTAGRPTPIIKMLKTRPERGWSSMPWLIPQQFPGKGRRTEQKHLKFFLNVAGKLDPCWTQHLGGTDKRRSVHPQNFVGGHVLTKGRGRTRYSIAKIIIEQKYLLCGAAWWRARSKREVFIRQQTFCGRGADAEGAKYEVKKWNKVGEEKGVSNPKEKEAPGETTSNAGADGIILTPQERNRRGRTTTRRVGATTTEKRYSEGPNRRGPNTSGGSRADTSIKITPGHSVKDTETLKQTKAEHERIDKSSRTTQNATNTS

SEQ ID NO: 979515 - protein, 71 aa, Homo sapiens
MSATSPGLQRTRVLVRGQAAAQGSALKVLRTWANGPVGVKRSPMLWGLNIQGEHAQYNRYAPKVPPAIGGP

SEQ ID NO: 979516 - protein, 253 aa, Homo sapiens
LSARGKTEVGSVFLAARAQEREASIMETTGCGKRIFRIHDEEEEPQAPQESTPAPPKTDIKGSYVSIHSSGFREFLLKPDAPAAPSLDSWIESILLRSQHECIPQAIQGHGQSDAKANVPGMAQDRGTTVHDTPNNRKIEQLSKRNRVNRDHMDQCANTKAGWDLPELRQRQIMERLFPQSNNCRRPIQRWFLVIHNRSDTSTQHQSKDGTTVEKDSTVSPNVGETENTTEPGHTWHARCEHSRTSLKQCENK

SEQ ID NO: 979517 - protein, 272 aa, Homo sapiens
MSVDMLIEHFVVKAQHHVCHAAYQTIESGDYAGDNYVHRRGCKKKQRVDNRVPTDMNVGGILAEEENIDCLTVSYVFILYYTHDHDVDLSAQSTGENKIVRIEKETAEEDYQHERPKCIQKQSRRCDNLEHKLNDLLKEKQSVEKKVQLSLNTKVAKLTNELKEEQEMNKCLRANQVLLQNKLKEDGEGAEGEPVTKEDLRSPRSQEQLRDVMYYLENTGEDQHLPGEEPEEIQEGQIHIGRARLKPGSSGARGNCPQEGPQRGAVTQAKIL

SEQ ID NO: 979518 - protein, 111 aa, Homo sapiens
PHDSIISTWSLPGHMGIMGTTSQDEIWVETSQTISVPLTGCVTLLRCAGAWPEGFGLRAHVLHGAHGGGPPGSDLPEAMSESPSRDVVGIRNRDSLEVAVKTFPPERTRGK

SEQ ID NO: 979519 - protein, 447 aa, Homo sapiens
LCYRDEEFCACQKIDSLSFTASMKHEPTKPPMRKLQYVFNAQRISTIRWPSLTLCDDVCPVDMRAWDWRLILLQESSDQGGRARGVEAREVECRSCSVVEPVASEETTNRMEIVYVVATVVEEVTRSEDTPTESTHPRVNSFMGAKILYDRRRLGYFYDRYWTLGALMGPIYPFSLEAQIRRPVRPIRLDQKERGRGDNPIILELVYRNKWQSCGVGKGTGDKGERRDVGEGPSGSSYRLSGWAPSNVEVRTHTDTIFGGASVLLRTLENRRENRTALSVFAPVGGPRIYGKCGRKAMNFRASECGNGVCAHNERRQLCGPGTARGNTFFRKRNVCHALSGTESAVLVDGRRPLFEPLWFEKPLEELVPLDDKGESDVNSDIQEALPFCSLGFNRKSREQRKAHIFEQGGYHLSHCIEGVKTNSNRLLPSGKKKRTRQVPCAKIGAP

SEQ ID NO: 979520 - protein, 152 aa, Homo sapiens
MLSGGSTNLKPNKLYAGAILDVPWMKTWGTVPSSPSFLFTDVDKAKPVSERHENSSMSVVPDPVLTAYVDTTMGTLAGQNMSILHIANHRPVSARLPRSDNRLDTHITSCLNICPNPFSKPLSTCKLFTSTKTIHYRIACLPSNQSYHLEAY

SEQ ID NO: 979521 - protein, 103 aa, Homo sapiens
MVFADTNKETQTGSSDYKSHYGGDTNVQRKFSIEADIGAHRVSVIARAVCTQSSQEIPPCVQQEDDTRVLDPRKCACLDLILWLLCAATDLEYDFIKGAIDGN

SEQ ID NO: 979522 - protein, 238 aa, Homo sapiens
ALVVHENVISCPHLGASCMEVQRRVWGGNAVQYVYMVEVKILCIEVFVDSPYGPFALVSYHFPDIQSPWMVASAEESSEELDMMRSLGMGPPEGNHPRWIHDGGRIPGPDADTLPKDLEIVVVLGPERKALHGKSGMVELVRNSVKLVCGRRLPSSCDRDFSYSLLQCMGESSGCRGSASMTVGHVGQPFSPGLWAFGPEGTYPLVLAGGPMVLFQDQRCLSAGGVPVVLIRDYVLEP

SEQ ID NO: 979523 - protein, 142 aa, Homo sapiens
MLSDIAHRIVAPGNGALLSCGLRPSVRHCQCGLRSIGIQKITDDNRRLLHGRLLAEQLDQTSRETPAFESGVILLLMRITLTRNGVLMGVAYPPQVSQIPRGVCRWASRSDARRVDPHLVRAQNGLSITHPRVRNAARSGST

SEQ ID NO: 979524 - protein, 138 aa, Homo sapiens
MWLRPCAGLGPSERRGFEGHEFEDNLVHMVETDTTHESTKFCGAPVDPGKGSHNHCRWGAGGPSTGLVAHGPQGRFHRNCGHMATVPVGFLTRNKKRPGGKRAAFVKPITEGEARGQQKGGSYTGASQEGGKSMYAPT

SEQ ID NO: 979525 - protein, 313 aa, Homo sapiens
MDLTAGRFLVKCSVWLRAKKLSCLRQADSTFDPEYPGPPRTTLSIQVLTAQQLPKLNAEKPHSIVEPPGGGIEIHGRARETVSRQETDYVLNNRLQPPLGGTTLKFQLRAPELATWIRFVVEDYDATSPNDFVGQVTLLLACYTQGYRHIHLLSKDGASLSPTTLFIQIRSSAPEGPRSIALGSEKCSPDPLQSLSSSGAGGGSNRPPRPPHWATQTDFDQAGWTQPVVTEETARSPPGGTEGVGQVTLQDDPNPGARKRADPWSEPTRTLDYRQQAVPAGNREQEPGRKPLARAHLPKRKTRRPEAKNKMTR

SEQ ID NO: 979526 - protein, 317 aa, Homo sapiens
MTLNQTPKRDGSPDKTLRPLATYGQRYTQTKPRTRTHTPRHQRRRAPHNACPCYSLHICTTTNGTLCAIPQPWRITPQYKTPSRHRHDQTRGRQHLRGLDTITHPPVSSTRQAGNAIPSPSRHEGPPMLNIHGGDARNKLDTRRNDKSLRRDTHSAAGGTKLSNAETTTTGRILGNTPHGHRTHKGEGQQKGKCTTQQRDVKPTRRLTTTGSHHINSGHHGAATTRWRRGVYHTEGKYGRQILVEPQAGRIANYNEEYDDSTQLDRYTKRDDRSLHVNTSWYRSDIVVILFSLLPFFIVNGDEHRKLTPVHMPHPVA

SEQ ID NO: 979527 - protein, 322 aa, Homo sapiens
QRGTLPSHFLVAAVFSLSCSEPPELSFVLECSVWVPRVPESVTVVVDAFYVEDGRSACGLTQSLYEVICYRSHDSLLEELESCGGVFIVDIIKVPSPWNRRCASSLEGYFFKAPAAGAHGIKDEWSLIYEPATVKENWIDPRDEVPAGAPTMRIPRSSHSCWRQSGRYNREMAGGAAAEGKRRGPALRHAQVLALERVQVPPGSLKDQSLDVHHSQAIRKVLQAIAVSTNCSLSTDGVEGPIPSRTAQVCLRPNQYGPKQRSKQNKFRGKQENTVSVTQESKSGSVKYLRKTPDWRNTVVKQLLSARKEGSTTYDCHSITHT

SEQ ID NO: 979528 - protein, 389 aa, Homo sapiens
NTGETPSRASRVQAVSRKILNSCPRDLPSYGSQNAGITRGEPTVAQTITCAYPISLTSSTQHPRENMANITPQHNPNYPPNWHLAPMDTQFTSQRADIPGQRVHQKRSPGAAVHYRFLVNNPQYINPLPCTLQATTILSLSTQTRTFIYAVPRCTTKQLCADPPCGLPNHIQQLRTDANTPEGTCNHAYRWVLCDCTALGYTPGYIPMEYGPKEKTLLVAPTGLTGVYLDKGHGHVSFFNALSPIFFKRLRINCQGATSPIIPHMRWLTGMIENWWSTTYIFRGGHPLPQTCKPQLLGRHSTLYLRSQFQTPCFTNRTNTHTTHTKQARDAPAPPTTISSHNPSRQPDAHNEKAAGQHARPKGPPRKTSGAVLPTNTPGEQQACTTPAD

SEQ ID NO: 979529 - protein, 87 aa, Homo sapiens
RTGGVVIIPGFGLSCVISHGSMEIRDVPPLSLAVILVRACTVLLRLSHRDLFHTHARPTVPYCKYPAVGSGTISSKATKPRSTCELS

SEQ ID NO: 979530 - protein, 68 aa, Homo sapiens
KRDDEGNVIVDKRRNKTHTECLRVRLRPTTFRSRPVAKCGYPAKAQETSLTLDVPPVKKTKYHRNWSP

SEQ ID NO: 979531 - protein, 96 aa, Homo sapiens
GRGRREQEFLHMAPGEVIITVRLIRSFEHRNFKPVVYHGGTLDKTVQGIYRILKQDIPLGPNLPRTIQNIINMMHYRLFIRHIIHRHDAALCGVAR

SEQ ID NO: 979532 - protein, 169 aa, Homo sapiens
MCRQSHIGQTGFGTTENPQDYRVCRSQGVWISCLIGVGPRGPVLCGPGVAHLLSVPLYTSVSVESAQVRVPMLGVPSHNRVGWLPVCKSRRGISLDLFPGPASGLLCHETVCCGVCVHWTPHGHFSGVEGLAPPSSDPFPPRLGAPNEPPLVACFTFVIKYGIRQNESI

SEQ ID NO: 979533 - protein, 68 aa, Homo sapiens
ASSEPGAMSPPVFLYGKVPGHAHRRLLGQSHARSADPSEAWDTAEVDLGRLIRRFRCHYSTFVVCRAK

SEQ ID NO: 979534 - protein, 445 aa, Homo sapiens
FNLVALLRARRVTMQLYCGANLGKFWPGISSLLCRCLVQHLARGWIRDIWPRICAGHVDFRYSYAEGISGFPETWALKLALPFQTDYPEGHLLQWHKHMDKFTLSSIKRSKTILDKQRLKENKKRRNNDEKQNKVNSRQSNDKTEKHHNKKLRGRELRRDGNYKNRENTKGTHAEKETNERKKEGRRRRERGGGCRQHHETSSGGEDKARAPRNKTKGAERERGGEKEEKREEERERGEGGEMGGWGGAGKEEGGRVGVEDAWRCGEEREEEGWDGAGKSQRRTRPERQHKHAKRKKEKKQNRRRKRNTRQKRRQGRTKTDHASEAQTDKKKKTARQEAEREQREQSKRGAEREGEEEGEGRKEGREVREETKRENGRKRRSRYVQRKRARSVNTRSIEREREERAGTGKGIEREDRKEEEKGEKEVYKKRRKETTDVSRRRRRG

SEQ ID NO: 979535 - protein, 113 aa, Homo sapiens
MSIGDKLWIGLGREDAKKKSPMLVPTPRFVIRKVFPNGAMSESLGLGRPCKALLTHPCLGNNTITEIIIKEISQGQLYDNEKVYKYTNKPQLRYMKYNTGDEDRTQKYYISID

SEQ ID NO: 979536 - protein, 309 aa, Homo sapiens
MPMFIVNTNVPGGSVRRGGPLRRLNPSSWRQATAEKPPPVTIRGETVGPRDPSSMGLRGSYKARAGAQLREDLGTEEFGTKIRGDGEENRVHLRGKWFACVETLWFGPTAPVEQFKARSGGSHLSNVLTRRWTARPIGAGWHPVSRLVAKEHQEGNPNGMVSGWASHQWKTRTDTMGYSRDGQDHNPFGVAADTHRGEQAYNSTDSEERNNVVWEGTAHEDNDIKNTTLVWGRVRHVRYMQPVTAVCNDRNEGHDIGGVPPPNKHAEARVFRPPQWPRGTRGYTRASEYCRQRVKSKKQQQQNSSTKDS

SEQ ID NO: 979537 - protein, 221 aa, Homo sapiens
SDSTAKLKRILPCHAYVNQGREPGDRFSGWQKLIMQSDPAAAADHPGPLFRNSQLGQFHFTNKRLRTSSHIGARAGYRWAYGFVGCHGMFPLIESPPVSVRDAHAPGISSYISKIFMGLIPYYQSGFFSAIPVGLSPPAKQAVVDLVGVNSVPSPDLSNKPSILGDGSGVMEWSRKRKVLRTNSTVQEVLPSHVYLNQVIDPDDRACGPRKLYMQLIPQQL

SEQ ID NO: 979538 - protein, 201 aa, Homo sapiens
AGGENALGEPLVRSARRSSDPPRNGCTGCERLARAWARHLRERLALAACAPLAHRVDLASHWTSWMMLSCPCRVNPSLHGSPSVHVHPGCGCRTPRTHRARWHLATGVLPLDLGLVCVWLRWRKLSLSWGHGVNPYIPACAEPPEPPVPTVTTRLGLPDAQRGCRGHRVRCEHGGTFVTPRCLLFVEEEQRINVLDLSDEK

SEQ ID NO: 979539 - protein, 344 aa, Homo sapiens
QTLTFSASVQAPWRPPGSPRGGTLENDRADAESGDAHRTLNGGKVPPDTEGVCGSPYGLISDFAGEEQLDPKLMAVGGADLAKNVTTIGAYHWGRSKPVALYQQDCGSHVGCDRGGTQEDKRHGSSGGTYRWRALWAQTTVPPRAPGSEGHSGGKSAVPFGGTKGIRRESADSVGIPQWPKGCVIRPTDQRVSLGKKYSGDSDVADKGSRLRHMTACGGVMTYRDRRDYTPIERQGSNTRSVRGNGQHVQRLRWEETEHRIIMKGLEGQPEDVDSRLSGGSRGGATESRNGHTRQMGTQSTFATGYTKQKATNRRTARHKDPGIHRLQAPKVTRLEGVRTEHST

SEQ ID NO: 979540 - protein, 434 aa, Homo sapiens
MAMVGKDIRLHAAAARSSSSPMYLLAGSNRQGDRSLSKCQVALVGTYCPRSHGAGTGESRWSYDHQSWHLRSRISFVGQRWARYQGSVESPDPSFGVQPYPAEGHGLSREMCEPSCSAKSTQRRITQSGDHATGWRRASEVVAWRTRVQPKGPSGVALARNGVDAHRDISARHDARLEAAANDEWSYGPVNAPDRCSMCRLSVTMVAHTLTNERRGRVKPWRDSWWSGNIRIPGMSYLFKHIHWGNPLYCDRLERDPPNSVGMGSPLGGKATGCWNNLVGEEKRRGVATSHMGQRESTGEGKTQSRLPVVKRGDFNWRRPRARMKPLNIEAGQAAWRPVKQAKVPWDEIRQPAGRGSNGMPRAQVNNQGGEKSTKKPLRHRARSSTQGQKVKQTWEPSKSSRKDNELGTHTGTKSFTNRGEVEDNEITTSTRSR

SEQ ID NO: 979541 - protein, 328 aa, Homo sapiens
MGTIDNKNSPKNTNTVTSAARGAQQRMVQATHRSTQQQRVKTQEQNTIRDPSDNTQRACGHHNNTTQKTKNRAKREKKPTGRYQRQTNNHHTTLEEKREETQTRGENNNDNQGERTQKQRTKKTQEKKRHRPPVGTTKQQNKTKKKKKRKKRDKEKRTHTETKKNKPNHNKQKTNKQKKQTVHKKEEKKKAKEKKKKKERNKQKKKRKETKKNKRTKNNQKRKRNKKQQGEKSKKKKDEETGERRNREGRNRKQKANAKGEGARRDETGERAASKEKDKKEKDKQDRTEKATKRAQTERKPKRGTSGGQRRGERKEKKGEEEKAANRN

SEQ ID NO: 979542 - protein, 138 aa, Homo sapiens
MVVKSEDEEDVMPTHVTWREAAWVLNTLRVAEPYLVPAWRTVRTLHKYCNPYTLGDDKPENHHKNMNVCSQLLHHKPSYETYNVTLLERFRVRGRGIAVSNEEVDGRLHIIGGHYNRSGSHPKILRMRNQRARLGHYQ

SEQ ID NO: 979543 - protein, 286 aa, Homo sapiens
QFWSAAKTKGFEVYLAEMSADNQTCGKRNIHGRKLKEINKMADHWETAPRHMMRLDIVLVLQGCLLIDTTVEDWTRLLMQILERTTTTTDHTTTMQTEEESELGYIPKSKWEMDTSEAKLDKLDGLRTGTKRKRDWEAIASRMEDFFSFPDDYDTRASEPGKNEGQMGRPGGRRQDADRQTGIGFVGRTALMGRTITSLTRGSTWLKKALNRTKFFLTLRFGTEHYSSQEWYAQTGPESKPRGHSWFCPCVPDSQPVVRTTRQRIKKVPGSPRYHIVCPAKKYLTA

SEQ ID NO: 979544 - protein, 544 aa, Homo sapiens
  misc_feature (542)..(542): Xaa can be any naturally occurring amino acid
LPVRLQPPCTGIWGDPPPAPPDLLALRPSRRCRCGVLCTAFDPRLHPLGVTGMCGEVDCPAGTSYHLDRGVSRYYHSMRSWDSPSISPWERVSAINTTDSSGSYPRAQSMGTRGTELKQGTRTRNHMSRHKSNEQGGRQTGMPVQSVSNRDVGLSGVGLIHMRCSHDGDASYRQRRHRKLLYMPLDNRQVAEYHRRKRQELARQFSFASQAHCSRVPNNLGDSLHFRPQLEQAKRAWGRKGKGTKLKSPRVPPIFLSIPTFDNKWGPIPGSNGLSKSNTSLYQDGQVRDNKGSDATSISEGKAVVVNPIGARTEPKQDNLFFALPGCGQKCPVLDEIVVELATYGHMASIGCPGGPRVDRLEPSRNNTLFDPVGEVTFTITRHPGCLGDNHINCSQAGGGNTMESHWQRQPEKELAPELHSQGPHSTKSRHRKRGAQRITRERCVGTTKGVRATDHKDGRRERRKSPNDPTEEKDIEPTTILTRRNEDGERRPRVSPRRPVRNQVMCRNGTMTNQQAEDRQPAHTATGGDDNKRGLTRQPHXEE

SEQ ID NO: 979545 - protein, 271 aa, Homo sapiens
  misc_feature (82)..(82): Xaa can be any naturally occurring amino acid
CRNPNAGGSPAPVRRSAGGSGTVHVKLEKKDKERDTREGDECPSPGAQASKKRHCRCAALRPSVAALVSPPCNLLFVERLAXRVLWSHGAFLVRSIIPGLLRLVLSPVLPASVGLGSPCLSSSCQRPPEGITLHPPRRRRFAQDREERSFEWPLWLPARPVRLGDHRLSLCPVLAQRGRPSAHPFAGIFVRRARPSLRGAARGLLVGLQHRQAPQLSLGTVTTPRAALCMFGPSCLRPRAHVARLRLLVPRTLPLTRGIDDCSPQPGLPAP

SEQ ID NO: 979546 - protein, 648 aa, Homo sapiens
  misc_feature (328)..(328): Xaa can be any naturally occurring amino acid
  misc_feature (330)..(330): Xaa can be any naturally occurring amino acid
RGSVGRNLKDSRKWVKMVSTDTRWLPWRPKYCHQMDVYILGDFNLPRAHVLYTGTDTHWMKAGEPLEIMIQIHQVEPGLTTDFNVHGGSMEQIQGRTHGNQLKITHLQITTVSKDKTPTLKGDLKCSIHTMTVHTNQTLVTTKQAYPTRLQLWIDHTQDMVRTDYTVTRTNQYSDEKRTFDLRRNLPRHSHSGELFGSAIDIWYRKLWFEDPVGQTCTNDNQTLATELYTGGLTWPQETAAQHTHITGDRNIRRQPEADDNSRFTNTSLRKLLRNNAGVCRNSRYINKHVRKTNTVQPGTRNQRPRGTKNRRCTQMLHICCSLAHNDXSXLSIYSYDDNALENSRRRREEHKIRRNDTKRNNDRRDRSQTDDRHSKAESASGSRQESSARAQEILREKKRGRQQEQDRSRGERRAVSERADGERDGEQEGRSARKSRRDDRDGSRADEQRALGGTRTSGEEEEKQERTSETPSDERDEGKHEEREKKQQTEKRRRQTKKKRTTSGETEDSAQENEHRTQPRANAKQERQGRQRATKKEQREGGRKKHRRDRQRATTRRQQKEEEEKTEKQKNKTREEKEEQREQERKKKSKTKRKKARKGTERHEKQEREKRGEKKEGRKKKEEDKRGDNTAERQRRRKTKHRKDAKE

SEQ ID NO: 979547 - protein, 140 aa, Homo sapiens
MDRRDVPSLGRAFSSELATLVGVLKPRRTLWRARMLISPRQDTLPTRGPREPCVWGDSCCPVCVGVSPPFTPVSRQGTCCALAPASERGLAPPGGSTPHGGPGIHEEPVLLRSCYGQNGLANRLPFRFHCCEKNYSRRAI

SEQ ID NO: 979548 - protein, 364 aa, Homo sapiens
MGSTRMILKPKVQTLCVKRSPVPEHSMVHHRPVTQPVCDKRRLVTKRANRVYRSLSASLLPRLRITANSTPTSQKKHETKDRHQQTHSREQRRGEEKEKEKREDRTKKTQETKRDSRKKERTERREERRRRKDKREETQREEEERTREEERDSTSKQRQEERQEKKEKEKKDKETRKTKETEHTTRKKRGKPRSTRKGEKKSKQSDRQKMQKQETKMRNKRKKQNRRNRRKRKREKRAEADEGGKETTRRTGKKDERQRQERGARQRPKAETQARRKERTRERKRQRKKHRTNTNRTERESEASTRDKTEETKGNSNTQEQETRETEEQQEDRKHTNTHATRQQQQKTTTKEKHDTEQTSTRKR

SEQ ID NO: 979549 - protein, 238 aa, Homo sapiens
MSECVPTTDYTMLFSDTMTDEVIDLASVSLRNSVSGYLETGNTYVAPFSDETESFTPRIRPNVKETGKATRGTFVDDDLQLTMWVLFTQTKTCRPTAMHTPPGCLTGAAALVLTLHWSTLLTDAPGWQALRRLLRMNRLTSSLATDVAARGLDIEGVKTRYLNFTMPNTIKHYVHRVGEQHVLAGLGAQLSLRWENDEPDSMLQKRDCTQLPRPPVTRQILPHDVILKFRRQIDKWDA

SEQ ID NO: 979550 - protein, 817 aa, Homo sapiens
  misc_feature (357)..(357): Xaa can be any naturally occurring amino acid
  misc_feature (628)..(628): Xaa can be any naturally occurring amino acid
  misc_feature (683)..(683): Xaa can be any naturally occurring amino acid
  misc_feature (716)..(716): Xaa can be any naturally occurring amino acid
  misc_feature (774)..(774): Xaa can be any naturally occurring amino acid
  misc_feature (777)..(777): Xaa can be any naturally occurring amino acid
  misc_feature (786)..(786): Xaa can be any naturally occurring amino acid
SPPHRLHCTHVSFSVPTRPFPTLSSSPRPEEPLLSERCISGARGRARPLDSDRLRESEKRPRPGRAHTSGVATGREVDSLAAAAARRGPDTHRYARYPQAPVHQWRAWILAKVGSRQQGGGTNVLTMGQYALVAQTQQQALVHLVTPSSGTTLPNNLYTFHRFCSSRTRTSLNLSKRHFSEWQIWTLNYTLVIGIPTNGIPTAINKQQDTRMTTISVEGEHGTHGQNSLAPGTMDPRDTTTHGTVPNGLTWDYRVRTSQIHWATHLGQQASRLDRPWFTSRHATHRRHITQPWVGLNDGNNGRNGLMYTDMGGRNSHYGTKATRLAKQSVIPDHGRDMMGCILVSSACVILFSLYIXEQPKYQDTLHVAEQKTAEHTQYQQTKYAHRQKRLNEQAGARHKRATTLTEKQPKERELTEMNTETEKEEQLMREEQTSKRRSKGEQRKRMTSGKERQASENDDSRESDEDRISRTKEGQRRNDTDDTSHQQKREHKQSEEHERQKHDEQQIEQSEDRPADESNTGQHKRMKVATEQPREYTMSRNDRHTHTHRSRKTQRKDTDDRGDTTTRAKRAESESRQQDATARDKNATRRLSVERQTESRQQGQGARQRAKQQQNDETRQRKDKQQXMTQQSVNRQHDYGHEAGEIREEESRGTVGEYGAIDSARSDATRSEHQRRRERADXRDEVHDEYQAQSKARTDRGDRRTRDSERMTTQXRTTTPCTARLSAVKASYAMRAERTTIETETRRSETHERSDEGERTEVSDDEQEGRAHXEMXEQRRERVTXSTSDECSSNGEAEYVRPGVERYTERSKHAES

SEQ ID NO: 979551 - protein, 415 aa, Homo sapiens
MCSHSMYTRALILLHLHTIRVRPKCNTQDELSWRHPASSPHPVSYKQSVARVRDGYSTRALPYLSIFIPLSRGAHSRGAQPPCARAPLRPDPLSTPAPFSVSPHRAICRSDTTPQRRQHVTPRPSNLSPATRAKKADNPKERVGTSLLNTDPLPNHHMWASLPEGKPPLSSPPLGPVPLTRASPPRTFHGRPLLLPRPSSTPRDRGAHSTFFLPLLSPPAHNGAPPIARDTINLPWPPPRTKDSPGKQPQAGRRCPTHKQGGAMGPPRKYPNKAPGAMSTTRTDPLHNHEPKLQTHSNPTESAAGPFNPPPLTVDPNYETPPPPALLTTPSPAHQHSRPPPAPHRRGRPPPRTNPPPDGHTAPPARPTPPTHGGRTTRPAHKRHKQQNKTQVTYRHHKNTHAEKHLNNHNHTAHA

SEQ ID NO: 979552 - protein, 204 aa, Homo sapiens
MPTPPTRPTPKTKSTTTNKNKENRPKNTQKDQNTKRKNKNTQRTGGAGGRLQPRGEGNKKARTPQRERGKEGATERAGGKREEKRKAAEATRTGGAPREHRESGARRQAPDTRTRERKTDTTQQTQQDKQTQKAARSGTRTRHTRDSAKDDKTEHTSQQTPDARQPRSTRAETTDASKHEATPSEEQPKEREDTRQTRQTAEHK

SEQ ID NO: 979553 - protein, 360 aa, Homo sapiens
MTIPTKLTITTHMSVVCRMSILHIYYLYLGKRRYNIDSIEIHDQLYTPSATIRTQRHSKGKEQQARSRDTKTEAGGQTEDRHTTEGRRKNEDHNETAKTERQENNTTKHKTDADKNEKKSRKHTEQHRQHNSTHNTDETEEHKQNGDKQERKNRRRTEHEAENRHKEQKRTDQEKPSRKETSRLEKTRSMKNDRTQSTRDKKRRHRTTYTKITNNTERHSTNINTKNRNERSGRTDSINDKRENTEQKQSKTNDERRRTARQEEERGRQRRRTREQTAHTERETEANRDAPRRKQQAKRRTTGKQNGGERKKQKARRREKQKNKAGEETARGSTQAPTRTETEADKEHTRHRERATTKEQ

SEQ ID NO: 979554 - protein, 227 aa, Homo sapiens
EPLWLRPVARCPRDPQGRRGFEGTSSKANLVHCGVPQTTQRNKLITTKIVGGAAHGATKKKAVLKQQWWWGAGGGDPTDKSGEGPVCHNTGVFPTRGKPCVAQTNNGLGHLSTHNYKKTAPGGATPETFSGDKTTKKEEHTEEDHKPRGVVNQTPGGCTPRRGRPEEHKNIRRPRAVVVSIQRNKQEERTAQKTRARQQKSKKIRGKKRRRERKEERGEEEGRVKME

SEQ ID NO: 979555 - protein, 79 aa, Homo sapiens
MPAYSCAVRALWVVLGLTEWPGEPKVEMSPWFTGGPVMPGWGLRDLLAQEAWGGPPVSVGRMCPVRFPGHGGPGNLLPV

SEQ ID NO: 979556 - protein, 561 aa, Homo sapiens
IQAVLSKVQLFFSMHRPLMHMKNSCTWQRRHGELARGTTTLRWDFNTTHRPTLRQEWTPQTGQRRQYRGQMAQTPADSLPRTKLLARQTHAPRPIVDKWPGKTRSWPAPGQQHPQITDFVRSKRTFHTTTSGTRDSSYSQIKHTLASHFLARTHATSYFYSGWAKPMWPIKNITFIHDGAISHLIKLGTAFINNHRSTERALTTQAKTPTTHTVHKAQLIAPKKHHRAPHNTTTPYEPSTAQYNISPIGQPQAGWAQTRRGSTSKRTAQHRDEQTNELRAHTLAGRHTRRGEKQIQTTNMTPQEHAEKRDPIARNRTIEPKVSSNTSQNIDVRDTTKRTGKNTQEHTNREHDSQYTLTRHSQHNIERLIDERKSHPETDTRNYSYRQVGAISSATPPFLNQTEENTDNRPHINHKRGIVEHSTPTNKRWTDETYRHTRPATELRDYNVRSSAYSMTCHAHHADHAQHKISTTENIDALPMVQRQNATIHADRRRANRRRSHTSHHVKTASSTNQMQTASRVNNVQPNIETPTTTTQRQSRRQTARSRQETTSRTRHKPRRC

SEQ ID NO: 979557 - protein, 101 aa, Homo sapiens
GGASSWAPAACILLALSGNGAAPAPGAWPEVAVDAVRHSMGGRDACLRKLSRQSESCRVLTLGSQIVGAHGRLLSGSQVQRVAVSRARMWHVECVEVTEYH

SEQ ID NO: 979558 - protein, 186 aa, Homo sapiens
LNSGCKPWIYMLCTVHLFHELTVQTLPVLLRQTTWKGRRLGETSASKKSKIVLLCPESIAVPAIGSCSPGLVLRALDPTEPGPRVCSLRLQAAAWRYSGVVLLVLMRGMFRVSGTYHVCIPPLLGVASVPVAMWPPSAWTDLMVGLKILESIIGLGFRTGYVRTLPRVSTCVPCGMESGLCFLLDL

SEQ ID NO: 979559 - protein, 71 aa, Homo sapiens
GEDGQKERDFHEAAAGWGAPRSGLCLGEKKARPNAGQGLPVRTREWKGARRRLSPPVKKRLPSLPVQIRSL

SEQ ID NO: 979560 - protein, 81 aa, Homo sapiens
GAQEALGGNAASETSSGTGSAAGPYAAPFPSPEGYHWDPELGIQFPTKGLSPFLKAAGEDLDVYILILVVDVRRTLGHRLE

SEQ ID NO: 979561 - protein, 121 aa, Homo sapiens
MSDLPADEPCHRFPSEMPRQGACWGRNRTSFLRYCWRLPANCQFAVSVTQLKKVFVFRKYREALLLCFLSLFVEAFLSRSGFWGGPPHPKSPPLCRPLGALIWAGENSSIVLEDSSELIGQ

SEQ ID NO: 979562 - protein, 122 aa, Homo sapiens
GDNRAGCPRLRRRYSVTPSLSALRFPAWCPQDVRSHGECTDDAYEALSPSSLRLAYGPSLCRLYPSITVTPDDRAKLESLYTSLENLVRSVPRGRAQVVRKKSNSTKTCLSYSIKWDQNLRS

SEQ ID NO: 979563 - protein, 268 aa, Homo sapiens
MPVSVWFLFSSLRVRFLVFPCFLLFGLLFLVFWRSGFLAGRFVLACASWLLGTLSMSPAGPEPATREGSKARRGIERSAAWAGTSGDPAHPQQPLATGAKPLIARSRQGHRQLPSECGAHQAHAHPELQLARKRPAQPRFPLRLSLHTSLQAEGAGSRPWPAQKGAPTVQRWAEGLLKCQPKWEPRQRRRRERARAARTASTHVTSHQHFEEAEAEWINEVRRSRPSWLTRRNPVSTQNTTKRKFERGPPSARSPSKSGGLTQEKRRD

SEQ ID NO: 979564 - protein, 337 aa, Homo sapiens
GYCIRCVCVWFIHCVKFFPPLYSTLLKNSYCRERHVFLYEIIFSGLSTITTQSDLRHILWCWYTASSRSGTGAGLLLEVPGSVTSDPKCSLGRGKAWYQTKLETLQDPGWEAMGNDLRHTRNEISEMNRAIQRLQAGDSTHIQEPACQGVEAAIAEAEERGEPGVSRNARAKQEELEAALTAGHSRIRQRQLREYQELIERDSLAQDIEIATYRKLAWRVEGEPVGWRWEMGHREYLHADVNSTGGSSSGGGIGLTLGGTMGSNALRFLHAVTGPGLHEGLIPSGTASDQSQECPRMIPPPNISTLSTSTTPQSQVRISNPLSQCRRFPDQVNHVGK

SEQ ID NO: 979565 - protein, 325 aa, Homo sapiens
GPFEFLHGERLATPPNPSRARPGCQYSPQNAQGSYPETLPETFFGTCGLVDPQAIWELVKMSSRAHKLHVLIKEMQVHGQEIESSQKMELEKTCCQYSGCVHSHDRPDPWLLEKEHDPRVITVSSGGMLVQKLNTNDLQSERTPFDGTTGLCYKTRGSKWFSTDRVGPRAPGHPMIRHQASVAGPTPHGVRQAIHGVSTPGSRDRPRSEAQGVATTMLWLALTSARTNPQASPAASLSVIQASEASFYTLASRYSVLLTAPKRTNSLTIVEPAGSDISNRPTQTQCEYQNCLSRYQKVTVYGNQMNKKTPLQLPLEDVVPTVSAS

SEQ ID NO: 979566 - protein, 127 aa, Homo sapiens
LLSVVLFDGLMCVFGVRCFGLRLSQSMHSTRHINNSRIDIIECDRIESFAADQVSLSRDVGVGLRSDAAVWRRCAREGRAVNGQLRNLWCASVVLWMLWVEASTCSAAVACVACWASSGGGLYFYSV

SEQ ID NO: 979567 - protein, 480 aa, Homo sapiens
VLPCLLCFVFLSPFPACLLVSFRVWASFSFFFRFFSVVFFVFCSAVVAVLLLFLCFSSSGFLLSVSPFFFCVRSFLLRALSSRGFFVFPFSPLVSPVAVFSRAFPLSLFPVSLSFLCPALFCLCSSSVLPLPPSRPARSSRQSRLPLFPFFCRVCVIILFSPVSCSLLFSSFLFVSCFFVLSLFLVSLLSSLFVFCFSCVCFCVSVRDLRTQEDQRRRRTGIMNSRLCHPSALVPQFCHVGPTHNLYGVPSYFPRWGAHKIVCEAIECVSAFQQGGLIYVAMQVPRSQPDASAVQVKPDHDSEAMIRLQAARQRQCSESSDNLVQSSTRRLQPLKSRQNETLGGEREDGWRHCSDHRSHRNNMLRKERELEEARKKPAQIRQQQYKFLPSDGFEMSTYRSLLLFKCRPGPETVRANYQSLLEHVRGPTMRQPQHFPKVHAKPQGLATAPVPQYIPMSLPNPKCRVMPIGPPKCHAPPSEY

SEQ ID NO: 979568 - protein, 145 aa, Homo sapiens
MPINERWCTVVIRVLSVLQHKLHRHASWRYFGYYLVQSQCVCGICAASCPVVMKTCAELSRRVYQNTPFQGMYDSVVPVLSSLSAGLEASLDSSAVGPSLAAALPVVSTVPEFSHGSWQVKRSFLSWFRLHLQQGKCPSCDHIIH

SEQ ID NO: 979569 - protein, 269 aa, Homo sapiens
YPSRLCLVPRLLASSPRRCSAAALLRFCPPVFFSSFPAPPPCFALSPVCSPLCPLFSLTRRLTSSLPFPHSFLCRRVLICSLVMARVSSRVSRCSGVSCLRLAFCSSVAGAFLLPALLRLVGRVSSVVSVFAVLCLVGVRFPLLRFLLRFFLSVPSGLPVSGFSLLSSPFRSLLPSSRVARVLALVCVSTPVSRSSLLPSLFVFPPPSLSVLCSSSLSAVVGVCSCALLMSLLFCFSVVFVLVQVRSLELIIFLVCVLCSLGACCMLTR

SEQ ID NO: 979570 - protein, 231 aa, Homo sapiens
TFSIFRHPTSCVPPPLRVSSSIVYVVVCPLSSLLPVLRISLSICSIVSCCLLFLISFLFASSPPIFSPSSSFPCLSPLFPLPLFVSCCCALCVRFCLFWSLLLWVLCCAAACSSFRVFARPFRSGCVSLVLRVRCFSRTVCCCICARLLCLDCPASGLLLLRGAVFLLVFVSVLLVCVMSLLIVVALYTIYLDDYDNISSKRSYNAYGVCMSEAFPASGVLKNLCLKNGFS

SEQ ID NO: 979571 - protein, 132 aa, Homo sapiens
MWLCLLVRVVYDLMVLSYFVALAWMALFASCSGCSFLSLSALLLVSLWPVSGHGVVVCVFTLLLGCCMLLAVVFYWLSDWWFGVCCTVCRVSPVPLFVSTVVSGHCVFVRVFSSVVLLDCYCHVISFSYWYL

SEQ ID NO: 979572 - protein, 148 aa, Homo sapiens
CAYGASLLRSFALGCALLRSFGCAVTLAFYGSFCGYRLGVVPVSCLLDGVHTCAISLCSVCVNIVFAGLHQLSTQCGTVPVVGLLGANKWCSSHGSAHPGGLRVYLAPLVACPLVVCLASSLACSWPCSRRCNPRSSWPHPFFTDFLS

SEQ ID NO: 979573 - protein, 83 aa, Homo sapiens
ALTTHSVNPEVPHGRFCCFAAGKGGATEQLIHMPRIGVFFQTSGGWTMNVVNWFLLITPELNFYVNKENQQFQQKIITNNKKM

SEQ ID NO: 979574 - protein, 484 aa, Homo sapiens
MAFIINTASQPRGTSFTTCPIPSWIPHIAGACTQPPTGAKWQSHGAATLAPWWANCGLHTPHCIRRRNSLGGPTQALKAINENEHDRLCLGTYGATLFGIAQRGRLVVHIQDVNTDLGYFIHYHFMNNRLSPITLHSVFGAPQLHNLQLVVGNMRFNTDMWDKDICGPTVYEGTITFGGLYPFYPCGPQVTLLALRRPTWEFDNRQSMLRTYTLRQPTHASYTYTTPPKRSVTFSPRQGNQGRHQCMNTIFLTTLHCVYSYPPIKARSDTQLANSGTVLSNTVVVPTTRYYTSTKDSIVQPSIWHTDYTCTLHTEQTQYHQRGRAERHMSERGNQSPAWVKCQEPAHMLPRHIFVDTLLGTSQRGPNEGTPSIKTTQLNGKYHMDNERDRDQARMVKNQWSKTKCRCRPTTVYKAPPQSATNLRVDHTTHQQRLHKHSAHTHIPPTAAQQTHDTQQDSTTHIEQNNQQRQLTHHHPAAAHQSNT

SEQ ID NO: 979575 - protein, 132 aa, Homo sapiens
MGTGVFTYMAFVLVEPTGAGPFGFTPQDTHHQGANAKNTHQHTNFVCRRRGHTKKLNTSVEPAQYVRNVAWSSTQPGDCWVIHPKKPGHVGQHEWAHGSKARLTPTRGKEQRRRETTTENDHITDETETTQN

SEQ ID NO: 979576 - protein, 164 aa, Homo sapiens
GWGPEAGRPPDSSSAVRARLVSPARQSQDPAAAFSLHLSLPPAPGRGLRLVWRLGGASGGHWGRASGGRFRAGAGLEGAEGKPVWKPRGAQSGPQHTLRGKTPRHKRDDRRGGGVTRREVGNRRGRRLVRTELHIRGDNRWSLTPQGGNTRASWEVGAPSKNYR

SEQ ID NO: 979577 - protein, 58 aa, Homo sapiens
MQNDKQIFVNEKAKDPMRPHPCSWARDGARKKRIGSRKHDTEPAHTMGTTNKGTGGHT

SEQ ID NO: 979578 - protein, 117 aa, Homo sapiens
ALTLRLAAGVLRRVVGPSVALSGRPYHFASGSSARGVVGYGQPRGCKGRHGSQMRRVPLVLVLPEANLLEREDPLRKTPSGGQYLLVVGPGLAGITTLDLGNFPQGNTHRSKQFGAL

SEQ ID NO: 979579 - protein, 500 aa, Homo sapiens
QTLTFSCLVSSAMVPSRTVFVWGKLEDDRADSTTSGGSSLEHSDYAAKVPADHRGWSGAPPLWAYIDIRPRAHTLSFPKGIAGDIGRSTRATHEVTLHWGAFIPGVSLRPLGHLDHTRTVVDPHLMGWTTLGRTIPRTDDKGQIGPHGETAPRTDRPGMGGHRTGWATQRCSLAPRPRTTPERTNIRARWQWAGQRTAISTSNSVSKPLGRPPQLENRARAHAHTTPTPSGPTLRKLTRGVNTARGHAHGPRQPLGTNMCSPCVAEPMWAKWGKRSGHTTPKSRAPRKRNPTNEQPPPASNCPSKPPTGVTSTHGGHPDSQPGTPHTSGRPWHRVSHNPEKERRAKNKQRNDGHRTPYEWNAGNPTRAPDTGAHHTNGQDQMGATPIVTTPARPKQDTRDKQPKRHTSNDAEHHTTGATTGGNKSLHRRSNSTHKAGDQRSLPKGGVHAGKTQLTTVSSFTTLYPRRETGKTDETKRQTARTPRRQQTHKPRRGRKRRTQ

SEQ ID NO: 979580 - protein, 83 aa, Homo sapiens
MAHNDKAELSVRQTKSNQPLRNKHEERNNQQKKKKTAGQTQTQTLETHNESTELPHTNTVSLIQTPATKERSRQQKQPPRLPE

SEQ ID NO: 979581 - protein, 186 aa, Homo sapiens
GGLSAEAARGWKRILGAAKSLAPVGVRMLRPTSQYVLVDNHNAESKEGLSCSGCCSSWLVFCHSGHSLQCYNGPNPIGCCKTAVNWFIWIWMAWSHYQSWCYNVVFTLCWHSCEHCNFQRRSTTRLRGKMELTYYCCKKGPVYTLTNSLKMVGHPYQRNQFFWLVTPFLGSKLGAFIPKSTPGELL

SEQ ID NO: 979582 - protein, 30 aa, Homo sapiens
MCNDKKMFWGIANMLEEYKGEKGDKANINV

SEQ ID NO: 979583 - protein, 52 aa, Homo sapiens
MLYCTSDSCCCRKRDTVFRVRWKQSLDAGANKLGGSASSRKGIQVLHQWKSP

SEQ ID NO: 979584 - protein, 303 aa, Homo sapiens
GLRSSRLGARPSDSQPARWRRGSAVRPSPSPPTRSPGRVTACGPRTQRRGTGGRAEPRRQGRPRGRPRGKKLLDDLGVTTASSETAAPESRAEGRHPGGRPFRGPQRESGQWAGHRKNQHRGSSGRPTLGRGKAYLVGPTGISGWAPNSVGRLDSQRDPWGTHSAHMQHDWRVKASGTSGDMDGVRITEPAIVRHLGMNSGLPPGEPCEGANPRKCAATREHAEGTRAVDRKLGMLDTHKVHGHRVKGAQKGPRTGTREEVATRAGGAQVEHHRVQPAGNREGLREGTRGGPRTRGKRWPHGY

SEQ ID NO: 979585 - protein, 107 aa, Homo sapiens
GAPFSAATGRPRPPPQPWRHVRGLLATCWRLCQCRVHLLPPLWHIIALDELKTDYKNPIDQCNTLNPLVLPEYLIHASSVSCFLCAAEWLTTGSQYAPLCISYWEVL

SEQ ID NO: 979586 - protein, 84 aa, Homo sapiens
SVIRGAILVVENDKGIDMVDHKYGRSRGSSKGVVMHMGDLLGDVLVCVCDSTCSHLVESSHNIHVDCNDSTPFLFALIAIVPKM

SEQ ID NO: 979587 - protein, 312 aa, Homo sapiens
ALHPGVVSKSESPKEPEELRKLFIGGLRLETPDESLEDPFLSTWGTLTDCVRSERLQNTKRSSGLVVFVTYATVEEVVAAYVVLGQRRWMETVVEATVELSPEKILKDQVPIVLENLLLVVWHYRTDIERTSLGDYFGTSSGTTCGACNHELTEAVALKRGFAVCNLDDHDSVISIVIQKSHDCEWATELVAVSIALGDSKRMAYVLSSHGQRRTTVVLGDRWCVVVAVWFRVVTCRLQFRWRDTCPRLWLPIGAHPSAVRRSGGRGVCLGAWAQRAHFGGVGAPVSGYPPLPFGPRGLERLPSGPSSPPVV

SEQ ID NO: 979588 - protein, 182 aa, Homo sapiens
  misc_feature (28)..(28): Xaa can be any naturally occurring amino acid
AVMNWDAGAEPRDHLPLHRLETIGDLSXWPQGEALPKGVDMRQDELDRLVHLAQWREPGILLPLGPSMALRSSSSSESCVLVVGCQRVCGGDEKSSFICNTLQACVQNKAWAYDQFFPISHVRLWVPAAHPSFHPQSLLVALHRWLTSKHIRRRKCYRFEGHGGPPYTWRMVKRHKVHNLRD

SEQ ID NO: 979589 - protein, 105 aa, Homo sapiens
MWGPKGTHGNGDKGQINKVRETYTHAATTLITKRTRPHHANGHNPTQWATMGDKTQKHKEDVPTKTGTHKTKQRPPPAHEHNNPTGGRRKRHAPDTQRAGRKHTT

SEQ ID NO: 979590 - protein, 325 aa, Homo sapiens
EREDREKHRPEEEGRSAPEKIIQSLKLCPGGSTGQPDSPPGCPVWLEAVIVILPLRACLGGVADVLDALFFEKPVCSKMPRGFLCTFTPHTRPKRGPIETKTCMSSTTNSRLFGCPNSMTRSSWIISCGASLEPPLVWIAPVGKSPGCFICVALKDSTGPLVVPVGNFPKRPPFALWNLESSHGPCVLPWKTRGVLCRMHVANARILVVLLVLKGVVCLWWNSGSACSMEKRLCVLDRLDTLSKSYLVPGLTVHIVEVVWPTCRWVMPGLQRASMGRGEAVSLRDLVFHYGAGSLGGRGGLGRRRAGTARAWGPGGRRVFVPQMA

SEQ ID NO: 979591 - protein, 104 aa, Homo sapiens
GRAGMTGVRVEGSVGLRNSNGVQNNACTDGGSIIWLTERIVHVTEVDDVKNGACSEAFRASKINRIGQVGLRLWRGITDVRYKLRHDQVTTGKQLSGECDSMMR

SEQ ID NO: 979592 - protein, 148 aa, Homo sapiens
MECNPCVTMHCLNCARELYTCLTNCWLKQICPTVNWGYHKLEGVAYSSKERKTPLGGNFKQWVLEASSGEHDLEGNLWDGPYNLDVRKWKRGSTIFDEHLGRISLNMFYITVVKRLRLRFVKAGRNCHAFEELVFVGNPLDRETFCEK

SEQ ID NO: 979593 - protein, 155 aa, Homo sapiens
MRKKRREQKGREKKRQKRHEGPRDREELKKTRYETYGRRHRKGEKKEQQKEMQRRAEEQKQERKREERRRETQKRRRQDSTERDKEREKKERGKREKQKKIEEKTKRTEKKGEEQGAEDGQQERGQKKRTDRKRREEKKRRHRTKKASKRRSKRK

SEQ ID NO: 979594 - protein, 107 aa, Homo sapiens
MVGQKVVPKEKTGGLQHELVWGFPPTIKKKPRGRKTKQGGFLGAQTHPAERGAFLTRKRTKTGGDLQNTREGVSPNRRKALAKINQKYRRPARWWVIISSTQSRNSY

SEQ ID NO: 979595 - protein, 123 aa, Homo sapiens
LLASSALEYPDRRHAGGGLQAGMVPVLQRVEGVSNRVVRVLGCNPGSHDLFQGDRSNYIVGTGPRSNPSLTLEEPAIPEYISVFKAGSLTEFNTAIQEIGSDSTGTEIHSGGIRRYLCKSINK

SEQ ID NO: 979596 - protein, 146 aa, Homo sapiens
MGFDHRTVSYHGRRLDATPGDVRVIGASCASGSVAATGCTSVPERRSEDVVLVPRSRRGGPCELRLCLIHSNSPCPIRTQGECACMCVGPDGSPALAMLGRSPGQDDAHFFSDRGQALAKNPENGLTSAGTEFARCENGEDYRLEP

SEQ ID NO: 979597 - protein, 264 aa, Homo sapiens
EAERGLEAREGSERFRVQRTGDHVRGSSCSQTPSRAIPATLSGGARDGCSPARDYSNDPRGQRSSEPPPGGTQDHSYDRKFLMECRELTYVNQKDPPRGSAHHSGGHQPFPVNEPPLKASKEQPVANRPRKISGASAVKKSTQLAMEHFNTHQPSVVEGTYPRGALRGPFLEKEVPPARPYESDQYLGQAVDVGQDTPSLSPSIKGTCPLFFVNTQQIPLWASTDEGSCTPGSDPAGQPEPGQDGQTTFFECQSQPCVGAHHLR

SEQ ID NO: 979598 - protein, 136 aa, Homo sapiens
  misc_feature (36)..(36): Xaa can be any naturally occurring amino acid
AKSIMSETRKHVIISSHAHRIVNHNSMYLLCALLVXRSLSIVLTHTEYTMDLEMHRVAVLEPSPMIGCSEVQVVSGSIKQGVAMARLDVKITRRSLRSAPQVRPISRGLSPPQSNVGSLPGHLANHTGSYFLNILR

SEQ ID NO: 979599 - protein, 175 aa, Homo sapiens
ESIPQTSFLLQWRSRTGPVSTAGDPKQAREAEARATVAEDIVLSLWRPLAHASPESHLHLYRASCIKSPGCIHIKLKISLYILVTGISSFQCHYRESASTMSGLTENEKVLVGQSLLAPKISRMEVPVNWVLGRSKVSNEPRQGGIMVVTNSKLLGHPKRMNPRYKRPPLETTIP

SEQ ID NO: 979600 - protein, 89 aa, Homo sapiens
DRSPGLRRPGTDAQCQTLALTVLKSRSPSPRSLPPALSCPPPQPACLDHSELVPTQDGSQGPEGELNRLFQGIILFSGNSVGFIYGVRG

SEQ ID NO: 979601 - protein, 327 aa, Homo sapiens
MRDTGTHTHDNLDQRQSVLSQGTIDKGIARHSRDGQLTASTVTPIPLDFLDIGDSTHLYRSAIKLQDNRQAHNILGQTTEGQLKKRRTNPANRTNSNHGNTHITHDYTTNDATRENDSPHSETREHPPKRNRTTKPHMISTRRNECQTSTPNRVEQTAYGEHTTKRTTTLTRGNNLVTEPRPRTTYRSERDERKITGDPTTEEQETANPRLNEKRTTRQTSRVITTTRGRHYNTESKETHSTHSRHNTADNPSKKKMSHHALERKANRDEHKKELQRKYNYNEAKDTPDETNHNPSNHTGIISQNTTTGYTINIKTRHYHDCYARPT

SEQ ID NO: 979602 - protein, 253 aa, Homo sapiens
  misc_feature (15)..(15): Xaa can be any naturally occurring amino acid
MAMIPLLTCKNDWIXTTLHETGLASSYFEPKSVLNEYLYAHRGTCVNLVKWKILIGAINSPTREATDVIQENHLHSIDSIRIALNSGSLGATANCAYIPLNIFLVAQGALRVTVPHVLAHQNYGETQVRKPHSAHTLTTETGIYALIAIRNYRRMRPHCALNSFKLATWNSFRSQLIVRVWIQPFWGYHEEASTRMYIARHRSRIGQDLRFQGRTRRSISLQHFPVVHGSPTRLKTYIDNEDYWQPRPLALNP

SEQ ID NO: 979603 - protein, 178 aa, Homo sapiens
MCRSGLGRSGIGNAIIFSTGIGVTRKALALSSVYKLLEYGSSTISIVICLHHNIAVCRTVNCLNSPKRRMREHLSYETCAEVSFTVTEDTSARTNHRKSRLALIVPIFACLRSLFGPTYLADTVKVAQQCPRVQRWFGKGPPRLAQLFTWPFEKTGYAWYEEYLVTGNPYPTKLWSHL

SEQ ID NO: 979604 - protein, 135 aa, Homo sapiens
RQWWSWQQNAQPLVAGLDKGKLDQEAAIRDLPLPEKLGSSCRRAPTLCSWPWAKGTQRLAWPVPCGNARSFLIPTMGVHALLFILAQSTLYKTLVPGCHTSSSPSLVYFLVPFLISWGRGGGGAQAKKRFTSVLG

SEQ ID NO: 979605 - protein, 83 aa, Homo sapiens
ANFRRPSGSSGLSIPVRTRGQCGCWFAISGAFPEDGYGVCGGMKDGSMPCLKAVVDLSGTLSPLKMQLCQAHGKLLKGSRVVL

SEQ ID NO: 979606 - protein, 174 aa, Homo sapiens
MRVARKDRGVAAGWLAVCAGRRRPGRPDKGPGGKVGKKPGLGRSRPEGSINDPGKRPEGGASPKEKLLCGGHTFCVNNLRGPREEKGRDKKQACGRADIQMKGTTSDVGTPRMGITPPRWQGDTPTSTRAHYQIVSEEDICAVLPKKSQKPTCLVWHTFVSQHRVAATTVHLWR

SEQ ID NO: 979607 - protein, 283 aa, Homo sapiens
GGDELGRRREPRTIPPGRHETIGDLLGASGWRSQGVIEEDDLDVFVHLLSGVNRASIRAMAELWLSAIFIFQTSWCWWWLQRVCGVMKTIFPFILQHTPAGCNQGCAYDQFLSHISMLRLWSLQLILVSTPALFGGQCTLLTSTHKRRKMLRLRAWGPLTLWDGDEAQVTSGTCGGPSSIRGGCPAVVAAATCLSYLLNTGYAVVLVDKGALPLPKKGNGWSANRKRFTLIEQPWIGQPKCGGGTTGRPRPGANTPKRSTGHIKKKPGEAKMRRGTRKHQARL

SEQ ID NO: 979608 - protein, 84 aa, Homo sapiens
TASVGATTVAVACAILDGMEESGSGTAGRHVVVTGEYTCTKGENAILAEATSFSKRDDLGPNVALCNQEAQTGFSISRQDLGSI

SEQ ID NO: 979609 - protein, 214 aa, Homo sapiens
RKYRPIRAWTISSRVPIALPGRIQGHFQMEQPRSEQLFYYQTNYLVVAAMMISIVGFLSPFNMILGGIVVVAGVTGLCGQPKIKTSFAGGRSATPDVVMVVMWASYFLISMFGGVMVFVLGITFPLLWMFIHASLRLRNLKNKWRIQLPRNQVEEDTDGHWSWDALEQPAHKASPDHLTYYFSKVKGINIIYLKLGLQQKLKLQFAFVKTYFPG

SEQ ID NO: 979610 - protein, 265 aa, Homo sapiens
LCPLQARARVSPPWFAESAGAGVGAMGGEGWGHAALGQASELVGTPPCYLAEAGGAATAAGRQISGRGRTKSRGAPRFSFGLSAQVAADSGPFGPLGNHLVWPGGPEPFPGGAHRQGPLWLVGPPPTPRLLFIIRDGRADQGPYNFGPPCAFLRGDIVPGRLVGDTRRRGTLSLSVGAPAPFWVGPKKPLRGTVSGNRRHLLSPREARAQGTDPSFIIKALERHIKGEPWNSRATPKGGGPPRPMWERSGAPDPDPGKCFGTGQF

SEQ ID NO: 979611 - protein, 117 aa, Homo sapiens
SDRRRGGAVPCGLEESCKMSLYPSLEDWKVRPTYFRLTLLFLQTLPIQQFCQKLLSYPSRWKSLSQMYPELSQYMGLSLQCKKKYVQMCAVVSGAPLQGLGSKTFQYKLYGAPVTGT

SEQ ID NO: 979612 - protein, 204 aa, Homo sapiens
FRILKPPERTSESVPRDESPTLSPAVFPKCRFLTSCRWKADVKGSGSYESRLQCSYEEQQITNNQRIKAAVPSIKFCCGPMEKSVVLNEPPRRPDGAAHADKYSLEPVAVELKSLLGKGCPVCEGLCRPRSGESCANPAVGLYILWRTSVSCGGQTGRAQDASGTRLKPSSQIEAFRASLQARDVYVMMLCTAHRATVHGRSHL

SEQ ID NO: 979613 - protein, 287 aa, Homo sapiens
EDADPPWREEGASAVIASGPPVRALGSTEQAGDPVYACDYETLTRPFSERPAAGPGLARVRRKKPLFAGCFGARLPTLAAWARLFNRRQIPCWWTARKAAVAEVGAFHPRGAGAPELTGGGKNFFGRQRGRPGGIPVTFPKGQDFEEPEGAGKSNTFRCTQDWGGWSPRTRRERGLTPVFQPGREKNRLASEAVHGFFLRRHVFCQETTRQENKQIVLPRSVPEENFEHHVGGGGPQVKGTGHDGSEDTCTRGVVFPKKRGKGVDIQGRHPGHGRSTPAVDQGIKGE

SEQ ID NO: 979614 - protein, 163 aa, Homo sapiens
MQPEEQLDTTPAEHGAIGGMRCGKHGIAQHNGGPWAVSTGAYNLPGTLRGTHPTKGRRPRLGSRVTSLPQGKPNMAGIAPGEPGWTQAPRWRAWIAERSEHAACGPKPRELDPWLPPSGDPSGGERYTPPTRRPTTKSPKGSERNSPGDRRNWLREQRAERPS

SEQ ID NO: 979615 - protein, 106 aa, Homo sapiens
MQAWPNATGQGMQRSLLPKVLARRIKRLGFGPILEHLGESQSALGRTQYMHGRGVTYNTTYKGQTTRAKEESHGRQIRQHPRDKGDKSLPHNSGTHTLRPHTAVTS

SEQ ID NO: 979616 - protein, 193 aa, Homo sapiens
TCSQNSQTLSKNVSQAIHKYNAYSNKPASVIAKYLHKIKQWQLQAKANWPGSQVTKHISCTHSIACSYFSQLGQHSRKLGTHSHSSQACNHASSSNHSLPCTRVYVAFGPICMKKEKIYVDIERKFKTPRQGLQQIGFPMPKYTRVHHEPGTLEVTILGTLHTGDWFTEPNYLYSLTTSLHDYSEHTTDRLPI

SEQ ID NO: 979617 - protein, 102 aa, Homo sapiens
MARLETPKAQDVPEKLGMVEVQRLCGWSEPRILWGSLPGHLQSGSAVWVLLGGVPSRWGLSGKWLFSPCAGYASRCFAFWGSLGHRFVYGGAPWNAGGGPEP

SEQ ID NO: 979618 - protein, 70 aa, Homo sapiens
DGSGAARRRQDGAVGSSRGSVGPGRGSGAPVPGCVGGRSPGLVDPFRAGGFVARVGAFPGGRERLVVAPG

SEQ ID NO: 979619 - protein, 94 aa, Homo sapiens
ESRAFARLAAVLGSLFSPDDRRCVLKAAPNSSLRRICSLKDFRCAAIFSGQRSFRASYLIGTRVHSVVFVMALIMVNKLGRIWAMMDSASGRGS

SEQ ID NO: 979620 - protein, 90 aa, Homo sapiens
PYMYSLACDTHVIDIVVQGSGLRSRLHSPPAMYTSRRGALKSVRTQKDIGFYQPDVIFSVTESCLPVFGLFLQILTYINLGEAIYLDPEG

SEQ ID NO: 979621 - protein, 76 aa, Homo sapiens
MPGGRHPEVRVSEIPSSLEPRSAVVRSNRYGQVTIRVKGRIRPVGTTHEKVGPGGRGRVQSAKKGPMSGRRRRARQ

SEQ ID NO: 979622 - protein, 364 aa, Homo sapiens
MKREHERREKKRETNQAKREDRNIRTEENKNEDKQNKPADSETQQARKPKIEQKERQGNKNRGEKGREKTKTEKKKRRKRNGRRDKEETKKEGERRKEQKREERKKNDEEAEAKEKRRRAKERDREKKGRKTEDTERKKTEERRERRKGKRGRTERRKEGEEERRGKKRKGKREGEGEGRKGKPGGQKGKGGKGGRKASEAKRREEDGNRGGTRARARKQMQGRGEREKKRSRRGRARRTDEKKDKEHATERAKKGKLGRNRRRIAARASERQEERRAGKRKTKRTRQEQREGRRRDKGRDEAGRAENTRNDRRRQKQRGGNTERTTQHQTTTVHTRSTQERERAAAPEPETGAPTDGAHADET

SEQ ID NO: 979623 - protein, 463 aa, Homo sapiens
MSTRSITCEVRGLQKATVPRHNGEQCVHGIVVADPAVIEGPDDNRMGNPFQTTANRRHCEVEAQKYVPHFKMRRVIRGEDTIRVTSKRRSSGSLLHVYAGPQPRVHDISSSLSFSFPSIVLSSSTRGKTNKPKTDQGRYDQLSRNKRHEALASVESGESKAALQQTEPTQHTAQQTQHQRDDHNELVDCSHQDYTEHTHNDRDKTGERTSKQEKEEESRRRRPEKETQLERERREREGRRHEKREEERTGEGKQQGRARGEKDETRRRETAEAKGGERETKTEGEDGEEERARTGERERPEREKETRTGRRYDTREREVGRGRKKRQEEKMVKEAKDVEEDEEKRVGERGRMGRGEEEMGERRSGGGEEEDRRENREERRARETDETTEKTQRTREHGDREKEAEKRGGESEEEDERDRRKREREREKERRKGRSEKRRTDEEERSGEGYKGEDKHGQSEGRR

SEQ ID NO: 979624 - protein, 728 aa, Homo sapiens
AYQVFYPVNRMLCQSTSLCVLRTAARVPRQSQMPLPGGTQAKQESTGEMEQERKEVDAEAREEWETQQRLTRRHMRRTRPNAPRQKMEDPGTTPYHGADKAHQGDTNRHEENTWHKREERNTQYTHYTQCTHSWKPGNHKRIGEEPDHETAQPADNTPLRTHSNKKGKQPTAVTSGRIGRGIPAQGLERLLPRNSGKVGVKITTFAQKQELNINVVDTQTISADSINYPHNEQCRQQWMHSVITYKNTSQKEQGIDYHGGTNRQQRLSSASTYIAIVRLAEPATVGAIHISVLMSNTDQSLQTWRPYLTSGGRSFIRQFQQCNVCPSIQCILLTKGKPKERATSPHSMVLADPITCAHTRIIIVTDTTLYMVAYALTEAQRVHTLVFSSYPLTYHSVFTHDNPEQNSTIRKSTYKQTNKTHNNQNHKQDNTQPDLNKHQYNTTIQNKQNNRTNNMNTTKEIHKHEHSTTERNQKRQEEKRHESTHTTEKQDGERERRRRRHERARRERKKEGDENERKREKSTQTNHRRTKKNKKQENSEEQERHDAKQRTTTSRTRQQKTKRRDKRDQREARTETAADKKEQSSKEKDRETGERTAQDDTPHERSHEDSKQASTGDARRRNQEAHEAEAKRQSADTRTNKPGRRRQEDGRQRQEQHASECRGQENEHADAQQKSSRKSKESATAPNDEDEQQSHTGPKTRSTEHRTKRRGARTDPHTNSGTHTSRST

SEQ ID NO: 979625 - protein, 178 aa, Homo sapiens
MAQIQLDLPRSRAQFCDRHLALPAYLKCVCDRRADYYYVDNGYDSQSVISGNLLYGITQRIGRTSPRTGMYYMKTPFMFCMHSSLHVVGRAATTIATRCVAPHGDTTAFRATQTRHHSVSTRLVRHDSQQSYHSANCLGHTTELVRHRSFGPTPGLAQQHWLSNGKRHYFYRIPPLTR

SEQ ID NO: 979626 - protein, 189 aa, Homo sapiens
DIFPDLFKRGGERLQYVFGYKLVELEPKSNTYIPQSTLTEEPVEEDAEDEAVTKARLLRDEASLNRIGLEGPQSVYGQGAKHPYCNGKVGKPMLDLSPGRDRLIRGSADSATEGSSLSVPEDPEEESITGGTFGGDKSFHLGKSPGAGLPPKYREHSRSELNGNFARSGGPRAETTKPGEKRKPKGIGT

SEQ ID NO: 979627 - protein, 96 aa, Homo sapiens
MVTGNIDVTGVASGQAFGSVNLANWCVLGDKPTSSFLSGAHSLLKNHYLVTLWPHKSFARVTGVRVAPNYSGGVDPPHCRVTSAPQYCGGTIDEGR

SEQ ID NO: 979628 - protein, 97 aa, Homo sapiens
FRGHIRTHTVGKRLFLALSCQQSICNDRVKSDGLILQTHSDVREHYQCKELSPKPSPECLSCTKHGGIWAAVYHTCSDAIECLTRNRYALLRLRKPN

SEQ ID NO: 979629 - protein, 171 aa, Homo sapiens
MAACIAAGHWAAMGLGRSFQAARTLSPRRLYLPAGVHRGACPGSKSTGPSRARVRPNPARRKTGHPWTSTAPWNPGNARSLEVLKFISSKGERTRILLKFSQYDTAHRICLEQGEKYSNISRSSMLWKFFCRVLTNRLDLLCPVEKIKPVFLGILHSGDQERRTVGLLSIL

SEQ ID NO: 979630 - protein, 745 aa, Homo sapiens
  misc_feature (657)..(657): Xaa can be any naturally occurring amino acid
  misc_feature (661)..(661): Xaa can be any naturally occurring amino acid
MTARDARRAAQSSTRGPAGTERTTRRARARARQRTARADERTTGGRRRQREKMRRDDKRKKREKTRRRREEEKKREGEGGEKRRKGEREQEAKQGSREEKRSERRGKRNEYERRAEYERPESRAESKRRDRNRKEEEENRSQKAEAEAAHSRGVINERIETHHRKVEQRMREAKKRKRGEESAKRRDGANGQRSAETHRGGRGKKVERGERVGTEREEEERETGAEKKQQVSKRGERQNGRVSDDARRSGEREAAAAGTRRRSDGLAQAEGRETRGRESEEARKRGGKARDRRAVSRERGGGSEQAGGRPDEAEGGEEEGERVRGRSTQRRRRQGRDRRRSKHVDKYRKEAGGEYDGTTYSKMERASAERKAWHVKRKEREGGGGERASRERRAAALKRGRQKTRGGRVGRRGGGSERDENAERRERREQRAKRAEQKAADREVCRTRASRRSERSERRRTGSRMNAPSVTPRQTCSVHAMKARAATEWQIRMRDRSTGEDEWKGGRAARAARRARYPLEHDRVRAVNGAGGDERWTRERGGAKTWADVREEAKRMKRTQSASKFRVSASRGARGSRSAAARGGVRVDERIGEARDARGCQRGAEAASETSRSIDELHRQREYAEAAVRVRLVTLQEIDREGLKKRESVVRAERARXQTEXLCDELHSMHAAEGRQQMRVEGRGLMRRLAVARDREASTYRCDRDRHDATSETERQSECSGDESEQTSDEESRDGVAAPRQRSVQ

SEQ ID NO: 979631 - protein, 114 aa, Homo sapiens
MGGPARASGSERYSLKWWRNVHPTESSLAIGDEGLPFISCFILLFFEKFNESLRLTPTEEVRHWEPPPSAMVPAKGTTMTVCNVACSEDEVSQMGLGEESGPYQVISLISTCIT

SEQ ID NO: 979632 - protein, 209 aa, Homo sapiens
MGYTDKETWGTNTNNVRIAHRATPEDKKTQRRTDVHTGEPPQVGSEDTPAEWKPEGEPGKTHRENKRRDAGAPSVSPALEKRRDRHPVTPGPDKLGERYIKSTDGSKKSQSLTRKGVLPSNTVSTEGMSPNNADTKEELNNYTPVTKNTGGATGMHNTDTAGDTGPWKRRSDLEDKCGRETALFSPRDVKTVLTRGGEERHNALVPRSA

SEQ ID NO: 979633 - protein, 484 aa, Homo sapiens
  misc_feature (368)..(368): Xaa can be any naturally occurring amino acid
MNVGYKNNFLVVFDLTVNLEIAIIKRLTIINTTQVWLIRFGTGSTKLWDNQVRTSSAQQQQVNCILDTLIDNGPNGSLKNSHLLLHITTHSAQFSPKSMGKANFSRHTGTTHYDASTHNAHSSHFSATIGASTKALNNSVTPHKEQQTSLSNHKAYRDIIDSGTMLLCRYGYHMSWVAATYRSPLTHQRCRFHTHTVFITHINKSHVWAGGTQHFISPSTPHCAGGAHPEQQAGRHNHNFSKRAPNTTWDDTHSSTTRDQHRAFKNSTSGAQESKDNLLQWSAKRDRISECVNNINLDTTTLQQTTVRYTPQRGTRAENYTMAARCDRTYLASSLDRGTLTTPTSDYLLPLRVTALLSSLLLLCNNFXHKPPTAQADSTDPAPPRDEANEQGREREVGDRRYEQGSTPAQTRGKQSTESTNTQRENSDKRSRTRREEGSENEKSKAAVRADTREAKRSRKRRRNNDTTTGQHPRPNTPAQTQRE

SEQ ID NO: 979634 - protein, 191 aa, Homo sapiens
GYCEYGGVKGEARHASAGGLWAHRYKRNLPVEGLSGYSMLGPEGLNPDLTGTWSIMKWNRETQAPYKSRTSRLAIGLFATVRGRNRPEDLARCFGKKPGGREGINRLKWTVAPDVQGVGGALCVPTKSGRGVAPPLGFRGGSLRGWCTRKRRSPLVASPRVGLWVQLWALWPFACQSVIHVPLPRIANGLM

SEQ ID NO: 979635 - protein, 220 aa, Homo sapiens
MGQCGSLCGVVLGPRGRGAPGARAPGSGCCRGPVKSPERDTLRGEGGLWVAERFGPFPGGRKWLVRLAQDVGNIGAQTRGGCEELGPGWLIGFRLVDVAVDFEWFDPPQGYRVALNGWPPSFRVDPTPEDNRGGGSPGRKYNAGCALVAQAGCDLVTIPGKRWGGVCNPGRHGSHQERWDWERGGRVQEKGPTEDSMRANLHAGGDSLVRIFPKDLYPKE

SEQ ID NO: 979636 - protein, 30 aa, Homo sapiens
MRGSTTPQLERPSELLNVRNTMREHTRGYR

SEQ ID NO: 979637 - protein, 141 aa, Homo sapiens
MVSVRKGLRNLEVSLSLRIWAHQGKPLAEKCAPLVLTICHRGFVSQEGWDSKVLSARNVVKNKLCVTQEEVTQERLTSPLCEGLKKARQSNLKKELCQGIKYGAHKVRDNSQNILRLKLVNSARCDRSLLDPSKKELGVRE

SEQ ID NO: 979638 - protein, 117 aa, Homo sapiens
MPIGRNMGVTPGKGSQKTPAGPHVRFIPGGFTLTLPFSNDNKSFSERGLRNAVVFAHLLHPGGTGDGGAILQVRPILNAVLCQENWIRKTLGVGYKPDGIRGHQHGEKSPALQLDPT

SEQ ID NO: 979639 - protein, 139 aa, Homo sapiens
MVIRLCAYGDPGGMSTLVVARPNRKRLGGNRIVLNQYREMELWRLMEGQSSLDSESIAELRYKNKALAMHCQRGFAGLCSNWVRLGGGMEIDLKFEIKIWIGEILDCYRSNIPKFLIEANIASPIPVVARNPVPFRLEP

SEQ ID NO: 979640 - protein, 105 aa, Homo sapiens
MPRGSAAGLPAAAAGLEGGTKRALGAGTSARLLAGKPGGISAPKMGEPADRRAKQDELGMGEHGQWHRRMERKHSGQGGKLRSHTNSVGMTRQRTTPGRTPKHCW

SEQ ID NO: 979641 - protein, 188 aa, Homo sapiens
MVEFDSVQSAQRAKASLNGADIYSWLFAALKIEYAKPYSFDCVHRMIRILWDYTNPKSQWTKGDPGSKPPRKCQRKGPLLPWEESPRAGIWEGPQTVWVTTKPFTNDEGLRGPPHKIQYRKGDEAMLVHPVGGVQPVRGAQCRLKGHARLWGNPRTHISAHKPGDMSTPVGQALWKWSNGIQINSKGL

SEQ ID NO: 979642 - protein, 306 aa, Homo sapiens
SRESATVGCCWARGAGGAAGTRVPACPVSPACLKPLACCTPGWSGGNWAATRVALGPREHLLVRPGEGLRDRLGEKPPGGDPENGRGKPSWCGIKENAGSGAGNQRGGSLARRAWGGRMGWERDPLKVGSAQRRLGKKRARKVCWASLKRVEPGAAVPHRWLATSGGRPRGRAPQRRAESQSVERARKGGRRKVTTRQAPRATTIHQAGQVPRSGDTTMLRCGPTAWQRGTDENGQARRNEERTFPVNTSGGRESPAARDVQRRGDRRYQKRHIGGGGQKRPERGGTTTERAREQRRGDAPSRGRL

SEQ ID NO: 979643 - protein, 292 aa, Homo sapiens
LSRAAPVERSGAEIAPSSPPAGSALSGPLPLLALARRDLAAMQPPGLRPPMQSRAVPGDDGRLGETSRKVALPKGGRQRGVAGARGKGGPGGFPGPLSKNLGARAGGSPIGGAQRNGPAKDPGETFELAFRADRPEICRKPKHKGATKFGHMTAGRCGRGRRHPTPKNARDHDVGPQERIPLRRGRPAYRRGRLSHTNGVHTGGVCTPQHRGKQYTDRGVWEEQSSPPPAGAPPRRWPRHVWENPGPDRTPGDYYDSRCPGLRNHNFTKRPARTRESPVNRPGNPIRGPSPR

SEQ ID NO: 979644 - protein, 103 aa, Homo sapiens
MRTGPEGTTKFRTLFPSQDKKLGEWCVPVKKQGPWTGGHKRFSKKGPRFPPRSWCADHNFLRQFGVGWTWVNANRFAPVVRNPQSGCSGRKKLRKREIFNPGK

SEQ ID NO: 979645 - protein, 237 aa, Homo sapiens
MRAATPMEDSMDMDIVPPEAPEHIFSDCELKADKLIITLRLDNDENEHQLVLRTVSLGAVQRMRGTCGSLRHMTLTKAGPIKVALATFENVCTANGYPSAGGLGNNTTSGLKVEVWFRASAYEVDSTLVAVEEDAEQKIDEEEDVKLLKYIWKKRSAPWEGGSKGSTEKKYNFVLMKMMTDDDEEDDDEDDDDDDFDDEEVEEKGAVKKFKKKSSKNGKVNSEWKVKPFNQIKENLE

SEQ ID NO: 979646 - protein, 119 aa, Homo sapiens
MANPTVFFDIAVDGSSLVGVSFELSVDTVPLKTAEHFLCSEHLVETRIGYKGSCLAQQLIPGLMCQGGDFTALICALVHMSIYAENFDDENFNPKDIGFLAIVSSGNMWTKKGGSEFII

SEQ ID NO: 979647 - protein, 297 aa, Homo sapiens
LRRAERCLLHFALQLLQCQPDRSVPKRFRSSGAVGGPPQGNHQIPLFPRPPMETTDKTCPASNVYPPINMLDLVDKTVGQDDISNQRDWAFPGGSEHLAVRHPNQSCASGRGTIFSKPSRVPFIKLTRHHLVTNVSPWGTLGEEPQNLPQVAWSSYGRPGLFPQRHHTLPPRGINHLLGTPRHFGNLEGPRIGSKGFGQRGHLVNTLPFLQPKTTRENETLVVKSPRSFLYKEGQCINPAVVTVTFRFVVDLQIHMGQTGHGNNEGAGYAGTKMTFDQCQIKSDRDNLAGRYRTGDS

SEQ ID NO: 979648 - protein, 262 aa, Homo sapiens
MCGADGRRGIVGSRSTPRPTDPETDSVCLPGTQYVAFASLDSSAQEWGSGVALVGSSRRPKCMQSLRGDVVRQQTVFVHVQSRTGPNKRNAMKQGLRGERWIEGLKQDFEETLTVGRVSDLWWHGTPMFTAGYRTFDLDHGPSGAIRAGPRREIDCGPESRVGTSVSNRSNRIPRETFHLSSMRCPKGPVIGAVLWGLHLGRRWWTVGHRPVIRVLCPGMLCFQGEVRVDRGLGCRCRNTGGLAEAIGKQGRGKRAWVHGRK

SEQ ID NO: 979649 - protein, 78 aa, Homo sapiens
MISLESLLESAFIQRSPHLNFDTDSEKAVSDSCKKPYSAVPPFVQVSFDLWASDSETWCQRSLVRGEGLHTPGRSHPG

SEQ ID NO: 979650 - protein, 68 aa, Homo sapiens
VRRRPYWRLALVAARRDNIVFPICPGCRHPRRARMSGCVNSQFEDDPFFSESILALSRKYAEDDKKFC

SEQ ID NO: 979651 - protein, 152 aa, Homo sapiens
MWEDSGLADDGDDDPVPLPNVIAALLKKWSSVVHPPKDDPPPPEDDENKEKRTDEYPLLWDQDFLKFDQGTTFCELIPGCKLLRHQEVWLMVLQDLLQYDQGENTPEEIRKTFNIKNDLPEEEEAMYAKETSVVAEQLQCVPEHCTLFAVQY

SEQ ID NO: 979652 - protein, 75 aa, Homo sapiens
WSKVCRVAWCDFDKIKAAGKWTVRFREMEGFGLIDDAWEKTSAYEDVSNTTEWSFLNPEQDNGGTQESVKEHDMT

SEQ ID NO: 979653 - protein, 192 aa, Homo sapiens
  misc_feature (24)..(24): Xaa can be any naturally occurring amino acid
TRRLGGPMGIPRRLSLRKGGPGAXLGPSRRGRARGPDSEEAEFVVEPCPGTKTPSRTAALRQGLRAPGGRPGHSGAPFVAPRVPRGGHTRWRGIRPPSGVARLAPVLGAATLTLFPQRVVVFFSERPFWHLPSLFSRKPLGWLRGPYLPLVLPRHVKPAGQTVFHGKRDQVVAGEDFLSKPQDLCQLSLECS

SEQ ID NO: 979654 - protein, 264 aa, Homo sapiens
  misc_feature (115)..(115): Xaa can be any naturally occurring amino acid
GPPRLSAMWLQTGRGSRPCIKALNHSALLTAAVKAEMSLWRLPWDLLSLVQGSGQVSGRGVLGAIMDRVPPVKPGSRHGPGSGHGTNSCPGPLRALDRFLPLTCSVRDQFPLVYXFLPSDGVPGCGRGPFGAAKVRNGPRAGPVPSALLGLGVLGLQGPWDLVSQISLWGCPQADWTSLECGAGATMRKVVSGLPEAQDQAQCPQETTWLTDFPGLSVCPFREQAGPPPGPLEICQRVLDTHGLVMGGPVCYNPGLTPRGIATV

SEQ ID NO: 979655 - protein, 132 aa, Homo sapiens
MDYPLFWAVYSWQMKASTVLPCRSAGTVFYKSIFSPKAHRRQNKRNPPLVVGACAPKEAQHPLWCAGPSRDVTGTLAVPRDLARKAWPPKQRRARAREPTGEVLAPRRITPRQRAAGERREKNTEQQEAETL

SEQ ID NO: 979656 - protein, 151 aa, Homo sapiens
  misc_feature (66)..(66): Xaa can be any naturally occurring amino acid
MVQLLYTYEYEICLGEGSAYNSVLWDISPMMGVLDGSKMEVQDCALTLPEKMSSQQTIERRSPSKXLDVAQFLLVLHARAGNRMERNRFTESKCENLQIPGAALDKYAKKSVKVIVWVIQPIPMPDCSKSAPSIPKENFSVLDLVGDPQPS

SEQ ID NO: 979657 - protein, 271 aa, Homo sapiens
  misc_feature (84)..(84): Xaa can be any naturally occurring amino acid
ASWDDACGTEDEIYEVSVLMTCMYQRAPLSPVDVSQFSGSVQDPGLHVWGRERKFEIGCLWSLDGPLSSRLLQGDVLLYCCSTXLEEVSHLHLWIGQQSSRDEQGACAVLVVHLNTLLEERPVQHLGGCMGNESDPLHELTFPGGLQVTRKVVWKSRISPKTSNREPPVAIKENSTKVTRGKKNHSGATEGHLTLGTASNHGGLFHSVTLGQEHLRPGCVWNGPNILGTDTGGGNWPGPSGNSERKGQAHVGIVTAWGGPCGMTTSGPSLG

SEQ ID NO: 979658 - protein, 256 aa, Homo sapiens
DNTANTRPRRQGLWDRRRQLPRAQTKHGRRDATMEKLRAQCLSRVPSGIQALPGFSANYDGDGSRSLTLMSSGRSAQNSGCADQAEAEGCVQEVGPQWQRDAELWRSPCGRWGPPCPRPGGVIAAGFVPADPQWGRRRAGWTTSRGVYRWLCPPQVCRMWDVTRDLKVGGAVSLTTFDFLLEEDGARVTTGRNFRGLTYPGVSASMNPGCGVVPMIDHVPGSCEQSGQPCACAVSPPWGSLLLALLSVGTPQLGRG

SEQ ID NO: 979659 - protein, 176 aa, Homo sapiens
ELGACPRGAPSRGRPSSRTTLSVAERRKSSQAEARGGELLRNGVARQRGQPFRMPDELCGGNGAAVTIEGGGRCAVSGRRSGSCGAGAGAVRGRRSHASSTGGGHATKLLERVASSGDRLVEGLPVNDGDTVVGIEGVEARRQKKTCCDTLSRLTHAVIHSAYSRVCPVGDQHSGK

SEQ ID NO: 979660 - protein, 132 aa, Homo sapiens
MGPSIKGAITLFTTGVYLAGRTLVTFRVYFQENALGVKGLTLIGFSRNGPWRVNRFSRGRGPTVGAGKRHSVLPSHQEFGCTACDSLEDVFSTRDFLKKIDLAELVYNTGTQEVKEKRVEDVPMEFPLHKVR

SEQ ID NO: 979661 - protein, 93 aa, Homo sapiens
NCAMPYCIQVMKGVLDEGGETQMLQKSLRKEEEPSYRDTTAWSYGQPKMDADREDPGVAVSSSQAALVGMVIPSPPVMDGHSLAWGTACEMKR

SEQ ID NO: 979662 - protein, 102 aa, Homo sapiens
MLFQLQDGCHIPTAGRGSWGAGHTVSTRLNESATGNPPPPGGGPGRACQCHWQHSTGPPRHFQIGSPLLGGSRPILLCLLGQTRGGHTWAHHEAPLAFGRLS

SEQ ID NO: 979663 - protein, 105 aa, Homo sapiens
MRGRGEYSRHSIKTTPAGENTRGMLKQTHQQRSLRRANRGGPTSQAEECHKRRRDNYRRIESPEAGGDKTSSQIETEKEREKKATSNNRRKSNRHTQSRQDSKKR

SEQ ID NO: 979664 - protein, 74 aa, Homo sapiens
SPVSPRRQQAAGGVNAEGAEEPGAEVQELRKTVFDTRWVITQRPQNLKLNAYGDPPRKFPSEDRCEATPAKRVG

SEQ ID NO: 979665 - protein, 137 aa, Homo sapiens
LSPGVLVEVTSSLNPAWKSLTHRGDAQEDRATWKSKYLPSDHPIIWMILRKCVIRGSRQLWAPIASMQCMIPVVSRSASEGTVVLSGQVTTSDAHRAIRRARVGKRKPSLLEETGAHRLSQGEMLGFVVRPREVTLT

SEQ ID NO: 979666 - protein, 111 aa, Homo sapiens
MRVKAAVDQNMSCPCRVKASMGAFLPNQDANNRALAKQTRKNELSSPKKPSAVYHQYGGQLDAGEQRLNDMEGLPGQPVDLLWTHYLCISSIRWDHLPPLRVPKDLEPVLQ

SEQ ID NO: 979667 - protein, 106 aa, Homo sapiens
MMGIICGSTLFIGREEGKPRVVERKFYKTRGSGGQIPVGTGNGRVGLTELFFTKDGLYLDKKGYTPFVKITISLNLCQRRGQKGWTIMDVIRPVKELLTLSVVTET

SEQ ID NO: 979668 - protein, 103 aa, Homo sapiens
REEKEKRKKKERNEKRENTKRDNHQTKTTKERKQARTAAERTERKLGAKNGTQKTDKSKGEKKSKTGTRTRQREGEESSENREQDSRNKRRKETERKAQERRK

SEQ ID NO: 979669 - protein, 186 aa, Homo sapiens
MWSQATSQQPCPRDLQWYDLVTTYSCVGVSSEGKVEIMANDQGNRTTPSYVAFTDTERLIGDAAKESKLQMNPTNTVFRMPNVCCGRRLDDAVVQSDMKHVALYGGEDAGRPKVQRKNTRGETKSFYPEEVSPDGSDQQMKEIAKLPLGKTVPMLWSQVPAYFNDSQRQATKDAELNGWSQCTYRY

SEQ ID NO: 979670 - protein, 241 aa, Homo sapiens
TSADRALGAGLYGAPARVVFWLLLLLTVPARGSSCALYFSAVQRYPGQRRSKGHHIIVKHSFNPRHRILWTGKGQACENCFTWPFRGTPNFAWPVNSLHSSAAVGGPLHPSALGPLRPKKKPCMAGGALSPSHRLNPEPSEAVQRGASCCARPGDTPSKRCIRVCRVGDNGRAILEMGSGQGSPTIMPNDYVFRLNGRCDQEASERDVGHQDFLLWFTVNPDEELPSFSKWNVGSPPGKGT

SEQ ID NO: 979671 - protein, 145 aa, Homo sapiens
EKVAQTVCPESRGAEEEAIAWPRSLDLVLARERKQRQQRTVLLMDKQNSQMNASHPETNLPVVYPPQYPPTGIPRDLQDIRGLPWGPRSCYPPPTARHSGPCPSCFPVPNQPVYNQPVYNQPVVELQGSPWYASAKASIKLSTWD

SEQ ID NO: 979672 - protein, 39 aa, Homo sapiens
ATNISLYIQNITCGFEAALILALVDVVDYFCMSPSMDEG

SEQ ID NO: 979673 - protein, 183 aa, Homo sapiens
MVPPCRHHPWGLNYPKIGKIDGRLSRSKIVSPVGHENQRMPIGPQLTGEVSLFASLDGKKKEKLISIALATTLGQTISSMHQFCWRRRPSHVTGSAFPWRLRDAPGLTGPALTLYLAPRQCPYNYKAGVSTVLLPSKASLFPRARASPCESAEFPFVSWGVCTIARILSVTRQVSRADLYTLC

SEQ ID NO: 979674 - protein, 84 aa, Homo sapiens
STEGSCGRYTSDRVDDQYPQEPKVRKAKTHLITCRLGHVDSGKSTKYGHLIYKCGGSTKEHGEIEKEAAEMGKGPSRYAVRSLD

SEQ ID NO: 979675 - protein, 301 aa, Homo sapiens
REAVDISECGFVFFKPGNMCSVQAVKDKYISRVVPIKYQDYLKKKNKKGQKNTQEPKKNWCGRARGPRKASQNTMVGARGPPRSRQPAGTGGAPRRTGTKQRARDLTTIIKSRRKPPQYRENKIQQSYYREHTKGDTNQEEEATDESHDNKKLGPQTVGIPHNTTPHTTRQTEATSNKEQSRKKNKEATKSKEKTQGQNRISETRKEDSSASRNRRVQEKNANEKQDSKQSREQRKNEDKANERSADENKREATGREPRKEVVRDRRYHSSKRRGDNEKRHREQKQEDEERRAQRANRTHR

SEQ ID NO: 979676 - protein, 334 aa, Homo sapiens
TRALAGAPNPAMERRRCAPVFGAVGWCSCPAPLLFLLFGHLRPRESRLLPALPPLGCLLGRDPANACGCCPNVAPAERAKPVRGIGRTPAGGYLAPGIGSGGRARKKAARGKKPGADKPAGTGDVSRACTSCCKKKAGNPRCWRQDEGDPTFNPRRWFAQVVAQTDKNQKGAEEAAGKEGPINHMCPARGNLRSKGLPNKVDAPKRTFGKLATGCPGVLDPGGLEIPNTVFNREPGQQGPLLGPQEGNPACDRTPCQQTGWPESKHRGAEPPKKQTGLSAAQTRRQRPQIGGPSNRTGGAHTILGRQQTSGTVHHHSCDTTRIEDNKHERGHKR

SEQ ID NO: 979677 - protein, 100 aa, Homo sapiens
MAREIKKENVHNRAKHIVESKTDDNHTRTTEEQDQGTSIPHPLTSLANKQAQRLQWLTNERNMTTTSVHPYHTQKETHKVTQETQGSNREQETRTKNQAR

SEQ ID NO: 979678 - protein, 87 aa, Homo sapiens
MVQQSEAEQLMPDPETYTTHISTRILALTHLQHQPKATDGQGKMAPNRRTISHTEPPWIRPQHQHSDRIGTPGQRQRHDTTQNYKGR

SEQ ID NO: 979679 - protein, 79 aa, Homo sapiens
GPSDGHETRTSFQEQREEDRSIQQDCSKPTLEHCCYHAQEKGTQGDARGDKAQVHRMSHRGDQLGVSVKTSSSKTRAQA

SEQ ID NO: 979680 - protein, 481 aa, Homo sapiens
SDQTVSLSYRGVIDITMCQEAPSSPVIVYHQIYFNIGEHSGCSKIYTQVFSEFTVYKRYPCKPSIDPHPVAQSVPLVHNRGYTLELTVGNPPEVPQSAVHGDPIVGPQQKNATETTTSHPLHTRDSRLQTTTEHAEKKSMPGARCDSATHTEPTPVGATEQLVHNQPTGPPWRPPVLVPKNMWRPRNTTQISPHKYADTPRLTTPPRPNHHTAATYTTRGTIQQEADTQPPKGADRPNRRGGNDAAAPSALPSARWALVGPRGDTKNRHKLKHLCYNSEQILPRNNRNPKRHNTLPATAVNISVLRQHRDPRDGQAQIAQLNNHNHGRTTYSRDQTHTNQQDYHEQTNHSLWETSHSSTRMVDHHRSGQTNKHKTQRQVRPGATPPRATEDNQREPLLATPECGGSTHTRLRGSISTQEPLKPHPASPDGAPLRDTQGGNAQRTRTGKQPPQWQRPQQPATLVAVDWPANTTAEENHTTHH

SEQ ID NO: 979681 - protein, 488 aa, Homo sapiens
MQIESWMHDPWLASWLTTGHLWPRQTGKDGDPGARSSWQGTADEQPADKDSDQTKAFEHSSTDPPGRYQEYSYTKPEQHKPRHGISAAGTHRRHNTELGRNTTILAGDRDSTRDNSATHPRGGTREPEQAEQDTTHNPTPEGERQHRENNEAHNESHKQATSRTGSESSQERKTTQGQNAPRRDNRPTGSTLRDQLLNREAATLNTRQQKETQPPRRGGKPTPKRLGRHESTAGTKAATTQRDHHTGSTPQGKQQRQTHDRTRENTTNRHRREINPRSDNTLHKAEYQPRDQTTPLLCGSQESNLSTPHREQVTQATNTRATMRTSYTERTPTTSRNEDKTTNTYEQRQVNTLERPSNSIDEQRGTPKLNVAQQHSEENGHTAADNTNTEHTEPNNRTEARATNHTTTSLIDNTGCHDHRKTTAEIPQEWTTHHGRDHDHKPTREAKGAKKYGYSNTPRAHTARGTRQPMSNKSQDARNNHRTDSNQQ

SEQ ID NO: 979682 - protein, 175 aa, Homo sapiens
NETRTGPTDSNLDMSGSVLFTPETGVMLLTPVESSLYWALINLLSERIRYTYEELFPSVTCGDDNAREPENAVDKLFSSEKHGVLLAWLFDLNRQSTIELESYRLLRVRRSFSIRRAQKKTSGAHCQEFRRRVMTCALVHNVFRRSLVQRSVNSILCPTRLPGCLQPCHASNTVP

SEQ ID NO: 979683 - protein, 319 aa, Homo sapiens
GAGGGTLGKMAASRVGTYRNAGNSRNQKCTGLRGKPGPGSVKSTRDGEYQSHYVKMGHYTSRGNTTSIPWQMASFSTTAKSGDEEPSAMHARLTTQTQPHKGQQATRITATRRVSKPENDGRHTSRSNRTKQRGKQGCIILPHGQEHKSTVMPQYRHQCHGNRAVMVAPTWTVGKTQGEPTGKNRFTPTGFDEELAERWGYHMAVQDLSQVLYPTNTGGGNMANCNPRAECHVARQGKELPRHVLDSPQRIPRARIQSDRWRNVELMGHPTQNSYIGRLHHRRVETTNTGGTERQRHTDRESRSEDVVPTRTPAKRTDR

SEQ ID NO: 979684 - protein, 298 aa, Homo sapiens
VEAEWLPTSRRHSKPPILLGQEMDAAVGERDVPLTLKQRQPTKNDVQSERSGPPAATRAGWGSWHSPGLGQVGEGTPRAHFLPSLPAVEFQTCPYPHPEPPKPVVLSQKNCYSPSTKFPSFPSLSLQIRGSTNANPKNKVQNTAQLPSRKVLVSGVKGCLPPSIFAPRHLSRLVINRTAGLNKPPGMIGKGGPSPCEEGELFSSPVTKPRCAGFYPGQMAVLTANPVKQVSRRLKRWYNQVHLKRPAKRKGENRSTKVGQRKSSRYAMAENYVTPTGANPGGPLSPSTFHIYTRKNEK

SEQ ID NO: 979685 - protein, 108 aa, Homo sapiens
MVRRSMDQDETLLRLDESPHSNRWLLLSCDDEIFAHVNVATMWMGFDSLMRLARHPGMNGIRTQLSDRKSCPQHGVGPHQIKIIALDSGICGKLTVGMNKNIDRLDMG

SEQ ID NO: 979686 - protein, 142 aa, Homo sapiens
MAGWDPVHCILKTGGPSMALICCQYMRGSGPLCSPAPPHFHFGQTNLHPLNFSAKFPAWQGPMHFEGDDGILVCFESKRQFAYSCAAMQELRGKVTPEGRQPSVVAVGVQLCLIPDISGPQAQVTLWLFPNLWGNPCTQELN

SEQ ID NO: 979687 - protein, 262 aa, Homo sapiens
MASEELQKDLEEVQGVLEKGYYGKGVRDALTAEKSKIETDTQDQDAQKLTEDSRNFLIYENPAACGVLPGTTGLYGETSVTYGWDQSDNVCENLHYLTEVLKFPPEKCAGAFHGGRSLILLVKNSKWEELLHDCDNLLKPISVEGSHNTVRTDDRAYIVAERTSGNPKVDYLTQLKGLQEQRGASYEWTGSQGGWSMSNGTFAHATRLEAALQSRGATEAARGRMRHSVADRGGHTGTGSAVKETETSRRPGGKVTAGAREG

SEQ ID NO: 979688 - protein, 302 aa, Homo sapiens
EGFLIRCLLIFFSCWLLCTNVPFAHPLCMLSASPAMCNCDWSKRKSPVFSRITQILVALYLSLPLHTASVFLSAEVQPVLSGKERATRERKVIVSVRVAINDTLLVLCAVSLSICLLEEISKMSLGNIYLEGPRALRVSRDCHRCPRDTALHLSGLLPPVIRSFLGTRASMPLIMTAPHVSDPGDCRISWEMLDSIIGRRVLVWDVVTFPLSGKIGPTLKSYRHYQPVNGSALVGRFLFERRDVKSYDLPEDAQDTEVVANLSWGTNAFTVSEFVVNTWSMLCGTHTRGGVQRVAGHITHAP

SEQ ID NO: 979689 - protein, 227 aa, Homo sapiens
GRSRRRRAEVKLLLMGAGESGKSTIVKQMTIIHEDGYSEEECRQIPERWSTARTIQSIMGHGRKPMGKPCRSTWPSPYTERTGRTGPAIRTHGHCNRPEGSKGTCNTLDAPCHGRSQSRRGLIGDLTQMGGGNEHMALKGPDSHRGSTPKLNRRQSGLKYLERTQGGSTRAPSSVQKRPTQNREQNWSKRENRPVERPTEDNRGRTTSHPYQENPNSNNGKAGNGDW

SEQ ID NO: 979690 - protein, 74 aa, Homo sapiens
SFLHHRYVAEACKRGERAAIAVSLEIVGMNTCLDARAIKRGAEWMRGDLDIFADGVLRANYWNLINQVVQVWQR

SEQ ID NO: 979691 - protein, 134 aa, Homo sapiens
GELMSISVHAQQLKVSQSLFGISNSPEMTDCDSGYITGCSGLLKYVLQIAASWIRSRQNVQSATRRLRASGPERPGQEICQIMLWPHCDVFVSGRQCRTTIENSVDGPGVQRDDIIQLGERHCNLYCAIGMVFS

SEQ ID NO: 979692 - protein, 241 aa, Homo sapiens
ALNQRLVKPGKSALYGCFNEVMMTFYDSDDQLRAESASGTQVSAHGSTLLLPWPVEAISYILSKKRMGAARDSIPEDTVTFRQIHRVNVPELTLMPPSSPKWTRPGAAFLKRIPGWLDLAIFFLVGRKLMDEKASRDMEAQPAGSRPRWHPGVCYLAFLSARGPPSSPREAMGKPAEAWSWAGSGPDVPTTRDFGPGTTFSKGPWRFKEGLGLKEMCWVCCQPGSAQPKGFCPHAGAQRLC

SEQ ID NO: 979693 - protein, 139 aa, Homo sapiens
MTPGDLPGDDLRGRGILARLRMPCSRGEPSPCLTKLWVTCDGRPTKDGWGPQYPGPDKWKKSLNPVMAGVTRWRPFWKTREKRHCYTRHPPYIGVQWVQGHNFTSSKGGSSLRTGDVLGLVQQYPPQGEEEAGGGATDI

SEQ ID NO: 979694 - protein, 101 aa, Homo sapiens
  misc_feature (101)..(101): Xaa can be any naturally occurring amino acid
GVEVSGLYRLAVRPGVGLQVLLCCSLPCKGVELLLSSARAYRGGHLTIRLALGGCTKSGRSTACVVAHNKCPREWAGFVEQLGPMIHGPNSHGEKTRWPSX

SEQ ID NO: 979695 - protein, 95 aa, Homo sapiens
  misc_feature (45)..(45): Xaa can be any naturally occurring amino acid
ISALARCSACKCLAESCEGPKGCCSSFDLDRVGQVCLREYHLVDXCHVLFALNVVPSVSPEGTEIIFNAVVVQKSKDPVKPGGHVTYQIRQEHTD

SEQ ID NO: 979696 - protein, 116 aa, Homo sapiens
MPKATKRTDNTILQQETFKHIGWAYLRAIVAPVRCDVHFQTPGGEAIESHDVWHALHLAAFRNGHPLVISQCLDVRQENENPCPLLRHKHRFDSPGALVRKSALTRGSGESLQRAK

SEQ ID NO: 979697 - protein, 78 aa, Homo sapiens
ILMRPPDEQRLCKDDQLYGLMARPSGRVWFTSQTEGTGPLSTEMGAAVPGKYDTCVSALCVRRPFFPPPRQEACPDGD

SEQ ID NO: 979698 - protein, 141 aa, Homo sapiens
MPCKRTNIRVLHGASRERVKGDLKHILDAHNGPYAIDAAPSSSNVFHSRIYETEQWDYQNPLRVLTVKFKLVMHVGTCTRCESRPDTRGDAMLFTSDASVFTANVSLMMSQMSRHAQSSCPIDSTQRYVLPTCLSGTLVRR

SEQ ID NO: 979699 - protein, 112 aa, Homo sapiens
MGYKGPCFTELFQVYVQGGDFTRNKWHGGKSIYGEKFEDEEFILKHTGPGIFVHGKCGPNKMVPSFSSALARLRWLDGKHVGVALLKEGMIIVEAMERLWVQEWKDQKKITL

SEQ ID NO: 979700 - protein, 123 aa, Homo sapiens
YSLGPKPSPALLPENLEANHLLEQRTKSFNWKTERCRGRSCILNHMVSSRQNSFGSPDATPGEKRNAVVNFLGSTEGHYCGPREVSIACELSCASSLAIMADGGSNNVVCLSHSGSSHAGGSS

SEQ ID NO: 979701 - protein, 86 aa, Homo sapiens
ETRRDGPAEDTGRVVGTPPPAAAWWAALPCGSKGWGQIRSAFRLWAQKEQNEITTQSNHNYGTSIGHPSEIMQEGNQGISEKCGTQ

SEQ ID NO: 979702 - protein, 290 aa, Homo sapiens
SPVRASNDDKEKKEQWSCQKWAAANVQPIRMHYLVPERAHRTQAYYRNSLIRNKLAGRRQLRGHYSEAERLRLPYVLSPSVYCEATLTVAEAVQNSTAKRTLRDIRISMKAPARDPDKTTASHDYPHDVLHTTGNTNGRADVHPTITSPTPTARNAKQTPHNTPHTATTLTSLGDTPEVTLPPAPAPTPAHIPEQQHTNEQDTRVTLAWTSPPHIGPMAAHGINTGIPGSKEQVLPARFAYSHLLTHNIYTLVNAHKYSHISPVIPPAVCRTLLRTYTGAIHNKGSTVGR

SEQ ID NO: 979703 - protein, 195 aa, Homo sapiens
FSMDRALNCVDDTVCAMPYWQTRTFESPVATEPVCQETVEQDEPQCATSQQSFHTERPSLLETHQVSTTQDTKKPRRILALRSLQNSTEFIKGRNQLQLLDNRDTITTGMKQQLTTDLAIEVTCAQSTRFHSNSGPVQHIHIDLSHRPPVTASINIHKIALYLHHVFTAHVHPETTIKVIHRCKTCYRTECRTPP

SEQ ID NO: 979704 - protein, 189 aa, Homo sapiens
MTDSLAADPCWYYEREYLHYVARNDRLDCMVWLNCGLIRTAHDTRVDVLQHNVLTDFTAEPRAHVNYSPREHRPENRKLSTLRGPPRVGKQYDEPRMNDVGYTDRGTIYEVRQNWTSSTGCYEDELHSQMKGRADGAHQATPCPTARTRCNPRKTGTTDGHQTRYNQDRTYGRDKNTDISKTQPRRARK

SEQ ID NO: 979705 - protein, 179 aa, Homo sapiens
MANLTSEGGHQLTIDAREKPFPTVGDHDTVPGIRWARTGPFYLTQGVRENSFPNGKEPCEGVYQLLMFSCSLRTHANEQRKQRLARLATKNPLVDTTLVPFPQACKTPYSSFLSTTRRLSRPYLIVPLPITPPLYTVPMETVQLRVRLLYEHSGLVTRSPVRAKICHDGLQISTTVLLP

SEQ ID NO: 979706 - protein, 70 aa, Homo sapiens
DVPGAPVLASAVLAWRLFLARLGNSCRLFRRRCRVSHTEGGTRFARRLTQRKITNEQFTPGVVYVRQPYA

SEQ ID NO: 979707 - protein, 244 aa, Homo sapiens
  misc_feature (61)..(61): Xaa can be any naturally occurring amino acid
ERGEPDADHVPLLGLLRLQLRAARSREHATPGRRRSPQAAPRASVLLLWLAVARAVERPLXIPRGEQKGAPPGQEGAVGWAPGIMGLCCLTRGAQRDFPCFGNGDSPWAPMWHSRVTTLGHPQVSRELGLHNARTHAAALVLQEATRLVKGSSLETPQINSKGVTLACSLWPLLRIGILGTHVAQVVHFNHKYGVQIGASTTLLLQGGLPSGSTDRRHCLARHALGDFHNQGAVDVQDLLPVKL

SEQ ID NO: 979708 - protein, 127 aa, Homo sapiens
MKKPEFHLLCTPVAERVILSTSNDPFLSLMWPSIGMSPGLLSLGPLRESKPLLHADQAVKDSPPTTSLIKSGGDTGGLWKALYPVNGTARLGGTDRARQEDGGSPTYPFHPSWLVTVHHDLWHILEP

SEQ ID NO: 979709 - protein, 295 aa, Homo sapiens
GCGPGAVWVRLVASGCHSLGLYSVASRLAKGRTCRGLSGILRTLFSKPPTSPALGKNGHGTLTKEFDDEQSAYRQLHEHHTRTKTCINTWSCLTQNFPQREHFKNHFLPIIHQKSASACNSQPPPPKAKRTTDWYTIRWTNESFWQSVGIQHGLRLVPQRSLLARYISNSPAENWATLLVVTSLLKNSYESTPTVGVHREYRPNMRSCLTARHNTASFLQQALCSQRNLRQPQHHNTFRAAQHAPGPLGQPAVIPGCLLLEAPGRLHSAHARHASKPYRTNPAAFGARCIPHSQP

SEQ ID NO: 979710 - protein, 109 aa, Homo sapiens
MTSGVKTSLGENPVSPLKEYNNNLQGFAPTNNHKRKFVVYKYIKKKDPGLHPIVWCPGLEFYTRCTMCGIPAPYLKASPKKVLGDIHQGGVEAPPNGHWTLQSPRGPGA

SEQ ID NO: 979711 - protein, 313 aa, Homo sapiens
GFPGLLPVNRMLCQSPPLRPRRAGSSQSRASRSAQPAGSRRLPGQCVCAVGAGARTGTARWEETIALAAMGARGLSFTAVRQPGAGVGVPCPTGELPFLSPGGCWAPEIPAAGEHLASNNGDELPFKRCTNVRKRSRVGNVGTPPDGLQIFPEAYVWIYTSGKQFIRRCTPPLRERDIPVELGLMVHRASLQALTGGKVSLLLPGTTLSVTIFHITCGNLPGRKYTLAMGTKPFFRVWGGPTDSRGTDRLPAGFSVDTLSPTIRSAFSLPRGRALKKQLIFWPPPKHLGWRPGHIDMVLLARSGSISGSHPPI

SEQ ID NO: 979712 - protein, 106 aa, Homo sapiens
MVTDQTHEARSWAEQHKPNGTPMGKWAKTRRCNEQRGINMAHEDNTKPQTDTNYTRIPIGSHLPWNDAKRYHTPARPEHYRETGIPNHTGHQTALVTNTIHKATYW

SEQ ID NO: 979713 - protein, 90 aa, Homo sapiens
FWDAPHPCSSLYGCSTCVRIVGYKCEAIRGDWLPAEPHRGVSPLELPLRFEVRHTASLLLDACLAEDKDLLCRKLIDCGAALENTCALIL

SEQ ID NO: 979714 - protein, 94 aa, Homo sapiens
  misc_feature (64)..(64): Xaa can be any naturally occurring amino acid
GKATANYAVNRYHEKYYYRLYTIIAHLHNALCNLLNIHMPRRHIIVVISIFVRKTDSFYSLLLXGLYHLLRLDGNSYTNDTAFEYLQGDTNNFP

SEQ ID NO: 979715 - protein, 73 aa, Homo sapiens
PVQPGTAMINGDPNLQQTTGKPRLSKFYQPYSEDTQQRNHQGDFPIVVIYSSSMKHVGQFPKTQAGIIQLGGI

SEQ ID NO: 979716 - protein, 122 aa, Homo sapiens
MQKPSLETKIWRSGEGKVRRLPKVIGTVWYGLTYAGDCPAPALCRVNRMNLALGFRVTALSDVGPVGNLGQYRSMSNGTLGSEKYGENNVGVPEKRENLARGIKWAEHIPCESTESCPLFSL

SEQ ID NO: 979717 - protein, 67 aa, Homo sapiens
DLDLNLAPERESSRYVSPRFQNDYFLTYPFKNLPTASDMGPQIFHRDLSAVPPSYELPQSVRDQNEE

SEQ ID NO: 979718 - protein, 297 aa, Homo sapiens
GQRAGRASREGASGGAACSLSLRRPATSARARGGLRSDRAADWPACRTKRARRCEGAEGEAPSPRRQNMGGNRGTRLGLTSGAAGFGPKQGGSRYVKKLVGPPGYLEGAGVTQDLLDVNPFLLPNLKDSERFLLFLVGPYNSNLCFEGAPRAESFPVERGPLRQGIWSKKHLSGFDWETTEKRAPWGRRGKTGYPADEGIGQRRRLEQPCLGQVICSRVARCFGTKVPRESENRVQVISPVMSSQGCFPLKKERVITTGYFNKKVGSGGSTAHTGCGSEASESFLKGPFGLSKSGCT

SEQ ID NO: 979719 - protein, 152 aa, Homo sapiens
MVLIMAPGNNMAGLEQRSILILRILDGEPWSSSFVGALSMGLRYGTSGSAEAGSHVLQHDPSRNAVSMRQRSTVRCWKCIPAGSIALSLTDLVVGTLEGLSCLGERVGTVFFRLCPFDPEIRAQGVPVETPTVWDLALGKWSHEEGVFSPAI

SEQ ID NO: 979720 - protein, 194 aa, Homo sapiens
  misc_feature (107)..(107): Xaa can be any naturally occurring amino acid
MQTSVSKRRVSHSGLSRYWSSCRNVGIHSAGRFVARAFERLHDRPASAPQMLVRDDMGAAMQALHAGLKGPRRKFTISLEEPPLSNSQSGGYQTHLAALHHSLSAQXRLRINGINSTGGGCDAQMNIRGLLILEASRDMRSDVLSECYPVTIRAERVYRRKGLGVGRRVPTGLGTAHYGGFNLAPRDIAGIRAS

SEQ ID NO: 979721 - protein, 214 aa, Homo sapiens
AAEFLSAASWRLRTLRILPLARGAAGQSWKRPAGASRESKGPDGMGSPVLKPPGDYLPQALEGQRLKKQLQSRVPDALLAGELFLRHDTDLGESNSLMMCDRRKPAQNQSQRKKTPESLILLHETSFHKPQRCRVTWPPSKAPIGARHGAEENPHAGKSLGLALPRRNAHDDDRPDGTPKGRRHPTWPPTHAPGGRNKTNGTRTPHRRTKRDTK

SEQ ID NO: 979722 - protein, 274 aa, Homo sapiens
SLLNNAIKGGVEDEVSLSAYITIALLEIPLTVTHPVVRKGAVIAWSQPGRQSTRRGTSGSHVYTKALLAYAFAHGQVHQDERGHGSISSHLNEEAVKIDNAVHVGSALMKPRAPSAAYLRNPRTPSAEVEMDILVLRRLSHGLPDHKLGGPDLCNRHREVITKHQNAQGGFSSIQCTVGGSPCSVPVWGSTFSRTVTLPGASRLRACPVLPVGEDRCSAQSWQLLGTPPETSGFPHLGFPGAAGPAWGTHLFCAFRFLHSGGYFFLPCGSPLRA

SEQ ID NO: 979723 - protein, 121 aa, Homo sapiens
MLGTSLPVSDGDKAPASTKTCSVRTREEAPRGAGGPGGARGILAGGGTLQSALRRAVTASGGTIKTEIREGLLKPEKSDTGKMHVPEKLRVSKTARNVQGPPAPIAHSKEQTQKNKIAKKR

SEQ ID NO: 979724 - protein, 566 aa, Homo sapiens
MVPFIARLSQGQDAQFAVPVSPTEGLTLVRAPKDPFSLRHPFPPDLCGPRASTLTRAATTGATEAHPGNSPSQRFPLATKCPGPWITLRVAPHVCRTPARRLAEGVAAHHLRTEFAPNCCPGREFGPPGRDPSVDVGTATLAPVALARIAEETNVTVAERPSKKPCSKCALPNNLLPRVKKHRALRPPRHERTDIGHRDAPYGCGPRQDRVGRRTYRNRMIVLPSEHINTRAGKEHVCIQRTRHHKPAIVGISHPARECLVRSATNHAHGLLRFVGGARRRDGRGERWREGEEAAARVEQEKEEGGWGGSGRGAVRRGGGPVGRRQERASREGRHGRRQEAPGEGVTESRETSHSEANATRKKKHDTAVAGRMRRRGGRSRAGEQRSRSGDSRDPTTAPTGNNAATVRTQRPESRVEAAIGGRPCDEVRRAVRLTRVVAADAAEDSDTRSRPIRELGAENETRLGGHHERREAEDDADRGCRDAIGAASATESASPDGRLRARREQAELSRERMTTGESDGSDGDRESGLRRGDELRAERACDRRMRHESCQVPESTEGQMRGVGG

SEQ ID NO: 979725 - protein, 126 aa, Homo sapiens
MARIGYTAICRGWDDRLLATVGLHLALEMPTEWVFWAKRRFYRTPGNFQVGTSMTVENRSTPQSRKASLSLGQRSVKHSKFSYCLVVGKLKTYMRNCVLLAIRDFVLRGCQRSGFPGRVLVVTARH

SEQ ID NO: 979726 - protein, 103 aa, Homo sapiens
  misc_feature (67)..(67): Xaa can be any naturally occurring amino acid
KGRSLMGPRLRRRRVLGSAPTQELCQPEPHRRSPWFLAASRGSLQMHQERGEAEADTARGEKRSRNXCQHKRTTTGHHGFGPGDTLPNLRVYVPISQVHCLSA

SEQ ID NO: 979727 - protein, 279 aa, Homo sapiens
EGTWIAVRRLRLEGTGGEMSRVPAFLSAARWRNTSEVQPPHPASRDGLAKFSSGPEEGVMQPCQRVPGDQAQGLTLGVNARYSAAEDALTTVVTFYEDPGDQPRSSLPTRYCGYSCEPRMHPCLGVMDGNVIMQRETVAVLPCATKGKMNWLVVSIKVSCQGGVWCLNLEEIKGEGDLFGFLVDLAGIPMAIYQGSGMFSAPLWALHDFTGLWLYQFPSWEREEYSPPAIWPTWYAATKVGNKASGAGAAHTTQDYTTPKDNLFMLVVRPGAVLCRLGL

SEQ ID NO: 979728 - protein, 284 aa, Homo sapiens
  misc_feature (206)..(206): Xaa can be any naturally occurring amino acid
QTVRRTQAVIEDAVVPQAVSTLSSTVSHDSQSVTGHCIVQSGKDEIRTQVDYWEECVRKEERFTSTRSSSYGRKRRKKFKHLKFKSQAIEIREWAVFHLNSCAQIVKILNIPMLRVNGADEDTISGFCEDYTLWMSLLCTGDDLKCLRLRGGMLCPCERLIMDFETNRLTVLNLIFDGNSNNYYESDLLGGGKIEEGKTARAFTSXIGDSLVNTQNLRHTLELLTPNSINKELKRLKNPELTPVESTTAFGRLIAVWSHCFTQVFFFAPTKSASVLFDNATTLD

SEQ ID NO: 979729 - protein, 129 aa, Homo sapiens
MSGGCGATSAGQPSPLEGKFEPRGAGGWPTPCAGKPKSGEAGCAKRFVCVAPDARWRQRWCETTLCNKGTVGRSQKQEARRDNPRAATSDKGWVGEQNPSVMRTASTITRRRHSSTHTQREGGQRHKEH

SEQ ID NO: 979730 - protein, 51 aa, Homo sapiens
MSCGPRAQSVGTGHSVDQRTRPAQWGVPPKNPGDGVRHQGQGNVTGQAYPG

SEQ ID NO: 979731 - protein, 174 aa, Homo sapiens
  misc_feature (133)..(133): Xaa can be any naturally occurring amino acid
MTEGRQMKLLQGRTHNVLTRHIDEKRTQERRIKLTNRRPKASDQNEEVTFKQLKRRVENSVSGDQHNLEGRSFKKDDQRGGWINKTLKPPVTGTGQEPGVNLKGPKLKGILTNSAQEDNIWTRINCGEVARNXKPIGGDKYETFGKGGPLWKRQTVRGQAKHQLMETHQGNLHN

SEQ ID NO: 979732 - protein, 298 aa, Homo sapiens
DAFQLVCKPQASPDRWNFLRTVRLRCVHVCLHLDGIASPSRGRHSEGARAGWLIPCRPSPVTQPHKAQSPAQGNQGVSSSSSFQSSSPSRAQPQFGLTSISPLLNPCPHSNSSPSLNLKGTSGIVLNADVIFYNLYISQEISSPKNSDVTLKIKYVIMGVKGGGGKALKGRPCKVVQAPGVTIDGGPGSRRRTLKTIKAIDKPENNKQNHSNNKLCGAPAAQQKYQAIVGRDRWSEWARLAQEPARQVVFPKKRGPLDTPWVGHGFTGRRDPRGERRTETQTQKQRHTNTHRTHDGRR

SEQ ID NO: 979733 - protein, 439 aa, Homo sapiens
MAFRSLSDVLHTTGSCRVSEDVTVLEKAPCCTAGDVPRELPGKMLRKPVGSRCQILASVSGFLTEVCPLSGPFLPSSLHRRPSVSRAAVRVPIRACGCVFHSVPNPSALLVAPSGKALGFLADARFFPENASPVHFPSGTGPIRFIRKHQGLSGLGQLQEREPVTFRKTGEGHLADPGNNPRDFWQIGYNVAGAVGVTSRGPHGKALLEGGQKPGSQGRECGTHEGGNPGAQGRYGEGLIEPQGVAMEFMSIVLLASVIFCIFFIYPSSTASEESQKSEKRKRIDTSRTDRVGRGGRGGERKGEQGDGREGEEEERTERRKKQQRREEEEKGRKTGSDRERSQQGRRRRRKDRGKEGKRTGKAETDRKGRKQRKAKKKEAARGERQEEKTGEQQHRAGKTTREEQKKDRRETEERQGQKERQKAEPERRTERHREAGRW

SEQ ID NO: 979734 - protein, 119 aa, Homo sapiens
MTNQGRGEAKKNPGELYEACSTQKVVAPQLVCPTVGELKGNTLGPGQAVKATTKRSMGKPQIYRGAGANTNTTWTSQLTGPEKHERTRGNHNCLRKEQKLTGGDRRAPNNHRAHKQQNA

SEQ ID NO: 979735 - protein, 287 aa, Homo sapiens
QSRLSGRLDSCARWGSCSSPRCPRAGHLVGATRTRSSTCGPPAVLGVYGRLCANPRGELGRGVAPEGWGQDSPGLLHLVPTTLANGGLERLDLEHLPPDVEGRAKIIFWRGPDYDKAMRERTITFSCQGTLDQGWTERLPDIGKRRWPNKGVALLTACGGTPCVLHTGAQASVNGGKIFLVFRKDNSPRLDGGTAIWYKRLANKGSLGSGRGRLGLENGLEFHPGPGGPPGLTDECAWNLENLLKNWAMRQEHGGSNRVRAKCLLPPRVAICLWGHAHKCESSEELQ

SEQ ID NO: 979736 - protein, 91 aa, Homo sapiens
VIYNLPTEKSSGSDGFTTEFYQTYKEKLVPFLLKPFQKIEEDGLFPSSFYEASIILILKTVRDIRTKENFRPISLMNADAKIIKIHGNQIQ

SEQ ID NO: 979737 - protein, 343 aa, Homo sapiens
CPLSTALGHSPIPHPIEPLTQNLCDQGPFPTHSYTLFWTRRANKIPTTYHECYTTGWGPELVHGHCAMALLYAAWLPRRTPQSKGAYQGPATERWEPTPELTHGRSTRGDYNWYQLAKEHKKDTSRNTGTVTEADAGNSINPVTPPRAGKDKGLHKGQLRDIARSLDSQAQLTQPQEHYRRDKGVTGYGAGTDYGRRAAAVRHEPNGQLQWTSPGMNYKGKTDTMTNRREELPNPTLEKKKAKKARGKHKRHNTSAHTSTHNTRLSYTTTHNTQTKKPTIPPNINYRYKRILHTLSYYSLSLFLLTKHKQPTHPTHHLTITTTHTHTHLTYEHNHITHHIHTN

SEQ ID NO: 979738 - protein, 164 aa, Homo sapiens
MPGQAEGNEAPGGRLWGSLKEEGPAEGGKAHTDWTVYPRVRQPRGEIHPLLGGDPKSREAGGGWGHGINQRARRSETNHAAGKRGDTKRESTSGSDVGHAVGGKGRIWQRGAQDPEFSIGGETRGDTTHDSNQETMLETTATARRNSTSPERGRNNGLERDSQQ

SEQ ID NO: 979739 - protein, 181 aa, Homo sapiens
MRQRFKPCTVALANQAKIPEVPGVICGMHHPGFWQSKAFRELVVLCQGANEQGLSCSEGSGFNYKELRSRSRAPAGPPPPCVAGSKREGGGIPWSIIKGPRRCRWARRVGEDQEPGLGVKLVGCHGWPLGMSHRTGGLVTVGGGQKGLKPRLPPRVATRQTRRREQRKTLKKGEQNVARGQ

SEQ ID NO: 979740 - protein, 142 aa, Homo sapiens
MVRTSRTQSLASAEVSLDAKIQHFDLGRKKAKVDEFPLVATWCQMNMSSVLCSPGGLPELCANKVHGTKVGGKDGFHIGCGLHPFHVIRITKMCVLCWADRLKQACEGGLWKAPGNVPGVHMAKVIMSIRTKLQNKEPCDEA

SEQ ID NO: 979741 - protein, 132 aa, Homo sapiens
MYHRYWEEYSKGADYPGLLIKVSQHPVYYQETKLTEADPSVMAMVVYDLNEPTYGHIRRRYALAYVADMLVEPFQAILIRMLLRRTSKMIVVEKPKPESNPVGYKLLVYMWNQYKTKIPLNSLSGTFWSLPC

SEQ ID NO: 979742 - protein, 41 aa, Homo sapiens
MDTRDIELCVHYTRGNKKVVQLLWITVGQFSMNTVTYFFPG

SEQ ID NO: 979743 - protein, 131 aa, Homo sapiens
MCVGAIGTIIMPELLGTLTKGLCQGVKGTSPRETGSSACWEFETRNRPYKLTRCGSPVDTVGLDTRRKGFITKVTNEGFSQQRFLFMLLTEREMAARKRGKFPPKLTRVVKQAGEENISPDIFTTVWGLAH

SEQ ID NO: 979744 - protein, 174 aa, Homo sapiens
  misc_feature (2)..(2): Xaa can be any naturally occurring amino acid
  misc_feature (19)..(20): Xaa can be any naturally occurring amino acid
  misc_feature (83)..(83): Xaa can be any naturally occurring amino acid
  misc_feature (90)..(90): Xaa can be any naturally occurring amino acid
  misc_feature (116)..(116): Xaa can be any naturally occurring amino acid
MXKTRASEVVRDEVDIRVXXKIQLGPHPKRAIVEKSCTTLAILTFYFQFIWAKHQNLGGRMFTGAGQGSASVGGTKLQVFTTXEGLIIEXQSRKTGSSSETQGLCGNNLTTGVLAXRRVWLEGSTWPQRRSGSFVGLSIVNHLKPVCTQEAIMCTCDKSSSDQCYFPPGLLPNN

SEQ ID NO: 979745 - protein, 185 aa, Homo sapiens
MSKTTTFKGVTPNSRNSSRSLRPPGVASTFSIRFDEPKEQTVSEGTKVASKYLLGPPEEHSRLLCGQMSRPGAKVSVGAVTDLEFTLTADERTSSEGKLGRFLRSERQHWCYFHEQLWTQDLPGSLGQIGQEKPVPCCGLCTVGLPRPHVASRRIPVGGVQGLDLELTSSIALTAGVLCCSSMAW

SEQ ID NO: 979746 - protein, 72 aa, Homo sapiens
GKRRQRGKMAAAVHSGVTVEQLPQVSSCPKKDIITFLQEHGSDSFLCRTINYEEHIQIVAKKVNQGPLWLQL

SEQ ID NO: 979747 - protein, 103 aa, Homo sapiens
QPQQCGEAWGLPWSLSPPIGKGKESRTKAPYVSNPQLSIRDQDPGAKLQWFSDCGCSSSSKLIPVLTGGHLKLEAPGVKFERKEGYSNISYMGCYSSGNLFLD

SEQ ID NO: 979748 - protein, 111 aa, Homo sapiens
MSKSPVSHRGSKVIIRGHSLTVFLGRFPRTSDAIANYLCPKRRGRNGICSPPERYSTRGENDVNYLSVAGGRMQGGKRGQEELCIAVKYSVKVGSQLTVRNAGGITGWPMR

SEQ ID NO: 979749 - protein, 111 aa, Homo sapiens
NNDLFSMCLRTVFLLTLAKQFTSSLDSYSVPDVLPPHNAWSSQRHLSSEPLSRKTTLPLYTKSPYEFILNYNSSRADRTNHIGISFFEYQHFIAHALAYDHPDEANQAENA

SEQ ID NO: 979750 - protein, 309 aa, Homo sapiens
ASFSGWNHGMGVEEKKKEAFLLCQGNPLMKKLKEFRRAEWIKLLRRRFAHKMLRKGKERMLIYEKAKHYHKEYMAGCTELKIRMAQDAHEQAGDFYVPVEPKLAFVITELRMGIIGVSPKVRKVLQLLRVRQIFNGPFVTGSNQGLQINYAEGLWQPYMHGGIPNLNVSEDETISTSVVMGKINKKAELALTDKRFGLLDLLVNTGIICLEDSIHEIYTVVKRSQSIYLLRALNVFHRGNEKRHIVTCALALETDHSLETVPHAFIPAVNGSLIEKQNTGAEITGALNKLAVMSPRLNRMREHQKRSHK

SEQ ID NO: 979751 - protein, 272 aa, Homo sapiens
MGFRKPSVLVELIKLKLYQHQLCKVMDESKIWLFKEMDEEHYEEEGEPVGEEDVGVFLGFEVKDGPGGKEGNWVEWMFKNGHMICGFLSSDKKGDCPDHIMADSDFRGICMSLAKMNRSVVFFQGKFENALCNTGCSAYDSYPICSVQACKVKLWKNSLGYFGPIRMQIVELYPYFCVSEFRLKLNMEYGDNRSYAGDNRIPCLVKKPEVTRRGCLTASNHADKAGEEPETRELTTVSQRVGNKNRDTKRGNNRMTQHTKETDQTESLSDTL

SEQ ID NO: 979752 - protein, 124 aa, Homo sapiens
KQAPATCPSDPDNPALIAEAEDGGTNRKRVKMLSCRDQVSVARCRPVQYGTVRDTAPAEKNSLEVDAIQDPLQKYHYLPDVDGRTLCDLVFDLSAWIVLRNALFCYNGRIYDSQWSEEVQACLE

SEQ ID NO: 979753 - protein, 169 aa, Homo sapiens
MGVRDDVKSMHPLYPASGGPDKPIVYEGFRDNGLLGCTVPLEGSLFLDRRTVAQWRVCALILGIRDLTREIYLYDCWLAQSYVGRRRMLLLVRPACWGQAPRLPDRLDGAGTGSFPVSTRDGLAKTMGVVDLPRVTSGSSASVPRGLPGFSHRGPLAPSPPRCSGPILF

SEQ ID NO: 979754 - protein, 35 aa, Homo sapiens
MPGNLYVANQKAGVSLGTPYFGEGPPTEGRTRASG

SEQ ID NO: 979755 - protein, 130 aa, Homo sapiens
MILVRMLLLLTHRCTVSPMKQVGREGRRATVMDFLQLVYRGNKRSAMVRTAHEWVKLHRRIEIILNKSRKRYESLCGINMDVLADLRSRMAAKKIRRPISQSGKDRVRMPTTDFEKSLTRKRLRCGEGSM

SEQ ID NO: 979756 - protein, 197 aa, Homo sapiens
MRIHTHTHTHTHTHTHTQSVCILYIQEYSDSAPRCSKHFFVTHQLVTCMLKRGLVRHVENTLSILSTRCEIAAHTCNVYSSAIIYPNIQKKKKKILENFFASPRLLPQTRVLLLGGVLVRGVVCAARPRVGGRRENPTIFYYYKEPLLCGACYYCWLLLLLVLTPGGHTTAALLFESLIYAGNRHQTYVAEEREPRC

SEQ ID NO: 979757 - protein, 98 aa, Homo sapiens
MKVVYSVIARWILTEVKAGSTESLKLYGEQTSYFELEDLSEYFLIQEFKSNHVYLELVRQKKIPSVDGPSNPLWFHNRRKKPHKVLASKRVDKKPSVQ

SEQ ID NO: 979758 - protein, 107 aa, Homo sapiens
AFRRCSQARQPCLIPLMIYESEAAYDPYDCIPERPMICSTGDPKAGAVLSEAVSMRQTNLIRVIPEVTRTTFIQYCPSKLVSDLIDQKVYELQASRVSSDVIDHEGV

SEQ ID NO: 979759 - protein, 107 aa, Homo sapiens
MAIRVSVVDGVDRRCAASTCEGDESEVTQMHFAVVTRGPSNELITTTPSDYTVGPTVGWTTKSLGCRMESSLEVPAVLLITELTCWTYCQSSHNELMTLGCVTLLMN

SEQ ID NO: 979760 - protein, 168 aa, Homo sapiens
MWRSIHWMGHFLRSPVSRVAGHFKVSSYHAPQGLDFFTVGQKVPTLAGASRDKWASSSGAGGSPSGLGETLGAPSCRERADAKLQLKTATIGLSLVQSGGGEQDRWTLSTAMVGIDASSGWGAQRTATGPGKEAPGKQAKEGWQTRGEVDWRSGPYKMDRWVRTRKGQ

SEQ ID NO: 979761 - protein, 87 aa, Homo sapiens
RPKIAHAYSSISHYSPRINGHSHPESPRSLHPGQSWLIIAHGVTSSLLFCLVKSRKYEGTATSRIMILSRRTFKVLLHNLSSFVMTS

SEQ ID NO: 979762 - protein, 73 aa, Homo sapiens
KREIRIPTDRSGILLSMGLMRAGDDLVNLKPNIWTLQAQGDRLSSLLQTSLLRIVLGAGSMLAAVEERRLVDG

SEQ ID NO: 979763 - protein, 132 aa, Homo sapiens
  misc_feature (17)..(17): Xaa can be any naturally occurring amino acid
MHYFPIILRRSILSSKXDALISPRGYSWMTYNVPQHSLATKICVELHRACRASLCSEAPFSASGYNLSSTIQHEETAIVVDEHQCQDVACSSAESQSHLKDVYHYHVVGKLLRAYYHKELESSRAFAIRKAV

SEQ ID NO: 979764 - protein, 42 aa, Homo sapiens
MLGKRLEGGTDQMLSKEFHKAAQVKKDAGPAEIRQGPGGGKG

SEQ ID NO: 979765 - protein, 96 aa, Homo sapiens
VFSYSFLNGPSNSAKKWKLFHLISAIDEGKVLTVACAFLRVILPQKYRWSVLVEEKSTGQEQGMVATLKTRDDLTTLIIMEVQRQDGGLYTREFRE

SEQ ID NO: 979766 - protein, 69 aa, Homo sapiens
  misc_feature (37)..(37): Xaa can be any naturally occurring amino acid
DCVVDRAGCKAYICRAVFPGSLGLYLVALLVAPGPSXLQSRLTVGCDEHERTKKDQEGSRKRKRDKFPT

SEQ ID NO: 979767 - protein, 65 aa, Homo sapiens
MGMKALYGVESNPHYRVILWELERRLPTISWVTLGTHRCHLSAPYTVQFCVFRFPQGSRITLEPS

SEQ ID NO: 979768 - protein, 150 aa, Homo sapiens
MRSPLTAVPEFNQETRKLRQFQTWDAYTRGACLVLSVALDPRTSGWKAEEVKEDIARVLSDACKDEAAYVLRRSRRLPLKSYPAVSRVLRIDSFTKECDEKTDISATLKAPRDEDMAVIQTNPRKDAVLRYSDHGSVRATLSTQSGRVTV

SEQ ID NO: 979769 - protein, 220 aa, Homo sapiens
MCPRSLILLVMRQRTSALTLTTERLLHRWCIGGRLPTLSDAAPQHHALPPDAIISPLPPDLARCTRPPTSYALHWQHLLNSLALHRQLLLTLQASPKSSLGEFTTHDCLITQPPPRSPSPRHLKHVSGGYPTLFLVPKRLGLPPPNITLHPIQTLHLSDPPPTPDTPSHNTRCTVAATSTTRQQATPTPTTHPHHTPTNAPCAILALPFHCATITTHPPN

SEQ ID NO: 979770 - protein, 311 aa, Homo sapiens
MSLLECKILARCGGHACDPAVLGEAGRGESYLSPGGKKVVGSLGLHTDLFLRDYRETLSQYGHRKNEGSLPLHVAQEDLAKSSGEKIFNPCPETLLMRARHGWNAILEMNRITPRDTGQTKTHQHDGDRQRDEDILKAPVYAHAKIHKRNGHCETTQPQRASITPMQSGQGTSHKKASRGYEQACQKKWSTGKNQKGAKRRDGRHANCKRGGGGHVGTLKTECGTPQITTYSSTTNWDGQTSGEGSGRGHKRTRPLHADTSSKRKRSGTTSKRPHTKPTENKQPPQRHNTTQRKHDHTHLTNSQTKNKAEY

SEQ ID NO: 979771 - protein, 87 aa, Homo sapiens
KAPVDDAQEMLTLRIATMPKDTLTVNVEAVRPRCPRFRKVKPSRTHNNMYAWGQEVSGRTYSYMQLMSVLQVFMGSLEDSYAVSSAA

SEQ ID NO: 979772 - protein, 282 aa, Homo sapiens
HIPSPESSSSNCDSSTLKKYDLTAREPETHAITLLLLDETENTARLSKPSHGSERPIAQSIVWLVMDLGRSTVHVSPDTSCGSTYLPSRVTRECLEHLYTDAVQKKDLTYYSLCRRFPDIVLGGTYMVTRNCYARSGVTGVWQVTCVRMDRRDHDTLYCILKKHEISMKTISYAEKRLIQDIAVCIEGNPLLNDSVHDANVLSILPVKYAINQLRIPNRLISKVVEPVGLAIRADHGTYGAPRLGVETPQNVLYPLNHATTSRRNLASYRTKGWTMLDGSST

SEQ ID NO: 979773 - protein, 136 aa, Homo sapiens
  misc_feature (11)..(11): Xaa can be any naturally occurring amino acid
  misc_feature (14)..(14): Xaa can be any naturally occurring amino acid
  misc_feature (24)..(24): Xaa can be any naturally occurring amino acid
  misc_feature (29)..(29): Xaa can be any naturally occurring amino acid
  misc_feature (72)..(72): Xaa can be any naturally occurring amino acid
  misc_feature (77)..(77): Xaa can be any naturally occurring amino acid
  misc_feature (79)..(79): Xaa can be any naturally occurring amino acid
LNLFLSMTIFXVSXLLIPTCNPSXEPTQXSISSCRAVTSGGCPSPCVTPRVCLCHCLSMLNWKLASVNPCPXVSFSXTXELKGMDTLILPGTLPTVGCGLIFFSLERLFQVSPGPSLGFLTQIGPHIFSTGNGCNS

SEQ ID NO: 979774 - protein, 77 aa, Homo sapiens
EKEEEEGEEKEIEEESHELAVVYRNVQRPESVSDHMYLDGSYGYGDQEMNVVNKRPMCTTYAPWFDDMGEWICVWEI

SEQ ID NO: 979775 - protein, 177 aa, Homo sapiens
DVEGSTSPQIGDKVEFSISDKQRPGQQVATLCADLLGRNSNSKRRLGYVATLKEILDCIETANHDKENLFSTYSEFSGDVDSLELGDMVEYSWSKGKGNKVSAEKVNINTTEVNGITGGSVIPPFISGTNVSSTPEECRSNYRLSNQGNDGDVEEGDMKGEVYALGHRWDGNKVGLL

SEQ ID NO: 979776 - protein, 298 aa, Homo sapiens
  misc_feature (56)..(56): Xaa can be any naturally occurring amino acid
MESHIELAPPAVISGHNPAEDKRRAPSPAADTRRTITITLASSALFACRMQAEQPXAPDDQTYETTNQSHTQNTTHHTHAKATDTTGTSTTQQTTQTNRRPQHTTTARHKRRRRGRGEETKGGESEGRSADGEDNAATQKRGEESSTEGRQKEKIAKTGEKRAPDSQDSQERRRRQRQAQAERAHSTRKQRRTRRSNAEAENRRGQRNEHKGRRDREETERPEERHTRGGARHKTDHRSKKRQRTAKAQQSAGRERAERRKKRQRTAEHSGADTREEEQSRRHNRRKTPEQTEYRRAR

SEQ ID NO: 979777 - protein, 291 aa, Homo sapiens
MGPLPEARPTGRGRLHTHTTAHQHHNDTTPHTPQNRTHTTTQPKAAWEGRESGRQRRGKGGGRGRKQERGEQQEEKRTRAQERAKRARGARGGRGKEERARTQAQGGERDEAREHDRKGRSAEQRTRRGEGEGGGEEQEKGSAERGRGDKSRREQAGGRMRAGGRGKRGEEGRGGRHGPAGGRGGETGRRESGAADERGDRSETGEGRKEGERGRKEEKEEREKSIQRREREEQRRRRGTGEGHAKRERGRTKKRADKQERRGREETRRAEGAQKSAQQDRSDARHQQRPR

SEQ ID NO: 979778 - protein, 134 aa, Homo sapiens
LLTGLQSTIFLQSLKDGLNHHHVEQKNKEQDKKRPQLCNIQCVCYVDQSQIQEFREAFNTDDQNRDGFIDKEDCMIMLASWGKNPTDEYLDAMMNEAPGAINFTMCLSMFGEKLNGREILRDVYQNMALCCVLM

SEQ ID NO: 979779 - protein, 66 aa, Homo sapiens
MGQTGSDDLGAAYSPGATRPTDASQRHGGRSRSHYECRGYFPHCDRAPAGDKQQGRTAWTITAGAL

SEQ ID NO: 979780 - protein, 295 aa, Homo sapiens
VPEVLPPKEVVPEKKSTGASWPEKPEAPPPKVPEAPKEVFLRRKGQCLLLKSLKCHPEKSQRCQRKVVPEKKVSEAIPPKTEESSRCSAESVCTEGKLVPEKKVPVPHCKESQKLELLEVLRIARECGLLETEIVQCLIVKGRKCQPLVCPRGAEGRGVPEKRVRMGYSPERKVPPVKDVKGCHSMGRGPRSQTRTGCLRHIGRKHSTSLKVASVLPKLKVRRNKERGQGTWKKLQTALSQVPSTYKGVLNKSPWTYRARALEDRAPTVRRATGPNRHGITAKASKRPKRDEPGN

SEQ ID NO: 979781 - protein, 100 aa, Homo sapiens
MIEPELSQQAHPDRPDYDLGRITNTDPNGANTGKATRNAKLHTSDHSMYTLKTEPNRQHTRGIRTEERNQHNHQTKTIKRQHKGKEHDQTHPQTNSEKNK

SEQ ID NO: 979782 - protein, 101 aa, Homo sapiens
GLEDSSSSTLGVANLEVETQSLISPALSDCSVSRSSEYVKEVLSDNEVHIGAVIDYERLELKSARYFERVTYELRQVFRCVQCSLMTGTDGWTVMRLVGVV

SEQ ID NO: 979783 - protein, 206 aa, Homo sapiens
RSSSMADRSIRTVWSRPGTMAGVSWLIALSRKRDNCCEQEERKSFVVDSDPTVIHNIAKDYEATIELERRKQRYIKFVYMLRPYMMGSNSLALEVSCQHICLRPPPSNAYESLKHPHLRIHCLRWSKLMYLDDLGICLAVMLLSLYSACSSEVPLGWPVCIRNVSIHMVVGGALEDQKDTSRARLDDFCFRNSLRSLTGHQGIRAF

SEQ ID NO: 979784 - protein, 521 aa, Homo sapiens
  misc_feature (418)..(418): Xaa can be any naturally occurring amino acid
  misc_feature (461)..(461): Xaa can be any naturally occurring amino acid
IQRRSSPCLQSAEEGVQVAVDTAACVAQYLTVSNADLAGLVLKRTRCTLVAGLVMNAHWLDNCETRTLDDNGHVHYDLTMTPLPKTVRRPSPTLPNRTMAATTHEQDGRREPCDTNTMKITWHHHTTSATTPRHPHIDHTRMIPNTWEGHHTFQKHVSYQGSITQEYHNAHGSLSHTHKCGNPNTRSVQHYVGHHYDSYHSITMDKGYSLLLQLKPTRQAVTNTHKEQGKDILTQTQLSRNAYTQGNNTIRARPLCGIKGRPHRHNKDSTEKLKQAQSMEMEQQTPTNNNSTLNKHDSNKTTSSRPTELRCEEQHQKSDAPHTESTQRQSKTNSKDKVEAEAHSRGSSKTRGQPNAQHVGSPQSDEETHKLTDDRGESDRNTVARRTPPNTHKNQARQRRRTRRRDLTTQHKLRRKTXADIESRRPTHTKDTTTEAVAQHYYTQRRRCGAKHVTRLEASRXQTKATSNKSDRQTVSRAEAHKHETPERSKATPENQAADNAAHASQPNREATTAQTAQPQT

SEQ ID NO: 979785 - protein, 110 aa, Homo sapiens
MALNTDSGFGNTRHHWALMTLWSWNEAAGQAVGITEGIFQKAKVLRSSWPSSTEGDTSVRAHGATRATKGVLNRDCPLKHRSDQGKYADNWAANTRLCIPGLRDTPQVVG

SEQ ID NO: 979786 - protein, 169 aa, Homo sapiens
MGIQSPVGSYCGHILLKSGLTQYVEAQIDEAVWQTTPSREQFRAQATRESVTALNTLGGNTTKRRTKQQHDERGRTNSSGSQTTTGASRRQHPQTENTPTTTILWVYPTATDNIKNEQSADESNRHERETETNADVYTKPYKPTQYTSDSTVHRHTNQRRKTERTQHKD

SEQ ID NO: 979787 - protein, 103 aa, Homo sapiens
LFFFWKQGLALSPRLECSVAICWFAATSVSRVRVILCASVSRVAGIIGTRHHAGLILVFWVEMGCFTMLGRAGVELLTSGDPPTSASRSAGDWQAWATVPSHM

SEQ ID NO: 979788 - protein, 56 aa, Homo sapiens
MGTKWMMSYNENVWIHGPNFHSRANFTAPAGNSSQIIHIQLTNGGPYHKRIGGLKS

SEQ ID NO: 979789 - protein, 126 aa, Homo sapiens
MLLGIPFAMSLCRPDGVLVVWPLSYLAHCVHPIVYVMLQSACVQLLVALMGQGCPGGWGEGPSNCEEMPPDVLGESRATGKAWVVPTGGTCVGHQGVPRGYQGGGASTVLSPCKTGRLAEQLSCPF

SEQ ID NO: 979790 - protein, 152 aa, Homo sapiens
MIVIGDSAMRNPGILPHTESTTCMIFVAKPLHQEMINSIFLYLEPSDYHRNRCNGQDARDKEGHTRLNRRGSSLFDSLWNMRLHSFHDYNIQKESDLMLMVLLYETCYCRTLSDVMQPAMGPEHYIMGTMVDPMSFYLDNVVTVYRLPRALT

SEQ ID NO: 979791 - protein, 201 aa, Homo sapiens
MYALLLNWLNAGVNLLPVRLECTYVSKTVPQPGPLSSRIRLYDFNIKGPFAVLNCARSTGYLSQGPGVRHDKKDRQSRLIFVLMRKTTFSTQEACSDTSITTLNTTRRVCTHLLRKVLSLRLGSVTRVSSRATSEFHARTLGQPGRKLRMRSQERLGSENCPIRGRRERTVKEGTDRRNGSSQEMTGRWAPGDWFTGRAKW

SEQ ID NO: 979792 - protein, 162 aa, Homo sapiens
  misc_feature (83)..(83): Xaa can be any naturally occurring amino acid
MPRTGKSVKEKMCYTEFRLPTLLSLGASYLPETKPSTTRQGQCKFLKARTMRQPHVMPCHHMAEVSCQEIPLRKVSYEMSRIXKSVSTQKSQTWSLEPVPDTFRSESDLEMSLVQSNMLWRGSRERHLWIEWMYKRNEVVRNVLDYDIHLSWFLTKYTIDST

SEQ ID NO: 979793 - protein, 214 aa, Homo sapiens
GGQRHLQDTDQSPLQSQPMSRTPYISFTQVAQFRFIPSTSERSGQCMIYTHVVMGVVIRAGVVYEKSDKIIPLASGVQRGLGAPSRNLIAQKAPQLGSQTSRAVASLWGLVQSVGYDHEMFQTFTKETKAYRGAPKSPNVFPSTHFLSPSGKTHVLRTGVGPGLGPVECMGYFGTGGMSSAGYNRENKLLWGYLYARERAVIIAEIPPQIAIPS

SEQ ID NO: 979794 - protein, 73 aa, Homo sapiens
  misc_feature (2)..(2): Xaa can be any naturally occurring amino acid
MXLGISMPFGKLAMGSSGMAHRVGSELTSESHWRCSDPWPGRALGENLGFVFPIFLGGGGYAPCCQLLARSPC

SEQ ID NO: 979795 - protein, 302 aa, Homo sapiens
MSGWRGEGPDGVYGENTCAEGVVSHRRNSGLLKEVAVGFFSQINKNAPGGNSGSGCVKQHSRRVDVTEGLLTGGLLSNSEEASPERRGREIIINIKRARGHGGREQEPHQTEETTEHNKGTQAGTRRKGTKEKAQTTEDMKAAGDKPRTNNNTPIRQQTTTKHLARRQSNKQTAQTARRTQQPAASTTASHTRDEEKCTRHNTEEQTHKNVARRKDREQRQAHNRQTRISANEHRQKSPTSEHKEKETSNGDSSTEHNQPDRGTHSSKTHAKTKQQTRHRTTERCGSSQTNTKQEDSTKTEE

SEQ ID NO: 979796 - protein, 214 aa, Homo sapiens
MLFLLKFLRREGWFLRGAESIIQCADIQVGLQHKLKYMRVENFDIFLGSLATFFLTLLSHFGAPPILQKLEVYGHEMVGTERNLWTNCLCFQKPDVCPPIAKICLSAGPVCCGHGFLHQILGLLLLSCDVEGTPAGCISSQSESSVGGKSWTTWFWVGGPCALALVLHYQIPVYIICLAGTPVNSAESGYTAGGRHSSKLRCREDRGRKGPPKG

SEQ ID NO: 979797 - protein, 307 aa, Homo sapiens
SGDSGPRWQHVRKALPRRLVGLGPSGMSDLIYGDLTIVRVNIVVMFVVPEDVIVTHIGKTNSRYVLQVKIKLIDMLSEGRTLCYKKPTDLCLLSGFPRVGDHTEVLKGIQKFPGINYPVRDPKFDRASRLAVADGAKEVVRFYGSCSEMIDLRRTSMFHRRRVCQRLDAILKGAQSGQYFCAGVQSAGDLGWRYEGKISPRNVAEVTRSAKQGLYRNPGDTMAGAPQGAEELCLVRRRMARWPGHCMGAGNLDKLGGESGAVDTGTRRTTPGERGQPERQGTDRTGDNHHKICKSAREHEHGREPRN

SEQ ID NO: 979798 - protein, 155 aa, Homo sapiens
MPSAGVKSIELSRHTPTEENEMICCSVLSPRIRSSLVSGVGGSDLDIVLAKLDQLDTRILHVAEYGVAHFQYVLSIGAGWAIIGGFNSLDFPYAQATALEQTYAKIHFSMHMHRCNLTFFTKNLLVSIRNGPRLTLDSRCVQRMKIYYLWGHSSL

SEQ ID NO: 979799 - protein, 134 aa, Homo sapiens
MVLSPLASAASFRGQGEDPVLGKLETVVVTEEEALAEDLPLVSRSNILPPGGIMDELCLVSETDWLPNLPGLGSLVNLGVNAQSLCDCWIIVVRMRSHVAGAPPDIVLSKQGGLSETMVPLWTSGSEVPASGET

SEQ ID NO: 979800 - protein, 133 aa, Homo sapiens
  misc_feature (121)..(121): Xaa can be any naturally occurring amino acid
MSAATEANAYFISSSKAHVIAHLGYHAPDEADQRRNALNAGDDTSYSSTLVGLAFPYCIALIYSHDTLGVTETFYYSFSLPKNYQSPEPAINMTSLHNSFYSKDTSLGTPVIDSLKPMCEXPIAGSKYLAEYS

SEQ ID NO: 979801 - protein, 105 aa, Homo sapiens
MVSANILYQHYKIRMDNFKLCLDCISLAWIKSYCNGQFQCISLQAQVMVKYVRLLNNNGTYIILQGYSLSLELTSLNLYICKICILMLDLAIYRRSSSNCEKFLS

SEQ ID NO: 979802 - protein, 212 aa, Homo sapiens
MMTGDDDPSSVVRKCECENILKKVIQWCNQQKDEPSSSLKMMRNNGKCEVDDSPCGGAKKFLKVDQGTLFEAHCWLQSYFRHRRLLDVTVQTVADYDQGEKAPGEIRKELLYQNVCTGQEGSRYGNEKPVGCKQMKCWGGMGNWKDVQIHWAADYTMDIDDGHNGGSQVGEIARRGWGHPPRQFQKKTCSGAKTAQERDPLEQRLRQRTRVT

SEQ ID NO: 979803 - protein, 47 aa, Homo sapiens
MAVLWGQVGGCPGTRVSLSRKYAADTRRTDDRVVVAPSGWAGVTEGL

SEQ ID NO: 979804 - protein, 239 aa, Homo sapiens
TTQGKRQQEPSSTEEGDMAKEWGYACHKVLTTGMNFPKCQGGKPVRPFELHTKDIRHDPFSAQTMVCVFMMGALQKPIPALTGKHRAELYLNDYLYGYLTVLDEGRFLLPGPLPTSPDFILSTWGLFRNDSIGLLDATPVSLESQYWHAGRFTILSQLGTHERLPPLEKNAPAKQAAAWDSPGDWHSFLEQQGHLQTWGEFHDLSLESHRTHIIKPTGPRTAPYNTFAPIRLFTALPRK

SEQ ID NO: 979805 - protein, 173 aa, Homo sapiens
MVAGVGRAIFGGPSKRTVVCRDWRRPGTRNVNYWTENTPQGAMNRTRSDLPPEKVERWSQSQIGRIRAGDQTHVCLKPQCSAPQMLSKRARGRARTKENLQFIVHKRTGPPHLASAVNSACAHHPDGKQLFLVPLHTHTTNPVWHTITIRTKRDSPAQLFLYVFDSPALYLHH

SEQ ID NO: 979806 - protein, 182 aa, Homo sapiens
  misc_feature (112)..(112): Xaa can be any naturally occurring amino acid
MQTDPPAGVSASPVADNVMTWNAVIIGPADTPFEDGTFRLVMNFEEQYPNKPPGVTFISQMSTLMYTELVSCVSTFAEPVGVPHMTVGSIFTSIPKSTELSPKIDSPGNVEXSNLYKDNRENISNVSCTRHKPGTLTRPRRGGLLMATGHDGQGGAGNNGDWSGSRDGKRRMVSKETSGPRA

SEQ ID NO: 979807 - protein, 279 aa, Homo sapiens
  misc_feature (187)..(187): Xaa can be any naturally occurring amino acid
MASMEPSWLVPFGTSGRVNHTFPPIFTLGLIFPLGAAPFMESIVGVFPRRAWGFFLQHKSALFPPSLNRRTGVLPLSLPTGEPNTLHTRVVILINTTILIYHLILPTKGRPTCGEGRLQGAIVLHTHLVEPPPSGRPPTQGFLTPPTSACHIHLQPNNYVYLPNSRGARTTPCGKDNLKPYPLRQQXICGSVYTQQHSLLSLSDTAPPKLYTTRRFDPQAAWRLRAPPNIWGCQSDQQPQKLWAGATPFSRHPPAPNSQPLPIAHFQKPPPNQPKSAGT

SEQ ID NO: 979808 - protein, 155 aa, Homo sapiens
MRRLHDVLSYSVLLLYGDGSPYSASALIIKKVTYHDPCIESVHIGRSGKELILPKQESIGLCGLQDCAPEDRLSRSARKDIQPASVDPMDLMKDSKIFAHAGSCKTNRVLDQVGPPSLGPSGGCTIPSTMSDHQIQEYRLRHGPFHLVPPQYGIC

SEQ ID NO: 979809 - protein, 119 aa, Homo sapiens
MPRLEYSDDYSDTYELKSGSTYLRIKALVCLTYAGIGCSLISMNSFPDYELFILASMNLDMFFKMGGQEVICHSLRAESLTRYGLGRTGVFPIRKEIKARGEGQPKVREAFNVREGVHE

SEQ ID NO: 979810 - protein, 287 aa, Homo sapiens
  misc_feature (208)..(208): Xaa can be any naturally occurring amino acid
DSVPHCITGTPTMVETIKDPSPHQLSWLDHCHVSQVIFTSVGKFYYPWRGRHNVIIASPQHFIPTCEKRWDWHLLEVGVERQRPVGVFTRFTVEYTLPIDLTQSNSAKTARIVPVHWLTSLPKVVTEVLTSSADVDARHGVDTGGSKDMPYHNSVPENEEDTSLVSKPLREAGGRAWSSTMQGGVKTIHQGADGHRCIRPPRKARASXHFRGWNSKRQARREPEETLQAALLTAVARYTDRNRRAMGGHSWVTWRDHPQESSHTPDARIPRATLATWSPAMSSARFR

SEQ ID NO: 979811 - protein, 179 aa, Homo sapiens
THSGTGAALNSLFRLPCCVQPSRSIMSFSADQMLNSRRHFSCVTEQVIPSITLSQVGDVLRALGHQSPIQMHEVEEQFWETPASEELNAKKMSLKISAYDASQFPTNKDQATYEDFVEGLRVFDKKDNGTVVGAELRMLLATLGEQMKRGRSGSPAWHGQEDSKWLHQLRSFVKHIMSI

SEQ ID NO: 979812 - protein, 73 aa, Homo sapiens
MYLTSLSLSMNCLCRLVRMIVPLLRAKTEQKNMGPPKLTSVGGQTKAAQQGAGAQTGGDTRVLTVPPRANPTI

SEQ ID NO: 979813 - protein, 436 aa, Homo sapiens
  misc_feature (290)..(290): Xaa can be any naturally occurring amino acid
  misc_feature (342)..(342): Xaa can be any naturally occurring amino acid
MPCQHVLWNNVSAAGGRLLLSSDGRLNGTVRSNAIGDRNVREAMDQFTTHGRRIKFRLVMPGLGRVPHRQRCSRLTVTSESNMCAWGHELYTTAFGEVNTTELYMTDGIGFTEEIPVALRKELQGCDPKKLSLVSISSKRDIEFVMSAYCNKNEVHRGNDEQEAIVAHGSLLELLTVTVCIFNWTQHHCSSLWIVNRYPQGHAKLHMAVKGTRKTQKFVWNTSAHLEVPIMQACGRRMKFHSTTNLFPPCCCTLPSYMDKVLNTVLTLVVATQSGHMRSNSIKLGFIHHXPETPVTTSQKRGAIHLDILERCRGMPKHGGKPGLIGAMRRKTSQLGGMGQTXPEHGLVPCTAITKHGTGSHTSELGQQRAQKRKETADYIKGDQQHARERDKASGTAQHIEGQQSDTKDKTRGKRAAHERNTTRRTNASASTDTTA

SEQ ID NO: 979814 - protein, 169 aa, Homo sapiens
MNDIAHHIYYGGEYPEYVTDILRTQQQHNTLTPTTCTTDLEYDQFSTEDVHVVNLITHQGTLALTLGYPPPAKIITSHPIRWLLIKHQQTATHVGEVRPHRHPVAADGRATGPAGKQLALSTSTESRGRTSGFQHGRINTPAAHASTTGDTASQSRSDHRNSARPRTRK

SEQ ID NO: 979815 - protein, 70 aa, Homo sapiens
HLTGVREIRDRIRRIQLETPHSSRFHRPPADNQSRLSENGISCLRRLIDTNKKRREKSYPRHIVTKSVVP

SEQ ID NO: 979816 - protein, 76 aa, Homo sapiens
YKTRYFNVCLTDVHMKEVIQQFIDVLSVARSRKVSGVYLRGECKTMDEEDERFVDTHQLCMSEMPRCCTCCVLGEH

SEQ ID NO: 979817 - protein, 70 aa, Homo sapiens
YIGFIPEICILATDPEFGVLGADTAVVDICDEWTMSPAEQLTDSVVRESHALSLFVYRLSGSNRRRGWNM

SEQ ID NO: 979818 - protein, 209 aa, Homo sapiens
MVCFRLFPVPGSGLVLVCLDPGSCAVLCMELNLKIQKNATCLYVKTWQMVLTVRYENYKMKNFKSCNHFSTTDTVTYEWKHVVGMIENGSQEIVQCSSRPGFSWIGEFYRRQPVYLIQGQRLICAYNTGDSTTFPDAEDKGILTVMNLLCHQNSIDMTLLDAIVYQLRNRLMLSSTTGMFLYHAFCPRMDGRPNEFLCGLRRNFQGGPT

SEQ ID NO: 979819 - protein, 98 aa, Homo sapiens
DSGSIFKTLGLWINPTDHSSSKNHLDRFFRRNSFSFITRGPFWKNIRDGLTSSRDARAKKNYCVRLAVTGGTQGRSKHGYHVTWYRMVRTVTKTTEGK

SEQ ID NO: 979820 - protein, 147 aa, Homo sapiens
IARSQKPEVSDVMHSVIAIYLKRSFIGYVIVVSSKIKVLRSHSSYTLESSLAAPYSGAKRIHEVQMNSRGEYIRSAIRPNTGAWTSVYTYARLDLGQIHNKKSYGKLPASYSLIRKPCGSNTKDARIGNGPSHLPNFLDTLDSPLHT

SEQ ID NO: 979821 - protein, 185 aa, Homo sapiens
ILESFSKTSEELKESCVFLWICFGLGKRKILCFIGVCVEGGSGSLRCTAECNVEVALQDQGGEGGRALEKIRLWRHFGKRDDVRVNGMMIWQQMVGGFRKIAPRCKLLVNQPLICWCIGGRWGGGIRGEEKSTHGRRCTLALWFKSSVANGSGLVERKREIDVERIGLRGPYCGGSIVVFKRTGI

SEQ ID NO: 979822 - protein, 284 aa, Homo sapiens
EPQIKKEAKPAISEKVQIHKQDIVKPEKTVSHGKPEEKVLKQVKAVTIEKTAKPKPTKKLNIEKENLHLEKQTNQNNPKGTSEVTESGTKKTEISEKEQYKKKQTGSILEKKKSQQEKNSLQLHNVTKAEKPARVSQDVEDVPASKKAKEGTEDVSPTKQKSPISFFQCVYCGWVQWYGFQFPFTPEKPGESSGQANSPGQKHQDRNTHVMTLQCFEDLTKGPFVPRVQAIEFAPESSANLSGGLEERAKVVAHTVKGQPKQEGAAGTGGEITPKGHLGRGHKG

SEQ ID NO: 979823 - protein, 109 aa, Homo sapiens
MVWSAAHTLVFEPPFWLRRCFSALEYRDGVVSVSAWDRCLPYGNSNPLTLVMCAELTMASHAATDLHCDQAWPLVVVVTGVCPWRECLDMKCMSAKCSMCTLSDYVTFV

SEQ ID NO: 979824 - protein, 136 aa, Homo sapiens
HDGEEVSDRVLFDTSDDEELREERDMHSIIVLVGNDEPRSSLEEQVMNDIGDLLQEVTVTMKMMITPRQADRLSMLSQEIQTLKRSSTGSYEERVKRLSGPELNEILEEIETAIKEYSEELVQQLALRDELELKRK

SEQ ID NO: 979825 - protein, 219 aa, Homo sapiens
DSGSIFKTLGCGSTQPPLLFQESFDRFFGRNSFSFEPTAFNEEQRVGCNRNRGEESWWLRMRCPRHRGTGMWSLEPGDRQCKPKSKKEIEALLALRIEFVLREECRMNSGRDFSCLMRTGDCPRLHLIARSVMVLSRLWARNRRPSAEVTERFWGKPGRMKSCIAKKMEFEQFLAMMRSISNEEGPGTYEELCEGLSVLDKEGLDIMGVNSAVSSHLVE

SEQ ID NO: 979826 - protein, 136 aa, Homo sapiens
GAIVCALGECRFDKIKVRIMDSEVQQMVGSLDGLMMLGERDKGSLHEGCPNTTEECLPELREERRVDLRDNRSKKGNEVDRLSLQYLDDNVSHRIVNCRSGPCLWLDFLKVQQMSAWCRLQCCQSFKNAFRVDTIR

SEQ ID NO: 979827 - protein, 125 aa, Homo sapiens
MSQHTFFDPPEEEPRFYNNSYSDLGHPEVLYLILPGFGIISDKVEGYYSRKKRNIDRYIGMVVELMISVGFRRGYRVSTTIYLREEIDVDSRGYVNFRDHNQSLIPSGVEEYLVDSMKIHGSNMK

SEQ ID NO: 979828 - protein, 180 aa, Homo sapiens
SKISIKKRARHHEIRIQKTASSSKVMKDANNLASEVENTEADLKKLHEKPVTDPEGVSDHELIVALNDYRPKPFAECAYQLRRKKYEKSKGQYHTHTLIDLELVFSYKEATGFTEYSEYHKSTSMHKSDTEEYTPHVWTFETPNVHQLTDRVCYARMQEWDRIYLERVMEAVQFLGQQTG

SEQ ID NO: 979829 - protein, 66 aa, Homo sapiens
FGSRSNPSVALAVASTIFENVIIEQGSECKILFTWRKQDAKAYDFCFTFRLRKNSCTRDWNHRNSF

SEQ ID NO: 979830 - protein, 62 aa, Homo sapiens
MTGESDSSSGRITEAGRFAMAPENLQHDDIPGGAFTGMHLGVKLVFTRTRRHDHEEVDAAAN

SEQ ID NO: 979831 - protein, 121 aa, Homo sapiens
  misc_feature (86)..(86): Xaa can be any naturally occurring amino acid
  misc_feature (101)..(101): Xaa can be any naturally occurring amino acid
  misc_feature (109)..(109): Xaa can be any naturally occurring amino acid
  misc_feature (120)..(120): Xaa can be any naturally occurring amino acid
FFFNLIYRRTEEGTEEKNGKTSRNKEKKEKRRKTTKLRRRTPKKERKDKEKREKERRRKKQKAKREKKKKQKEGKDEQETLNSKRXQSLVNLSSLHNIGTXEIPTLRLXKCLNTQHIALXI

SEQ ID NO: 979832 - protein, 72 aa, Homo sapiens
  misc_feature (2)..(2): Xaa can be any naturally occurring amino acid
KXLRTPVPVSFGTSPAAGSIITSPSSVTIITSPSSLFPSSPLPPPCFHHHLSLLPASFITSPSIISIITSPS

SEQ ID NO: 979833 - protein, 103 aa, Homo sapiens
VDVVSTKGGVGKTTIEANLGAFCADAGLRVLMIDLDPAQPSLSSYYQLVDEAQGGIYDLLAFNITESAKIISSTTIPNLSLVISNDINNQLNSLILQAPDGRL

SEQ ID NO: 979834 - protein, 85 aa, Homo sapiens
MRHEIRADTLPFGLEAFREAFAPIAEEFSMTWHITDTEQKKRVVLMASRESHCLADLLHRWHSDELDCEIACVISNHDDLRSMVE

SEQ ID NO: 979835 - protein, 107 aa, Homo sapiens
MGFHHVSRATLELLGSDRSTCLGFPKCRDYSHEPLCPTFSSFLTGLSCCWSLSLAILHLAVGVSSPKHRSPNTYSDKVQTSYQNMLQTLTPTICLMSDSLIDCPFYQ

SEQ ID NO: 979836 - protein, 32 aa, Homo sapiens
  misc_feature (5)..(5): Xaa can be any naturally occurring amino acid
QVIAXCPQACGKQALLPPFGHESRTPAAPLSR

SEQ ID NO: 979837 - protein, 77 aa, Homo sapiens
AAGAVVLRDIDDGAREVLVVHRPSYDDLSLPKGKLEPGEDLPTTAVREVAEETGINIRLTMPLQPIVDAAANLVVVG

SEQ ID NO: 979838 - protein, 72 aa, Homo sapiens
ASVSARIQAFAEQAQFQLVETFAERLAQVLMSEFQIPWLHLKLTKPGAVPAAKGVGVEIERGCRYLRFTLVL

SEQ ID NO: 979839 - protein, 53 aa, Homo sapiens
MINYRATDLHIACRSGPAGNLIQINLDLAAQAMISGRYHRRCHRPRGRLPCLT

SEQ ID NO: 979840 - protein, 70 aa, Homo sapiens
MSTAAMSPPDEEQTVLHPPVQLRISGMTCAACATTIEKRLSRIDGVHASVNFASERATVTGMGVKDAIAA

SEQ ID NO: 979841 - protein, 81 aa, Homo sapiens
  misc_feature (35)..(35): Xaa can be any naturally occurring amino acid
DFISRYETVSTSAGDRYDSLLSRSGLWAADAASWXNSNLPLPDNLFKMTQQNTAFHSIGQFHVADYVNFFFEQKQVFICKQ

SEQ ID NO: 979842 - protein, 123 aa, Homo sapiens
  misc_feature (109)..(109): Xaa can be any naturally occurring amino acid
LTGSMTLEEWKLRKSRDVRVNCSPGHRWRPEPSSLQGSGKGGLSSVLVLPSSGGWVPMAPGFVLLPRGLFSSRPPVTSRQGKSLCDYRVKVEGPCLRGFIPSGFRGVRXQYTGTWCLDGQSHS

SEQ ID NO: 979843 - protein, 105 aa, Homo sapiens
PRGTKTGAQSWTVQTLADNLAGGTMRQAVRAALLAALLLLVQLCPGSSQRSPEAAGVQDPSLSCSPLVCYQLCWGPCAPLFSVVVLLVSRGARPIGTRYGRRAAA

SEQ ID NO: 979844 - protein, 85 aa, Homo sapiens
GFGDLFGNLYGASGARRTASRSPRRGADVEGETTISFDDAVSGTTVTMDMVISGTLPGMSGDWSSGWYRSASVDAAANLVVVGGR

SEQ ID NO: 979845 - protein, 143 aa, Homo sapiens
ATCRRVATEPTGDHTMSVLLGSGHGPGVSPEDAGTRVRGHQISQQPLRLEDSEGRYHDRQENDPCPTATHSQASSGGAVCVCHGDVDAPVPQGQSVYVTGMSVCTCYEDVGRVYGDMVACVSWGCVLGTRVHMCHGDVDAAAN

SEQ ID NO: 979846 - protein, 154 aa, Homo sapiens
  misc_feature (9)..(9): Xaa can be any naturally occurring amino acid
  misc_feature (34)..(34): Xaa can be any naturally occurring amino acid
  misc_feature (36)..(36): Xaa can be any naturally occurring amino acid
  misc_feature (60)..(60): Xaa can be any naturally occurring amino acid
  misc_feature (80)..(80): Xaa can be any naturally occurring amino acid
  misc_feature (85)..(85): Xaa can be any naturally occurring amino acid
  misc_feature (115)..(115): Xaa can be any naturally occurring amino acid
KNKHTKGDXAPKRTKKMKKTSHQTKRQETGKNDXPXESWSDPDKRKGARSRETVTGAEPXQKDPQNRRKVKHALPPGRQXEATFXRFEPFRAQGAPPRGRTAQPRVLNPPVAPEXVTKPTVTNPRAKKALTKAGARDATHHFQKPLQLNLATLS

SEQ ID NO: 979847 - protein, 119 aa, Homo sapiens
IRGRVDTALSGFVAVAAVAFFAMWSVLSNLLCAILIFTVGPFRLGDVVELVDTVDKPGVKGRVVAINLLYTTLIEVEEAGTGSVMVQVPNSLFFQRSVRLLARQRHTALTFGERSTRPR

SEQ ID NO: 979848 - protein, 137 aa, Homo sapiens
  misc_feature (3)..(3): Xaa can be any naturally occurring amino acid
  misc_feature (15)..(15): Xaa can be any naturally occurring amino acid
  misc_feature (17)..(17): Xaa can be any naturally occurring amino acid
  misc_feature (25)..(25): Xaa can be any naturally occurring amino acid
  misc_feature (29)..(30): Xaa can be any naturally occurring amino acid
ALXSLLRSLPRRARXSXGFGPESSXERPXXQPPGAVPCAQPRGAWRVTLVQQAAAGPKGAPERAAELGVNFGRSRQASARGTNTHRYKASCKSFKYNSLLLKHQRIHKANKPYACHECDQRCHGWPASSQHHRIQTG

SEQ ID NO: 979849 - protein, 163 aa, Homo sapiens
ICRKLKLDPFLTPYTKINSRWIKKRGGGGQFQDGRIGTAPVYSSQCKLCRRQVISAFPTEVPGSSHWGLLDSGCSPPSVSRSRARHHLTWEAQGVREFPFLAKGSCDRWHLENRVTPTLILRFSKGLSKGHINRLYPVHDSEGTMSMEPRSLLRSQTALSNMS

SEQ ID NO: 979850 - protein, 76 aa, Homo sapiens
AASEVLVDSAEEGSLAAAAELAAHPPQQRLRKKQKLHLMRNEARKLNHQEVVEEDKRLKLPANWEATQSSFGVGTK

SEQ ID NO: 979851 - protein, 109 aa, Homo sapiens
  misc_feature (33)..(33): Xaa can be any naturally occurring amino acid
  misc_feature (51)..(51): Xaa can be any naturally occurring amino acid
  misc_feature (61)..(61): Xaa can be any naturally occurring amino acid
  misc_feature (76)..(76): Xaa can be any naturally occurring amino acid
  misc_feature (79)..(79): Xaa can be any naturally occurring amino acid
GRFSSGGDPGQRDPGSEFFFRLHPDEVEALLRXGWGQPRGQAHRAPPPHGXKGQCHCLLFXHLFLGGWSRLHPQKXQWXLGLKGRSLLLPFSFLQKQTEKKIKALYPKK

SEQ ID NO: 979852 - protein, 76 aa, Homo sapiens
VRGAQTMPPASPGLRVGWRIPESLRSPAEDMRLHNLLKMSFPNNVGPILLRVNSLSHERSDKIQGQRLIFFQNCLL

SEQ ID NO: 979853 - protein, 73 aa, Homo sapiens
  misc_feature (5)..(5): Xaa can be any naturally occurring amino acid
TFSLXIVPTTIPITRSSAFLNPNSLLIITIGTQLAQQLLRRHTLYLKAFWDSIFEPKLCPRETVTSCLSRRGR

SEQ ID NO: 979854 - protein, 73 aa, Homo sapiens
RDGESEETSEKNIQYAERRNRCEEKVKGIGKRGRNCECKMKKNEMNGKKTDKMVEEGKLRRQVSSLKGEGKEN

SEQ ID NO: 979855 - protein, 115 aa, Homo sapiens
MRGRVDPKTVKILEDNLTSTIQDIGTGKDFMMKMPKAIATKRKLTNEIMIKLKRFCTAKETINRVNRHPTEWEKIFANYASDKGLISSIKGIKQIYKKKTTPFKKWAKDAEQCRR

SEQ ID NO: 979856 - protein, 55 aa, Homo sapiens
DYKSDPITYLFKNPKYGPDAVVHAYNPSTLGGRGGRIYLSSGVRNQPDQHGETPS

SEQ ID NO: 979857 - protein, 68 aa, Homo sapiens
MGAIKHTKHSGFRQSLLDAPKEVMSEFLLRRGFEAVMVDALRVDHRDNMSYHSAFAGSVQPLCRRGRE

SEQ ID NO: 979858 - protein, 100 aa, Homo sapiens
TKFAAASTAQCENTFDALGRIRTQRDATGHLTRFTYLPGGVTVADDGQGHHSNTWISDARGRTVGIIDADGQRTSIRYDRYGNLVGATDRAGKVDAAANL

SEQ ID NO: 979859 - protein, 96 aa, Homo sapiens
SNCSRICSSCSPTCSSCFRICSSCFRICSSCFSICSSCSPICSSCFRICSSCSPICSSCSPICSSCFRICSSCFRICSSCSPICSSVDAAANLVVV

SEQ ID NO: 979860 - protein, 106 aa, Homo sapiens
IRGRVDLVMNCIGMHLSWGLDTVLVFWGEGGREDECRGHAKLVHNTGGGTETLIEEVGSSGNELSLFVNLRDISEGEGNVNSNNMFSFCHFLKGAGTASVSVDAAA

SEQ ID NO: 979861 - protein, 67 aa, Homo sapiens
VDYRQKLTLGVRGPELALGQVIAHMLSAIPTGGRLSLTCQQGHGTQEASVKAAAQDQWKLLDLAQSR

SEQ ID NO: 979862 - protein, 136 aa, Homo sapiens
AGLPPLDFFARGSTNVIFNSFVFVYVRRHMENHVCHPLAHSSLRYTRRGTLHPTHVPESSMCYRPNVRKVTPGSYGFHHFVNNTFYHTFTHNLGPQEIFGGIPVLWRSSTPQNGDICAPAGLPPIFLRSSRRGREF

SEQ ID NO: 979863 - protein, 163 aa, Homo sapiens
  misc_feature (23)..(23): Xaa can be any naturally occurring amino acid
PKYLGTVFPSEVDTKLTITAAFXGPHVIMRTVLGVHLKRSGNMNPFCTLESPVQPCMELGKAGPELSRETWWRRPRPALSLPGPGQVCVCPSSTLGGLQAAAEGIPWYLFHFSVHPYPPGLVEPMVILGFHIHEKRRFFFVFMLKLTPILLSHKINLMPSGKT

SEQ ID NO: 979864 - protein, 83 aa, Homo sapiens
AKAEAPAWMGSFPSSPAFGPGSRFGARDQPAWTVTSPLEPGLGDRQYLPPRRAPWAVPPCAWAGPAALEGALIFFNKSLCFAL

SEQ ID NO: 979865 - protein, 39 aa, Homo sapiens
PPQPLPPHRRGHVVWCVGRGEEEEGVKPREETGERHHTH

SEQ ID NO: 979866 - protein, 103 aa, Homo sapiens
GEQAEQGTSLKGPQVQGLEHQALVEFQEDIIQSLVKNSENTGKGLPDDRDLREQGGRTACHFGHAQKGQLHLQVGQLGQQLLLLLPAKISSLDLGQCCTSRDD

SEQ ID NO: 979867 - protein, 324 aa, Homo sapiens
PEPGARGPGVVTLLARRGGVRRPLGGRFPPTPAPGTRPAGPSPRPFQSERDALQFLLSLQLYIARCDCAPRWADQLTEEQIAEFKEAFSLFDQDGDGTITNKGTWNCHEVTESEPNRSCHCRIMITDVDADGHGTIDFREFLTMMARRMTRYRIVKKNIREAFRVYEQEDVKGYISAREISQYMTNQEKQLTDEDVDKMIRDADIDRHRKNKNEKSTRLNERQKRTHITSTVSVPRSTTAAQSTLRNFTMGRTQHRHKDHLYTVTISQRYVNITSVNTPLKLVGAALRQHDRTETDTSKPRPSVNVGHSPQAAVKRIQNAVTST

SEQ ID NO: 979868 - protein, 70 aa, Homo sapiens
MEYSLKGWIQHNKDENNKRKEGKAYQGIRNMSGKPEAQEERISTGDTQKEPTAETTASSDPGERQQAGTH

SEQ ID NO: 979869 - protein, 469 aa, Homo sapiens
MAECPTLVEADHLTTRDRHVGLVRMFDVYRTEKQPRHGCPITIEYKGYGYMLQGALAVEEDVVLGQAYETPTPDRPQSLLTYHVCSSTLMENNDPTDYQLFWRISDTTVNDLTADGQDNDYIETCMPTTDLSDHMGTNHDLPISDQPQGALGRPNETHAINHNMGTVLDEYVNGNNPYRAINNMPMDGPYTLQNHTDQGQSWELETMGTKKKKKGTAANKTESETLATADLDKGRSSNINATRTKQTRNATTHDHRESKYTQTSQQRQKTQGCPTGVKYPVYTSDKSINDCALIAAITTNTVMYDTDASIRSTVNLADVTVVLIVPNLIMTAEHSRKNTLSAVNIVRRDNLQSILVHLLEYDSGGSRLQVMTQTVKESTSEKQDWYRDHSMDNIPQSSDHETVRARSTNGPWYCATKRRRNNGTRASTADHPAAGRQQQPQSQAESPRKTLACQTSEAHTTPAKKRATT

SEQ ID NO: 979870 - protein, 307 aa, Homo sapiens
SSSNGSDGCCAVRGRGLCCVVAVSDHVNATRLLCSGSVRRMSTVWLLVLHPVERLVWCLLEMRDACAEDGTDIFQVRLTWCPKSSPWISQWTIQSIKLANRTTPRFLRWCHMGRTTSPQQNSRCPQSSIPLSPFDSPDRSHGIVDTPSLHCTTSIRDTTKTVSTGRSLQNETTGVKLLHLLITTLPAMEDTTSESVLKTTPRDYLRKMCLESRHAPNVIAYPANEFPLDPLHHHVNTPHNASYLPSTSATPLKNMAKPMHALSRDTSSVIHRTHRKSEKKMKDDVDAGSLSTHNYMHRKPHPLKGLT

SEQ ID NO: 979871 - protein, 279 aa, Homo sapiens
LKAQLGKEKTHINIVVIGHVDSGQVHHYWPSDYKCGGIAQKQPLKTFEKAAAEHGTMGSFKYAWDLGETDKLSVNVVSPLISPCGNKRHSKYYADYHRSPRHTRALYQKHDNREPSQGLTVLAPDSRQLECRVNLEDWISPKKMRARHPEHAWTSLCNTKNEMRKQTNLYEELTKKNYQPETHTYKHDRTLRGKRKTGKKATHITAQQGIESTETDQTKTETPHSPLDQEKRKTNTRTSADHKSTTTSTEEPKREKTTRTHTADRKQQNRPTGDRTDSQ

SEQ ID NO: 979872 - protein, 591 aa, Homo sapiens
DEDAYKKQFSTIHTSNSVTPDMHGRQHVIKQQLHSCIIRSRHPSLMHTSTARRHSTVTNSKQVRTSPLNIVTYASSTAGIAVSYQHSTAHSFLQQHQGRGLACSSYNPRQYFIMIYIQNYSDYTNTLIDTRPTTKRTTEQDNNTQHTQTREHTQTSRAREREDQHEETQDETHGATTKERTTHRPRTTHSENDQTTIQKRRKPTKSRGTTKQKKANRRNNTPHEYQQQTTPQTTDIPSTSTTNNHTRIITEKRDNDNKKEKTHVMRQRATKNRRKSKIDRKQNQDMAQTRTTKHRKREQTTEKDTSQKRRRRSRTKTQTNAEQPNTHNERVIKEHKNRRQRRSPTPATAKRRSARAQTKKLTGQKDNRGHGDTRRLRENRHRHEQTLMRTRHRRNRKEETEQEERITDQQQHNSTNHHTDDKERRGHDTIREEQQRQQATERAIDTEKGADTTQTTDEKRGDSAARDKAKAEQTKEPGKQDTKTDQQDRTRDKGSRAERSTARHTHSDHVKEAEEEAHEGERDETHRQCSEEHAEKQREMHKRKERAHNTTRERSERKRPKGTIGRADERRSAGDQREGDNADSTAGRARV

SEQ ID NO: 979873 - protein, 114 aa, Homo sapiens
MCVPEHGPTAKVTIIHMGRVVMLARKAERGSMGTARTVHILLVCMRGPPRTLPRAVYSRVELNRDCFPPPFSVLSCRFCCEPQEVVAAQSLRGAHVFLTVTTLTNARARTYPMH

SEQ ID NO: 979874 - protein, 279 aa, Homo sapiens
TARDVSLCCCVCVWFPCGVCANGVIDDTCLDACSCVLLDLCVLMCLQQLLMLRVAGLTRCCAALPHAVDVCDAAVLPLLCCHSVLADVMPALLRSVPKAFVCERLWLMCCTPHCDDLTVCCQPDGICDIDVPVRTLKVCRWFWACALCVSLCQRGWLALLVLVVGAFDGAAELLVVLSDPLIAWGTIQGHLWLAPDGGLDTKWSYKSLRPGYMDDRTAQGTMPGGRTQFGFRFLSLWPLEGLGGTYFSPRRQSAFYRDGTINSIERYTTLCSTTEICNW

SEQ ID NO: 979875 - protein, 413 aa, Homo sapiens
  misc_feature (241)..(241): Xaa can be any naturally occurring amino acid
MAWSRSYEQRGSGLNREWGDKGGVAIGLWVEAKKDGAIYGADERKKIYEEYIRLIYAIVNNKGREKCLSKSKQAKPEGNSFPKRRTQQLEKRSVHELRDRCDESGGPGGEPEAWVLERNTGGVTPLGGAPNNRTKTIAMQRNLDGTLTQPFGAEQREQQHRNIDRKEQVRAPRTERQLNLAHEPGGRLNKARGAPEDTMGGNRSAQTQRGNPSKDWRNKTEQHKTGRRETYTTVRKAHEQXRTHRTAEASEETIRGNEHRNSRPHTGTEQGRTQAGEARRGRLRQEGKHRTNKRDREGRTEGNAERKHGGEEQDTVADTVQQKQRETEDEKEEKQRRETRDGARAQNTTNGAEALKKDTEERNKDIENKERRKSKEKNTTNNRNKTQEDKHKKKQKRERLKTRTKRKQRREDE

SEQ ID NO: 979876 - protein, 121 aa, Homo sapiens
LHLMEKIYDGFMTFLNYLSAYGHSLAFYGGTSLFVEYISDGRMDRQKQLSKLGHNSQKPHFHGSSLQGVDIVATLLSKSPDSPQCEGKLYRVAQRPAKSRVLCKRTSQLRITTVATLSSAH

SEQ ID NO: 979877 - protein, 278 aa, Homo sapiens
TTEELLGSICPVALVIVEARELPIAGDAEGRFWGGCWRLQLPPFRTKVPLTLQSTHPRVPPRLGGTVGIRRFSVAKERVSLYSRALAGSMAPGTRTLGGGRMSVGQDRSSSCRRKGRGTDSEGANSLPTGLAETPNPAVTAEGPRCMAAPWMPHGGSGDKENVIRSLARVAANQRTVGVTQCQAGLMVRQRLTQEVGHILGVTSEMWRAGRQVGFRAFVDLLGSAMVVKHRGSPDHPGSSGLTARSPDGGAQPEAQRNCPRLRKPKFFWLGGAGEHDA

SEQ ID NO: 979878 - protein, 162 aa, Homo sapiens
  misc_feature (76)..(76): Xaa can be any naturally occurring amino acid
MVDGSSPTDIRGILRETVEEVTLSHTESVAIGLLVIQGLLISTQTIVVTLVHTGIVARNRTNEDHAPIALSRWIVXAKVNCTTGGGDESCVPVRGSSSAVELVEIPKTYRSVWDEGLSPAILDQRDCDLFGKTRDSQMGERERGIGMQSKRYRGRPELSGSS

SEQ ID NO: 979879 - protein, 136 aa, Homo sapiens
MGMGTATSLEWSASRDAMSMTHGTLHEDGGTRALCIAQWVEVPVHTQGHTPKNTNRVRNEQRRWRAPGAVDRPEYPTNTTKVTDHQTKLEDDPRRQRDVQCNNTTVAAKSRVGPPNEPKVDDGSQRRCKCTQAAAT

SEQ ID NO: 979880 - protein, 151 aa, Homo sapiens
  misc_feature (38)..(38): Xaa can be any naturally occurring amino acid
FCAMGGVGNVGGVRWSGVVNVACPCTVGGPVGGLILGXCGRGPPLQHCVSTGASLCEEASCVTAVACERPSREFSLSPLTAPENTADISQKRVESVPTLWALSVMLWVLPLSLCGTRGGVVSEEVPRECDDNPSHRLIRRESLCGGGRRKV

SEQ ID NO: 979881 - protein, 126 aa, Homo sapiens
MRPACVAKDPRKTRLPGRYTSRQTRSGPSDTRTQCARMEPRRTSEYEYVGIEAEYRDGRDPSHDRARVESEREVVHVESYGDGSRGTHNQVTVTPVCSRRGHLIRGNLDVILREGERRGIKALLNR

SEQ ID NO: 979882 - protein, 310 aa, Homo sapiens
AGAPTPSPLPSCGALHDEGLSSFVTCQSEDPHGGPPSCPLDNINAPTRPCPSHHASLGTGALGGGCPSAAPGATCTARQDQDTFTVYITARWQNMPVAGRHMEPLEEDGQPPGAKAGGTRITTNVLNCPPHSGQNTLAEKTIEVTKSACPRHGPLHLGAWRDQTLQEAKSYRDLKMKDSRKSRQLKDVNDAGWATLDHKVPRSRAVEDGPQLWKPTEPTISNLNAHTMSQWELNPLWSGSTKQFYNTYRGLNQSFTNYPFHKERVTKRCHKAQWDKVKFITLVKRRKMEIAQKWVKNNWCDVKKGYIIKA

SEQ ID NO: 979883 - protein, 307 aa, Homo sapiens
MVEAVCRYPGTVLLPLLLRGDSSRACRNYYLSLDDCESAILSRRLSPEETRDATEKWFCARSRSSLQDQMPAMRLEALWTKHPVHCWRHGITEIFAYLAILLMSTHVRMNPPAISHPGVSHGCQNGRGPLMSRRDKRALRSRTAATGPESPVVASHHAAGHRAATKASHAGRDHPAARRRLSLRPPASPRPVLLWSPALRTYGVAPGGATAWNAIITQLLNQVEKHRAPHPAIKEKSQGSPTARHEEHVVWIKCLCAGETAGGVLGVLVPGPSVFRLKSPAEIGEGSPGGFRPPDNVCGPTKRWSHK

SEQ ID NO: 979884 - protein, 195 aa, Homo sapiens
MRGGERERPLSMSGKRVARDEHADTRARGAERETHKVKRRGTNIQQEREEREEERESVGAAEKRGGGREGGPSQKERPCGAREREESRHQREESNREQHRGGERAQDDAIPSDGELVRAPGLCRQKGGPHKRKINEGEDDTEGEVKHNRKTGTLAANEGMRVQTKRAACKAGANIQGTQTEREESNPQRERERAK

SEQ ID NO: 979885 - protein, 125 aa, Homo sapiens
WQLLPVTLWPEVELLVTVLELLEVADALPVLLMLPGAMLRCAACDAVLLLTVLCCAVLCCAASDAIPDVGVLKSPVHAYGHAPGAKKMCDAAPQVAVPVKAPPERSTCTADGQLGEHSEKGKGCP

SEQ ID NO: 979886 - protein, 226 aa, Homo sapiens
MPHCYDEVCDGKLQVNGWVHTLQMVSSLQLGPWSLEVASILQVYSCRPPWNSDTRLQLPSAIYEDCIQSLSVKSGRGAQVQALLVRTVPGYRLWRSHRYSEREVIGRKGLVSMDIVTVLYAEGRLHRVSCDACEDDRLAPRTLDLGCWAVRALRPGAMGPTLGMLGPQFCPVAVSQAGSPVARRAPGKPPGQTKAPLADGEDWAGGTAWGGRSLEGSQRVRRVTPG

SEQ ID NO: 979887 - protein, 218 aa, Homo sapiens
  misc_feature (72)..(72): Xaa can be any naturally occurring amino acid
NRKRTKKITVRDAETKPDPQCTHESGKGQYPVIAKLPCAGLLGHRSIPYRALASSSGFHPISDDSTLSSAQXLYRPSLCAPQGLRTVAHHCLAAFPGASLYSSHWPRSVGCGAFRFQNSPWLIIQSVPSYPPGLHMCWWKEGMMHGAADLELGLPVWPTCLSVHRPVMPVRKCVRQLAVMQGANVRRKSAEGELHSWVVQMVATPSGEEPKATLCAGK

SEQ ID NO: 979888 - protein, 260 aa, Homo sapiens
  misc_feature (154)..(154): Xaa can be any naturally occurring amino acid
QAAGKMGDFQNVSGALPKAADHLSKQEEGSVRGRKRGKEKASRRLLQETLRLVGFKNTQREAIVEGHLTCDRENVPLSAWSKWCSILEGAESLFVAGGVHQELKVVQKRTQCGHSARENLFVRLTFAQSSHTRFSREEAPKETTCVLWYHLCFXRVASRGEASPKKLRVLTPMRFHECGRPKCGREALVRRPRHEVGDIYKRVPLKSGSHPRGAVSRDHPKKKTSSPDRKGFSVRGGVGPAIFCGPPGFPPPKKMLGQHT

SEQ ID NO: 979889 - protein, 119 aa, Homo sapiens
MSALYATLVDLSRRTGMIWAKGGFFSISKGASYTKCYVGPVSNNFSVNFYGTSVIRESPGYGFWVQVELEPVYSEKDSNHQIESKSFEKKDHFVKASKDVTEFNKKAEYSIARLFARTG

SEQ ID NO: 979890 - protein, 319 aa, Homo sapiens
  misc_feature (319)..(319): Xaa can be any naturally occurring amino acid
ERLDVFAWVPAAAATSSDLSASIAASLMLLTVLARVLGAAFQPHTPRCCSSTSRKGSSLRHRSASGAAQCSSGTAGAAGASLGGAAPDEADRTPLTRLACASARHRPPVSHPGRPWLIVSLAAVGSRRQRLSFPQPALRDRLAPEPVGEALLEFPLFSPFPHLFLSLPVPEPNRCRASVIAGPWCVGVHSEKDLDFGPLLEPGVPESAGVCAPLSVPSGVPPRVGIGHRRSFFVAALAENYLRMEHPFGEVSPLSGPIVLYPVLGAQELFTVFMTVVDLCSLFLGGSRLGPKKTFSVGGSGCLAVVVFTYWAHFRACSX

SEQ ID NO: 979891 - protein, 235 aa, Homo sapiens
MVSLVGAPYPTCRSGQPSLCQAQSIRVPGAVFLSSPPEVVFSRVPQRGEVRHSRRSFFVCVGTPLLEVGRTRPTFQGGYWGALFPHHGSRGAWGRSLTGGRAAQVPPLVVVPREGLVSPGGLFLYEGPGRRAFGCSGAPNCDVLGEPPSHRGADHPRSSSLVLSYGNCGGLVPHGVFALGGDAWLLCCYMFPRIRKIVNRPRSLSLLWPTDERDADTLCVWCPPRQYVVVSAVVA

SEQ ID NO: 979892 - protein, 71 aa, Homo sapiens
MREHEVPVHLLITRRNDEQRTLDAKTEGNNCPSSAPLREKPHPNAPSQPYQALGQHPLQFPLGGPHAAPSC

SEQ ID NO: 979893 - protein, 173 aa, Homo sapiens
MPKSSRRLVETNNVPNTYVTEWHVVSRRLVTRMKETSCAWRSFLPGIAYQTEEYPGISVITFICPRRLCLSSYAVLRPETVHASAVNGSGGCRDLTDSLTTRGRLVQKIPSRTECCVDLVARTEDLDVWGCLSKPNSSLEADLVVDVVSHLSKIGEDSFALNKLTANKKGADR

SEQ ID NO: 979894 - protein, 181 aa, Homo sapiens
MTAAITCLLALTATIFQCGCTAAWMACQEVARPAVGVRGRDIVVLGVEKKSVAKLQDDQQLLERSCALDDNVCMASCSALTRRIRKARSVNMCAQVLDVARCHLADCGRTLVTVEYITLLHRQSEAAVIRRAIGLQADLASLALIVGIDFDGTPRLYQTEPSGTYHAWIANDIGLGAKSVQ

SEQ ID NO: 979895 - protein, 137 aa, Homo sapiens
CHELDVLVPGTGGACGPIGSALHLSGSEMLLALARVPCGSGWHAAGVTGCGLQLCHLLSCCCCLLLLLATGLALGLGCLPQPVTQCVLLPPCALAYVCRACWWPALLGCLASWGQAPQGQLGLQCPMLELGSTDNDL

SEQ ID NO: 979896 - protein, 140 aa, Homo sapiens
VQEPQDRSESPLLLLRSRAELSRSNGLSHQVSPGCWSEPIEHGRDLEVSGELKHPSIITQQGIPEVPEKSLADSKKQELLHRVDEWSTWRKRDLGIINHSNTVIALSSHEPVTTGRDKSTDQTMEQIDFPMQEQEMLIPP

SEQ ID NO: 979897 - protein, 261 aa, Homo sapiens
MSNNTVGAGHQDPGESHDVWIWTSAAASTSPPSSADVAQQRNCEDMIQMFQKKLGPIHGCGLEAWSCKADRLTDGHLPVLESDVVPLTSPDGDEDGEHRPQESTRQMQRMLKQLREYDYEDECDRLTWEETEENLLFEEDNSGYAMAKMQRPMGEQQVKIAMEKGDYKDNEKSHDQKPRRRRYQEMTIEQIELEIGQCKERNDTEMQEYMDDVKMKLMALDSARLAELADKIISQICKTEQYAMTAMTDPKKEQTTTDKQA

SEQ ID NO: 979898 - protein, 290 aa, Homo sapiens
MAPSRNGMVLNAPLPQWTWQLAAVAHCGSTMPGPVRILHDCNVALCNANGCCLQSAPVPLLIWSPSPVPSLLLHCPHWILSTHTDSVLLPVPAGVIRPWDGKLMWIEPGRLHNERVGPVTHSGSFLLDPWTEGCETNVSNWMIHLTCAHTVARASLTLEYTGYQDLNPSLRPSELPIVDTPRKVADQFLGLTDIDNLGPTPWLTLDPVVIALSRERVSLKHRETQLDVHHLKERTNEFQKWPIDYVLAYWALLPNAPDFSRAITVPKEMHANGKARQEPRDCFENYAHTH

SEQ ID NO: 979899 - protein, 77 aa, Homo sapiens
VVVLVCLSHPDAILVGAKCHRLLVAGKTEQMTLRGTLKEPQWLGNPDRYYPAVPGQDPLRLSEIKTIILMEHLSTVE

SEQ ID NO: 979900 - protein, 552 aa, Homo sapiens
  misc_feature (183)..(183): Xaa can be any naturally occurring amino acid
MATVRSNAAMGLSGAYTHERSKPPDGDWKARIDTTLSPTVKKSFRGAMIGRVMSSHLDERRYYQRTAHTIRMDTLTVQGRGRGREGDDEIRRNDQFQLCSREVVLNVACGIPGGEIYSDEIELPGNHLTRGNMSLKALYVGTSTGAVSWSKIASAELQYTKTREARLRGHGEICNTAHLFHPXRGNPVLIGNTFVVSCVGGRSGLGSLESCSTTFAETYLWGEFHKRQSTFGTRHTEEHLDSQKEVPHSQKGFHVCARDAMKHRDVPNRVEQCGAYMGRAPQKREEGYPSAWHHEGRIPRGDEKRGADNLSGARERTTGIDNKRARDPTVLVRQVVRAWIRNDGPRGVKPLGGKAQSEELSGGSKNSATGQSNWISGNGSHRNCGGTPKRGESTQQGPYTNEGELTHTNKETMMWRHHNSKKGKAEAHHEPQSKPTAGQAALQPNSDEAPGNTGGATAQSPGNTKEETMTNRKRDNTPRCRQHGANHNQPSNSANNHQHAQIITHSSGPPVYHPHINETRHERRASLDNAAPTKTTNTPILTKNTTHTTDEE

SEQ ID NO: 979901 - protein, 275 aa, Homo sapiens
GLGGPASPPVPPALPNAAVSILEEPQNRTSAYSLEHADLGAGYYRKYFYGKEHQNFFGMDESLWPWWHVSLRREEKEGSGGGTLHSYRVIVLDHAAPDTPWYHLGGRAAAGPHGVCPQGNFWSTVAPQTEPQLPAPGLSFTQGTTGRCSHWMSKLLSFQRKVGILYCLGGQGSEEEMYNNQEAGPAFMQFLTLLGECGAGSKRFERFTGAKVGHHNRDSTETPHSPLQPHTRTTEDHVPRCPTMLALKHLKKTSQEGPSAKGHQWGTGNWGPYRV

SEQ ID NO: 979902 - protein, 556 aa, Homo sapiens
  misc_feature (147)..(147): Xaa can be any naturally occurring amino acid
GALSPVLGPLSVPVGAGVLCALPPPRGCPACPVNVLMPLAACGACDLGLCGACAVLCVWMLAAVSVHQSPMVCPGNALVCCRPPVHYVSTLQSMQVFDVCLCVWADAPGQLPVHATLPDLNLCKSTTAVSQALFAACPACVSSIVAXLGLMVHGGQCAFGCYRLLLLRFVPGLWARHFTADHTQVPFLEVWTPGEETLSEHGCGPNWMCMDICSQPYLFGAERPLGDHRQSGCQTRQMALGIVVWCPRGPWWLDCGRGCPKLCPFDCTGSLVCVMHVEQPPKDPPWRLLTAKTIFLFGPPVYGALKRLESRRWGLPAQGFPLVGLHEIPTKGVGFIRYSLGALTLVTEGVTGHRLNQSVDHGHRWFRPKWHATEQWQFVGLARFGTEVPHVVRPFGFGELAPRPDTLEKFGQGSIFGDLSWRPRCYLFPFLDHWDESPKPLRFGPIWAQMVALTPRVLYSIKGTIGSPLWRHVETKEPHDPLCGYGMREDEPTGYARSAEDCVSLMEMRKHGSTDTRKRALPYVITLRSKRNVWLVRLRLTLKEVTCSACHVGMHA

SEQ ID NO: 979903 - protein, 244 aa, Homo sapiens
CGNLSAVTGDQMTLVAIAVHLDFSCAIRQFHVSGAGSRCWTGSHQRKIGSSCCTVGSADRLTVLYQVRLPVTFDLPMRPVIGEVTYGVSQIDPRSFNGSISPQIPQHSPDCDISQEDLIVLLLTDVLSTEQLLITIHRTIARYRLQPGTFARSPIRTVVCRLIGRRINLIERDTASMSIPSLKLTLHDNPATLTDELLRSGKALVLTRKLGCDLERFRNRLVTTANEGASDGHLEGTVRSATSL

SEQ ID NO: 979904 - protein, 140 aa, Homo sapiens
MHTHALAGLTLPVRTCAPQVSTYKPKLLRQMWDSLRSLPGLAPFETCDPSFVHHSARCPLFSFGGHLWDRFRLVVANSQFEQQVNTFSKLSRLRFDTGCLNSLVNHFLRPKRNPLGEHDPNLAKCGLWYLRRGESPTPIV

SEQ ID NO: 979905 - protein, 340 aa, Homo sapiens
GHASSPAPVVQKHPAMWHSINSNSSMHSMHASMAAWRMAAWQPNLGTQHSTAQHSTAQQAQQQAPNISSNTSTAPLQIYQSCSTLSSFTVLVIFPNSAPKHIAHNHRTTRHHTQHVACTRSIACGPSTLTTDATAHTRHTAIFRHSKGPQWAKPAIFGHMQYDTAGTALAQTQTDQFCHAQGIEAPYHPLFNIRQALGASRKRLPMTGKLGTTQLTNSKRHQSLGDNTQRCRGTSQPGYSHTPTTWVYTPSSYTRQSEFGGHLAPTWPRAGTVGDTIMNAHYTMEATRFAHRFQTHITLMGMRHWTRQLYSYVIRPKKGVPGGYGTYDHTLHRINYQPKR

SEQ ID NO: 979906 - protein, 241 aa, Homo sapiens
MPRMAVMAPRTLLLLLLWGPGPDQTWAGSHSMRYFTTSCVPGPAGGAPLHRRGLRGRHACTCGLTATPRARGMEPLGTVDRAGGAGVLGPADTECEGPVTDLNRANLGDPARLLQPERGRILTTIQMMSGCDVGSGTGCFLRGYLAGRLLTGRGLHRLERGLRSWTAVDMAVRSPRQVGGWPCGEQLRDYLEGHVLWSGPRYLGERGRRRCKATGQHPRRVLTHQRLTLDTMRATLRVLGA

SEQ ID NO: 979907 - protein, 61 aa, Homo sapiens
MAGDGATQQNTNATEAHKQHPNDRHTTTKDGKPTHTAGPEAANENNTTTKHKHTPPKNHKN

SEQ ID NO: 979908 - protein, 118 aa, Homo sapiens
VVIRGAAAARGVSARVFQIRGAAGRSLYLGEKQIQKYTRLTIPKISVIDTWCHMNQTYRTYTSVHEKVDSELACGRRWGLKHVDMLDVWTDAGSGYENVEESMEQHRLFRSIMAFKGT

SEQ ID NO: 979909 - protein, 120 aa, Homo sapiens
GILGTLDKRAKRGQRKPYHKKRKYELGLPSANTKIGPPPHPPQSVWREVHEYVPEVGTWGNIFLPLWGASRQVVVYTSVKNNELIQMLSYNCDLITSWFVPMTLVKEIGDRLLQIPGNHR

SEQ ID NO: 979910 - protein, 145 aa, Homo sapiens
GTCETVSEESNVLCSSPQHTVYMRRGFPEAGEDIDQGEVSALSEQLKACGLRYCAEKYEWDVAEARKIWCFGPEDRPNILTDITKGVQYLNEIKGQCGGRIPVVATKELAHCVRENMRGVRFDVHDVTLHADAIHLWSGGQIIPT

SEQ ID NO: 979911 - protein, 346 aa, Homo sapiens
  misc_feature (323)..(323): Xaa can be any naturally occurring amino acid
SLSPSEQVNSEHKGASAKTGGSYQDQCTMTDRMRSGVTGVAMSVGPRSVDRIAELDMAEAERQLVRARHLGLSVVATCEQLLMLYIKHSIEHEVTQEFSSEKHDVLTDRKAALECQGPEGQSAMGLIGAAPGRSRKLMSRTVGTHEAARGGHKQRLLVCPPDSGDGHYYSAAECLGKTREVKQSYERNRREDKGQDKASTADEHTDTIQKEGTKSRKPQQSKKNKNLTPVAASGTGARDTRRAKEKGKDTEKTHATASRDIEQTKEQQHVRETKNTTRQQKHEHKAHKATGTKTEPNPQSGTEKRPDDERQGTAETQEKERPXRHHHKLNRNEPPIKRENHNNREQ

SEQ ID NO: 979912 - protein, 141 aa, Homo sapiens
QVIGAKLLKKEINFETRRNEVTGFGQTAKLNNDDTNADSPTTATDTHTRQQERLTDDTTRREELDTTTLVDRHDDDLNENNRHDTKRRRLNSYDNDDTHRTHDDDTLTVTRHTRDKGNCGTLPYNNHVGRNTLSERSWNCD

SEQ ID NO: 979913 - protein, 333 aa, Homo sapiens
EKGSEEDDDDELKTMLTSEAPNALTIYVTVTHACADERQCSTPCAAMAIISGPMNSVYQAIDIDSNMHVGLCMPHCRHMVHEAMRRQTTVTLTVTECDSHTTADNMSLTDTPGRTHEPNRTDGATGIDHQSVTTLDARDPDGETADGNQEITKADAFPSPGGLHTTKEAPRYQLNHLNSLSFADPMRKAAISYITRQAHEPPSCRNHNSGHNANRPKNPVGTEQAGNLPPKHARTAGQETGEWSPKAQRPTNHQRHKTTIPLNPGTSRKHPQPPQTPQQTQQNKQKEPKQNTTHTKPRQTKDKITTPRQKRSNEHNQTKTNKTTRKKGHRKTN

SEQ ID NO: 979914 - protein, 72 aa, Homo sapiens
RGGHLFWPCLSLGHLECVIQSVKLLKSQESSGSLQKEDLIIMSLSSKLEYPNVIRFVLVINSSHKNPSVFEL

SEQ ID NO: 979915 - protein, 124 aa, Homo sapiens
MAIPNAYRTKNSRLYTSYAKAPNVVAPTGYYNPSRDAIKLFTKEPLKPGTITITLYIDRPDLSSQRRSSTMNPPPQPEAPVVNLNLGLLFIALATVYPSRVLKSSDQGEHQRSNYALTRRTCEQ

SEQ ID NO: 979916 - protein, 145 aa, Homo sapiens
MDRTWRRPFTTYPMLALQVVHIIVDVGATAVQDGRSSHVASWMHERSVSGGTHCTWEADAMLKEWPLPTQRLERFSGSISLVCTAWELRLPVPALRLLGMGEPPDVGGPRTGGAGTIPDGGHGLASSLAGKPPVWLPPRDGVQHL

SEQ ID NO: 979917 - protein, 146 aa, Homo sapiens
MARNQSETARKSYRWWKLRPGRNSLATKGDQEKRSLYRRGEEASSATKALGPWRFERFVGYQKSTEHDSSWKLSFQRLVREIAAGFHKPPEVSERSHRCAARRLAKRTWVGLFEDTNLCAIHAIDESPSCPKTSSWLAGYGERELK

SEQ ID NO: 979918 - protein, 199 aa, Homo sapiens
MRTEHKSANCVVPGYLDLGWLLLLLRDMGRVTPSQVVGRGLWVKVCRKGPLVVAPMIPMRCHALAVTRNISIFPAFLEALYGKPTRGVICPGPCTHLGGGITKYQGVLRESRETGYLPRANKWGETPAHKPCPREKTRLQGLNAGGDKAVWNGPGQVVLTQFLPRGIAAPKGAKSKPYDDHRPHADTPTTGTLTHGTLD

SEQ ID NO: 979919 - protein, 305 aa, Homo sapiens
VSAALRCGRRAMVVWIEPGPAGAPSREVRGSERRAEATGLGLADWGVGRGVQETMSRTRWRVACVLVARPGSAFASFCLLGYMAPLSTSTPGSSTAAGATCKVCLCSLALQVLWGALTPRVGLLPLEPVYWLVDNVIRGLEWLYVVLVICADGLHCSYRLPVCPASHPPNYSVPRSAGISSISHWNLILDCLPLLPGITTPLVPTPSGRNDIGHRLPSVRGAFTPSQPEHDNDASGTAMEVGNLFREAYAGIGKLKQSDRTNYGVPPNFTINHHHFPFGKVPQKFVTWAWPLGFLVHRLGSTPRE

SEQ ID NO: 979920 - protein, 158 aa, Homo sapiens
PSESRPDYSTPYGHTPRWAQGTLPVVPSFQQSETQQYTTLSYSCGRLLHPQPEHAATGGVWVHVRSRGLAAHTLYQHPTYTTYMINHPHHTPTDQHNKTTQRRTAHIQPPHRITRTQQAQAATHSAALHTGATRARQTSHSNQPPPKNNEPQPHHEYP

SEQ ID NO: 979921 - protein, 317 aa, Homo sapiens
EQVNSVADQLTGLKKASHARSDSRSISDSENLDVVMACTSTERKCLGMLAGMAMQQGSLHASGCEEDGGSTVKCPTLQGLHHLPSMANDCDMPGREGKTWYLDDDPSAASRGLGHVELVVRLERCTRTRERMCLLLRWNDGAEVIRRCSEEGTMADPGILTVLYSKLHRRLLGMGGLNEGRSSRGHTHFPAGEYTGEAVDAGMLQPRDDWADAMNLRSQLALRTSSGCGDLARYVVPRRMARKGAGDGSDRRGRWQSGWGLSAKTCRISLFSLKLRWLDRQTQKLPFQTRRSFQHVWGLWKFAFGAPARPNPSFTRV

SEQ ID NO: 979922 - protein, 140 aa, Homo sapiens
MYPFLQLAGGLDCYYYSWLWQRAMNPGDDREKKLADLVARRRVKSQREEFALKVKRRETTCLIEASRALVGQASDTYILSSVRGVPGMLATTLLVQAWCKSSNSRWEGDECVGSTQRNSHLQPEVTWDHAGSIHTGLMTI

SEQ ID NO: 979923 - protein, 109 aa, Homo sapiens
  misc_feature (87)..(87): Xaa can be any naturally occurring amino acid
IRWGEGRSPMNYTCAFRETKMIHGQNYNVAILILSREPVLGHHLRSNIVCSASLRDHRDRWYKMASGAHAVPSASAHTSTRLSYTAXLRVDVTEMACESRHTRAWRDVC

SEQ ID NO: 979924 - protein, 232 aa, Homo sapiens
AEPGTSGRVGENKRLTKGGRKGARDGTRGLIQFSYEHDWYDCRNAAVSMWQVYMNHTWKMTARHPWTHTVTRIACFLNVSRRVGGGVEDEILDLHLAWNAVKLAFKHKSYYACMDESMYRGKNCLTNFHGMDLTRDNNRVPCVKRQGRQGLEAHVDVKTTDGYLLRAVLVLVLLKKAQQSDTEGPLMLSTKQVRQIRKKMLDIMTREVQTNDLKEVVNKLIPDSIGRDIDKG

SEQ ID NO: 979925 - protein, 149 aa, Homo sapiens
MSKRHEKGGWNREKHSGGDPHGKPYGGTPSGGGNTAQEAPTTDAKKGYYVSGEGDKLRRPFNTGGEQANGGDIHTKEEETFVKNEGRAPEKKGGGGGSHPKATAPKRVILREDGYPKEGAPVVFRTTGDTKGRHTFSVDHTHEKRGGRQ

SEQ ID NO: 979926 - protein, 157 aa, Homo sapiens
ETRSHSVTQGGCSDEFTVHCSLNRGSSDPLTSASQVFVPPRHKKLCPANFWYLVFLVETGFRQCWARRVSNTVGSTLIRRASASQSAGITGCEPPVLNQVYIFKLVKLGIDGIIYSKCNQCAIFFKGKLKHLLKKKKEKPLEGHLYCWGARRTKEGN

SEQ ID NO: 979927 - protein, 426 aa, Homo sapiens
MHMVLDGHCRDYYMSVIVVRGTHEGPLSQLQSGCIRDCCRERKGLDPVTRGQTPKGLERLVREYELHGMPRSAYAYVGSARLSKLRKTIWALDTRVSYVLRINMVTYSLTPSGEALVVQVCGLRETGRGVYDTVPRCKKGRGKVGEKRHMEGRLRKKEREEANAGATRSARQWPMARLKPFVRPLELALESRRCGRRSPTRKGLSTLEPRGISAHGNGGRHPGGEGQVHGGGPPLTRKTGRNNRGSSKNEFTAPRSQGANNTLGTHVREMPPWVQARIIYILTKHPKWENKAPCVPLEDLMNNPSHEKKFPRGANLRQEENSANKRKNSVRRSKCKQHLSPPGTTQTNGGRTKYSAAWDRHDTREKSYSSTTGACTKKTNKAGGDKNACCRHNATKVSNEQKSRTYRKNKLPRYEIRKPPLYHLTV

SEQ ID NO: 979928 - protein, 269 aa, Homo sapiens
MVGPSNITGGHRNVLPVVHEATPNRGCCELYEGALGAHSSFEREPGERDEKTVSILRGTWALTHGSDYVANRKDGRCGMCNKLVALLATLEEPRRAWRLPHGPSTQITLGDRLKERVGYQRMDACNTTGPWRAGQSILTQGPERSALRRWSRTRKTSIREGVRGPRTIILLRPDRPRGCSPGTNNDERRASGAPLATRKATRDPTAGGPHSNAPRAEKRDLTQEDGSQENERRTPKKGTREPPEEREEGGHTGEEQRAYSASSTQRGRT

SEQ ID NO: 979929 - protein, 337 aa, Homo sapiens
EATEGLGVVSESFTLVPRLECNGAILVSSRPSGSQVYKWWSHLRSPRDSWDYKDDAAWEELHREGASYSYHEKEEGLERVFWAYGTQDHSDMSRGCPWKDFRLLCALPLHALPTDPVVDPRWCTCMSGEAILLSCILQQEEGDSAGEMKAYGEAVGAPGGEEQKELQRAVSQDHVRGFLDEGVGYRETGPQAFHSKGLSGTSPDDVQAVPVWVLQVKDWTNVLPRFWIPSLTPEDKGQQAGEASRTVDCPCRRALRMWTDAVDLTRYQLVDGWVITGARLRVCGPELRRTLGGVGLGWYLDVERRGLGLWNHEKSRDGRPQKEREGGNRDNTRGPIC

SEQ ID NO: 979930 - protein, 144 aa, Homo sapiens
  misc_feature (117)..(117): Xaa can be any naturally occurring amino acid
AKADRKSAPSYRGGLKKPHRYSPKTVGAFPSRFVVVRKFVVEAAQSVKLLFPVVLVRDIAQGILKKPDPEVSSSCSDTDPVLLARRRQSNAGTLDVDRRCRIYQKLVCSNPNALSRXSPINARNGTNPMLVLSRRYYAREKRSC

SEQ ID NO: 979931 - protein, 109 aa, Homo sapiens
MRTGRHVCGVLCSPAEPESRKWKHVEPCRRSVRAAGKKTRSGRDDVITSLASGKHTSSVISSCAPSKSEGNNLILARSHELERAAGAFALGVIKPARGICLAPEEQKSP

SEQ ID NO: 979932 - protein, 103 aa, Homo sapiens
CSRRRRPVSSRVLLPDARLSHCLRGSGRLAPHTNQRRYLEFLQHGQDKTRTKCKQSELRSTRTLDELSEECQKKGGNTCCVNRTQDTSKNARSRTYIRGSKSE

SEQ ID NO: 979933 - protein, 157 aa, Homo sapiens
HLTSVSSQVDYCFSRVPLTKRSSCVRMIFVLAYFERDRSMSDSERQMMLLCCTALQDERCCTATSSGSYVVAGMAVRGSPQPLHSFVLGGRGSIGPDRFYRLRRQFPQPLLARTRSQVMPKLDASAEEQRPLGVRLLSGPPDLDYCQDHASEMFRNR

SEQ ID NO: 979934 - protein, 194 aa, Homo sapiens
MGLIRCDLKCEGHFDWRRYRLTSLAISRRVASFLMSDTSRGWQREKCEIRKLLKTIAVADIALGIGDDSFISGLCSRCCIRKWVKTLINTGWYNLGKVADDKTGDGEIMNGPGGMRTRRTDSPGGGASRRVAFTPGVRQLCANEGENIVRWSLSVAHGGTIEQGRCKATLDVEKYQRREYRKQSEKNTPEKRAE

SEQ ID NO: 979935 - protein, 305 aa, Homo sapiens
SSSAAPPSRCSGRVSPAPCLVGLYLDVARPEPPDPGWSRCQSAEVSWCLPAGAEGGVGRVMSHCGGHRTPWLESWNERLRTSVQKLGFWCEYQTLTTETGVTPSQSFEADRQDIIVRFTVLGMVAIRSPSSEALTMAYDAKQWILRLRKYPEYGDNGHQYIKPGKGMWIKYHGKPTNISYSLRLRVALEEHPVLLTEAPLNPKGNREKMTQIMLRPSTPRHVRGHPGVLSSTPLGRTLALYVASGDGVTHTVPIYEGTPSPGQSCVWSLVSGLNDTLKIFNERGTGSPTEASGTRGDSRKVCRAG

SEQ ID NO: 979936 - protein, 194 aa, Homo sapiens
KSCERRAGAGERKRGAGPGPGDGSPAPGPVCVLVLLGPRVLSAPRVSVSNDYLYFQVLQVLGTFRYIFKAKTCQGNLGVGIFHTKGMTQGFHLCSPPFETFTKRPCGGNLQTKRVLFTSKGPKIGLWLQARGGGLASLSSPKNSGVCPQGSHGGRAAGWIQFFVDKPQGLDHLDQASLTGGGLIQGQVTPRRHE

SEQ ID NO: 979937 - protein, 113 aa, Homo sapiens
  misc_feature (103)..(103): Xaa can be any naturally occurring amino acid
MGLTPSVRKMVVSVTQAGLQGRNLDPCWLLTSGDSGSSPDSSLRRVAVEMYRGRMSSLPRLVWLYVWVRCRDIPRMLGPLCWFAVQTSLESHGDSVQARGQSXRSRWVHSQGT

SEQ ID NO: 979938 - protein, 332 aa, Homo sapiens
EGAARVAAALDDGSALGVRADAGGAGRCSRGLARSPCGFGECVPQNAGKVVGFRGPGEAREGAGWAARRWANRGELGSEGAAGRFGVWGGVHGGFGGPGGANPGAGRRRPGARRGRGVGAAKKVGLGVQELVGSPQEVLERLGGDPPRGSSRAVGPRGERGPRAHQGGSPGGKRTGPLGKGEGGDRELSSGGSGGRAICRRGPPLFVLCGEEGSPGILGGREENKEGFLGGGGKTKRRLTHTTSARRIERQTKRDLCVRGGAQLVPRQREKKFFFEKTHLRRGGAQDGAPPMRVLMTSRRWCHTRRGAPEENKHPVDNGRRGVGVFLSQQFT

SEQ ID NO: 979939 - protein, 70 aa, Homo sapiens
PNTCVNCLAMETRCRVVVWCRTCELIVVWVTVLQRGVCISLGVADFDFGEALCDDVEGVKRSNSEYSWFL

SEQ ID NO: 979940 - protein, 327 aa, Homo sapiens
MTVLGGAVSRAFSVRMPLPVELTDLLDRVRAEFPQLVVKGEGGSRLLFRVRLSMIIYAVTSMSQWDRRSRAVLLIDSHPSGGDASVEGPEGEGAESNSNHCVRYCHETINLQENKFHKKKPTRSTSKRITLEHQLNKGHLEGTETRTQSKTLFMTGACRNKSSTSFANFQKTTSSLWLKTIDPDGIGCSMEPNRDGWCDPYMILKGWLPTGTLVTTCALFVSITCLINLVLVVIQTNQDFKDNGHCVILTLNIGGVLAAGMSTKHLLSLVTLQVLPWEKLSSLSTQRSGLKKPVGHPKPTRPWGNTLFVKHTHVRPRAENTTGAFPF

SEQ ID NO: 979941 - protein, 279 aa, Homo sapiens
GPGGGPSSSSIGSASKSDESSTEETDKSRERSQCGVKAVNKASEYQYLKGIQAMEDSGSNKSTKRVKENEKENRERERKRETKRRIQLLTPEARYLVKDGKEKPKVKSGKNDDKARETRERTPKSDKETESSSMKEEKAKDERIGDQCPQSMNQNQFKKGKREGAIREEQRYSTGDENRGRPVQEEEKGTPVLRSLKSTVRRSDYSRAERTKTRKVVFTVSMTFSPVRRLFDLGLRKVNNVFSYLSEMGGMAEIGVWENQNRNNDAEKAGVPHRVAGSN

SEQ ID NO: 979942 - protein, 121 aa, Homo sapiens
MVDVVARRASDQVGASMYVTDEDLPMGKGPIDGISMDPEVQWPIWQETVSRVASSVPSYVLRMLWGYVEEVLPGQQDLSEDGYGIENSYVPTEDKSGKIRSKLSDVISPNFGTETLGILRD

SEQ ID NO: 979943 - protein, 228 aa, Homo sapiens
LLAEELRDLSKLEMRDDLEDCLVAVRVGLVQRTAIAVGSAVDSPVFQTFAHRFNRGNGPHRENWSLDQHKHMGVLRDAGTRSHRGSPDARRDCVGDQRNGFLLTNGSIVIEAPSSVSALLGLGLPGVVPCLKSISSADWEIFIRRTARAPQSAWSLRALGRCFVIWPYCSMGGVPLEYTLAMAGSLRVLRRFGPLGWRLRHDFQPYLTHVALMEDGGAARCGKFVDAL

SEQ ID NO: 979944 - protein, 109 aa, Homo sapiens
  misc_feature (44)..(44): Xaa can be any naturally occurring amino acid
MALLVKSTLWGEIVTDDNFILEHTGPGYLCTWLMLDPCTNGSQXVHLHCKTEWSHGKHVCVCKVKDGMNMWRPCTRLWAPRNAKTSKTIIIADWGQFNNLHCVFYLNSR

SEQ ID NO: 979945 - protein, 110 aa, Homo sapiens
MSMDHNLYWIARLCRMLNPSTPFEVTVPQSEVKGKGSSYSVLSLLVQGISQRRDSRSGSRAGTGFLNFETAQGGPTHCGPWDGLRALYEHLSGAKEITTLDRGGGPLDRK

SEQ ID NO: 979946 - protein, 142 aa, Homo sapiens
MWEAADLANEREKHKSSGDFMGAEQKEHTVGSCIGDHKIKSHFRNGGSNDHEHITEELESQYQQQYATRNIHQERYRGTFVDLASVTVRRPLIAEGLIVLEPAGMHDQMMITLILKGPKMIPDRRFRGPEPRTTLVKELPRL

SEQ ID NO: 979947 - protein, 149 aa, Homo sapiens
VIWRRFAFFVLQKGRKLKLSGPRWQEGKAQGTGGLWVKAEANMGFGATLAVCPDHLCAVCRQYHHLLHLLLLVPLQDVPPTTSGCQHHSSTTVVHAPYPRAPSVPPATLDQATMGYHSMPSHARDASRTLPNAVPPLTQSSRMGPNGRT

SEQ ID NO: 979948 - protein, 108 aa, Homo sapiens
MMPSIRPGGVQPRCLEQAGPRVDLYEGTCGSQQYKAVRDGHLCVKVNMMISFRVYRTEQAHDVARQIEKFHSQHNASYSSQMEALECYHGKLSEVVLKLRTLVVYLGK

SEQ ID NO: 979949 - protein, 148 aa, Homo sapiens
MKRRATAEADLRASRHLDPVGVARAAEGSCGRPGWWGLRCAAQPAGSVAPGGPLSRCAPGLWLEQPASNWRPVGQPGERPPGGGAWTLPKHLGGTLTKNRGEAICASEVWSPFEVARWIGSRDSHKRRAKSQWLRREEWLRDRHKAPR

SEQ ID NO: 979950 - protein, 312 aa, Homo sapiens
MTPTTKTHYYPTKHTQKQKHDTPPKPVNKTRYTSLYPTISTSTHLTNILTLHPLTTNTTNDNNSTRTKTIPHKTTLTLTIPKPHLEHLRIHTHTTPQTHSHHKQPPTLITQILRPLKYKTKQHDYINTSENNHTSTNNPKAIMHNSLQLEWNRPSYTAYTAQSTVYQLASSQHTIITSIDQPTETETRGKMRTDTEDRKERRQGGRSREEDRGTKRENARSTAHEHTELKATQKRGREKGEARRRNQGANTRTERATRRGDNKQKETEPGEAIKWTEKTGNSDRKRRSMQTERSRDERLRSRSRRAARLRDE

SEQ ID NO: 979951 - protein, 168 aa, Homo sapiens
MHQWCMGNILSDKSRIREILRFSSEQYQNSNPSEDCVMTRKMNTWRKKTEESVRRGNANENMIIMLHAVVCITRGRTHDFRCAEHQSYSTPHRGHNWSEPVADWGSSRMLHIRLRRGKRTRNDPPKCKSGEENGVTPQKREPSASHADTGFGKKGTGNNPPRGHHNND

SEQ ID NO: 979952 - protein, 119 aa, Homo sapiens
SPSGERELSGCVVAVVGKPVSLQAMEVSQAMEAERSQIVRNSPGRLLYHVVRTKYGEWKRMNNAEGHRETDTMRVSWDRGPAEAVGYQDMINEVDCVNGKGLQVEIRNEICVSNDGRRS

SEQ ID NO: 979953 - protein, 43 aa, Homo sapiens
MYTTEESVTSTAASSSPPEEETPFYTNTYSDCSVTLKSYSYPT

SEQ ID NO: 979954 - protein, 210 aa, Homo sapiens
MSCHRYPEENDNSLEERKSMTHGSKVLLYSYTVLEFLIQMKPDCTRVLARLLLNEPMRGRVPSHTWRPMEVMLTASDLVSHKILSVYLHALKMICFTHDIIPRKSHDDHKFGGAPLAPGKKLWQHLAGGRGHRKARNKGKQGVQEGPRAKHGMAIPQKTRRSTALKHQEARKGITAIAHHARSRSMYNRNQLRTQRRRTRTSPRRNTAQS

SEQ ID NO: 979955 - protein, 89 aa, Homo sapiens
DAAEGGGLALAIVREQQLLSLLMLDVYLLGEGLNKEDVTEHVKIDSELCWLPSSEQSAVCAYPGLLTADSGDLAAVQRQDVEQLKLIAR

SEQ ID NO: 979956 - protein, 147 aa, Homo sapiens
MGEKKRPPKGGGPKRLPRTPLDGCPGWPHQAPTGARDNPSGGETLAKQEQRRATNQDGGGPPRRNITPRGVKHRPGRRPTPTAAEQERRRRRSLTPTNNHTGKTPPNEHTNKPHKQPHKTTAAHRVNNQPSGAHTQQDTDPRTHEPN

SEQ ID NO: 979957 - protein, 269 aa, Homo sapiens
MSVGGERRPRRVVKGNGLTQWSPEENRGPRRRAGAFSHNIKKGAGGQPREGFVKQLPKRRSEEDIKGSLINRGGPRGSAAYSNMSPRRAWEQATRQQKQQTRQAVASTQKESIAEPKKQVERKQWEATETSAQMTRSSQRQGEARQHTQENDATRADERRQDKKMNTERRGNLKNHDRTPHDKTNRDKAERTHKNNERKQEKEKRQERNGHTKQTSGEATEKRTGTKRRRQETAREAQNREKTKRKNIREQETTAKKGDKEREKRSNAR

SEQ ID NO: 979958 - protein, 306 aa, Homo sapiens
  misc_feature (36)..(36): Xaa can be any naturally occurring amino acid
SPKQIKHNNMQHSTPATSTTHVAQLQSTMTCAMHSXWSNHCNITGHQHPSTHSSCTHSHQAHQQHTKLSPSTSSCGMLSSKAQCSKHQHTFNQQLHMPHHRPKSVAHSIFNRFTPTIHHTSTHQQQNRKKQKTPKQLKPAITTANIKHLAASKIQGSTKQHNKNTFFPQHILNKYSRQAVGIYADNNTFNPDWLNISTSITSKAPQQQPSNPKQQFQHHIDHTGGDFIQPKLNPPTRQYFTTATANSRKTLIYYKQPYFWQQLQIQEKTLRTKTDDIPTFPGTTITSPVPKGDEKPRGKDPMGTPV

SEQ ID NO: 979959 - protein, 157 aa, Homo sapiens
MTKNNHGHMSLGLRQLDIVSDPFGLVYCASSLPMSDSVKSREMDVVRFTSHRSQNNCLGPTAVHGVSNPSLLGPSGTADWYRALETLSECVPPDSGRLVTRRTRTCVDRLFDEQPHPANAGFFFSLSPLLSPTSITHPTRSHNGTHKGTNRNATRKR

SEQ ID NO: 979960 - protein, 441 aa, Homo sapiens
  misc_feature (206)..(206): Xaa can be any naturally occurring amino acid
GFFARTKPVGLLSQAAPPHHRLLSARRVWLLRGRRFANFEGQYQPCGTHPFPRLLLGRLMGHCSSPNPRGRLPQGAPQMLCRRLRESLAPEFATEECEVGLPLQLDSSGGPSAWSKDINAYNGEEPTSKSLPLSHACDDRNRELGILWGMLGSSRERMDRACLVTARVGCEKGRDKKLELVYRSSQDKQLEGTWMRNSRGNSSVQXEENKGWPPLRGAGEGGWRSTIPLMKPSVRKGFNASLGEKLLNPPYSQRRTSSTVSHKTRADGRFLFCPSSYHYPSSHCTCAEKTRGEEEGQGRPRKAAEGGRRRREGGRRGAGRRNKAGGSGTMRRGSEARRERREGGEERERREGQGERGRRGERGGAEEREARKARRGKKKQNKERERRQGREQSAKTPSRAKGERKRKSRRRRETTERSGRSDRKKGRNEKEGAEKKQKERR

SEQ ID NO: 979961 - protein, 231 aa, Homo sapiens
MKIVIRCTRVYVARTGGLNNGVPRSVHMGRKQISCLCCIALETVWVGRIVSFSVCHTNDDAWVSIWETLLLMGCYYNPRALFFLVYSTLVLGLIAPYFSRTRKYFEAVDGHRGLADEGSHGAVTLPFESVPQIKPAWCLQHPVPSSGQPDITWGDTRGIIKSWAPPFTLRANEDPIILIEQTHSLWRPTAHPHVNHSHQTRQRLNTRRTLVFSTLLRVIIYLLFIYHPHTN

SEQ ID NO: 979962 - protein, 327 aa, Homo sapiens
NSTGSRLDYRRYADTLFDILVAGTMLAPARNAASDDAGLRPYDDSNQLCVISTQVSDHEIIRDYVAGSPHSNSLRRYHAIRSNGSLQDDTEEKLAPLPVKPCSEADARCTFGECLSGILRGAMRTRALAQAILTSLFQRQVSLKKASAASYAVRLPQKRGWVDEWMPKLALNSSFDAHRHSVDDEAAGTLCRVKPDRRVDHSAEYFTDARSLSELSESSDSCSPWRRQDELENWVQAPSVPRNARQEGWVCAHKNEGIVFRTDGWLLGHDMRPWGATRAIFAHGRVPRKMTWGVSREETPQGGMYTFTTKWLKSRDNKHTHNNWNTH

SEQ ID NO: 979963 - protein, 109 aa, Homo sapiens
SEWREASWKWLWWSRLGIPVSAWRMADSSASEEHDVQNSKEKLVHYLHHKIVVDGILITDEGASGWNCKCMISLRAAIPTSRAKVAALMICMKLDAELVSAHCCISLNF

SEQ ID NO: 979964 - protein, 142 aa, Homo sapiens
MIEQRIIMIGQGRRERGDMQAGEGQRANRREGREVKAAAKQTERAPARERRATSRRSKTRRVQAPDCTGDSAEQAKRQHDRTASSKRQNRRRTPHAESDEHPEERSKRHKQENTTRKAKKEQREGDAEKTAETTERTHDATR

SEQ ID NO: 979965 - protein, 246 aa, Homo sapiens
MLLYRDSGERCYKSMMTSEVSLDYTEKDVCQVSILEDSNLVGGEIGIDRYVYGDILWCTVFVRYKAILCQEFPREGYDPGNIGRLFFSIRITNDVMLRSLLLISPETDIVARDHGRAFQSFALRSADITGSGVVEMVATRLVAVWAGPWFPGIYLGCSVDLRMFRSLLRKGDLRLCAFVFPRLPRFFLLFLRHRVQAHTSADGAAGRTHTASGEVCAQVELTHESAVQLQNGRAGPLPVDRTYNKH

SEQ ID NO: 979966 - protein, 101 aa, Homo sapiens
SADGTLGCGEVCCVSFCVTRVPVSLLANVARVTLVCHLLSRYGGRYGGRQPSVYCVCNLGHWRWSRGELDSGFQVIHVSFIEAVWIATKSSRICLCVIRRS

SEQ ID NO: 979967 - protein, 180 aa, Homo sapiens
MWFVLLALVVGYAVQPLTGACLRRCIIALQVCDSTWPHTTNSVHLQYNWDNLLKWDVLVTQTVRLMRICLDRHSWSWKKVTRFDVYVNWETWNTFLKWTGIYQTADNTWEPEDKLYDCPELIEAFLNSQTSWQNENRWYNHAQLFILTVNLMTANQTERTRDELVAKPKREFAPGVSGTS

SEQ ID NO: 979968 - protein, 103 aa, Homo sapiens
MQPTQYAKNQFHAADLHDYTGNNPEWTYEDKRVRAKATDGSTPLIRRVDLVDIVPTRQVIGYGNELVLPNDGNYYTLLHSQGLRHLEGMDGPPSSEAQRMWAP

SEQ ID NO: 979969 - protein, 77 aa, Homo sapiens
LFAQVGSVVFGQLMQQFVTLARTSCSAGGSQGASQRLALPLLQPAWQGWPTDRCALCIGGQAAGAGTPRLQVLGIAH

SEQ ID NO: 979970 - protein, 36 aa, Homo sapiens
NTANNFATGSSPKLKHPATPAAAHSSNQLKQQHHHV

SEQ ID NO: 979971 - protein, 226 aa, Homo sapiens
MLKLDLALYWGSVNQNVDGLGTGTNFTLVPKTPAKACPVTPWLDCFALMTRTHRCVLYLTVQIGPGMRERVVFPAYEGAWIDGQRLTALLSHSWGPCTDQQASPLERETCLGRSPSGRYQCLVAYGTQRFLVPNKWIPDKETKHDNIHRPITAISSAAALCASPEKNYIQKTYRFCVAVCPKSECVSDQLCQTNRYSLVSSLRSREKKCRITPIISEGVVETEADV

SEQ ID NO: 979972 - protein, 316 aa, Homo sapiens
GTRAGRRLRSVEGSASGVPGTFLLRGCTLREFGLTQTPWLQKSYRRIVEECEQVLLGKNGYVGNEYGDASYMLRNAKIERDRLRTKDAWRRIMEEMQNLLIGEKDQLDVDWSPVKGVLYGEPSGGVYGVGLKTRQVVRNPTLPGLEYINVPTCELCRCMPQRRSWERLECHESITGYRGVDDCERSLGNRSLCAGSSTQVQDCYKAQYCVTAAGNCPVGSLTQVAPEWGDKSRPLDMNIVLLTLGHARELDDGVLYDLNAGGTGGRQDGTDKEERKRPRVQRQGDHRTDTHQRRHTGRRRTEERRELETTTKRQTE

SEQ ID NO: 979973 - protein, 407 aa, Homo sapiens
MRCVSKDICEPAEYTTHDAKLNLPELTTQFTGPTTVTHLTHLHTGGKTCPTDTTCGDFDSTLLTPSDYDCTWCRNDWTTLRWTTPDTTYCGPGGYLPNGTPYVPPHCLRTTLEPGVYTYTGAGYTTEDTTQWITLRPLRGTDNNTLGLVKHYGIIVTTLYNYLTTLKEEHLQPHRYTTFTTHLAFLQHWFHGTYSAPTSGLFRIPRYMYLHDCTFITWDWTTRHCHKGGRNLAITHRGHTGTPSTATRADTKTTTPYTQHNRTTPTPPNAHSDANDKRESATTITRLRTPQNPPTEGHGPPRTHKTRNQKETLWHNATSARSTHPTYKQPTRHKQRSREKQKHREQEQEHKGHTTQRNHRPHAYIPAAGAQTNHQEDRNEHPIQDRTRAHTQTTRDRTTTHHGKTKN

SEQ ID NO: 979974 - protein, 328 aa, Homo sapiens
GCAVWGSEAWRGCCHQVDQLSHRLAASLVCFSIMESYPTMIPQACMFANRAAHRHSHHTAWPVLCHTFTQFHSSQHNHQAHWHIQSIPCAAASHFLTIASAMLHIAMLAHSHSSVGLVCILWVQLSKAAIVMHLDHKGTQHNSNTSNINVDTAECNACNTPNNGLHTFWPSSLVEPLSNCQAQVPYCIHCDILYPTNADGHSTFNSPSLPAETIDMQGLLSLAFRWPNVVTTIAFQHTTWPDIGGASISHMATGLKRWSIGFQVGSQFGQYPYTLCLTWLVTHIIPVVQNDSQGIWAKQPLGSYARINTGNTATYNIEHPVSINLNPN

SEQ ID NO: 979975 - protein, 302 aa, Homo sapiens
MDTLSGSLIDYIVPRALGVRTKTGGLILYVDCGLKGVQIPEAKFWTVGRTKPILADTIGVAVYEPELGCIKARVNTETFINRERRHFNQELMVAEESPYDAGLRLNVCDKRDFVNQRTLLSESTTVLNESQNSIAPISRTEQFIHTPMTKLPTSDPRHIRMTCRPYRITDLQNTHSEGKSDTTTQRSNKPWATTGHTQQKLKHKKQRQGNKPRHTAAACHTHDSVTNSTCNTPRRHRDDRLTRPRANANGNNGHDKKHHPRERTRQATRTQHNQARTQSLAIASRTTKGDQQSATTPPTSTA

SEQ ID NO: 979976 - protein, 487 aa, Homo sapiens
PCPVKHPRAGNVSSLLIHHPLSLALNMAAALKQTAVPGTYSKQLVACSKPPRKVLWFIPPSDQLTTTVSSQSQRHGLTHIHPPAARATPHNALPPQHPQQLRTTPANVGRNLPPPPLAHPYHAPPLHHPRRNSRIPLTRRARAQPRRPSSRNTAKRSTPRHCFPFGQQPMNSTTTDVQLTRQHIRNPFPSTFNSSTGTYTVASLGLANALWAYFTYANVATTSVPPFNAWLAPDAPKPLGPLGSTPTRHLPHSSPPHSYAASSHTSHRHCFPTPPRLRLRLDTHPLSEAPTFLGYTSTLHTLSVACYTPSYSPYLTLYSLHRYLNLGHALSASLGGAISPLSNPNPLLTACAPYRLFQLGSLTQLHTASALSAPAAPGPPIHRSTQPRLTAQSNTPASQPPRPPHTGPETPGLAPYAHIEPASGDPPGHTPRHRLPAPPPHQQVPQKPTPPYATPAPPLRPSPRNPSPTPPRHRKNTHMAPPVRRPA

SEQ ID NO: 979977 - protein, 111 aa, Homo sapiens
MLTILRGQAISVVPPSAFRITIFSGGGQYVGRGLILHKFKHKVSRWNTFSSAMCVALLTIGDSLSNCGPGLADTGDTRTYLSLRGWVATSQSDTSKCFHNFKTSVRNTGGA

SEQ ID NO: 979978 - protein, 84 aa, Homo sapiens
EEERRMFNSAVVTMPVVRNIFLAVGVIRIQSEDKGQENLRLNSIGVGWIDVCCLRLATFWYIHAMGSRVAIKNSLFVNRNIPIG

SEQ ID NO: 979979 - protein, 186 aa, Homo sapiens
SRGVGYWSYGEEVYIDNCGDEIDGPKIEETPCIGCKEKMVRIYGGVGEVTEIPHNKSVTTGMALTPRQYKRNSKDIHMNTHVTIHSIPTNSRPSKIGEHSKKRERDSERKPKAQGQRDSHPRGPNTTHAAREHIPTPPTKPTAASPTPTHPQPGTRTHHINTRVTRTAEPQHTPRTKHPHTPRTPK

SEQ ID NO: 979980 - protein, 96 aa, Homo sapiens
RQWYQRIVSNYGRVDVRRSLTIPLRYQYKTIGDILLSICSSSVNDAWMMSSATSILRDFPIYPSTQAGAQVRHSLHYGNRPTCNSEYSFTAHSAVE

SEQ ID NO: 979981 - protein, 103 aa, Homo sapiens
MTLIQTAFIWKLVNNADGEHCGNRDESVKVMKSCDSVINLSKERDLPEFWQDAAVIQTSEDSDKKSCSSCPYGYRGCKSEKFIAQIGNLIKRECFQVKALTWY

SEQ ID NO: 979982 - protein, 102 aa, Homo sapiens
ESYRSGWHTGVGILSVWDDSGMLLFRYGLLGVPNRYSRSTSISIVGRLCGPPTVACPSGPPKDGKGCTEQVTSHMLCSESPHEDLERRGTWKYAMFDVAIGC

SEQ ID NO: 979983 - protein, 78 aa, Homo sapiens
PDMINEVDADGTGRIDSSEFLTVMGIDNGEDTDSEKEIREAFRVLDKDGKWHILVLEESFAMCMTEYLGEKLDQMKRC

SEQ ID NO: 979984 - protein, 176 aa, Homo sapiens
METSKWDSRQFWPLQLEVTLSSEGRSAVVWYSHRGQPRTGVDETYSWNQLLHGLGTSSRLSHFPFAKSPRPEANSSRGEWRSQVAQACRWVKGCGEWVRNQQVQKKATVSKGTHQRAEQENGVETTFLKAIIVNKSREAWTIYHLFEGPVELMNFSWKGCANPLGVTVRYTIRTQL

SEQ ID NO: 979985 - protein, 89 aa, Homo sapiens
SEGKISNVAGEVPGDGEVVRSWRAQWRGSRGGEFEEPRNVRRRKIAGGRSSGQGIVLDAPAAGRVAASTSAAHLPPGFLESLKEDDVGF

SEQ ID NO: 979986 - protein, 105 aa, Homo sapiens
MARGPKKHLKRVELQSIGCWIKLTGVFAPRRIHGSPQLLRECLPLIIFLRNRLKYALQEIDSKEDLHAAVHVKIDGKVRTDITYPGGFMDAISIDKTGENVPSDL

SEQ ID NO: 979987 - protein, 64 aa, Homo sapiens
MEFIPMKWHPNLSVWGDTFRPGIDGTTFTSGSPPHFGEQLATPAGATTHTRPSLPIEQTPPGAM

SEQ ID NO: 979988 - protein, 186 aa, Homo sapiens
MILCPKRGYEEQRKSNDEWAVSHSLGWATGPSNDGARYQSMRGGRVRLKYSKCDGMRWCDRSWMDDGAGWLRRIRVNPEGILRDEFEKQIKRDIAGKTSRVVVKACAVRDPDILSCESSLLRLCDIASESQSTRVQGQPWHNGVGGVGKSKKSRAQRQTGYLTGGGKKTQAEDKEENLETLRGRKT

SEQ ID NO: 979989 - protein, 66 aa, Homo sapiens
SIGINPECPLRPGGSVAFSVLCTGLTMDHPRRTFNSPKTGQTIVIYYLVESVHTEIVENNIVGNSI

SEQ ID NO: 979990 - protein, 90 aa, Homo sapiens
LSVFGSEEAKVQLPSVVPNPGSSDYLGVLHHADVMFDPYTEIYSRIPEVLQEVKWCHFCPGPQDRAPGVCLQERNVGDDIAKATGDLEGA

SEQ ID NO: 979991 - protein, 121 aa, Homo sapiens
LLDQLKCGFVTMICAVLNGRCQILVMLWKELKEQLGEDIDSMSEGNGLFSRGKLGVAGCTYRISNRRYRRNGMIHDAGSSLWAQMQAETGRTTGRIWTASGDSGKAVEASGDEAGRKQLRF

SEQ ID NO: 979992 - protein, 190 aa, Homo sapiens
MASLVSTLTSSTWRDSVWRKPCCMDYIVATCCAFENSCLDAQQLTSPPENTGPEGLCLNACSKVVDSSSGADHHQIAWNAITPGTFTNPRIQAILFSVSHVLRCGYSAPGLSSSLSTWASYVEAYAYRMCAVVNTDFPSCANVDFAFPMQATRELTQWVDVVDAGREVLRWRGISRNSLRGLPVLVLLEI

SEQ ID NO: 979993 - protein, 116 aa, Homo sapiens
MKSLILLAILAALGAVVTGVLMKSHESMESSVNIGTRRIIETGVNAEWRSRYPARAEMDEPKVQERIRERSKPVHESLDREACDDVRTFAERIRQWFMDTMLPYNRYVQEAPRGLT

SEQ ID NO: 979994 - protein, 201 aa, Homo sapiens
MAVCALYSVPHSPTRSVSRRAHALPRPAEMLRCTQSLSPDETGVQGTGSSLSLGPYAKDVKVGCRCPSLNAIQGETFLAECCGRVHSGAMMGRTVIIEQSLGKSQSIQIDGVTVANSQVDETDKKENMGAKLVQDVANNRNEEAGDGTTSATVLARSIGKEGFEKIRKGANPVEIRRGVMLAVMVYIVDLDKESKLVSNLK

SEQ ID NO: 979995 - protein, 68 aa, Homo sapiens
MNKLGRARRKQHTIDPLTTLWALYHTQISDTNHPPSIHYTHTARTNHHIQHRTHPYLVSSPYQYTRAY

SEQ ID NO: 979996 - protein, 182 aa, Homo sapiens
SAPAPVAGRPRLPRDLRWGVPGVFTPETLNAVWVLRLQTLLDAGHDFHICNHNSSQTAAMDLSPADGRMLARTGGLDAKPANFHVCKCRWANGKGGVFSPTFLAHVARVNYNFLSSSRELLRGSRGQFSLRSFSSAFCGRGGAVFPIKIKRAPVAGFRGYKGRNKAIPVVEVADNVTQSCVT

SEQ ID NO: 979997 - protein, 158 aa, Homo sapiens
EPVVTGGVLCVCVRCCACVVVFSCGRLGDIPPAGVVDACDHQWSDMLRSQMQVQKIGAAWQGGEWMHEITWNVRLRLLVSMAVATRVLLEWGRRVRCRRREGLTGGPLDHRRGGARTVYSLESAEVGITEEELAGGNVVGLGNHGVRGILRDYLLCYL

SEQ ID NO: 979998 - protein, 164 aa, Homo sapiens
MLSVALLENGLPGAVRLAPTMERDSPWPLQKLERRIHSPCSVRSFRIAMHVGDVTGNQFTPRLTSTEFRERLRSIVTGDLSKSFRIDRSPMKARVCCPLMLCDEEIGATRAVTGLRVLARQYLVLNGEGYDSWVYAIVLSVLYHGSCPRSPECGHMLEHHWTVD

SEQ ID NO: 979999 - protein, 40 aa, Homo sapiens
  misc_feature (11)..(11): Xaa can be any naturally occurring amino acid
MGHHLLREHRXESLYLIHSKNASSGYLGSLDERTGHRRST

SEQ ID NO: 980000 - protein, 113 aa, Homo sapiens
MAAVIRGAVVVDSSVELGGSVNISESSGFFHLGNYEECRKDVRRRYDSRTTYIFSRRSAYTELNMPVEAIADMQARVWELLSKVMVLWLCSSRRRNIHKASFDECLLLSGINI

SEQ ID NO: 980001 - protein, 242 aa, Homo sapiens
RGAGEKTDDNGASGPRPVTRRRRPVVGVDELCDVEERLLRSCRLPRHVHRTEAQLGDSYLRPTETRRMVKMVDVFLYRDVAGAEEKCGVVLDDIKPSSDPELQGVRMLVRELSSAHLEKIRNGSMHWCVRSCASRMEYGRMGDRCDVSKHSTYSCLMDRTAIYLHDQNPDADLSVRCTMGVTTPVKLHHDHGQLRILALRAWKLIGSSPGKELQENAGPATRMSSLSQFVTAWGQSWARVVE

SEQ ID NO: 980002 - protein, 67 aa, Homo sapiens
DPDGDKYHTSIDHLTSGNTSISLRPHYGLPKLCLEGMKVIRRLHSISSRSMNAMEERMPSCSPMMVA

SEQ ID NO: 980003 - protein, 272 aa, Homo sapiens
MSNITHVHMAPMSPPLRPQQCTPLTGVGAILQGPALNDSSSVLRLGELTEITDATQVILYSIRPNLYAGWLPSDCRCIGASRCRGNDISKGDQLTSDLARFRRNARDSGPNGFPLGGFEHYTNHQLVMSHVDSAWFKASCILVDQALSSWWRIDAESAQMKEEEDVNTLKYIWKDGLAPGRWSQGFLENKGKLGVDEDGDEDDEDGSCLPTDDAQNRRSRFLHNTAACEIQLVVPPVRGTVMGKFTYWARPGDIFSQDSSTRYGDKPPFTVP

SEQ ID NO: 980004 - protein, 69 aa, Homo sapiens
NCCYGTSMWRSGNAFALSVSREDAFEGGVPLSTQTMVLPVDRGDAQALVQSGKVSRKQYRCYRGRFASV

SEQ ID NO: 980005 - protein, 103 aa, Homo sapiens
SPAMAFTSASFCYMLASVLTDACIILRHLSHYTHFDLTLGRTDLQRILYDQGGIRLNPLVSPQRWSHLTLDYLVGSDNVFDASDDVEHYYLSVLQILASILCV

SEQ ID NO: 980006 - protein, 72 aa, Homo sapiens
DVMELEPCCEEGFSAVPVLTWTVIFPIDPDQILSGILIKRRPGSYSQAERTWWNAEDLISDLTYSSMLVVLV

SEQ ID NO: 980007 - protein, 574 aa, Homo sapiens
EWQSGFSGVPVSLPTPSGWVAKTREPAATERRRTPVKGAETSGAAPRGVQEERKGYRQGSMHDASMQVLRDKRQIIVPYHLTVMTKLEAPTGDSRTQIRWEDKTGQPRYKLTAPMDALITASSDKGGPPPAVRPTPLKQGRDTNYSDRRLPQSRDSDQWKDCKHTAKREEKQKHQGETKQMTRPHDETRITLDKRAHTRMAILRNPMGLLGLWYTGATQHTIAAGVTQIPEGTGPVPSRAHAQAPRRPHSAHSDPRSEATNTTEIDHGPPGTRYLRNTKNATTTQGRISAHQKKATNHWHNTDTPTYTIPTKSHRRSTSTSQHKAEQDPTVKATTRDISTTNVTVSSTDREANRKTKKPKDEQEKTAPYRYTGDSGNPTTSQGNDDNTLRSRYDEQHNLEQEYTATHAAARHDHANADTVGKDMEAQSVQREATMTAGTYDEHPDVTQILNDTTTTHHQHKRTKNKQNNPKSNETLTDEPKQSTIDNRDTIAGDGDTQEARKHKEQPQRAINEQQRNKIKQRYTSRRHRGGTRRSTNKQRRTRPTSYKGTDTKQQRRSTNETADRRYTDRSRQQ

SEQ ID NO: 980008 - protein, 189 aa, Homo sapiens
MQPNTYSLRNYTTNSGPTPNRQVAENNTARQPTPSINKAIRAKRTRPAHHQPQTKTDRGHPSTSHKHDQQLHNGNTPQTQAHPRNQNTNDPTHHPCTQNYFTKNKSKRTPTPKEPQQTAKTGTKKGRKHTTYRRHNRHPTPEAPNKQTKRTTHHDRDKQQQDTRRQTTETTTAPQQPHHAKQHANPLTQ

SEQ ID NO: 980009 - protein, 84 aa, Homo sapiens
MTRRVLRCPKWDSSISFPFMTGTVAQRGSSSSNLRPCGFRKAQKEGIVWRLFPESPVPVREKADKKAVAPRGGEGRTPGVPQRQ

SEQ ID NO: 980010 - protein, 83 aa, Homo sapiens
INPLAQAVIYSTILRAHSSQTLKLALMLYLSRPRNKHAVLRCPVRKPKREVQPHRTLQKACSILGGYFRARKASLQATKCLLI

SEQ ID NO: 980011 - protein, 162 aa, Homo sapiens
MDKNTPVRDTVVLQAYKSGSILWGHPVTSQLRLDPVRKMDCCLEISRIEYKRIPFETTCVRHLWICRKSDAGSTVMGNGSELHGCNAARSSCARVFVRLGDPLLSFAPLLETRQLGGSSDSTWGRHGPVGSKPLGGGWDGELLGGTVFRPQRCCALPLLTRV

SEQ ID NO: 980012 - protein, 399 aa, Homo sapiens
MQSDTTKISADLTVTSSSHTPHIITARENSGPTHTEDQLHHNHQLTIPHSHATTQRHGHTPPTIHNINHSMANQQTRTHHTKQLRTLIADTISPSLHNYTTVTTEQPANDRRLTQQTYRPPSHHRRRGTSRMSTDGRRTTNRRQQSSNEPPRQTTTHNNQNNTSATTTQQLRSTNDTQETREDKPRITQQENETHNNKATTHDTKLSNNTPCTVPDITQKEDYPLNTAEQPLRAYNSRPTTQRSTISANRKNTAQQDTSTAQKHTYGSQHEYSTHTVRSKQKHRATKERAEHTQANNTTGKQNRAKQRKPQAHTQSTKQRKNELRTHTQHTTTADRARQDNATQAYAPHTIRTQNRSAKYNSSAAQHNQLATRDRHDTNTATQKTKMKRNTRETTTHYR

SEQ ID NO: 980013 - protein, 78 aa, Homo sapiens
PNLSPRFLIVQPMSTTSPYADTHGIAMGVLRIYPYYSQISVMLLNMPVTDNSNSEFPIEKGVDKLRNTHKRILVGTHI

SEQ ID NO: 980014 - protein, 146 aa, Homo sapiens
MTQITRGSNRGTAGGKKTMDAQGEQGLDTRRIELSECERRRMHSENQIATQGETEKAREQSEPNGARYTEATQDDPTATRIDGQHDEHTGEQKSTPETTNATQVRRTTRDKEHEDTQQNQQTDAIYTQHTQPRKKSNTDTTDNHQH

SEQ ID NO: 980015 - protein, 83 aa, Homo sapiens
TVIRPPRRGVGGLRGTFFFFRLTAGQLRSLSTPARRRLMRDFKRLQEDPPVGVSGRTIWKTTSMQGNAVILGPEGTPLEDGYF

SEQ ID NO: 980016 - protein, 69 aa, Homo sapiens
HVLTGVTQRVCQEWCLAEYLQRHYFPDDTIYDSLCRALVSSPCFAGMAMYTRSLLHLPWGVPPIASADA

SEQ ID NO: 980017 - protein, 222 aa, Homo sapiens
DDVGDRSGFVTRDVFVCASDLHNTTTLNTTAVTAVTNTARTTFLLLTRCSTCATTRLHNGGRHMPHMTLRHNILHRIIYIEDGTTRSSAPCDTHYNSLPTTNKGTHLGQRHTPDGVIRRIPKQVHPLAHNTIIFSRALPHERHDTPPDPIPTPSTLTHKRLHKLTLIPLAPHGPLLSTNHKTETTVLIALSSLVSPNPLLPSDILHYDTRAQLHDIQWHTWT

SEQ ID NO: 980018 - protein, 113 aa, Homo sapiens
INCLDRSILYHNVWAHVIRSVPKANGGERACPERLNVTIADESALAENACKFDLSAPRRPVFTSEYLATTGLARAVDKMPTVYHFTTQVEDEYILRKSCILSRTVAGRNHVSQ

SEQ ID NO: 980019 - protein, 428 aa, Homo sapiens
SSPGRPRGSDIVFNTLTWHIPDAPTDDAQGRQGELDSPHYFLLLIQLSDDYSDMYHCREQTMWSIQADAADHACTYQREGCGADDGKNNMMQQETITTGHTETTHTQTQEATGRPHTPEGHRATYAVHHTDRTSTRTLPPTTDERDTKTSANNMTDTETREEQQETKRDTTTGRHKTKTQTDQQRTPNKRHIPDTHKTGKYTSTTQPQEKKAPKRTNNSEPPPTQHSSQTAHQRPGKNTTTKRPTTAKPHEHPNGHNKIIQQISQRADETIQKQRNETRTQHKKQQKRKEKPHTENQRKTREQDKRAQQQTNPKKRQKKATQQKIDQKTQKQPQSGETTTETRHNNKTYHNQKPKRTDTREETQEKEKDTQPTPNNTNNVTNSTKQVTNKQTSNKNAEEQNHRHTSRSTRQTKTRPTTLSNTTNDQTD

SEQ ID NO: 980020 - protein, 263 aa, Homo sapiens
MSKVGCNSLVPLIRDLCEWLHEGSAVSILSNRGEIEPAREEAGMDDSHEEEDRYGALTWINATTVILTRSPNSGAEYTYPNNLHEENFGLGLSIVSGAPNCEQYMLRLHQVKGELLYVKLICNNCETKGNEVGLGIREQCVCVESYIKDRVRDVDVEIRTCQWGRRINGRFVNDEGVRDLSADGVLQVGSYVGAHSSLSRARDIGYFTGASPWRCLQESVRNHRDGRKRAASNWAAAEINRGGARKSTRDRSGVQRGGNRQAA

SEQ ID NO: 980021 - protein, 89 aa, Homo sapiens
YMTWGRPVSERECRCASDYKRIIYGGDVDEEARTIYHEGFPVRTPLIREALVDHSICEPYVSMVSIAGGSDEVMPAEDTSYTCRQLITR

SEQ ID NO: 980022 - protein, 121 aa, Homo sapiens
GLLTDSVGATNAVVRRRHLDGRKSPVLGQLETVVVNEITVTKGKLFANVSFSQLEDGLNVLLEQMPRTGFLSSQDLALSSLKGLSNPKSLYRLRGSIRLRMSLQCGCMKPSRCNALEQCGP

SEQ ID NO: 980023 - protein, 72 aa, Homo sapiens
GESRHVLIVLLRGTETAQRAVSMGRMKPVGTPFRSGLGDKRQRVFLATADGEIPKRPASRSPSALRVRLRER

SEQ ID NO: 980024 - protein, 366 aa, Homo sapiens
VFPFGVPLKILDVAMGRRHARCYRYCKNKTRYPKISLHAEVTLTANDYALFGHCGTETTANTWTDDIPLIVSHHGCQTDILTQMVLYTPWNELARHKDATNTGTNEITTQLVETHSTRSIPLNPGECVNTQAPIYPPVNHGHSKPQHDRSHDRHGSLTQRVHNTQGQCRHEMAPTATPDPTKGTTLTEPTRNTHKRSPNSKQPPGPTSTDNTQAVGSKPKRDEHQVGHRDRGPQMDAPGEPQRDNHKVVPHGGHSDPDTDTPTHNTTQQANRREGTNQHQTRDINQAMDNSTHQHRTTHTIEIWATVKQQTRGLNTTTHTRGHSTARAKQVNTNTTPNVNKRGDHRPRGTTPSIGAREQNKSKTTK

SEQ ID NO: 980025 - protein, 270 aa, Homo sapiens
  misc_feature (227)..(227): Xaa can be any naturally occurring amino acid
VEQEILVTGIKVVDLASSLMSKGGKIGLPGGGWMYGNDCTDHGVNQQCLQLRHQWMVYSVYAWGDQCDDGPVKCKWVYHHDILSMNAGGGSHRYTDATHLQGKSSGILCSTLVIDAISVYVIVDSRVLRSCNSCAVLVVEILHERKQGQRLVLAIVIVETMLIGCPTQGWYQKLSCRYWCRIPFCLLELYRTNHVAVTWRTIAWSRNLHNLAKKGIYHLLYRVSYRXLADDFDWPCPVVTYRFAHWAWYDCTLFGLHLVELGHLCQVVDL

SEQ ID NO: 980026 - protein, 286 aa, Homo sapiens
PLIFAESPLADWDPVHVLLTNWRAFKALIDCSDTVGASGPRALRHHTHIPLWAKPNRHPVNFSATFPAGKDPSILRVMMDSVCQRANANAYSCAAMQELRGNVTPAGSQPTGGATGLSICMIPIIDAPQTVPGMNPTLGIMHTTRPLRHAQEDSAAHILGAAGMPTLTRPGGTSTGGEPTPTSDTEGTDNHTERHGTLEGGPNKRQEHTNAYKAATGPIRKYHTRLGRHPHALNAGPAHGAARGAQDHMQSHNEVPTRKPYTSAQQTHPNSATPTERTGRQGQHAK

SEQ ID NO: 980027 - protein, 266 aa, Homo sapiens
VRAERGGRSVSARGQARQECGTAARPCGSRPGGWAGVPEQPPGLTSPVSLSPSLVAPPDRHHGAGMSRNGWRIPRALSWGATDADGGLRGAWTPVLRRDRNRVTWALLTSPGSRGHPTPRERSFSRPSLLGWLPDAGKASLMCKGVLSESMDELSSTGLLGAAAPEYGAGNFFSHGITVVTLRVGIHLHVRSWIGPWGLCPTQYKGRYWTTRTLFGKVRGPFLYNPVGNTRGPYFRRGSRHVGRNHPDGGTPGAQSAEVDIARVTL

SEQ ID NO: 980028 - protein, 77 aa, Homo sapiens
EMRSRNGDCRTGKPPLLLIPRTSEKEKRESSQEVAEAQNTILSRSAYRNKMGDVCFFSNLINAISLADANPCGLDSP

SEQ ID NO: 980029 - protein, 128 aa, Homo sapiens
MSGRYQDGLLAGRQQLRRRFLLLPDAEAQLDREGDAGPETSTAVEKQEKPLPRLNIHSGFWIVASMVVTYYVDFFKTLKENFHTSSWFLCGSALCLSVYQLHFTCIVYLEWYCGIGEYDVKYPSLDTH

SEQ ID NO: 980030 - protein, 155 aa, Homo sapiens
MATEDGYICFALPGKRTKKELGLSRLKSDLSGLPWDDRENCGGLCDRLRGFEYVIAFMRLEQLPVKRGLGSLTRIFSHLMIIWLHKPESVRLLDLFDRRSSRRMYRDWSGEGLISGTSLGDFRKLGWVPLAGGKQAEDGSVRDMNLVTKKRGNPY

SEQ ID NO: 980031 - protein, 194 aa, Homo sapiens
MTGEVGSEVHLEINDPNVISQEEADSPSDSGQGSYEDNGPLSEGDSDEEIFVSKKLKNRKVLQDSDSETEDTNASPEKTTYVQCRRRSNNREFICGGKYLPIIRRILPKVWQTVMTVPMATVWYQDNSLKRSETCLELSLQSGNSTDFTTDRKSSQKAHPVNHEGNLQDNAGSTHPQRRLGTRGDNTPYLHNSH

SEQ ID NO: 980032 - protein, 134 aa, Homo sapiens
MDAQTPSSKAGQEDTLRHVPPDTCDGCGAHRTGDSRLRLDGAAITVLCLGGQRQEGSWSKGPKFPTLKIAHSLPRQESGVQELGSPRQGGATGGGDREDSSKRWPGEGLPHRRVAQVTHQRRPDPDKPLQAAPR

SEQ ID NO: 980033 - protein, 50 aa, Homo sapiens
MQTGFIREESSLVLGVCTAVIFLRSIISADPTDVNLPNSDTVPSTGRQTT

SEQ ID NO: 980034 - protein, 258 aa, Homo sapiens
MPVELVLVLRIPDVSRCLLLHLAVCLTRSEYDRGVNTFCSRRKIDVMVEYAIEAIKLGVYRRIGIQDIRGCVPSMWQKRITSPLMETEQYLRNSSQRWMLTYGVCHEWATCSMSNDFILISAQSGDHLIATGSRYNETMTVDELGPKSVSQSGFAVGDQDAGSRVHCLLSFGDSTDYWEESMRTGAPAGSYGPIVRPCTGDARAVGRSRGEPRGSCTSFPSAMTRTKAQCSSSSPTVMGAPAAHVGSSCVGEFLSTGT

SEQ ID NO: 980035 - protein, 156 aa, Homo sapiens
MAVMSLWRTGFGYCGGCSVWPAPWQSRRSWGAFLTRGFSEGCWGNSIILQASLIRTTVGRPMRKRIFIGIEILSRISSAQAVPYEQVIDEFYIVIDRGLPRRNLSITHGDMYSVLVKARTSQKFQKAMSQNHCGDMHNASHIMMDCPVDFVLIVLK

SEQ ID NO: 980036 - protein, 115 aa, Homo sapiens
LAEPAPDETHAADLVFSARSVSRGRPETFFCSLCKYGQLLEEKNSLSPVAGSKVAQSVPSNRITCTFGMSGTSMVDGDVHSQTFWRKSASASMSLCSLVAIGCPGTRITASHIRQ

SEQ ID NO: 980037 - protein, 217 aa, Homo sapiens
  misc_feature (137)..(137): Xaa can be any naturally occurring amino acid
MPVMLRYMGRWSSSGYRCVGRDMLWSTSIRGTASVSKGYDPTVENTYSEIVTLGERLTLHHSIMVEHSRGRTEYSMLPYVIHHLGSMVMCLCMLSASLHSFQRRLRVCTKKLHEGHGKTRVAVGASWGTRADLSPEXRGTGQVEGNEAWKQSWGAALDGGPLLEENSELTQGSSQSHQGEWPVEKSMGRGGGTLCEPGVGKRGLAGGRSRGEPPPRG

SEQ ID NO: 980038 - protein, 88 aa, Homo sapiens
IVVRNAVGRQNTRCRGNSSPKSQNGKGEDSYHTLCVDEEHSQYECKSTRRIWVNLDRINWGGIGLKNHGINLMKDGCLDDGAKGVTSR

SEQ ID NO: 980039 - protein, 113 aa, Homo sapiens
SPKKPLRHNKPAQQGSDTKIPLFPRLAMTTQDRLARVNVYSSIIMLTLGQLRARDICQQRIWFRRGVNTGMCTHTKRLASGCANFSNVPVASKYRITVVKLRGMLGDHNTTVV

SEQ ID NO: 980040 - protein, 75 aa, Homo sapiens
EAVSRAVTLGDTEALTSLSLRDCGAVTARIQTRGPRLGNGNRGFIMLIARFPHIVRSVHHSHHGNPYGIWQYCMT

SEQ ID NO: 980041 - protein, 86 aa, Homo sapiens
GEGLVCLVRELRGPAIVCKVVLVTNMSRGSSAGFDRQITMLSPEGRLYQSRISLYKAINQGGLTSVAVRRERTVQDLSHQKKVPDE

SEQ ID NO: 980042 - protein, 83 aa, Homo sapiens
QVPGHVAGDLAILRRFLSGAAASLSRPVPGASRACAESPSDRLPGIEHFSRRELLVTLSHAGGQSVIRDWLKDLGTNALLAPG

SEQ ID NO: 980043 - protein, 106 aa, Homo sapiens
DEADGLLSQGYSDFINRMHNQIPQVTSDGKRLQVIVALSTFALLMRCRRKLSEKISAFSLQWVDLKGEDVCSEILYNHVVVPVNPKIDRPLGKAWKEATLDMMMYM

SEQ ID NO: 980044 - protein, 514 aa, Homo sapiens
MSYVASKIFNEELMVRKPTKNDLYPKIQSLKSLHMIYMRALQIVYGIRLEHFYMMPVNSEVMIHSLMDGFLPFSNLRVLIWTHFAYLRVNDFETADDAMSKSKKDKSGFKWHYQLYSLPEKDGRKPIWHFLLAINSSVRSTWHQFNSRHQEANALGATDTVPWKRKVKPSHVCRRTHTSSVSHTNGGEVHKNSYHTARRHCLFTHKPLNHTFFLFSVFYFFCISTLPDHHYHPTPPPPPPLLIPSPHPLTSLPTPTPSHPHHHPPSPTTERGNLDAHNKHTQTDQPAGTPRNAGEQEDHTKRRTHSKQRQAEASTDEVATMQDERDKSEQEQRDRPSREPQQDKRGASEKARRHAARMNRAHTTSERERHNKRPRPHREEEETAGTTRTQRNGTKERSSGRDSAGEDGRAQGKWTQRSMTNGRPASTKDTERPTDEGTKEETHTSAKQADARSVGLQTCAAGVHGGTEADASKTDVKEEDQRHAEAEQHTEHEYRTDKQHDRARSQQHTIDQPT

SEQ ID NO: 980045 - protein, 69 aa, Homo sapiens
MRRDEQAREGERKNRAPTEGDNKRREKKRRGKDNSTRTRQKRRAKRQEHSKNSETAARSNAHPQHEHSH

SEQ ID NO: 980046 - protein, 75 aa, Homo sapiens
GCERCLALNGEILQVNHYCHQTIPVSSLSFITGGMITCNHQSICEEWLLRGPIRHPVGIVGFGRIKVEVWISINL

SEQ ID NO: 980047 - protein, 126 aa, Homo sapiens
MQVSMLARHDTQPSSKTNSREHFVKTCESTGKEKQLQTDSRQTGPQVWQQTREETSNNQTHAYQSSRRDPPTPRVPKPSGGPNTRRSRRNTRVHDREDTSKKQPGKSHTEQTDTHSTRDSTPPPST

SEQ ID NO: 980048 - protein, 154 aa, Homo sapiens
MSSREVAACNHGTLGAIGNLRVVDQIQKKASGHQIGGHPGVRGSTGLPTLLNRIEWNVREECRGTHRRKTGAGDSTQRYRRSATRRLAVETTRNQPGDGPGYEAHGKKAPTHGSAALERHNPRGEQTEHPSKNRAAHNWTHHATTATRDNTHPT

SEQ ID NO: 980049 - protein, 104 aa, Homo sapiens
GRRVVCSVRWAPGPRAGSVPFPPRHEVDVKEDHSLEHRCVVRKIRAKYPDRVPVIVDKVSGSQYFDIDKRKYLVPSDITVAQFSVASSGRRIQLPSERRSSCCG

SEQ ID NO: 980050 - protein, 129 aa, Homo sapiens
  misc_feature (97)..(97): Xaa can be any naturally occurring amino acid
MLTRTPLLVSYKRLVHIIPPASGGNFSGEHISPRRTNHEDQPQLTRGRRRGDKSLLEEGDANSTHHLRGDTLTTGGDEETRSFSPLYIVAPRGATLXPIREHCAQVKWRTQLQRPTGWGAPSSGVQICR

SEQ ID NO: 980051 - protein, 112 aa, Homo sapiens
  misc_feature (46)..(46): Xaa can be any naturally occurring amino acid
MTRLGLIRKQRSHFCTMEVYIAKFVMCHQESDIDSTDQGRRRRSPXERNFQVLMSDYTRLAEIGIVVRCLARKGSSLLVTIPLEEYRFTEMTDRLLLVDQGNVRSLMWLHAI

SEQ ID NO: 980052 - protein, 361 aa, Homo sapiens
  misc_feature (111)..(111): Xaa can be any naturally occurring amino acid
  misc_feature (296)..(296): Xaa can be any naturally occurring amino acid
MVTRVCFEDGMAETGSAILREVNNMISEINPRYRCVAGGHYVGAWGTARIRRTMNLFDKYLSSCQGIHSVLIGVMVAVRPLVTSLDSTVIHYSCGHICTVGSHPCDISGGXLCSTTDEMCIELMTSRWYDNRHSTVSKIAWHYRRSCYRLTSVDATLPSDIEPTGTYSEWSSVYSLDRVSNMASIRLLTCSHSIELSSKRMVEVIMYVELASQTVGAVFRAMHLSIRCLIHIPVYSMSWPYSVDLGGALPNGRFRGWAIVDWCARAVDLSRGSPRADRLSRQVWYPGWGHACRALXTGGCATRLAPHHWCAAQPRVSLNRAGGGTPLVGRAARRSTQAGEAPQDDGHLTGGVNTPSDLSGS

SEQ ID NO: 980053 - protein, 76 aa, Homo sapiens
QKIRKRNSENSRREAEIALLYSGLGNRVRLRLQKKKKGVFKPLKLCRLLKLLMEIPKRCVRVSRVIFQTNQRQGEI

SEQ ID NO: 980054 - protein, 204 aa, Homo sapiens
EGLYGSYARIQNAYISPCQEEERHLSLRCATEPSCCRHATAARPLVIRDRRNLCRIPVVSAFVPEVVPECRDAHGLTVGRVDQVRVVGFLRYVATCLSDDMSSVFLWNALEAVRVCCLVRIPGLAVVSQRWLPLSGGAVATPSHVYPHSLLDVVLCPGSVKGTERGHAECALDNRPRATCGLGSHRAKLSCTIRTRVNNRGACD

SEQ ID NO: 980055 - protein, 69 aa, Homo sapiens
AALRNVASLMRTGAEKRCASNVCMVGHSERQVRSQIGIVMGSTGCMTVKDTDATWKRYIGEMRSRTIDK

SEQ ID NO: 980056 - protein, 227 aa, Homo sapiens
TLQACPVSCPRVKIRIAFRFLMKTWSMLMHGVGHDDHVISAELIWLHLPVARTHSVRVLARIALVSVNELLTTRTTLSELERVPKETPIIPLWVNLGRRQRIPFACTRREEHWRDQGKWVLRTRKVLGVLHFCALFKFRRIVGLARHSDKVCARSQGSPRNLLRRGTFNARDTCEASSPGVSRIISHCPYPTKSQHLAYGTFARRLRFYKAVSLAFVVTHMIHHTDS

SEQ ID NO: 980057 - protein, 118 aa, Homo sapiens
  misc_feature (81)..(81): Xaa can be any naturally occurring amino acid
  misc_feature (107)..(107): Xaa can be any naturally occurring amino acid
PSLRPSSCCCCSPTASVPSGLQSASGAVAADPLRTLTSIPLLPPPVLDHGRTPRHQYLAADACTMLVIPSPTHSWLGPVVXNRLALRRIILFTSIIRDLELIFVRCXSRIEPAIVQNT

SEQ ID NO: 980058 - protein, 61 aa, Homo sapiens
MRHCATTGRGFTAGAARVNTQNRGVSLPRRGKKAPFGKQYARGTQGVPPLTSLSAGENYNP

SEQ ID NO: 980059 - protein, 490 aa, Homo sapiens
RRHTGGLRRLSCFSGWHFPRAPARQRCWHSCSAYPWLWRTALLPTTYSSTSRHAHTPCVPPAALPLRAPNTPCPQNTRLHTPSKASFTRTRCARARHPAPHARTRSLRPLCYTSALVQHNPTSHHILLCACLAPACTSHAPRPRTALSAPLLLPPHASTSLPTTAPLLALSHMCPHSLTHGRADTPAAPLPLHQPPPFTRLQPTAPCPPSSSTSKQLWGPQWLTVPSPLLIRNHFSPLPPSPRRIAQPLSHLPLNTLPTPPTPTGFYPNGNQLAPRWHRRTLISWLQTFQTHAPPPTSQPTPRPLYTTHSRLPPGNLPACPSRTHNPHSLHPTHLRPPNPGPLPPLRTCAPPRTLSPLLAGPPLLASPPLGPAPLAPARPFQFIPPFGAFHLTSPKRANAALRTLGSHTSHSHSHSGSSAPPTAQRGLSTPPPAPPSAPRPAHTKPRQHPAANTAPTPHISPHTHRRLTRATRTHPSRTPLLTLTLRRPP

SEQ ID NO: 980060 - protein, 93 aa, Homo sapiens
MGIRQPTKRGGTYETILVPSPSWLGYRTTRFPTARNDTNWGVAQVKNESLTGRGSNYPLLGADREPTHINRRGGGHSTRKNIRTGTPTRATRP

SEQ ID NO: 980061 - protein, 120 aa, Homo sapiens
MTRIGVPPLWRSIPSSSLTLSSVRIRSILGPAGPRIDQNLGTSHQVLKHLEPHLNKIWKLCPNSFWSYHSQSPWNIWVQASLIDFLPRVSSSSVEQVKTDTAPESPLGSPLDHHGMPSFE

SEQ ID NO: 980062 - protein, 75 aa, Homo sapiens
ENRVEAAAAGGGPRLVVRLWTPSPLQCRVEAGVCVPERMGWAGLTTQVTSIDCQSIGRNEPLDGADAWTVSHRRR

SEQ ID NO: 980063 - protein, 75 aa, Homo sapiens
VRCLAMPGVSCGGRRRVEGLRCFYWALEYLKRFKGPIAKKKEKSTSQYAADDVAARGSMFASHRIVSWGSFYTSM

SEQ ID NO: 980064 - protein, 113 aa, Homo sapiens
MVISDLELLAQRIEEPVVEKTAGREKLGGTEEVSRAEGRITPRVDVLLSTTVTWYVPPCPEEVQGDFALNVVVVSGDVITGERDHVYNERDLDLMNGVAKVNTLFTRSMHYDS

SEQ ID NO: 980065 - protein, 119 aa, Homo sapiens
MCGSDRPYIDRSGVLCSPCITSYRPMDLLTVENLQFAIHRQAHCEWVNVWCRTTIVGTLHVMKRVNLALVMEDVIERDYEGRIWEYQVSCKKYGCVIMSSMVDGSGPVGYEEWLLDDGM

SEQ ID NO: 980066 - protein, 240 aa, Homo sapiens
ERRRRSHRLATLPMTDDSVEQVSSPSPTTDGEQYLHQVLKISKNLQYQRCRCGRTVCPLEKLGPGLPLDLSQWCQKLHATGEPQIPSSPVMNVPRQKKRIHRCVSKILLPKANELMEEELQQEQDCIEKTGISKSVDGRRKARQQLGYEKGRGIRKRRGEETTTDHYRAMTEEEEKGEIQKVVRQHDYSDYEDRSPRSFAERCSSPRKIESAGEFSWVHESMFTEKTTTYQYPGHSIPLI

SEQ ID NO: 980067 - protein, 399 aa, Homo sapiens
MTSRAPRGHSHAAQPTRKRNTLRGALGPGSTTWAQTPLWTHGTPLIHENRPLDGPTATNGPALGARSAPHHTLYAAHRDDAPGHPTTPISRRWGAQHLPDKHASDTGRSTTTPMPCERRTNLPAHTAHEDDRPNGRMASCHGNTLQLVAQGGTRLSHCRHQDELLPQSRCGHLLPSSDSYQPTLVYTLCNPVPPPSYVSDTNGLGDQLAAYTPAHSRHVSLLQCVPPYHSLGESHLSVSRHAHASKTAPGTRLLALTLGRHKGAPSRMVPSSPRITFPYHARPYRQPATINPCNTPLWANAPHDPTDTPHDAKGTQPNAPDSQWQTAEVHSAPISPLTTATGQPTSAEYALTWTPASSPHPQHADRRLPLKRETNATRSSHCSRRQRTGTRRTALTRTA

SEQ ID NO: 980068 - protein, 116 aa, Homo sapiens
VEPAQLYIKTEAIVKFKIQSTGIWGMGLQLQKVNLNQIPLGRDMQSPGDENSDGDPITQQEVREKNEAASKKSSARKEMWWVLVMTHVELKCILEWKKHAIVQTSGIRGTGIQWCM

SEQ ID NO: 980069 - protein, 103 aa, Homo sapiens
MPEEYVARGGSNGCECGSSAIVMTTSRDARPILSQLSDGAPHGDERNSSVETTHRSNSDRCDGGPPPSSGNANVGIKSPQFLINGDPNRMTGEQCHGACYMHQ

SEQ ID NO: 980070 - protein, 122 aa, Homo sapiens
LLLALSCVMAGSIRGWDLQISDSRTGKVYPACAVSARRECRRSAVMSCRYAGQVARYTGVDPRGGRSVSGLTSSITEHDERCSLASLERSPSICDPLYQLYFGTKERLYEKDRSVADQISSA

SEQ ID NO: 980071 - protein, 252 aa, Homo sapiens
MDIAEWMSYNGSTVSCSSDVYVIEFGVVTMTVIGHTTGEPTNLIELRRAARRDVQARLQLLIFGYAEGDEQVVSGQARDEYTTPTNLQGHHPESSALHNKRCPAIQSASVPQRVSAAHRKRTRARLRGTELWMKNPSRALTANDSEGTWLHNKPPALRGPTTHHAPLAIATRSCHKTHATPKKKQHQQVGDAVESTRKRHTPTKCLQPVPNTRSRHTPRQAQPPHTPTGGRQAMPPTTCPPDQNREPPATQI

SEQ ID NO: 980072 - protein, 162 aa, Homo sapiens
MNVYSSVDGHRRQLGSSTGGPDGVPGRKLLTICIFADPRVNWVPRVMARYCCPIRRCCWGTVKQCLMVVPRVAPGGPNRLGDDNIADWMYDELLEKTYWGVYCRDSDVVGQGSLLDDKVDGSYLVRCRSFTPDAVVSNLGLILKRLVGRSLGHKGLGLAVHG

SEQ ID NO: 980073 - protein, 66 aa, Homo sapiens
QVNLMSSPMAGTGLGGWRCCGGCDCRSYVIQRLVNAPGVRDSGVQSVWLDGRKASQSNRAIARELP

SEQ ID NO: 980074 - protein, 67 aa, Homo sapiens
EHLIAYKKFPMRVQCVICCGQIQMTVGGYVKCISSIGVELCVTAYWVEKYMLRENILNQLRIVSTSR

SEQ ID NO: 980075 - protein, 152 aa, Homo sapiens
  misc_feature (11)..(11): Xaa can be any naturally occurring amino acid
  misc_feature (26)..(26): Xaa can be any naturally occurring amino acid
  misc_feature (96)..(96): Xaa can be any naturally occurring amino acid
  misc_feature (111)..(111): Xaa can be any naturally occurring amino acid
MGPPDKCLEIXYVLTGILIELVEVEXMLTPCDLHFLYKKYRKRNLQFRIAGADGPWFVIQGNLVVRCSYWNIALQVVLFARCWQNYLRKNRRSVKXSSRRTIDEGMVVIAXGHGVAVDKYGAVIVLIAKKHTRIRISRTPGGTFNLGKDGLL

SEQ ID NO: 980076 - protein, 221 aa, Homo sapiens
GAAENGCYYEGYVGDVKRYAMSDFRSVVVRDGACIRTATTRDKEARRHEEEGEEGRGHMREKSKGRNEAASIEKEQKREKQEKNRNKKRRKQKKESTRGKKETQTQREENKEQTKKHRAQQKERLMRTRQGRTEQSEARHNRAEKGTKRQKKEAKTQTRQKREEKKGHRKRGRRRQSCEEEEKKTNTSKKKKATHESPNIIQGTQREKTEHNKSQRAKEQK

SEQ ID NO: 980077 - protein, 68 aa, Homo sapiens
EPVVSALPGELVDKCIGSRIHIVMKSDKEMVVLFLRIDDLVKYGIWKDVTGGLKIMIREGTWDLLTFR

SEQ ID NO: 980078 - protein, 306 aa, Homo sapiens
LPVCTRRGVVYAEVTETLRLCARDDRCQTEHHAVARILTSGSLGKVERRMRCEIDSDYVRWSDDSCEVNGDSSAQDTCASQCRGVMRGIKLRIGEGAIVVASSKSDDELRGVENGGKLMTVRIVNVCLRRSRKLCSQGEDASEGPSVERHSSIAVRGEDIQFVIVARRDCVERQACGDLVSPGARVKPRANWLLCTGAPLAALRNIRALLMLEGVHHDAKGRRLYAWRTVTCVCDSQTLFPVVAINCGLVVPNNNGEDKTLARDKQKQLGGPKTTNAKRASGPNNGRERRVYKQSSEKRTHPRIRP

SEQ ID NO: 980079 - protein, 106 aa, Homo sapiens
VVSMEVMSGCGGFRLVRWQLCAGSVPYGARARIEGFHHVVDFRRLLLLFDPVETMGNNDYVSSDLLAFYDRRLLTLLRLLRIAIDGIPVSSLHRLVVICIRLVELN

SEQ ID NO: 980080 - protein, 77 aa, Homo sapiens
SSSPDMVCTYAGFCYMLALSAHCRAHLSVGHLASITRLVSSELIDVMYYMNPYRTRCNYAVNPLDSPRGTSSTAVSV

SEQ ID NO: 980081 - protein, 196 aa, Homo sapiens
MESPGRLSKAVAWRKKLEEVRELQSGAPPDANVAITLSGDDVSMTCITSKEELNCQEEEDPMNKLEGQEDRVLPHLVGEHWITRCPLRGYAGAQCRMSWRAAGLFTGEKEQAAGELRAGVGHAETRRGVCAGEAVDGANRAGLRGATVNLVSRPGFHLVRTGNTGKFGGHSAYGRQPAHRWCNPARATRGGPHLGP

SEQ ID NO: 980082 - protein, 72 aa, Homo sapiens
VCPWFQPVMYSYPSLAVHTSIKRQSNGSSRHVVIDIVAVSAVSKVTRCIAISEFTRLLDTKIKLIPLQVPTK

SEQ ID NO: 980083 - protein, 242 aa, Homo sapiens
CLPAGVCQVLRGKLRRTGSSGEAPQTVYTSAASQWELCCALWRLHGMMRPYTCTTCAEVSSVDVTNDWKNVSYELLNDLMIHTEVSYKGTGRGGDSVVYGKSVEGGPVISDYEIHGGWEIVFVEGQIAEVKSNRCVARIFVEPSTFSKRLRGYQTASWASVSGLGMVNRVGKANKMRKSRLGQVKTIERHSFGGEGDPTGEVHTGKRLGGQVVMHDAVGAAGRGGEHPPRAGLGTHRARREA

SEQ ID NO: 980084 - protein, 208 aa, Homo sapiens
MRIEKCNYLFARAHLILAHRMMFVRQRLLRVFRFCKIVNVIKNLKRSAVLANVMVDQSIPGKELVEERYSGVIHLRFGEDVEMNLSNTSESYGIEISDAMKRVEEIEQKRQARFIMNRSTNKYIELQTNGQDFSQRRQAKQSNLMRAPLAGEGNTVGERQMVAAVTRGCGRGRCSLEICVAISLHVHVKMPLDTVVTAKLCMFYVRSL

SEQ ID NO: 980085 - protein, 31 aa, Homo sapiens
MLMWVGLRKGREWVWEVVEGGRCEDDVVGDV

SEQ ID NO: 980086 - protein, 61 aa, Homo sapiens
MSSGRKSMREQNSGNSESPSSEPNEKKLISFPDSEVVQVSDGSEVITLSDEDSIHRCSRQN

SEQ ID NO: 980087 - protein, 57 aa, Homo sapiens
MGYPVEDGRYTFPVGIRRLTHQQYFHFRYHGIGCPPGPILSGLAHPGRNFTACRAWA

SEQ ID NO: 980088 - protein, 140 aa, Homo sapiens
MQRGRSTETLLPRIIDELIAFHDHAPHNHVPYLLPSPVCPFSYTLTTEVTNTSISEAQEIEGRLNYPARHHPSPHRAPIPTHLYITDEVTIPPLPSNQFGHQWYCTYEYNDYGDLIFKLLHTSPIIPRTRRPAILDVTIE

SEQ ID NO: 980089 - protein, 149 aa, Homo sapiens
  misc_feature (41)..(41): Xaa can be any naturally occurring amino acid
MLCAVVKLIGANKEFITYRGGITDVKVMTSGYTLENGCSLXGLVQQDELHDVEGRRQVNYEGESKLDVNVATLVDECLYSQRFPLEGFEITPPGVLNGLTCGFTGLRAILSGQHVSTLLGGRCFESERMTDGLDGCEPLYVYLVSGLPL

SEQ ID NO: 980090 - protein, 72 aa, Homo sapiens
LTMERDRQQMRDMALRFQTCYMHRNRRKHLGNGSYDSEEINQDIKMSRNFCSLNDGHIPLEDVQEVGDYYKL

SEQ ID NO: 980091 - protein, 108 aa, Homo sapiens
MGVSRAPIRVWCRQGVTCCALSLGLILRSQLLMPQVAGPENPNLGRAPYLYPLGGSPCPQCLGTLTSALKMGFVFYVFFEGVQDIQYKSLMVQCDQSRPRSHPKCAGQ

SEQ ID NO: 980092 - protein, 31 aa, Homo sapiens
MWPTHILEQPQHNQTTIIWTAKNIDHKHLTS

SEQ ID NO: 980093 - protein, 221 aa, Homo sapiens
MPAGSCYCPGNAVIQPEWADAKDKTHGGGDDSFNAFCRWDGGVAGNVPGLCCRVGDPTVIDEKFALDIRTGSIVTSLMRAHHTARRDACNNYALRATYTIGTDDQLTLLLDRIRHDWLTSVPGSLGHSCGSNSLVVVVESVFMGFGLHLLQWKPSLSVSYEQVDSELEVPPFDPVTQGFHTAGSGIPTCLFFSNAKERREAIGCGLMVNREARWTRRKTTN

SEQ ID NO: 980094 - protein, 92 aa, Homo sapiens
  misc_feature (76)..(76): Xaa can be any naturally occurring amino acid
TRVGGREEVKLSEAPPAGPPGKGISSIEQKTVILRKEVVGDEWTYLGECGVLVDMRITICDRRVLSEWFGSNCLDXSKCIVSRSSSKVVSIL

SEQ ID NO: 980095 - protein, 113 aa, Homo sapiens
MRIEIGVICVRGHLSCDTAMMFVRDDAEVSMICKSTCLKHFTKRAQSSRKLVDHEHSGKQLGKELYEWIIHLDICQKVEMNLSNTSESYGNKTMDADEEQLKMSIRGAKAKIE

SEQ ID NO: 980096 - protein, 127 aa, Homo sapiens
RPWNPKSLMKSALVTYRQLFHPESVCITGMDDAANNLCPVGRYTTSVWQIMALVLVRNSQGGLKRCTGVFRGLLGFSHSFGWGNWGLGSPITCSWNVSRIVFWAKKIRAGVRPVVTVATTQVSHESC

SEQ ID NO: 980097 - protein, 72 aa, Homo sapiens
PPPAPGKHVRTTLQAARMGKEKRERRTITAARKGRRRPSRNGNEEEGDQYGTMDDRGHTSVYEVDLMEYHAK

SEQ ID NO: 980098 - protein, 118 aa, Homo sapiens
MTGNKLHHGADKVVHHQWLAQSRYHTVHSLCLLGLSIFCASFVHLFTTAGYEGSEMSCAMVLIHCKAPSWSYLDPRRGPISCSENRGVLAYDLGWAAVMRSAWGKAWFLSLAGGCLRT

SEQ ID NO: 980099 - protein, 220 aa, Homo sapiens
ERSFRDCPHDSPVVDPLICNSSRPFMDWKALLSSLNDFASLSLLELGQCVDYVVERQMAHTTYCKYNSSVTNDCELRKDGGGAARRRQTSFSPSIRHIFRPMRAHKLEQHGRTRLVIRARVRTESVSTLLIRPMSAAPQGVKNWLAKGLGACTSRPIHPSKAPNYPNRGKPPSRIQRELHPRPGQSHVCRERTGRCSVTSLSGRTGTEEQHGYLDCTQNA

SEQ ID NO: 980100 - protein, 133 aa, Homo sapiens
PDTVVHMTSFSVFWKLLSPGDSSDSLLSLNRIRSDRCQPLNSSTHEARPGILVRGSSGHDCLCILLLSCVVSILCLVDCLLTLVVIPAVSSGAARQRFVSIASSPSGGRPQYLACAAHWSSGVSPLSSCALPL

SEQ ID NO: 980101 - protein, 72 aa, Homo sapiens
GVNARTLMRRVLVWQTLWSLVTIAIMYHNSSREAGDWDLRPARQQLALTAGCKPQPSGFRCKSRGQGEGASE

SEQ ID NO: 980102 - protein, 155 aa, Homo sapiens
MVWRCSTYSCVTDVRPFWLHRLHLSCVGLARGCSVFLLLGLLPAAYLNPLRRVMRRTSAVHCVILISFTGHCGPFVTQGVLLPYCFMAGCHRKKSCPRSAGFLWRLVKLYPFCLELLSHSQLLTDGGPSVLVVCASVLWKGSGPLFELSINLCKQ

SEQ ID NO: 980103 - protein, 111 aa, Homo sapiens
MSSFERRPLPSGTMGSRLIGGRYVLTFKVTWISFKWSTIRFLIDLLHDVLNDFFGKGQLCNNYNLSYTFRVVANVEHQAGSLLVTAAVFIIGKAVNKKNNWGLRKNLNWGG

SEQ ID NO: 980104 - protein, 144 aa, Homo sapiens
DQIRTIERNQEMPHKGAYVIWYGQILKDVRYLGLSGPRSVAGVVYIRKQDGHRSDVCCTITTDLKKLIVQRHHQTSAQKAIKFMFDEKLVTGMVCSYITSVSLWNIWLRLMVLQEMYTTREPKGYSRAAPDSRTVDSSQNDERQ

SEQ ID NO: 980105 - protein, 72 aa, Homo sapiens
EEDNRSETASSGYASGQQVTDEPPLEEHVQGNNESLQLVNHEANSVAVDVMPHVDNPTFEGRRNSYIKRLLS

SEQ ID NO: 980106 - protein, 178 aa, Homo sapiens
MNETEHWVKVSTNIHTPQIPFMWSIFAVSAHPGMGKKWDAMTEDQGGGSTLGIPGIHIGLEHELCTIMSTPRETTTTATAQAGKSGGRPSVHEDNTRQRKKEDIIKRTKNQDLCEDGHNNSDNMKNKDLTINKTNDTTGRGEQLQHPHKIDGLRTYTRGGANKTLVTGKRDKHTSRQN

SEQ ID NO: 980107 - protein, 79 aa, Homo sapiens
SALVPLADPLLYDVVTALIIQVLSARSGCVPIQTCTPSCYISCPVHNSEMEVVRSDSPNWRAARIVGTFDRKLTEYDKS

SEQ ID NO: 980108 - protein, 301 aa, Homo sapiens
VFPFVCATEDPGVCHGPPPVPVVTGIVRIKPYPKSRFCRGVPDAKIRISYDLGRKNGKTWIEFPGLCVTWCHVVNMSMLSSETSLEAARICANKYMVLQFVAKMASHIRGGINPIPCHPYQQDGCTCAWVLDRPPNRAMDGALAKPQGTVVHVVHIGHVIMSIRTKLQNKEHVIEALRMGYVQVLLADKIIHVSKKVGFTERSSADRSLKNVGRKRESIQMFGVSGGSPVWCLLASGGRGHDGSMCCALKSHKSVLCKRARRKFGGRPKIEQLGPEGKGRPDGRGPQTGNQPVGKNTARGL

SEQ ID NO: 980109 - protein, 114 aa, Homo sapiens
MKKRGGAGTTASSVEDKLPRIGRSGEGQFGGTLYQEGRSGRPIYYKLSPPRRGGNGLILSASRTFRNVNDTTIAKKEGKQMNARKMKTDQGKARYRWSDWYKSQTYDEGLYNNE

SEQ ID NO: 980110 - protein, 109 aa, Homo sapiens
TPLAALKRHLCVGPSSASVARRSRLCRAPPSDRRGLPAKRNDRPGCPLNSSVIFLIPCIGIAGWCSSYCLGARTRSARHAPVTSNIDWLLVGYWNGCVFGKYGPSLGLT

SEQ ID NO: 980111 - protein, 115 aa, Homo sapiens
MISALVVMGWQLRLNSESKNYRERNISHTTATSYIYHSIPSRHPDIQIHTQHTPTPYIPTSLIFKHIHTTTTSLIYLPSHPILLQPHPTITTTDTIHSNRAIFLSVPPQLAHPHY

SEQ ID NO: 980112 - protein, 81 aa, Homo sapiens
ISPLMAVCNVVYGSSVSSRSIRDDIARSGIKGLSEGYKFARVAMSLYVPKMNYRHFTMVRIRALAFMRGPSKYFLHRQSQN

SEQ ID NO: 980113 - protein, 135 aa, Homo sapiens
MEFQHRRSEPWAVLGQALGPQECKKLMNVCRIFYDMKVRKMLHTRRNQKRTKAVIFWSQLQTNKCIIVEDRQRDLGGKDVGVTITDPFKHSVLDCFLTTIVRYACMMQALKQKNPENDELLLLVGTKLAPLQHYT

SEQ ID NO: 980114 - protein, 215 aa, Homo sapiens
MLSWSRGPDGSCVPRALLPPPCPPSRGSSSPVTLAQAAAPRACPSSSAIGRVENAYIDNLMADGTCQGRGHRGPTHRTLSPSRSWSRQIPGEKTLQFNNSRPRLRAELSLGMTNRPVFQRLIITVDIVACPPYGRCPEHNVIHGGLPWDHQHGLHDTCGGNFKTIGDTYQYNPSEKCNPRVDRLPTSTFSQVANLCIQPQVLCTDVTAIARVAFR

SEQ ID NO: 980115 - protein, 349 aa, Homo sapiens
MALAGTPGRTERRSVRLLSDQEEHKQLVLDRGPAVIQSRSILVITSTLVGARHLVTLMQYPCTNRNCNELIVMRHFFGRTYGQHVRRGIFGTGPIVPSMCISSLQHVLGSLLNSHEEGYRSPFRKIPRHAACLLVRRAKVVTNELNVGVPCLQVRYQYVYCARKITHSKQSAVARSTPLLGWVRYAPFGEMLDRRTASSCSFSFDIIYRRTGNAMTLEPEEGSLSRSIGGREMLRSIGEATSHQNGRYLTRTASVDLGRNARYRTDSVLEEVAPGTFVLCRICLEKPSEPGKLRWGLTLVKVSNLVPDSDKLAQVEGKARVTTMAKARQHNGAGYREKQRREVDTRRGQ

SEQ ID NO: 980116 - protein, 142 aa, Homo sapiens
MGPLAVLLPSHVVDVRRVVLHAGAVAHLPAHLLWRRRGTLDSIEMTGKTDVAQYSYSIECDIPLQVRRCTSRRVATIQRIFFLRSIVVFVQRDVALARVSNMPRLVGNIDMWPVALGGGITWRKVAPGSLWIAYNHHGCCIF

SEQ ID NO: 980117 - protein, 313 aa, Homo sapiens
AQGAGLERVLEWQEKRIPYSDSTAMLKGTLRCQCLRVTPWSAELCDAIQCAVSTLFMQLIPQELVLYALGPACSGTPLGCALVSTFHQQSSADSLQEGFLLAFMGHRAFCGWLLCCSPRFIPLVGVGSAALASLCSSRDSTDPCVGLHLPVRSRYADFPPGAIRAGPPTLAYRQGSGTLVVVNFMARCAGSVMEKVVLALYLVVMGCARSPGPVPVRSVPNRWLGVSHVCCHQGEEPEVRHLAATEAVHVASFRGELVDYLVLGSWSLRWSGHFPGPGALKACRLALVPRHLLGFPQARAFRGGVCTAPGALG

SEQ ID NO: 980118 - protein, 250 aa, Homo sapiens
MASDVRFCLLGITVCHTQLMRGLILECPDDTSCCPGAKYSKIVCRDPHVVIPLEPISGRRVFLRKSSYRNAELLGNETHVNFKLRRPMSLGIGPRNAMGSVDAMDADADWVTYVASVGVLHVFCGRTLTDCADTDDSRPVLVVAPFVLQSDDLVPIFPRTLAERSFAPVVPLCRRIWPAEEIVWNWPCGHYLRSSLPGHAYLMVGETSHTLQQAEWGIALPMSGMKPKDGSGRNKCRADQVFTTTAGSDG

SEQ ID NO: 980119 - protein, 75 aa, Homo sapiens
MSADCCKCSGPCGATNIRRVQTGVPVPGKIGITPQGLVDAGGERVFQGPTRHRCLLERCRSITHGGGTGTGRERR

SEQ ID NO: 980120 - protein, 82 aa, Homo sapiens
KVGAYMTTLVYKPDTVAFVPISGWNGDNMLEPSANMPRLQMTIGMSPVMGLVLAMWKHQLVEALELAIRTSNSFQLDKPFGA

SEQ ID NO: 980121 - protein, 103 aa, Homo sapiens
MCAMMQQEESIKEKSRRGNVIVIKWRKNKVEFVVVQKAKRDLGLEMLDVTPIMRESLFQKTNLSGGNLTYLLTIHELCQCMLQVTLIVKDLIVQTIIMYNPIW

SEQ ID NO: 980122 - protein, 103 aa, Homo sapiens
MLPTGRRHNSQHVRLNQTTVVITAKLTNMGRTVEIIRGSHILVHFGPPKGSLSLRILLFEQNNFWEVGLGGVRGALLVLKFNTETAGQNEVPNQGQNAAFYNS

SEQ ID NO: 980123 - protein, 287 aa, Homo sapiens
AVAGFVVARVRDTMTARHPCDPTYSLGERVLRIMYFRNRDQASLTQGHENYFHPLGIPHLGSNATLAVYKNADWNTIYAYGDLSFYNMWVNLSRPLGMNSVGAFPAWNHPGGVTTSVRCGTNLLTKATCAAVSDPRKINHQFLAIAVNGSADAYMRSNCALPVGEKTSCLGCLVGSSYCVEAFGPCMDTIGLRTSQDFQIMVSQDPVLEDAGMAYQSWRKARFFCWRTSAMVAVMGMTVWGGPVLGVEEEMILITGGRGMYGQAMRGCTQFDRGPQGIRTVVCLGFP

SEQ ID NO: 980124 - protein, 58 aa, Homo sapiens
MGTGLDYLPYCFAKQGALTQTWGAAGQKTFNLVGGRPMMEPRRAQGRASGGSPKAGPV

SEQ ID NO: 980125 - protein, 95 aa, Homo sapiens
GGFTWNISSSPHNDFAKMENTRPPQLTDGDRFGESRAKAGTDGNTRRRRARILSPELSTIGNKSIQVRMKPRLVKKAKQNIPFQETGKHLPQRLD

SEQ ID NO: 980126 - protein, 96 aa, Homo sapiens
LYHALGRAAPDASMTLGVAVGLGLVLVLTQVLAHSFDQYRNTDPAEKRRPLLHARMRMMSTRADCLDGDRSTGGRATVDMDLTAPIGICMEYLPII

SEQ ID NO: 980127 - protein, 303 aa, Homo sapiens
GFTRNSSSVSPHGYVRAHPQRPIIIRHHEHERIRSAGSVQWGGPPPSSTAQLPKSPYAKLPSSPTSGLPPKASPFKVQTSLLGGIFSFLNQTKVVLKRWTHNERRGFSAPSRQDPRTCANFPTWNQSTQGGTSAWQSDYPGMNVSLLLWNDNGFDDWSSPRQTADSGNRTRNLVPSPRRDPLHSEAFLSGITQHVHILQHNKFTDLAYWNRPTHRTAGVVTLPLPGMGAHLIWIAEPTPRRPHTTRKRTLGYKRKATRPYQPRVLAHPVAAGDLQANSRNVGSALNTGPRRGKADVGRKPART

SEQ ID NO: 980128 - protein, 137 aa, Homo sapiens
ALSSERASVGSQYVLSSPLFLFRTWCGVKQTAVPGIYRSSGGCSSPQKRCLVLPALPVIRDQFHRGELNNKICRREPRLRAPTPKWQKGMENSLGCPLKIPDKQRIRFLKRQERSGLGKAQEKSMSFATDHTNDEKE

SEQ ID NO: 980129 - protein, 245 aa, Homo sapiens
MTNKKRENLGCRSRRSMGKSEKLSQCRRDLGAVTLRDSKYAGELMPKSAKEIPLTRREKKIYLSLKKKASKIGRKEREGWLRVRRTGLTFCVRLCGRIFNPSLTGSYMAYDQCEGLGKYFPRSSKKGFPTFCGPFDSGTHTAKLHVRKPVKKGTKGGAGAWVPPLLTLVFRTQWVYHGGGPKGLGRSPFGPAWQDGVQGVSQDEAIVSLVTSPFRALGNGGDNCMRNPPKVRVGTQIPPGTDSIQ

SEQ ID NO: 980130 - protein, 103 aa, Homo sapiens
  misc_feature (24)..(24): Xaa can be any naturally occurring amino acid
MSSVCNTTCLWIELYTMRSYLFTXTHQLVMVTWGTRPDFCPFPRPPPVPTANSTRYNQITVLIPSSEAVGKSLPLMAGQFIWRNGPGLCVCRLKFPCFINSWN

SEQ ID NO: 980131 - protein, 133 aa, Homo sapiens
EQQRRKRSDTWLGPKLDSEPFAPFSARRRPWKTDYHRVLVRECALRLLGSPVSFPVEHRPDSVPVLMNRPRAESVKEEAQVILHPRKTRIAEYRTERCMSMIHMDVMWADGRVDDELGGRRRELIGTPRENSD

SEQ ID NO: 980132 - protein, 183 aa, Homo sapiens
MKEGERLDVFDIIDKADRDWYDHKVRLIVREMSFLMNVGLGCSWQDNVAGHMWELWSDLVGQQTPKTRTQIAYFQELIPGPHAEQQDKPCDAPAPPKAHANHAEQAAQSHQLKGNPSSHRNRLTQGGACQQKNPGERDEPTQTGSDSTHGPDDNTHGEPYGHDRGQTTRSSNDSHNKTQPSPP

SEQ ID NO: 980133 - protein, 100 aa, Homo sapiens
MRVHCWPCFSYCSDQQSQNGRRSRVSLVAWRLEWVGMRRVLCECPLTGGEHLVGDVGTQVPPLPCCSLSPSLAWISPRGCGSICRFRPELSGFRVYGLAS

SEQ ID NO: 980134 - protein, 185 aa, Homo sapiens
MLTQTNKNHAQGCYNTLPDCNPTTPSHTQRTVDSKPSYSPGCTALSTSCIQPSRQHLHEHKALRDIPPLIASCQDPKGHLRYPIAAYAQLAWTHDPLDYTQHRWPLTTARDNPPLPTSSTQPWIKHQRRPGTPPLTLTLHNVTTPISLPPQRHPPPGPAPHNTPLTRPPQPPSPPPPQPPTQPTR

SEQ ID NO: 980135 - protein, 118 aa, Homo sapiens
  misc_feature (61)..(61): Xaa can be any naturally occurring amino acid
MWGTGLVAVVALWQCVRLVSCGPLSGYATRDRCDHILQSVKCDPSGLDDGSTCKAECSLQXLCNYTIGLAHGISLRTRKYTLLTHTRVTCGIATFSREKARVLQREGSLNSLILGMRH

SEQ ID NO: 980136 - protein, 45 aa, Homo sapiens
MPKNNRGPRKRRHRRRRKRHRANKQEEKREKKTHTRGDWKGERKQ

SEQ ID NO: 980137 - protein, 131 aa, Homo sapiens
YNIHSHRTNHIIISSSKTHLSPPWISSPDVGNSQNACNAGDILPILHPSRLPSPYSSALIYHSAITLGSTKLFYYCTLNVCRKNLVKLLSQAKLNMTSFIDNSFYSEKIPSLRSSTYDSLKPMSKPPSLGR

SEQ ID NO: 980138 - protein, 239 aa, Homo sapiens
MFRKRCHSGTRSSGGVPGIGVSGQTAANPIVVVVMYRFTIIYYYYPTTHIPTSTHTDTYANHNGLRSGGTRRYEGRGTGGRVPGRGRRSRRRGGGRGGPQPTRDKDGGRATRGRRGGGGGQEEREDAGGNARPRTRARTRAREGARGREGEAGERRQRKQGREASESGRSREDRRIRRSEDRGRRPRKTQARARNRRQDDSREERGERAVRERGAREQATQRGRSRAQTNSRHNRATKR

SEQ ID NO: 980139 - protein, 299 aa, Homo sapiens
  misc_feature (221)..(221): Xaa can be any naturally occurring amino acid
  misc_feature (276)..(276): Xaa can be any naturally occurring amino acid
LITAKIQRIIRDYYEHLYAKKIGKPEEMDKFLDTYNLPRLNHEEIQNMNRPVTSNEIEAVIKSLTAKKTLESDGFTAEFYQTFKEELIPILTQTILKNRGEEDYFQIHSMRPVYQNQIPKPDKDTKERRNRTKDRRKEQTRKKDRKEQTERQRERERQTDRKDRKKRTETTERGPTDNILMILMPLKIPPKTIRAITTSVQCRIQITKNQYFFCHRPLQEXVYNSSGHYNTRINHQAGDPRNITGRRRHPGRGSGDNISTPHSRKNDAIIIYSSEXSKHHRLCSITALANTTPDKGRHR

SEQ ID NO: 980140 - protein, 142 aa, Homo sapiens
EAQTRGREDGGHGVRKTVEPSGVLQEIFVRRELAVLDGMRIGDTSEPPTVNESVQLVPQHGLCCYVKCAEILHVDLWDDYYAEVLQTTNQTDVPLIEGSIVVSVSVESTLPLMFIEIPVWISGEKRPKVASRIHCMMSLKIH

SEQ ID NO: 980141 - protein, 121 aa, Homo sapiens
CALETLSGLYTSSVGAGGQICGNGSRDGAVKESGRLAGSVSFRAEPLPAHGPNRRWEMPVPVMWRCCEGGAMGTEVKPGRSVCSNGVEEWVCCYGVSWVPSPAGCANDSTVPGAYRGTFEA

SEQ ID NO: 980142 - protein, 136 aa, Homo sapiens
MAVVLCRSLSVWQQCGRGPSLCMLVSSVTRPGVEDHELADLQVTCVDWVPACWRGRNETSLAERYEAEEQQVSKKRPHLAEGEEDEMCHERKGGVAVSGEDTVVLRNDGMLECSVALGDAAIEPLEDGDPEDDRTA

SEQ ID NO: 980143 - protein, 108 aa, Homo sapiens
MAAFGHICGVEAVAWMHTLSHGFPRWLPDHAIKGLGRAVRNALFLVGPDTRFKNVVSRKWHLRGIVNRRVPTMFPMSKFGVLIDRQLEPIGKGAKCRLTIKEMKRANF

SEQ ID NO: 980144 - protein, 313 aa, Homo sapiens
  misc_feature (109)..(109): Xaa can be any naturally occurring amino acid
MACRSRRRVSTPMNMLNCDDRRITGERDQKSSRPEPYETVMQTTLGGIWIYEAEVGFHSCGMDDESLTHTDNTPHICIIGACLFNCLLLLLEGCSAVIGLSGPLAGITXHAVGKQSRCKPGLVSAVLRTFQTLLAGEQAVCMCPQSQEDWRESAARFIDLCNAWLIGLFYELRSEEGVAYEIGSATTGSHLRVNHALAFLRKAHGASWGWALWFGPPIRVVRSQRGPMGLQATCGELLLATTPEWGGLQSTPAQFRPCPVGAIFSPVARAQNGSPVRNSVVTRFNSGPLVGGALVSLCLFRSCLPLASPPGTK

SEQ ID NO: 980145 - protein, 190 aa, Homo sapiens
MLQYSTIMQQVNYVPFSCSYARAFMAILHIRNGVTIESEGASVIALRRLFGHHTSPASITEYERDRRADVTMFDGRVPYRSKGRLGHLCLTYGTCMTGPEVQLSPTFSSEIDCRERGRDQKERDYRADYARSDKRGPNYNGYIRWRAGKTPGKGSAGGYRQCRNRGPLIKGAAHSRETGFSQTTSRRIFL

SEQ ID NO: 980146 - protein, 161 aa, Homo sapiens
MSRGSRLVQLRAFLLGMHKLIIGAARQIVTRDGRSEERLEGQGVVDLPVLDETLRRLDVVLGASLFLLLSLTVFSMVSVPALHGLGPMLLCDLISLRIYKGVIRAIQKSDEGHPFRAYLESEVGISEELVQKYSHPALGHVNCTIKDLRRLFLVDDVVDSL

SEQ ID NO: 980147 - protein, 314 aa, Homo sapiens
  misc_feature (178)..(178): Xaa can be any naturally occurring amino acid
  misc_feature (300)..(300): Xaa can be any naturally occurring amino acid
ETENDYFKKKKKNSGGPVAPPPLFSGGVSLAWAPNFSPMSFCPEERSLWGGISFLFFHPGEGRLLLLPPRVVGCGRGGPWRILATLSALGGVTRWYPPPPLDSVEMTGGKNGAGLLPNNPGRQIWRYPHIYCCAQSGCLFKAPLEPRGVTHTRVMWGRYQNTCWKSDGIITTRSTWTXGRVHYHPKEMLHQTRCVASIDRTYHPRWELRMNRTKLHRIKKGASKLNKPLKLIHHWESTHTSEATIRHDIMSTQVKMLIDTATSHNNVSAHAKSTHVRNHTTAGNSAPKNYEKYVRQPYQXGKGDRTNPSRIDTR

SEQ ID NO: 980148 - protein, 154 aa, Homo sapiens
MGPDCPSSAGSGQVSLRFWAKVGWLMSMYVCRQMTFDRRLRWDSAIMLWSCGCDTGAVSKSTPMLKVYSVLMVMSPYALIHRLGGATDATHVAQVGLDRLGVGLRAANPPPLGAPTGKGGGRLASLHLPDLRCASEPCDAHFRGHTQSPLQLTG

SEQ ID NO: 980149 - protein, 190 aa, Homo sapiens
ELIICDSLSSKPQLSPPWYHQPMRQPAERLIAGTYFLFYILVGSRSPTHRTGAYTHEDPRLTKHATTQSATAQEPIETPEPNKLNMTAYSKELDIVEGYLFRDSMNDSLKPMSEAPIVWVDRYVDAMILFNVGGYGTNSASNSFSSPVTEQHAYALPCTIAVCGINYNRLQSAYDNTDLKFVIDIFNPAA

SEQ ID NO: 980150 - protein, 178 aa, Homo sapiens
MDTKASVNEPVYISTASAWSSVLDDNARKYGTGYKSVEMNSTLRALFILRGYMQVLEEKLNVVLLMLPFKRMFGDIQGFFWFWAKLSDSVIDNIIKQKKSELVSLGLLIRRITIITDEHRLALHHEATGRPGLTKGYADFFLVRGRKGRDTEGIRSKLVKKLEAKIANVLTLKDSVVG

SEQ ID NO: 980151 - protein, 209 aa, Homo sapiens
MGEVEVDSIAQHRVEQVRVDRYDREKTVEIALECTVIFNGLILCRVAGDVRCVSLMHTVTNLERGYYLRRGDTIVRAVKSPRGSCLEKYGQLLGTISGSTGIIGQVLRSELFGARGSAKEVEFLMRVHKKFLGIINTGESTWTCLMQYRDLELASHKPQVQSMFERLCPNSMWGMSLKLTKNDGLLVTLQRHKVAGAKKQLRGTSLAIS

SEQ ID NO: 980152 - protein, 105 aa, Homo sapiens
MWIFNVLVGDGNSCFSLTPSRYTTMLLRALGKSRNYNTQEQPGKRFITRLMVATVARFERLTCWLEQFFACTHLLAALNRNKHLSPEAFDKRPTTLGSGLQWHLD

SEQ ID NO: 980153 - protein, 49 aa, Homo sapiens
MNQFFRCPSSGSTSSVDVNFAATVDESWGNQSDGKGTSIPAQGCMAETN

SEQ ID NO: 980154 - protein, 68 aa, Homo sapiens
RWYMRSAADPSNESYSNGLVTDLCVGVHCSDRRYKHLWQAGPSRGAKIGTWLCIKDILRPCMGDTMTN

SEQ ID NO: 980155 - protein, 223 aa, Homo sapiens
ALETGPGSRAGAGAGAGRAAEARAAGAQRGALSQAPSREKLPPPLPARRRSPGRSMGRARVAAGAGSPGGQPLRRCALVPAGRSQAGGAPSPDPGAPAGPHSMDAFKGGMSLERCRRGSGAPQHPGHGAASTWPGRDPGSRRRIRQRVVVTPELPEKERGGEPQQHQQTHRVLSSTRPAQDSGTQVEPDRPRRAVIRALGGTRPEPYIKATVATGGRVGLRKV

SEQ ID NO: 980156 - protein, 80 aa, Homo sapiens
SLPVLAAGITILLTDRKLNTTILRYPPEEETPCLYQISILIVAVQPEVNIFILPGFGIISHSVTLLLRNKIEPVGYIGMV

SEQ ID NO: 980157 - protein, 249 aa, Homo sapiens
LDVLWKRTGRPPSGQPLLTGLYHAWLAAVVILGRFLQFHVNPRTIFSSHGNFFNIEFEFSLVAWTCTFFRGLGVAGGVPGYSARGSNWQTPVADVVVGAAVWRGRRRAFLLIEDLNWLLNSQPLPRFCAPRGAERSYVLWLACYQWGGLLRSSQIRSCSPFVLLMAGNRAVLRKYLAMGFWRGPLRWFPGERLMLRLWKSWWSDRHYLPQVTSQVLARSGPLLVTHYGRGVYPVQEPAGVSPPISGLLK

SEQ ID NO: 980158 - protein, 151 aa, Homo sapiens
MHEIDVGDLYCNLYGDLDDLSHNLNDARIRGSNLLVHVGDLEILKEKFSGSGGLCQEFIDEEIFDRVRLGRLKGGYRATWTARLPVEAIRGVWRLRVTTARHCKGAAGRAWERKAPLSEGDPTVRKGGTKEREEAEPASNKKRRRNQQTIN

SEQ ID NO: 980159 - protein, 128 aa, Homo sapiens
MQFPEVTAKHYYRTRPGVDYGQMADFGEQRRVDANVWSNPLESLNGPVGTYRTVYAVEQEQTSKELGPGGLDGLTWVRARGGSRRPRPRQGVTKTADTLEPTGDRTKPANPGENKQTPEKQNKHFRRQ

SEQ ID NO: 980160 - protein, 92 aa, Homo sapiens
MIILIQRESKNQQGEPINKGTADRLPRDTRNEEPPIMRRFKRITNQTRSHHTGRCAGLQGEQTRNMTQTEGTGQETTEHGKTTNNDAPPAPR

SEQ ID NO: 980161 - protein, 135 aa, Homo sapiens
MAVSWNACPYVAARYCATVPHPEKMIIAHRFTTDVAVGRTWKCGPFWWVDGLRSEGVEISRIGFKGNVKSSYFARWTFEMTVRLDVSEGDRGGKCSILHLCECLQNEINPWSMRTSCVDFFGHSDFNFQIVIELG

SEQ ID NO: 980162 - protein, 281 aa, Homo sapiens
MLRLMCPLYKEAGSLELPRDESLQDLESYDWPFGVTVLRWKELVFCMYQSLDCAETEAECHELEVFLDERCYDLLQARIFARPLTVVRGGDPLVRDEMFSLQVLQGVYYGFCAASCKPNGDDVGRIRAGTVGDYPPLPIQETLHVMECCPPARVIACCHWWLIDRALWPLFTCLCLRSCCHGWFLHGAQRAGGGRDETLKALPVIGHPAVHGGIPRTHATSQEGWYRLHAKSTGRYSRAIQQAGRSKPGIATGAQGESAHNKTSTRHPQHGAQKHLDDCVG

SEQ ID NO: 980163 - protein, 73 aa, Homo sapiens
HGSSDFYSSDFGLSWACGPVEGELVRDSPDRLNEILCSLEIQKLGWDDGGYMPCSREISSGGCRREKFGLKAR

SEQ ID NO: 980164 - protein, 106 aa, Homo sapiens
MHATYNWWTESIQYLVVQGLHLNQHESSGESGGQDVLATVGSDFAAAYVNPLLCDLSSIPWFAALTASWSLGHWSKVVSEYCAWENALGKRAGDGKGLRDLHAFSA

SEQ ID NO: 980165 - protein, 303 aa, Homo sapiens
MYIVLKDEQGQDAGGLLREWYMIISREMYTLCMPCPYLTGDRVTYTINPSSHCKPNHLSYFKLSDRMWPKLYMTTVFWSATFTRSFYKHILGHVTSDLPDSARGDALPLTTKVLGLSAATNDGPPNFRAYDPQPIQRTVQVHHEDGRYGEVRRPSKPKGAQQSLANQRENISTEVMHAPGYCPNDDLPARHTGRRGERALTPRPMHSIRTDTKRNHNMTHEIEVPKIGRPPKTEGRQSHRETQSTTQQTGQGGKTGQRLSRRHTPRRQQRTEGRAEEETQNRAKQQTEKTTQQRKKNKFIHDQ

SEQ ID NO: 980166 - protein, 538 aa, Homo sapiens
PLKLGASSGGVTRGLQPLRIEQAAYFSCFGAHLSWTTALMFAPHTDSHRTSRLRTHSTHCSLTQPSHHPDTPHTSLAPPPHRLRSTPAPPRATPATPCATRTRLYPPAPHTPPPLRHLCNNHRSPPPRHHLPHHYTTPARTPLPAPTSHHTLPSAPRRTPHPARTAPPHPHNPLRPHLTRTQARPQHQPHHTSHTLPRKNHPTPPPHPRHTTHLTTGHAPPPTHTPAPPRATLTPPPPNPPPTTHAPTHQHPVPQLTSNLPRHDPPPPLTARPPTPAQHTKPRDPDQPHPRLTPPTPPPHPHAQQLGHHLGTKPTGTSPPHTTTPPPPGPNTTHQPAPPPHCLTPPLRPPRRPPPRAQPPHCDHPAPHNPPRRTHPAPTPSTGAPTLPTPCPPNAAPRTNTQRHPTALSPVAHMVPNYHTHEQTTLSRHSLHHATRRNRGPCGHTHQASVQRHLAPHTRHISKWQTRNHDYDTAYQSTPPPLTLSIRHALAHPATRRQTPPPPRAAHPHQRRPTVPRIRPHHSRAPPTKPPAAHHTPT

SEQ ID NO: 980167 - protein, 154 aa, Homo sapiens
MCVCTAVTVDETLAKQCLPKAVSSMQESSRRNGVPASFMGKSRYDTSVESINLEEVLTGRALHEGDCRLKAMKLFHLDISIDDRLVVLSSSLCVHGGGLHPEVTWSCGATADNPQSRTGEVPRSENTDDLTILIITGRTDNKDGELHTPESQRT

SEQ ID NO: 980168 - protein, 118 aa, Homo sapiens
MSVRRPSAPLDRDWQCLDLAKNLVHIIHPMEDGRRTEEGGSLHGPWVVFAEWSLALHPLIPRVPVCPYPGLLSNVAGQFFHLQLSGSGGMGTRGGIYRWDAPEACQEAGGGKTGDNHR

SEQ ID NO: 980169 - protein, 160 aa, Homo sapiens
MRQAHVRKLCMPHKKGNICHQMQQGITAFQQLQQDHLRHPERTDCDKSLTTINSSYKRRIQESAKQIEAKIITITELLMMWQRLNRALKWLSQLTYTKWEPHQEAERVDGHSAAPSEISGATSGDADRQHKTYCIYGPLLSVTVPGECQEAVNPKCGVVQ

SEQ ID NO: 980170 - protein, 268 aa, Homo sapiens
DRPRCCLRGKECCVNRFQQVESRWGYSGTSDRIRFTVNRRISIVGSWLVWILIHGPTDSSSAIYEIDCNMSTHKQTRGTAMMTGAFSLCIADSITHIPGLIVSKGTHKRSCPNVVLHMPVQHSKVQIPTMAQTDCTTSSACRQPGLQASTRVHSFILVPLAIKEHGTSIERWTPFQKSSFITLNSSIHFTHIFGLNLLPYQSSVQKTSDGPQHKVVRVSLPSSHHCHDTETVSLDADRTPLFTSLLIPHSFASPHTSDKRRRTGNTSP

SEQ ID NO: 980171 - protein, 70 aa, Homo sapiens
GGNAVVTLGPRHEEPLLVTIDLPRRTRGAECVACVENAEDRQMFMYVVEYIEYSTLFCRSKDRDCEGVQL

SEQ ID NO: 980172 - protein, 233 aa, Homo sapiens
EKHWDSTPNEYIQWRYATGEDREELDKNDRMHGDANKKVMEQVFVMMVRSYCEELVVVESLSNLTNTKSLGGRSSVDNTWISRQKLEDMGFGTEDAEVDSAEAAKMGLNRPLTAKEIEKHLTDVGLEAEFATHSRIRGLSGGQKVNACRWCCHVEQAPYVWSLDEPTNYLDRESPRCFGYGIKAYGGGVVLLLNNVITEALCKESGWLRRSLTLLVKGFRYGALNRGNDLRPT

SEQ ID NO: 980173 - protein, 255 aa, Homo sapiens
ESVREGDASSFPSGSGVENTRAGTSSGTTGTISARGRSLYQSRERQNSQDLKKGRARPSMLCPIQAKGLQSIYNAVPYASIPQHLMCTIISADDIIAVKSLPLWIPEVINSPQLARLSNAYAIPAAAGVHNAPYRELLIMTNLGVKREALIARSGTRKLTMRRTPFFHHWNIKPNTYEGDDGPRRIARTTRHAAAVSRQPQDDQLGAQDSAYQTQNQERRSSYIHSKRDSSQGEMDDHETQGNCQHVPQAENSRW

SEQ ID NO: 980174 - protein, 142 aa, Homo sapiens
MRIEPIAENPKFCVPPYHNCHAKVKVSWNKLIGTHTPEEMSVYIPFLVHTVLILTLDTQSLGHLASAVFDRSTLIHSDVKLVTEFYYYLELRPRKTKSMSSFKLPKFLSEQSDARGSLPEEDVAHTTGIWRFQRNRQNRVST

SEQ ID NO: 980175 - protein, 198 aa, Homo sapiens
MIRGREGASREGKMGFPCCTSDHRCVYSDYVLVLSSSNLRMRAPARGLSDEVILHAELSRIAQSQKGSSHRCLMQQGRYQSKSRTITHYDADVVVVDGVRLLILLSGTSYKDLMPHDCGYSSASRVCASDQCPLRKYVDHIIFGTVIQEGENKQCGYERLTFGACFSDKTPAHTVTMALYLCQPSHDHRLLARFASGQ

SEQ ID NO: 980176 - protein, 84 aa, Homo sapiens
YVRKRHHDTAIYNRLLMNRLERLIAWQREDTVTKYYARYQEHMGRHCASCMNKCNFWSGVRCNGLTVEDRPFTITTINLMASDN

SEQ ID NO: 980177 - protein, 271 aa, Homo sapiens
MTARGFLVWVNEEDQLRVISMEKGGNMKEVFRRFCVGLQNALREIFKKSWHTPSCGTRQAWATLLTCRIHSVGTGACVEACYVKLCATCEQSYPKFEEILTRLRRQQEEVQVAWRLAAVGSVFDVSELTDRLGFVRREQVQLVGDGVKLMVELVKKLERRPDPWTYLFPAESRRLAIVANAGTQLGTGQYLKSPGPHNRGTAPCDVSDGSSTHRLEEQSKENRSRAKPRIRHRECPQAFATEAPKDHRGPEQRGGTGKLGQQKPCQQAQGA

SEQ ID NO: 980178 - protein, 390 aa, Homo sapiens
GGVIMATSELSCEVSERDTVSAGTRLLGTTWKDSDNCPTQSPTDEADSPDLTDATTHHDTETLPTHARGHAAHGRSAATASDPSAWTRLGRDSGALPIRAPGERAIAHRTKPTRTWHPTPKTRGEKSYRHDRAIDSHPTMPQAHSGPGPTPTMRRGKPPPGTTTTPNPQPITQRTPRTGPHPRTTHEPTADPRRTPQDLRPHQPTSDRTASDRRSRRQSPRPKPPTLATTSPKHTPTSTPHTHTPSRHKGNTPKPHDHRTTTNNTKDRPHTTRTHATTPAPTRPHTATAHPALQDTHQARHVRTAATTHSQMGITQETSGKSRHSQLYVHTSDNTDTRPQPTPHTPRRQDPTSHNPQAKATPHNQQEHSPYNHTYPKNTTRENHYHNTTE

SEQ ID NO: 980179 - protein, 137 aa, Homo sapiens
MGDNNNGSHLTPNITQENTQHDTHTSQNQCPPMRISRTQHTATSKQSAKTAATPTSGRQLLAKEPKQSTQTHTHTPEHHTHTTQNKHNPTANQHNDSKTTTYTANTTRSQRGHKPHTQTPPRDKTKAGKANPATTIR

SEQ ID NO: 980180 - protein, 283 aa, Homo sapiens
MTSHTFVLRPFPGVHRRRLGTILNQERMTINYVFLTLIYIRIKDKIYGTRTYGHARYVYRQHHSLAKYIPESINTKSDIEFATDTMDQKENTGKNDKKNPQERKRNKLQTAIRTPGPKTPRNTQTNKREIGIKPDTQKNHEKTTAAMEHTSTHNREEQSTATKTRRRIRQRKHGRQANTLASRTQIQHDKARTRKQDKSHTDTHETPLTPTPRNTNSQEIPQTTRRTHIHTNSNHELEMKRNAQRKQNTQEAPRQPRDSASTHQQHPPAKSITSRPRTNESKH

SEQ ID NO: 980181 - protein, 175 aa, Homo sapiens
SVWVSSAAAQNATDSSSEMLNTSTGSGDQPADCIGTVGQGEQNPLTRQTFSIGNAERSGSTKESGSRSMREGSCMMKYGSMPEIRPRRALLEVHKEDVMQHAKRATNSLGPKQVHSDNGTSPCISTPGPWKGLRKTHASDCYETGSLWKVKDRQYQANVKIDQIEDVQRPRVDAI

SEQ ID NO: 980182 - protein, 72 aa, Homo sapiens
MNDGAEARQPGSGDRQANYRVGRQRLDGPTVATSHTNATDSTLDDNATTQTHERTHTRPYYHTTLLPHHPHK

SEQ ID NO: 980183 - protein, 234 aa, Homo sapiens
ALKLGSQFGGVTRGFNMRIDKVLSLYRGPSTPGHGMMFVRQPHRNGVQHFAQLYMSSKLHTTNAQTIDKRHAATKRIRRNATLRTPTLTRGPNQPTNLDTTYENERLNQSTPANQPTAHNQLIRNRARNADADTHTHNTDTRTHDTPTTPRNPQLRQANTNRTRHRTHETRTHTEKHTNTPPHADNNPYPPQTRHEKPTNRTQHPQKANNKHGNNKDNAQETTKNTIEAKVQQN

SEQ ID NO: 980184 - protein, 136 aa, Homo sapiens
DSLSTTSHPEDLLTTTESGESVRGLASLKLPPKAQKPAREEMKTGHIDTLVTMLLATMIHQWTFTSVTAEVLDMAALMHLTDEYLKLYGQDGKFTLRSPNLLTGAKKQSPPATQIPVWENAKATLGSLKDSNHYSL

SEQ ID NO: 980185 - protein, 206 aa, Homo sapiens
ALRDRTSPQLTSVSCRCCVSRRTDRSIMSFRADQISCNLLGEVTFYVACLGRTGECPEDHTLKPGSRDVLRALGHDIPPVQSVKESSGETPGNDTAEVRLRIVEVYDTRCNLAYRWPSAKLSKQLDGPMARPLWKDCAVRRGSKLVVHCLTTCGKAIWRLPLDNRVIVWDTIAALCFHMTQNTLGDVLIHGTMYGKLMLATDPFVL

SEQ ID NO: 980186 - protein, 207 aa, Homo sapiens
MIRHCPFGGKAVVLDGLRTHYVCDTGHPRGTMEIQTQALRRRTGRVLIIAVGGVALLLCTNGGPRCDHGTCRWAVEVPYAVRAGCHCFHSWEFLCPAQDLLVVGPWERKLCLGIRCRESSNMKLSRGRPPVDCPGGDCGKVEIQMGRRKSGKPRLKVDSLREQWSKSPPFFRGDWVVPATAFNEGKEFKNLKGVNIQGNPGIGDLEG

SEQ ID NO: 980187 - protein, 320 aa, Homo sapiens
VPLHSNLGDGNETPSEKKKKRKKGRNNIPYQIQGLKLTWEWLVCKWWWLVDVVALQICFDASASFTQPTIQFTLAVINHLIGGSRPSGRALGNHLAWGAASMLGLQRSKELKWVCTPGGGATGVWKKHLVVTLEFREMTISGYWKEIRALAREYRKFEPTSEGPNQGRMVWETNYRHRTAPEEPGRREPSLVFGATTFRSETPYTWGESPDPTLHQRRGTNTYSVYDKLTYPEKGVTQWGGLEKPALALNHRAWPLFNIGVGLKITYTCPTLFPPRKRVTNGFMGKSGDHMTTWPFHYGTQLDGTGAHHGIPVFAINIDI

SEQ ID NO: 980188 - protein, 217 aa, Homo sapiens
MATSELSCEVSEENCERREAFWAEWKDLTLSTRPEVGLLPAGGGHPETMQTYLPAGASAMVLVLAARPWLLMRMGVLGRGLQEYQLPYQRVLCAAHLQPCQDGAATKEVARGTPTSMLQELLALDDYALVWPVCGRGRRWLEITKSRGPLLVAVSNARLLASYAPCLRSMSQEAQERLRGTVTLGSVVPGLGWAFLAIDCGMGSLWHWLLVVCQSWG

SEQ ID NO: 980189 - protein, 73 aa, Homo sapiens
RQYGCCISGPRIEFSCRRCMIFGCILGWDVLRLCQLPLPSGAKRYLLTDNVVKLKEFQQKKVSCMHVIYSGTK

SEQ ID NO: 980190 - protein, 106 aa, Homo sapiens
MEISPPETGRITSAPQTNMCSPKGARRTLVMDFCIRHTVWQLYQFRLELRLSSCGRQCAWEDTFSQQNVLSIAYRDNYITWHTGSTFNGGRSPQRHRGNNDYGIAR

SEQ ID NO: 980191 - protein, 88 aa, Homo sapiens
QPSTPPSSSPSEEEITFYTKTIFCFSVTLQVNVLSYAGFGTNLPICVTLLPPEKQSNHYGLHRLWIMNVNDYHHWLSERVESGVKHDP

SEQ ID NO: 980192 - protein, 397 aa, Homo sapiens
MANYACGLVDKTGTSCTVAWSQLSAESHRPPCRNCVGKSMVSLQVWHPPMEAFEQADGHVMVAEMIKEHVGSLLGTLETSCMILCAHDALPRSHAGLTVLMCLSVPDKRHENDVVDTSEIHIGKEMQEHPESSADEISGGSNDVKSVFRAASERHPCPWMDEAVSPITCILIVKEDDMTLTAFDTNRGHKTDYNHEGSASLCIGSKPYWTIGRSPFTAIHHWKATPQWRTPSKQNKGMAESSRSRRAGLTVGAGLTAHPESKAPHRGPYYNEKKRTKRAPATPENGDENGEHDSKAPRIDRSDELNNDHGNERRYSIEYTRDKNMHNQRRWQWVARWLKTYDESMKLSTSFVTGRMERHEKSEERNTITYNEKHRDDETVDERDQRRKGDKDNSRSK

SEQ ID NO: 980193 - protein, 301 aa, Homo sapiens
DDWLRYGNPWEKARPEFTLPVHFYGHVEHTSQVPSGWTHRWYWPCPTIRPCLAIATMLSVKRINMAHLCIAGSHAVNGVARIHSEILKKTIFKDFYELEPHKFQNKTNGITPRAGWFCVTPGWQQVIAERIGEDFISDLDQLRKLLSFVDDEAFIRDVAKVKQENKFEVAAYLEREYKVHINPKSLFDIQVKADSRILTTVLQQLMSFNLFHRIKEEPIVLCSDCVDWGKVALVPHGTMVLRIVQASGVYMTCGVAPGFSGPRFWRKAPGTFRSWASSAELLPGLAGACKGDIFSGPATLF

SEQ ID NO: 980194 - protein, 89 aa, Homo sapiens
VAGEDGGGRSTAGVDRGSRMRSEQLPNKDIIIRFLQEQVHMRFWHEHKLLGHIHECGHRTSYFKDHMVVYDAYNLVILKLSVCKGHLIM

SEQ ID NO: 980195 - protein, 73 aa, Homo sapiens
ERVGTVRLRIGDVYVVPSTIERIDMGDVEKGPEDGIIVRCAHCRTVETWEWKGQEWAKSRMVIFVRKRGQAPG

SEQ ID NO: 980196 - protein, 168 aa, Homo sapiens
MWRIDKERLHSLNFPIILRLHPKTKPTAKIHVTIIFIWRKSKLSSTKRFVGLSGSAPTVYSDYPDAYTTMDTSLSSVGSYIALNEGSNIEIIIMIREAFAFGNDKSLIVNEPPVNAGVTILDAGYLLDVRKNRVFDPIYDTKEGSDRDKGGFKATHWAHDVLLKKWLQ

SEQ ID NO: 980197 - protein, 290 aa, Homo sapiens
  misc_feature (211)..(211): Xaa can be any naturally occurring amino acid
MEVTGDAGVPESGEIRSSKAVSAAPRLTAANEHGVASPPASEDLRSKACDILAIDKSLTPVTLVLAEDGTKWDDDDYFLCLPSNTKLVALASEMRNGHTTIQMEVQLGDFPRVLDVDGRRTCGAGFAGGRLWRRQLKEDLSRIILLSEEEPPDACRRSLAQPGSGKLRQSWATVQRVRKPPEVLTRRGSAVGPAVLQRDLQCWEKRWAPTXTPDSQVPWREGDTKTGSHRDQDMQERIIRRGDRAHAILYDEKDKTTQGGTHKRREERHHANKSRKKHKTNNERGHNHDN

SEQ ID NO: 980198 - protein, 279 aa, Homo sapiens
EEQAEPDGTEVADKGSLSPKSETLKILLKALVATLGSRSANDVCHQRLEIVQQAVQCSGCSGQGWSTYKMYLWMVTRINLVKHGTPKQSQVRSTFIGVLGTIAGFEIFEFQLAWSSWCIKFTNEKLLQFFHTTTCIVLEQEEYKERRRLSDVDVCIDFGMDLAMPGSELIEKPMGLFSILEEECLYCLGESSTSFNEQSCYEQHLCEIPINCRIKPEPADRHDLRATSLQIHYAWSPWTTTLRVGWPRTGDPLNETVVGAYPKGWQETLVALLVGHRGP

SEQ ID NO: 980199 - protein, 171 aa, Homo sapiens
MLNFVRIYQVIAEVIVLFTCPLAVDEDAGWSTSLTKDDVVFLIIVILVSIGYVIVVLNCISVVTSTVEHFFHVLTGCSYILFDYLSFFITFTRCVSWVRVLFFRVKALSIWGGLFPGRFLPFTSLAKRFRGIAPWGSFRARAFPCRGFGWGGAMGAPFGVGWSTLCSCVRP

SEQ ID NO: 980200 - protein, 102 aa, Homo sapiens
MACLLDTPIRMSVLFGSNRCTCADYVDWLFDPDPTESSTIGRSVSFIVYTTARTSGKAYHNAAIAHITPFVLYGRMYLCMFVSVLSAIDNCIYPQTLRLFDM

SEQ ID NO: 980201 - protein, 120 aa, Homo sapiens
MLHVNAWGISEAYRSQGGWELSFECLLLYLVPPSVKEYLSKLYGKKSFGFHCRVSLRVCCHLSHTLYYSKCNRFDWEADDTGGRRTCDHTGILDVYSCMNKTSCHLLRPWSLMNGEAICF

SEQ ID NO: 980202 - protein, 155 aa, Homo sapiens
MRCEGNMIARNKSTMQTSSEIRCLGSNYNGSMPLALMPREADFVEKQWEGSLSLDGTSMALCNALGFRGVNSSFSGLCAFYGWGLDHQCGVGAPRDFDLESQWEAGLGLVVLVHSCSWSLCAHDGGAFTPNLWFAIFLPDRVRPWVHPVGLYARG

SEQ ID NO: 980203 - protein, 81 aa, Homo sapiens
MVSLVPLYRFASTSFGLCSLPEGGGATKTTHGSIHTEDAVKVNGKGGDPRPVGRPPQEGGHEKGEHKRTENGGGKNQPGAL

SEQ ID NO: 980204 - protein, 81 aa, Homo sapiens
TLRSDEQGNGMPVPEHKRKDGVLPCVMTQTWHIIGSDSRMLLVLSKISEDADPTLCNREVVSRNYNRCGNGDNAYAMDITP

SEQ ID NO: 980205 - protein, 322 aa, Homo sapiens
GVVQVENENHCDFVKLREMLIRVNMEDLREQTHSRHYELVPTRCRACERDGVHGTLTLTSETLLVFRQTYEAVEGMTFLGKLQTELEGRNETNVVMRVKEKEAELTEAEKELHEKLDLLKRTHPPNEQEESGETNNEETLEEEVKQPSRRGKQRLSRLQSQAQQLWGPANQRRTRIRNTLLLYVTILLNEPYSLLLVMSITRAGASVRTCRGRVHLIQPSTPVSLKVWVTILSLWCVLVNGCLVLLEVTYSPEWLSYLIKQRAVTRTWPTTLVGPCDFCPRRRRGEQGHMGPGHVWALAAEPPGSHLVWGTFGALFPRLSFG

SEQ ID NO: 980206 - protein, 103 aa, Homo sapiens
MVMGQMVFAEFRDNEWRESSKGLQTSEEKTIREASRVLIRSGKWPIIRCMLNFVYVMTIHLERSELDEEVDELIMGSRYGGDGHVNYEELFKDDSEVKSVQKC

SEQ ID NO: 980207 - protein, 155 aa, Homo sapiens
MVFGERPFVPTALDCMTCRKEHVDVRKDTAMVGYAQCTSWILMTRVVGQRYGLSLDGFRAEVLDFRALGIGLRELLGGISIGRGFAHCGCLLGMQSDEASLGWLALGLVRMAILGFLIPLGEVAFVIVCRGTTVGAGFGSARGYLAEVALSVGVR

SEQ ID NO: 980208 - protein, 95 aa, Homo sapiens
RVVSTQRAHYGGGCSGFVFCSSSFANASRSLVSLPPVVSVSTPNTMPSIKLQSSDGEITWKLMWKVAKQSVTIKTMLEQIGNGLMKEMMTQFLYH

SEQ ID NO: 980209 - protein, 138 aa, Homo sapiens
MRLLIPMQIICLSSTYNFGPSHTFQFHFRQSFLGSSSGAQLNAGWGTMVPCPHELLQMPLSLFSQRAWVLQCLDTWKHAPVNQGTWFRTTSRESTRPVAVKFHLGGGRKPLLKLELPFRGAGTVRVPCGPAQGFWGWP

SEQ ID NO: 980210 - protein, 169 aa, Homo sapiens
MSVGGAARHPPELEEQERVDYSVTLIREMSRGENDGGVGCSPPTKKKHRRGGGNPRGVINKHSTPRWGFRGPIYSVGDNNKRRETLPNVRSPYNNIKISPPAAGALVKPTTNRNSNTINNRTYKAKTKINKIHTRTPKTYKYEYIYKLELLQTGTTKHSTYHTLNSHYH

SEQ ID NO: 980211 - protein, 180 aa, Homo sapiens
GILNADNILAAMSRSETKLGSGYSLCLGLEAIQSIRAKTIHVFDLNGKIHVEEHMGRSQSFALNLAECCTGCTIASGHGKKYACTEITWNEETVAYKVVRTARDSSVKPNDLGLVYSLVLHVVILPPLMNMDVSCACHDVDTTVCTMVRADPNGNGSSWDAETIVKPCIHEYALEDDSGI

SEQ ID NO: 980212 - protein, 184 aa, Homo sapiens
MQNITSYHTDSVFKHTTSYYTTHYGRVQETSTIYGYTSSHSPDIVHTLNIYSHKLLNYHQMASFSDKWPLSIKGTCIASEPNDTATPRTTHLTTTKHDSQLADHHDGHKGKTTTEPLQGAHNTAPWLHPIDRTTPARAWNYPDHHTPRTQPPPTRDTRHARSTHSNTDNRNNEHTSTPTTTHTA

SEQ ID NO: 980213 - protein, 118 aa, Homo sapiens
RDNELHGSWFQSHGAIQAEFCVVRETAINELARHKQHVCLATSPSAHSCIRRSIGPGQHHRKWSDHPHCRGYVSTFRTSNSEARIPKDSMLVRARALADLRVIYMGVLLTCEEIQAWR

SEQ ID NO: 980214 - protein, 334 aa, Homo sapiens
IVTFHLNSRAVLCLIALIVTCCIFFHLYFDKVDAVDAHMLAETRWEASSALLLRLAAQKLLDSDYYTKGTGDSTPTSSNNLGITGLTNDNTTGFKWFPPMGSGTYWAFGAYGEHRKYSLKPVGNFLDTYGLIQTFPERNRLAGRINEPLPANIWVPKAGLSHAGPIKDPIIYPIPKETARVGDVDTPGTFHFGTTPVAHPGGPTPVMIKRRNVNTPAKTHHRAPTEKFTMMPCIESSVGSIQLGGGRIYHYPVHYSGLLVSSVVPMNYKAQIYTIASLRSRVQKSVRTPCGKERHSQQGLGNIPCNTGGGMETSNLPFCYTETPRSSRIVLPQV

SEQ ID NO: 980215 - protein, 345 aa, Homo sapiens
MQHQQNPLHCVLREGTIISVKQTVKASSIMAKAIHQSDRTQEQTRPHNSKSRQPHGQKGALPSPRISNKHSTRSMDTRTRDIFHHSIHRSDNPSQKGTLCTTSGSIIGNGTTVQDASRKERHGSHYIRAWVNTLGSQNRNNKSSIGHSKEEGAIFTSDEHFKQAKRGKEKTQKEKWPTRTSNDKYGPSQGKKGTVTQGITVTQITREPSYQRIGTKQLTRPGVPYNSKHTETHGVDNRGHPTWGSGRLEHNYPGSTRETPPCPYDTTQQRRDNDAQVTTCKLHTSESQVGEKKGSHKQAKAPVNREPPPRQPGQPQTTKHNNTHTTNQIHHKERVKTRTRENTRK

SEQ ID NO: 980216 - protein, 181 aa, Homo sapiens
GRSVEFFLGGSVGSSSSRVTYDKAEYTAGVRHSIAVRLSLREGPNIQDFKEWLHYSCASMYTTLMAFLFDHRTNLEMTPFACAAGDECSCRNRSCIEFAAFWITGLDPGIQYNVINCVAVMRGQERNEDLSREMQMNTCSENPFSLTVGTRGRYDSLCRVKGGDDIGRNYRSVAHVLAIDT

SEQ ID NO: 980217 - protein, 95 aa, Homo sapiens
AYKAAAMGHVVQLGIALPSELGNPGCDGATIPIIGRMNTFDGGFSYVGLCRNLIFPRTLVTHWSYVIDQNAWRLQPDVTDPMKRPMSSNASMHHS

SEQ ID NO: 980218 - protein, 147 aa, Homo sapiens
DRRTVGVRPEERQVGGVSCVGRSHCGNLACKCRKVVEKKLGFTLLHRSTGSAYADSGEIMHVDLYGVIDKKSCSVWVCQKEEIEGHRGALALVIVTKRLTVQCIWEACCACESQYKVSPKDGFYRAWLVTLGVPKAEETSRTTDAIM

SEQ ID NO: 980219 - protein, 208 aa, Homo sapiens
MSTENLSTQSPSTSDRRCRGLLSSFSFLQMQGSISRHWSDYKLCWVQHTGSKIALALTAVLIYYLQSNSLYTHRRICARLHSPTRHHARPGLTRSAHPSPTSEHYRKTLATTRPHTDRTQPEISHAAPPRAVRAPDIANTGVHNPETPPSVTTRTHQRRHRHHIRTTLLTDPIDGDQVAQQQPKTIARQLQPYTTTRHPDTTRSPAHT

SEQ ID NO: 980220 - protein, 159 aa, Homo sapiens
MAWKPHCVGISTLCRVSNRERGYLLSNRGRFPFKHEDKGMALGSNLQRVCVVGRPSVPMSTGHEGEIAVGTFTECRTCPPCAFGTFCACRSGCTRERGAPVYRVQVGLNVFQSCSTDSTERAERSTKSSTVRRFCVITTDAVTVRSPRIYAFAVASQRE

SEQ ID NO: 980221 - protein, 114 aa, Homo sapiens
MSTRGLAVVAKEIGARNQAGGLPPKKKTPGGPRERLGTKPQRGSQGLKGPHRLSRRRRYMPSRGGKTTTRTPLRQISSRRTFDRRQQISTKSPPAESAKDLVGATNTITINLAP

SEQ ID NO: 980222 - protein, 90 aa, Homo sapiens
CNAEAGGKMVADVPPRDVDRGDSWAREQMLTRIGHSLYSCLHVEPLVIIRILADTINSIYDTFNICWYSTRLMKGPTCDYRPYYTALLLE

SEQ ID NO: 980223 - protein, 92 aa, Homo sapiens
DDLRRESSGFPASTVLVTEPERYDSPPPERTDPETSPPSPLHRNPRTSPKDPELYLKYAAMTDRDPPSQVQPEHTTRTQRPANQPPDQHWRL

SEQ ID NO: 980224 - protein, 107 aa, Homo sapiens
MLLATLWCKDEMRRRSGSPDGRSSKTPHGCINYEALAPGNVSVYLNWSSQDASIVYGTTGWKLILMHTHEMNSPDLFTISSGKQSNLEVKTEQVPEFMPSPGSLNDS

SEQ ID NO: 980225 - protein, 221 aa, Homo sapiens
LILTARASQLNETNDNNLRTYVDLDGLSTTPDLMAPVSAKKDNTKVILHVHYLMGGCTVSARIDRNRIAVKVIEISIHADFAEYMYRIVVPKAAIVARHTYLANGQTKVLTQKLSSVRGNHMISGNMRIMAVKRAYRGSEDQAILSWDCKHPYELEYSYTDLCQPYLDPMKVILELAPGKLEADQVKSQKNHPAWHRPNQMKQRWEELTHPDTQKDHPEKG

SEQ ID NO: 980226 - protein, 110 aa, Homo sapiens
  misc_feature (42)..(42): Xaa can be any naturally occurring amino acid
LHIDDDDKSGFDYEMETREDAMAMVDHSRKISSVSDSKGEMXMKVDPVLYEHHNRNWASCRTIQTDEARCYMKNKHYCPRKKYLTLRKMAMESPKDDESTPKRDGVRRND

SEQ ID NO: 980227 - protein, 187 aa, Homo sapiens
MVVSYDMNGFLGLICVSTTYIFTVLRIDVDTDHIIDSPLTIIIGLIPNLAVERYLRLDIGHNSYVKQYESDLAAVLLSPRMQSFFPPVGWLTGVVGAKSSLDIVLDDRKYVVAQFHVCPMQWERYSRSHRQGSFTVVPYSRGYTLVPETEPKAMFARHIHGCKVYTWFPEIFSAMRNAPGDSDYPDA

SEQ ID NO: 980228 - protein, 159 aa, Homo sapiens
MGHSIAFKTVPARIRLLGSHLDERWVRCTTLCKASRCMHYRHGVLTGGEESEKLYDSRCRYCSRSTLLSRLIGGIANDFVIGRHSHGGLSSKKPGVLDRTYKSWWSIYCKNARWADISRMFGLTCPILQFSERACPGLGMPPVKGVLSNLCSHAVTVAI

SEQ ID NO: 980229 - protein, 105 aa, Homo sapiens
MAIPRKAKETAEEHPRDGGKEEIVWTAAQSPKKTLSLVTTVRQTDGRRHGGQYHVRKGETTPEWRIEDIGDLLEITLGAAASYENGQMMSESPMKETLGTFGPQL

SEQ ID NO: 980230 - protein, 142 aa, Homo sapiens
MLRFPDARIGAGSRRCGAPNGLCLLAYQGSHKTGGDRALDLGPHALRRFLIPAASRRVMFLTAPVSGACDVFILFQIVNHGTERVSFILCKGPVLARGVVLVVGCVLFPIYGPARVRMYYLVSPHYCEEGLGPSWYTSVPQL

SEQ ID NO: 980231 - protein, 144 aa, Homo sapiens
SYFYGGLVALDASMLMEMKQNSPCPKKKKKKKKKFVGRPQKVKTICGGTERPPRKGTRMKPRRHRRCTTKRTNADAKNQKRQGKIKQEKKTGPERKTPTRLENNHEREDNEKKKEKHTKKRDVQQEETSESIQNRNPHNSRKKK

SEQ ID NO: 980232 - protein, 286 aa, Homo sapiens
ADRILTMISELRARLEALKTPGTWNRITGSRLACSGFTGLIPQCRLMYLVILKRHIYLLPSGRINVSGLDQPLNLDYWLTSIHEAVTKIHVKETHNRPVPPKVVLCHVCALPAHDLHVHIHGLETLAGLKGLRLVRAASCVIAGPTSEEEHPLDDRSLGRRGIRASWRSKQNSRFLNEGHKPCSTSILENIRSLVPLTEGGVFVCGRHVASDVVSTLVLMLVPRDSSWSDRRPRVNGGVRPAAKFSSAPEGSGPPGLLAGGPEPRVVLGTGGDGLHEGGVIYCHFP

SEQ ID NO: 980233 - protein, 125 aa, Homo sapiens
MCHARIFSSSSSLVVAEHLRFPSGWPTILRPTLRGNRRLGSDHYPWSAYMAACSPAAIFPGVRYARGSACTIEDFCGREMSCGRVCELHRRAFWCVDQGFFPDCEALVPLQNLGRLSSTFFGKRG

SEQ ID NO: 980234 - protein, 94 aa, Homo sapiens
MWDATPPYERSKTSVYLYSRHYWRDLNPQRRLQGSHGCMTFRHCSYSANTVGGLPLKIKRTVAGDPKKQRPSQTPVHRGSQNPAALKQGCRIKN

SEQ ID NO: 980235 - protein, 302 aa, Homo sapiens
  misc_feature (153)..(153): Xaa can be any naturally occurring amino acid
  misc_feature (225)..(225): Xaa can be any naturally occurring amino acid
MPVYQAVVRITVEVCSWAVEESWHYRFVYFFATGLSELNTITYEVLSGGSLQYWDGSRRVNVIPIASGLADVDIMVSYARCAYEAGIALYAFLEYEVWVMTLASWRRICMKENCERYRRVGDAEIQYQVRGPVGLNGINLTGAISKIRLKGFXACDHVLSVSTFWSLLDKANRFGVRQMPLEWWMTRARTSMTQGRIRVIHSPRSSGLTKAQTKWNDSWSGRDAXMGQIGSRGGKRETGVRQAKSEWPGATDTTTGCGGRPGKTRTSGAAHAAPDVVPRTRDPGAQTNTGPPNTGGPAQAGY

SEQ ID NO: 980236 - protein, 179 aa, Homo sapiens
MRTHELDGTGDRQAPRYTELPCVMAELQEEGNWLLRAYMSKCTTAVAEAQRAVYPVREIIHELQRKISLNTPWMAKLVIQQGNRFTTDEEQFSDGESEIQQKYKARSGKAFQCSAHGGNQGSGMKTVSRLRTTHLAAVKHCQKAETQGDKLGAPMRKFSGARCTRQQASAGVDAERETH

SEQ ID NO: 980237 - protein, 286 aa, Homo sapiens
GLGLGLVEGAAARLSDWALACFGALRLTLGVGGCGGDSSKAPPPSPALNEPTMDYGFQRLQKVIPSVFSFSLSNMISAVKQRSGLGPPWWPPKVSNTGCPRAPPERGSRTSLGEDSDKFHCSSRGHSEAWNTPNYGLQLFPWSPDCRFPLGFTAKPGWWHQNRCRVRAIGRTSSVSLTGEEAGTNDQASRKQPTRLLYASPGKGEEEAQHVRMAHGRTAIAGTLRDQANGGAGPRTMAGRPAVKRDMHGTWDREPGRPKPVAATRPATLYRGQMNTREAKWRPPET

SEQ ID NO: 980238 - protein, 104 aa, Homo sapiens
IERRKEVESILKKNSDGYGMVKSAGKYSPQGSSSLNTRSARHPQHEEHERHEERGHILCRISESFPSISAALSFAGHSDGDLYGRRLTTSTSTFDEELESDLVR

SEQ ID NO: 980239 - protein, 115 aa, Homo sapiens
MEQDKCQILQRKDTPAQAHDSKTHATKKQHTHNTNSAHHRAEHKAPIQHMQAEGATHTHMRKHSCTERTSQTDDRTDKTNTTDSDQRQKTQTQYESENAQHRPDTGIATESTSNG

SEQ ID NO: 980240 - protein, 222 aa, Homo sapiens
MGSLTRGSTRGARILNLRPGGVDTTRKTHETDEETSKQDTEWRSSNEEKQRQEETTQNKPRDSEDNEDKVAEDRTEQNTTRQADEYVKHREQGRDIIKSGRNQKEEGKRGEEEEGRERKTETKGRTGSRTTHNNDEGKDKNRHREKKHTEDHKKKKTRYGNRKSKKGERKEDEEKRHNEREKRGQEQEEDSETTPGEKQQTRKEARKRERQETEQGKKKREK

SEQ ID NO: 980241 - protein, 110 aa, Homo sapiens
MESRSVAQAGVQWHDLGSLQPPPPGFKRLSSLSLLGSCNHRHVPPCPANFRIFSRDWRNGESAVNPGRQRSAVSRRSRHYTPAVGDSISKKKKKENINRESFVGAAFGRF

SEQ ID NO: 980242 - protein, 157 aa, Homo sapiens
FRMRLLLLLLVAGLDGPEQRPRPIWVGAQEEIKDARTPGGRVRLSSRLVLPRGYRRVSDGVECGVIRPGDPDIRIEGENYLPVNLVYRHCKHLSVSVFKPSINRVDNCVARILCAFLWMKAVRIWQGGHDVKVDACMMVCFLRQHDGRTSVCRIRCV

SEQ ID NO: 980243 - protein, 91 aa, Homo sapiens
MAERPHAGTRTSKNDNTRDHGQADRHKKKSNTEPQTEKRTDIKDKTQYSQRTTTKRCAHKATNNGRNRRNQKQETNNDQKTKKQKAQRRKH

SEQ ID NO: 980244 - protein, 112 aa, Homo sapiens
MDCAATWGLDRRSGTNCLGGTWKAHADLGSVPGLEPPHEDDTSFLRTARLRRRFCTASRGLGRNEFAAPEWCICAPSRVEGGTSVLSNEWGDLARSLQDWAHRGNELDGNAQ

SEQ ID NO: 980245 - protein, 126 aa, Homo sapiens
SLRPISCLDIHLQSNTGPTVKEEVLYRQAGPSLETIRRPFPNSKRVSWMTLENPFSGLLKIPRADVTSFLRQDVTLGIYNQSPSHKGFRDVRLGSPVTISSVVVQETGPNEDQRKSSLDLIAQYRD

SEQ ID NO: 980246 - protein, 229 aa, Homo sapiens
MGTTRGTTTGAVGVSPPNRKPRGEPPGVLQDTSQGRGPGGTTLRVLTAGRPERRSPRLTYTPRRGGVYPSTAKDNGTGLEDGKKQLEDRPSAAMNAVLPSHSVSLPHQMRLFPLRQKEGHLMEIQGERRHWWGEKLDWARETVEQKATVTKCGAGWRDRVTGGQGRVQGSQLWPPEAARDHETGKGGGTEPGGHSCRGKAIGNKIRRAQRGEKAETRNRGADSEGRRHS

SEQ ID NO: 980247 - protein, 297 aa, Homo sapiens
RARGGGGGPAEAIRAAAAERGAAPAAPALVRLGPGGRAISPPSASARGGGEACARPIGPDRENPSPFPGAPARRHAARNSGLCLRGNKVKDPRYPSGQTEGKNGPQGGDGPNHKKDSKKASLARKGTNSRCLTAGGLAAPGRGVAWQGRLAWGTTSGLKRATQLCGTGRSAGASCAICLQGGLLTGEKGEREIKGTPDEGRAIVTQTSTVLVGGKGQTQQGGDGHLRTSTALERAGQTVRTSYLGGPGLVATRGLPPGGESWHKPAGEPRFKEGRTTLPVEGGDDTAAVVIWTFRLP

SEQ ID NO: 980248 - protein, 174 aa, Homo sapiens
DCATCISSLGQQSETPVSKKKKKKKKKNLVCGGGLGPPAKKRFTRTHIRGVGARAGPQGRGKGKSGHTKAVIPHREKTLRGPEKQNGARGEFPTPKYTKKPPRGGTNTEHRVLCDNKYPRKRGEISERAPKSQGGTTLNIQHTGERVHKKGETLQKNILTTIYTPPGTPGGGRG

SEQ ID NO: 980249 - protein, 197 aa, Homo sapiens
LDRGGRVPLPIEGRKEGVYIKVDKSVPEPADEVPTPGDGILEHDPFFCPPTEAPDRDFLVDALVTLLVPLLVALLLTLLLAYVMCCRREEKAEERPGTSDIQMVHHCTIHGNTEELRQMAASREVPRQLSTLPMFNVHTGERLPPRVNSARCPSFWTSTDSQQWFQVQPEFILPSLSTPRVDIPLVIPAPGPLENQV

SEQ ID NO: 980250 - protein, 381 aa, Homo sapiens
MGTRPRRVADHPGGVGVRYQIQPILALMPHVLGIRVLRIEVPVPNWIARMEEVREPKEGLTHRWYHLTSVKVKAAWGPCHAVVSEPFVLQAIRDCTLNALSPERYLRDIDLQTRQTPVPYRTIHDLQWGLAAMHQTIMTFYGLHQGLLVASRLNQSIEAGANAIMRITLHCTHETLSMLAQMVRAALDWAWKAPGRQRALANCWGPLSSRWEKGSDRASGEGGRATKAQAQRGAPGGPNGPERSKTDTKGTRCTSGADMTSANPVLPDPWAACGCDTSTGRRPCDARPRQPGSPHTGPAMRNKVRRSTSRDESDRALAEPQIQHKSGPHSKRKRDERKGRERGGPHKSAGTETDAVGRSRTQPRRQRRGAAGTDEPTERHQ

SEQ ID NO: 980251 - protein, 117 aa, Homo sapiens
MTHTITCLSYSKTQPMNPNSVPSQPSYMTSRAIHVIPLAFHYAPHIEAYSPITCNPISQVIGADVSSRKHNTKAITHHLSNRRRFRLAGDETLVYYLRRFFPFAGILLMRLYAIFQT

SEQ ID NO: 980252 - protein, 125 aa, Homo sapiens
GEDWMRLQGSEAVELCERSTRISGEILQAITMSIDTGVTLPSYEEMTQASKFIRCAKEAPCRTRCNSGFGQQVLHMGDIDAEELGEIAQECPFHRDPHAVWEGQCACGRSNECGMGYAMYREYVE

SEQ ID NO: 980253 - protein, 157 aa, Homo sapiens
IAPLHSSLGDRERLSQKKKKKKKNFFGRGLGLGKRFLNPSGWARGPRLVLGVTCVVHRRVPWGRTRGPCTRWLWDFSHQFKTSPGGHPEGSLRQISREGGSRGAAIHGETLLQRGRLKGRRPGNTQNFNAPGPVGSHTNEKEEQQKTIHRNDQNKRT

SEQ ID NO: 980254 - protein, 73 aa, Homo sapiens
MGDAVACKSLSIDLTEFSPIHRMSFIYSYMIEAHLVDLMYTFILTISQVLGMTLCAVIQSTTKHYLNDLYDSS

SEQ ID NO: 980255 - protein, 207 aa, Homo sapiens
MRPWQGAQVHRALQQVLPRPRVSMKQFLDFGSSNAVEKTSFTFLRQGAACERGNYHEEIKLFPDRVPEPHPSVQLVAELVCPGSLRDPHGVPLDRGIARTNRTLEPVSLTPVVQPFGKPGTTARVLPNHWQQRLCLRYKDTYGGMTPFQTRNIKYFRARGSTSADLHPECFNQTRTPSFWWEDQPANSKHEALTPNGRSEVVKCYAW

SEQ ID NO: 980256 - protein, 128 aa, Homo sapiens
GSLCELTTLESANFPRCRFGGWNCGLESRVVASSSIQCSSSQLVKKTIDFFVTQLHLRACQKPDTIGDTGSSIKALTGMAEFSDMTTCFEEDEADVAELIKTPTERPAYLLVWPDEYMTGKEYEEREI

SEQ ID NO: 980257 - protein, 295 aa, Homo sapiens
GGGGNGAPRGPPHGSAGVQLRLTVTSNSGTQAILPPQPLEQSEAGVEPPHQSNLGIFGRDRVPLCGPGGPRTLGLKQFLGLLKFGHNGALTQCVAPAQKRALKLRVNPPHWVHQHLVKRKHKKDKAKEKLCVGGHMRRPREKEFSNTNRWGGAGPIRYKNTAPTRGSNRGNTAGKKRGGGFSPPKKQAGGGRRLLNTPRGVCEAGMEPFYRPNSGKKTLPAGGGNTRRRKQSRTKQEKDRTSKDTNTHQNEREQAKQHTRQQAKQQDRKVNATQKHRQRNTSEDTERRHDRDTCM

SEQ ID NO: 980258 - protein, 164 aa, Homo sapiens
MQSMHTTLSLGEQAKDSHNNNIINEEEKPVLHTNMTGLEKPCVFPKVQSHFDLNIGSYAGMGPGVGHQAGIPALGKAKGAGHRHRGRRQPGHMGNPVDKQNSERNHLGRQPQRQTARTRKRRDKTRRRESDHNNAEAHPKGYCDRKPQKEASKTKRAHDDLDGA

SEQ ID NO: 980259 - protein, 281 aa, Homo sapiens
MGCRECEREAPRAVFLDLPFAWFVAPLGPRALPPAGRKFALCSCATACGWNALSAAQLAGKMKLSLVARVLVVLKRGAGRGGGQRRSDVGARVAPGIRPRGGPHYTFSGGRRCPKNGAGWGESSAKRIQGTSTESKRPSLMVRLSTSVKGEHGPDWGRGPPKEHQVHHSKTRRNKGPCGRPKGVSSAARWNWTRSVPGRTSRFWPVHGWVETRNTRPYFPVDTGGCATQENWPLKKISARVPLKERTVKLIGKEVPMRCQCPAYFSVPRPDTKRWNMRHML

SEQ ID NO: 980260 - protein, 115 aa, Homo sapiens
MLASLGLHDRKSISLERSQVAVLQFLADVESRVGKCVDKGQKSGRKGRYGQGERRRIEWNVILCFPFVNWVEHEDCPRWLRGVVSITRGPAFLLGVTQLQGATKGDHDALNHDDP

SEQ ID NO: 980261 - protein, 265 aa, Homo sapiens
ISNFSSILLKLFNLCKLTCSGPAVTDGLCLVIPSTVGCQCGWTHCDVHEFETEPDANMVNIRVSTKNTKFIRGVVACSCNPMHSLGDALSAWRNCLNLGGSRLQLSPSIVPLLSSLGRARGDSGLHNKPKKADVPVPTVQGGQKRQAGYGPYNSNKGEAQEFYRAGPLFHITLDKPRVTLSCSRVNISDPVFPTIRRKGAGASTVVKGEKSSSCFVVAPVGIPSAEVPQGVVSSGDDHVDDNFGPGKWITTHFFGGLRECVGAAT

SEQ ID NO: 980262 - protein, 163 aa, Homo sapiens
MAEHRRNSTNVVKLNERPETQREKSTAFQRETIEQEKQAGEIVMRRAPHNIALVHFPPKALPFPYFYFTILGVVVKRSVHDWPKPTGGGTSEALLTFDLWWSWRPPFFTTFTRGNIPMEPQAGKATRADPRGPLIIPTGTVGTLTPLSIFPLVAIWGPNRWCK

SEQ ID NO: 980263 - protein, 102 aa, Homo sapiens
  misc_feature (78)..(78): Xaa can be any naturally occurring amino acid
MLASALLFRRTVPRLFVMFEQCGQTGRYVDCYGNDHHRRDASLLIIIPSRRVPRCPQLASRHVSRCRKGGACGISASXIFAICPLSSAPVSGPLHILRSVHI

SEQ ID NO: 980264 - protein, 213 aa, Homo sapiens
MEKTFMSCTVAWLSSQPVIPGLWEGRGGQDCEVRSSRPALANIVKPRTLLQDKTNNTFRWGIGRQGAVDPSKLAQAQGSQMRPRSEPLTSSRVDNRRDHVQQKHETTQTKKSVAPRPRSQPNNGGAAPREIDTAQATKRPAHAGCIPQKAGDRCKLGSGLLQPQHHPTRKKSKAQSEVPYSHLSKNKQESAQHNQSDEGPDNRQIRKHKARAK

SEQ ID NO: 980265 - protein, 303 aa, Homo sapiens
MAPEEPKGEQLHETTKSRNSYYPTAGGKKTNTTTKQHTNATTKDECRTRQKSNNDEGGGREREGRERRTDRKRREHERKAQTEDRAGTQSGKRAKRNTSSEARDRQRREREQAARKARKPRRDDADGSGGEELKDSNGRKPQENSGLSNADQTTRGPAPRTGSRVEADEERRKRGSRRTAINNTKEQTTRERGTDGKRRRRTARQEHKTVKRQEEQRRHEEKRPTDSERSTAERRQREKRRRNGDSDDAPSRRECSNNRQETRRRLGHTPETAREKREGKERERAKTRDRETRQTERRQRRGE

SEQ ID NO: 980266 - protein, 447 aa, Homo sapiens
MVHLTWSLQGAWGIATCEVTFDLQGVPCIFLIALSLRYTFGLVQSKLFPFYFHGLHGLCRFINLCILAFTSMLWASAHILCRASQLYLAVLEPYAVPLVNARLAGKHLDLSCHVGLQPLEKDEAGVGRTREHQGAGTYGSARKGSQVRSFRRILPRAWLGHLGPVVVRDRLSKACPEIEPIIARHKTVSRRTQKNCVAEETMAPLGMVIVGVSHVLCLASRAPVVAAEGEAAEDETEGTNGQEAAGRQRGETRNEQEDETDREEEEKRRTRKSAERTRQERRVTQRQGSEAKRREAKQQTEEKRRKRQASRETGKDEREGRTEQTEKKNKKEESTRQDKRQSTTETARAENDQRRRTQKLASKQDRHRKENNSTHGKTQRRHANREDREERQQSRSHHRKRTEGKRDKSRQRQHRRKERSRTTDSQTEQNKQDTNEGKKSRTSPNKK

SEQ ID NO: 980267 - protein, 349 aa, Homo sapiens
EAKMAVLSAPGLRGYSGSLVCAPAWAWLCRHEVSIRAVATDGPSSTQPALPKARARGSQNPASRGEYSGGQRLNDLRKLGARRKILCGPIDLSAMDLVAPVSIDGTIGKAPRYGHCDPAIWEVDDYPGSTDTVRTRSRTGPWTRMGHGNTHQPKQKNGAHKRCIPDNEGIKQTQEVTRKPARHTSRNPHSGQACSPNREEAGQKNQIITKHGVARRGARRHRNMSGHWNINDPQGDGPTINGQRALETTGHSCSVQRTNQAGTERTEDQGPGRRRSEAPTGPVRAGPKQDMSPVRVKYQRPGRAKRQQTEWQRRQERTRKREGRDSCERRGNHRGVASRHTETREQRGK

SEQ ID NO: 980268 - protein, 439 aa, Homo sapiens
MRNVFMFRGRFYPFYQFYMTDFQEVPDRLPALQFENFANKQRSTRSWFNRIPLVAGTGPRWRFRPGPNYKRGGGAPRWREESVVVYTSNRHDIFASFFSFSEQTEKTEHSERIATERVERARNTMDSTKYARRQGERRSKAGARTPGRPRGQIAREQERETNEEKTKETSERTEPTAHRQRSRASKHHSKRQENSRTKEDPTAREEKRQRRTRHRSDRRQHTGRTTRPPATAHAERARGRRDRESARKRRNASKQTQRRTRPRRGEEAEPDDTKNGRAEKNRKKQSKTDPKGRRGARRQTDEEESTSRQTNRPTKPTTTKPHTHTQTAQQRNRPAARGRGEQHERAEREQHSGRDRDHQEETTTENAHNQEARARHRAESTPGTPEPKRNQRRATTNGQEGERNTGSRGSKRETTEADRRSKGGQPEQRGTESSRTRQK

SEQ ID NO: 980269 - protein, 157 aa, Homo sapiens
MSARRIGIPVYWFPLLGYTAIGYAEKPHGGLVILNRAKREGICKRIQGVWDAIGGKSSQSLGDYGLSLRTLVHNRVHEHKHFELCERSLSVRNNFDRNLLTGYETRREMPSRTPSGDHVRSYKGGWENTRKAWEGGPHEALKTCWDQGWHKSPKWVC

SEQ ID NO: 980270 - protein, 122 aa, Homo sapiens
MFIQLSPSLYSLNRIIPVSLKNKQKHLVGAPHRKSLTHCGAGPIYEKCKWIQKRATTVVSKKRGESHQGACFDTSLPRVVINAEQHNMHQHTIALIYSLVHLKRQKQISEKDTRIRRGKKKN

SEQ ID NO: 980271 - protein, 425 aa, Homo sapiens
MIAHDEPARPGTPSWASYSKQLLTVLESDLRSKEILGLKLHLSGGSGLVHQDLLEGHIPPVQVPNVQLRSQDARAQKMANLKMRILYVDHLARVKGPGQCVVPDIVETSQETTSIYYTILQTSYDQVVHANVDRITARAVSKTQPALELWLHTKSLTAPIGLRKPYYTGNIREEIYARVDTAITTAYHSGRHKIIQSSRAKTPRYYGQAPKLSDDNGRMVHDVPLNKTSRCMIKDSFLKTTQHTHSTIRTSTSKSNPRTAPPITTSRTTTNRDPTIRSTDDNKLVQQNNLNNSYTTTYHKISIHQIQHTLIHHSLINYYNITHKSYEAQNENLAHAGTDTKDIKLTQNKRTSETYYTKSSKHRRPHRQIHEGYQGNKRTANKRRVDRTNSRCIERGQNPHDDSRNRAATSNSRMPLHTCTDTISH

SEQ ID NO: 980272 - protein, 199 aa, Homo sapiens
MSRIDLLPSSSRTILGMKIEYAHFDGWIGCCWARQPCCINVKSRGDSHHHSYHWLEMWKQVRTMTNILFPPVWDVGGQDRIRLSGSITSRIPRSYLVGSIAHDRRKESGSSRWSCSTMLLVTMGLRGCQCCYFLCQPNQDWPMARALRGTGRLTKGFGLLVTGPWFCFRALCAPGLGLCVCAPRGVSLRLPRWGRGLPG

SEQ ID NO: 980273 - protein, 137 aa, Homo sapiens
MRGKAETRREARGEGGEARRKEEERAERRGEQGAGGRGEEEDGTGRQTARRRREQDRTERDRGRQATRTGTSEEEREKAGATAGAGTQHKEEEEQQRRETRREEGSREERGERAQQRREKRRERRTTTRTGRTDRQH

SEQ ID NO: 980274 - protein, 134 aa, Homo sapiens
MGPNVLYNQYKMYHLIVCNNQAQCCHLRYYTACKCMRVSSRYAVLVRVSPRGALVDHPQLWWTFTPSVLRCDCKLFYSFLEWDLLGVGFLLPWPFVWGGGVNKKGGFPWPPLSLQDLSLDRFDGLFYTLSRGGY

SEQ ID NO: 980275 - protein, 134 aa, Homo sapiens
MGLWYISDFLPGVCYSSLQTMMCQIQAVKARLANQYIQDQLYKLGCGRQAHRFLFNQVQNLGPVLSMPCCLGPPLVPRLEPLGGGFKSLVGKGAARLGPGGTTRFAFPRGWGHPAGGSPAGATPNEAGPPFVGT

SEQ ID NO: 980276 - protein, 78 aa, Homo sapiens
HAATNEYPDPDPDLVLKEIVSSFNIAVMPLRFLSHMESSSGIVVIQAATRSSKHLGLLTADLSEGSKPAQWSDALFTR

SEQ ID NO: 980277 - protein, 239 aa, Homo sapiens
HLPLLGPFHPSFPTFPMILVNFLEWFHDYWLSCLSVFLFQTPITRYGAFRTSVPLYLPHLRFLRGLFVLVCVVCVFKTGSHSEMRRSLSLECSGAVMAHCSLKLLGSSDPPASASCVARTTGVCRHTGYIFVEMGSRHVAQAVLELTSSDPHACDSSTFGEAEAGGSPEVKEFRDRPWPTMGENPCPLLKKYQKMWLGMAVGACKSQLLGGRGKEDHLTQGGKVAGPEWALRHRGKRQI

SEQ ID NO: 980278 - protein, 237 aa, Homo sapiens
MGADMCCLLSCYVVLVAQELVPAMIEIMSLLSCVLDMSRKLRFSENKYSRNYDHRNNLVVSPCPVLSGWTERTLKVLERPRPVFATVLLVGFIQCEPSFARCIHFVSRVSVCTNKIIGRLTNIVGLVKTINSFLPCGVVQHAVVKLVAVWLIRQFKADNDVLPAFCGLLTECVAEIGPGIPSKTVRHWNTVCEDSFHEIANVRPVMMVRCYPGGISRPFRELEHAKVGAVVTVTLPF

SEQ ID NO: 980279 - protein, 137 aa, Homo sapiens
MLKAMIQDKEGIPPVPAEAHLCRPCRLNKMARTLSDYWIFHVGTSDSVPRWSLPILKRVRYADLQEKTLGVKEQSAWKLAAQGLQSKAVDRPAILVKVGIRPELVEARSLSGQASVQDVRMSCLNLELFQTGGQSRD

SEQ ID NO: 980280 - protein, 114 aa, Homo sapiens
DSAETRRYGCRCAPRGISLPADTPSPWVYPAPLRSTHVRELVLHSTKGQPIPPGIGPTVVSERILPPESIVSLHEVDIFGAPRNEPPKQVEELRVMKFPGLCLLGDNLRDIEGD

SEQ ID NO: 980281 - protein, 79 aa, Homo sapiens
  misc_feature (34)..(34): Xaa can be any naturally occurring amino acid
SESGSDSNGSNCRGGVAVPGLAELFCLFSSDARXGTLAPGEWVLRRRLCLAVSQTGLDFLCTFTFAWGKLGFTRECWGT

SEQ ID NO: 980282 - protein, 173 aa, Homo sapiens
ASGSDGRFGRNDDRETSCCTGRCLDGQCRWRAAGYLLMLDPCKDSHDVGEESRARPGTRMDQHRGQFLTGVLRILSYLFQSPCGSIFIDVCMMSAAQSLLNPSDETRNSLSRLMPQSLLPPFLMTSRMFLIRKSDNLPRRSKLVVWCENVFAEVCLVAQVHALLYKDESRLSL

SEQ ID NO: 980283 - protein, 277 aa, Homo sapiens
VDHWSRYYASYVRIVPRHLVPVPVWLTRTYRIAKAYMRSTAEERPTGMVWPRELRLDYETPYDMRAHRDYLSTHQVGPTLESHDHHFRQYITSNFNTVAETYSLHTPIGSVDIMEVLSLTELMECTFLGTEPSRGNAGPAPQWNLLRHGRTSWPESENPTSIFIPDSPGRMPSQGRACHIFHLPNLFNLDEAPKKPEYVVYLSMCVITLWKKYASIFLVRTVNMYFLRTNVLPNYVTINVRLNDQKVTKTLGSVSRKFFRGLREYKNAFIGWFNLTG

SEQ ID NO: 980284 - protein, 112 aa, Homo sapiens
MGQGRSSKVQKLLHLSGDCHNWLTRGGSRESRYALWLAHVFLPAGSLLLVEWYRQCRFRAYLDGKRPAPREWVVPLTIEVVNTTVDHTPGIRGIFKFRVVVSPRKAFISKIP

SEQ ID NO: 980285 - protein, 88 aa, Homo sapiens
MYVDDEVLSSKRSRDASSVRKDETIVTMGSEEGVQVDSDEEGAYWDVDDMTIRGVTRWVVPGFEKRSEGKFRDRAWGKSWHGVEFHRS

SEQ ID NO: 980286 - protein, 108 aa, Homo sapiens
GRRAAGRGRRKEGKGRQGGNGKRQEREGKGKGERKGKKQLYCNSQKLETTQMPSVEKWLNKLWHICYVEYYSAIKRIKLLIHATTLSRELLSEKSQSQKFTCSIISLV

SEQ ID NO: 980287 - protein, 344 aa, Homo sapiens
LTPQQSQAEADQKLSVATRSGEGPEGTESARDGASVQEGAPVNHGPRKCAVLPTKIHSLKSNQFSERVSRAREMQASKTGSNARPRDRQIGTTGGGKPSDEGLEMMTRVREEIRRIAGMRGTCAPDGPHAVTGEAGHDHTGKMPLGRRQVTEKRSGKRIVGRGGGRKWQLIRYRASGRRLRVESGGVKARGTLATGESWDRGRLERTIAQSPGVQGQVDVDAALGGPLRSNRLAGPEDVSRTSADRCMRVESEAFECGSSPVEARGEWNRAMFDGVSPRDKEWLEISRESNVHRRAGPQCGESLSDKTGAARIGEHGHCSRERPQRGVTPKHGGADQTGFVIYH

SEQ ID NO: 980288 - protein, 253 aa, Homo sapiens
EDSPAGKTNALKTGDKILEVAVSRDHTMHSSLGDKSETPSQKKQTKNKKKKKCVGGAALGALWEERFLIKHPFRGWRGGGGAQGGGTVGQKGGAIKGWGTQIRERNARAPQETIRVRCGRVSPPTNIKNTPRPGGGKNTRRASRWVPTLSPKMGACASKAAPMTGGAVILQNRREMPQTREGRPEKLIKKMYARPGPRGDDNRNRKAKDKKKDSNKRKKRTSKQTETHRTRRQKKDRKKEGQRADEDDRAETT

SEQ ID NO: 980289 - protein, 328 aa, Homo sapiens
VGGPLESRSWRIAWATQRDLISKSEKKKKGNFKNGTKEGRETHTTHTHTPHTRAHTPKHTKGRGKTPPPTQGGGNTHTTHTITHTHTIRGRRTTVCQHSVKAITSNLGGPQEKGAKSSLGARHRVVTKHPLSLKEQQLGQKVGDATGVATTRVKPPTHEEHDRRGGERTTEDGTKKCEDHLAGTMGGNPLFAAKERQKNRGAKDGTMQRVHPQRARDDGRAQSCVTPGEGEVSPATRIISTGHPTRGNRWSLHPKQHEYRKKKGCAHDAEIIKTRGGRPKILDGHCLQETGESGVPQNRGTSETRVAGQAVAAERKTHNDARTRSHIG

SEQ ID NO: 980290 - protein, 236 aa, Homo sapiens
DSGQQAVGVAQTDSPPPLAPPAPAPSLVRTPGESCARAEAAIVESLVPLQPDMRRGMCGRRYKGCPHERAPMYRSVTAGWQESTDRRWSTGKLLRKGDEVMPRVGKVVIKKKSTRGRSLMGNWDPMNCRGHGGAPRAENATTLTVARDFLTEEPDLGSGDSAGAAVGRKRSALGRAGETRTCIHKLASVHEYVPVQISAATVENYVTNGESTGTRTARAGDSEEPRTRLSRKSQPL

SEQ ID NO: 980291 - protein, 76 aa, Homo sapiens
AGRWWRVPVIPAIWEAEAGGSQDQEVETILANTVKSLFTKNTKGWPGVVARAYIPIPATREAEAGGSLEPGRRRLQ

SEQ ID NO: 980292 - protein, 286 aa, Homo sapiens
LSLHNDVNPTMCSCHTIENSKNDSVAFQILSQKEEWESRTQHHPRKNPPHLAGYEKRAKDDSRRVVKSTQDLSDVFHGMKWASHSGTPERSNRLVQDYVKRSHKLQQRLMIQICTLPDTHRNDDTQSPLAVPRQKCAELHDGEKVVTEVGHNIPLPSPSSSLRSAQKEMTGQPPEIEKVDHKEHMRGRGPTEHLELISPGKVYGLTHEHDESGYYGPTDSTRQSTHHACEHATALTTGPNTPPHRHTGDRERHKRKEPATTSAPHTNQPGRGATRGGRATGPPHPR

SEQ ID NO: 980293 - protein, 150 aa, Homo sapiens
MTQRAGTSPVTTYSKENEEKHYQGRTKQHTTGKGNKQKKGHRGGPRIGHTKNERDHKEMKNIKDTSSRGCPEGRDTESQEKPKKGGEPRKKHQTSGREAQDKNSRQVYKRNARGSNQHKTEEQENATETKQDRETKNKQQQPGVDAKHDR

SEQ ID NO: 980294 - protein, 156 aa, Homo sapiens
MLNYRNKGRPQAKCNRSLNNFETQTQKYNKKHFCCPHGPERVSEHHLVLGAAPSWSSDTGHIAGCHGNTGPTMRVVSPQYNSARAHRRVNNPQRELGGARIFTGARDSIHAPPRETSYNKQQHHARRRTPTEDSTSQTIDETDDKTRRSRASNART

SEQ ID NO: 980295 - protein, 112 aa, Homo sapiens
MLYTMGYKQQHTGQIWPTACFCKNKFYWNTATLIHLHHINGCFRATVAGLNSCHRDYGLQSQKYILSGPLQKKCADVHHIVVTCFDDLSPLLDCEFQGQKLVLFIFNISLQK

SEQ ID NO: 980296 - protein, 67 aa, Homo sapiens
AERLYYAMKGAGTDDSTLVRIVVTRSEIDLVQIKQMFAQMYQKTLGTMIAGDTSGDYRRLLLAIVGQ

SEQ ID NO: 980297 - protein, 132 aa, Homo sapiens
  misc_feature (8)..(8): Xaa can be any naturally occurring amino acid
MQCGQPIXKLNDYFGTSKLKRTTRPQVKETFECGGHRRVPKRKYPERTKWQEGRGSPPPSLKKPRCADNTVCRSEETTCQSGKSGGRPFHRDLNNRAGPKAEPVVQQYPRDGGEKGNTGILQQRANAPDINT

SEQ ID NO: 980298 - protein, 149 aa, Homo sapiens
MGMQHYELGEYIRKRFRKFLNESYKHEQVYIEAQTVDRHLDECYDKPGSPVSPEGVSIWNPILLWEPVPVLTGSCFLKIRCYCLAVVGNWPRYKKLESETFEIDGSRRGARYRFIATLGTFRYMADFGLRHYTFFGVVPILLRAKNRME

SEQ ID NO: 980299 - protein, 94 aa, Homo sapiens
GSLWLSEVGGFDQSSACWSSSVGTRCFVWTHFSALDRTGLWVHQSGTMEDHSPSMIRRRLMMVAFLGASAGNCKYCSFVRRGDDCYPATLVRCV

SEQ ID NO: 980300 - protein, 126 aa, Homo sapiens
VNPTQSCKFYFWDARLIHHTEINKCDSPNKQNQKKNYMIISIDTQKAYNIIQHPLMTKALNRLSIKVAYLKIVKAIYDKPTANVILNEQKLERFPCGNRNKTSMPTFTTPIQYSTGCASQRNEERE

SEQ ID NO: 980301 - protein, 199 aa, Homo sapiens
MRIEKCYICSGPIYPGHGMMFCPAMIADGCARSRKSRRLSINNFRQRMRNPRKVKVDQTHPESTAGKELTVDHSVEFEQASEMNLSNTSESYGIKLLMRRRELKKSDQKRQAKFTNGQMGRATKELHESFRILKEKSSKSIHRLSEPLLAAKGTQWGRAPMVAGRLQEDVDWKMLLKESLLPIVFYVHLKMPLGFLEPA

SEQ ID NO: 980302 - protein, 95 aa, Homo sapiens
AIITPQTCYAGAVSMYQCQPEPQHTHVGQMRYNPVLPGNQAFLRASFRMAVLNETYPADVTISITERLRLPDIFSHFIIRQEARALPDLTSSGFL

SEQ ID NO: 980303 - protein, 130 aa, Homo sapiens
MNSKVFGGSAGHRTQGSKRLAGAEEPTGIQSMQELWAKNNSYAEVSRKTCNKMARGPRRVDQSREALRTQEAPSRRRQELLMPDQGGEKYGDEKKQTQRGPTPKTQGAAQVRRRQNRRDKNSRQQGDKHI

SEQ ID NO: 980304 - protein, 86 aa, Homo sapiens
CCIDNGNPRDLVVLLVYHQADGDLDRCWANTVIARISSIEASMKLTVGRSSSGAPWCVRARLHHRSDLTASEVTGDDRLASSRASF

SEQ ID NO: 980305 - protein, 136 aa, Homo sapiens
MRRHTSERERFQYAISQLANRTTDGLAEQRNDPDLGDWQHSVAKSGQDDLISRPTGKRLLMSMSRYVVFAGCLDKHLWSPGPPRTYITLLKTTCTTIWSRCDRTHSSNPYSYRVGSKHFTEITRKRGEKRRLIPKK

SEQ ID NO: 980306 - protein, 67 aa, Homo sapiens
VKMYKHEHIAFSGSILIAIPIGVSVLMLSRQTPRKRGWNDCAAVVPEDIGYIALFSLCRVVLIWNSS

SEQ ID NO: 980307 - protein, 153 aa, Homo sapiens
MFGHHVVTHLVGENTILWGEMAKNKRGRGGGMPCVKSPVASGRLTRSKIAWDIRGKGEVSLGSRENPSLGNKRSRLLGANESNTPTKHFVGGRRQKNVSTTSVWAAAPQITATGHSVPQRIRLDSGWFPQKTGGAGSRPRGSALGSRGSSGAR

SEQ ID NO: 980308 - protein, 136 aa, Homo sapiens
MKTGLFLPMSLGNCSCSPDEVLDYYVIIPRADVETVAPEYHCNAPCERADDDEPCDNKIQTQPIVGGRALEDFGATGFGSGVIEGSECSSSTQGSRWNICFGFFTPGKHGGGHRRVFDEHDGALRLNGSVPGDQGT

SEQ ID NO: 980309 - protein, 324 aa, Homo sapiens
MKFFFFSRQSLALNSSLGDRARLHLIKKKKKKIRGWKDTPGGEKSFHILYFQQRDYFLDSTRNFKTNSVREKTKLGSLQPGGTERKNSFFFKKKNNNKQNNTKLCGGGLGDMKKSFENNHWLGGGGPHDVFDCKPWRHKHVPPPEKHIRCRTKPGGAWASPPTIKKPAAGQTRGVPLRKTQLRTGPAAGRQGGVLTPGDVPGRDSNIKLARRAAGSSKQLQRSETRTPNRTKTTPTLSQTPDRDTSYEPTNSRHNLRKQKHYNHARSTAHTTVMPTQHTKRQRTNATTTTHKNTRHRTRYTKTTEHIIHTDKNSQETTTQQSNS

SEQ ID NO: 980310 - protein, 141 aa, Homo sapiens
MVTHMWLTTKSVKIFYRIDSFGSHYQKLFICQMMTQKFEEAKPFITLYKFGKEQIKISTLGNLVMLYFNAQLQKTYIPGDVSGCSTELSADYSTSSPSGSVLGSPSTSKYSDFNLEHCSTGTWGPHCNVLGARLRGPGINP

SEQ ID NO: 980311 - protein, 110 aa, Homo sapiens
PVPRACFEEAFVSGRGLGLGLPRRSRAAEIAALFSRSWCTEQQQRRSGGRHVLLPGPGRTPWLAPASGLRHSPVALDQFGGSFPALVPPKPCRIEDGVSPCVAEVWSQTS

SEQ ID NO: 980312 - protein, 219 aa, Homo sapiens
  misc_feature (48)..(48): Xaa can be any naturally occurring amino acid
MPLHPAWVAEQDLISLFFFFFKRMGSCLGPGRSEKRHDLDSVKLHPKXFKRDLRTSRERSRDLHPRDTKQKHTHDNNNYVAGAQQPQEKVLKHTGWGGRGPKRNENHLLPNRRVPKESDLRVLSTNGRWRVPPPKKKTRGGRHPRPFVNNTPEGASEGKGGHTRGHTEAEKNPRRRRDRKTYTTLASNTRNARSLKTDNYMTRTTSRADNTTSTNKHTT

SEQ ID NO: 980313 - protein, 129 aa, Homo sapiens
MAMCPRLNKLEANIMETCKKGPYSYEGNNGRYWRSMAGEKYCRSIRINERTIREACYAVYTPNSAIHRTRGLFGYRNSCTNETVKGHMGSAKRGIETTGLTHGTQQRVGMVNNTGSELFPLSLPSSHRR

SEQ ID NO: 980314 - protein, 184 aa, Homo sapiens
CLSQYCTTALQPGQQRDSCLKKKKRLLAEKNPACQTQGQPGAGQWEMGSGSSSGSQNLPNGPQGHSLASFPIKSSWLLGHGPWARDLAFPSQFKAPSLSMCGPNANWSLVADTWVRMSKSWPNGQESQETGVSGGDSRVEWPSIWDWEAGLCQACIKISKWFQEKPFQFIKPCFLTQLWGWWLG

SEQ ID NO: 980315 - protein, 106 aa, Homo sapiens
MWRYTYVCARLGLRKLSGPCNVIQCLSSRRPECCLVRIHMVLDAPICDSESSSPFVLCVLTLQFLGSLAMGLARKLIKIHIHTEAHSMRQHLFVSGGQWVMSMAPC

SEQ ID NO: 980316 - protein, 90 aa, Homo sapiens
MGPGSFPREMPQRLPATAVPGMTQCDYDKTKTQGKRSKIKVAKVGHEKGNTSRQGNEGVQTQSKTGTELKKRDGGDTKNAKKWRFNKQGN

SEQ ID NO: 980317 - protein, 169 aa, Homo sapiens
PPGFPQPSPVQPGSREDEVRVQKKSIRFEKRRSEGREDPKEIPGPGVPVIVEKAPKARIGDLDKKKIPGCLLIYKFGQFYFLNPEANFISELKDAIVLPLCQPIVIPPQPVPQIGFSCTRNTMKKTFFLYSCLQVHDRVSTGLVKACVPLEAWEGGLISTKREVGPPFL

SEQ ID NO: 980318 - protein, 106 aa, Homo sapiens
MTCSRSLCSKDMGLSVETGVRVLIIIAQEDEPCVVLVPTGYTLTQSNYSAIVTEESAHQVNVIANPQFAYPSCGPWYLEVSVTASDEALILAEHFGGVLHFRCRKN

SEQ ID NO: 980319 - protein, 143 aa, Homo sapiens
MAVVTSIEAGGDDRHRKKEIAGRGNMLRTFVKKHLMESDNASIKWGSITKKGPQSSLVENQLCSRGWWFISLCGLQFMASKEIKKTTTFETSAIENLERPWGHTKSGFKDHSSMEELLLKGKSCKEERVPGCEVEGVNASRVH

SEQ ID NO: 980320 - protein, 338 aa, Homo sapiens
AFLFDFHIRWFLLDLPQFYLPFNQPRFSCSTSYLEDQTNSLAVHVFLFTVVWVSFLFIFSNVFFSPFFYWQKRKFGSSCKPEVMEKAGAIEIPKGPVETLLCLARVPKRHFLWRGHPANVGGTLMGRRRRATSLGLTPGLLQDNNTGVPTNCWPKQSAPNDTSGTQVEPDAAIGTTKGEQGIQRRCDAPKPTPSDGQRNRTTVWDRTQGKDMNPKELECNTANMWDQESHAHHGTKTITHKLSYPRRVGCATPHENERRKEHCGGARHEEAQSTVRGATNIRIVLSAKARLEFGSKTSGDDDKRVRVEEKTSNPRAERERVTAQRSTQTNEHTTTRNT

SEQ ID NO: 980321 - protein, 101 aa, Homo sapiens
ASLAARAKIEALREAGTVERALRSGYPMLDYLPPLFVQYAGAPEQLNGVATPLLCAGSQRWPFLMKKNTKLGFSLCILSSDGSYFNPLVKTCRDLQGTRVT

SEQ ID NO: 980322 - protein, 135 aa, Homo sapiens
MFTTRIQRVAGRWWCVACSPSYSGGCGSRNRLSLGGRVLLVEPKLRRCSEPKLRRCNSSLMTELDSLSKKRNKNSSKAKMRSRKVCPETRDYFVYNSGVAPGGTHVRCKCQKELWERAKAHGWTHPCALSRFSNT

SEQ ID NO: 980323 - protein, 144 aa, Homo sapiens
MKGVYCAAWSQLRSSSLLVNNTVNRSVRMMPVVARHKAADHSKSPMYNYSRTRRQEEISVFCSHSPQCRRSPRMKACPGVILYSLMGTVKLKRRRGYTTLVYALCEELRFAYVELMCCNVSMDLGNDVVCVLKKESSRNETQLH

SEQ ID NO: 980324 - protein, 124 aa, Homo sapiens
GVTTDDASQELVELIYQQATSIPRFLLYGSSPVYVTCPMHRDYISPTAVATSANSYFKDVGVNMTVQGSSCKKGMKLLENDFIAFVLFLGELDLNLEIKGTNGRVTRADILQVWSTRMAECPVF

SEQ ID NO: 980325 - protein, 71 aa, Homo sapiens
MVYVRTLGPLTRFPKGNIAGPENRGAVVFSHQIKKAAGNPHVCGTNPERSPGGPNGSYQGVQGERFNTACG

SEQ ID NO: 980326 - protein, 102 aa, Homo sapiens
EARACERREAAKGPGVGRCSRSSYRQNSPGERMVKYLKPEEPSCKNVVASISLTKWTQYKKGKDSWYAQEGGRYDRKQSAMVEQTKPIFRKKAKTTKKMVLR

SEQ ID NO: 980327 - protein, 100 aa, Homo sapiens
MGGRPWALEKVFKTHRVVGAGPQGVRYNPGAKGVVPKERTRGHGDIGAGLPHQIKNAPGGNPNGSGKNPRMGGPGEQITGRSINRGGHRRALDHQIKARP

SEQ ID NO: 980328 - protein, 117 aa, Homo sapiens
ECSSSPCSQECANVYGSYQCYCRRGTSSAMWMESPVKDIGRVRPAQPCGAHIFAPTGCINIPGRLPVQLPLVLLPGLGPQICRKLPKTIDECVTWASTNCSNQEDLFQHSRAVFRLL

SEQ ID NO: 980329 - protein, 81 aa, Homo sapiens
KTAMHIDADNRTRGRVSDLDAEYSSSRSLLTEMMINPKDRWRMRLNIGLHYEVKDVHELYDEVCIILGALLMMFDGGRRMT

SEQ ID NO: 980330 - protein, 104 aa, Homo sapiens
  misc_feature (67)..(67): Xaa can be any naturally occurring amino acid
GRPENLATEAAWPAVWGAPERGSPQTRWRSADRIFSRRSSVSSFAESWDPSCMSKGHFQIPFVRQSXLRHILVIPLPLANVNCTRLDGTSLSQSSLATRNISIP

SEQ ID NO: 980331 - protein, 62 aa, Homo sapiens
MTSYRVNAALGSAVAVLLVWRCNPEVLGLITKKFTELGPQGCRLAVTSSHTVKEESSQQADA

SEQ ID NO: 980332 - protein, 173 aa, Homo sapiens
  misc_feature (103)..(103): Xaa can be any naturally occurring amino acid
QQLLGALRELPRPKGLQDVVLIDNAGSLGDVSKGFVGPELTPLKEQLRGHVNCDLHARAVTSSGPEEAFPGQSVASTEPVVNILVPLCPGNFSKGVGAGTVCXERRARDMLVQVLALEEPNVRVLNYAQVLWTQTCSSGPGRPPGDPDMRTGAGRSWKATGKLRDGRGVSPRK

SEQ ID NO: 980333 - protein, 278 aa, Homo sapiens
LRPEGKQSGRARWEARRASGLQALVRLGKWGCGPRRARAWALLIRSGWGPPIPFWGKTFFNSRTGRFLSAQDFPGFGDKRAQRGRKGPGEKRDNWGRYCQPGSRKGPPPRGVSCLDDTRKGSRHPRGRAMGKRGYRGDLVGAHEACGADPPGKHSGGDGLGEAPVGVLVSREHRAKRGGRDFNHILCWKDGPPPISSRGGWKHNFVVGANYVWRIPPPYVDGVGHSRFVGHPPPCGVRSYIKQDPPPQRMGLNGDALNHHENKILFLHPYYSPTTTRV

SEQ ID NO: 980334 - protein, 120 aa, Homo sapiens
MAPASLIILPRGGNWAGESSGFPFLRSWGYLFKQFGTPIHGLVNPRAILEEGQSRFWVSQGPGGSRDHFLARALGLKPPGSSFLTDLLNNLALRWGARPLALWPPGLLLRRARGQRRIGS

SEQ ID NO: 980335 - protein, 110 aa, Homo sapiens
MCTRTTTRHIKTPEHNNKAEKWHQRAPTKQNRDTTDTQHTTTQGRTPGQQKNTPKQRYTPPHKNTHTHAEKHHEFNNTTTHNEGHYSSTKRRKHHQAGTTRDHHKKATTK

SEQ ID NO: 980336 - protein, 236 aa, Homo sapiens
WWLTPVIQYFGTANDWEQSLSLGVCRSRLTQPLRDILYSITHNKTYTRYDSGIDVHATCSSHATSGNAHGEIGNYSTSASLDGFQVAVRRYVPTLTLQTMEEQIGSILASLTGHRYSLVLNGDYLLNMGTSTGVRMKTFTTQTQNTTNKQRGNNNLSKTKRGPKHTCGSTLRQGNNSQQDRKNQRHKNYTGQKEKGAHYLCHQRLQYDEAQSTNEKTFSFPKRGQSFTLNTRTIIL

SEQ ID NO: 980337 - protein, 526 aa, Homo sapiens
HITVLQPWMTDDPVSITQHTQQKTTKHTQTSTNKNTTKQKPKHRNRKRQTKMGQTHNDKQQDTQHTLQRRETTITRTKTRETTRDTTTNKRARETTITNVRHTHKDTKTPQKNKTTPPEHTSHRKPHTHQRHIQRDPQCSIHPYERPHKQRLPRRPPPNKQQAGNHTHNTKTTTPLRTQVSPPTPTSKPQLPQPQPNKPPTKQRTTTVRQPTPHHSRENTTRQKPPHPRPQNHKHTTTPTPRRKQNRTTTRHRDHKHTTGPLTTNSPQDTPHPTGTTQQHDTISPTPPTHGSNSNNTATTNNDAANKVVTTPPTTEHPSTHPRKTRKQTPTKTQQTAKTNRKPNKHVQTATYQPNKQQTTERNPPDKQTTDSTVGNKRQWGEPHPHPQEDTTHNTQNDTSLNRQTTTTTALHKHHETKKNRAIVAHQQQPHPMEHQPTPRETTSPRGHPGGSDDSAHDKQQLVGKYKHPQGVTKGLGTHTLYNSRTQPAPKNCKAPTVTHTRDNVLYSNHTPHNRTNTGTNKRTEH

SEQ ID NO: 980338 - protein, 116 aa, Homo sapiens
MEGIMDGSDEVIRVPQSMAIKKVYRMICGSKVSTVGSKDDTTCLLLLPPKLGLTGESGAAGGLVYDFYSLDMRPFHILPEKCQLCNVSGGVGERNSVSLLHFGDRRRWAGANLIFH

SEQ ID NO: 980339 - protein, 670 aa, Homo sapiens
  misc_feature (434)..(434): Xaa can be any naturally occurring amino acid
  misc_feature (440)..(440): Xaa can be any naturally occurring amino acid
GPEQLIIIIFFYLLFIYSWREEDPPRGHTHNRVANKMTNDCVKSSQKKTHTTQRETTQQQCKAASKRRPHRNTERNRGQETKESTTPTSYNKRRHPNPPHNTNTTRRRQTGEKTKNTSDNRKKNKRRQKKQAEQTTKNETEKEQTNKPEQTDNRRRSKGKKQQKRYKEDKRKHTRKETREKPPPRTTKQRGKKKTRRKNKQHAPDTTRRNAKQQGQEDRTVGEKKEREKAERQQRKQQQGNRTQQNRKSKTRGQKTTTRTTQQQNIAATTQQQKQHRQRKREQHDQHSPTPRQNNNTRHAERERRKDARHAQGRNETQRPQRHKNDGSTRTKRHGRATRNTNARGPRTERNRDKGHEDTPTREQRQDGHANQSRQRQAANSAGRRRHRRTSRTTAAERNNRDKTRRDARRRRRQREETKDDIDDTRRRRKRHDXDPIEHXYVQEHRTNIERSNWMRDDTCRQHADAKTQQADDATRERETETSTGRHRTQTHTNVQDETRTNDQDTHESTGCSDETRSEDEAQDRKETARTDERTRPSDEREREHEEDTEGPRRSNHTQEVENTNEGKAWQGIHEKQSEESQDARRRTEAAGRRRQSSRRQRGRTRVEQTENIVAEQRKDHAGDNGREKRKSRKRAANERREESRQTEKIASREGARDSQQPRQTREDLI

SEQ ID NO: 980340 - protein, 198 aa, Homo sapiens
MSRTTAHETYLTLTTRMQQARHTTDAAAQTTQHEPKRADSYAGRKQHADQTDRDKPKDESAAGPATEARPEKPDHDRERMREQGAREGDSARRARRRDEQSRQREKQRRGSTRRRTSRRAQHRARGDTQTTREERQRRWRRQARPRKERAREARKQQQTKRASERVGNRSRRKPQEDRHTQEHTNTGGEEEPREQPRK

SEQ ID NO: 980341 - protein, 622 aa, Homo sapiens
YRVYKESCFINELNVLRGQRWVICCPAVVHFMQRHSMRISYLQCSGSATGDSSLERIAMDPSRGKTILAQERLVTLGTNIERHLWSSSVTYALSERSDNFSMMAARGYRTRMLRIIMTKRINWTRGTLSHDTGGTAKIIISGATTEGTADKTCYSPDDTGITLRVLLCRHRDTQAKTSSSSSVLLHSCLDVCRPCLISNKTLEQTRDKQSSTDDNYTGIYTCKHKTYRQVTEGTKHKNDSNTQDNHQLTTYNSEARRTQTSNIKSGGNAQERRPYSMHTTLQAEPENESEKNGRSKHNNSAHPETSRRSHGKEIEKTRKKRQKRTKKQRREINKRERRETEDKQSNRGEAEKRKRQNEEGKRKRNKKTKTQHNRNKEETRKKTKREESKNEKRTQSTEKEKRGGEKRREARRAAETGEQQRRKKKGSTKEQRSERSRGGGRKEQRREKRGRDEENKAREQETKKPKRGRETEEKEENEHKETEETRRSRGGKGGRIRRQKTQTQKKEEEKEREKRDREKTKSEKKQRERKEEKKEEESKREGEKKEESNEKDEKGRSSGGEEEEEEEREQRRDERRKREERESEEKTERGQEEKGREERRREKKGDEGEGKNAEGAESRKRT

SEQ ID NO: 980342 - protein, 410 aa, Homo sapiens
MSNKVYNSNMRHREACTYTYSGPLCCECTLHVHDVDSGRLNLLTEQCVAWQTYPSTGLEIMDETHLQTLIPLDSTSLKTLMVHHERLLLIGAWSPHWTHDMEAPGSTTHTQRGTRIGKPSGNGRCIVRHLTSDDNAKRVLVQHGPTPSARISRDFSRPHANGLQLSRRLPPNAISSLPYYYIVTETLTSRKRPAPHHNNKRHPQGKMEAEGGEEKRKGRREAENKKREGESQARGPTMSRPAGETADNSNRGQRRVHDEGRSPGAAALGSRATGGTNATRPQKHATRERQKDQEDARGRPPTREDKQEPAKERESDRRGKPPERDETRPKGGSKTPGRKSRKRKKAKERAKRKEETEHNPHRSKPTHSDERKEERTTRDWTTTNTLDKHPNTNKQAQNATTNDHHNDRGA

SEQ ID NO: 980343 - protein, 207 aa, Homo sapiens
TATCRIRRRSRAMFVLYSHVLRLLAETWGWNPQQSRGPFAAAIYALAFQRRVLYWQLLEKILQSLPSDYSIELKGYQVHTRDSPKCYKLTDKTVIGLQRFPVETCPYADKDSWKQDYKMYKHSNNKAMTRRAMAGNAVYNPVSKALLSIPMFTTSSVDLIEDATGGCIQLCTHVGSNQRDSFTDGRSACACTDLLTTRVVEELHDGE

SEQ ID NO: 980344 - protein, 112 aa, Homo sapiens
  misc_feature (8)..(8): Xaa can be any naturally occurring amino acid
MLIITFSXASSGDSNPSRVTRRSTQIDRTPTQHNINNNRSRSLQYAKWRIGQPSGRHKQRRHRLETHAQQRVNENATDEYTYERKTQKATTPDREHKENIIDNETEMMNRTK

SEQ ID NO: 980345 - protein, 275 aa, Homo sapiens
MHKELGPVKITFLEGLTGKAFKQNGPLPGGGLGQMRYREAALELVPSYHWWLPRSLSAAHSVHSPSPGLEMYRTQNRPSNTLRHLRDWSDAVLIMHLSSFPGPDNFIAISARSKCAKLSLAGLEGSFSTVMIRAIWTGALYVYSVFQVDISMVASRFSTRSCKKPFGATLLGLRHRLAIAWPLSGLGVPETVRNVQAPCCLAHVGEPEAVGARSAGPGPVSRGGLLDVVPFVLAGAPSVWRRVSFSRLAKPKWGGATPCSPLLLPVLSTSSSLWR

SEQ ID NO: 980346 - protein, 157 aa, Homo sapiens
MAKGKSLQWRTDSRTQWLTNPEKQSLGNKGDLRFSCRDNYRNTREQRQARRLRTLFPIQSNILLLSQRSCKWAFSPTSPLKIQAEQRLGPGELSAYARVLAAVIQCQLETCALLQPGEKPKSAKPDQLSKTFVRELLLPYKALCVRDWCASGTDPYE

SEQ ID NO: 980347 - protein, 210 aa, Homo sapiens
MVRHAQDALGREMHQKNPRTVPPNVRDDLSEVRAEKNVAAADLSLRGLGIFNYVFKSKVHDLMPTYIGPYIWDGTVLPTRCLTMRTIICRVINSLPGLYGTSFPCKLSETSNGPRCPAQDTGRIIDHLSLLSKDRGSHQGMKAPYFCSIGFRLRQQIIFEMHYAQFRYVCGANPWYYREIPRGLVHETKVGCNHNPFGSHKHQQYPNFAN

SEQ ID NO: 980348 - protein, 123 aa, Homo sapiens
TLQLVRRKLPATLNGALTELRDVLPSPNCYAGNLPLLVNENRVYFRIWATENRRRHVDDISVTEIYATVVTNESTSNIVTHSATRLHTTLVFEANAGKRNCSSFPDFTLVQVRTIKAISSGID

SEQ ID NO: 980349 - protein, 143 aa, Homo sapiens
GARRVGGGSARVRAPLPSSTVPPLLLPFLVLLCARCADLGTSLCEAAVGGDSGARIGRGKAQGKGVKELENRPNHITFGTVAGARDASCGVQVQRIREGHTPHLSNLNVNGPIVDPTRDFCPLGRRNGIQVSPYLDGGKANSN

SEQ ID NO: 980350 - protein, 108 aa, Homo sapiens
MTQNKKNQPQFRRFTVNQNPKQSPKPLQVPLDSPAIFPKQEPNISHMFNVDHSSTKPQERPKPATGSQVDSQVIHKTTKRGPIYRQSSHLVILNAKVPGAQPQPPASH

SEQ ID NO: 980351 - protein, 101 aa, Homo sapiens
ASRITLHMVSRRFVEVGRVPMSPWDLMPENGRDGQMYGSEQGLGLMDLCTQVRRQAMPFKCLQLTDFILKFRTVPTRSMSEKPGEGRTSIQNGTHTMAHRD

SEQ ID NO: 980352 - protein, 317 aa, Homo sapiens
GAIFGLSEWVCNSVVAESYGSPFRFTFPAVEAFPLAVRVHETKVRDEHYVRDTLLIVIISVCTVCSEKGAITLGPVLPWNRPRTRRLKGQNWWEQPGVTTQLGHSTAREPHNRKSDGSKTLETTTQGRDQGTETFERNTAHQRLYHMFRNGNSPCSANVAFVLTWTLKEHCPTSNNLSGYKVGDKSFLYYPLLSNIPKGMSHRNLWGRLTHKTCTFNFLYYSSVLCRSEEHQNDSRPGAFKERTQRPGGILGHNLFVGRSMELRNLNVIIFRPRNSTGACWAAPEVAKLALPVAINLCCKGTAHACCCQESNGETAI

SEQ ID NO: 980353 - protein, 183 aa, Homo sapiens
MVTHACNPSTLGGQGGRMALSSGVPQTSLGSMVTTLSLPKKQSKNKAGTWVACHSVVPSSLREGLGVGRITVSPRRSMAAVAVIGGNWQPKGRVTGAGPQVFINKHKTVTHTPTHTVGARPATRDERSKPPRGGAGTRTRGRTGHTGPRRPGQQGAGPTTNTRGTRVENTGARLGSRAGVYPG

SEQ ID NO: 980354 - protein, 316 aa, Homo sapiens
LLLADRVVIKQIITSRNKVLAIMERLEKVNSFKSWSKYSVNFWDNEMVELAHLSGDRPNMICKMTQKTAKMAAAGQFLKKCHNDASHSFNDMSEAILTANQPIKNKEGVLTRMKRGWDKGHVTTGDLPVTPNGELDISSISILTDIRNSQMNIEALRENSFISSSKENFCDMERHLERMDGFMILLHSMSHRRPAFLKLSNFRRRTGLQRRKLCGIQRPQTRNQKRIRGQNWNSSIGNPAPATDYEQLPQTRKQGRDHTTRWHGVKGSTRRKAIHRGQPGILTQTGPGAHLHPERHADRRHNRERTTTIGPTPIGD

SEQ ID NO: 980355 - protein, 101 aa, Homo sapiens
MGGRSGPLIRGREHHQGWGNLPGNTVTRASRKAKPRWRGQIRESGTNRRKGAARRTGATGEDGLDMAAHQGAAGPRRCMCRKGAEGAVGTGREDTGRNPGL

SEQ ID NO: 980356 - protein, 138 aa, Homo sapiens
MERETEKATDITYKTEEERQHRDRTEVSSMTPHDDVWDVRQREQLRARSAGRGTASIEERRPNQESRQEQREKQKTDEEAKYNTQTASTQKRSRQQDTGQKRRKRKERSRQSGERSKTERSKKDQHDVKRATNQGDTK

SEQ ID NO: 980357 - protein, 184 aa, Homo sapiens
TVALPQAGPWRDRRIRCSGRYTRTGYPGVHGDNHQQQIKKIADFSTRPICLVVQDWATLKEKCDSPVHRRIEHMERSGDQQGETIHLRTVPVLLWRKWLYTTQATWKRAQKPKDLSFLLKEQQANLVSFPHTVCGPWGSDNSWGWAGALWARPFTRTPVGHPRLGILHLSGHHLYLYWVMVLGH

SEQ ID NO: 980358 - protein, 113 aa, Homo sapiens
MRESQEINQDTAWISKETKPNKLGVADWTMCETCTVYETELSWFAPLFLTPGGFMTNDNGQRIFKKEDWQLISVGHDRGPKKDLVCQCTGYSTVVLVRHRLSQARPQFSFGLK

SEQ ID NO: 980359 - protein, 354 aa, Homo sapiens
  misc_feature (44)..(44): Xaa can be any naturally occurring amino acid
  misc_feature (312)..(312): Xaa can be any naturally occurring amino acid
EFLRFLLPLSRRRVVRSYVARALRSLEGGHSAARSPSARAPGIXDLGDDDDAEQGRGPRWQAWGAPGAPGARQAHGRGVQELKQPGVTDLGCRTHLARGLGERFSGLKFLTKHFLANQGDLAPAGHYHIRLNPQRNQRLTSVGWALSGEARFLAHRGKSYTVSHEIGWTHAGPCVKVSSNKPWRLRLVQLVPFGGAPWRFLPTLKASLEIIWTSHGWIVTTAPGKFILITSCERNEFAACHNDGETFGRTHLRPTATIVRDNGTRGCSLKKETLRVESGDPNKGRTSRPKTDVRCSSVFFVLLALRYILTSXSSTMIQCDAITIHHIDQTELTRYQQNQTHTQQARAATAHDYT

SEQ ID NO: 980360 - protein, 107 aa, Homo sapiens
MRSIQGLSYRHLLKPPEERAPHTGHGQGRTLADHLQFGGAPCSTNAGRATTTHKGEKFGACREEYTSGRPKSNRRSRRRGGSTGGDIGVAPTGAAGETHTLSLRQAE

SEQ ID NO: 980361 - protein, 186 aa, Homo sapiens
MVELMFPLLLLLSALPILYMVLRPKSRKMLSSGVCTFNVYSFLGQASGGHRSYYRVSGKEAQPKEAVHQTAGRPEDHIIAVSRDIAAPTGANWGGPTEDPKTKGPREPSNGVVAAQQLAPCSGLTKGITHESFCAKGPPSAEGTSTLTGLDHHWKDVDAWRSGTRTQDNGLEHAPSGVHHWRSTSS

SEQ ID NO: 980362 - protein, 309 aa, Homo sapiens
MRKKRGPRTGKAAHRDTSTSRDGASAREREAQGPQEKRKGEPPEAETSEDGTNTARGEETPAGARSESARGADQRQKTATSKLSQSSNSNEADTIYAGDGEQRERRNDHSRRHDQHDHRSPDATRRQTATASDQAHGPTQREKTRESKRSKRTATRREEPNREEQRQQVTNVTKNRDGTKEARHKTIDTAHSSREGEKEKKRRSNDEKEGRAHMKKTGEAETREQTGSAGQKDRYNTRDERHRANKDEHQRNTPSNDHHRPNTRPNTEQTEQTRPHKRQQDNDDTSTQKQRKETQAKRHEPKAQKPANQ

SEQ ID NO: 980363 - protein, 31 aa, Homo sapiens
MHVKKQRNRSTKQDSAAVNIRGTGTANPTKA

SEQ ID NO: 980364 - protein, 154 aa, Homo sapiens
MFAKPKGLRIILGAPVVLPVVGRTTTSGSGHTSWFPQALHHVNTRLRRVGTSISRLKQTLTLGPKVALLGYKGARNQHITDYNSPVSVASVYTQTLNLYAKHNPTVYPKVSLGVAEATPPGLLMRFNTNGFKDNSPEKLVHKRGSLSQTLSKRY

SEQ ID NO: 980365 - protein, 152 aa, Homo sapiens
MLRHWPEKTLNHGGAARPIVSDLARVPQNRRGSAVVPKKRGADGSNTGPALGTGRITPRRRDTNTERTTNKQQSKEESVEPIDASSMQRTRRGNTARTTQPQNRETARDDAARQPEAAQEGDDDRRATKTNRRTRTPKRQEPTTKTGGDART

SEQ ID NO: 980366 - protein, 369 aa, Homo sapiens
  misc_feature (128)..(128): Xaa can be any naturally occurring amino acid
MGDVSLYSTSPTKTFKECLFYNEPDNTGWAVMTTGMEISSTCDRAAIAAYFAPGISRTACNIGEAIVKLCNIHYKADYATIAQQRSSKPDTQRAVVPRTSLCADINPQTTWTIAKGNTTIIVSYIRLXYYIIVVLSIQKTTHNNTQKYKAHTHEPIANSKHKTYTDRKTTTKQQNEPLHNTTSKRKEEEAIRGERESVTRTRDRKEERRRDADVASEVRKKEVKAEQKQRAYKESTADNEKEERDDTEDEEIIGGRTRRLEREHERQRNAEEPSREPGRRREREDEQETEGKRRERKKKRKGGTEESGQRQRIGITRETKEQETAGKGRRTRRRNNRRRRGQRRESNDSNDEGTRGQQDSTRHKHKSSG

SEQ ID NO: 980367 - protein, 200 aa, Homo sapiens
MDGVGTWTLGVAEETGLETPETGVSCVSLRGSGSTQPICSGPRSGPLQGSGGDGSKLRRAKWVTVLYLTAVQMPPLSFTGCLSRARTQISNECPIGNSRTQDTLASDVAWVATDTGHLQGLGTLEDEKLLSCRDKNPRGKKGIQLAWPIAGDNCQVRADRRFRPKLGWSVGLLVNSCLKAGMISVWTVSPFFVAGTPVPS

SEQ ID NO: 980368 - protein, 125 aa, Homo sapiens
MREGMKERRGRGDEWWTGGRETAAKAGRERSAEEEGRDDGKGDKTKQQDRKKKTPEGKEEKGEKRAENKGRAGGREEQRERGQENKGEQKDRKKKKSEEETRREEAASRGAKRQERNEERQATQT

SEQ ID NO: 980369 - protein, 536 aa, Homo sapiens
  misc_feature (246)..(246): Xaa can be any naturally occurring amino acid
  misc_feature (277)..(277): Xaa can be any naturally occurring amino acid
EPKLTTCTRESCVTMWVPGCLPHPVRDVDWRCAPHPVSDCGRLGMCEKQFPNPGRLLVASRGMGSLRPVSWVHPQLGPQSCPLCIRNKSVILLGSGQPCFILKTQARYFQVSHSFPNRSRYEPPEESIPQATVIDSSQNSCCPLCKSLRVTDAVKGMDLPTQEPALGTNLYRYRVGSIEPEESLNPKKLQVVDLMLFHWRVSARHPQKVPSSSGVVTSTVGTSLAWLGALLHAVQGPCGAHASPSXDRVSRCALGPRTLVVCSSLSFAPSPLRLVSXTEKKKDESRGESRRRKRERATKEGEEEKADTDQEERNEETDREAGKNRDREGMKRGDDGGETGGTRRRERARPTANKRRGEDGEDSRSEERENETEQEKRRGRRETTRTAAEAQRKTENSRIPGQREGAPERQNEKREKRKKKRRRGHRRRDKARTRREGKARRAEREKGDGAEGREAEGETGENEDQNGRREETREDRGNTDESAGRSRRSKSRRHAGRRVRNKGTERHEQTTDTAASRRHGGRKRRGRGAKKSKRKR

SEQ ID NO: 980370 - protein, 361 aa, Homo sapiens
  misc_feature (317)..(318): Xaa can be any naturally occurring amino acid
EDEWLTRITNAEKSLKDLMECENQGHENYVTNAQASVAGFDHLEGQGLMGWKTHMTLNTARDDRRTVYDDHNTTYNQETQTKASNDMYWDLLVTTGPRIYVLLDCGCTLETGDWGEDLGHSTLWNAHSCRVFIQENFPKFSKAGNIQLSRNLQTNATKILLKKLHFQDTECVRFTKVAIDGTTLFKGQPEQDRSGYPTKGAHQDNRRSPWRKLFQAEEELGPIFTLLRQAFLPEFYPRNIGSTRKGDNTPCQEATVCSIGSTTGPKKSLRDTLWGRPAPSLALALLHLRRIIDSLTPWEKPILVDGSTILSTDSSSXXPCPPLFYLLLHNHPAHRQPGTSRTIHNTDQPTASYRVSVEHTP

SEQ ID NO: 980371 - protein, 337 aa, Homo sapiens
MIVSLALKPGEQSETRSQKKRRTRTRTDRYIKGELPIIRYGANGKPGAVFELCSQGETAARRIGGKKQKILGFDSMTCMGLNLGKHFFFQSPPLSKMVKHPGRAPRSGRGRVHYKIKEEGAHLVARVGRSRLNTQTNNNFARAAQRFTPSVGGPLIHRHWPRTGQRGGPKTGRAETQCGMATSNYLRSAANTDTHEPTTPNDTTLHNESNHRDPPPHKTMHEQTQHNAHTRRNNEERVGSKQAEERGRERELSAEGDAARLAEHRQERRSAEGQTTRQQQRRTGSGAGDRAAGTRRGANGPSHQPARTHAARAKPPKDRAEHEYRGDSARRRQETGT

SEQ ID NO: 980372 - protein, 430 aa, Homo sapiens
MAWQGNDFCAHFDDGPKVQRPFILTQARRTTGHPITCGGGGPVLPPIGGRRQDFGCGHLAHTTTFGDRDNTTLRRAGFHTTHSVPAPQALSGQSGGDNQPQAQKHVVGRRDANHWRARSILIYHQCPSTAWFIAVRHAARRSSNDIRNEPAERRTTPRGRDSQATTTSAASQHRKRDDRREAGGTRGSRQSETRSQTQRRRAKHRRGTRDAEEAEREAAAGDDNTPENGEHARREQGEKTGEKGRRRNAGGGRDTGRAQERGREGATGKEEQELGRKRPHQREEESTEGTSQEGKREERAERGLGSARRGQERREGSKRDEQGKQRGRGGEEGGASGGRKASAGRRDAERSRHESSTGRGHRASDAQEQEQRASQRRRDESDDTGEGRGGERKGKKQTGRDSDRPTHGQETRAQKGRRTDSDETKKKRAS

SEQ ID NO: 980373 - protein, 174 aa, Homo sapiens
MLLQQKHTHQQTFVGPGLEKFKPSVGGPMSIELAKCQETGLEGGSQKKRGAAGNQGRACKAVHTRIAPDKLSTTSANQSEEHHQKRQADTSNHAPSTETRHEKTGKQKERRQQTASEKRRHTHERGKKRKQNKTQKRRQNRKEEQQERDDSEGSERAEERKRGQKKREAKERKS

SEQ ID NO: 980374 - protein, 191 aa, Homo sapiens
MIHYSDHCAVCPSDPKVAKIQLLDLPGIIAGAKDGNGSRSTVICQWPEACTLDPRVVRACPCNLGNTTHAHWTLRGRFGHFVRPGNPESCVTSTAREDSSTSFAPVSVFIRARSGTNYTPQCQGLCNGAYVVEPTSAHEKGPRGLCVLPSLFFFASPSFFVFVTCRRAQYAGSTKYELVARRRNVRTELQR

SEQ ID NO: 980375 - protein, 528 aa, Homo sapiens
  misc_feature (323)..(323): Xaa can be any naturally occurring amino acid
FRRASRMAAQGGRAWAGVGGAPGAGRRPGRKLALQAAENGAEHPKEMELVRAGLRPAGTAGNRTPKVVTKESLWGGDLAWKAWNRWDPTLRPVLPKECFKVPTGCCPGATKRHKAEARKAPQGETPLRGATVAPSWAHNGSGRPVAPGRKPPEGGNRQEPTRAQDGLGPFRGRRRLIWGPPLGARGKPRHSAKTQTAERGDIPQAPTVDGMVRPNGAERRHKGAGLTPKGGLVPPNRGGAGHRGAPWRGNQNRTPYNAGQGWAHTSHTLFNGENLGAAPKDKQLLVVTTTFPMVWVTPHIAPTRRRGMTNVGLNPVSPVHTGXSRTKYLKTRPFSPLGSERFQYSFTTHRTPRTHKQHTTHNTTHSVVADGRTHKEAPPTSEAKTRVSVHDQPQAETMEGAQRDRRTPQKVADNEYAAPSGGESPNKRGRYLKQEKPNNTRCENDRDQKGGTMLRNYSDTQQTKQTTAAGGQHTTETPSLLENTKPHDQADALLRHTPTRGAYHKTGTATQQATRDYTKTQPTQQKTE

SEQ ID NO: 980376 - protein, 70 aa, Homo sapiens
KWRGMDVFGVLNGYKVSDWQDEKVLEMDGGDDLHNSVNVLNTAELYTVKIVKIVEINKCSSYLKGKKFQD

SEQ ID NO: 980377 - protein, 110 aa, Homo sapiens
IIFLFPPHPPQKSLLCATRVRVQLAHWAPFPGFGQFSCLSLLSVGDTGAHHYTGLVLYFEEMGFRHVAQVCLKLLTSSDPPRLWPSRVAGITRLEPPRPFFCLRSIVRYF

SEQ ID NO: 980378 - protein, 71 aa, Homo sapiens
MQNRLILIFTAGLGSGLFRHNTHGGAGAGVNPTCGRGGTLWRVNAPILEGAAQNKGGGASGGKPRGTPGKK

SEQ ID NO: 980379 - protein, 201 aa, Homo sapiens
  misc_feature (8)..(8): Xaa can be any naturally occurring amino acid
MPPRIYTXFTSKSATTVSSLQALPPPRRASLSAKFGSISARNTCCARARAFPRPAPPLFKDSLHVSPRSRPTLAGPLWDWFPGRETESLSHLWIRPRERAEAGGLSVSPPSCVRSHKENRVSQKKKETKKCCGAGRKVPNHSGAGPEVSLARDRTRAPGWFPKPAPVAPGPARNAGPPRARDRHENHHAKHDSRQQAPPRH

SEQ ID NO: 980380 - protein, 195 aa, Homo sapiens
  misc_feature (44)..(44): Xaa can be any naturally occurring amino acid
DIAAGSQSGRRSGRVWQERRGASGISLPGTSGSRHSDRGPGRPXGCREIGGVAAAAGGGGSLQSREPARDALLRKGGAPNPGKFPYNMGQGVGGPGPPRTDRGPGAGTVSKKGNSPGGHPAPGGGGRKPFTERGTPGKAGLWTRVEVVATARSDVDGEENTDGTAGSEHNPRRGARGIDPQHFGGSDSVRREGQL

SEQ ID NO: 980381 - protein, 343 aa, Homo sapiens
TAPRTAQVHGRLLIPLWRGRRYYLINLDGDGELQADAAGPTQDLHPRSIEQSGQDGIPWRCAARWIHGPATRRWVSTGFTVRSREGYPGTSTAHFHWRGHTLARQYREFRHSKTSAEQSPGGEFLDGSHHKHPQEKTNQSQRNQTNLMGGDDLGSAIGQAFEPRRVLQRDSLREGDWLDTRERKQSTSAGQHPKGTIPRYFTSQHNGIGNKARKTQGTQEQQPGMNRLPYTIPRHAKGTPADPDAGPQPNCVNPWKVKDPKEAKGTHLNVGSHTTGTNKQGAKRATGNILPREHSQQAQGKGKAPMSAIICKNTFPIGDLVTQCAKQRVCQIPFFPQRVKKNP

SEQ ID NO: 980382 - protein, 336 aa, Homo sapiens
EEERLQNEGTCNELRLTTNKDRLVTLEESSKATEKTEFLEPDSWEHIDEQQFFTEEDTKQNLHTISHCFTSNNDTSPKQGSMSFSTTQQTTYNVRMTQPGGSDAWPYHQVIQPDGTKNTPPTTHHPLPATPYTHTHTHSYNTHLLHNTLHTHTIKKYKNSITKQQKTHTHTPSPHKTRRTRKTHHKIKKTHWGAHQNIKRHKYQKEQQRQQNHQDKSTKETNREQGKKKEPQTGNTKQAQDEDKHTSTDEATIATTHTQRKTTAKQKQGTPTRTQGGGAESGGGRGPAGGDERGREQRAADQREGRTAEASPAGEGGGGGGERGDSREGRATAGEG

SEQ ID NO: 980383 - protein, 129 aa, Homo sapiens
MNDYPCPLVYYFSKTHRNFIGHFLLHPCRKKQAPDHVSCTSTNHASMAETIWVLLWMTRWSPWGTSLFVLAPFNGFLPRLLDLLPMVGAGPSWGHYSGGDSVFPHGGVRWAGIFRPLAASGRRSLGRPP

SEQ ID NO: 980384 - protein, 150 aa, Homo sapiens
MVTVSQMTALLEEKHVQYIRASFKVGKQSLQMDLPELGYQIALNCTGGVITSMVEDNAYNVWTFKRNQDSNLRRKAPIIVHTVGVPPLQTFNNGTITFSGSKRMGTLGQDLIVWIRELDRSFAFMERGASRGANQGSGGQDEGHRHPNGK

SEQ ID NO: 980385 - protein, 299 aa, Homo sapiens
EAKRRAEHHWAADGHQQVCQPAGMKAYGTRRHLYDPKLAQTSLSDQATISLQMGTNKGASQAAVTGARTKRQIFEPGLGMEHCETLNVRPADGQSNKGASQRGMTGVWAATQGLRPQVLSDSRVPELCEACQKPQGTKILQFGLGATRAFPVFPPREGCGVLVDPSKASRPVSWIGFFQPLYEFNSTGLRSGREQMAGGPCGGRDLRRSVQGPHRAVVQQGQWRSGNVSGVPNPQSGTPEKSPGESQRTVGGHHRWEACCIPGSVWRELVVEGGEGILSGRRELKKKSAGRKEEKYEAT

SEQ ID NO: 980386 - protein, 79 aa, Homo sapiens
  misc_feature (23)..(23): Xaa can be any naturally occurring amino acid
  misc_feature (48)..(48): Xaa can be any naturally occurring amino acid
MVMKWGKTGAKEPAGTGGSTKKXGARVRTTKVRVRSNRGPVLPPSAGXKDREKQRRPKTRRQRTNGAERTKKSTEESAT

SEQ ID NO: 980387 - protein, 240 aa, Homo sapiens
FPLGVSCAGAEGRRSHGPAGMDGLEAPFHKDAGACHCVHQPARKICRRSAGSQGARSFGAPVWCPLRGPFVRLPQGFGAHTRVGRGPGFSSWEGRLQGGRVPTEGWPGPFGIFVVDSRGEGGNNVPGDCPCRANGAQRFDRALRSPKFILFPKGSPLGPKKGTRFWLKNLNLATKLAGTVNARPEPSIKTEEKSEFITLGDRHAFQKASESHPEWRVQTPGFLGIRAKEQGRGDMVVEEK

SEQ ID NO: 980388 - protein, 299 aa, Homo sapiens
EKHLQDLQDIFDPSRNMATYRNILSYVKRMQPPITSTSSLLSHEQTTDPFYHERKLTSKRYDWLSVNPFGHTLTTLTFQRTHSANVDLDIALYWLTHWNTKLMNDNGHKNGSTLKFPQAHATNHYPRNPSGLWTLRSPKHGTRLAYQPTHITNESKPAQAKASLTWPHNPLCPPKATGTLNSLASGTWHHQKSRLTNSDTTRLEDTNHDITSYLYPPKGSHSRHTGFTTSANPKRQLCPKAGNVTNCVIRQTGTVWKTLVIPTSLQANTDWAWQMSPLLPHTYKFARTYRPLSDTPTYT

SEQ ID NO: 980389 - protein, 136 aa, Homo sapiens
MLVASCPFQLNSSCGPLSLLAPELQRHTILLQAVQVVFPLLKMKLYISGQCPTGACHQGTRGRVIRWSADPVLSIEGEPVRLPLPQGSESGNSGHQCPQEGLLGQGEGSVKTSRVVPRAAQGGERACLGGNNPAGV

SEQ ID NO: 980390 - protein, 264 aa, Homo sapiens
  misc_feature (218)..(218): Xaa can be any naturally occurring amino acid
LRQKDQLSPGSRGSSEPRCTIALQPGRQKENPVSKKDTKTTRTIHDKRRRHTPTGHKRRDDERTTQTRPTPTNRPEHTTAQEQKDPDHTSDPTDHTVPERPPDPPGTTQQQHRQQYNEETTHVCVVAQLTRAPMKEKRRFFIQEPPIFRVLVGAGGAPPKGCGLSCSTSCAPNSRAPPQRENPLGGKEHQARAWRLLSTQIIKKNAAGEHNRERRCLXKQTSHKGGGSRQGATTRRRHTTTERRLTKGERPEIKKLRRGHGGGS

SEQ ID NO: 980391 - protein, 36 aa, Homo sapiens
MNWTGKNRRKGSKTRPVTGGCTSPPPPHKPKNQQTH

SEQ ID NO: 980392 - protein, 114 aa, Homo sapiens
LTAASTSWVQAFSRLGSRVAGTTGASHHAQLIFCILVETGFHCVAQAGLELLKLLSSGGLPASSSQSAGITGLSYCAWPSKAIFQTQRKDKDISRHTKVEGIHQCQTCFTRTVY

SEQ ID NO: 980393 - protein, 155 aa, Homo sapiens
MKEADAEVAVSQDFAMHSSLGRQSKTPSQKQKKKKKTKKKKQLGGRGVGPEKEGFYKNHLGVVERARHPTVECNWREPGRKSGAPKRKTRLQKTNWSAGFPHQIKKQQRGRKPGAGFGTKLQEGGSGRHTQRGPTQRGAQEEPEIKNTTGDAGGR

SEQ ID NO: 980394 - protein, 116 aa, Homo sapiens
MALACLELLPGPWLQYVILDPELRVEKWVGEFEALRPYGAPSPRGLSGGLAWGLLGAAAWLNLVGNLRRLVSLAFDKSLSPFKHFWMDLAATLFILGKNSLVKWRAKDLAHWVLPG

SEQ ID NO: 980395 - protein, 201 aa, Homo sapiens
SAERLGRRWAVLVFARGCGLPLGMLRSGRAGSGEGWPKNFLRVGVERKVARNTGQDGFVKVPTRVVGKRAPREKPGWATRKGPAQGKKGGLPSSLTRRGGVKKKKALQCRGIKRGAPGEQPWWGGPFAEEKGNSGDGVILTRKVCWTAGKVWAVKFHGRKRLCALFSQKKGVSGGWEGGRKNFGEDQGSDFSQKKKAEEPL

SEQ ID NO: 980396 - protein, 132 aa, Homo sapiens
GPAGTPARTRRLSDTKMSDDAGDTLATETKQKLLRCLIVILYLRMQKCMVIQLQFHMSQHQVTPEGRGMKMQAVPGAGVPPMWAPCASLRNAKGPWSPPSQMETVTEDTLVLNVWDSVSLGREEPKDRENTR

SEQ ID NO: 980397 - protein, 166 aa, Homo sapiens
PVPAAGAGEWRLTGAHLPPQGEGGAGCERAESELSWKVATWCGQRITEVKYVIRISLLPNWFPPGCRGGGRGEGEGMVHALRRGSLAGDLSRVSTPVIEPCRQILGQVTEPSSSFPKSERFEGALPLVLTAPSVPSSPSSKMWQDSPRALGLLPVFSLHWASQMIP

SEQ ID NO: 980398 - protein, 238 aa, Homo sapiens
RATKRPALPGALQSQKSSMAARAKATTTFPWCCTDRGTCAGELILSLNQAQMRSVLEDAFCVESVAQMSTTGSMGRMREFHGEKAHGAGHMKLRGTVRTQWDSFGKAPKTRVIVLPSSLCAPRENMAEFWQGWADTILSPSIFFCARPPDEGETSAGSIRHNCSLCVTSFLTNVTLVRKGRPDRGHFLWGDPIACRKRAELTLGTPRSLLCGSLGQIREWSIWARVAKGNENNSKVVG

SEQ ID NO: 980399 - protein, 115 aa, Homo sapiens
MDRGARLPDGLGLWSLRGRSAGVLFNQGKLCPWQELGQSSHILQVILINKICGRSQKGLKGSLRGRIWEVTKYFLQVLSKHKVNILIQDNNVMCQCWVYSGRFYARYSLKEYEIV

SEQ ID NO: 980400 - protein, 238 aa, Homo sapiens
SAAGLLGVKVCVSFGVTRALGAVVKEPSSGSVIMSRYGRYGERTRGVCVVTVGTWRWQKGELEGASSYNGSFKECMELGENPPGFGPLCGIRKDPKEMQKDAVYEDVMDQGDCVGFPSERLTLSTGNASEKITVCDRPLALSVSFDSKLIDAMSVAKKGTSMLNDGHLLQPGGKKQAGPGSRSTFSIQRKGYSRFTQEGASGRSSGSRHLLEDQDLSLFEIKVTFTQKNLGVGHQRAG

SEQ ID NO: 980401 - protein, 213 aa, Homo sapiens
DTQAGKEQVISTASTKCVLSSVSTGMCHIAKSRITSLHELLVSKDNKTLTSPFQKLHKTAYIRGWLVLQVEGADQPVTPQTHLATMDIAIPPPLDPPPFFPFHSPSRLFDQFFGGAPVGVWIFSRRSTSLSPFYLRPPSFLRAPSVFDTDSQRMRLEKDRFSVNLDCEAILPRGNSKVRCGKDVLRCMEKHEERRMNIGSISRSPQEYRIQLM

SEQ ID NO: 980402 - protein, 128 aa, Homo sapiens
MRLKNQARDPNLKYPIEQRIITNGGAFGRKILHHSFYNELLCSHLKETQTVSPQRLPLNSQGQQGKDDARSIVGNLHVPAMYVAHSSCVFPLCFWRTKGIILGFRLMGVTPNCPQFNEGNALAKCIMR

SEQ ID NO: 980403 - protein, 310 aa, Homo sapiens
QRLPKVIGNQSLSRAGLHRPKMMADEALAQVGLSSGVFPDKEVMLMLPYALGGEISSKSPCWRLPTAPMGQPWVYSPRPFRRAGDALKIGGRPGKLCSFVGRTQKEPPVERRPKGPRLGHTQWGFWKNAVNLFLPNVFWRKPSGCPRGPPKARGAGAFAPGLQSQRETGGRIGPEQTGWVHTGPFSGTTGFPPGFQSTFYVHRCHAFPLKGPKGAFIFFTPPQKVYSDLQRLHHHHHSSNQIACLLAARVRPSREQVYKQTTWWWGAPTRRECQRTTCAYRVFPKTTSLCAHSYVVWGSTKIKHPRGTPM

SEQ ID NO: 980404 - protein, 78 aa, Homo sapiens
VHHNLHCLYVWKCSDCILSIVRLLPVQWLYELVSCATCAIVGVPRHIADSMSLVTFAFAWLGSPRVGALGLLPVVSTE

SEQ ID NO: 980405 - protein, 176 aa, Homo sapiens
NVLDNKKRTALTKVCSSQLYQHEAVQCQEDECALMLLEHGTDPNIPDEYGNTTLHYAIYNEDKLMAKALLLYGADIESKNKHGLTPLLLGVHEQKQQVVKFLIKKKANLNALDRYGRTALILAVCCGSASIVSLLLEQNIDVSSQDLSGQTAREYAVSSHHHVIASYFLTTKKNRC

SEQ ID NO: 980406 - protein, 84 aa, Homo sapiens
FMMSMEPQANLKVVENTSAALGSILACVSLPRWLSRDFGGYISGTDVYVISYERKEIMELQATIHVPAKDMIINFVQPLFIVSP

SEQ ID NO: 980407 - protein, 119 aa, Homo sapiens
MRSKTGVAIGARRSSVTPRGNVQCAALTCYSRTGGRNIPEKGELRTAGAGADRAANGICHGHAQNRGAEGGAPAGQQVQRPRQSRGIRYPWRNKPDNGAGKREDGAQKLSAGGQTNRGG

SEQ ID NO: 980408 - protein, 107 aa, Homo sapiens
PRLFLVVSSSAATVVSSGVLSSACAVTQRCVVDFVGLMLNESVPLASLICCESPACSNHGRHVKDHSEGELSTLLGNRVDLLIPPICRNEVRWAYKDREKKLGKSCG

SEQ ID NO: 980409 - protein, 136 aa, Homo sapiens
MWAHTLYPALGAATGRRLLSPRESGNTPLATVDNLAPPETYTICHGLGRTRRPALAAERGGLPDPRSRQPWEWSRPSKVNTSWGNADSIGSRGIAPGARQSRAAERAAMGRGTHEETALKRRPQERGRTKADKTHL

SEQ ID NO: 980410 - protein, 297 aa, Homo sapiens
MQWGDVGLNNRASEENVCYSLTDVTQKSTQIYLNDSSCHPLDHLIVGRITVSASTHDIIVFFDRCTVKHLSPEAVARLKSFCNLRPWLVMGNRTSSHIGMQTPIKWIFGGGGIAVVLPRLGFTCFILRLYCSRRVSPVCSNVDISWAQSRLGALGFAESFGWCHHGRSLIWASRDGGSKVLGERSSVLQWLCILCSIYAMVRPQRKPGTSGVVPHGGGPRNSCLAGTRGWTQRGPRWARGDRLSVTTGLVPQWRSTSAIGANMEMKRPLHRGRTRKVQASKDKRHRGLYHVKQRSEI

SEQ ID NO: 980411 - protein, 162 aa, Homo sapiens
MRFFHETEAPGPKDFLSKFYVAPRSMKSFSGKMHVILFKSTNNHYTIKKKTKKKKIGRRGGAKKKFQDHRLGGGDRGFVERGPHGAKEHAADTVRGFPPQKPGERGCEPSRGWSKGQQGQALSPRAGETTHKQKKTHDEMRKTSERHKKNTKRERRNKNATN

SEQ ID NO: 980412 - protein, 108 aa, Homo sapiens
GANRSAAVAAVVAAGGGCGDGGSCQDGVLHQLPLGPGNLSWKHCPKKTSSSCAKKQMMLIQKAKSGVQNWQKRTLKTSDQNLLLKDTGDIIKALTERLDALLLKKQET

SEQ ID NO: 980413 - protein, 74 aa, Homo sapiens
AVVTAVVPAVGEAAGGRSRGREIETSCERGESLSLLKILIVNRLLAMCGVRRQTVENVGIIVRLPLRGRDTMNS

SEQ ID NO: 980414 - protein, 176 aa, Homo sapiens
EPSFAKSPPDRDMKLVFLVLLFLGALGRVSGARRRRRVAVGAPVSQTEVTKCFHWRSNMRKVCGPPVSCITRDAPIQCIQAIAENRADAVTLDGGFIYEAGLAPYKCDCSGEVYGTERQPRTHYYAVGVGEEGRQFSAERTCKVLKSCPNRPSQDPLDGNVPIGTLRPFLNGAGPP

SEQ ID NO: 980415 - protein, 79 aa, Homo sapiens
MCGGSASEDCYNNSVGGAPDDKNGPKVQETRSTRGFPRKAERGVEHTGVGLCGSAPTPRAPAEAHTTRTLRGAHDRRQQ

SEQ ID NO: 980416 - protein, 190 aa, Homo sapiens
MGQKWILISEWWFKLTSYGGSLTIVKIHAEKLSEYDQISPPNSQPDKENPVCVNLMKHSKKTYDSFKMTLKDYIKVQKAEVESKTWFRHDDGDYWEPCGLPRSGNSRPTFRCLPREFPFETIKNYQEYGIFPNSEKSVPQGTALKRLERPLGTGSRRMCPKHTPVTYQTHFLAPGRKRYIRKETYGKNMR

SEQ ID NO: 980417 - protein, 112 aa, Homo sapiens
LSPGVLVKARDRGWVSAGPGLSSLSLLSDIVFKPCVQSLTHRRDAQEDKGDLEVQYFLKIIQYWMIIRNVSCVGSRQCGLKQMQQIRCPFVEKAVVLMGKNTMMRQGQSEAT

SEQ ID NO: 980418 - protein, 101 aa, Homo sapiens
MTWNPWTNRWSQEEPPGPRQVCGVHQKKKTRARPSLQPTPTNGSKRAKGLNRGPRKQIYRASGENKQHHKSRHNQSRQSRHNRVKTKQEQKKTKAPTQEKR

SEQ ID NO: 980419 - protein, 301 aa, Homo sapiens
AQSFHPRCIPQKQNQSSACASRTFYIWCQGWVGCKGQASTVISSPVCSPKANAGARMCSRILQSVNQVQNNSHSTIRRLRGCHRVTGREQDHRDNQWNTQNVPTMLAGEQSRPKNGEGVGTKEAPKIDTTKGQYKDNLVRKDHYSSPKSIFKGGKWWYTLTFLEVLHEYKGPILNRYDTNSGKHRVDPSTPALYNAFRPARGSRLVSSMCRPKAETFEETVEPAVTWDPVSITHNTHNTTVGLRPKVNHVGGPQMSTAGSRHGSRGFTKHGDGCNTGSASVHDGNTRGDKTPNTQRRESTH

SEQ ID NO: 980420 - protein, 143 aa, Homo sapiens
TKEAVCLLGPDGELSTFVAMCSSPSPSLSHLGNLVRSHSQSRQPRRRKSRATSKFVRTLQQNSCARGTVRLPNCHSKIAIHEKSIWGGNPGCLLGLLEKLNVLTDMHQEQLCKGDEPLLKSCFIRKMWHPGKNNLWPQSSLFD

SEQ ID NO: 980421 - protein, 112 aa, Homo sapiens
  misc_feature (71)..(71): Xaa can be any naturally occurring amino acid
KETKEVLGRQRAGKRGQEMEDKVTSPRESRRSKIKSKIILIWDKSLEVQILFKETVCRKGTKYSDSGDYNXAKAKMKKQSNFLLQLRIRRRPLLTTFPLRKTFLKESRPCVW

SEQ ID NO: 980422 - protein, 67 aa, Homo sapiens
FGSELTLIRAELSRGAARPPPGEGGYRWGAAVSVRMIEVLTTMISEIVHQVNALWEQESRCQPKVCG

SEQ ID NO: 980423 - protein, 253 aa, Homo sapiens
DAAKDSTDRLTYVGCFASVRGKRRAVFLDLPFAVVRGRLVDPRAPCRPASRENVAAVLPLCLTAWWGWDRAWVGCPNGLGNEVKALPLGGRGMAWLLRYKGGGAGPGREGEGTQKGEATVGATGVVRAFGPLGETQPYPSLRSGVVPRDTGAGLENSFGPREFQGGKPREFQPPVLNCCGLYNLSWKGRDPFWIVDRTAPAKRKTRFIFKNPGETGVWEKARAGFNRGGTLRMDAGFGGNAGNIKVLRSVPGC

SEQ ID NO: 980424 - protein, 188 aa, Homo sapiens
MGGHHCFVTAPSHFKAAIDRRKDCRNRPQSNNLVVSVPRTRILDSLPWVGLRTPYDYTGFLATSAPKRVGTSRQLTKRTGNNMDYITLFASTDSKDRTSGQGTGLTLSSHNSVPHRGSTTHCTTSTLGDEETRKNEPSWLLTPTQHSQPRHTLLDLQRTCAHSPHDAHNVSYTHRYSFVTSLPRTQHT

SEQ ID NO: 980425 - protein, 104 aa, Homo sapiens
MVTRANGKGLPRAVKSCRGSSGAVRCIPVPSRERLSPSLECRREVIMSGRGKPGGTSGAKAKSVLPGGLASSPVAVLPGLAGTTGTYAAGNLGPCVAGFHLAGM

SEQ ID NO: 980426 - protein, 249 aa, Homo sapiens
SKRRKHKGRKEAGDRWGTREAERAGGAARGSEACVLGNRGTRLGGDPRPTDTGSRSTQSINTLTAEHAQQSSWLQRLLVKPRYRCPFSTTKQAEPCCFVHTIKHAHPQEQSSQKIIGREHVTGQKGFWKNEARAFSLWYSIVCHPGDVGLTKVYCGAAKSLDCRFMGPKVDLGGSPGGLGLWPRGIHTFGVCRVNPIFFEGSVRGACLCSNRHNRAASLPVGNGTIQDVQCDGRPSASLLNLCLGFPKF

SEQ ID NO: 980427 - protein, 95 aa, Homo sapiens
DKEPVVYIHQEYYAAIKQDELISFATTWMQLEAIVLSKFTTGKKLKYCCMYLTYKWAAQIMSPTGALTSMGTISTLQATSQANGGGSQDRPEVWG

SEQ ID NO: 980428 - protein, 185 aa, Homo sapiens
AKKEKAINRNNEEVTDLKRQAVEEMMDRINQEEFILEPLIRQQTEDQSQNLRKAAKVHVDELQRNELGHLTNPPSSRSLKSLDPENSETELDHGFASHDTVPAEADSSSPTGILATSESTSMPVWVLYPVSTKTALNKNNLEAEFKAVPPNTEPGARARKCEGCTSSQGYVSASQYALAAGNNFL

SEQ ID NO: 980429 - protein, 97 aa, Homo sapiens
TSGGGSAADTLLTHVRMVCEAADDAPSSEEEAIVVLCKDAAAQPQDAVILRAQTCTLMTRASSTDQLLEVGWSHGFPEKDGKQQVQYMGSVLVTKKS

SEQ ID NO: 980430 - protein, 127 aa, Homo sapiens
EEISSEDDELVEEKKQQEEGSLQRRKLEMEDIPVHGKALRFTVYRNRTLQKWHDEDQMLLKTGKGSGAFERSILTQIDISDGTNERLLRRTQTKRSVLSSSWKPEPAAQPVPESCGQGKPEIFLKPC

SEQ ID NO: 980431 - protein, 173 aa, Homo sapiens
RRNPTLGGLSGRQRCCCGWEGAGSGAHERQEVSRHSVSSVEEQVAGTLKWGGEDAIGLDGGGKGFGSPGCWGASGEGAQKGESRIGLFTGAPTEFFPGTGGSEQALRKKGGAVLSQMVWDGNTGGGELVVQGGNSLGEAQRTPSAEDRKRHDMSNEVLHEDFGDVTWNLKLGA

SEQ ID NO: 980432 - protein, 94 aa, Homo sapiens
GRPSGKSKGKARSKSTRLQYNMDLSGEASQFPYKMMISECSRLQKVLNILSEQMILLFNEVAFGHSGYQMQPYSFNPRMPYREWGWLPQFMCNN

SEQ ID NO: 980433 - protein, 292 aa, Homo sapiens
AGRRLSEGVELEGAFMAMQELPLMLSQKQVSQNPFPMSLPQNHGGNQSTHAHSLDDPDAPAPLCDETNASVKHPMNNDHGLRPAEEHQRDRPVKSIGRWNIGPLPLRSCKEPLCNAKKCFPKLCVGEELAVMILTTNFKGFTVMNEGERRSLQNVVRRGGFQEMSVDITPEFLEKHKIGLVVHDESVFLCGLMMLPRTLRSRYVVQRENEVLISDYTRMCDMMLCPRTSKGLARLAHVYKDASSDRAIALELGSSLRGAKRSHGNRIGSRPAAIKSVVHVTGPFTHLGGQAL

SEQ ID NO: 980434 - protein, 120 aa, Homo sapiens
  misc_feature (15)..(15): Xaa can be any naturally occurring amino acid
SLKLTAFGRDVSLRXLSCARATLSFWPGGYPRYSKDSGSTHVIQQQNGKSKFPECAMCLGFIPSRLLHVDFTAPTCSRDSDHQVAHPDLSFQQRTVLLSLVLTLDIHPQLNNTMSHAWPL

SEQ ID NO: 980435 - protein, 208 aa, Homo sapiens
AGDVVTFVEENQLGMWVGRLNHAVQKVWQYQSMCITTYSNSNTLTGRLTVYATYGKLGMDGSNIQVKVQKKLQLGKQHNDFTVSRVPKPSSVKVPCVEKLMHLISVDTSHVCTITFLNAKKKKQHSKTHTCVRRPRPPNNPFQPPCLSRRPQQLRAPLRTTGAQGNPRPRKCSWLPPKKPRGQRISEPLTRGRGTRPPRRAPEHPPGG

SEQ ID NO: 980436 - protein, 134 aa, Homo sapiens
NGSRCGTLRKPGWDSEQEDVNSKPPAFQESSPERPFVGGPEQEEEFGPAVAAVLQSSGPFVEGSIVRISMENFLTYDIVKYLLDPTVKYDRGSQWNQGSRACVCAIVPVVKLEKPCFPWDEQDKVRVFGRREDV

SEQ ID NO: 980437 - protein, 73 aa, Homo sapiens
KHGINAEWPLRPGAVIIGFRLRLKMPSPFLPQGTTTPLIPILVIIETISLLIQPIARGVRLTVTLLQATYSCT

SEQ ID NO: 980438 - protein, 129 aa, Homo sapiens
GGYLCRVTSCFLSLSRAVWWQQAQPSLKCKKERREVRGTLYRCRDKWLPGKPIRFHRVPREPVIFIEIEGCRGMTMVPHGRVFQGARLKHIVSAYRGGRHFRRAWGEHQEMIPMPPDVAKGRCGIRPKR

SEQ ID NO: 980439 - protein, 108 aa, Homo sapiens
QAEKMAPPSTREPGSCRRQRNKSDGEMVLPGFPDADSLVKLALWVRGGSHQGIWGPTTVGDEYDFYRSFPGFQAFGETQGDRLLQCMSKSNAVPLGVAETLRIEVKVT

SEQ ID NO: 980440 - protein, 112 aa, Homo sapiens
GWRVRGFLALGRFFKRIIYVNGRQVCPFLHMRNDSGIKKSFEKLKRHYSYRVNSPGLAAIVAYGLYKLKKQGKYVRMSIHLIQMRVEPRLCRSNDVWYGLFHVSGILGKTKP

SEQ ID NO: 980441 - protein, 78 aa, Homo sapiens
ARLSAELLSWRPSVELLSRPVLCCIGGCPELGGARVVLRDREGRWGRHRRSLQDVRGVQLSKGVEALQGWYLGGPECW

SEQ ID NO: 980442 - protein, 139 aa, Homo sapiens
MFTILPLLLAKKKKLVFKARANAKKAWNEGSQRVPNRETTGTTDAGKDGDTTLHEMGCTQTRPEATCCTAHYWAPCYTDTRAAGRNHRAPYTPDTGPLQPLWHHTMCWTHPTKPRCAPPYEPARRKQRTEKVTPPSNVE

SEQ ID NO: 980443 - protein, 321 aa, Homo sapiens
CSPPCFSTCYTPLSGARGCRSASSTHAGTHLVLAEHCLYTAAETLLPYDNIYQTYNSLLLSHSPGSGYQSSKLAHLRLRQPTSPVNRGSGCATSGTPGMHYRTPARTAPQNAALWCAGVTSHFWPGGANIFLGVQHLPHCGRVLRARQPRTRTLTPYTSLLPRHPNQPTQHTQHTTHTHTTLVRSGTRAHRRRPSQTDTGFYRAPLSGVEEAQRGAHKVAQKDSTTWGHNTRWPTKRENHSGGDNILQTNERAPGATLLLPHPANISQNKTGGARGGGTNTTGRQRLLCERRKNLTTKSGGSRARQGRASNDYTEGGEHDT

SEQ ID NO: 980444 - protein, 128 aa, Homo sapiens
DCEAGSDAAAFACGSCDRQALYSGWNNRKVMQQKRNPQFTCGAFLYDEDFMDPLYEKGKMSRNYVWMCSHTKTAILGRHLGLSFQFSRCNSMEVECEGDFFAMLRGESCVIKKKLPCSVDTELRGTLF

SEQ ID NO: 980445 - protein, 85 aa, Homo sapiens
SCGRMCTVHAEAERVRKFSPFSHRETLTGRVGTTDDTGPHALASPVRVTIIMTKACRQFIFLPVYFPFAFLESCASQKLESSDVH

SEQ ID NO: 980446 - protein, 69 aa, Homo sapiens
GPPTRDPTAGPDVHSSSSGARRANGPYEEVSVSGFEEFHRAVNSTSAEPSRTRGVCSTLVKDVCHLVAK

SEQ ID NO: 980447 - protein, 75 aa, Homo sapiens
AGRKRLPAWTGADLTRSQLRKMDSEVQRDGRILDGIDDAGREDKLAYEDVAIPLNELPEPEQDKWWHHRIVSREH

SEQ ID NO: 980448 - protein, 242 aa, Homo sapiens
GAEVAVSQDGTTALASLGKKKKKKKKKNLGAGLGLREKVFKSHIRGGARGGPREGNGRHWAPKAGAQKERTAGHMETKGRGSSSPPHIKKIAPGGDTPRGRVPENQISHKRGEVQGGEPKNGGRSYPHQGGVPKGRGLRENIPKNLKAARVSGGGATHKANREHNRSKKKIDKKQHKDEDKRRRKTKESTQRGRWERRDKSPDDTEQERDRQQTQSNKRERGNADHTTAQEERNTREERKKD

SEQ ID NO: 980449 - protein, 103 aa, Homo sapiens
MGRQETWVMKREKKEFLRLMGAGNEQNILVVLLLGDHKSTSHFRTGEEDPRKLTEELESQYQQSMASTTYQEDIGDIVDCGFSEVEDHDGEGDVAGDDDDDDD

SEQ ID NO: 980450 - protein, 276 aa, Homo sapiens
CSGIRLRFILFLRITPPGLSSASQPAVSLTPEHHAFNEVAEFCMAAASFAQLHVATLPKPICALIQAPMLAQHIGQWHACKRSMLHPKFTSLPKHGAHCEANHLTHTHGPIPGGMTNTKQKRECTIQSIPWQSNACSTPQSTKRKQIGILPLDLEELNGPSLGQTMWTQKRNHPLDGNIQLASGVDEQHNLYDQFKTGLGYDLINIAKERSYWPNIIALHRGTQTPPLRKHIGTEPFNYFQTALRFQTLTARQDKAPRITPKRRNQLGGDNDRQVT

SEQ ID NO: 980451 - protein, 132 aa, Homo sapiens
MNTDADAYLVDDMAHGLERHINYNPRRRTTYTRFINTSYIKTELRTYISAPHYYDPLGVILTKRPQGTRTYTQVGGEQRHKKSNPSYYQDRPTALVEAIDCHRSIKERTHPMKISQNMPYYPNFIVTFAKSL

SEQ ID NO: 980452 - protein, 113 aa, Homo sapiens
NSIAHHVFHFRQIQIIISILATMQHHSSNSNEVYSFSSPTVTITSQHFSPTNISTSQFHISYMEAISDSNHTHPITAHATACASASPNYSKCIHIYLNDILWFHRLCLNYRAI

SEQ ID NO: 980453 - protein, 72 aa, Homo sapiens
LHPGERIMGQVLHDEVIPDVRLRKRRNYSSLMAYPVWKCNEYVFLCCQCTSVSHGNRILLGERSGTVKKRSR

SEQ ID NO: 980454 - protein, 289 aa, Homo sapiens
MLTDVRSLPGGPGLDDRGLVKTQIVTVIDSHGTRVLKKEDSCLEAKHNEASPVGGSNMKLDGWNQSSYRCKKQSRSDLAMPGGLMCRNLWFLRLGFPVTLTRRHESGHSEEFPLGLIQEGMSVYEKTLNGDTLVSPGGESHDRSRLFRGTVLDRQVLGNSGVQVKRLSVRTLLDNPGLQLYTERDVQTASKVVCNAVSQRLDLHWVMSKHMCPEQEVRSLENTYDLERALDTQVLVDQLLGVQSAALLNCPVHHTLVVGREHKIAGAKINGGAQKDVKPKATNGGHVDV

SEQ ID NO: 980455 - protein, 70 aa, Homo sapiens
MKPGRGGRKPTKTADTNNTGDTEEHNELTSTTAHTRLQITQRTPQVQNTTHTKTTSRTTVKRRQQTTKTR

SEQ ID NO: 980456 - protein, 99 aa, Homo sapiens
  misc_feature (20)..(20): Xaa can be any naturally occurring amino acid
MVGQCAISSGVRIQDDHNIXERKPVYIKLSEDGQKRERDTEPPKKDWVCKGQTPNGRSNGLFCDKNTVGPNRENPGHMWQGGGGSPQKSKQSPGGEGKR

SEQ ID NO: 980457 - protein, 82 aa, Homo sapiens
GLKMAAFARSEITASLRGLQGVRSMSPLTKVQKLASNSMCVSSKYRENNFFLADRHNFITDEAGKLQKMEFALCGPACNAMV

SEQ ID NO: 980458 - protein, 293 aa, Homo sapiens
KPSRGLFSCSLAPLLADSSARNPNPLCLPQDAEASLAHTDPPFVPQLLWGLEYAADARDDHTDGWRPKMELTRAILRGGSPGVATGSPRNSPAKTPLQGTQGPGGLPSFDSVGPGKTLLDRQTLRGCIPNGPKRRLALKSPGLLVRTAAWRVLKEPVYRRTEHGKPLNPGAKWARTPRQAMERGESSESVRACATGDKTQENSGYQHNHSNAHTAPAQPTYRHKNTLSIARHPPRTTSTLEVAGAHIEGSPDWPTKRRKSGAIPTSAARDSTRRGAGQSAGKYRVRDTRTRTG

SEQ ID NO: 980459 - protein, 151 aa, Homo sapiens
MYRLLRKLRYVKFLAINEYANVWLTMSYSVILKVNWYDMADLVRELMGSLTIYLELMMEGVGTRNGTYNVNAKVVLVQKPRRLSLVSELLIILRRGRECDLVPKEKACMHVCALEHELRLSQKLACDVCVSVPCSCGSVHLRVVSLPDMWQ

SEQ ID NO: 980460 - protein, 96 aa, Homo sapiens
MHHCTSSPGNRRKDLSSKNNNTRPKNNPLLGRLDLKKLYDTTGGAGGPEVSTPGHGAPEDTGPTHARLSPKKPRGPAVVQLQWVGATAQRSGDPRR

SEQ ID NO: 980461 - protein, 250 aa, Homo sapiens
  misc_feature (23)..(23): Xaa can be any naturally occurring amino acid
DVLRRESSGFPASTVLGRNPALXSPPRPAPIASLRHLSHRTLGLPQGPRRRPAPASNRRAAALLSRRHETASPRRCAQKYQQDSEGPHQPPDQPGALRLLTLPGPCLTTFDRDDVALKNLCQIFSSPNLMRQREHAEKLMEAAETKRVWPEFFPSRDYQRNAKNVVNEWEKNAGLNCHGSGCPLPFVDTHTLVDFHVTYWERGTTLGTDKKVTPLCVAFMATHTWKEQVEASKIWVTRDHLARWERPNLV

SEQ ID NO: 980462 - protein, 218 aa, Homo sapiens
GSKLEHSSLRKNFVLWVGNLGLFRPFMKLYWLSTNRHLTANYLYLCIPIFLDNDYRKDNKFIQNKQKKKNKKNLTGHGQRGPERRRAFRRTHCGRRGGRGDTEKETRRKTVAKKRETQGRTAGQQEATRGASETNPPNKIIKKQRARGGEQTPEKSVFQRQTEIATATWDEYHREGAKTNNDGHTPYHKERSSSPKVTEAPQKTIKKFFTPPRHRGGR

SEQ ID NO: 980463 - protein, 292 aa, Homo sapiens
METTGAGPGSISSSRGRQDLDTNLGMFQDDGTGTEKRKQVLGFKEIDNTGRCNYVNRARYQKTTHGEDPRGDDLCPCDFALSKEVNQGDREFFTIGGEPNDNGCTQQFVDVHRDTWGRPLQPGPRGGPSKRITLEGPETNTLNPSRGAQMQEARGEQGKLRQMASRIGVTKNREVHNHNFFTDMVSQETGGNCTFGALLVGNQTMGDEQRDQSLAPHKFGGPSVAFLVQHNGVTRAQETHRRSADRATGDTQRQHSRTVNTRRTTWGRPVKRDHEADQPWATPGNQVTGDTE

SEQ ID NO: 980464 - protein, 114 aa, Homo sapiens
LYGGSRGDASDTSVNVNARAKAYLKVPSVSEGTGTFECGAVLEWNEGRVGEDIVKCSTDETLYQLKTWMLDCTEEKPFQNICSNNGQCVLRTCVCVRKRGYYQMKFMLANDGEW

SEQ ID NO: 980465 - protein, 135 aa, Homo sapiens
  misc_feature (32)..(32): Xaa can be any naturally occurring amino acid
AFTNQEAQQLLLGVGSSIRVCPRSKRSGSAAXYTSILKKRHERKSVCHRATRCRDKRLKNRIPRGNAGVASYGSGAHVGVKGVPPQRKTCGSMQVEGGLLQQLKYMPGWRYPAQFLGRRQLRRGGIHAGENKEGP

SEQ ID NO: 980466 - protein, 157 aa, Homo sapiens
MCTLAWATKEVKTPILKKKKTNKNKQNTVCVGARPGPLERKEFFLGPIVVWGGGGGPHVLGFRVNHVWPKEGCSHRRRPPGEQEHNSVALGGFPHPNIKKKAAAGGEHPRGGFLETKFSQDGEITGKAQYRGPISQNTGGPKAGPPEIKKLRRAVGG

SEQ ID NO: 980467 - protein, 90 aa, Homo sapiens
MVLWTLGAKRRWTQRGNSVSAKGESAVGGFSPPKYRNTARGQHTQGSFGEHTSTEGGSQEGATPGGSFYTEGGVQRGSRKYKNERRGEGS

SEQ ID NO: 980468 - protein, 100 aa, Homo sapiens
VFPFGVPLKILVSPWDAPVRSYRYGKNKPYLQSLVFRTGVSLNAKIRILDRECGRRQKWDEYLASFDGAINAGQNEIMEAEVIALQRPMAGRGAEIVCQN

SEQ ID NO: 980469 - protein, 98 aa, Homo sapiens
GWQAKDAKMAAVRFASGGSVGLARCWSSRECCAGICCEGARAGRAVVGTPEWSGRGSVTGFRLTRRSGGRGRLLSESRAMLGGRGVAGVGRVVWIPGW

SEQ ID NO: 980470 - protein, 138 aa, Homo sapiens
RKKEQEERQQEQKRNTRGHTQNKRKEKEHREKKRTSQKKRRRGGTGEGERMEQGGEQAEQRARDAKTRQEEKASTDRQGEKPRMQEKKHEKEQQEKERKEDEERGMRREKHQPEGKKERERSSRRAEKRRERTRSREE

SEQ ID NO: 980471 - protein, 272 aa, Homo sapiens
MGLVFVKGYVPEREQRRDECVVWFGINLGFAERRKIAKASVSDDYRKDDKIYLKGLRKKARRKVILDEFVYKMTRGYPPGWVHFMRRLMDEVTPETFKVYENSGRQICRNEEGCRSLGKIDRLRSELPSVVFQGDAREQACVLFGHHKGVDTVCMSAVIWEEVRRLVDRVFIEARIETLGMKELREYHQMDIKRIANEREKQYRCWQGIGEEELSYWSENYSQDLWLIGMGSEEGEPGLYSEGDRGLKTVLSKQGAYNPQGGGAQKRGTWQP

SEQ ID NO: 980472 - protein, 246 aa, Homo sapiens
ILEAEGGRDVFCYVICLLGVYPPHERWRSGVCQRSPRSYCLVAIERLRERSTGDTKKLLADVLKVNVFRQDSGDQVLSREATVSSANQGGLVHPKTSIERPTDELVLSSFKSPLVGGTVNGGSEGDCCWDGGELTGVPSCGLDKKQHQSCPVVESVFKLNEAQLHHCHQMRDSLIESLIVSRLPKCPVGSVLWTVGQLFQSSDQLCPDVWRKVAESLTGTVGGGTKSFVTLLFCMEFILLAKLVVW

SEQ ID NO: 980473 - protein, 30 aa, Homo sapiens
MSVQQAGAVTGRAVTVPPGVEPGVANRATT

SEQ ID NO: 980474 - protein, 163 aa, Homo sapiens
MQKRLTGGKQPGVFAHATSVETGDTQSPRVINHSKSTRVHTQAGEVNTQKTMYHTQGGPNKKRRGPPQTAHTRPGTDRQQQPQATNGITSTPHSSPTPPEQENARRATTHTQQSRDSRRKDGRNTNEHGPNTQPRTLARQHANHATQEQQQSPSSPQHAPPTR

SEQ ID NO: 980475 - protein, 255 aa, Homo sapiens
SRMSGELMCITMNVLLGSVWDLCHLRDFCAKCARVLYSYLNEGSSRTRATTEMLWDLERTTNTQVNSEWQTDHCETWHLLTETEISCLRPSGVLHLWVMTKDNCQRIFKKEDCKYIVGWRPKDPKRTCSVSEWVSNVLLDRHQGSQARLILLWASNSQLNVYAMPISNNDFSETNKQRFINKYRRDFFRPPGHLWRSVSESPHPVCELGATPLCNRNTGYCFAATEKSRGQHTLGAATSPMENGRYDNPRVIEKS

SEQ ID NO: 980476 - protein, 67 aa, Homo sapiens
VLIRTGTMEGVEGDEEGGSIVVPEILKKTRRNAQSWNNQCAHDNRIDWPSRECCRKGQGRDTSYSMT

SEQ ID NO: 980477 - protein, 202 aa, Homo sapiens
LKKKKKLLRTCISRFSLCYKELPEAGRGGHACNSQHLGRLRRADHRVQEFQEPAVANIGETPNRLPKKKNKTQKEKNFFGAASALTEKGFLKNPSCFGAPGAPVGVMSTNRVAKQRGPKRRTPATKEHYRGGGGPPPQNKKKRPRRGTPQDGFGATTPTSRRDPERANRGEPLHTQRSTNGARQDYQINPATGVERTARQTR

SEQ ID NO: 980478 - protein, 79 aa, Homo sapiens
YLTPATVGIGLCCLRPPPREPPVTVTASLACDLQVLGDSTVRCQDILEGWEKMEFHSCCPGLECIIPISVTTTPPPRFK

SEQ ID NO: 980479 - protein, 139 aa, Homo sapiens
MWLLMGKRNPLTTTHAVTTTDWTVLQQHAKTQQLKTRWTNDRRNLDYKTHRTHALGTTGNLTTLTDTHNKTPTDAELILTEPLTDSQPTRLPTVTQPQNWSNRLTDDTKGPDVTYKYTKELTVLRHFGPHLIQDPNCIP

SEQ ID NO: 980480 - protein, 118 aa, Homo sapiens
MCQHPCVFIYTEQIFGGYPFTAISTAAQMLQPECCVGATTAPQGKALVRPQSSSGPQRPPRQLKANPWTKGRVTRDNTGPNTNGREFPQVKRAGATRLWTTPREPGAHRAYTEGQGLI

SEQ ID NO: 980481 - protein, 283 aa, Homo sapiens
MSHQTGIQGKSWDSGGDWASVRCRAPASEDVKRSLPEQTWNVQTSENIYLTNEQTVCWDSYKSAFRFLGYRDYDSLCFTPCWRTNNHAIYTQVRFSECPGYDMAIHVHGLQIILMFVKKCCMQATRATLKKEFGGGHINDERIGPQYRKMYHLPGIYKKYLRSTILPLPPMNCSWREETTDRFKLTEGPDCCGGWPLQHSNTNRSSISPFLEKPSAWGKLDHRQPTNVRVHQLYNCILLGTQTSTWSWHAFRVSRPFVVNFRGHIQPRKIRRDSDNGCHSNGQ

SEQ ID NO: 980482 - protein, 127 aa, Homo sapiens
MSNQSREGLARALTGVHHQGGPGEARFNEPPPEGVTTYQEHDRNHRNRDQTPPTGGDPVTDTPTRQRANSANTDQQDKRRSRTTKAEEQQHDYSNEQTEVTHDNTANNTAAGQPTRQTNNQQKHRKP

SEQ ID NO: 980483 - protein, 289 aa, Homo sapiens
  misc_feature (232)..(232): Xaa can be any naturally occurring amino acid
MGNRREIPRTLGRPRGGKIPLGATGVRKPSLGPNLGGDLPYFTRGKNKTFSKKKGGGTARYIPGGPQGLNRTTRCSVGDELRFEPQKRGPRGLESGEQWNHLPDGQYFSRGGTQDVTSPLFSPTNNRSSNKNNNIVGGTQRHPQEGTFIRTHICGGERGAQQSITYTPEQQVRPKRTTVANHAWGDSPHKKKAPPTPAVLTQHQRGDWQPTSSLSTRAHKRANKDPPDGVGXRSSQTRNARHLIDSSEAGSRPSRQTSRPTRQHDDQAHDKQRIAQMRRPRREQHPTYR

SEQ ID NO: 980484 - protein, 294 aa, Homo sapiens
SSSLALPQACSGGCHTLTSGKGETGLVPPTAGKPLNKIFLMSSKKKTNAQQTTKQQTTETTHTRKQQQHQQTTCGGDATQTPAKRYNNPTFGGAAPPHGMMKTAATKEGPQKKNPVRKTHVGWINPQKKKAGEGTTTDDVDNTQPNEKLANNKKTIKQTGSSPAHEQKKTNPVVSIWKNKDTKMTKEKNDTETNRNQNRQEKNRTEKGDEQGKQQRGKGGRRRKREETNKPDARGRGETDREERENRRKGEGSTEQTRHNERKANKNEKDKETEKEKKRASKKRERKKRPKRRR

SEQ ID NO: 980485 - protein, 70 aa, Homo sapiens
GSLHRAPQWFLSGLRRCVDLLEESLPAGQDAELPAMLALTKPESIAFDRTNIGSCEDFVILEYSGSVDCV

SEQ ID NO: 980486 - protein, 104 aa, Homo sapiens
MVLAIEFFFFKDYYTLQELIRSIIHQKHSFNQFNLEENRWIYNSLKGLCDCVRSLFRREWSGPNFLTVSYWWLRHRGLYWGAKPKGEHKGEFYLTRIFRLTKGG

SEQ ID NO: 980487 - protein, 95 aa, Homo sapiens
DKVSAVWANRISSCSLQPRTLIPAAPYRAARRFTMVKNRLQYPYRRAQKEEARQDVEALLSRTVRTQIRDRQELRVANPGTKTGSLLEKMYAYLS

SEQ ID NO: 980488 - protein, 93 aa, Homo sapiens
MSLKGYEETHVCGKQCPKPRKTGFVTIRNDIRHAPVGSPGNSDISGSPKRDTTIPEHWQEEEKSGVPQYYSDPRRRGGSLHTTGNRLRGRREI

SEQ ID NO: 980489 - protein, 104 aa, Homo sapiens
MSRSPPHCFGADTLPGRALRAVRDKNTDPAPERDDFSAHLQCNLGAGEVPPAWSPFRHQKPVKGRNSLAFTVFNCSRVLILPDFWIDTVQQMRANCVTITQQVR

SEQ ID NO: 980490 - protein, 62 aa, Homo sapiens
MESEKGAKGVCQRERQGAREKGEGNLRKIKTPGGKQGVMTKFQGAPRAKGVHKREPKETRKV

SEQ ID NO: 980491 - protein, 110 aa, Homo sapiens
EQCGGPEGRSLRSTVLGTGTDPVVLSSSLRRPPIVLSDVGDLRDPVILRPNLLLLGPDSNVLCVGLASVLGKQCMSSQDSVMKLFARRGERQACLDMPVSNFVAVQASSD

SEQ ID NO: 980492 - protein, 305 aa, Homo sapiens
ECSRERRPTPVNPDPEVQTRPGPESPRPCQEQAEKAAAGRGNSLHSGARSSVLRTGARGPVAGPLRPAGLGACPNRPGPMGRPPVHKTGVRPTHGMRGSQETRAHLGMSANRSHPGVSGSKARDLQGALPMNRLGRTLPFGARCRSTVGNTGRNARGMRHFDESIRSSGNQGGTAQPEVVVPGRFQGPPIQEARSVRGYEPRIEPLVTPDIAQWGGAALGVPSMGSPGPKGGEDRRTERGALDNADAQHPKVNGGGDAGVSLDSEPSGQWKRTQGEAHELERSQGDGPEHGGARAPQRETRAGRA

SEQ ID NO: 980493 - protein, 129 aa, Homo sapiens
MRGDLVHIRDPEEVGTGGFKALSGTFGFRNWSSLWESNLFWVLGHLIREMGGLGSLSAQVGSESGVDLPRSLGNLFAPGVQGHFRALNLPRERWGSQGFTAAFQVFTTRVRFTRCAGGYTFDSVFAPGL

SEQ ID NO: 980494 - protein, 259 aa, Homo sapiens
GPRGASVVGGCWGSAPGSESHEAPGRAAGCPRAEGPSLPRDGAKRSSDQLEQGQPQSSSERSPGNLRSGHYSSVQMQTQAPGPRERCIGTAQPTPGPIYRTVYYSQAHKGRPLSEWGLEVLRTELGRSATWPRGNYLGQGPRLRAEFPNGSRNLRRASNQVGRTGWSTSPGGPTKGFERPVHIYHRGVGPGRETPHGRDRRSTVTLESPGEEPRVTAVTSAFERAWYHSWIVNDYFEAGGTQGDRQNWLHKDRERREAT

SEQ ID NO: 980495 - protein, 102 aa, Homo sapiens
MVSLLEYLILGVTSSWSISYTNASGFNLVVVYGSTYMEFDGEIYAIVLGRVLNESTYLQKLRRVEPFGLNDRVEEKLTCNRDGPGMTFDNLLVGVDDRMGRR

SEQ ID NO: 980496 - protein, 143 aa, Homo sapiens
  misc_feature (127)..(127): Xaa can be any naturally occurring amino acid
MITEYTGITYKDDRYGAHRPCAYMPRSGWDTCLVRKETRTLFVLRARTPKNTVFPSTGTRIFTKTYTHTQHWFTGGSLPLIPWLWQVPPVTIRFTETGLGAIETDWTMGGHFLIGGAPFVRPRNRVXTLVHPCPLRETQGCAF

SEQ ID NO: 980497 - protein, 244 aa, Homo sapiens
MDGDPVTHVSSYHTCEVRQILKIRSFQVVHPPQGGPSFLPEDDENKEKRTDDIPVVGPRIPEMLTKEHFGTQFWLQDYVRHQQGCLGVTCKTVCQYESRGKPPEEIAKTFKYQRVTFTEEEDPRLRQRRNQWCDEKVNLSVPALLPCRIVHILVPCSVICYSTTVTQQQQSLFTELSPAVCWAHSQPRQFLSLGGGLFGWNRRRPKGVGSLLESGFAPCASVVPAVRPLSLGRNGISECRYPRR

SEQ ID NO: 980498 - protein, 87 aa, Homo sapiens
MVNVWTLGPYNACVPLRGLPGALALWCVGVFSPHIKTTRPGGNPRACCGKTPKNGGVQEGALKGASFYTREVSKPEARDFNFTPRLG

SEQ ID NO: 980499 - protein, 150 aa, Homo sapiens
MGLSHPTINKIKSLIHRRKHPHVQYTYPPFSSYPSNPDIITGFPSYEKPNASSYSESVSRGPPAKYKLEVRNPVALSVSPRELRQEIGERRPHGGRETQFPEHSESAGGLPMNRGARFPPQVGAWLQEQAHPPHQRQDRLTDEEHTHGEP

SEQ ID NO: 980500 - protein, 107 aa, Homo sapiens
MTREYSAEQIMRKSDCIAVGLDLFYKGACRFIGYGTYMCGNENSAGSPGFVVVGGAGPSLQLTGARLLERHSRRLGTRVPYAGPQSFRSNVGVQLREFAIAPFSTTP

SEQ ID NO: 980501 - protein, 111 aa, Homo sapiens
AARVLHMLSAGPLGPLFFLYTCLCVFLFSSLSFHLRRNAHSCGGAGHSIWCPTWMLFSRVKGLSSVVIEDKSREIPEYVYSEPVWVKVLYSVVIEDKLTRESQVRPRSALR

SEQ ID NO: 980502 - protein, 114 aa, Homo sapiens
PVGIQDHTIGLHSVCEIVTLSLKILIDSSTGGILSSCAPTNIGSWLKEMTLTVSSVFQECVQETTMRELYSCVKAFSEMIIIHFVVPFIVEVQEKAIFHQVDLVDPFLRYALEA

SEQ ID NO: 980503 - protein, 332 aa, Homo sapiens
VPSRGLGTPELDSLEVQIKMIVKGWAWWLTPVIPAFREAKAGRSPEVRSLRPACLTWCNPISTKNTEISQAWWQVPVVPATREAEAVESLEPRRRRLQMNRDRTAALQPGVAEQESISTKKKDSKGLKPYENNLIQASRERTIKYKGKLVTEMASGPKIPDTEERRKTRRIIYDGTGQPETTHDSPMADTPDSTNKYYKISGQMRHNATKSAKTHEDMSRKNSAATREGITLSVTPTNTAMGVTNCGETSQTSGYKKKKKLQTYSRKAHERETPKKHEHGPDYRERRQGEQKHPAKEYNAQRHTDIVRAAKNTSNQAKANNTHHTTGPAAHQ

SEQ ID NO: 980504 - protein, 175 aa, Homo sapiens
MEPSTPESPRRCVVSPFDSPFVVGSVSGPIQANARVKVMTCTTEQNSWGVCEEREKYNTYNHTQSLWVGAVARVSRGVKVFLTTPTLLWRAREGAHIQCDPGEQKVCRKSCDTHNKKHARRGKKRAKGAVGGSCPQEQTRLPPMVSMERLLRNQHPQKGIKETQLGVISRKGDRT

SEQ ID NO: 980505 - protein, 35 aa, Homo sapiens
MVWVVGYFKVNLNSLLQGLNWGTRTGRKTFGVWEH

SEQ ID NO: 980506 - protein, 131 aa, Homo sapiens
MPVAPSRCSGSINCAGTRCVERKKRTPVHSRFPALIEYGYESHRSVEGSVMTDIAQVGVVQDSVTLELISRELKVNTRRKVRGPPKINEAVPDIVLDVLTEHNLLRQGEGWPLDASRQPAEQLDSGSSPVI

SEQ ID NO: 980507 - protein, 246 aa, Homo sapiens
TRGWIPERLYCEDPQPPAETQACRVESVLYWALFSHLIRVPHPQDVNLSPSRPYTGPNWAEERLIEDGRTCMDPAVIHCSGLCYDHTPTICQVPPQCTGPSPKRPGDTSQATGARRPTDYALTLHTQATAARKAAGKRHAHAPNGTRCTSHAADPTKEPTTNPQVRPGHMPHEARTPTRQRPNTHHAHTNKTPYSNCDERETTTAPKTPAGNDNTATPETHRQRTTARTHPHEPTTTTPQNTGTNI

SEQ ID NO: 980508 - protein, 236 aa, Homo sapiens
MHCSSAVAQTQLIRVMHDLSCLMFRVSRAKAKRRQTELRPGRGSSLLQKAPMPYQPSYVLTYFEMKTRETVGVMHDLIIARNDEFRANLVSVLTPGRGCLQWRSLIQGSSGSDDFNVWIGLQGTPKKNRSMAIVRHVWSLVRPSEVLGKMEPPGQSYALAYLGEAVNLKSQQECQKVDEMVPMRKEQREHSLDTVEAQQRHNRQTVPIAWTSQLDQDTTQGEPEERRDRLSNRPMR

SEQ ID NO: 980509 - protein, 456 aa, Homo sapiens
VAAGPVQSQRIREADGQKDNGLRLGKADVAVTLRIDDQVRYEPESTLADNVRSREETNRARRPTSETNKKSLASGERDMREVADPSKTMKNTQSCTSNRDSWVYTIMSGNVDQFSGQHFLYTEAKGRRASEITGTGHIVWRPLGKRVKARGTGILGMEEAPVVHNPDAGPRQWTEQHHQSTNIKGHQQNARAPRGQSCETNMTHDKFTQEITSERKRLEARLTNLAIDTPGIGETGLQGRGPKIRRHTGQTSQLMGMEKHGDKLPTRHQENNQPKDKGRETNKPEYDDAAGVHAERRAHKKQTQEGQKQTPTTEKEETHTQEVDQNRENKTNKQDNCARDKHSQKNKKQRRAKQTRAQTTHTRDRSWAPLENKNYERQRPEPAENSPTTRSRATAQQKTNRNKRRTTTRSKRIQRRHRTHYNTTLSRCTEDKNHNNNPNCKMTKTKKKDEKTHYNK

SEQ ID NO: 980510 - protein, 320 aa, Homo sapiens
QILLCVLLVLFRYTSACSCSYLYLDIVILFFIFYWGSSERLHTGHPRREGKGKIREITRIPRVKPASPATRSKRGFRAIVVHQRRGKYEGIIRVAERGNHKVGGHPKPANIEGDPNTPRALPKGRGNSHSGGGDTPGPETTKPIYTTAQTLYTLSSLTHWANPGGNNGRDLTTKTPTQETCEQIKPQDEGRSKRIEPYQRYVKTQKIHSTETKGHTRGITQTVHLPIRAQMVKTNYSPRAKNTASSIAPSRRKRGKKLHANNAYNNPQQVREPPPSGSRYKITHPKRTQDIQERARRPGITTEGNIAGNARTTDGQLTQK

SEQ ID NO: 980511 - protein, 383 aa, Homo sapiens
MRIRSFETSLATTGRNPCRLQKQKQQKTQTKQQRGRRDPGHPEKEDTNDNIGRGRREEPHSTQQERKRGQNARYTTRRNPGGQEATARGEVTSTTRKHTDRPTERPKTAEAGDRQQMRQHKPARRTQRENKQRRANIQTQRSGAESRSASAPQRTSLTRTHTTRDREGEAKYNGDKKTTATGRERRGHEPAGTARQHSRVHQEHGSSTHGRRRGAQQEHTQTETAEATAQSGTTAHTKRRGDHMTSGEAALQPERRGNNKRWGQGKSTKREGKEEDRTGENSKHTQTGHAGRGTPEDRESEDEREQASSGRPRRTPTDERKREEPSTAENGRDEGSESKHNTPGEREGEGEHEDRRQEEPKREDSGTARPPTRDEEGHRGQQK

SEQ ID NO: 980512 - protein, 490 aa, Homo sapiens
MTVALMNRLLFCDVVVTLITTTYPSEGDSDGDPMTTSEASSKEKTQSNMRSEYMKERHPVREARYNGLAQYSDASSGGSTSRTSTTQQHSHGSSTIKQMGADDIKRSIICRTTNSRRTQHRNIGNEEDNRMRMKKERQGDNPWRLPTRRTRRQHTHNNSHYNQSSGEQQRQRLRQPYQPNTFPKNRANPTTQGPDEDSSDHQIQITEDGQPDSRTTRQEEHHRWNKRKRVAVRNQASNEDITGTNHRMKRKKQHEETKNNKTAEADMETKTEGTQRTKYTRGGQQNSRDPRKNTATSKRKTGRAQPHQQPDETNTTRTRIEGTRLTIQENAKRTNKPYNHRRRVDSTSIDTKQPASEHTHEAKTRQLRGRTRQRRHHKELAPYDYTPTQHTKQTGRRQEKPLRAQGASTTHSEETHDTNSPPRQHAATRKTHSTDTSKTRQTTAIRTRTAPPHHKPDPHNDTRTERTAAHERERTRRPKPNNRDDASQQV

SEQ ID NO: 980513 - protein, 84 aa, Homo sapiens
DTEVAPNRKQDEEKYTCPATPETKPGPCNHHEQQRSISKQQPSYPVQPPGNPVYPQTLHLPQAPTYTDAPAAYSEVLPVLPDLN

SEQ ID NO: 980514 - protein, 105 aa, Homo sapiens
MGHMAVIEYRKRGRQLLTQEQEVRTQKRDIASTGNKLKRSRQNNTTRKNRREKVKPSRTKGTSHKAAGQDNHHSEGHTTQKNHAGREQGAPDSSKQCKQRRDETT

SEQ ID NO: 980515 - protein, 261 aa, Homo sapiens
GLQDGRLGKEASGPGSSGGSARERVSLSATDCYMCYEIYNGENAQDRVGVQSWSEALEAQYKYIVMEPTRMVRRDEPAWITVGERALKARMACLVGTAVALFTPLAAALRLLPTTFPCPAGVLSRGLLHASDGISWQFLTLAASSQVEYDAINCRAVLVTTLTSSTLVVLVRKDDLRPERDCAITIALAVWGATGVKEDLRHSMPYDSATTRTRSNTPGQQETAESPDRHTREGSRAGRFGYMPEKNSPVARVQSYQMVPP

SEQ ID NO: 980516 - protein, 306 aa, Homo sapiens
SGGAELQEERLGALYWILAALRPRSSGLPRNTVVLSAADRRPGYGGANGPIPADPGALGRNVLIPVKDRIRLCAEYLKEIVTSNVPLSQNELELLERVYTLDELQHVGSFITLGLHWSPSQWQGLTRRCTSTPEVLPSNTRLSYHTKQVKNQETPGDTPIVGGTRGPYTGEHAGSSQATEAKQLVGNAQVKPEASTNTQGGRRRDHPILKASSAPIPGMPTPGGTKKRQADTTSQLQQAEAAGNNGAQAPRTHHTGDPQHDRPHTRDEQGDKAQSPRLRPLTKNDTGRDQISTRRQAKRAQRGQRS

SEQ ID NO: 980517 - protein, 115 aa, Homo sapiens
ETFFAESRLGFPASTVLGRNPCARSPPRPAAHSHALRHLFTATLGLPQGPRSPLQSLSQPPPPPPPLLIACHDDRVHLAGAARTYHQELRGPSSNRQITPEASTAIIRYTLVQCS

SEQ ID NO: 980518 - protein, 240 aa, Homo sapiens
GSGGGTSGSGSSSGQGNHGSKSELVVMVLEVATKDDKVQENRNMNLLYQLSGEKEEENKGTRCCQQTATGDTSHSVPVTITDTLAANEQTIFSLEAQQFISNIRNKLKPLRTRQSHEEESINKWHDSEGDPDVRGTLEEIIDDNHANRVYICGLRTLRQHSYHTLDKDLLDLDCSDLLNHQVHAVIRVLMDDTDPLGHRCMTGRKVPQGEPMQHMAGTGTTQIKNINEIGRIPLTHTVIY

SEQ ID NO: 980519 - protein, 221 aa, Homo sapiens
MADNLSGMGYLKTRELAEEIRRMIHQYLPENLLQNWIPRLEGDNQGRDVEPRYLLANHIIGVGSPTRDWEYSTNLGATTRGWRTSIIKGTTPPLTMVPLLAMASVAEFTPRVLGKFFFLLPMWVSKVTKLIRKRSRVYQGHYRPICDTLPKAKKGTQGLRVATTNAPNGTWKLMWVPERTQTHQVLEAKSWRNQRRRHQMTGVASAAKRVRTTGLTQGQRR

SEQ ID NO: 980520 - protein, 30 aa, Homo sapiens
MSAMQVTLQGTEVVVMQARNYEAGPGIVSF

SEQ ID NO: 980521 - protein, 203 aa, Homo sapiens
MGGLALLAQGWEVHGLGSRPPGGPPDSPRVQGDSPWRSGSPGYSWGSHGHLAHHAPGLIFGVISTARRMGRVSTTMCGATEKRAPVRSPCGTLRRNLGPCPPLKGDMGPLRAGVMEGLNRGVSPRATRISHSNRNEENPTQQTWGATSCATAGEHTRASEVTRPPQTLNRGTKAPMRRAGRGTTNTPKGAPEEACKERTKRPR

SEQ ID NO: 980522 - protein, 103 aa, Homo sapiens
MGITWGFGGSTPVIPAPWGKPLRGVWIPTWRLREVQGPTLGNLVGGTLSSTKKRNRREHTWGARPRPEEDLNTLWGAGRQCKQGTWAQGTGARAGGSPKKPGA

SEQ ID NO: 980523 - protein, 36 aa, Homo sapiens
MSTLKAPRRWGEQRGGHEGPPKGKEKKGQSCPRKHP

SEQ ID NO: 980524 - protein, 107 aa, Homo sapiens
VLRRLCGPDRPGLLWRPREQFGAMEEPGLPLNRIWGCSWRSYAGLWQQLPEGMRPDSNLYGFPWELVICAAVVDFCCLFFLWRSIDRLGVGLCGTERKTLASKCFLD

SEQ ID NO: 980525 - protein, 335 aa, Homo sapiens
MIGITLPYMVEYPIIDNIYGIYREHVPELQIDPLQSTVNGASWRCAKYCAQNTRSTPQYNDSDKTDKHTFARDSASLTIQEQNYTAKYTKTQNVLTIHKAKLDKTRPHTALPYQYNPKNNTKPKAKKAPVDPTETYNTNPDPRTSKKETKPQNLNTSTTCYGTGNQTPRAQQTRTDIAIRTTQPQIQRRKPTAEQTRPRPHYETNLHGRQIHQETSLRHHTTTISKNHRTSNRTRTDRKSTQNADEPLSPETRRNTVDKERGKKRNRTKENTKAKQPKMQPTRSAAAKNKQATKPREAKQRTKQRKPATARNNVRRDEQKRDHQRRENDQTKQEN

SEQ ID NO: 980526 - protein, 98 aa, Homo sapiens
MFYNTLSGGGAGAHQLGIRVNLWGPTAVSPKENPWRTSTTGLGVPHPIKKKRAGGATEAGFVEPTPRGEGRRRPQKGETYHKGGPSRDPQNKLTPRRG

SEQ ID NO: 980527 - protein, 223 aa, Homo sapiens
MDVISCMLTPREYRRVLTCASQTVKTAVIEINPYLLGSMCWGLHGIAGFLVNGCWFGKCQNYELRNKERISVAGASKLTCQPCCISTKGMGLSMGTMICGWIREALALLRGTRESEPHFMATFSVGFWLCVCHLGSCIGAIPNELEVGAAYESGRRASYQSTTEMPKQRCITFTVRKMLNRALRKLCLMKYGPPERGRVCLGETEDKTTTFGGRNIRIHAKED

SEQ ID NO: 980528 - protein, 89 aa, Homo sapiens
MDKWDIGGHTACSQEERIPGATGAITGLGGFSLPHIKQPAAGGENRAAARGHKLSTEGGESQEGNNGSPPIPKEASRKTLNINYPRRVG

SEQ ID NO: 980529 - protein, 144 aa, Homo sapiens
MGANILTHHRWPGIMFLHSKHRTPRSHYHRTVGVTNRNQRHQEETPSTSEHQLTKGSDHGDKQTRAKRTDPHKWTRKGTDQVNLSTYKERHIRQPRPLSNNPPYPTNTTMNQIPPCETSQNEGPSENNTTRGGQNKGRSTGHSN

SEQ ID NO: 980530 - protein, 160 aa, Homo sapiens
KEDAKPKEKTEVANTGAPRFIKQVLRDLQRDLDSHTIIMRDFNTPLSILDRSMRQKVNKDIQDLNSALQQADLIDIYRTLHPKSTEYTFFSAPHRTYSKIDHIVGSKALLSKCKRTEITTNCLSDHSAIKLELRIQKLTQNCTTTWKLNNLLLNDCWVNN

SEQ ID NO: 980531 - protein, 75 aa, Homo sapiens
SREWVSFSSAFPVLVILGPDYYQVCRCLCSQRVVHESMKWSDHACPEIRSSRPSEMEGEIIDHVESCYSDKLLPA

SEQ ID NO: 980532 - protein, 161 aa, Homo sapiens
MAVELDPCLACVSHILSACQLRVIVALQSWRRHMIIDTESYAPKQVTASPEFERVLRAQQELCGVLSYIHNYTCGLAWVAVSTKVYATCLGLVYSIWPSPILLEDIQKLLKKRITVFRLRSGGFGLGGPSLGGPADIATQLSWMSILNLILPRHLKRIILK

SEQ ID NO: 980533 - protein, 330 aa, Homo sapiens
MTCAYAPSGKYVACSGLDNIVSVHVQSEKYFVRGTCCVIRELNMDTARVTLFACCPSSMDDNEKNRQRYRLETPTVVPLCGYNLKNRPTKMHHVIPGATLGDVLSRFSGFSDARTWASLGACDAFQHKTTGDVGIQAIVPSEGIFMWLNRSLDIQIADKLAFPNGKAFCTHGPQEGTATLEGQKERVRCLTPESLHGTDSPVTKFILAGITLLIIFSSMKRCAHRRLVGPPTGIHAEVMAIDVEADLGRVAGGGMTDRVSWLVLTGARTVGAGTDRDKCIRTELAQQGGPERENIAVGYSEERSKDRGHNPRDKGGARNGRATRNGDKGA

SEQ ID NO: 980534 - protein, 314 aa, Homo sapiens
HGGTCLQSQPIRRLRQENRLNPGGGGCSEPRSHHCNSSLGKKLRHHLKKQENRVPQTGKPVRCTLYSSLGKPLTHGEVTKDSLAVTVDLVAKLALLPTDRIEKYETTSIQAGGQLAGTHLQALKAVEVPSSEAHDGSTTNSLPWGCKPKTKTTRYFLTCKRRRSNIYWQAKVCPEHGPPERRGTMWTKQESTNVMQDHQVKQMRCMRQGTPRDLQERHDGDVARVCNEDWQKDLEEEESDMVIYSTGGDGRADKGMRWRPMTERTGTRGKKDARKKKKTAGDKITRGEGQKREKKEKRDKRAPKRSRRNKEKGL

SEQ ID NO: 980535 - protein, 94 aa, Homo sapiens
YAKLMRCQQPDSVNGMARVGTDDVWKAESFGGYSAKKQYVGYNTVPWLHLVSRMFALPLNLDLDMQHVVWLRLLVFPVWYFILPRLENGRVRQS

SEQ ID NO: 980536 - protein, 164 aa, Homo sapiens
MARFPNGSQTKANYILNIVRPLRKNSKTGAELIAARPISRIAAHRASPVRLRKFLFGIIKTRAQMNPPRTYHSRIECGHHKWYVKPTECHRSIRGGLTSITLRCSWSFTTQYSHRSAGDLSSCLDVDKRVVLADGCPHAYVITSQDVCSHELSQLGVNPDASRR

SEQ ID NO: 980537 - protein, 68 aa, Homo sapiens
DNRPFLKVLPVCWQNVRYFRMVRSNDVAYVGRTVKSQTCCAACFGGLAGSVQTLSKKCMEYNLKASHN

SEQ ID NO: 980538 - protein, 175 aa, Homo sapiens
RCQRGRRDKKKQNKEHMQTTERQMRSESRDKDTQYDKHTKEDKRIVKEKREENTQDNSETQRTKMKRKESAQKTKTQKQEPETPLKQKKQQKTKTNQKKDTKETHTMDTTHKIHGNRTTRNKRRITQNKKKEEQKKTKNDTKKEKETQKNTQQTQTNMTTLNKKNTSPLAKKQDK

SEQ ID NO: 980539 - protein, 227 aa, Homo sapiens
MQVAQGPTDSMKECHESEIAIKPKHLIFSDKWKIDGRRRGELHAAVIPAIREDVRRAYQPECQGCSGADPDQSLVVETLYLLKKYKISGVWWCVPVVPAARGGWGRRIAWAREAEVSVSQDHTIALQPGRQRKTPSQEGKKKIKNKLGGGPGGPSKKGFHNPNGVWGPGAHIKNETHRGTKRVPGRTRGKTRRVESHQKKHARGTGVSRHTEGIWSNNGLQRARGRL

SEQ ID NO: 980540 - protein, 66 aa, Homo sapiens
LIALFIILDVFYTVVVGPRSYCTCADIVAGTHFMLGGTCVSLGGLRTTVVSQGIEQSLLSCVIVYV

SEQ ID NO: 980541 - protein, 170 aa, Homo sapiens
MYGNAWMSRQRSAAGAKPSWRSSARAVQKGNVGSYPPHRIPTGTPPNGAVRKGPPCPDPRMVDPPTACKVHLEKLQTLYASPGRQPGGGGLPCNATEVELPKAVGAHLSHQCDMDVKHGVKGDHFRTLRFNELPYGFGLAWGLWSLCLASVSYLERVYLPNACAPVYLGM

SEQ ID NO: 980542 - protein, 225 aa, Homo sapiens
MHTTPPRKPRTDRGANEQAAVGKYPMKNKRRPRDKRICIEENKPNEGYDEKTLVEEYIQQRQGTTRKRLHKKKKPHNAAVNRPQPQKRINDKQPATQTAKQQRQVRRQPQKPEDLDKRDDTQSAGAEAPARGKERRGRTEKQTERGEKTRQPQRKGREKQANEKTTRRRNQTKPKQSNLKTHEKHEEDKEGEDRRQTEKGEKAGQDYGEEKGREKREKSDGRRQT

SEQ ID NO: 980543 - protein, 310 aa, Homo sapiens
MGHAAQVGLRRRYFPYHRRAYQPFMITPLMNHFSFICFLVLYALFLTLTTKLTNTKHLRRSGNRKPSELILPAIILVLIALPSLRFLVHQQTRSTMPPLPVKISWPPSGTETYEYSRRTADFNATKLLAYITAHICRRTRRPWTSLTLTIEYYSRWKPPHSYYRLTSQDVLALMSVSPQRLKKRCDVPDRLITKHIYSGRDGGILRVQGSGNQWSRTTGDNAQCVPSNEAHLRISAGRARIDPKKRIYHSKRQERKIRLKNEAENERGIVGDRRKRDKKEERQRRAEQRHRPRIGDTNTGRAKQSQDAND

SEQ ID NO: 980544 - protein, 84 aa, Homo sapiens
TRGRPLRRPALRSLVVRLALLHSCSANHCLDKEPRYGLEYQRDILIKCETDTKTRDSDEKEIRLPFREENELRQGDRNAGGMRN

SEQ ID NO: 980545 - protein, 180 aa, Homo sapiens
MRLPKKNIKWPYNNLILYPTCGLKKVFSQGKPFNTLVLTNIWTGGLFKFGGEQDITGAYGRREGTYHCGGHEHVGGVTHVVRTPPRHLGTGVVTRATKHTLRGRRIPGHPRWGQQWGNTRPPHKRSARNYARVSGAVPVKPTLPGEARTKEIAARGRQGWHAQNGPVTGGITDTRPEKSK

SEQ ID NO: 980546 - protein, 275 aa, Homo sapiens
DLVQQLLAAREAPSGDPALTANSPPCPRLVLEEAPIMKEAPPCDGGGPEGGPRKPDQEPGNQSHKDLPGHARRVSKLAGAPSVVQFRIRAEVPRLSLMKSEAGPHQECLRLDEKVLPPLPFAARMVGNHGAFTQELCFDAQKLASPLLSLGLHNLAPHKSRRLQPRSPAPSTFGSTCERWVPCGDPRLSPLGITMKTNLTKGADWISAPEKQFLTITRGGAPNTEEYLRHGGVTLKKPGPNWVRVTQKKNPRGTGSWKKREGLGAEGPNRQGTCN

SEQ ID NO: 980547 - protein, 118 aa, Homo sapiens
MPIAGAEGKKREHKEKTKRRESKDKIDHEEKETTTQTTKKSQDTTPRHDETRRNTTEEQQRNRQDEKQPETKRRKEQRDSAHDRETGKTEDRKEQTNANTTRNEQEKKEKKRNKKDKE

SEQ ID NO: 980548 - protein, 75 aa, Homo sapiens
MGLGPPKKPRRAPGSDTRGVWASGLQGRPNPARAGESRAETPQQNTLVTTNHTQHKNNKHKHRKTDRPESHSSRQ

SEQ ID NO: 980549 - protein, 142 aa, Homo sapiens
MPFPTVLQSGCQSETLILAQTQQKTKKTQNQRGGRTTGTPKKDAKNPPREGAAGGPTMGTTDHKGENKRGETQSMKTKGERKTEHKNTNNKKNTGSRSATQEGTRKRQRQGGDKRKRTDTRAKTKKGNQTESDREQQIKHTR

SEQ ID NO: 980550 - protein, 103 aa, Homo sapiens
PKKSLALCPPGGGAGGDLEFSGNLLASSRVQGDSPVPSALPGYAGIHGVLTISAQLNLGFSIEREFAVWTQGGPSDSVTSGDSTRLGLPGGAGITGLSLHAGP

SEQ ID NO: 980551 - protein, 106 aa, Homo sapiens
MAESHNAAGRVPCPANELLHLIVGAARTKYWKHKPVPILRFTQYNTGGYSAYVAWSTTTRWKTVRAGPTVVLRHNKSRRLTGRQHGILTQGGSQEKAKFKNSPPRG

SEQ ID NO: 980552 - protein, 61 aa, Homo sapiens
MTQGEWRHLQSSYTHLLERMTKMADSLGSGRMKQLEHDRQFARGDWKTRSTGRREKNREDR

SEQ ID NO: 980553 - protein, 133 aa, Homo sapiens
KNISTKAVGQVQAEQHITYENKYPEGSSEERQVMDHAYPPSQCLRGSTGETCKRELASPCGSIADDVLLGDWLDGTVHFLMRKDRLTYRKCHIILGSFDTYSCSTGAEGWGILCDLQKRSSQIHTVKVSGSDS

SEQ ID NO: 980554 - protein, 108 aa, Homo sapiens
RSFPAAAGCQRGALQGPSAYTIPTMSQAGAQEAPIRKKRPPVKEEDLTGGPRKPEQWSRKSSPRPTRSCESVSKLARSPVGVQPHRSGTETVCEKCKAWTLPRECLSA

SEQ ID NO: 980555 - protein, 167 aa, Homo sapiens
MRTNPKEESPRRAKNGGAHTTKGGPQSERAQSQINAPGRGGTRAEETLDKQQQQQQQQKEVTQNKKHTTKEETHIKTQQTTKKEPNGSAENNMKREKRRERSKTQARRRQKKKKKKNKNKKKSKRNKRQRQDQGKKIKEREQKTKDRTQKQEKKRKKRKMKKDERKR

SEQ ID NO: 980556 - protein, 208 aa, Homo sapiens
MCFTTVPFDDPFPQLDPHVTGLLNGPLRILAELTADWAIGAALMKIGRVYEDRDSRIKIPSDRESYNSLNHGFNSEKHQIDVNRDIYYGFANEQYSQRKATVIPLKNGCRALLVIFVSVTLDDHPGDNTEPLLGICMVTVYLRKTMGISRLALELRTGRLSHTVCGSGRSDHSLELCLIVSLINKDTMDLCRTGILELEVWRPRHSWI

SEQ ID NO: 980557 - protein, 137 aa, Homo sapiens
MIDTNKKQNTQGRDITRENKETRTRDYKTREYGKHNSNYQNEQNKAETDKKNRNEAKPYEKKEDKKEEKDEQDERKERQRREKKARDRDRSRRSEKGEREKNREAAAGRDGRRRRKEKKTTHRDQARMTRQEIERAK

SEQ ID NO: 980558 - protein, 115 aa, Homo sapiens
MGLTTANTGYYTHFLGTQPNFCGSARQLQATLQLLARLHTPPGTYQTFYSTSQLHLATQHLVAPWFKPLGENRLRRARPLHTRELGFSPFISKPSPKLLKRKTLGAKNRASRFNP

SEQ ID NO: 980559 - protein, 251 aa, Homo sapiens
GVFADGHMELQVESGVPFSDSAPWRKTWRPRDQELQVPPLCDSRLAPKQNPRLELAAGRTTWTFTATVRKVNDRYKEAISLCANGTSVLLPVPLAHILGHRAGMSIGLYGTFPVEDLNGLHLPFLCSSMLLPGMVKGDLVPIDPQSEDLESSLTVASKKTHDGRRVMWLKDDGALTTRMIHLILTSPDEPARRFSSREHGPISCTKLPSVVTPLRVGSAPKNNPGGKRTLLKTADRRVGDPNAKGAQRRKC

SEQ ID NO: 980560 - protein, 112 aa, Homo sapiens
AVYLAYNPRHFGSAVVGRIILKSRYFETRPGLHVMYPRHYCQYYITWYQSVRLGYIVLFTFHVTLGSADVSVTKLPRRSGMIREPDTVDVTYDHLPAVARALPSCSCGHIPD

SEQ ID NO: 980561 - protein, 138 aa, Homo sapiens
ALSLMSNAMYIMEGPRGRIILIVGMMQQDLGYTGCNALFTYLNSSRNTSGMMLVSELHGKSYRRDIWRRLEYKRRNLRCNSPGKGERGCSEAHESADHLPVRTSWLNVQLICCRPKRKPRTEAIFRETEDIAKYISAG

SEQ ID NO: 980562 - protein, 70 aa, Homo sapiens
WELFGKDGSLTMLAQAGLELRSSSNLAGLGLPKCGDTGVSHWHLAWCKSLSGICVCNPLVYWARSESPGS

SEQ ID NO: 980563 - protein, 142 aa, Homo sapiens
MGHQGFNVPSNVFAGHLPMNEVNLVERVVLEDEFSSLCAPRRMLRTYVCRLYHGDIRAPGNQISGNHLRLIGVVSVHRVVDDFIAHKVVTSVKDTWTTEWDLYLWSDRRGRESRVYETHKARITLVIGHQREGYQWVHQFFH

SEQ ID NO: 980564 - protein, 42 aa, Homo sapiens
MCGRDPGVSTTRGPPKKTRPGPDAEGGPKPGRSTGGRSDDTH

SEQ ID NO: 980565 - protein, 194 aa, Homo sapiens
MIVAIGTSSLVDKDTRLRLKKKQKIILRNPFNSLHEFYQDWRASSPIGILPPNFSVHKGWKGILLAQLLCWETSHKVITLDNHSFPPVAFVGGQSFNLAWHFAHIISPGPQQCVNPWNPTLGRPGRQNDKLSSKTPAGAPEAQPPCRGILGLGERYPVDGVSDPDLCMPRTRGCIGYPAAGYNSTTTLWRYIIQ

SEQ ID NO: 980566 - protein, 181 aa, Homo sapiens
RLRLTETGIPCLREYVCAVTAYSVWYAIINKLEAAQCHDSVYNEMDSVMKVIIGNGHRIVDPSVYLGTQTILVRTWKLDVWCQPIPAAFYLYRLFSIVKRTMPILPVGLLSGRPSSFRDSYTGVLYPKAITRNLGLQGLPIHSGYILRISWKLLYLEELGVPAHVSTYIARSLGHSGSCTD

SEQ ID NO: 980567 - protein, 127 aa, Homo sapiens
  misc_feature (46)..(46): Xaa can be any naturally occurring amino acid
TEISRACWYAPVIPANRLNLGGGGCSEPRWRYCAPGPCKQKRGHCXKKKTNKQKKKQPNGGETCGNKILSHFLEKTKNKQKKKTFVRARRAHKKVSFTTPHLVGRGPHNSVRENSGPNSGSQEISGP

SEQ ID NO: 980568 - protein, 131 aa, Homo sapiens
MPKVKSGAIGLPARARRSSCRELKERCEDSCSTRGLGQHILKNPLIINSIIDKAVLRTNDVVAWTVVDLELGNMTCKPGTDKAPKVVCLLKLDPKAKVAELHKRVQGHALWPANFKYWWVDVLKNRFGHCF

SEQ ID NO: 980569 - protein, 151 aa, Homo sapiens
GFDPGLKTGTVKVTASVGATSPKFHNGGRGLGWHIGGSFLIVIPKYEMRCTGSSLAILKATPFLSKEKGPVLSQVHTGEVIAWLRVNYVLQNFLISPIILLMGLIWNDEPWGPLSPFLVPQFEMYEGLWVSRWEWVEAARVNLYTDLRPVD

SEQ ID NO: 980570 - protein, 285 aa, Homo sapiens
GVVSEKCRCDTEILPSLFMRWTTELNTKDKLPGITHLKFLCLVVPVCEQRALCGGVQCSIHGEYSVGRCLCVPADDGRGTITARWIANRSSHAASPPWLVDETVATILKWRILSVNNDLDRVSGVAAGHDLPIVRSSRHSLLQVAKRLLGILALCLEAVSLGLPLNVRVVLRPLHRLSLQTMAVFYTLCWPRGLVDEPAMNAAPVHRVAPSVHLEAMQLSWTSLALVGIDSTGKLSVLRSHLPWATRWNVGVALRRCSSAEYCMLPVRLGDICWREPVGPELVEA

SEQ ID NO: 980571 - protein, 544 aa, Homo sapiens
HVVDELKIEINRAKRSGTVPMDRLDRLTGECGMHSKACSLTRSTVWANQLDQDTLVIVKMQFMAGLLQGWLQTLSHDLLAGVWLLDLFTSALPLSGQSKRVVASITRESAIVMSANKVLPCVKVVSWRGRLPYPVMPVAEGNGVQVAREAEEEDKPNKVAIPSQLLHKDGHRGSRSYRTARKKGRAVTADSQSTRTSRMPAIGNNTRRVDPARQHTSSNLRAAQRNRTNDHRRELKTGMDAPGPGDDDSNAKGLGHTHENKGTEIEPAALRSTTKKPPATRDLPKLLGAYRKWTGTEREKAGPTPNNRQSNAYRTAMNHDREDRETNRHPNQHARRTKQHRTIAHHTTHTRTPRPPTSQHRDDTNITPETSAVTCDTPQIAEQEAVAPPDKGTTSETSKPQEDHGRPEPPNTRRAQSMARNSGNDQQNRDDHPNVMRTRAPPNPTNYGDKQERESRTNTTETTAHNRRQTHEQEERRDSRNGQEYNDKKNPRAKTPTTQDTPHTKRKQNEKNNDTTRNRRTQAEQERLNSKRHEDNREARYTRN

SEQ ID NO: 980572 - protein, 276 aa, Homo sapiens
  misc_feature (113)..(113): Xaa can be any naturally occurring amino acid
AFPAVTTYAHENMPPRKGSPSSLSRRGEEEYNKKKRLVQSPNSYCMDVKCPGCLYKSPRSLAMHKRVVVVGGGAAPRVLCQPTRRKEREVYSNGCSFREEASTGKHSESRLKXRKPFSNKQHLGMDSHKRTHGGNKSLVAAGDSFVKEINATHFWLGRERHPEARDEENRINGTFRKRDNRECKEHPRVGLTARYKKKRTGEPRMACGSNITNQGTRGRSKKGENYNRESKEPVAENGRAAGENLKQGRTQNQLDRARSYRGKAQSDTRQRWHHNV

SEQ ID NO: 980573 - protein, 190 aa, Homo sapiens
MQFTSELVDRSPRTLREQENNTCDQIPARRETIFAQAERIKKKQLQVALNRSQLRTKMKTKYKEEMTRHLTLLVKREADPHLRRRLPLKRTSTGTFTGEAGTHRTAGSRRNQKQGDVGTLLVQWPRHKRQRMGPPPGITSCLAREQPIVGEVHRGEQLCWCRLRETQNLSLKDTARVTRGERFPLHCTHI

SEQ ID NO: 980574 - protein, 69 aa, Homo sapiens
PIGPPWLAAGPTPGVRPRTVDAAATVIKLCLHASETGVVNNLSSVKGWTQQDQNLRGHLSGGAILLLTF

SEQ ID NO: 980575 - protein, 442 aa, Homo sapiens
ESCWSLQRGLCVGGGNPRTSGSGSSAPAVRCSCGGMPIDHGSRWCGAARCCRPHMTSSFLSAFPSKCADDCRCSCGGARVGPWLALGLGNLLCVLPACRFLAVGHPGGLGVCGLLDCGPEARGRGDSAAATADGLHGVGLPDHQVWDRIGSTDTERLNVPVSDDSTTTILPGPLPELMTTHLTILILGGHLSNGVTALRTTYCQVVQNPDPGGLGQADTKGIKGIMIGNQGHYDLATIRDIEVIQGGYQGTSGPPTIPGGDHPFLGTMTSPIRAPRSARKVQEEANKASGKGPNTGPLGNGRQGRCLGSDDMNGTIRGPKAHGIDPELGKERDKKEGTGHWLTDRRGVQAPPGTHRQGHHGRQMRTPRTDPGPGGDGHQVHHKATATVRTQTCGRRARDDANNTTGDKNTGRWWRVPWTGPNEGRKASPAAGARRETEVEET

SEQ ID NO: 980576 - protein, 75 aa, Homo sapiens
MSAAVFPKRGDPGGPSDLWWSGVSYPILKTAPRGGTPEACFGTNFPESGGSGVVHHGVLSIPGVPRRTSVFNYRP

SEQ ID NO: 980577 - protein, 208 aa, Homo sapiens
MPGGPELGCRKNLCEPAETLREHLVSTKSVKLIGEYGLRTQHVRSGGSTFTLAKIAQWPPGNLVTSDEKEPTDVCLEGQTPCCGGLVRYLGVAWMRAKDEELELASLGAVKSRGFFLGGDRLARNPEGPSGKSWALGAQCAYHNPRPRQLVRVPAQAGRLFQGGPGKDRVEWNTITVVPFNLVTVLGLSPGKTTVRISSFGDFSPYGG

SEQ ID NO: 980578 - protein, 333 aa, Homo sapiens
ERSRAQTPRHFSEQTSRAESARHDLSCLLSPFSDSCWGPTHGDPIPDDMDTRICLTSIDTGHSEHAPVLAWSELVSTWYTAEHDKHVPRAYRCSTTMNTHDTDQSEEAPPQGGARKTTDHNKKLQTASQTEHTYRHGGRSIRAESRTTPRGTSKAGDSPHSACPTQSSDPREQKAMTGSKNQEASGGWVEKEFQPSQLHQKGKPSTAPTAIGRTIIPRGRHIHRRRTHNHTAVHPPEDGEEPHKATEERNPYPFTPVDHPRLHAGKHAWNHWMEARHHPNAHNKRKSPSANDPQADAANTRSPQGPHPSQTDQAESPQRLGRAPRNRDGQKIP

SEQ ID NO: 980579 - protein, 250 aa, Homo sapiens
MVGIGEATVVPGADLKGAQQQPLGPCLPKPHLAPPALCWGLCISASMQGDAGTPQLPVHGFRVQQVLLKPHLPLASCSLSPLPLCLSRGGRACGIRRLLHLNSLQCRERSLWNYTQERICKGYSGFSQRSEPRGNSPSNHWPLKQAEVPVLSGPVAHLVQELMVTRSWFIEGSWQLYLSKIVLEASWKIHVPPLPPTKAFPRGQVPYTIFLGRSPGPRGRWPQGPRAEPRFGKDPVFYAWGPPPGFKAPR

SEQ ID NO: 980580 - protein, 67 aa, Homo sapiens
GRSVEFFSGGSAGSFHHGPRKQEESGAQSKVSCRTDQSRIKEAFTIMDKRMVMTDDLKNLLPGDDVK

SEQ ID NO: 980581 - protein, 599 aa, Homo sapiens
GDVSQKVLRHPDMVSLETSCLGQLQQQASVVKVKSFPEVMTLSKPVSTSQPSCGYQGWHDSTSVLGSRPVPGASNRCNTAHGRLCCAVLVAPTWLTDNQHHMWCAKMGAYCWVLTIGKQPLSVPSSAPFPQQLVYLRCSHHLRCMPLATVRAGITSYTAQLGPSEIIQAQQCAHSTTHTFTLPKKEHTEGGARRLRNAELGAPQGPGPRTFGRDTGDTCSKARRSTYEHGERNALSKNGIRQCTGGTRIVGPHTRRAQRTSAGPSCQRPYTIASGTSGNTTHVGTSHPRSGRGDKNVPRDGEHTPEEHGDPPWSGASPGSEAQRHMEEPSGDATDGPDRELTLSERASSEKEVNDLLSVSTRPPQRTGSQGRAQGTRNELKHHDTGYATTGRGNCHPQSGDQQTRRYRTQVEVPHQQDNRNGDTPQTRRERRHDPPTDNSDHKREESPMTTPRAVAHVYQSGSTVDTTVQPEAKHQSHSHDTTALVDKTNGLPHHTRQPCEHNRQEPTYTTEQGHNETQYTQDTATEDTHTQTATRIPSTYKGAHHHWRRRYTIKTATNQDTRTDRAPNRRHNHNQRSAHEPPPEKKKANNETEHSNNT

SEQ ID NO: 980582 - protein, 95 aa, Homo sapiens
MREGATKGGGLYINTKGEVHNRGESAPRDISQKYIGPPRPTAGWGRSQITHNHKTVGTTNNSKQRQQQKHENLNKAHKKPSRDCIDRINDNESHE

SEQ ID NO: 980583 - protein, 75 aa, Homo sapiens
ALTGTLLDGWRDSATANCGSDQSELRAAMNHTHDSNVMRDSGNLRVGKTDVRQNMNSGVPSAKCACNQMSMADLS

SEQ ID NO: 980584 - protein, 661 aa, Homo sapiens
VTSCCGICPRDSTAAAVSKCLPWVPPACHHASGNACMLLASLAMPCLPMPAAHLPTPEPKHHICPTVKNEQEQQITRYRERKTCQSITWDSRIVQTTTRTLAIEEYHPVSHPQTMKPGPPEQLGAKTDDMTPVKTKYKPREERRHQETPRHTQAPSPRTPAKEETAEREEPADEHARSTHSRRNKEEAKTAERQKKTEKNDRRRNHQRSSSEKREARRRQKTTTEDATQDSRAGTTQSTRHTSQPNDEEQTRQQAAKERETAPSSAREAKKKEQRETEEDTEHSNDQNRQDQAEQTRHDKQRRDAQPGRSKGDKNTSDAGESRAREDRKQQSEEAAERGDTQEAGERARGERRGSTQEKKSDRSREERESEQEDERTRKTRRSREEGKQGDDRNEEERQSRAQPEETTKKENKRSNRQPEEQEQRNDRRTTAEHSAQRQRRAQIETEREHDSSEHGTAERQGASELVVGRTDETDATATDTENTEAAGAAQERPRARRTQDERETEGVAQPGHQQQRPHISNTPQHREEQTSAETQKQRDRKARAVTKVEREQIHRETEQQRTEQERQKSKRKKLDEEEREQSQNPASKARIKAKTSGSARKSSARAAESQNRRQQHSRETTGQEQRPLVHQTTTRASISARSLRVARKKAREKVQNRDEE

SEQ ID NO: 980585 - protein, 30 aa, Homo sapiens
MTETVDEETRILNNSEIGDHRTTQHNNERY

SEQ ID NO: 980586 - protein, 416 aa, Homo sapiens
PTPPLSTISCQTGPSVSLVALWFMFVGVMTIPRFPDSSGIQWERGCPSTPANAIMPSPLHERSHPPMCEPVTSAFDTMSAVNPASSIPNSHLSFQAHPMAQSRREGGTMAVRYNVSRILLVLNINAIYLLFNPQHTTIHHTLPQRTNITNSHRKQQQTETDKLGAVPTPRNNGHPRIMETQREDDQDGNYSNMRTHRHTTTSPDGKTRDSTREARDKEPRNQPTHTAVDAARDGGSEQNATPSTPKETTERRDTPAGAKAMARVERGRTGAWARRGGRAAGTARERDRQTWGRAHGEERHRSASEGRRTEARDDERAVGRGITDKGVRRERRRGEAKARAGGADGGTGQRRTERQRRGEDGDGKRQGAQRRRTEGGEAERRRNGRGGQSEDGRRAGRGPERTAKHSREPKEERHGE

SEQ ID NO: 980587 - protein, 256 aa, Homo sapiens
MMRRSLCTIKAPEYPLHECAQCENLSFAVFLDRSISHELEYTMRGDAARTRRMPGGFQLAVPRTEDRILRCTVVDVGQRVVGRGGGTGWWDSVCSVGEGLGLLPSTCLVSGRCRGASVLMLGGVPSDLCSYGYVGLAGYHKAPEEVVGGDSAVGESGGCPWDGGGRMHSSQGQFRDVRWGRCHGNAPSPYEHVACRRTGFWREQTLACGSWLRTPCVVTKVAAPPVCGIASGRWFVATGLSQQAAGGAPDFLRPGG

SEQ ID NO: 980588 - protein, 116 aa, Homo sapiens
PVWGICLGLCRCLSPGEGLVVGVGGKSLAPGFVPSPALLGCGLVALTQLLTLPRVLLYFFLFWLDNWRVERRHDGFHPRNRSPLSIPTERDREAKFLASPGALVPVSSRCPAHVGP

SEQ ID NO: 980589 - protein, 55 aa, Homo sapiens
MKPHQGVGVGHDKRGCHRKGGPRRAREYKYPPPGVRKPRTEIHIKQRSNQHTEKT

SEQ ID NO: 980590 - protein, 206 aa, Homo sapiens
AAVSGNCFAARAPAVRMLVCVSVAELCLLPVCCGMPEGWCMCPPVELPGVLGWPALVGAAHAPAGAPARTLRLVPPCCLLIALKMAAGSCAWDLAACDSWSAAPAVHGLSVHHMPCALDIPFNAASNDVRASSDAELPWQLSAREDPVVSELLGMNDSLAVARLAKEAENQNRLQGAMLNARIACARAMACQKRMRPVMARLREKQ

SEQ ID NO: 980591 - protein, 69 aa, Homo sapiens
MRTRHTWRIPKGKAKKGDRDEFRQERQTNEARGRKGDPERKKKARNTQRTHRAQTSKTDNNDKNKQTEK

SEQ ID NO: 980592 - protein, 70 aa, Homo sapiens
MSADDKRLRQVNDIMTRQKNIVTNATKDKRKIQNKKKKINIIDNKLENRIIKKISGKHVVTKNRGTENDK

SEQ ID NO: 980593 - protein, 265 aa, Homo sapiens
MPHFHNGLGMLAAVATVCSTMPGPVKIRMTVMCPGNANGCCLHLLRCPCVGVPSWPIVLLPHGSGTTLKVRLPGLRLFSLEELSGGLAFTRKVGPWTIGISVDPEDGGTMSTGCPCRPTVQRLTGVPAPKLILFPQEALVPQEGRQFLLKNETVHQLTGPVMPVRNVYKKGESSSHHLRKEKTFKAFASLRMARCQRPGLRHTGKKSQGSRRTGMLTRQNKALLGTWTSVAVNAGISHVGVFRGTTGDWDGAPCCDSSCRDIGAS

SEQ ID NO: 980594 - protein, 193 aa, Homo sapiens
LPDCSVMRLDVARHKRLDRVDNPANSRIRRFTHHLCRQDYESTIHSYISTDVLCPLWYKNAYLRNTRNRYIQQHDLANNYHETSPNTEHGTMKRRTHEPRRYIKTNVPEKSPSVDECPNKCGNTRTKDDNTKIPHYSDPPTINKGQSPRHMSANCRQQQIRLWTQYVNHDNYSLIQQLTSSAHTGSMSQSITP

SEQ ID NO: 980595 - protein, 238 aa, Homo sapiens
MTVEPGAFAVSVGAKRGPLDTRDITSRGMGAWRRITSLGDLACERVAGDPHIRMAPHQWILQARRGAVAPASTWTTSDSPQNCWKRHSSNEQAHFTNSPTLGTPLFPLRTPPFWLLVRALVPQRFKRMLGASWWRPGGRRRRGYLSGGTGPWRGATRHYTLGPGSSPSYRPSRTTQEQTTLGQSRYMGPKSARPNKCGVLPGDADALRKYPPGCAITGKITVSGTWAFDRTRGDSQDN

SEQ ID NO: 980596 - protein, 496 aa, Homo sapiens
RTSPTVVDANSTITSALHTLFSPAWTFKSDTCKPTTLNQPAISKQATRNNCRDEVSGTRYARLQRHQLATAFYADHTTTCRLARSVRHMQAPDPAFNTVAHLIRSALLNILAATFPLTATSPDTAQPPGPTHASRGPSYAETPNTQITDATTSADSGNLSDTIEMQRTRADRLPDDRAIAMRPWLTHHTPDSLITSRVITCTAQVYSGRTTNGANPAPLGSSLEVSYPADPQASDKQPRQGTQPIIRPRTREANTRPRRDCTQRQNPNTSPPPARTNHYNPQPHATATNPKTDRDNPTTQAHSRSAHPTHGLPQDPETSTTCHQHAPTQPHNQDHAPLDTGPLAPMPTNTTGTPRTPSSPKYPTTHTSHTAATPPRPHTNDHAHTHTHATHDQTTHKARQHDTNTEQTDNTKEKRKREKQTKQTGRPQRTTARRATKATLQNHPTITNITDRSSRSHSQQAKPRQTTDERTRPTESKQNTNVQPTHARDTTTHTQH

SEQ ID NO: 980597 - protein, 332 aa, Homo sapiens
MNQLGKGTDQPRTDPEANYMGQGHAAVSVHTNETTGTKERQYRLIAPRPLFSHEQTEQSTTTQRSSKTAQQSTKKHSKQPTKNKPQHDKHNNLKTNAAQQGGQEADDGRREMRRKTSEEEREKTTGEGERGGSKRRREKRGKTRTRGRRGATDRNRRKGREAEATEESKRARGREEEREKEKQRGGEAGKEEGEGRKDEGTEKDDESAEEHKGSRERGDDEGGETCGEGKEARGGGEKRGPRRDENGKRDGERQSEEKASREKAEKTRATRREEHRSKRTGEGKTERRRREAERDRKHGEDKKETERGDKERRAGGNEDEDRRGTKEETSKR

SEQ ID NO: 980598 - protein, 173 aa, Homo sapiens
SSGKWDAPEGASPASCPNPQATDMDPKLTHSVLPLSSPDGQSSCLPWPDDTMELLAEMPMVEQDEHTAERLKHAQKTATPRQVKMWAQAEKEAQGQEVVLRETIPANGGKTEQGAPLKQSPLYHIPDSSSYLDGRMTQNMTWQQDRPDNLKKMEGPDPEPGTKKDGPERDLKT

SEQ ID NO: 980599 - protein, 144 aa, Homo sapiens
VRALVPSDCPDRPRGRASNPAKYIPCGHVTTALLDGSSTLLLRVHDARGLTRASVPSCYPYYNGIILPLCTLAQLTAWPLSWTLVLTPETDEDEDKEDDFRAPTVQERGLCEGIHGPALTVSMCHRCHFYQTSQQLTPTCKQSC

SEQ ID NO: 980600 - protein, 442 aa, Homo sapiens
MHQRRKLLTRLYERRYALTRTENRLTTRTLNTTDRTRQTTDTLTYTWRYTTNRNFKDTTQFDEEQGHYHGPLHEKYTRSTTTTTPRDNTAIEQTTINQPDTRRHSKNTRQPKIQAYQTKHMITDCTYKSKLSKGSIFLHTQQDSHNTRKRLNNNTNPRENTHVHAKREGQLRRCRITTTAPKNITQTNNTDQTRAKTRTNIGTAGLHLGDARTQKLNTPTGTQAHRHRYEHRVASHTLEHQQHTDKSHTDNRPTTQNEPTTDRHKRATHVAHANPHTKPYTATPHHNQPATVNPLTTTSSRRRQQDTRRTTPTYPGTSDTPKPNTQSDSRRTRRQNTRKRITHHGQQEHQAKTKHNKTHTHRSKKTRAVTKQTKPARHQQTQYTTHQTRTTTKPGDRRNITATQGNEDDSQTPKQPTAATNRKHRDLTTAHQTPTELKSHTE

SEQ ID NO: 980601 - protein, 123 aa, Homo sapiens
MEGVTIPSPAWLPASWLVTSYRDVECMPRRECHKGAYINKAIEPFTHWTGSGDQQSWKRDALRPINTPLPIATISRTLRLLAGGAYCRIPCPCTFNSADAQSFTGNTPIPLFATTHKRTIPYQ

SEQ ID NO: 980602 - protein, 484 aa, Homo sapiens
SFPAVTTYAHENMPLAPGSPSSLLPEEENEDTKKKRLVQSPNSYFMDCDNAQDAIKSPRHTRHNATNGSIKTDDRHASTLTLLTSHTREAKRTDDNKNAMYPFSRRHPQGHPNQQHPAAHAKTPAAQPKSPTQPSTTTAHPHNTKTQDTPRPRPHTRHALQHRTVRPPHYQNRTAQLRPHRTQKAHPRGTHPKPHTDNHKKRNRPPRPPRTRQQKPEQQQTQKQGGRKQQSNHQDTNNASAPRRRTNPHTEDETRPPQPQNKHRRRQRHSHTNNRHTTKTRRARTTRRAIDSNKQTTTTQTPPQPEERQQEREQKEKQTKHKQNTNKKHTTHSQPHTTKNNKTDNDKDTNSTKTQDNTTDQRQTHAHDHNSERHSEQEYTQEHKRTRKGRRSKEATNSTQHAHPPSTAADTGAQRKLNTRETATYSPRTDSTAPPSTMKRKNDNRKEKQRGTGTDTNTAEPGKRRRSNNREQEKRNRHHRSTKG

SEQ ID NO: 980603 - protein, 454 aa, Homo sapiens
RSLGGKMVARRRKCAGAGTREEPVSPAHWATQLFQSSSLKMQQCFSRTIYCDEHTCVRAMAPESNLDHQDRWTYFQRYLKMVDPPITGRQEVEKPLFTAHPVSTMWDHTYQCSQKLARRKPGTWAEKPQDGVQRDRKVTKTSHKSQVPGYTHGYDIIVGRTQAKAPALERCQRPGPYEPPSKSGPPPWPWRKYHTEDRTANTHWVGTARWGNIPHKSVRHQSVNLTAKDPSLGCPPRTHYEVAPLCTAQLGELVGNQTVITLRDKGSQNIMCTSKEKDNHDTVKETKRKRTKCGRHKEVKGKKYKRERTTPMETRHRHSRPHMCKMKEERVDTHYMSDDTDRIAQSEGYPHGGDTNRDNAQPNTTKTGQQKHTIQNEKRRKTSQERTNGQNTVKQTERQDGRQQQDVTKHHHVRSNHNQEKEELNEPTETNERKQNITAGEQSSRSTGKEELKK

SEQ ID NO: 980604 - protein, 104 aa, Homo sapiens
MTSGVYASSLNEQKCYVMSDTWGILHKLYVKLIASMTSTGSLKRFPILGTKRNYNPSWYLHLHSVVIFYTKTLLCCHCNLGASPLQYWLYSIHAFYELILTHEL

SEQ ID NO: 980605 - protein, 411 aa, Homo sapiens
GTHVDPRESQRNPILEIHIKNRGNRPRQWDHETSPSVVLGAYITGFVMFQTESTRPHSVLSSSRTGSRSQVGLSESLLYREFLAPWDGNVNKDAHIIGLNFHKRCCRSALLNLIVNHPYHCNATPITPNHPPTAREERAVCYAQQPKPGNRNNVPETACSSQRSSRVAARKKHRSATNHKKQSVTRHNRGAQEKWGAMANGETHQRNDRRVETHRKQARGQQSSKPPLGAVTTRHTQGGEGSHQQQKHEPTQNAKHALSAATSPSCETPYNEKDGRHENTTRKPQERHPGSRHTDDYATDQSTRRERHQHRNKYNPVCKQRMGNTTKDSQGHTKRGVTNTEARNHKHQGPPTTRAPDRTRKGDPTVEQHHAKRHGHAQYHEEQTRRTEPTRNIPKKKHQTHKKLGANHTGT

SEQ ID NO: 980606 - protein, 111 aa, Homo sapiens
MVRNKRHSRQPTGLILERSNTRRANYHRRRDNYTTASLHRTISRRTEHPPHTTKSSPQQKECCGVSSHPRTPPRAQRRTKSTNQKTKTNEQSRGSTQREGPLPTPQQAGYD

SEQ ID NO: 980607 - protein, 534 aa, Homo sapiens
GRGGLRAAAAAAVADGGCGEAVRQGARRPVLQRLSQAEGRRCSCRDRRKRRLRGLNLAHREERERMHGHGGYDSDLVMMTAVENPAKGKTGQLKMTYCSKNHFRKKNMAQGGPYTRCSQKLLDRERSNEIERLHLIALAAYSKTYNVRTTDYIYTMVAHKKTSSVGGNDRTDWDVIRGKSYDPKEMRRRDGPDLEKGLDEKYRTHIKGYGLRSRNMRNSWTKRPINTTYLPATAISRGTKLHQPATRSHGTSTQNKPYHDPMSYYPAAMEHGTLVSLYALCILLSSKRTKKSSNTTALAKIQPDTTEEDRRSTGREQAERVRSRAQTKGKQHNERKRSEEQQTNERGRRGQHDGRKTRKQREARGTRSRGGQTRAANRMTEHRARRDTTTTGGATTQPGEVTEADTTTRNGTEQSKQAAAEGVRNDEADRRQWCTASTRRSESTYARKRDKSRRRNNESVERGQREQKKAQKQGSEGSKKSTEGARGQRERATDRSERERGREDRQTTRAPEGRERERRPRSRAKKDDSGEEPP

SEQ ID NO: 980608 - protein, 326 aa, Homo sapiens
MAACTCNPRTIVEAEVSRSPECRMFNEQSLVATLVITTIYPSRNVTRNPRRGVGWSHSTRGPTARQGRLDGIAEISLNLGGHSGGGRTLEALSISANLIASQVLGVTKDAKESPNSSQERIISSNQSKRRDGRKTLSKWLSFEMGHRGVKKLCLGKAQRHQKYPGDTEGPEQGESTTNRRNPPRRKREHPGTQSVRTPHSRIRVIAVASPPEENTNSRPGETESTETAVGMRHETNPNSKTVSQKKDRDTQGEEVRHSSDDNKTQCQTYHKELVPPPPARRPICTGCRNTKREEDSTNKKGAEHSEDQHTAKGIEQQLKKRTRHSE

SEQ ID NO: 980609 - protein, 132 aa, Homo sapiens
CCAEPPSALAHVCAAVTVKLLLCMLGMCALVCLHVLGACVSLSPLTPSLLVLPTVPPYVLLLCHHVLSSCLMDCASNCAGCLVRPGEDLGGSRAMLECAWGSWPPAWLTFYDIAMTCGTETHSVAQAGVHWR

SEQ ID NO: 980610 - protein, 282 aa, Homo sapiens
GGGGAGAGQEEKRDEIVGLTMRPPMCFQTYADGDVEMFMTHTRPKASHRRLCPGPINHDIHASLPEAAWSAGHHVGPDRVTAENCAENDDLATSLVLDPYLGFRTHKMNVSPVPPPAADRRICAQRWKLSWGKRDLEAAYRALTLGGWKARYFQSRGPRQEASLKTHVTIDKLRDFLPGKWLNHPSLATLLPPWRPTGPKIVSTRAWDNKNEKLELLVGCFAVACGRHAAGLHAGTDADCLPDVNDHQACKRTRSPVAAPRRMINHDCNQLTVGACNGKDTE

SEQ ID NO: 980611 - protein, 157 aa, Homo sapiens
MKENKTADEPTGTTTERNADRKGKTRKKRQEERPRERKGRARRERKEKREKREREQRAEGEEEKEAKDKATQTETEQQTRRKERKEKGRRNSNTEQKRTKRKRYKKTKRKTTKRAKKRDTKAEEKEERTEEKDETSEEKQKRKRKRKKEREERQKKK

SEQ ID NO: 980612 - protein, 206 aa, Homo sapiens
MADDFVTSRHGDAVASATFPMQCSALRKNGFVGASKGRPWLATRQKKCHNFRKDVAAAVVHRIGGSIVVGYDIFSGKKYEDICPSTHNMDVPNIKRNDFQLIASRMGTYHCSRTAWEVREDLLSSLREHLAGAFEQKVQTVEEEILITGAVCMTRGGQLVAINGHGKITVSQVAVVASSDPLNCIEGPSELAGLAVSKWSLYTLLR

SEQ ID NO: 980613 - protein, 313 aa, Homo sapiens
YTSCVQRHLSAFCCPSLTKHVYLKAKKHTQTTKKKQNKHQTATNKKHNKHPNNTTKQTNKPKEKPKKKRKTTKYNTHNTKATNKRENRRRGRRAAGAQHQTRESTTSGNTHTETRGADRGGGRTHEHNKRQRAECELGRSMRHKRDGAGADRQRGGRGTANKTNSTEHQTAEQGGSTRRPPPDSKQKETRRETDDGARRERREQEGKKTERERQRKTTRGPQARRGRENTRRQATGTQTERGRKDREEDRYRAVARGGRRVRARQVSAGQQDVSSKVAGVGGDEKEDGRSERADAHGEKGRGMANLYTSIKIT

SEQ ID NO: 980614 - protein, 258 aa, Homo sapiens
RGLEQEGCTGTPGQAQLKTAGRGGGVETPATPRLGSRKARGGGWKAKATSGETGKWLACGPRGHLLYHPGCTAPPAANPEPNGAGLSCAALWSGAQWDWCALALIAWAQPSPSPGPAGGCEPSLGGVQMLRWHVASAARPPPLSRKACRRLWRSTTAVRGGPSSRSIYRLRSPCLTVARNGPQLLLHHWCLLRLHRAPASAKSANAPPARRAAAPAAPWACAKCAHGVSAKGRLENLKLLCLMWEPGLLPDVIEQLTT

SEQ ID NO: 980615 - protein, 313 aa, Homo sapiens
RSLTSGYVSLVAVWIAEPDWSGGYTDVQLAIFANMLRRVRLFYAMLSTKYTYVGTVHTNTHHRRHAQHLKTSLCAFFIPVPHKRIYHGTIKILYGHNECDGINEVVNILNKPHRRIDRVRRRYLDNPPKFRTEHSKLTQIKAKPHSITGGGQSGISPRRETPCTNIDDEPNEGITSPTSSYTYVGKPNGEERATASETVTGVSKVKKGRDIKAIMSLNITQSIRQQRLRQCPSNIENDATKHYEHKARRGTKNTEKKEQTKKRTAEQNEQKQRRTRARGEQNGRKKKLKLITRKKKKENEVRGDSKRGRRHAS

SEQ ID NO: 980616 - protein, 394 aa, Homo sapiens
MLSYSKSTANEPTNKNTFNHTHWQANNGPRKAPQTPTTDMVHHRDPERDKRQHTGTHSLEPKSNTQWTDDKEVQDIIHTHSKQRRRGEHKKRYMQNKHHKLRHPQHQHKGTTHKQGIANKNDSYNKATKPGTTKTTENTNNDTCTRRNKERDRNRQKHSIQEREDKTAQRHHSNDALNASEETRDGEEGKGRGRRDVEENDRRGGGGEDQGSGLPQARGRDGKMEDEGEAGEGRGKTRDRARGGPVARAREKRVEQPYRETEHKTEREPASQEEQQAQTERRQARRSTRNRGDETHPAKTKTERSQEEQRADKNQTEPGRQRDDERKKEASESRRKRKRKRRQTKKIGSASSEQTQCEESGQAKHAEAMDRTNDDDRTVSRRRSKERVVRARHI

SEQ ID NO: 980617 - protein, 464 aa, Homo sapiens
GEERERTSLEIFFDIYFSLLSLSRAAVVEDHDDRKLENRITTTRGKEDYDRLSIEKKENRKNERNDSPPRRPARRGASGAGRTTTPPSSDGQRTRTRQENRAGRRPTATRETTRERKKTAEPRAYGHTPHRASPRNVNRGEQSTPDGGAHSLTGNRTPHRTRRQAGCARSDKREKTTQAEHTRHQTRHRTQQPAPQERESTQRPARARRQERRSADRKNQESKTKGLAARQQTSTHDQAEKTATSQHKRERQPPRTAAQGHARRRRQRSRRDERERQPPRRRSGTRATRSGASESENQQRRHESKHRRAEQTVERETNTEATEEGADRHRRRSSTHTSQTATHDQANNTASECTTELGADRHPQHTDEDDTRDTHTSLLQPDPNTHRHRDDCKPDRPHDRQRGPRQTSARPDRTRLRERHRPTPTSTTNTAPPTNKREHDDDTTRTKARTVCTRDDPATRAVVR

SEQ ID NO: 980618 - protein, 564 aa, Homo sapiens
PHPLALHPSETLARQHSTCRTSQRPRASHHAMVTSDWGCTGLTLALSLTRVPGCAGRRRTPPSRTTRARTAHSRRTMAQILLRQLKTPTSTLITRQRYGKRSQPSTTEFHDLLITTKPLNHVPKNLGYDRSSLPNVDAWAHEDSLSMDLIPYFFRPHIVIVYNRESTPSNNAWQPTVLHSCNVNLGQHSAHPCAVHITAARPSRPTPQKPTHHTTLAPATDTRLASPKPQRQTDKTPHRQTPTRKQPITKTHTLNRRAPTHTSPANTRHTPSVQMTTQGHRERTPGKDKHNTDTTAATDPISHGRTEEQRIQRPTERPQETNQKETTTPHSTRHKPDAQRPNDTNTTTNRQRPTPANADTDHAEPAGTPERSAGRDPTRPAPPAAQAEHGRSSDEPRRADGAAGWEHGGDQQETGERRRQTRRRRGRRDTRRSERRRRAGGAARGQHEAADGEERREGAETEWLAERRAGRRGGEREQRTRAKESKGREEEQTEQEDDRQRRRTRSGKMANRRHEKIVGAAPQEQGGIREEHRGVDAESEKREGGGREKVAHSERKRLTRRARQ

SEQ ID NO: 980619 - protein, 123 aa, Homo sapiens
ARSCTLGGGYDTAGGLCLSNDIHKLGIRSRPGHGTLICDKGPALARWRDFHSASNAGKVYMYVCGEHVSVACIGAHCSEYSKQMRIVLRTRNSSRVDTQEKPEVLAGLVCPRMSSGLALRGRT

SEQ ID NO: 980620 - protein, 408 aa, Homo sapiens
TDLQLPRVQRHGALQEVLRWGETVNDERAGSRVMGESSSALMNCGQWCLARHLRLVCCSPYLPISTIALCRRYDSQDCSSAAARTATKVDKCGLLTGGPSALCIDQHELLEAHRGTAPWVSPHRDERACIMREVPMKQTRGQNNEGAKTQARTDLREVTSPCHRGEKAKNDREPGTQRQAVDHEQTKGPQTSGKDRTTDTQERKSPGAPMRPDTLDNHKDPGIPRQPDSRANAAERATNPETTRPARARSAGTANATPDEDTTRGKRTQNTNMPESTRQRASEQDSQRGETKRQTANPKRHMTHTNATPTTPRPPHLPDTSLNTTLTYTTFTPSSTRGHQGAEATAPARRDPHTKRPRTAQQRRQGTAPRTREVNREIQRGGAGREWNKKAGKRAKAHGGTHETEQEA

SEQ ID NO: 980621 - protein, 225 aa, Homo sapiens
MVPMAQALAVVVQGPMDGRMLPMDVFPCLPEHPMGCISWGTLACAGLKLARRYQFQASSAAWTSEGRTLDTWTVPLERIFSSPLWQPCYLTCDKHPYLSPDGQLPGTLAIMEPQAWQEKPTAQPGTLNTTHEKALDLRTPLRKARGNRRTDGSSSTRAPRQNKPASGQLVKGPETKIYHDGVGSTGETGKYTHNSRPTRWANGDNTNAGNKENALRRARKRYGRN

SEQ ID NO: 980622 - protein, 402 aa, Homo sapiens
MTIPHHTLQAYAVTVANRSDTCHGLGYGEMTYLSASIVLGGNTGSQNNRPKLATRSRRNEPGIGKRKKRRHRHSHSDGDTRATTPMDSGQSNQISYVGDAKYSPFSYQVHFREAYHSHSIPPSALETTQGNGKQGTRDPVKRSSQYEYSKDIRLDTMDHGEMQHKCQLGSAPIPQNHITQGTTGGHDVHTEHIAQRKQKNNQRTTKIHVKPSTDRTPKRRTSRTCTYTRAITHTPYTTSTREHSIVKAWRTKIENHMCTNRSIKHKETADTLATRMTPVGKPHHGKKATSDTTAAQRATGHQPGEDLFQPETRSTRMTKTNITHNDNESINHTDAAALPYSNDQIIRARNRHPRNHEGTWRTRSSERTRETQTKTRITAPKHSSGEHAETPAEHEENQNHDG

SEQ ID NO: 980623 - protein, 332 aa, Homo sapiens
WELEPEAPARPGPGALTGKMRPWPEGAGAGRAFTPIPFLAMTARALLGKAATMDDPYPRERLTAQCYASLQLHDCGSVTQDLQPGDWYVMDPNPQLNTTHFVSVCAKGALLVDCDLTPPQGSGPAIRIFTYTNSIIMVPGRLSAGIARTIACAAKRFAHTLQANVLRHSTHPIHAATSQPTCSISNRILRSEASPRQLLDPVRALAASSALCTVWPAAERTRTRRHALLDATCSPVHSLVAPGAALAPAVPTRRIHARWRARTPRHCLPRRCTCPFGLELFLSRNVHSRSIQTEGNILGHPTLPLYTTAHTYHIATHMAGTTAFLVQARGTI

SEQ ID NO: 980624 - protein, 289 aa, Homo sapiens
MQVAKLHNDYPTQFDLTLVIDYTARIPTRNLRDYGNHRSSPEYTYVVSDDAQMPAPILHVQRQYWVLGTPRDHYRPGDPWLGAKRTHNWNSTTRHSKSPTNATHQRYQIIGAMAQHGPNPPWKRDPAEHHEDISVHAFLLGRLADEITNCCIPMCVTTTVGNLAHTFRCVKRNVTLLGSPTINPHISRYLDHSHTRLQHGAFPRSRSNTHKRTHSEEQVATAPKTKKQQSRGQDTTRYRVWNTSHHADRGDGATTCDKDRLPAITTSGRTTDSETRCDHTDNANKDSWH

SEQ ID NO: 980625 - protein, 278 aa, Homo sapiens
ARTSPPTSRRAEMNAIAADMCTNARRVVLQELDAQMVNGAQWLRMTAYTTFICETGNDLSRDMMGVGAWLRDLPATEVLRLGPLVLNALLVTLTSLPAGGLQHISASRNDTTHNLAILLSLSYLSSTLPQDTRRLWLLDMYPRNLMDHYTVHTPLYPTPEQLVAEDELTRSDSVAVQCPVSAYLYETHSVPAAGEITGSPKPKTHSRHHQHSNRPNQGDGGSGHERYTGRQAHSTRTRTSQPYRWRSLKATSGPNQVGQPTNERPFDVAMATKAALLN

SEQ ID NO: 980626 - protein, 97 aa, Homo sapiens
MDTVNRGKHFHCCANGPRLSRSEEPNVQSVCAGRDVGRPVAGKNAPHACLGPAGSGSPSCLSRLTTSVTAAFGVVADGVPVGAEEPTWDEGEAPQTA

SEQ ID NO: 980627 - protein, 70 aa, Homo sapiens
SRRKRQALMACTRDDEIRDTAIQEVVLDSGDSGGEATSNLRDRRVQLRNDVSRRVRETSSTYSDDGASLN

SEQ ID NO: 980628 - protein, 101 aa, Homo sapiens
MQACLQLVVQQKYNKGKRSTLVKGHSNKWRKPVRKGDRRRHNEQQGQEDCRRTCETYNKETMQGTKSSESHFRSFLLIGLDRPTTNNQATACQSDKRATGN

SEQ ID NO: 980629 - protein, 297 aa, Homo sapiens
LRSREHHGSYIGPCEHPTPSPHLCPCACHPEPMRVLLSCMGLRSWTESGWSGGTDRMAKGRCGVQRWGVWRGWGQKAHRILDTGHLFTCTKMNVKTIKAMTRKNDGRKKSNKYKRKDEDNNSKDNMHGMKKKIDKYVMNRKRTIKGKKGSSRGRRKMHTRRGTRKQRKRREEDKERKKRTRRQKSRTEEQRKPRRRERARTASAAKREKKATQKRQRRRRQTDKEEKRRRRTNGREERTREREREETEKRNEATDRGTRREKHRRTSQDKTDNKQEERTSSQETRRNKRAQKHTQKR

SEQ ID NO: 980630 - protein, 156 aa, Homo sapiens
  misc_feature (112)..(112): Xaa can be any naturally occurring amino acid
MSSLVNKYRIELGKRKLNTNCGYCSRTRLDINLTRGGVVELARHTARFPRRLGYPHLRVIHVEHWDGPLGVHRGPHPHGLCMLTVAPACNKRPGIPSCAWNTGEVHGNTPGXGLGMNNCVTYPQTAHWNADTETGSAIWALLGERPPFVGGGRKSV

SEQ ID NO: 980631 - protein, 241 aa, Homo sapiens
GAGAWEFAEEVIEEASEGPVGSDPGGMRRRWPGYDKLEKIKMRMHDRSVERPAGGPGDTYALMSSVLTRGCIEADNECLTSSWREEKTISGNYAEELGPVAEAEVLSEKETKGSVAGPGPVDERSWSPERRDVDRLNNAVPLVRMVDLMSSKDDVGIECPGDCETVHMRVLEVSTWRRGKTQLEELADDRVGPPKNAHCMQVARAQRWIVPVTGQLLRGDLPWSRRVERRDERTLMRSRTM

SEQ ID NO: 980632 - protein, 117 aa, Homo sapiens
IDAGILCGGCELDMIIIRRFTASKFGSTRCCRNCVLMLFPDQVAIQLNDTHPAVAIPELNVGSFMWEYCKNCALVSTGDVRAHPRSTFRFLSTQLTTVLPVKPMGSRLLTRVDLVSK

SEQ ID NO: 980633 - protein, 227 aa, Homo sapiens
AATSSQPPPIHLPSSPTDLHPSPRLERHTPTQDGGQPIISSRNHTYIERAAYSSNNSRDRQKARNDTQQTPKNPHGAATGTAHSRLGDHTTRTTNNSTTASRPKQRGWKPKNNPQTKKTRKPQQKGHQRNADTTSNTLKHRTNKQPEYTNHTRYDTSNPAPHNKAQNSKSPQERNKHAHNAKQRNAPRDTHKPNHPTSSHTEDTSTLTTQIAERPKNTYTTRNNTTT

SEQ ID NO: 980634 - protein, 97 aa, Homo sapiens
MLKEKITKEDIAAYRAERKSRDCSKNKGGVQGVKQGHDKPLKDHEATIAEPGQMHGNQQGTVGRPGCRSLPSASTEGTTQRADTSAQHETEGTKVPR

SEQ ID NO: 980635 - protein, 337 aa, Homo sapiens
GGKPSPVETLLLTIQCWAGPSLTPTPGALRPQCMLLPPLSMPPDCTLRTGTGVEFCLAFVRHYMERDGWKSTPNDAITETGSQEQSRRPSCAPGNQDHTGHLQEGQEQSSSDWLQMLMYHQPCPLTREALRRRLRHLHGSKETRITHLYYECNAIFKPVFITSNVVLIHAQRRCHMQWSSWHDSHAIALLRNCLYKTAYRLSTAQEPTNILPHKQQTGQHAMTQSGSKTRTQAGSPQRKDKGRRLTPPQHEQTTPTHRPPPTHPINNTPPHTHTTPQDQPPNTAAIAPSPDPTPTPTHTPPPPPDTRTTLRPQAPPNPHHDHPPRPQRQQRPQTPPL

SEQ ID NO: 980636 - protein, 497 aa, Homo sapiens
ITLNVNGLNAPIKRHRHSKLDKESRPISVLCSGDPSHVHETPHTAQNNRDWRKIYQATWNNKNKKHGVAILVSDKTKTLNQPTSSSKQHTRQAIYINWAKGHPIRTRKQLTHRKSYHAPESSGSTPEWTKSKSYRDLQMRLRLPTHITEWRDFNTPTVKPLDRKLTRISRLETQYCNQADPNRHLTELSNTKIKQKYTYFSSPHSDTYYPKLGPHRRPVHSNSISPMRQELDSLTTLGLSAPQCPPTLEHQAYKQHSLQNRSMAAHMHNNWPDCTTGTSLDMHDTTNADSMNTTGTSRPYTSIGDIFPQLYRHNSEQVPRTSEQLSKTQPIDTRTRQPTPRPTPTRRTTPHTERTNTQRDALILLALETAVGEEELQREEGEEKQKETTKKHGETETETTRGTQDRRRGEEARKHHETKNRKQTNKTKQTGEQHDKGPPTGKHSKARAENYTDRRATARQQTPRQKKQEGEKRHPHKHVTDSRGTATTDNTNDEPQD

SEQ ID NO: 980637 - protein, 396 aa, Homo sapiens
MSQANKRETDEHPARARLTHYKHMTTGHHHIIPKGNELRTIPHNPAGKRNRHRTQHQDQLSVNQPTQGLLHITTVPTNLQYTNKPTEPGCEDVCEQAKTMINPPNISHTILYRHQKTTMPDKQNTETKDTNKHNSTGDRKQTAKTRQEESREQKNDARAGEIRQKDGNDAENAAKSEQTTNEKRRKTRGPTKKRGEGRDREREKRTTAQGNTKQRIRRQQEDRQDRRTSTAEETRSQRGDKEIESKRMRQETERKKHESETQREANTRARRGQEPTETRDTGRKKGTIEGTRQQDTAAGERDGKRRTKAIRDEQEQKNTRREKAEGSKKERTDKTRTEERGGVTRRRLEQRRGMRQQNEKEEAQEDRGRQRDVDAEQRTTKQQTGRGHETGNEGDK

SEQ ID NO: 980638 - protein, 539 aa, Homo sapiens
MEAAAQFFSESPDVVYWPLMAHRRLHILMYLGLTRCHAADGVAVLNGAPHCPLRFSFRTCPGRCPWLGVMLVWLVCGGTTGSTLTSRWCLANRLRYVLCPLLQLACKEANYYVLADSVLGTVSLGLDCRGPGGVRTLQQRMLPMVEPNDLVYDGWDISSLNLARRCWRAKVLDWGLQEPTVAAHGGPAARLLITSRIIAANQSARSDHSYQARVRSTARIAWSIRDYRTNEVLEKAIVCRTAKRTAWKRSSLRQQRPLAHYLPEIPPQLRPLQRASWIPPATHTDTIAAHRTVYSPLFRLSYAIVINKQETHQEATHKPLYKKYTQLNNAPAYQNHQPTPHQPYPNTPNTPHHHRSQHNNVTQQQTTNTNHNNTPHQPCGRGAQADRSRGQAERGGWRVGEEGREREGAPSGRERGRGSSAGGGLERGGHTRSPSETRTWHGRDGRVAREKEQARGGRRRDATRASTARGGSGESERQRHDGRARQSAAGARVGGGGGAQRGEGDGKRRRQTEEEHSERRSSRAARTHVVGAARGRDGD

SEQ ID NO: 980639 - protein, 659 aa, Homo sapiens
VKALCAPCGHDCQMKRARSVTKTALHEADGRADLTEPVPHCAASCSGGIQRSSPQSVLWHLYLHRKLGSLAQEHVRITPRKQQGYSTVSHFNIVHYRLAILACLSGLVLEAGKSGRVACPAEWQHQSATGLLPGLGDLMSLNQLICHLLGQDTTLTSRTVQCQREPTYQLNIHDIHLLLPALRMEQLVQLQTLYVGVPGEQQSQLIPYIIHTVALRPEENPKTHYREAEEQPKASWTSQENGEHSSVIDGPNTTQTEALNLPHSSRPPRSTFVDVQPNATNISFHRKKTSNQQHNNEQVTYIVQQDTTNPHTLPLYHSHHITHTPIQHPQKKKTPPTPHHTNTHTPQPLTPPQHIQRAPAHPSRSEPQRPEESKEQREQRDRERAVNRADRSEKRVKAESGEGWSDRTPRETVSEEARREAKTPAGRRAESRSAGEAAKQKEERTGYEGSIPYTSLLTPHTSSRHNTHPSKHNHQTIQYTMKERTTNNYNIKPSHLATKRRANTTYTNHTISNHYIIKPIQLPLTSHTHSHLTTNHTPTTHNPPHRQDRRVGQEHTKATEDSDKGYEAEGSTRLDSTHSQEHKTKGHMAKYRRKRNHQQRDSYARNADCTYTHTQKEKRHKRQAKQTLADTQSTTSKRQEEKSTAHTAQPDRRTSRDTE

SEQ ID NO: 980640 - protein, 380 aa, Homo sapiens
MSTTQRHLQLTYAFGRTYHPHAQAAPMAAARMCSARDVNNGRVIRYTVLRPGRTTWLNTPRITYEQKETNDITRNWAETMKLDDVTRPGNNGDKTTSRLVDSTQKTLHNYNNIIYTITSSYIFIPPPLNPTNHNLTTTTHHYHSTITTPEHTIILTHYTTYLYNTHPHTHTISTNRQYSPYHTITTHITQKSTTINLTLPNSEQGVRANSVSEASQVADTDRQDNQISNQTEVDTQTSNPGTRRRSVQTSNGQLTDSAVTEQLPRAQAQRRAHTSPRSSERLDDSTHLDRDSGNGGEGGATHRTRGEETEMTSDREADRSACHAAPRNEESLEEHEKRDWRMLQHEESARGEQEPSDAHTSLDAERRGETRDIDQTRRRL

SEQ ID NO: 980641 - protein, 60 aa, Homo sapiens
GGFSSGTRSQSLRAYPNNVRELLCVGASGSRTRDALVHRPFGYWSAAIEIPPVAFAPRNS

SEQ ID NO: 980642 - protein, 76 aa, Homo sapiens
RFVVRTESSVLRAGEYGDLDLAREVRDGGGGRAEAVLALADLGVPALRRLRLLVWPVCPSLKGGRAGFGLPEGSIA

SEQ ID NO: 980643 - protein, 134 aa, Homo sapiens
MFHCFFEIVRGARCVGATLVFWLPAGGACPVRQRRRHRAYDLIPSSSPGLRCVATDVAWNFEKFLVALTVCPYARYSRRFQTIDIEPDIEAWVAKGPAVPRAPLLPRCLAVAVLLSRGGFIYEGCSSKLRGRDT

SEQ ID NO: 980644 - protein, 123 aa, Homo sapiens
MTHVAQKLFIDGFFLIMSKSSNHISRRHAVYRDTDLEEQHGQQLKLSTFMEIKEVGGQSRFGVTNAGHVSKSPHVHALDRRREAFLYTVDFSRPADTALNGVNSYIKLVLIMIFLWDISENVN

SEQ ID NO: 980645 - protein, 76 aa, Homo sapiens
MRPFRSKHDNRRPFAERMGFAPRKRQRTPLVRPGQGKSRSRVDSDSTSQKRHRVKLRSKWNPNWGRTTTHIIQKRH

SEQ ID NO: 980646 - protein, 222 aa, Homo sapiens
GALPGGMCEDKDEEEKDVSSERGGGMLCCEAQSVGWAVSCVALLHNTALLASSCSVCGGPNAGSRCHWNPPPHCTFMTGDPDKRTALSQESQDPAQGAASRNGAFEALSPIGGPRGGSGSFHDEESRVGTRGNDPGPLVPSATYRLITGYERTDKIIPFHDTPSYGFVDAWVGGPPFDLYDFSKPFGLQEPPMTDTARQQGGSARLSLLIVYSLLLAFDLHT

SEQ ID NO: 980647 - protein, 249 aa, Homo sapiens
MLILSKGGVRASGATHGEASSWGARGGPLGDTTEGKHVLQASESSKGTVVGPRLDPCAEPRKCERRETRGHSDTGPFRPSEEIGGAQIKGEHPEVKPRGTPRRTRDNKTRRHTSHHTCGAPRPGGDTSNHPQKTETKNTPLEKHAGDRRNPIYVDMVAHKQRTTNKRATTKAVPNQGKTEHSNSTQRPYEAETRTEQTVTNENATEGELTPERTHPREVPEPKNPRGSINHRDLHKQNTHSVSKLLPQT

SEQ ID NO: 980648 - protein, 97 aa, Homo sapiens
ADLRRRATKALGRCTQKDNIRFDGLSRVSHVTDATDWRVEYPFVVLTPDSEAEIAGLIKACFDARALTCDPCAGGGTGYTGGAVPLTPFSAVINTEK

SEQ ID NO: 980649 - protein, 153 aa, Homo sapiens
GSCDARAAPDPVLEAWPGGTLGHCWYLLVLDNWVCSNVLLAGWAVSLGMDPGPEPACSSALVCCPALSVAVGTGVRVWALQVGNSSGQPGANALDAAARPSTECAGQLELQEFAAGLQIPGTWVSPHKGCVDHPIVLTEAVCKPTCIPRQMIV

SEQ ID NO: 980650 - protein, 115 aa, Homo sapiens
MGRQGVEKSNAIKLKLCRVESLGAKKLRKLEEKTKRERPSVRQRKAEREERKPNSSPSAKLRWKERRTERHSTWKKDAEQEEEERNRPGRNRPMGIMKKVPRNEREDYVVRGRNA

SEQ ID NO: 980651 - protein, 318 aa, Homo sapiens
MTGRNAHTVHSRNTRVWDVGPSLLVSAVIRRGPVESIIAVTTLHPGAVAIAWDIHPDLPPKIVTQSSINECGSGVQQNVLIRTRKQHYRRDRRTHTRLCEHRVDHYAVSVKDDWMRTNNLTSTCHTSQKMDPAELLGNSRTVELANAQRIKCTSVNQSTHDLTVVSVKEHWYTCRLAASKVPMFTCEVLACWLIGYINGEQQILVIVDADRSGGKTEALYTSMDTKQMNECYNRTETSCKVDDAQFKECRHIHYTQTVTIDSIGRTPRMTNEKAKRTRTNSKQQRRQPGGTTRIPHKKETEQKKGLNNRQEGKRDRTN

SEQ ID NO: 980652 - protein, 309 aa, Homo sapiens
AHFPFHWCPRTFPAVGAFDSEGHPLSSIAEGSVQRGPQKVPTRGWVASMVRTLGAALPARVVLSCQDSPKPGADEERGQAETRVIQTVDGVQAAYISARILWRPHLSGLRRLKPSGYAVSHVLCKALSPGAPVRHPTYLARLRIRALGTCYGGTGDGASRKASAAERLEADRAGSRQGALQRGQTPARRPVWSPGVQTERSSGPETRPVQGVKHEQAEPCLAPAEWDKMHLGILRSLIELCDKPVSPGGSEPLEGTTERESNRGTIGTQQKGWTTGESSPANGGRRTHRKKGNSIKQVEARENKERKRK

SEQ ID NO: 980653 - protein, 204 aa, Homo sapiens
MDWAPVLVLGTLVMLLPVSWLPDIEQVLMPSSMADCGPKVAGDRGDRAPSMAHWTKCLACLISLAAELAELLLHLEVREKLQRAGQLSRVRALGSCVGLSTWPVLGWLPREAGASEDGFRKAQKALSEEELKEVEASHEKLPRSRKDEQDGQDDGEATQGRQRVSQEQLRNWRNVWTLCQEAKEDATDDRPCKDDRYITYLTEL

SEQ ID NO: 980654 - protein, 243 aa, Homo sapiens
WWRKGGAVAALAALVQRLPLSAWTEESLESGLADLPVRSMQQVELCLVALAWILSDAWLTRRQLQGGPEGMLISAHLRPCHGVMYRKDARLSGLRLDRRRRPRPAMDTMLTYRGVSGDGHTLHGALRGTMPASPWSPRSETVPKARGGGQTSAAGGQEEEEGEDEAELSGNKGEPRPNYSSLSQPGASQRQCTKRHGTQAGGTDIGRGDTKLTIHVVPPGPQVLMNPDARDTMKSTRRRTKRQ

SEQ ID NO: 980655 - protein, 111 aa, Homo sapiens
MSHWSHATGWGWLPLLPPNGRMPALSSAGLAYGLYLLHRLGAGCNALTDDACEGSGLLAVFKPWEERTDRSKFVESDADEELLFNIPFTGNCQAQRHHYNGQRMMTHSPLR

SEQ ID NO: 980656 - protein, 134 aa, Homo sapiens
MPGLRWWGLLRAGGRSCCVFRSSFAHFPLPAGVGAEKTCRAMEDEVVRFAKKMDKMVQKKNCGWSIGFAKGAEEYSYDPGITAVVQLTPNGCLMHSPLSKSTRIGMSVNAIRKQSTDEEVTSLESLSSNPGKNY

SEQ ID NO: 980657 - protein, 182 aa, Homo sapiens
DRPGGMGRGDTCPEDWRGLQGSDRWLSTGGRTSGGLRSIPLPFGQTNRTPAMYSVHIILGGQEGPSFLRVIVWSSVLSGEQRAICLIVCEATEELRGSNSRGLWRPGGAVCVSVAVSADGAHELVAGCCSMLGGSNGTEKNTDEGPLDARCNTEGTLRADVLRALMALPYHWKTHGLFLVGE

SEQ ID NO: 980658 - protein, 331 aa, Homo sapiens
  misc_feature (119)..(120): Xaa can be any naturally occurring amino acid
ALFASPPGSLQTYSQKRREAQYEDCGDSSVQLRDVLYRSGAMDPSCRDPIAYSPAASADEVKMLDSELMPAPPERGDPTRFVPSSPDGMAVKPCCSSGSHSRERVEPEYIHRRASISTXXSTAVLGFRASRSVDVLRTSDGSKATCLDRIAEALSCQVRSYNGSLSEEEANGPELGSGKAMEDTSGEPAAEDEGDTGRNYSFSQLPRFLSGSWSEFSTQAENFLKGCKWAPDGSCILTNSADNILRIYNLAQELYHEGEQVEYAEMVLSLLMVAGDPIYDYWLGNSDVPHASREPLRWPAGAGKPDTIWDALTGRDPGDAVRRQKNRGSTK

SEQ ID NO: 980659 - protein, 131 aa, Homo sapiens
MGGAGARGIGGMRRAERATSLDLWRTLCGPKPSPGSVAMFSEPGCPAGPNNSYCPQHHANNASLCPVCQWQTYTNSSQPFRLAERSYKPARYAQHYMPTGTHPNETLPGEPGTQQTMEDKWAVGEVKQQLV

SEQ ID NO: 980660 - protein, 234 aa, Homo sapiens
GRIRSPHARSSRSSPGPGSSPGGMSRPQPQPPSRLPGARSDSWPPGRPRDSCAQKPARSACCILTDLVSGRYPWLRALRAGAPHPLAEDSDLVSGDGCRCGRGGYSGVAPKCRWGAGAQQRGWAWASPPCQAEDYRLQSFQDEYPVRGVNASIVDSENQAETKKDLYLCVPLKNVDRNNADPPDSHVWHGDLTVNHRLCRQNSSETNCNNLSRHSKDLQHIWPFMYGDYIAYDC

SEQ ID NO: 980661 - protein, 320 aa, Homo sapiens
MGSSNATESSVSYILHEAKVLLCEIAERVWWRLIGSSVSHRSWQSSEERTNVTLKGPPKDVCARPCKEYAYEEIICTDRGKRHGDHLGNVADTPGRFHSILSMGSLNGFAGSPGKIDLGGFPACSKVNIPQDEEQLTNRQFDSNESPLVRVKNRGTERLGQGVAQAKRHLVDGPRSIHTVELMVDPLIEWIVLWLRTRRDVLRGWREQRLCGANGSMDSTPNVEAALGLDRPSCGATRRLGMHEKEGQGERGQAPVQDQKGVEDTHRRQDKEQSQRHRRLKENKKETGKGKRTTQDREEGTNTGETKKDATTPTEKKKKQ

SEQ ID NO: 980662 - protein, 360 aa, Homo sapiens
MILRRSISPRDDPQHAYRYARYSAEGGISNKLPTTIKSEITTYYTLYALTKSQVRCLGDNTLLTQGSTIASKAEHLPLDYKTTSHRTEDHPKHLGDRWYTEKRVLRPHRAKPLTRQPAHKDTKARWTVHSAQGNKTPTDNGTQTGKQDTQQRGADRTTGNAKLRNATRPESSKKKERNKQTQEQQEKQQSRKSTQPPMRARQTQTHRDKNTTKQRLHHTWRACNSTRSAGQAGQLNVRVATTTQERVHNVVSAVPSGHSSTDVKGGAVHPTKKLVKVYPEMPSPNYIPTLPNATPGQGKAERNARRGERKQEECGGTRNDKHHKRTNRAGETKTEQERGQQSRQPGRSRTAALAPRRREQ

SEQ ID NO: 980663 - protein, 138 aa, Homo sapiens
  misc_feature (89)..(89): Xaa can be any naturally occurring amino acid
MHGDEARSTTRCLAIAGSAVANVLNGVDSSVWDPVASDSLAERYHAGLIHYNANDEVDKQIAYEKRLGCFSRCAMGPWKRHAVVTILLXYRNSCEPEMRPPLDRGSFSRYTMHEQNYRWKLPEDVCWVQHVTHSWMNI

SEQ ID NO: 980664 - protein, 251 aa, Homo sapiens
ALGALQRSCGCAAVSGNCFASRLPQEDAVVVECGELACPWCGDAEAGAVPSGERLGVGGPAPVCALPLLGPAELAPVASLLLLMPEEAAVLAADAAPVTLVSAPRPDSRTTAWPDILQCASKEESFQEQSALEAECPGDRRQELLEKITEGQAAKKQKLEHGFRGQLNARMAGSSQGCKEDENSDWPGFGRAGGSWPSSSQAGNLNWGRPLAKICLLCPSWATGKAFDVRQGPWNGVSSLKNGPKPAPATR

SEQ ID NO: 980665 - protein, 75 aa, Homo sapiens; identical to SEQ ID NO: 780683

SEQ ID NO: 980666 - protein, 55 aa, Homo sapiens
MQTSSLVGPFIEHKDNADDPGCLIRDNCNSVSTMLGTGSLNSQGENDVKHTFGGV

SEQ ID NO: 980667 - protein, 134 aa, Homo sapiens
MRPRTEAAMNAQTHLAQLDNIARKFRNNSDDDIPRNLPEDWARHATRERRSITKPFMTASLATMNGDSPGTSDHDLGTPQASEGGGLAWKRGGTVGPPWQVGGHERESTIMVTSHDDTLDSIGRRTQPPDQHQT

SEQ ID NO: 980668 - protein, 129 aa, Homo sapiens
GVRVVSTLCAADVGVQLGSGAGAACGPLHGPAAGMQLWPPSPVPAGPTERRNVGACGGPLNPEPGQTCHEHPYCRRTYPRHIIRLVYKDGDWTLTSRPTLIGIKVYSQTRRTFTDLQCQHTRALSGTTI

SEQ ID NO: 980669 - protein, 315 aa, Homo sapiens
MTFSRVSAGSINEVVPSRVCGLSVPRDSSRRGRPRGPSLQLPRMTPGQSRCEEHDADDKMGRCSSLCSSSGKWSGWTDCGLHGSTDARIIISATSSSSLTLGDLNLRKQMSLGDCQAVQLRCSWVLQEPPACKTPRNADDLQTRAALTGGSAVRGSLFTSDNYRLAPRPRLRGKESWQPSIRTRPSFGRGIAEGPGQGGSLPAKGIILVTTKMAQTLGQDACKHERYLTCLLGACQRMAMPSLRTFAVLPVANAGNFPGRFTGYEANKTDNSNLRWPDTFRCCLVANGAGMDIPPLPGWMGASKPGRRLTVLTIK

SEQ ID NO: 980670 - protein, 248 aa, Homo sapiens
  misc_feature (135)..(135): Xaa can be any naturally occurring amino acid
  misc_feature (182)..(182): Xaa can be any naturally occurring amino acid
DSAEGDQAGEGPRGPTPKLRVIFIHKRTFRAPLRSVAVATLSPTSVAKAPCTEGCVLQGCDPFLWPPTSLEPSGEKGTQSMAGLGTSVILEPVSYKPPVLGAHSWCLRGVGRLIWPFQDLEMYPGHLLKECEKFXYIHVEACDRPTYCCSARAQKPRGDHRQSSLDIRDCIKNVCGENFHTXKEGIDPLRTRVKGGDCGLSQDGLWAKGDGVPQKIPYTAQKTSPINSVSRQTPSEFQNTKPYWRVAN

SEQ ID NO: 980671 - protein, 169 aa, Homo sapiens
MLGLMKAEGQGTKRSKKKVDDGAAGGPQIKENEISETQMRVRMKNDDYQEKRPGVDRAHLTSRNPKPVCAAEQPKKRSQNWSLDGPKELPTETNEKRLRSRRQNERYMKHATWPGKTRASQVLTWPWLVIIRHTCVRCSAAPASKAAATGKAKDDATFVQETRMQSLFP

SEQ ID NO: 980672 - protein, 119 aa, Homo sapiens
GVNRRQVLLVHAARRADRPGQSSVWRHGTCMVETIFPSETGQQPSLNALARPAWCTTPWMLDDGLELCFLRGDKKQSPLEFMLGNARMVDPEAWDMRGVGPDGRVGQRAKLDLYLQISA

SEQ ID NO: 980673 - protein, 285 aa, Homo sapiens
GVARVQLRLVCWCAWPPAASSCLPAALQLMEDDGLMCTDADCCQAEFTCLGGFMFSTRFMNVPASGPLRDVPLPCHTLTNTCVCLCAMECGCLACIKCPECCPFTCCATHTCVETAETSSCARIDIPANCILEPMKGWVVHHSTDVSSVGFAWRCGDPWGRLGGGMRLMGPGGQGPHRPSNVVPLVGLSNEVSELEPMCPHELKTAKLGVETKCELGPAYFDCLISRLWVDPSEKKPFSDEPCVARTESLTKVSHQHIVIQHTNKGQKAIGQRDTEARRIATRTP

SEQ ID NO: 980674 - protein, 251 aa, Homo sapiens
MCESAPRIRLRPDSKVHRTTPAAHRLSIIKKEASGISPTNNAIADTVNQHSRRHQIRPIANGPAIATRQRRCSSDKGAERRQNTSGDSSDAHESRRTELAHLKRTTRPTHSAHGRLAARRQDDSPGPNQGRPPVTQGQINPVTSQRPRPENRRTSQGRTATPTGDARNKPPNTKKRPPRKLRTIKRGLCTTQISTQTATKPRQAPKAATQTTGHTPMDTHNQQQTQGGLHPHNASRRTHVTSTGRSDNTKE

SEQ ID NO: 980675 - protein, 596 aa, Homo sapiens
MRCRCCPADGDVLCSVNTDPGVLAHWLAVCSACSDVPKLPCHVHLWTPYNHASYHHHTSPLLTLPPVRHHHTTHHPVATEPSPTTRTKQIATLHPEHPSHTILTTGATDHTKREPTSQKASDNTTTSSHPTFILVTHLTELTLYHYPSPLINNKYSHSLNINHTITSIRHMPPHHSHTNSTTYFLNLTHTPKQHYIQHQQHTNKANPTNHTQSKTTIDNNTPYTLNLHINTAGRESDARDRGDHRVAVGTGAIEPASISAEGGSIAASLTGRRGPGNDRLKHRHSHPLPLDSPLPSTHATLRELRSMTSRPTMCALRVTSINSTHTLSYSHDLHQPYEATSLTHLYHTHLNQPITTPYTYSYILHNEHYSCNHLLLPYLTPHTILLTSNSLSYILTSTKPTILSITHNPRYLHIMKRQARLPHYTHNTINHINPLILQDQLTSNHTHNHHTPPPPHTLLLLLTTMSDLAALHTNISTTLLHRLHHYKSHPLTHQPTLTLTHTHHSHTTHHTHPETITYTHTPTHPPTQLLHTRPPHTSPTTHRRIPLQSNPSSNRHHTNPITHHTNSPHRHLTYTKHNTHATTHTLHLHYRSHHTP

SEQ ID NO: 980676 - protein, 217 aa, Homo sapiens
RVRELPGGALSCINLPSCAARLPQTRPVGKIQVILGADVLRKKHRVDDERVRRFQIAQYKVLVIKYCQMTASLQQQLSCTHEPGYTNGWLHALLPLLRRSVAQEGLVLWHVITASTTVASFSLTSWMFCEGMAKRSGKTCNLWMNWMGPSRGSHHGAILEAELPVRLRCVVKLLAVCMDVLPGSRLYQEARHEKEVEVIGGRRQVPLRVSAHATTTK

SEQ ID NO: 980677 - protein, 403 aa, Homo sapiens
GTNALQQQLRKREVLLRAELSSALLPVFMPCGPTTLLACLSPDGALACLMWLLPCACETLVCCPCMCPLHVCLCAHMHRLPCMPLCCDLAVCSLTVIDVTVVSMCLRALCDERMLCLDHSWCGKLLACAHPSTTVCVEPCPFLTVILLRLPSGGWIVDIVDDDGPSCDQTLAAGAHDCSAVVPIAQYCQPAVQDDLLGVQPVRALFHRPHIDQRCARRCLRPATCWRVGLMWDTQASCCPQSDHRVQARVWVLVPSLNSLHQGSSRIVRGMNQGAGLLPLTVKIRTGLSRSCVNFGSDCCQHADLARWDSVSFTVGFGKQGQTKVLDLTVQLHFLLQLACTALPTPNAPCSGNVANLWHLRSSQRARRMYATGTDFAVSSQHHDLRTPARRWTLRPPARGPQG

SEQ ID NO: 980678 - protein, 316 aa, Homo sapiens
CVRGPEVSVRGPPVRLKSPETNHGCDGLCADCADWLCEWNPDNGLAYDACDLCALVCELMPVTPVPSKPQDKVEAAEATPVALDMTPPGAENAACECYAARCSLPCLPALFCSQQQGEPDLTEHEKVAILAQLYHEKPLVFLERFRTGLREEHLACFGHVLADHRADFYCAECGPAGHCPAPHPAYPACVTGAMLPCEKLIQGGEYFSDEQMRFPGPPAYEQYIGQYLTQEGAQWPGDQPTAPRPRSPRKPVGRTTNYDAQHTKERKLQKRLLQQQADEQRTCRKTTTRKKKVRKDREDMRGIEKNEDEWGPVENL

SEQ ID NO: 980679 - protein, 106 aa, Homo sapiens
MDHTQFVKPQFGPWLRTRNGTLPSMGNAGKHNGDTTSTTYPNPTQVHSAKSGTVEVKWPQSCNTPNTVDPTKYPPESEASTSKRETQSRTQRQTEKKSVREKYRVI

SEQ ID NO: 980680 - protein, 53 aa, Homo sapiens
MTDFSSEADDAPWKNCSRFPEYSWDEVDRTVLKGLDVDVSGTDLHATFDRDPD

SEQ ID NO: 980681 - protein, 294 aa, Homo sapiens
RRPSTPSPDSALRPPAPRPCLACCPEPSCLLSLHPLCCGLASCAPVKLLAVHVSWLQLAPVSCCDMSCCCPPVPCALLMGCSLAAGPLMQFPCRGVSWACCPVLGVTMPLLACSKCPVDDGLCFDAPGERQKGLCWECPGLRIANTVCGPWLLAVLCRRSLQLTRTPWDCLCMQHPRPLSKRTKEPKETTRLFYPRNKTCWSFRKTISPWCGPVPRHDQLAWRPSSWRAGENLYPYLGNGSCTEGGDTPSHSFPIPSNLMCHSRLHAGQSSTGTFLPTPRQFGNDGKLNYASAP

SEQ ID NO: 980682 - protein, 328 aa, Homo sapiens
VLAARYRGSIVGCRVRGYTLATGAAMSLCAGAPGGVPGGIYSSGHALGCGPCCPLARVVGERTRYTTVCLSGIAPEELMRLLHGASQTAGRRGIVNTSSPRSVYSKVCIGLTRVPRQHMRMSAGEAQTLGGHNAPLVRVRHLRTTPSQGYCPALNWHQANNASLVDVGSETQRARQSRAGRAYLQTRYDEGCRALSDMSRISRAIALFPSRRDAKLTPRAKVCGASGDLRPNGGLAGGGHRWTGELGADWSVGLRPEAPSLRRSTSLRRYGGFLDPLPGQHTDRAPCSMVLPHEIRGRLSFYFWYKMAKRIFGSDVLRTGTRVRCVDG

SEQ ID NO: 980683 - protein, 286 aa, Homo sapiens
MLEGLLGSFTAVIIFLILISGGLLWKQVMMTNNKNLIVAIASILPPYRVTDYMILEDSMYARAERESATREQDVSLKTWHLSGESWLDQDEYIAKINNVREGQSTDKCERNTSIREEIQIIYHNLKASFMECEKDPREDWNQNPRNRTEPEIIPEETEQRNRMTPEHEHLPRGPTTLGTHRDQELAEKVTEEEERAPEKNGKTVVEHTSWHAHDEQTRREENMPRNRKTQAQGKRNHKEPKKQRAKEKKHVDTRAAKATKDGDNRKTITERENRHRKEQKNKEKEE

SEQ ID NO: 980684 - protein, 294 aa, Homo sapiens
MGSQCWSWIGCDRHLTMQIFVKTLSGETITPRGVSPVDSIENVKADGSKIREGIPPDQSEADLLRGKSSCEMMERSPCLTTTIREKSPPCSWCCASGGGMQIYAKESDWASSMSLGGGARVMASINVMARVSMHGDWHSLLTKEERFDALAGKHGWDDGRTRCCLNYELLHEKEFLPCNHLSVIRLHMGGKSRNSSSGDYCRRVKTTINATEVGRRSEHAVGGDGRRAKGAYEKGTGITVPGDHKPVNYRHGKGHGQDRASTLGVIPDSPGESAELAVVGNVRAETNSRRTIGR

SEQ ID NO: 980685 - protein, 71 aa, Homo sapiens
DCLPAWSSCALRDLVALQLSSESLNAAPMELKLCAGLMIKSVPVSERQCCCETGDCAICTCGACLTEEPLI

SEQ ID NO: 980686 - protein, 407 aa, Homo sapiens
MVLGLSRLRRCGCMIVREGRLSVDLETLVCMSGAWCPMAGECDIRLSRRREPKGSWLRSVTQGTTQVHLELPGRELTPNRLRVTPEGPCGCNLALGGELSSRNWDPPMQVVGNIPNVHWRKSGSQWYLQKFRTHKWSSMVATHHGGVHSRNPHSSKSPEGANYIYATTKRSNRLNGQPGALSRAEEGWMADKCTQDSIGHTNTNVRINCPLNRGSTHRDMVQITSIAEKQAICAAHSNKMAQTRTVRESKHGGDGHTCGKGEHSGKRTPRKPKSNADGHRTADQCRRGGPRPTMVDVDHIDTRKDPAEFAERITREKQGSLTKQRHMPYYTQGHKKSNTWSTRSDKSKTHQEDTGHSTKEHARTSHTTRDGRRPQIAHNTRQGPHTKISASVDLTVSTPHKAESFKN

SEQ ID NO: 980687 - protein, 505 aa, Homo sapiens
YQRCQMWQRCHNADGWTILRYELYVRAGPMARAAYSERTQRLCLQHLTQGTSANTDGACVWLLFVCVLCRSGPVHGALRRRAVADDSVYTSRAEGHCLGRRQLGRGAWRRTVTTLMEPWPAKGTSSQGVRSPRWQGLGVIARLWALPSLGGVGRLVDGLPQGSWLRCVEVAVTSACPGGLQRRESMPLLRHCGRLERLILSEWPRTPLRTDRTGAWGGTIPGRETPVMQRALFPATAPLFILTPGLVLAMGIHFCPRHRRIGSASNVLVKGGRRENGTGNWRNGGGDLRNQPSQDDNGYCETCCGNNAKDIAMKMPPMGVGAPQLQNSQRAKGEGHHHDEKGYAQTRGGTVVGQREYKHPVNARTKGGPRSLVKGVRGGLRLVALRARLRQGPVGPPPSKDRQGEKQIPKKEFAAQRHGVSTQRATPGQPQHTRTQRIGSHNRRHCWGTLGGKGETPKERNPCTQREMSHKRHTNHEEPGTHHEPDSSTKTDKTTDSTHTEGIKP

SEQ ID NO: 980688 - protein, 51 aa, Homo sapiens
MDARAANNNQNDATSERRQEGHAPPTIQRPAHTYYHTKHHAISGHAQQRQL

SEQ ID NO: 980689 - protein, 409 aa, Homo sapiens
NAAPSAEDEDDEDYCALCACYCACAWHATCSRMLLQLKTAMVSLRRNDACMDMLVCDTPVVDDGLSIPAMALHVQAVQALLRFMAAMATFTTMNVLDMLLANDVLPKGTQSKLETVTRHAEQNSLERRGYDLNEASEGHFWTGPRLTREHWAYRGALYQLVALNPQLQKSHVWEHPQHHRFKWLPVDGRLFLWNKGCWTNCRSCQIAVYQEQHKPIISLCRLVKVRRTRGEFPQTKATTSEVCTAYPKNGEDILEKRVLPRLLRGRQVPLWNGEGGSLVHVRRNRWGHIFEANCAQCESPQCFRMRVLPLGGAFSAPIRPKIILNYMYVALGCEPLLDFKGRIIHWTFISTPVGGVTTLQAQMKHNPFEGILIPTLVYCAPEVHNPMFAYPYAAIWAKPTCDRNQATCV

SEQ ID NO: 980690 - protein, 109 aa, Homo sapiens
MTMGGVLRGACTESELQDNLATRVQELQHSRVAYAVTWEVSGEAARYSAVWNRCVLIISGCTKYDTVHQQASASSYSFIGARFDMGLYRHQLVVYPRRQSIYDLMLRSL

SEQ ID NO: 980691 - protein, 262 aa, Homo sapiens
RGEAECRSLARSVADSPERFCGRSAAGRSRERALWNGGDGYVCGGMPGWAGRAGSNWDVAAELLPPGYSAGPELEGLCAACPPDLEEPCSYAREPCPRLAAPGHLTAGADKPKPDPGLGCVLDLTTARQGEYLATSWSTELLPQKDMKLLGELEALKANQLTAGLWGDREDCPHHWQRFEEPTHVKMAGRKTNNMFKQVLPGKGQAPTLLEALSPPPRTSGLSPQQISKSQGGEEGWPLSDKVEPQEPSSNLELQRSMSPQA

SEQ ID NO: 980692 - protein, 363 aa, Homo sapiens
GETRELALARDGQGRLGFEVDAEGFVTHVERFTFAETAGLRPGARLLRVCGQTLAQGSGPEAAAQLLRSAPKVCVTVLLPDESGRARRPHGKAGSLAEPSRALSSSLSDEAPVLPKTTPDLLLWTPQASHQYPVLTVRHPLTQDRPGKSQRLMKDKGNPGRRTLTGHPYSTRTVALWRNSSQQDHVSRPGSGTLEDEWQGHLGDRLYLQTILESLHPERAKPIPEEWADPYRETTKTLLAEARAWETSQQNGLSPELLLTDAARRTLKKRTREKRTTMQHRADEPRDTHHRRATKAAHSKRDINTNNQDHTKQGNNSGNEQHTGTTGHEPRNTRPKNHTTRDETTPPKQRGAAPPPKSEQTAN

SEQ ID NO: 980693 - protein, 366 aa, Homo sapiens
SCAPCLSHAGLGHLVNMASVYCVQQQRLCGLGLGSARRPSGVAYTDRDGAVYCATWPDGMPDEPVSPRAARVSRHTHVASCALPRLGDTYICDAWSEKASQTSIPPLTPGQAPGWSNVACKSSAPALHDHCQCTTYQHVQRLSDTWRDTAQSAITLTRTLLSTILRIKHLHLCAHDSSYSENASQTSQDDSDDATDVALAQRGSRRNLTNQDHRSHPQQAGESHHRAPNTYMPGNLQRALTTYSGQPTFLDQCTSDMRGDSRLTRLHWAFLPKTLAEHSSGLHRALTACHYLRNASIKGHVCNNSDRATQRSTFTNQCSDTLHGIRVRIKHQNTSKHRTNVRCNSSHPIRCSYTGNKERYNKRHTR

SEQ ID NO: 980694 - protein, 164 aa, Homo sapiens
MDHSDHLLLPDNLGTHIVTFTSPDPTLVANRRRTGACICMSTPYSANGGETHDYTLTWLFPLRFIYPNTLARFDCPTLYRRVCASIHPYGQWSTHGNQVRNTKDDPRGPSREATTSHPAQTPDPIPTSHRHTQDPPAAQHGHAPMAEQAAVAQQDHTNRTQSGS

SEQ ID NO: 980695 - protein, 87 aa, Homo sapiens
MSLTGTSTWCGERRLAFRQLLGTRMTWAITFCWFYRNEPLSNEFHVSSEHAGRELSLRMPVEPGGTTLWGTNWVFLVKLGGHVPLND

SEQ ID NO: 980696 - protein, 361 aa, Homo sapiens
RRSAGRVRRLPAAVCWRRRIHALCWFHLCVLCCAVLCWPLCLTASSCHADALHGSPGRLLPLAIPAPRWLACLVMAQPGPASQPDVSLQQRVAEFGNTINAEFITCTTARSEPRHLHQNESPPLHRELIYFGLTRRTDSDTTANTATLHTRLHKTDLGDQPIATPDCAANAHNATSSAAHHHQAGLCPNRLLLEETTQQPNATPTTHTQPSTTRTRLGKTDTHTVDTTTPIHDASHNDHRNNQDTGEPQCHAPQRYQHRNSALGKPHQARTPHTKNHKLRLLRPQPPGPLISGDTIQAVTCNAKNQAWPTTIGPPHQSITPTHKPLETMSHPSPTTHATADPTPPPPPYMPFTSPMVNKRT

SEQ ID NO: 980697 - protein, 190 aa, Homo sapiens
GPAPRWEEAGDWGDRGETEAEVEPDPEALATVFLGRREEMGSKAKKRVLLPNPPGPPRGQIWRMCGGAGEDQVTSWPGRPPVLQDMEDAEAGEQSTQSGYWCNQGEQAGNVLRRGVSSCGRRGPERGGQMSRQHYGGGAPQADLGLRLAARGCRFLGRADDQVRPGVRASVWWVRVSAVWTPCPVLAWLR

SEQ ID NO: 980698 - protein, 76 aa, Homo sapiens
MFCSAPRCVSGLCMHQSVWSPMSHPVGFPLTVPELGVFGPTESDLRSEYSGDGLLEDPLLPYPYSSHPLGWAFSLP

SEQ ID NO: 980699 - protein, 255 aa, Homo sapiens
  misc_feature (80)..(80): Xaa can be any naturally occurring amino acid
  misc_feature (82)..(82): Xaa can be any naturally occurring amino acid
MRTVRTRQRDYTTIHAAVGVCAVIVPGIEVQTQQAICTERIVDNTVRSDNVFTEPPLPVCVVTRLIMLTISPRLIDYGMXLXACGATTDHARVQRNDLGTYVRRWVNNTVEVCVPKRCGIENGVAERKVARRFPRGIVIIHAIPSHGMGPDVGKPITVPLGGPNPCTERFHEARLNGLQQSDDILGLLPPELATLGITELEYEFYRRLVDKASCSPIACTVSRGVNNVIDNVRWYIQINDEQAAGGIVLCGYLPV

SEQ ID NO: 980700 - protein, 235 aa, Homo sapiens
WPPSSCPGPLRLVCLPRWGQSVDAGGSSAWSGWASVTGPGPCLRKKPFSCEEKKKQFAVTNWERKRGLQDLAAAPVPTCLQLWSRERARCEHDLTPRTWESRDPSYPAGLTSSLLSGAGSTRLRPNLIPDCIFERDMQGSEVREAKGEAAPGSKFIQAGSVLSCIGAWTSGEVYQPWLKFLDIFLEGTSLWGYEMSKGAINERRGTELTRTNLGRFMGLLFWRNQYFEHNLKTLR

SEQ ID NO: 980701 - protein, 66 aa, Homo sapiens
MSKVAPIGQIYDVSHEPQLFFGTGVPHSPRPPIGSEKKFRKPGYPASNVRQDTNSKHQQLKNKAHT

SEQ ID NO: 980702 - protein, 290 aa, Homo sapiens
GKWQQQRGLAAEYTLHQISEDSELEMSGAHGHGTDGALEVRGAPSPQKEHVNPMHESGPWCITVSEIDLPREIHCLQKEILVWLQADSSTFVQRKTAYTWSSFSSIQNEIIGVWNGTNLQDLWKSVAASSSHRGAGEVYIITVDKYLAASSPSLEPNIGAIQYNRYGLNQQAPTKELTWRASHLLQMPEPDENPVSINCGHSLLPVEYQQSSLKTQGQQQLKPGEILLVPVNEAPKQMDKAFRTPTKERGDALTQKQPTKRAKATTEMAQDRGHTQTARSTIEQGTNQRG

SEQ ID NO: 980703 - protein, 144 aa, Homo sapiens
MVVAWQVITDFTLKKTAWFNSHDADIPSGSQDLWHNGHRTHFLSSNIAHRYTGETGKFPINELGKVARIRTNSGLVRDHSLASCCGIGIPLVNVLFTIPNKNIAPTGGATKLHPYYKGHPFGKDVYIPQRNSKIGPLVQPNRAA

SEQ ID NO: 980704 - protein, 531 aa, Homo sapiens
  misc_feature (209)..(209): Xaa can be any naturally occurring amino acid
  misc_feature (248)..(248): Xaa can be any naturally occurring amino acid
DSVSSRRILRGIGPIGHAPFNTDARYPRETRDESLRIPKAERVPSPREPGVEIPPCTPRLREERPVPYTRMVLSCAGIIVLISRRVLMAFRRPNSMASKAACGPRVVFQGCCTIGPRTNRRPHLCCFSCAWALRDGGRRLARGTTLHRDPGRPTGRLRLRTQVARGETKEIGARKAARGLGVARRRGGGIAHSGGARLTRPAGRGLAKXRSRGDPGPLYPRTFEANSPVARGPFSGKPTRGCCHSVWXGKRQDKCGVYTPSSVKQSFLRWIFRCAGGIYVAIPFSICALCALSPTVELIVTKVVIGAYVAPLKSSCGREFATIAPNSFLPRPPVGGEPLAEKAILMGTRGPKKGTANSFGVWAVILLAVGGGFTSPGRMISLENCDTRTTGVRAQTFGMRRCAQTGSVLTKSFNSSQQSFHQATGRLCGNSTAEPVIALWRHIGGKHPQEGVVSHDSSLVEPICFLDRARERSSPAQHLLDYTTTRWCYHAHDEYSGVPPVKKQRKRYVYHLIVACLVFLTSGTGQQFSVM

SEQ ID NO: 980705 - protein, 128 aa, Homo sapiens
PRSPVGPGLPSVPVRAPACVLVWRTRAAVLGPFSVPACYVLLLADRGASVNCLPPHRQASSVLLRVFSFEPVPSCRGLVGAQAPGPAVSASRPTVVRGADDSARESSPGWPLRQTKELDATGVDVGTI

SEQ ID NO: 980706 - protein, 315 aa, Homo sapiens
MPRPVCVECISIHVGHGVAVQMDDAWWLSSTGWNTASSPMDRGANDDKNIGGGERLLSNTLFRLEDRALGWTCALGRVLSMTVDAQQSYELKCAHGGDPRRQCRLQPLRKLNHRSRKECMAQYSYVGPRASYQPHWAGGDQLEPCRRTSNSTKCGLKRGAPGSFSGLLGYTIELWWGRMVPGVSVPGPGHVSRGELVATKVQCWRSSMVSQAPTGIHKGSEPYSVQCSPATATWNYSEVPEWSHNGALMSIGGKRGIEGQGTNLEDYEPDGLHNRCRIRGSQGEEINTGHPDIRGKPVGEPTADNTWAHEAAQAA

SEQ ID NO: 980707 - protein, 124 aa, Homo sapiens
MVLSTYTALKLRTTHQGGKPHGRKHQDKRSTKIIPNRYEREQPDHTRYTDSNIHTHRGAPQLTAAHSQQNRTEQPAQQRQTTTLTVLKENRTRKTTYTRQTGQRRHQYTAAERESDTKYNSARP

SEQ ID NO: 980708 - protein, 165 aa, Homo sapiens
ANPSWERHPQPAGTAAYELVLIRHGESAWKLEKPVQRVVRRRPEPGGHGEAKRGGQEATRMLVVVQFCMITRCTSVAGKRRGVRNHSWDLVSQDCAVCIRNVGLAHSAMEVIVWGDRLHEAGIFCVGSETRVVHIIERSDTCSAKDDGVTVAQDRKDRGRTACSS

SEQ ID NO: 980709 - protein, 136 aa, Homo sapiens
GPIHPPLPVSESKRGHLRVERPARPPWAVPPADDTRSPPPKPNHENLQQGRKREPITSKALRLFIVSQRYVVNKANSVLIFSIIYSLYIVPSQYSLRVRPVYIHAISRMTRKPALRQSSSVPTSDVYFVGVTDVRL

SEQ ID NO: 980710 - protein, 84 aa, Homo sapiens
CSQNTIGYQISKADDKIWFCCTFIYMIDSSIRSILTEARIELRDLVAECRIFPSYVKNPRAQGRYTLVEHIADEPRRGTYQEIP

SEQ ID NO: 980711 - protein, 134 aa, Homo sapiens
RGGGGGWVPRTLAPAWEPFLNGPPLSLHSTNWSFLRGLQALHPRSRMGEDWLHPLPPTENEPDFAQVFASGLHGAGRAGSQDDDPIEEHKKRCVRCALSFLSRTQLGRIEPLVNCLETGQHERCQDTKLHGGNQ

SEQ ID NO: 980712 - protein, 119 aa, Homo sapiens
  misc_feature (77)..(77): Xaa can be any naturally occurring amino acid
MAVLCCRRYSRMCELSCSLMVVTRCSPWMVLGVLWCSMAQNADAVLLHAGRGMRITRTNDVSSVGGKQVSWYRSDDXDGRIGDMTDWSACELSYCKRVRGCCQEDSAFDCLNGVRKRSG

SEQ ID NO: 980713 - protein, 113 aa, Homo sapiens
MGPNRVVYLDITFSTLEMGSGGQVSYVLGPRKIEGGDAADVEVQFSYHLVRIFSLLWGPRNGLLLHNLSSGISRGIIWGRGIGVGYRGGRVKPAGFYTAIWEPEVPILRYLIL

SEQ ID NO: 980714 - protein, 325 aa, Homo sapiens
  misc_feature (80)..(80): Xaa can be any naturally occurring amino acid
DRPASCDLDPGPPRPGAAGPCCWCTLCSLRSQVGPACVASGPVMQHRHAVLACCSSQPRRNVARYPVEPLSESVLAPISXPPEGFRREECRRRYLHSTRYDPGTPMEPSRGASVGTLLCQEGLEISPALAIGTTQGLCALRWERRSTLPDANHEQQLHVGKPPGLPAMYHVVIAQRRGMADCQFREVSKSPPFASGGSGAQRASDRRLRLDFGSHVLVFSPPKVAFNMIHHRFGGSFGGGEFHWGIDRTWVLVCEIARGVGSKGGHPEEMATVMQLRANRRRNRGAEARVRAHMGTLDARHLWWRRRNSGGNTGTENEPCTFISA

SEQ ID NO: 980715 - protein, 335 aa, Homo sapiens
GCNVPWEFGDVIPDYVLGQSTCALFLSLRYHNLHPDYIHGRLQSLGKNFALRVLLVQVDVKDPQQALKELAKMCILADCTLILAWSPEEAGRYLETYKAYEQKPADLLMEKLEQDFVSRVTECLTNGEVRPPNGHGTDLSVTHYGDSLEQLIGVSREDLALCPGLGPQESPEAGMMSCRSPFDKYPDDPACKETPSVIINRSSPGQRSVVCWPGAGSEERDTGRGPTSSMDQNGQLQLSINHPQRHQKDKHSRKEAEQKQGNPGPEAENHRKAQKYGKNPEKYTGGPVRGNTWGKHIRQHPAEGKKPRYERKQGENREKEPTPRETDPKARTEAN

SEQ ID NO: 980716 - protein, 104 aa, Homo sapiens
MRCGNVLHRDIQCRFRKCLETVELQISLKNYDLSSKGTKTAFIGRYAVMSIKTILITPALYSSSCDAVSCVSTHVMHLMHLKALMRTGSDIPLEDVTSYVRLII

SEQ ID NO: 980717 - protein, 188 aa, Homo sapiens
PETNRTRQPAMNSRGQYPRQPTYPVRPPGNPVDTLMTCVIFLTAPSLYRVHPSCLLSELYRPSFVHPRGCHESPTMSGALPGASLYLPMASSVAVGPVGSTNPHGLLSSRSHLSTWSPQCWWKEGMMRGATICELVATAGNLASSCSWMPSGLLLSLPPCRWFCVLVTQWTGNVLHWSGTDGGYHHPG

SEQ ID NO: 980718 - protein, 73 aa, Homo sapiens
LLPAVCLSDANYLRRGAGAGSCGPMSPLGPWYLLRRTCGGLEPASCGPLLLRVTLTCHFEDAVCELHQPDVGD

SEQ ID NO: 980719 - protein, 172 aa, Homo sapiens
GAARSSQAPRKPVCHRRQPVRPRALYPAAAPIPARRARGAAARACPGQVSLLRLRGDGHQDLTKMACLGGVQPGARRLGSAVICELTFKYRRSTIVPGEQGAGVPALHPACAQMTSWLFAFVLLHHRGCHEARGSKFCPHHVIGENVSGLHRAKTVDGQLTLGEGGRNRNFG

SEQ ID NO: 980720 - protein, 105 aa, Homo sapiens
MSGTEEADGMSKTDSSERRRRSSACHGEKKERQECARDMAQGQGRGRTERTRHRSGLACAWEGDGNAVVDLEVDGREEADLETGFERLGAPEGPTYRSEPIGHQT

SEQ ID NO: 980721 - protein, 162 aa, Homo sapiens
MDSVRSGPFGQIFRPDDLRFRSAVVLENNWARGTTQKARRWCPSVLDVVMTKEADELLTACRGFQLTHSLWWGDLGCDWVTLPHHVKIRERGTQNRIMIDVRVVPSPHRVSEHRGARPTMPALSSPPARINRRTRASALLKNLSRMFASKPKADSRLLGLDT

SEQ ID NO: 980722 - protein, 271 aa, Homo sapiens
RLVECDIVFKPCVGIPEQRRDAQRRQGRSGSPTISLRSSNYGMIIRKCAIVGRRDKCGTLSRCKKDPGNVPFGEEWRDGAECGNETHMDARRPDPEGSLENRPALEKLTASYPGECGLGVQQGGPQLTIKGTMLVRATNGRSDCCPMLVSICPQCEVSCASLTRHSVVGSHDERSSLFYPWLESISTVRNSSHGVATLADTLRDARMLQASESKNVVAEKVGSPRRNAPPLGDSVLQIIVPVLLRGGSIPAGVRPMGVSKDLKVLISRRTL

SEQ ID NO: 980723 - protein, 124 aa, Homo sapiens
MLWKDLGDASGDEVEGDDPVLMCIGPGVWMSRRAVKGKYRYGAKLKCESNLTADWTNVNQSPDKDPGVMGQAWMTARRPHRALSLSPLSFKEKKPLGETNLGNTATKGRPRIMHLCLSRPLQER

SEQ ID NO: 980724 - protein, 117 aa, Homo sapiens
QREGARPMCTWSRRREHGWRAIGRGHGTRVAGPRLIGSHLRLLRDAAWAYKFRCGTCIHEYNIDMTRDHYRPLERGGVAAGVSAGCTLHVEFCEVPSAAEGARDVWTWPIRCLDGVL

SEQ ID NO: 980725 - protein, 156 aa, Homo sapiens
AWVYVASFVSVSQATPQQACQGDCSGIDLGTTTLVWVYQHGKVEIIANDQEKLNHPSYVAFTDTERLIGDACKESSCIEPHQHRTDAKRLIGRRFDDAVVQSDMKDWAFMVVNDAGRPKVQVEYKGESKGFYPEDVSAMVLTKMNVKLAECLPWED

SEQ ID NO: 980726 - protein, 146 aa, Homo sapiens
QLPRERTRQASVSLILIFPPFPLSYCLSFSPPPLHIPLEGTREKGKSRVSPSRQHKGNAENTETKKDQTKHVKQSDREHTETREATRATRREKNRRQTTHNNKEDREDTQHEKKQNHQRTRKHTDTQETDSPYKYNRKTTCHTDTR

SEQ ID NO: 980727 - protein, 428 aa, Homo sapiens
QNTKWLDDCRVQLVVVPWSALCVPCGLVEPLCVHSCCDGFCAMLCILCGLCGLLACGPWCLGPEACWMLRCAVYSACSASQAVGIAQVLPKDIGSLLMDRKCTTAQHQMITLEQGKHLIIVSSHIGTQTFQQCQIASRIQNLAIFPFPNRMGAHHSVGKRHSQGLTIGTAQFSRAQMNRPSQKAWNSPWFDAQGSQNRRRPNTRRGDLHQSVGQTIYHGYIGTLKYPGEAETIKQKRSASISSRLEYKREHHLVVGLEETTSVGAAYPTNGATDGFGVAQNDTRGTRSIPLELAEAWYTPRIHTIIPTFGGAAIQSGRRFLFTTNTYRRYTPPRWICHVPHAQCGHIKIIGVCGVTNDKARKYTGGHIKAARPNAKNQLFSRRIFSGHTDGRELTAHEAYKTRPHRPEDSYHMALPGCAGINAARPDS

SEQ ID NO: 980728 - protein, 159 aa, Homo sapiens
GKVGFQSFFSLIAGPHHCMQWTYYRSTHEAEGNEVGRHEQIRSSLIRVVPKGRLRNLPHSFPHRRIHEQIRTLSTCHQYHLTLIGQAEKDKLQYQISLDYQDSRIPFLSVHKIYITSKTTNTTHPRATIDPRPETSTTQSHKTKQNQPRYKTTGHKTTH

SEQ ID NO: 980729 - protein, 622 aa, Homo sapiens
AACAAWRPNRKAGLLLTPPYWQTLSFPWCMQEHSSQAGQKLDPRFTPEPSSMTLATGRCAQHSSAPEHGTATQAGKPGHTAQQGLGVPQNPYGTGGRVRPRHGSGPSERTITRKRSTPYYGHSLAQQIKDNSWDGTNRSDVNATMVKQPRRETHTHSSALLGHKRVTPGDDALAHTQFAHRQHGRLYTAITAGPVDTYPMTRPHCSGRQDPFWQFPILMRTRVVIGPTEDTTTYINQCKPYHWDCATTLSLGPICATYDNFTALSTQNSMDTTYTHNTPVTCYITAIWRGPTQNQNARSSATHQPVGKRKLGGHQHHQLLAIQQQTDGAMSGTTTDDIERNTTTLSHTAATRPQRGITLEGHHHRIITADTHAHGDEKEKPRSGRTHARWQTTIRRDNACDGTKRHHTLDRSETPHPQHAYATNSRSQGEQRAAKQPDLALAQDTDRGKNETNHTSGRNTRQCEEQQRRLPPGQHRGTAENASGTTTRTTQYRTQARSNTAPTQPRGPTQTNRAHTKHAWRETPDRDRYTSHHTSGTDVDRTPAKRRDRVRRANEGHQSANTNTRGRAHQTTHTEAQPKQRGIQPVRQRPARGATRRNPAQPTRHRQTTAEQPSRGIPSGSR

SEQ ID NO: 980730 - protein, 106 aa, Homo sapiens
AGVMGGSSGAPRCGGCAAAVGPGPEPASAPGSGGPSWTRERTLVAGEARWLCNCAARLGHVIRALLSSAGASTAWWWIERLLAGNQRAVLCLSTNQGPAEASPSTL

SEQ ID NO: 980731 - protein, 476 aa, Homo sapiens
KLLLNFYFSFKPQNRVLGVYKHSLVYSLAEVPRRGCGAVSKLTRPEIPWGAPLYNKCVNHPEVLKSTCGRRGCGCCGTCGEGPPNPKVSVGEGVPVVSLSIGRRHRGGPRAPQGGRPRGAIYGARAGLCCATKCAPTILLEGAPHKRAPGGCVSAPVRQKRAHARNATILSQSLSLSRGGATRGPCETESGLSRRGHPLKNSPLEGKESRGVERGASPPGERCRVGSVWGARESSSPTRGGVGADTRSVWCPPGGQQGGALSGPQGLRPPGGGAPPGCCGPRRPSPCEGHLSVCRGEPQYLWVGFLRKNAVPMWCPPYCGLFQLPWGFEHPLHKSGGATRPFPQEDPHQGRPPREALRASGRTRGHPSPGGFAPRLEVPRDNFFWRRCAEKRRLLFGVGAAPSAAFEAALRSNPAGGGPLSAQGGGGGDDRRALWPLKREGDREQCPQGGGGRTPTGCVILLRQEDTPAPGERADC

SEQ ID NO: 980732 - protein, 80 aa, Homo sapiens
MDTGPKSGSTQRETGHRGTRVWGFPTKYKKGARGEHRRRSEDANYQEGRSGEGQQGAFKPTGRVQGGGRIIKNKPAAGIE

SEQ ID NO: 980733 - protein, 321 aa, Homo sapiens
MVCRRFVEVGRVAYVSLWTSCRGEWSRMVDVICSEQVFGRWTLPSSEDDGPCLSSACSSLISSSQFPRQGAHQKYVRTSLVQQGEHINTEMGSRHDGPRRLRPEERKAKMTDLIVSRVMKAKKMRNRIIKNEVKKLQKADSPESFSHEKHLVLRVLLLLLLLLLLRAAKVPAKKDHRREERGSSPMKVPGQKGTGQRAALLQKLRGVKKLHAESTCSKGIRKEALSGSHYKANEVLSDPSKREKQRSGAIMAGPRRGDGWPWLSWSDPFLPKWKTAAHREAKRTRDDIPQTGVHPGAPVGVQQTPQIQTCTVLSQPTYYYN

SEQ ID NO: 980734 - protein, 315 aa, Homo sapiens
  misc_feature (186)..(186): Xaa can be any naturally occurring amino acid
MPSITLCLPGEHRQLLEAAYTTSRGGHPLAMCSPNEAAWCVGCPRGALNSGTLFARYRRVLTALCLRVLITLGLRSREAHIRVSVRRGIRAWELGPLLLDVSSFGGFLHSSCLGIVELLALPAVIRLRFVRPLLRSRISDRFTIYLIGAIPMLPRSGFRFNGVSVPYIIDCLSTRVHRLNPIVGVXHSVRRYSHRLCGSQSLVSQRISGAPPVPERIPRAGTTLVPLRVTTALVTCGFRSVDQTVGKLSASNVWTCDATFGQRCELAFGALSGPYGTQRPLWQPGQCNNIYLAEPDYDKLGGSSEKHIRPSIALH

SEQ ID NO: 980735 - protein, 154 aa, Homo sapiens
MQKVGGERLTEPRAVLEACRSHKDYGVHGAFSEYQCTHDVEVRVIQAMDGSTHCCRPGKTASGYLELMGGSSWVGAEEAMKANSMFVLKAGLSRSRIWSFCLHGSPSPVGSDCEAHCGAERTSSCETERLIFSMFPMVWSYYWKDGHYLLCCTD

SEQ ID NO: 980736 - protein, 128 aa, Homo sapiens
ALPFGPRWRLRVQRVAGATGAVLEPRAALGWAPLNLPGLRQEPGGPRYSDKQRGDKAGEPYEGRATRAREIKSAHRKGLVVAGNTGYTLGWETGPIAGRAEPRGDRRCSFANVSIGGGYPYPSGLALD

SEQ ID NO: 980737 - protein, 130 aa, Homo sapiens
MATITNIVATNHSNVRRIVRHDGYTLGVGNSRVSHLCGPQSAGPVFVYMDRTNDLVIAVGVNTLKPIVMRVNDHRCAYEHMIYSGYEVVTTLRDNKLSESDPGPHSGRLPWLIPTGREKNLPLNNGGQSQ

SEQ ID NO: 980738 - protein, 159 aa, Homo sapiens
  misc_feature (54)..(54): Xaa can be any naturally occurring amino acid
NRVSGETWLLCPAVALRSDSAGLRKMQAWGSLLSGREKRRSGEAPSSHELPCAXGLACGYNSTGGFLVGSWGYVKTGSVSSLAAGLALRQVYPAWVLNPAVSGSKELLGFPSRYICYLVRGNGNEILLLWKIHACRFKCAGDQVVLMAAKVGVRNVDDI

SEQ ID NO: 980739 - protein, 291 aa, Homo sapiens
QSVRPSQWKMMLNIDVSATAFYKAQPVIDFMCEVLDIRDINEQRKPLTDSQRVKFTKEIKGLKIEITHCGQMRRKYRVCNVTRRPAQMQSFPLQLENGQTVECTVAKYFLDKYRMKLRYPHLPCLQVGQEHKHTYLPLEVCNIVAGQRCIKKLTDMQTSTMIKATARSAPDREREINNLVKRADSTTIRMCKSWPDHLQFDDGGTRTRLASSQASVWGTCVYRLTAAVSAQNKVSLARHRCLDCEAAAFPGSETVWPSLFAPRRWRGCRDFPRRRIPTGGSDGPGCESPGR

SEQ ID NO: 980740 - protein, 213 aa, Homo sapiens
MRKGKPPVALRKKPRSPESGACLLGGVPKGVCTLWGEEAIFFSLKCVSPVGRGKTIPERDMKILAESLLKEGFLKVTVPLRGGKARYIFLESFTPPGGPQARPYNSKEFGFPKKNFMGQWFAPQNQLLCVRSYSGARTSMARLNISIAQTHQTAFSPGAPVSEASKGVPLGALGGLQGRPSPPWSHYLPSPILRSSQGSTGCKPRLFSPPYPA

SEQ ID NO: 980741 - protein, 424 aa, Homo sapiens
QQFQTITITVLGARDNACLLRAAAYQHFLRKALLACTEPCSSLRTASRDTIRLTTDETDCDSCHATARTPSTSPLSTTPTPHLLRHDYTRLYLLLHPPKFSSHALCYAALHLATRTLPLHAQTHTARTHASRPSNTPWAAHARHTPALTLAPFHTLSTFHSPPPPNSGSTRANQVSTLHLWPLHLQLCLAPLFPKAPTPAQPLFPPYRLTAVPPGAHNLNALRHLYPAKTHTPAACHSGANACAPCYHFLGRHFSLRPFTRNSLPALTPPSPLAAPFVTQQPPSLAGATFSQFSPPWRQARVGSPLAPNVARTPPSAPRAPTPHILARPATPFPQRRPWRSAPLFGPRLGRHRACAAPAGICDTPLGPVRPQPAAPLALLPLPFPPFPPTGPGTHPFSARAFSPRRQHTISAPRGTPPFGRPHT

SEQ ID NO: 980742 - protein, 200 aa, Homo sapiens
ESGSAVGPGAPTSAFPPPAVKHIPQPGGLRSPQLPSGAMSQKRSARDCRRRACRGSWVELHFSNKWERGQRSSLRFSIYTWRPWKQITVDAQELSLDRSSSKSSHCGQPTSLEEPKDTKELLKQIPIACGGEKQLKVSEEDDIRKTGKKRVKASVKEKTSDGDIGMAQVARKNYLPPKGSSSLNTRKRRPTLSYEEHRAS

SEQ ID NO: 980743 - protein, 148 aa, Homo sapiens
MGLRAPLSGGPPERTSVAQKTPRESYEEIDRGPLKPRVSPTNSASCDPLTQCTSGRGDHRIGGQSGVPASGFMNTECYSVGKNMWQHQRQLFIIKQCRERDTETPSTTAARKPQGNIYQPNAQHGSLAHRVIALAEGMLSTRDGEPPP

SEQ ID NO: 980744 - protein, 358 aa, Homo sapiens
GGLCGWNLTKKHCHASGRVLCSEGFWYPREEWEIRKGLECSWRDLVLDYNLHLPARLPWTPKCAECCKPHDRDNSHVWDSDGEINTCHGTGHNRYRELMREHPNMTGHETQNEGQMRERKSDARDRNNTIIEKMREDGHNGTEHGTKSDQWTELSVADEATGPQNKTHEYRGTDDRRQNILERENRRNTQNMGKQDENRTIYEKHRKLKPNPRNLNKHMEQTAGIENPRARPPEQEKRLNRKAKKKRNKERNKTKRNETNSEQKDQKKQKKKRQQNHEETKKEEKKRKKEKREQRHQTKKNKKKKQRNKENEGKEKKNRYEKRRRKQKKRSETRGGKSGRSEQRREKEEEKKNREKEE

SEQ ID NO: 980745 - protein, 158 aa, Homo sapiens
ERQRSGAEAALSLVSRASGARGVSRYPAAPSFPKTRPSWPWPPRVPVLAGVVRVQRKRGRGFPSVSPRNHFSLKRGDFHFFPLCVLFSPFFACLFVVVSLQRNLNLLDVEGLFKKKTLRSSYYLWKKRGGVYGGSLKKKETLLRNFFLKKIDAFVGIT

SEQ ID NO: 980746 - protein, 148 aa, Homo sapiens
  misc_feature (49)..(49): Xaa can be any naturally occurring amino acid
  misc_feature (68)..(68): Xaa can be any naturally occurring amino acid
  misc_feature (74)..(74): Xaa can be any naturally occurring amino acid
  misc_feature (78)..(78): Xaa can be any naturally occurring amino acid
MSTVYLHPGRAAVIRSALRRSSYHPATLRAVASGGPPAVGYHVALVHGXRPGRPSASSLSLPSMKRTXWSMRQXCRSXGYYLTTGRAIMDRTTHSSVKTHNSWTPRNGLCRTWFYPLSHCTLSYHVMTLGEVALAVGLYRKGTSCRGA

SEQ ID NO: 980747 - protein, 86 aa, Homo sapiens
KSAENIPPKEFLFKHPKRTATLSMRNTSVMKKGGIFSAEFLKVFLPSLLLSHLLAMDGDLYGRRLTTSTSTFDEELESDWFVVDYF

SEQ ID NO: 980748 - protein, 106 aa, Homo sapiens
MLCARNTKNRKTGKYGRAEPKKTRNKGCTHIYHGGSKDHTRTQATPPRSRGTSDNRRQKTEAQRKKRKNTTQHNKDQQTHAHKETHTTGRNNNHQTTQNRDKKQEE

SEQ ID NO: 980749 - protein, 141 aa, Homo sapiens
MTGHHNQRRRSQQHVPNIKIKPDARWTTNQTPIHARLANLLGHSGTPPNDHNQAHTRTHNYQDTSGYHYIPPHPHINDQQKPHSVQLHELYNNSTIYSRTPAIITHPSNAYLYNTLPTRPSATHRSLTNTLLPQEQTHHTL

SEQ ID NO: 980750 - protein, 115 aa, Homo sapiens
MNRSGDNHESLRARYRGMPKAETDESRLKRGHTHGDHRTGAEPPYSRLQRRETPRRNINRGAAPAQRRGPHHSHARRTCTVNTGSTASRVGEDAHNHEARHATNVDEAKRTVETT

SEQ ID NO: 980751 - protein, 255 aa, Homo sapiens
MSQKRSARDAGGEPAGLLGRTDFSNNGTGQRSSLGFLFIMETWKKYCGRTAGVLDGVVQELSCDSHSCEKPEDTQRVSEKDTHSMGEKKTVTVLGTDDLERKEGSVKAFLKKNQMWIWDVVKCGGKYAPPGSSFFKTPEGQGTSAEEPERHEKGGIFSADSERFPSILGPHWGHDGANSEGLRPPTRFGETGLPGRRYLAGHARTGAGGRPGICGSAPYKKKPRGGPRHTRRPAEPAPHTPRRGSLDRRKIGLFG

SEQ ID NO: 980752 - protein, 221 aa, Homo sapiens
ENKSLPTLSDSDPVLLAPGAADSDEETEVLLESLGHDPFGLSLCKVAPAVADAASVWSGWSRSEQCVAPHKRSTQRVQSAYHIGRPTRQHQAEHSWGQSQRNHEGSFGHHNGKVEVAWVPKDPKGRMLAWGVAGLLIMSVPGCGPQLREGVTGQTPVHDGSLISPVRVRLRRSRSRGQYSAETSAPGMSSWPQPQGYARGASWYPGPYLTPGGEQEPGCVG

SEQ ID NO: 980753 - protein, 396 aa, Homo sapiens
SGFPVLQQVLGREPVRSFPHPGRAPIASPPVHLFTAPIEYCRQGPRGRRSSAAQPPLADRRLSIRSPNMTDRVHLAGCARSYHHETHEARHQPARSTWSSTPPTFTCTMVSAGGPKRWRGPWRGVPGRALGAGLGVWPLRGLIPHSPGALLDTHVRLLEVAEDYLWTQKSRGSWILLGCTLRMLPRYARGGSAAPFCMKRDLGVLKSWGSRLTDCVIILRLRTGGVQALPSVALPPHLDLDGTAEKAAGTPSYPGRPGGVTGRCREHRGEIANLGGLAGTMGHTEGKNTSRRRRDPHNAAPDNAQGPTGLERHSQGNDPSVAHTQRIPAPCPWAPTYHSGPTDTRRGHGPKRTHICKRPTSGHNKRTRTNTQRDATEPPEGETNNRVEATTTHTEL

SEQ ID NO: 980754 - protein, 76 aa, Homo sapiens
MNEAHSIGSNKDTTFLHREKPGAPSKKRVNSSLVRTDSMTMTTLHVYKQDMKQERWSTHEEYVEARVTERVDKRTS

SEQ ID NO: 980755 - protein, 176 aa, Homo sapiens
MCWLVALKLNILSQRAPRFPGGRCWPREPREPLRRVQTLVAWCFPRQPAGRNGKASWGAIVMRKNAEKEGRGETLALLGVTLVTDNRVTTYGEDQHVDIFFFSDSALQRVFVCVSHVCLALGRLCEAPYICGAAGLQEKCPELSDLRVAELQWEHHINERPRAGSVLTPGEMSVRE

SEQ ID NO: 980756 - protein, 133 aa, Homo sapiens
TGADVADVPPPLPLKGSVQITGIDGKPGLAGLANDLQLPLRTRGIWPLLCPAKTPPPPPPKTIRKQTIGGLWDRAVTSQGLLERVCALPNLHALSFCVPLSLLFDLMWACDVTISCDCFLHKEFSSHHGVSGL

SEQ ID NO: 980757 - protein, 106 aa, Homo sapiens
ASTSSSLPVLSVAVGSRPCRQLLYASLFLLIRLFAFDAHMQRHPYALDRWWSTGAPMSAFSCVSGPAVRGRAPASVDDGRYRPVEIGCMRRPRRVDQETWSLVGHG

SEQ ID NO: 980758 - protein, 217 aa, Homo sapiens
MAQWTPGAQKRGSQRRNPGGTSRQRGSERSLPNIKTARGGQNRGVVSGTKSPKIGDSHREGHLTGGVSIHKRGMPKQQEVSKYPKFKRPQALGWGRHNRHDNHNSKTITQETPHDHQENTNLENERNQHQIASKTSKPTHSSITQLSTRKNSKTKTAKRHEARNAERGTGARRRTKTPRRQGGQDLGGREAPRYNTKKQKNKSYIIKNTNNQQIHEP

SEQ ID NO: 980759 - protein, 324 aa, Homo sapiens
MALYEVVQKGNVAALSSFQWQPLPLGLTSRDIPSTPLVVESREVLQKPRKAGEKNLAWVVGFNRAQQFSKTSSVVPPRRPVTILQVYQPKVATGGRGPFGGGKGTSSGGQGKYTRREGPDIPRGRKAPTEGQKEFGAQTWARHYTEGSPQKRRRHFQKENNPRGKRNTGQKTSQCGSHQRCVRKYMWDPGEKTTFLEKTRGTQKVSPTQRWVTVDNGGTLKNSWGKGKSPPALDGGPPNGTQNLAGSQNLGGPPDMRRKKEIIGPLNKRGHKTTCGADGETSGGDTYELAKDGHKRYTRSVNTHRSATSPPPRTKSVYDPTEEK

SEQ ID NO: 980760 - protein, 119 aa, Homo sapiens
RNRHLPFLRWNEEHKGKEERLTDDVFSHEPILTRRGSRSRILCLLYPKSIKTGCMGHMKANVSVLSKGNASQYTMLIQGKTLNESSNGFNSYTDCIAVSSKSSPRVKVSRVRWLQKTFD

SEQ ID NO: 980761 - protein, 137 aa, Homo sapiens
QWYQRRVAITAGGGQKKKKKKKKIVGWAGHWALRKNAFEDTTPGWGGGGPQEGLGVTPVGPIAGSLKEKDPGRHVGLQCGRGVFSPTQFKKKRAGGKTTEAVSENKISTRVGVPEGHITGDSYYKGVVTREASNIPI

SEQ ID NO: 980762 - protein, 333 aa, Homo sapiens
GLEVIWGRGEVIRWPAAHAQDDHAKIKQVLTYSRVGLRWKQLRCTLSRDNPTRRYAIKPKANDYIGVCMCTLYHENTLWYLNVFDRLAQREEVCARCCDDGPQDKRGAVITRLWVSLRQELLEVLCWRHDYRIGVYAEDNRKKCNRYSHCYESSAVRVAGIRGMYPEGPAIAWRLPVILTRTCQWCRDLKPILLSSYPGDIEMILGDPRKHDSGRREAGAKGGGPEQSRDDYCSHNADGEYNWGLMGIGVYTTSKSMIEDVIKGGYDFNIDSKVFPQVKTGSRGCKGDQHKGTVPCGRKGPPCPWKAMREERRPGGWHRTQSKGLRKDAENWH

SEQ ID NO: 980763 - protein, 48 aa, Homo sapiens
MCSSQNWVGSPYLFRFDSGHTHISAHGFSHNTTGLLFRTHTINIGCPP

SEQ ID NO: 980764 - protein, 240 aa, Homo sapiens
RGRLEVARSLARSLTRRSALWRSVAGRSRERALWKGARLCRGGKPGWAGSAGSNGTSPRSFFPRDTVRPSGRPVGACLRILKSPAACCWSPAPAAAPVHLTAGAEQPSQTWPGCWPDLTQPGRAISAPLEDGAPSPKDMKLLENRALKAINHKADCGDRRCPTSLAGLRATHVKMAGDEKHMFKQFCRRAKPHRAGGTFSNPDFRTEPRQIRKASGEEEGPSGDKCSERPSSTDCKANGS

SEQ ID NO: 980765 - protein, 175 aa, Homo sapiens
MLPVIKLLLLPLREDDMPEADEMADLRAGAHVWLPLPMEGVDISPKQDEGVLKVTQAEMVHMVQEMPMIWGPSLCPLHLAGYYMAQSLDSEVWICKDKFSFDLGTKAEVIKGWDHFAIATIEWWRGGVPQSTCKPEYAYVFSRQSFHKIPPNATLVFEVELVGRKTGEDLTGKSE

SEQ ID NO: 980766 - protein, 307 aa, Homo sapiens
MTARIIRILLLIVVAIFARWIAPYDAEELFVITDNLNNGPSLQHWFGVDSLGRDIFSRVLVGAQDLAGGGRVSRVYRCGDRDVAGLARWIFMKAGGTRLIMRICDVLFAFPGDFTGRIADCCGCWERGIANVIILVAIFSIPVFARLVRGDTLVSKQQTLLSQHRMYGASDVTGLCVISSLGNRPLSIVGVFSTMAAIGVPSDESLAARLSFLGSVRSAEHEWSKVMRSRSKSSDKYLTGSAYVPTRSVTGELGPMEENSSSTSTHNTHQQPTQPRPATHTATHQHKYNKYTDNKGDKATRAEAGEK

SEQ ID NO: 980767 - protein, 328 aa, Homo sapiens
MHRNIIINKLSTAEHHTSHNPHIPTLPTVEANTTTNTTSTSNHTTQTIHAAKHTYQRHSPEEQTRDSSQSIEKQKRQTRHRREESNKRRRNESSAHRAAPSADSNAERAEPARARDVEERNLSARTQQNDKATKHSTIAATYRRAQQQSTQTNHTKESQRKRERRSETHDLGRDDTADYKTHAEQPTTPAQTERRRHDRTQRTARRATAHTHHRTYEAHTTQRNATQRAVEDDEKERARTRSQTKRTESEKERKQIESNTLLAEESRCHTARAQSTRKSRGTVTKTHRKAATEGTEEAERDQDSENTAEDRREARDAPDAAKQSTSRT

SEQ ID NO: 980768 - protein, 78 aa, Homo sapiens
FAVLHETRGVPSRIWASAHDNCRYVELLHMRHEQIETMGGNSAVFDFSGQVFERHTVREVREILPLDCPKVLVPQFAA

SEQ ID NO: 980769 - protein, 169 aa, Homo sapiens
  misc_feature (144)..(144): Xaa can be any naturally occurring amino acid
MGPSGVLKRYDTRPRVQKLKEMGRSRANPWATEGQRGSRATAGPGGEGPEAPQVADRHTPHTRGDTPTDRTGAWHHQRVSLFVRREKQMSMDRIHKRRRSDKEAGRTPGGMTTDGARPSMTQQTITSSPPVHLYTHTILLHAYXTTTPQHTEKREQIKDNTTTVKEQVT

SEQ ID NO: 980770 - protein, 207 aa, Homo sapiens
  misc_feature (148)..(148): Xaa can be any naturally occurring amino acid
YPPACVVCVCGELRNVMWPLFMQNTSESSLPCAGPASPCGKKSLRVLSPPSSSPPSITSGLSVPVSSHLLPSGPTQPLVKRQSSAYIEDFLILTKSYCCTHGSWGENHYSYQQWVFPQGPLWRLQRGELAQPIFLTLKPVVVLHNVVXNTQTNRPIAHTNIFSPLDTENTFLSCGGRGDHNNTTLGRLSPRGLSRHTLRAKREQRRQ

SEQ ID NO: 980771 - protein, 179 aa, Homo sapiens
RDSDRKRAVPVEKLQDVQTTVEKKIERVTNARRRLIIGKTQPGRSDDCPAQSDITRSSFYGSRHGKSPRHNDRAAVVRLSRSPIGSELLTIDIHAQTEVDGVYINHHQQAECQVMDRPSPVPTSPDAKWVLVHVTGSNTLDVPPKRVITPDGLSWQHASGYLIGGKIVSGRNCTNSGVV

SEQ ID NO: 980772 - protein, 127 aa, Homo sapiens
  misc_feature (20)..(20): Xaa can be any naturally occurring amino acid
MRFFCMIQCGAETVKKRAVXAQCYSELDSSSTLRVQHTNLGSRHATLDALQKTDRIILVRENTRRIKNAGESRRTSIRCHYEKMLERLFEIARVIRTHENVGDSDEERTVLQGRGNYDQRYKPYISE

SEQ ID NO: 980773 - protein, 95 aa, Homo sapiens
PGSPVRDSAGVVVEEMRELLGFALIAGAIVDLISVRWTWAVCSVQSGSTKGGVNPKVECVVGRECVNPRYGCENEYEEYEEKNSVKEIEGQEDFL

SEQ ID NO: 980774 - protein, 323 aa, Homo sapiens
ADLVEKVRSRGSMAARARRKRSASAERERREMSARREKERELDSASCECWLRRCRVSECECPSLGPSAPYRSSSLEPGRWRWRTVAPAYLGSLTLQSLRTLSEYARPHGSCHPWSIASIHSSVSPGGLWTPGAPGLQLSRACTAVIQLPGRGNGKPVNETSVTDSSLEFEVKPSELEALHGVPGTGLGSLSPTWGPGSAAWTTVLHPFPFHPSLGPLSENVSAGKLGSPAADMSMLSGGAEKADGKGLGTWAMDQLARLEMSNVNPNNNKKSKFTALAVGSKMIHGALLGDPYLALALRGAHKGTLYKGNFRNPVFTVAKGIC

SEQ ID NO: 980775 - protein, 77 aa, Homo sapiens
AFSLARGVVAAGAAQLEMQKSREFVDLYVPRNAPLAIAIIGARTTHHPDERWPRLTRSQAGLSGQFKNFMLSAGAIS

SEQ ID NO: 980776 - protein, 106 aa, Homo sapiens
MQQEKNNTIKNNKQTRQTQETHQQRTYHDTPHKRQKRAQEARQKNKTHKETTSEQERKNKRRKGAQKTQDKTATSRHNEDKQQRQNKRYRPEESKDNRSHEQRRTK

SEQ ID NO: 980777 - protein, 46 aa, Homo sapiens
  misc_feature (17)..(17): Xaa can be any naturally occurring amino acid
  misc_feature (24)..(24): Xaa can be any naturally occurring amino acid
MTVPGAKGQTTIDRQAXVTRTGTXEGMKLIGPAQYQGQEQVTAPQR

SEQ ID NO: 980778 - protein, 455 aa, Homo sapiens
  misc_feature (126)..(126): Xaa can be any naturally occurring amino acid
ELLYAGLLTMLMQVLMSEERSSNDDIWPNPLQYLLGFPSMDDELKEKEKEDDDDDEEEEGLEDIEKNGDEDEGDGMMKMMMKWEERSREDDSVDTDRTKVVRAADGFQPLPVTSMFLQFPGEASLXDHPQFCLDDHWVAWTRADPAEDALSTNTAARNTKIYLGGRRTARNGCTRGKRKSNDPLLRSTEKAHIENPHPGGEMQQYGTGGLGASQGMLREGDQARQRYPGDPMEGAVGSTPGGLQTPWAKLDGSTRVRHAKSRKRGPPEPPGAILRHRAGTIAEMSRHPRVSTRNTRQRSIRSKRHRIESPEYRGTLGCRGTATTKSYVSSVCDVRRRDTNTMTTRADDQTQQQTHGKHSKHHKENTHHNRHTQTRATDTHEDQPAQQRLELKLPAHSGIQLVDTAKHQKTKAENEHRKKHTPHTAEHPRIRNNTTKEVHNEQEKKNSEKQRNSKD

SEQ ID NO: 980779 - protein, 234 aa, Homo sapiens
  misc_feature (144)..(144): Xaa can be any naturally occurring amino acid
MPQSKSRKIAILGYRSVGNTPHGRFQLCLKANLWTPTIHHRKHFYNVDHQSMAHEYHLQFVDTAGQRCNILIFPQKYSIDINGYICVYSGHQFKSLKVIQSLSMANVWIWRGSNNTYMWVGIRKSWLMERVISYERGNLVRNLXMQFLESSVKKSDVWMFIRRILGGRTTVGTFTDSLCRDVILCTLRPGIFTDKACGPEIHVYSCNDNNGPSHSILTWLTVSPVINTIQFSLY

SEQ ID NO: 980780 - protein, 104 aa, Homo sapiens
DSKWVAVAAVAPRRKRRRSRLHIPGEREAQAPEKGPGLGERDRRRSRSGIPALKTVPGSSEDDIDPTSSFPVLRWKEGRDEGNVEESIRSKRSKRKGKITEERV

SEQ ID NO: 980781 - protein, 77 aa, Homo sapiens
MPFRLNEEAVAEFSVDNDTGVELKWRQLQFKGRLNECECLKIRGAAIIVGQSDSGGKVLHRMPILLREITAGFGPQR

SEQ ID NO: 980782 - protein, 383 aa, Homo sapiens
  misc_feature (205)..(205): Xaa can be any naturally occurring amino acid
LNVHGVPWCAQCGVTAFRYMAQGEAHCANVCRCMVLAGVMPGGSAEMGAKPNADVWPSPRPSCPGPQDATSSACVCLGVCFWPVSLAAVVLDTCCGVCMKAPLFDFLAPGILDMATSAQAMCPACVVMCCQWLYMCDSVSQPCKNHDSTVECGALGASICLKAVLHDYVCPVGLAVFNLGLWSGRDVLLDEPEPQSSSSDCHSKXPRIHAVTPLNLDRVTREAALRLDYFVVFSSVSCGLWHLRDRATTALPNSCMERYLVKTDGHRKGFQGLGLPVGAPIGERVTYVLTPMSTKDTERQEGTRWPRRMWYIGLDVCGNHFPVEPRPHVFLDPVLGRAEKVLSYIVDGETRGPGEYARSPNLASLRGHDTRDQLSKCALTHYK

SEQ ID NO: 980783 - protein, 442 aa, Homo sapiens
MTLNGGGSGAGRRACCVGVPCERELPSVWHAHPVWAPAPACVHLPACMPGVTDAADHACAVLLEPLCVAALTGWPAVSVLTVCDPWWSHVAWTRCPDVTSCWDSASVSCGVHAELMTEDAVLQRVLGCLVCAALCCWCQGCCHWTAAIFLAVCCELTGALNARRHACGNTLLIWLHLVGGTGMKEAITPWSTDDLGGSDVEARLVARALAMAIGGLPMSLCTSVTDKGSFGERAQKLRVQLRALHWRNQIDVPIHPRGATRGDLLRSREVSVHEGRGLRRVGHLEWQVPFDDHHAGYFHYNVQVPVMKAFVRPEYGCAVQLKVATPDVARPGGKSTFKQQGVFEAEFTLDRPSRVLFGGNQSLVQSTLSHWATAPNFGAAGEGVGSAATTQEFKDVTDRSARGATLVMDMQIEVTGGRRMQIYADGGRVSCGASYSCLSQQA

SEQ ID NO: 980784 - protein, 230 aa, Homo sapiens
AAPAGLVCSAGRKWNKRSPGWSWTMAPACAKRVYRVCDLHASPISEFCSIVRRASETPMGRSIAWRMWAINRCPSVKLSKVAAENIGCWLSMSPVEVPQLMQWQSDHQNAVRRFRTKNLGIARPSLATDYFLLVSLDVKLSRMIALSLDPWHHSLRFPQGTNDDEEVMIFIDELIRRNSFISTHPVDNVNGSGNSHGTCCLYPSYAFWRSTHRVHCQLELLRVIGAVHPP

SEQ ID NO: 980785 - protein, 282 aa, Homo sapiens
LSRSLSFSVFRSLSLAVGSGRAFLATPGVHEHYLAPGRLSDPDPNERLADLDDQGIRSNPARPWTCSPCAASSRSDRSCRRPAYFSAHDVIMEEYEENKTCIELERNHSRASPEYVSASEIKRKDRKIWDQNHAGIGRKRRPIRTEDTLPDPPEDTLIQNELRDDVRDQQTELKMSAANPLTVRGTYSHGQVTSDPYESSQARENELICQPPAIQTSQEMTGKLNKQLEEDAEEMHIARKGQKRNTRSKEGKGDPRRTRVPDIREKEAKQRTPEERSKEEER

SEQ ID NO: 980786 - protein, 243 aa, Homo sapiens
MVPGLLATLLLSMWPRPVSVPLCDPCGPLPCPCAPGPCAPVSGENALECIVGLDVDDANGPLTRRTDTDERVEDVDGKSRDKDGETDAGQVGATSRDATDSVRLDGRGKRQDNGKTLASSDMRKTRERAQDIDSAMHRTTNRSARAQRQNAKTERTDNEAESSPHGRAQTDTAMPGTEATDAMDRNEGLHQQQGTHQQRTTKEQTEGRKIRAKALKDGEEDQKHRSHTLSGKEDQRTRTTWEN

SEQ ID NO: 980787 - protein, 308 aa, Homo sapiens
LSPGWSWLSGAHSDAGSQCTDSTQTCPRLLSWTVPASGTPGPLLPPGMWPAACDWDGQLRHGHWSPWSVTWLGACPDAWNLLKECLPWTNGHPRGDPTGGMWGLPPDSWRHRRLQQLMLESSSFVDSDEDGSTSRLRQLHGAEHLIQTHPEAQTAGEESSAFGRLDRASSFSSNNRSSMSLNISHCHAQHGKTITFWPSASWGRANDRGRWRASTVGAPINEGAGELWRCVTGSIQARVDMVAAGDMTGTFENIKRWKMPCGCLQEIDPRRRITSCCTCWDKARDLTLPLVTGAAYRAVFTALKASED

SEQ ID NO: 980788 - protein, 503 aa, Homo sapiens
MAVAAAAAAGGNPKVLSPDYECVASYSWILVLSCVLCAECDVSLDADDPELAGVQLELGVEPAGGVAMSAAELHCLGAGTPCVAPAPCPDCTLPAGDCLGWTDAANHGMAGSVKPRGGTMTVVAQMRPGERGNHRGSRVTRTLRPAGHPEGTRHQDSRGGKQSLQNRGRRKQQGVTAWLREELHPGRWATRTAATCDSGQSFSAEEDETVTVGPLNAKDGKARGDSISDSAYAIRIRMETGGVTSMRNTDPSGSYRNDIRGEQQGTRSETALEFGPGPHLDIGRTGTTLPITGANEDGNDQDETRNRQADNGVTSRKEEDEQGTHGRGSQEHQARRAEERSEEPDVEWGGPQFNFPSERDEQTTEAETKGQAAPNSARGTAGREIDEGPGDPQSTDGEQLRSAHTDTLCRETNESRREANEVAARSSVTEKVREQTRKAMRHEHRPQDTPTEKETTSTAGERKDGVRRERDERQRDNEEKKERDDSDNQRHEHSEDRHTSHAD

SEQ ID NO: 980789 - protein, 169 aa, Homo sapiens
MPVGKRWEDWRNCLGMQKGMNHRAPGMSQSQRAREHRKYSVGSDHIETREDRNREEEQAQVGNRSKIDTNIDTDNGIRGPFAAERKALDYTTRKGTEAKEHMQIGRGYTGCRHREATGQMPEHRAHKPTGLDATYHDDPIETIYPGITEMHPPRCTERRTYGSHFGRPE

SEQ ID NO: 980790 - protein, 107 aa, Homo sapiens
MGRYSHPIDTLGIGTFASPNFMFVDTHMVELDRDFRRADYRGRDLERGIHKGRVAETFLYREFFSEVCAGQRNKLGPMVTGFRKGIRNRTEEKRQRFPTLGTTRAAT

SEQ ID NO: 980791 - protein, 136 aa, Homo sapiens
MTPPPTAAKPHDKQKSQEQQKATQETTEPRTQETTTETNKSTDRTRQKPTRQTRQNEHAPTTQTHAKRQKGEETSTNKEKSRTTQQNDKQHTKEPRKKGIETSENKTRDKQTQNSRKTTANKTTKTKTTKTTSLKQ

SEQ ID NO: 980792 - protein, 194 aa, Homo sapiens
MTLRDAPDQGPVRWLKTTVVCKCFQAVVSSCRVVCSVRQQESSWRTRDWGPHLQRFSCLNQRDCVDQTGTDKARVRLDKVGETGRSPLVLHRTVDPKLRRNTLPYHRSQEKEDMHHKSLNGLDTTGCTGMAPHRRSGPAVVPPGELTRRNQAVAPSKRTRHRRTTSVQIVDQDKGVQHNAKKHTEEEDKHETYQ

SEQ ID NO: 980793 - protein, 93 aa, Homo sapiens
LAGVLTAGLLDLTPITAWSLGKGEPFWLGSSIGLVQSCAVYGTVGGASLCKHPAVVNEAQPCKTGIAGFLYGFEALWLESVVYTLSYSVESGV

SEQ ID NO: 980794 - protein, 289 aa, Homo sapiens
SLREELCEEFLAHARGRLEKELRNLDVPELVALTSVLPDVLDVHLTMEAVVLLCGVPLPVCAGVPTRSCFACPWAQHGADEAVLAFCPCMLGMPAIFALVWSVLAGCSDAGWWVTTHLLVLGCSDLVPPVRFAWLPVGPAGRCLGSAGRCHGRIVELSWPASAWATNLQGLRGELPWAALTDCPAGRLASTSALAGNGGALAWDEFAWTSVVSSILEATIKGVSGQQVATFSRHKEGVLLQTKHYFRGEFCSQGLSVTCLIRGLRPLYVPEGSEILRVAFGEGACKPLG

SEQ ID NO: 980795 - protein, 176 aa, Homo sapiens
GKLGDSRLTREGSTGWGSGPVVQWVQPACDAEGQTWLAAPTDGNETRLITNGTIFCFEMDPAVNEPMRDQVGRDSFERGDVPNSEVLSIEKVYQNQVIEMHSDLRVLDFLGHDMVESVAGQEDMLSMYLISSKGLIIRLEVRFFLGELCRRAVIVYPVLDRCKRSLPTCWVTPNIQ

SEQ ID NO: 980796 - protein, 331 aa, Homo sapiens
GAKGVAEPEVFGNEQAIRPVNGMRLGRKGTPPGIGYPSVNTRGTPGRRAKIEALQSMGKSAERNLRVDFHPLDRRKQVGPVRHIPWRTEHASFPGWTARHSWYERKGNCRHARLMRCCPNARFAWDITLSRLSLDQGLPHLEEARLEVPRIPASLCVTALITLGHSMANYTCLGCKVDHVPRHAQLQPTFTPMTDAHWLGTFSIKGHAAEEDAKKDHGLIRRHYVNHRMIAIGGGPVQKSFDHLAEGQVRDIWRLGSLDTELSQSLLPLWIDEIYIPLNEFDSEPVDSFCLGRERNPTHFRDDEGGKNRHFFHSWNLDLDLYSRSSYSLLP

SEQ ID NO: 980797 - protein, 77 aa, Homo sapiens
GCTGFAGATCEAVLCAVSLRRALGGCVGMWLGLGVLLPVLVCAVCCVMVLLRSPVPLPLWHVLPADPAVSPVLPGLP

SEQ ID NO: 980798 - protein, 110 aa, Homo sapiens
RQMELGEENGAAGAADSGPMEEEEAARKTRTVTIRVSRNGEDELVGRRGRRGATRTGHGGMQAASTCPADAAMQQPQQQLLVAAKEGRWVRACVPHLAVLLVTVWRLPRG

SEQ ID NO: 980799 - protein, 96 aa, Homo sapiens
MGREMKTRTKKPTTLGLQHLAQDNARWSPLTITANTHEDPLTDATHQDTRKRAHASSHKTERKHEHGQQRNTKQENPNSKQTTTPEQENRRQGKTT

SEQ ID NO: 980800 - protein, 292 aa, Homo sapiens
SLPVYFNGCMFLGRRRVDFPLCSESKHKSDYRQILFYSILASSTCDEEKAETVLQTSQRCTLYMLCRPVSEPYQQQMARRWWCSITVKHEQNIDCGRRLCEAVILIVKDQTDMHGDSEYNIMSGPDICGPGTKKVHVIFNYNKGKNVLINKDILLARMMSTPTPVHTDCAARQNYELNLDNRQVEYGYLRTTNGTNCHPSKIKDPECLQNRKKWTERPRYEEPIRNSQCSQELGHKAGEHNPGTRECYQAPMTGTNSDVTCKMRTTRGIHNLQSADYKIPERRRHRVKAPRT

SEQ ID NO: 980801 - protein, 374 aa, Homo sapiens
LLLSNSPPPTCERAAVNCATPRLPNVLRLLVAWPDCCQHSPGAPAMLRILGSRRGAGATRLRVPEPAAGFSPIPETPCPLPRALQYESPGPLHEDDLTEQEKGLLLAPHSPTMSEDSAGLDHARRAPCSDTENTRTQENTFPKGEPDLKKESEDGQVIPVCIREAVRQVLKGYDVDAGAHAWERVNWSRKNKPDVKRPMNAFMVWAQAERTTLADQYPDLHNAELSQTLGKLWRLLNESDERAFVSAAAGGAVAGHHEVTQPGIKRYQTAIGRNSCLKIVDTEAGHTDEDTVYAEMEKFIATQGHITTVAGNADSGQNYHPPGIAPGAITRENSLEPSSGPPEHKQSTRKPMYSIDGKYQRTPQSAANHPNPQT

SEQ ID NO: 980802 - protein, 113 aa, Homo sapiens
MLVRPALLTHTFLATTRTSCDNRLPRLEGKRVWDTRRRVIAICGSLTRNVHVDFADHCVNCLWHLTTPVKPPTESDALGSPRAKPFLIICDPHIRAKRVSKTCWKLPQNTQDL

SEQ ID NO: 980803 - protein, 269 aa, Homo sapiens
MRTQKATTEEIRHVVSMLSEEALYFMDGCGSHDRAFAAYVQGCSCTSGDWPGSFTESIIPTNGRTTLGFEPGTVDRRSPVTYCEPRVHSCGNSVRMTNLPVVAEIQVAAPTRRVPLGERRRHIAPLIAGLDWGTCVAQDLPLCAYRSGDRHEDHPIVTKEVRRTGAYRRSADVTWLATATVTVGPINVKAIELEKRISQICEVKRCRGSRVVKINRCNEVGKCCRWHVNTVVANPEEEYALEEILDEHVRNVCKNDGDIRKVYNKIEHR

SEQ ID NO: 980804 - protein, 146 aa, Homo sapiens
GVSVEMNGWALVTGSLDPWEVGACRGDACCAACPVMHWLTAWLSSSCLPALPCPAAVLLLLCPGAWAAHPGLGPQPPLFVVPLCCVVSACWVALSHEDFHGPKGNNLGSLKDAWLGKSMNACMHIDNITQIRRCHREAQWLMHESM

SEQ ID NO: 980805 - protein, 237 aa, Homo sapiens
VCGVGVVCVCVGGGVWVLGVGGVWWERGAVVGWGGCWLFLVFACGLPCSCGGLLVRVRCGSVGVCYGEVLGSAVRSVRAAFLRSFGCGHGAGPGRFSAFAMVACAAWQRAARNGTLTCRSRRRLVGGAWAWRAVGCRLGVGGAARLVCSRQSWCLKRYWALSSWAFHDGPAQSGLRPAATTVDRLGVFVDYEAGVLALVDVTGGMSHRADRAAPRSRSRSCPALRLWEGAISIPRLP

SEQ ID NO: 980806 - protein, 190 aa, Homo sapiens
MRFHRTFSYEVVVYSPVVQAPWNRIVQRIRSVNQAPGSCDAFQTPAHRIWLFSPKVGLGTARQSTPVYWGAQEGVSRLVIPTKSFCPSEVCRLRREVPFLTSFSWSWPAGLRKCFDILPWKKTPMYRVGLRATRTRQVVFPNEELITQDGSGPVRGTRPCRAALMERLECALTHLFSGDVVEVRKDFDLW

SEQ ID NO: 980807 - protein, 216 aa, Homo sapiens
MVMAPRALLLLLSGVPGPDLSLCACSHIHECISDTCLLSLCPGLLEMPLLHLMCGYVDDTQFCAVRQRRRESEMGSLRAPWVEQEGPEYLGPGDTEGTMLPGHMADPSEPAGTLRWLLQPELRTGLNTPSRGCLAATWGPTGRLLRGYDQSAYDGKDYIALNEDLRSWTCVDTASQITQRKVGGGPVQAEQMRSLPGGARCVSGSARYLGERGRRR

SEQ ID NO: 980808 - protein, 268 aa, Homo sapiens
MSDAVRPNEVYCTETLALSLVSGAITCPVFSCELTCSWDAGLQWEGPVQTMAFGQAVIGLRAQGRPRYCLGMKEFPCSGLGPHTCECGDMWTAEQTRGLRNECAVDVGEHDGAVASDETRCVMGPKRQADLLHWMYLWRPLHVTGMLCQDSTPSEGPHKYPSSTCPGTGLDALHDITEPLRQAIFLPRWVLCGTSRLNCVQPRGLLTNEQTLPSYISRYLCPFTCQHIAERWNCAKLSSFPRWALIEAIWGGWLQPWITNTRGPGDLS

SEQ ID NO: 980809 - protein, 137 aa, Homo sapiens
MGLHWVGDKRLLGEKYDQFCVGGHCIDTCLWREHIVLENLNAWIEGHWKIPPEGTERKTIGRRTRSTDTTNHSFGPHADQNSSANVVRKDSSTTTTHMSGDHITREDGEQQRDTDNADKRDKGETNETNTKWRQQER

SEQ ID NO: 980810 - protein, 201 aa, Homo sapiens
VKAHDPGNLARYRGRLGSTDDNFSVFLGDGGVRERYVPRNTPGILAYQTCSEAQSYRMTNHSKYDEVDTSSKEILAAKPWTEGSHITLSTAKYLQLLCSAEDGDACQIGKATGDIDGWVLDAYAKVEWVDRPMDPFMGQIKLVDLCEGNCKTRSKMARSVADNHGITMRRGNSKYVETWLHKLCVAQPFDKDSKCRCRVNR

SEQ ID NO: 980811 - protein, 391 aa, Homo sapiens
  misc_feature (187)..(187): Xaa can be any naturally occurring amino acid
QEPGRYRAPDGPSAVGVKLVHIPWALARYTSQPLTVRYATRFTCNHIRINHLKKAIYACYWRPGVAIWGRVFGMETDLTVIVISGDLRCYEDLHQQGGAKNANYRFDERVNMEYYQTASLVRFPAWSCAGEYDPACCVNSKPNSDVEGNIQYFVELMFTNGLHNSHKPIRGENATSHLRISLEITKXPKVGMRAEMRSLSIVFIGLEEKDNFDDKTEYRYSSGMRWGYGNLGCNDSVDYHAQVEEPVVLLAIMTMTLIVHGSTHALWFVKQLQWNNEKDIRDIGVRRRCILDDRQNIAVNRRSSRWPSISHKGDATSVKTFPIYLTTHGWDTPPLVLFLSMGEHLSLSSIYSGSFFTTGAKLRDERELAIFAPRTNTGLNERSCSITQCVT

SEQ ID NO: 980812 - protein, 122 aa, Homo sapiens
MDSNPVDGVLRSEKLATKAHLRREETKSDECRKNKDSLNADDTNPESDQDDADYTSYGYEIRSNDHLITSNNDNERIAHIMSYHNYIQISIDMNTNVIIETAYDSNYEIMTDRPQDKQTAER

SEQ ID NO: 980813 - protein, 126 aa, Homo sapiens
MYSALGKGERWSDPAPKLTLSRWPTKLPKTSLHMPIAIIWLHPHPYRELGEPGSYILTHKEEYLHASSGLRVNLYAYQKVIMVALEESPEAPGVEPTKSGRLQSLQCLWRLEGDVGGPLDDTTFAW

SEQ ID NO: 980814 - protein, 171 aa, Homo sapiens
GLLGGWGGQSAECQRGSSGTDREASGQQLTLERDPDVLDTWFSSALFPFSALGCDPKMTPDLARFYPLSLFGNWADDTFMLFCGGPAWSCWGPSSHGHACPSAMGASSSPVVSEDRAGHGKMSKVPGEMCLDQEDIIKWGWRCRCCKEKAEKRNIWTLQEPWPLWLQDTRQ

SEQ ID NO: 980815 - protein, 176 aa, Homo sapiens
  misc_feature (38)..(38): Xaa can be any naturally occurring amino acid
RARWLTPVIPALREAKRREDSLSPGVRDLPGQYSENPXFLQNKGNHKKTNQRDQKKQKKKKKKNLVWGARPGAPGKEKVYNTHFCGAGGGPPYEDMVQPVAAKSGASPEEQPRGNTNMWAWGFLPQSKKTAGGDTRGCAVDNPRGGARRGALGGLHTQRGAQGADQKIKFNAASGD

SEQ ID NO: 980816 - protein, 170 aa, Homo sapiens
MDKQKGIACLNRGERQDTICVSWGEESAAPLWLTTSDPCAGPECKCVKDQWASITYEDRRISKKLFFHVPEVQAWDGAGGRSMRWQCSVILNQRRGGVERLVCLAVCEGPKAVAVLDLIGWSIALKNIHFWIDGQWFLAYWFFRQQGGPDKLNGVLVPTRKIPSKLGVID

SEQ ID NO: 980817 - protein, 165 aa, Homo sapiens
MRGDSKTVVSGKSLWVLVQEHSLTLRVSCGLQTCEWKDSKTLKCGCGEPMWGHSGNGHGDASGMKWRSKGKQLEGIQEGKTAWVDIAPAGRMNPWAGTEKQPRYEKRSNRAVGPRERFVNIISVVLSCGIVHKYTSDLGPCEKNSDENLRKRGMRRRSGFHERVV

SEQ ID NO: 980818 - protein, 269 aa, Homo sapiens
MLLAVYRQQELPWIRRCVCDLDIRGGSILPRPGMPRLLKDRHVVWEMLDAHLGLRIRAHEVRVALGGDTMGMPFDVSRASEDCAWWITGVISAPGVASLDFAPSMLQKMAVTKYSDRSMMKMPGALDWLVLKAVKTDWRRGYWHCSSGCCVHSLKYVCLWYIWRHDVMSLLDGKDKCELGVVVAVVLTWPVEKLERPVACLPPVGQGGITPRGVPTETGCNGPPFVPRNCLRRTSVKGGFVGDHQASYRAGENDPSHQYCVCAMSATLS

SEQ ID NO: 980819 - protein, 131 aa, Homo sapiens
MWGQVEHRGPKGGFPKRKPRAPRTRGGGVSHPNKKTRRRGDSTSGCLRHTPQRWGSRRALRGGLQHTGGGDQRRRMNEEKINAPRRGEETLRPQQHTSHTDTETMKKQVQNTHTDIQQQPKRRKQTADNTR

SEQ ID NO: 980820 - protein, 130 aa, Homo sapiens
TRPRYVGASHNRGGSLPMPSPMTTRQTWTTGSWPPSPSSTPGLLGIVSHIRGLYHSVAQAFPRNSHPGKGLRRGSRAPKSGRHNGLVDGHLTAVCALPKTLATGDRKTLGGTRLTFPRVCATRAPCGAPP

SEQ ID NO: 980821 - protein, 93 aa, Homo sapiens
GSSHGGMSLCGGFRLLRWQSVWPALDSPRIWGLPHSWFPKAVRFYYCIDWIPVAIFITLVNVFMCIPYQDGCARNFYDSPEKIYERTMASFQM

SEQ ID NO: 980822 - protein, 86 aa, Homo sapiens
GPPWGPVYVPVLAESSNGPKGSSKQQSEEDLLLRIQPEILSASVLGGSSCRKASMVSCHPNCVIRGNMGILDLIQSWLFCIGVMDP

SEQ ID NO: 980823 - protein, 56 aa, Homo sapiens
MRHNEKRSREYSPDLMIESEIESKTKTRKRVKREEMRAEHARTSDEDEIEQDASYE

SEQ ID NO: 980824 - protein, 355 aa, Homo sapiens
GLAGRVECCSQPLRESDSGVVVPVRAVYAVLLLCCVRCIVCCALLCINNGAPMVLNVLLCVPACWPLPALLHALCVPDVCCAVWTCWVWDDLCLAAQWTNCDAKLLTPPVPWMLLPANCCAAADAWMHSAVIANGLPLNLVHRIACEAGLLASLRCNMSKCSNDVLMCLPVGACSEERGMTPVAAVLDVSRLWRPLMLMENPVTVHQCAKWRHGNQENKALALCKAAYEGDPELEMAMAADFPQLDVTNILPGKGSDGRPCAGAAGDSHLLGEAHLVEAGQTGRLWGTHERVRIAWRKLEVPGWAQGAAVLPWGPELDTESVRNGESGGRPVIPCDESGGREHRARRSGRRDSTT

SEQ ID NO: 980825 - protein, 473 aa, Homo sapiens
QSACYGGRLSPTVDGSRVGSQGGPLRRAGILFPGPKSLRIFSHGLSAIGYSATQACGPLCCKYLRLRTLPVLEGRHLVTFCMADSVILDVSVDDHGAIGYHDVDSHAEQSSGTYGAPFSELTTYALSKMSNLLYALNRETISMGTGLNKRWAQARFIHSPQIQSFRKWKPKNYLARRIPVQHASGGLVNAVAMCHRHSEPCLVCLENRAQRHTWSPVSSDTLGQLESIIGVCCRSHEPGDLNPTGGYGHVARMLMRGIEGVGRTFVTVGITGEEPNEGPALHGTCPKAEGEVVLFGGSKHRDGGHYFFTCSFLKSIMCKRKDLNCSRGREQRGTAPQRGPMPPGSWTDFRCRGKFEKQGIERPVCVATEPPHEERGMWFGGPMPQRCVAGEEMHPWSPRCDKKLKKIARGIPGERESPLFPKRHVHQTGLRTLFARARTRGASAKPATMRHATQLESTGPAILVIQQLVRNKA

SEQ ID NO: 980826 - protein, 260 aa, Homo sapiens
MNADVQCRGCCMGIYCVGANGVLHLLMGYQGMVDRRLKHLQKACLGELSPAILQSVAGLTQFVPVPRVPKGLSELRGKAALNVHALANLLAARESPSLCVIGGDWGAFTGANTSSAKGQVEVGKLEDAWATENGQDQIHGMGPLQKVYRRYPSKSWLGRFGWGLQFQNTWNLLGRGQRTIGNRIRDHVTPGPVVKEGYNREGTDREANIDRKHMGAHQRPPKKEPYTITLGRVDWGRDNLVGVTWSPGDVAFAPWRVTDM

SEQ ID NO: 980827 - protein, 324 aa, Homo sapiens
LSGSRVPASQRAARAPPPRSSSSSFHPPPPSHRHPRSPSHIQRLQPHSPNIIRRYTSMETRDPSPPVLLHIHIPYPLHYTITYTHTPTWTIHDHITIIHRDRHTSHEEETRNKSIEVTPHDNTWNTRKTMNNRVQSSRTICANSDNKWKEIRTTAGRKSVHRRQTKENNQNPGHAEKDPPKRTTTKTERQEEHPRDTRRPNSGHTAGGRTNERTRFRTIGTLTTNTTGQPPDKATQRKPPRRQHHEHEMKQQGSPATEERTSTRSGERSDNERHIHKRRYESKDHNNQDCKRHNQFQELTKVHSTHKEQGTTTQGAATLSTPEV

SEQ ID NO: 980828 - protein, 356 aa, Homo sapiens
PDGEHTRRGHVAVVGEQEDRVVLHARSDDEYREHQQHDDRDHDTTGCDGGEPSQHHDTDGKVRYAIHSALTDQSTPFQSSVEGNQPVEERQVQEKSPGVGLSEERWIAGRESLEDEICPEQHEHESGEGPHPGQPQPDESNGGAPGVCTRHRRHVRVGQDESAEDEEEIDPRYPADDRWMTNCVKGPGPRASTISVRKCRRKHQNAARARIARQRTESAGPTNRWIDSRVDSRHRIREGPAYRLTLAGESSPESSRVRRAGTRRSTTQFAKKTGNRGHDDRECTGDSKIDDNDGVKRKDASTTNPRNPPECQRARGDNHDNNNIVQVHTKENRDAPQDQHSVGCTQQHIRETIRSQ

SEQ ID NO: 980829 - protein, 239 aa, Homo sapiens
GQGPGGQKTGPPGVHLTAVVPWVRDTAGGHVPGEVLAGMLDALIPVMEQSCTMTQQSPESCLSLIPWDNPKVALDLCPSLEKQLLVFPGTQCVGVCNLCQALNGLRASTKRVYLKLRTFILHNTNTEGEEDVRVELQPEDTLTTDKPSYCYENIHDQRNPYAITLAAIQDDNSGTCPIILMASQGNTPAFNPLRHSDGSGLRLLAHTAAGPYDLGAKVTLEHLHARNALSRRFQLGCLA

SEQ ID NO: 980830 - protein, 326 aa, Homo sapiens
VVCCLHQCTELCPAAVPEALVPVCTAPTCGVALPVLDVSCMDSAPDLVMNCPASAGDCATWRTCLLSQLVYVPTEENCLSKSADHMDWPYWIPACLFALLHNMIYNLGRTDFRPKTGRIAGFCAPVPQCITTALEVFTHYDLLTLNGSKVAEWAQGQLLSGGHKLPTGLQRRYACANFGTEQGVTVGCWDHYRHDIDLPVSGYHRCGPRELYLPGGIVNPHYEVAESDLLNNMLQCQLKVFYGTGLGCTTATHVHSLPSADAERYRTTRHQAPKQNVSEVYTAQFLDDANTHNPSGTWAEPFRVPNSKGSAWHRTVVEALNVTSPK

SEQ ID NO: 980831 - protein, 175 aa, Homo sapiens
GVWLMTCVSSRWCETTPKPRNGYSRVNQRTSDFGEEEGILMVKLEDDFTCRPESVLQRDDPGAWKPPTQNFLTFLLPGGSNALDEGSHQTPRTLSTMWLETMEADKWSMILELLVLEQFLTCHYLENYMSLWLRGAKQPEHVGEEAVTLVDGYAEIKPVMTNLRVGLTCPNVHGQ

SEQ ID NO: 980832 - protein, 217 aa, Homo sapiens
MRVGGLLTASGYWVPVSRAAGVPWAKPVAGSLTLGDVGPQGPRSASGPVSIAVVAGWKERLGLVFQQRSVNVPGKGSWAALGRPVGICADLAIGYIKGHPSRSINPRAGLGWRRPLGKSGLPEESVSVLKKRIGSCSLDRRGHSEEGQFGCICGKERAQVQTFVQCCSLVGNHCRDGYQISVCLPWEDERRGDLVGKDGTETINGKLLATDYLPNKS

SEQ ID NO: 980833 - protein, 289 aa, Homo sapiens
MGWNGVARACGAALLLVAVALSAWRRRCRAHDVAFDVLCRVASCIPSPINVGPVGTNILCIVHLLPLKGVDHNEQLADESGVTTEDHQHFTCTILDGPMVKSYLYFTQFKAECAGLRLRLRYAMAYSKAAFDREIDVPLKTEDIGSDQKQQWLTGPGAFKAELSKLVIVAKDIGHLSCDQQPVCGWTFSSPVKLNGPVALKVSSTITWFSSERTLTFSTLGLLLPWSRMCVLQWWLKPLGHETRGSRALLFPKVLSPLLLESSGSGSNLGPNEVATMGVCRESLVPDSR

SEQ ID NO: 980834 - protein, 298 aa, Homo sapiens
  misc_feature (295)..(295): Xaa can be any naturally occurring amino acid
MHSQRRNNNRVLTRSGCPARIARVTTPSDSTLDRQQHVVVLINKDIASRCVEYENMVTKIRAQLEETLSAIVVQSVDSNLVSIYDPSKEPALVFFRRGIPILYHGEINDDEILDFFNDNLEPAVKELSDDNFEHLTQASSGATTGDWFIFFSSAECTVCQRLYAVWESVGGKLKRKLNIARMNSLESGISTATRLGVLEAPAFIFLRQGKMYKYSAKQYSPEAFVQFAEKGYTQSHPQPVPAIPSAVNEFLGPLQSYFAAENITSLATLSIFALVALLFVGKRCQNIQFRACETXISR

SEQ ID NO: 980835 - protein, 96 aa, Homo sapiens
MAGKYHSLGAIELPAHETSQRGIEARVTERKHSRPKKKERITPSPPGVVGNPEGEARESQGASKGGSLGKSPVDAVGPQKGGHGKKALGISAHRGI

SEQ ID NO: 980836 - protein, 156 aa, Homo sapiens
MRFAFRCLLLFFPTVSLVQGVCVPDVTIREVVAFSVPCVFLRIRPLYTPLRHPRRFGEPGHVPSQGLVRFLGPPGTRQDTLVPGIAYIGLMRAFIRVYSDLSFVPEISSVRGLQWFVNSLKWPRTLNSLPVSCFVLKIDAIRRGSFSMIGAAKCDQ

SEQ ID NO: 980837 - protein, 358 aa, Homo sapiens
CVVSRVVPAVARVGAPGWACRVVDLGGIGFRGPRRGEYSLGLVSAAGGFSGRLSGHLHVARPAGGVGAHRGVQGSLRHGRGRGRLSAPTAARRLVLARACLQWRSMHPILAAVVLVALVRTVHLGLHKLCGGARFNLSAGKLLLLAAVSSMAYALLQVLRRGSNGLRYSSETLGGLQCRPAVVAPQMDTRMGATLPVDHRGKFACASYRVDVPHQRHGLSGEFSSISVRSTSSLIFVSPFLSDEGCLDARQRVVSIDALPEARHSCLEGHAPSSSLLMNLDPSFLSTLLGPDCACYLTTHTHTHTHTQTHRHIRTYVHTCTTSDTHTYTPHTHCISVPRPSHWSHLAPSSGFYIEEFY

SEQ ID NO: 980838 - protein, 40 aa, Homo sapiens
EDACQDEENQKRCQDLGAFTESMLSSVPLTYHTLTAHSKR

SEQ ID NO: 980839 - protein, 372 aa, Homo sapiens
AAGRRAGVCLVLLLLGPLFVARILCVVFPWSSCLNVLSSALLACVVSASEAPGVPTGSSAGVSYGPLLCALFGVLRGLDSFFAAVLEYSWHSYAMFLVCVCDTRLSLVTRWGLRLLRHQPGRCHVRLSEEIDPLARVHLASQGTRAPRCGRSTSSGRSLRRYEGACFALKEQRISRSPYRQGGCSCVRRRAPDECRRDQTRRSILRETVARDVVSCGLSHHRRYAGETGGSSHPEGGTRVLAIVRRSYARRVVRALQQPLFEVEVAPRCMTPFSCWVGDTAALPLPLWNGKIIKSRFLPTLLWATRALATTPHTHTHTHTHRHTDTYAHTCTHVQHGYTHIHTHTHCISERAPRTGSHLHLLQDFICEEIFI

SEQ ID NO: 980840 - protein, 183 aa, Homo sapiens
RCGRTHMGPGPTHTLNPPLTRPGPGDSVLPGPRDFSTAIEGHEARRAAMGRMPHVERFQGNLTWSSSELTARATSRPAPSADMPAFSCLEDRGLRVDISTVSRKRGPPDEERRQGCPPGLADFSGFTTKWQQWHMVIRHTVRPASPDPSQSSLAVATDRILSQARPECQDPEWPPAKTAEEGS

SEQ ID NO: 980841 - protein, 282 aa, Homo sapiens
VEGEVTGQAGGGGCVVASDAWAAGEVSRDGRGTGGDGEMSQAEQGPRAGSERDSRPPAPASPSQLWRQLEAIVRIAEALRQECSCSPVATEADVEEPLRLFQVSTLDAALSGTTCQGWRASPDTGGPGDSAEPASTKQLKRRNGHWLPGVSSTSIIKDVTKQKYPEHAIHQGAAASCLAARPRLQHCACERQRFYYAPQVRSHRSHWTHGLAHASPLLPLPAIDNVAGTSASIICSPRIFPGTTPFSTQTEGAVSVLLPLVTRHLAQFHREMLFNILAGARL

SEQ ID NO: 980842 - protein, 287 aa, Homo sapiens
GSCPGKTEADVAPCCNDVIDRLTKVPRGARVCQPGTGTTGDGADRPGRERLNGCRRAGSPDAWSWMRKRLVIRPPCRGRAQRIRQAAQQLTLLVGSATGAGPLPSAGLPQTNTGRSSSRRWGPGFTSRAAAEQGHISVLRWWGPGSPAPEPRKGPFPPPDLPWPVTAVTVMAGSVPSAQSVDALESPGHLALEGPSSHQESALEGNVYYFYREYFRDLGHGWLLPPAMQTCTFLLDSRSPCVGRIPGPMPASIDGAWLVSCLHLTPNSVNAGYGEPWWSIIEIGYRS

SEQ ID NO: 980843 - protein, 164 aa, Homo sapiens
MELGGLGVHESLGSTVVSQTGVLKTSRLEALGFLQVDPGDRGVGLLHYRQELGPRQSQSCKLAHGWVTCPVASMSHTRKEEEGAAKLKAPASVGQHWRRPRQWGEASQVPCVTNGGPRGCLLGQHVGHGRASRLATMEASGKSWEAGMAHCQAAHSDWNSRLSK

SEQ ID NO: 980844 - protein, 237 aa, Homo sapiens
MPSFKGKSWRDPTSKDTARKETGFTGREAGSPRLERKEEYKSPAPAPEEEMDANVSRRPGLAESTKAKDPFAHRPKSTFVLEEIEAASISNEDTLLCGYCHTFWEHFDKDGWSLMVLRVSRSLRELTQTFMSCDLITGMFPATGQVMRKNAFASVILVRNQQSQLHFWSLGLPRPGACLSAESRLAGGLRVIHMADTRSWQRGDPDRWLDEYFLLSVRHDSIVGQSLQSRARSYKRT

SEQ ID NO: 980845 - protein, 242 aa, Homo sapiens
AVSTNTIPSGPGGWTGKIGETGKRAPQLLGREKQEDSTPCLLTMVWLRDSPVNAPGAHGEGPSIGKPQYSALDRVESTEGLTGGHQASHTAREVARGAETHASTAEHWECQPSKYWPVRRLVVRAEPPGPHCPEPMHSHSLLPWVGEAGGHCERLDCLPPRVLPLLAIALISDNLQECSSDGNYLEQFFVFVFVFVFVGGGQLNKHKVFCVRYWAGQGSCAVGVVFFSIFLLVFTMCCLIMI

SEQ ID NO: 980846 - protein, 333 aa, Homo sapiens
VPSLPGFRGRSSLRVCWLPAWVGAELRSVCGGLLCSLLSACARYPSSLSALCVLGGALRVWGRALSSLWRPGLRWGGPGGSRLAFLAVCRLLFARWVCPSSACRCGLVAKCGFVLSFLRSLLLCLLCCVRPVSAGAVTWCSGSGGSLVGGGRRWAVVNARVVSGLVHVVCLVRGLRVGAGPLVLVERVGCSLLCFRLRSAVLSGMGARVAVCAVSWRCVAGGVTVGGSDCPMQACRWGVCWPCQGMVASGLAARPSGLGPRRFCIPCVPLAVPDACGLSVGVLRVLVSRCCSAPCASLVFVLLAFVWGGACCRGEWVFRMVAFGCVAAVSWGC

SEQ ID NO: 980847 - protein, 178 aa, Homo sapiens
FFFLVAGVSVCLLFFFFFSCCVCFVSCCAVSSSGCIVLLCLFSILCVVSSVCSSCVFSCLFVSVPLSVVFFFCFFSLAFLRVLSLFLVLSLPAFLVFRWLLLCCCLLVSCCGLPGSVCWGRFLVVLVSVLSLCRGVCLVWFGVLSVVRCCVFVAIVGVFACVVACGSSLCRLCFVCLS

SEQ ID NO: 980848 - protein, 49 aa, Homo sapiens
DLQECTRLIWKKDTISDTSGDFRKLMLACQRLEDQRMALSSDYELIDQD

SEQ ID NO: 980849 - protein, 203 aa, Homo sapiens
LFVSLLIRFAFCFLAVGCCLSVAPCVLLVLGWFSLFCWWLLFGLLRSCRVISILLCVLCPSFCGSVCAFLGLFLPFNVSCNVGGLFVSALGVLVLLGVPTISAVSPVVVSFLFSVVARCVFYIGALVSCFDCFGFFLFASCVPHAGFLCGGPRFLSFGASSLLVCPCIFSLGVSWSPLILICVLTLPLAASSVFLCWFVGYAG

SEQ ID NO: 980850 - protein, 116 aa, Homo sapiens
MMIDETELGTFEEDPMMFKEMQMEFLRLLPRSGVQRTDHGVNCSVHLARVHSDSPAFSLSSSLGLQAPTKPDNFFFFNTLSFRLHVHNVQVCYICIHVPCWCAAPINSSFSIGYLS

SEQ ID NO: 980851 - protein, 360 aa, Homo sapiens
PCVVADFACRYVRCAFFFLGVLFFLSHLSLCLVLTIWFSAGVVVSLIVYLLPSKAFMMVLRAAMGYSVQGGPSNALSGHKFNFSSLGFHSIACSSSPLDGLGKIEGLGYEAVPMYMTVSPCSHESGQDPVSVTFSLTQVRPLPNSFPFEVNYEIPTESAMAGSLSMLSLLMSGETVTTSCGEPSPWKGNSQSSSALGKGGPAGDDQQRAGPGDTGLGGEAAEASTTLADSPGFPQHVPRSLVPPPPKAQPSRISDVQHLGNGSVRLSPPVHKCPQDSWVAAVGMNPVLQNCAPGKGGPEKVTMYHTPKKGVGPGVGDTGSFFGSLTAATPAYPKAAGASRLGPNLEGGVNLTRPNLINSG

SEQ ID NO: 980852 - protein, 243 aa, Homo sapiens
MSVSLLSGSLVLLVSCRWRGAPSALRLFSVLVDLGCGVRGLCARSVRASLSFSLSSRFGRVSAYSGFSYDASVFHLKAIWYLLRQWFAVWPLFSRVHAVIVISLSRPFVVGRLCLLGHLFCHLFSGFSRGLCVCAVSAVCPRVRDFASCCGWRVGAMVSFVVRVFGWSVVAWVGGPLWFWMLVLWGEWLGGEWVWVGSARCRRRVVVPCRGAWVACASVPWVSLGLGRCWLLLCLPRAASVMC

SEQ ID NO: 980853 - protein, 282 aa, Homo sapiens
SGRVGSLLRGARRLVGPECGRCSRCAGGLVFACRASAFSVVFCPLGSGCRRGSRGVAGVCRAPCVRCVLWAARFSWGVLFFAYGLGVATGGFPLVGVPCFALYVVRVVFLGAFGVHGLLVVVSRGAEGGEAAHTGQLSATAPSGAAECLVSQGWRARGAGSVAAATGQSAEEAGGSRDRHFRVVPLVLYGLARVVCGPASPWSWRVLIAQARDRQINYGSGMMRSDLAAEAVAACRKALPGLAVGSWGSVALVAHAPCQWLTLCSWLRPEGVVTSTVSGWPV

SEQ ID NO: 980854 - protein, 179 aa, Homo sapiens
MSLFYAPPLFWRSLCLSRPFPIPVLLQLRVLSGCQVLLLSCSCCDVWSLFLVICHDVCSSGSCVLVCRTSYSWCGSHLLLVCSTSLSSVYRVWLFGVVVPRLPWSGVVFSVYSSCLLSLVLLSCQFFCGGSPLLSFMSPPGHNVSGSCLKSLSFFCLSSCATARPRSPCWSPGDLYVVI

SEQ ID NO: 980855 - protein, 338 aa, Homo sapiens
AGAQHRETTLGLGVGGLAAPELGELVLTTPDGLDDWWSGATLYLATEVRLMVDTGRGHAVSARHGPHRVTRHLHSLLSASPCRAQDIDIVGARCSVHESDMVCHAHEPPDTECAAVVYGQDARTGKEPAEDAMTGAPEPNRAIMRVRTHSVHCGNPSRKQWRRQREAPGGWRETTRRAPHRSDDLTPVPKDQAARRTEAISTDKGKGPATDQNRRGTEDGAGEQNDLQESKHHIRSPAQGEHTVCRAHKRIGTPPNGKTKRGVITKEPGVNDPCSPSGGITKMHTTAHMDIQLPKADDGVAQTGDTPNEDIQPRRSLSAPRNKHPNTYADTNRAQVGI

SEQ ID NO: 980856 - protein, 293 aa, Homo sapiens
GPGFPAAGPGTPAALLTLAKQEELDAGLAQRSEERCNVVLRPQQQDPEVPAGEWACAGGLGAPLTEDQQNWLSEEILRRSGLELEKLPLLGEEAGAPHCPVNQSRWRAPEGPQVTGTRPLEKEVQALRCPDWRRWLSPRVEAPQRCTEDPMDGIGHIPPGDTSHKERMVTRSLADDGSSSHMQVHGGAARGPTKREHARDLQPRRQGGGVLDCGERQGTGPQTHMNGPEQQGLVQDRSLRQRRLTQGDGLLQHVARACTPGKPNAVRCGVTDNESWRDAIASSPLQGLLGEWA

SEQ ID NO: 980857 - protein, 296 aa, Homo sapiens
YKIAVLVLLNEMSLHRRGAAVMPHGCWLDGSTMLLHAPAAVAQILHLSKLYNVNFEESLIHSVCQHSCAGIQQIDNLPLALTVLQFAHVHHWHTHGFFCIAPFQHFLSSCAHIEHERRVQQEPHMSVRSVIYDIIVRGRPNCNPSRGRYNENRVFHISRHDKIDYTIAVGNHVRAQHTLQSIKVNIFADGHIGGLQGTHSMARKVGAGPYAVGNSIVSTPWHPQSQPSQSPRSDLARQSHNNALGRRRDNARANTLLAILARSIRLTHSKEAEAKRVQSVVDHRIASATFSRRRDA

SEQ ID NO: 980858 - protein, 198 aa, Homo sapiens
KELSDVAHRIVAPGKGILAADESSGSIAKRVQSIGSENTEENRCFYRQLLLTADDRVNPCFGGVILFTLETTLPEGGMMGVPFPQVIKSKGGVVVASWYDKGVVPPGRDKWETTSNGWMGLSERCAQYKKDGADIPSGRCVREDMGNTLPSALAHHGGHLPNVLARLCQYLNSINVHCAIVESEILPDGDHELKRCSM

SEQ ID NO: 980859 - protein, 189 aa, Homo sapiens
MPCVQAQVWVLDPQGARTRFLRAYRCTTLRENTASDLLEVPEYVKCSMDLTKTEITAPLPLPRLRYLYGQIKNRLRSQRPPSQYQKCPWSGQQTSHKGTKTFRCTTYQRKRHQTTQNWEMVTHPGQEITRHHRTRRTNTQGYKMTQQHQWRTQEIHKTTTTRAEEITRRNDTQTRNERDRSRKRPQRHT

SEQ ID NO: 980860 - protein, 108 aa, Homo sapiens
MCLEEDRSNESDVCVTSLTCIQRQRSIKCLHLHLYVNGQWIEAHVATQIPYITESQNTKKIWKQGQRHPHREARSPGTPDTEESHESQTSIIHPPVQRTGPAGVTRVT

SEQ ID NO: 980861 - protein, 59 aa, Homo sapiens
MTVSKRFEQSDVGVYREPSGAMLVLAYEPVLGHLVLGKTENNPKGPREVHEKLRGWLKS

SEQ ID NO: 980862 - protein, 170 aa, Homo sapiens
MSQMDVVRPFEHPGMYVAIQAVLSLYASGRTTGIVMDSGDGSPTGAIYEGYALPHAILRLDLAGWELTELPHEDPHLTEATWFTHHGERGKSCADIQGRSLCYQFGLDFEQEMGTADSPLLWRRVEACRWQVLHIGNGRFRCPEGLFQLPPGIGLGVRTLTLLKGGAPKL

SEQ ID NO: 980863 - protein, 107 aa, Homo sapiens
MEFVPAVQYNLIRVEIRSILYKNPQAHIEGNNEVDYGDLTEQEPSLVKIINEVKPTEIYKLEAPGANVEITFDLAEYTADVDRSWAPLRPSRMQVKNSGLINSCGRL

SEQ ID NO: 980864 - protein, 232 aa, Homo sapiens
MRHPCTAPPAGRREKGDAGQQTIRGQRKGVGDGDRNGTNIDDRSVLHHSRSPRVSAGRPVTPTAGGYPRKAHTKRHPWESTHPGIITQATHTKGDLGAPTTRDSPLVRGRIATPTYPHKDTRHNHTGTHPIRPYPMGHTTTPRPPKQTRATPVTTTDPTRGDPPPKDRGPPSNELGHPPAPNGGNVTTTRRMSTAPHRAATETTPTTNGTNEDRTPKVPTQRRRPTAAKPTT

SEQ ID NO: 980865 - protein, 468 aa, Homo sapiens
PTGTTWREIWVTTLFYNELRCGHRRSTQLLADPGGSPPEPLMAKQSKKIDSRVTVLMTLSTHPGHCTDGQSQDRAWSPLSASWALASIGYLIYVELLETGVDPTNGCPSYEGYARVLPRSTPCRSWNSWLGSGAPVPRYDLSMEASIHRRQMDSKTFTNSNGSGKRDHSGSRGTIQRQASLVALLFQTSWGPFRKLRAGWGASSSMRSPPIFSILGMKGRLSDAGPAMGPSGQFTHKRQMMAGLPEMLRGGGHAVVSQGAVACPVESWDDPLLENFPTVSNPTPVQTFADPMQQVVDALGNPIPGEQATPGYWTKANGVWPVTRGPGTTQPNGEITGGQWPVTKVNDKNRDAISRPLGPPKGHPTGQEFPPQRIPAAPPVGAKGNSARVGNGGGTNSQGALTVPTHFKSNEWWEFDKRKGTYTTKRGAHPSEPNREQASITGALDEMRQHTGGQDVQRALERTAPAQN

SEQ ID NO: 980866 - protein, 81 aa, Homo sapiens
MNIALGSKLLVGSGTLGEVFLGKRWGPKTKINTDTRMAATLKSLKLVRYRAFCSPSAFGAVRSVSYWNVSSTQHGGQDPPD

SEQ ID NO: 980867 - protein, 391 aa, Homo sapiens
QAFICAARQRSSKAHIQCMHAGQQAQQHTGAATAQQASINSMHAQHHSPKHRTAWWSSSMQAGMHQRVKSIKHTQAHTLKHSIQQQHTSPLHPEQAHSNQAAQDLILETPGNTLTCTIPPPQKSSHRQHISSRQADRPTTHSTLEHRHLTYWTRSKATLYYLGHATRTQIWHTSHARPFRHQSIIYPSRYGETIPLYCTLFRIAGTTTGTGTNKATHNQSTDTLSTIRCPEPRLVLLYQYPNWGTNAVKVAIGTSKTETPKQCYIPYQNFTTYPRPRSLEVKEHNFSRGILGLRHKTNIRPHPDEAKTSGSHNRKAKEITITTHNAQHKAQSKHHRTTLTNTTGHIDQADNKSTYRITHRHTGSNVKKAPISHQTMTSHRARETNQHNSER

SEQ ID NO: 980868 - protein, 291 aa, Homo sapiens
GARCRGDAGLSRAGGAEPGGERQRGPGPETPHETVYSGSIITAIDCQTFGSESLGCDPAHSVKDGQTEIRTMVIYPQTEQQQQQASRGPGQVQSMQSSAVHSSAGKQPVHPMTMAKQQFCMARDRLYRTHEGDHDLILQRAADALPQRRQCQRPRHHHEVCTPNTSRNASLLDHSDGQRHNQGIPGPDQVETGVYTKKSILNGNPTKKLGGPMQTRDQARQANAKKGSRTNTILEKHQAKYRDDTATQDRIERTVETLDPQFLDYPTIEGDTWETLTLPKAGNERTFESLT

SEQ ID NO: 980869 - protein, 158 aa, Homo sapiens
MAKNVHLKICALIEGLAHMLEGPLPGKVLSKPASGSPRCQDSSFRHVFDSLVHLPIRGLSGKASLLGLGKTQTSKNVELLWWVPKRMTPGKGNSSSVCPVAWNIPVMRWQLMKGLSESLQGKKILLSTTREPAVLIKVLPENMAVPKRECVLMGATCA

SEQ ID NO: 980870 - protein, 353 aa, Homo sapiens
  misc_feature (77)..(77): Xaa can be any naturally occurring amino acid
MLPEVSQFRGRSGCVRGLCSRAEEPRGDKRLLLFHICFVEASLTKSSLITCDAHITQFSSSHTQLPSSDKFAKYRRXTLYKEKNTTRHINQGNVSITNISTSAFVLHYISIMCEDKNLYVDTTTERSESAQSTRRADEWSSRLCDINNIFFLQKSRRTKKIITPTTTVFSNHNKRPKSNPPSDFYSCVVTVYVVLKLIYIKQRKEKETVSYENDAVEKKYDVAHRRKHIWAYNMGAGTQREKLKHREVKKETFMAIGSKIQQGRISTRRENKQKQQHIINTTNTQQYSTKRTQWADSEATRPASGGTNKKRNGAITDTENISSQRLEREAIPPTHNYRAAPKRRITIIRRCNP

SEQ ID NO: 980871 - protein, 276 aa, Homo sapiens
QDQRYHASPEHRVQEPWRGSYTSEEFARAGKQAGLQVWRIEKLELVPVPRERSRPTSTSGDAYLVLHTCKTSRGFTYRLHFWLGEGVSQDESTDAAIFTVSDDDYLGGKPVQNMRTCQGVVSSNDVWFSYCQKAGLKYKVWSALAFWIRSCSVRTTLTGMEAPTCERVVVVVRATGSSPLAGTRGRARRDLLSVHLRLCAPEHLSVECGFPLRRGNYASVGTGNQVEYWIPAQWKGEEGLEVIARGRRECTLENGTKAKGETREVRAWVGEEEMLQ

SEQ ID NO: 980872 - protein, 45 aa, Homo sapiens
MITTGKQPDEDDSSEDLYETRLAQRITPRETPLIDLTRGKKKQVR

SEQ ID NO: 980873 - protein, 261 aa, Homo sapiens
MPSPHNRGPGGQIIRLVFTYASQRRDQRAMADESRGPAKTTSTSPAPSGGPRGSPDLYFTQFKATRCGAPEIEYAMAYSKAARGNGKVMSLLKTEEFEVTNNSSGSQARRHSKHELSNAGDLCAKGIATEHVTSSPVCSGGTFFMLRAKLVRGLVSPSHKGQQHLLGFLARRLLNLSTMGCTLPLVRRGPRRVHEALGQRTRGSRAHPGSQQLLQFTTFLMSYFWTSGSQIRGTKRVGNMRATSWGKQTMHPPRPPAEHPS

SEQ ID NO: 980874 - protein, 70 aa, Homo sapiens
LPIRSTTTSTVARDLKMRLHLAPADYALETVQGHHRPTELSIQLDVGNIGDICNGERPRLASCPRADTTG

SEQ ID NO: 980875 - protein, 285 aa, Homo sapiens
EEVNADLAARRTQAGGRVKELKKDIDVPGAAHWPKLSKADSKPHEQQGASNHDGKSMAAAWHESSGPGMTKAEEGNCKEAHHTGPWDDTAEPRRTKCDERMTKSQSSGLDATEWRDHGNASLETGRRSCDMDTGDGHTAQSRRGDHEDWQQAVRWTACCIKQKQTAERSKLKKEGLRAETRLSHGGWKTSRLIGGPRMQKKDQRSCRHQSGGAWKKETGRQKRDRHRTTVERQQENTQRARTSKPLEEKPDTNDRPRKKARTRNNTEREKAQGHASKRKKTKQKK

SEQ ID NO: 980876 - protein, 50 aa, Homo sapiens
MSESLKKEQEHKCTPGTDEADAGSVTVRELQARHEEAVQAALRGGKKQVQ

SEQ ID NO: 980877 - protein, 134 aa, Homo sapiens
GPIGVAETHAWCSSDRRWEEVSRVTWHLSQRRGPEIVPHSFPWAAQFNGGRKLGVSWSAGQQHIISHSRPRGEEMGSASRPSVPGRAPGGPVHSGCCGSRCVGCMVLVTGAVSGPLRRTLGGTSRLHFAQDVTL

SEQ ID NO: 980878 - protein, 291 aa, Homo sapiens
EHKIPCPYALHGHSPPSCTCPRWDWEFLASTRLTSELNFLLQDDRQLLPHGTAAGRAPKIERDRPGGITERESARSSNAEGESPEQNLSRSTGAPGDRNLLAKLYLALDVLILLLSAVPSPTVTYYATQKQNEFTARWARPRRGGGAGPAVRVSCKLPSVQCSASSPGVDIVLLCVMNSSPRNSSPLIPQSNYLESAQVAEERGVGHPVWNTSGCLQERAIKSSRWLIQESDSVTVTAVWLASQSTKGEGNGRNGTGLTRLARRSTFTSSFLTETGRDRGPWAVTTTNTSS

SEQ ID NO: 980879 - protein, 452 aa, Homo sapiens
ASSGPRSPDPRLSPGTLVPSPRRSPGRPHDAHAPTEERPESETEIHGRARLTVGDLTDNRRTRMMDPPFLGRHVVRQPAVTWTDWTALMTDQRLPTWITACSYIIHEHSWRPDDIWKTYTVANIGHIETMMVLTCTVDAHPHSAQRATQTALIHTQLEPPPRAQPRLHAHLPAHPPPLTCTPQPPTPRTPPRLRRTNNKPKSADTRRKRRLHSAQRTNLTNKPQGRPPQIASSRTHLDYEVTIAPRTLPTHRSKAQTSITLHVLTSTHTPIAEHTYASRIDYGDRKIDATIRLKCNNDTEKTNNTAHTSKHSNSCLRTDAPIDLTHEEMSQEAYFADRRKALPNPGHQHQTTHTTAARRRNTLNRDRNTEAEIGSIVEHKLVQPRRLTYTLVRTYYDDTPRDLPPSLPAHLTQTRTTDNAIHAQTSILPKHYTGLRKNTAEKQTSRDSQHDT

SEQ ID NO: 980880 - protein, 74 aa, Homo sapiens
PHPPRTEPMLRGEPARPRPLPRPGLGPGPGPGAVAPVNGWGRRPVIGGPRERRTHERAKDGHITLAGWWMRTEG

SEQ ID NO: 980881 - protein, 235 aa, Homo sapiens
ATLNYTLRDLPQVLPGHRSLPHGWLMREDTEGLGGSPDATWACCVHCLYGYWSYPTARAPYRTMKSFPAAVDPYNILTIAWTGRTVVHVEPLEHEMSLASSSKGTGYACAARKPPKSYSLRGGLRNAHGRREQSQALARTKLPDKPWALILDRTIVPRFVGPLDSLGARPRDLTLDGPSGPGGNHGMVLDLSLEDLGHSGATPTDSYGNRFCRHLEPIPKGPPGSFLGNRWFTDI

SEQ ID NO: 980882 - protein, 267 aa, Homo sapiens
  misc_feature (259)..(259): Xaa can be any naturally occurring amino acid
MRIGFSYVGAYVSFLHRIRSPQEPLSEFYCALGLPQRYVRTEAYRATIASILEEWNILRIDVLRHDDGASQVYTVTPSNIEECLRHLPECSCVCRGRIPGPPACSEKAPDMSSSRGISQLLGLRWLTQEPSPWGPIYDNDHTRYRTLSSLLTRTLTNTMVCLNLDPTAWTLRKFLTLFPLPEVPLGSSSAWLSSCWPLLTGLAVARLRTCIHCFNTKPKVMSIRAKITDSSSWYHPAMSVSTLPFITRYPQPWLGFHFXSSMASESH

SEQ ID NO: 980883 - protein, 265 aa, Homo sapiens
PRPLGSSKVPRPRTRSHIPMTSGLAGIRHCKRAVRSSWGKAAQKPMHPFEEPESIECSGGERARVVRRHSAQSHSQHRKKSLRKDIESLGNEDADRNWPRVRQQQHKHSAFSSWYEIEQLKKPHVYGMQTRTTENCSRATTKAFLGSCGAPTVRQPQHIPTRVTFQTNKGLAPSPVPQYIPCPLPNAKCLHALGPPKCLPLTQSINVSKSIINRCLYLDLNLPGPQPTPPMSADFQSVPNSLISSLAPCFDTIFPQPPVTHRGVR

SEQ ID NO: 980884 - protein, 423 aa, Homo sapiens
LLCGVGAGLFALAVGGGAVFASGRSLGLAGYWLCLVVRRFGVSSGVSVARVGAGSCSVLPGRFGGPSFVLVGPCPVLVARFRLFVRRRAVWCVAWGLRATFLGGGCVRFFVACGAWALFVGVLGMAALFGVLVVALLGLGWVVGWLLSCRAVVCVASVRVGSCCPWLCRVLGRGALPVGPACLVLRAAARDAFWAFPVGCFPWLSLLCVRPVVCCAGRPLGRRGEGRAVTCSECLLRLRAPLGRTCLVPSGTVVSSELDGLPLDGEVYVVPDVVFGMLVDVSVLGMAVCLRPCFPAHVSARLGNRMCGTGARSGVTLRLSQGERDQVLGGPEGAPSVTESTGCRELRTLGWRNSWQLDQDATECYMNREEERYNDSMLYRAGLTDQGPGVKTGAIWSTREMPVIRFQEERRLSELAIGKGALG

SEQ ID NO: 980885 - protein, 33 aa, Homo sapiens
MPTAVHHLVPRPPTTLPPPRPPPLNTVRLGIYA

SEQ ID NO: 980886 - protein, 269 aa, Homo sapiens
SNKDEGNLSQARDIGGTSKTTGTSRTRTRRPLRVGTHEKVNPEAQETRRGSMGASGNHSRARYNISRVETTARGRRIPEHGGPKPAQINVLRKGTYRFAKGPPAWYGTATRKAGEETSPLDCVQYRYASFSVTLNIVQGIESAEILHGSMPLPAEGDATLSMTVSLRKAVCPRKPAWRSHRPGCQPPAQRCASCATQPSLPAGSAPDTEGWPRGHTASMCLVADTNSLVSGPAPQRYHAWIKKQALGRFPLICWGIFAALLMSCGPCIS

SEQ ID NO: 980887 - protein, 104 aa, Homo sapiens
MGGDSGLSCLLVRVVCVCNIGNRFPNRLVCAPREYPRLVSWAWVSAGECCEGILLGLVRLRERVELVRGSVCDGVKSLLQPLGWSLRFGGVSSVWVTVLVGLFG

SEQ ID NO: 980888 - protein, 107 aa, Homo sapiens
MQYSVSRRSSFLNAVLAAWCMSRSEMYPKLIVVDIRKRWWSGVLLASGDLPRSPKFCCCGHPECQYDSLSLQPQFMFAPESVAVTYNTSFSHMSFISQVLKSSSYHR

SEQ ID NO: 980889 - protein, 341 aa, Homo sapiens
SGETNEYRPDGPRPGLRTNRAFEHGQAPGRLRQGEDPRRLPCPPPKKGNLPACSDRLRTRRPEADKPLARGHQGSPRLARRDQYAPSSEQLRTPPKYQPCPRRGRRIVRKYRQLECHRMREELTSQRDLIGRRQVPSEEDERRHTGGSGDEAPNAFLRGNPRAIHKPTQARWSTSSPQKPPTPEESKAAVTSAPGRYIHCRGYSQKDRTMGRKILPDTEYELEYGEDTYTGSQISSRASTSFSIGEFPVDERRKLIRYVTAFYGELEDYMSDRVQFVITAQEWDPSFEEGLMDNPSLAFVRPRWIYSCNVKQKYFLTSSMWCATGLKMWLTHTRHTHTQTH

SEQ ID NO: 980890 - protein, 78 aa, Homo sapiens
MGLLVPCISRYIGADIYEARLLSYPSCHIAAVTGSVYPASSALVQIGENKAPSSVGSRSEYSHMMLQIFLELTTHRYI

SEQ ID NO: 980891 - protein, 84 aa, Homo sapiens
GPKKSDHRESLRNSAAPVYKRAPCDNQASRERVFAQDFTASAVPIRVQVATRTAAYPVSVHPPDLKEESLLYGPSPLVYARGNS

SEQ ID NO: 980892 - protein, 152 aa, Homo sapiens
MSHSADYQSSLQSMSPTLQEALGRSHCQPSLLVVYSALPASDFLTCDPRLSLKFLCRAYWRPIHTLWISFLPVMTVVDCKVVYCPWWTHYSRHLSICPPSSCIATKRLSLGVGSTPEKDSDRVRPTKTVDCTTLVFTKKPTLCVSESDCIQF

SEQ ID NO: 980893 - protein, 288 aa, Homo sapiens
  misc_feature (156)..(156): Xaa can be any naturally occurring amino acid
FRTAATIQSVAFFSLLFSLPSSSVLSSLILFISLPSCCTSRSTSLSVFLMSSIVGLPRILLRAAPICLVFFPPVPLVPPLPRCTPSLLSCAQPAFEGPCQYLAAIFPTTVSVRPHVFQEGLPFPRGSCWTASPYPARTSSKSIGADEHPGSVRSLXLQPRVRDELSFREGESVTVLRSDGPEETDCCCSALHGQEGYVPQELLRCCSHRVKPQEEYNVLRRIEGVFLEADRYQALPAGPSQTVCPLCFVTACVSCTPHACLSVWSVATGSSVLLRKLHGNEESGPQTF

SEQ ID NO: 980894 - protein, 128 aa, Homo sapiens
MVWGIAQIAYRCLGRYWPSYVGTEEAVHLITFRCVCIADSFSRPSKPSLDKSDYNMVDISRMSIREKHAGKLYTRNLSRDYRGHQENVHPHVKLVQPRVELIQSVMDHIAGDEDHTEWSHSALSLRRY

SEQ ID NO: 980895 - protein, 477 aa, Homo sapiens
QRSGVCAGCRLSWCVLVGPLSLVVSSGCALGGLCSRLVDVALVRVSVVSVCPLRGVWISRRWFFRRWVCSCMVRSLWGPSSVERGVVRWLWPRVAGGVLVCGGCMSVGRAGLSMVAFACVALGCHCASCPGGASLSAAHAPLLVGGLLAGVPDVIRGCTPGRPPADVDASRRVWGDLSAGLCMGVLLSGHDASGNVDCLWGELGLVAAWGIGEPGFCPVLRHGGESCARLGGGLDPLRCLPGVRCMETVRRAVPSEGRVAALRPMDSTPRGRPAYVVADKVVPWSRRVLEVRVGSGEGAKCHWRLVGVARVVGECLVQGGRGPWRGHLTGWRGWCLSLVLGGPSGIVRGWQKGAGRPVVARVRSDALCIRRVMAPRGMCRLKGKDPHGYSAHACCDEECLAVTGLCAVVHGNTAPLGLAPVATRASMCHGLAFVSGAQCASSVPALLAPRSSSVRVLGPSPPGNHRMRAWHRGTVGS

SEQ ID NO: 980896 - protein, 253 aa, Homo sapiens
MPDLRDQAVEAHTEPLVSGTGAAAGVGEELRTFVLGPLGAVSAQGVISPDRRFMVSGGFIADWQHMPAGRGCPVVRDTLRRSSASPLPASVVEEPQGEDREAERASRGPQTGECMRDSPWERQQKRPCPEVHLLRPRRGTSRDEQDGDCQLRQNPGQRQSPPEWVPYIVPAGHVQSQRKVYPQPPLSDAYLSGMPAKRRKTMQGEGPQLLLSEAVSRAVKAARSSAPDEPARALSRDLEGTRGSGELQAAAPV

SEQ ID NO: 980897 - protein, 98 aa, Homo sapiens
MSHSSNGPFVKTKLWLYVDVLQWASDGRKLICLVFVHFTKMAAESCVSANCDANAGVLSGTKMTSLDLCCVHKISGKVKNNPFYGLHSLRVYCLCKRA

SEQ ID NO: 980898 - protein, 279 aa, Homo sapiens
MSGVYVCVGVYDINRLPQCSIDYVVICAYLAPVDECPRAALVMVQVWRPGASMMSGKGNPRYRISCNCRVSGASFRPPTMGSVDLARRPSHSAISSLMRGQGWKSRSLLPAIQAVEMPLHVKTGNPVMPLSRHMTAILFDREVRCGHACAVVSHACDGLAFCCPVSLCTGFRVACKPAQERHRRCVTPRIRECRLIAAAFAIRLAQVSEHSTLLKDVSTKAVNSPEHAIQHRCCSSLLAAAARVQHRMQRKVLYRLKGVAPPALDVMDSAHCLRPAPAS

SEQ ID NO: 980899 - protein, 105 aa, Homo sapiens
MRVEVIFAFRGPWDRRHARLKTPGPPRILCRCHVRCLLADLHGSFGIIGRLVRVCRSEPFYITRSGMCPRTPRSLSLPDARALHLLVRSPISCVGSGSAPSLHPG

SEQ ID NO: 980900 - protein, 277 aa, Homo sapiens
MAEESKSLCVSPMCNDMVLLYSPLVWNGTSHPQGLVHKWIEVHTDGALPAESDYQVLAPESSCKTKSQESFVRFAPTNLIARIVPILENSTSAYFSARSGRASLRAYHVALSEMAPHSVDLQCAQGCTCLPAHACGLVPLAGVSHPALPGLAASAPRYLRECGSGTIQPHTSDLSAPDDTTSLPVVSDPSVIMPGQEARAIGPGSADRGHLAGSFDGLLVLASLIYRTQLYEARLLSYPSCHIAAVTGCVYPASSARVPLVRMSPVLSGQQVLSTLI

SEQ ID NO: 980901 - protein, 265 aa, Homo sapiens
SVFFDPLVSLTLGSLRVVCLFLHAGGNAPGKTAPCIPKMVRPIGSGLFVRFALPYRFLPPLVHSWPQLPSPASPLDLLDTSVPGGARGPPPGFLDFQGVQATAQPQTTSSQSLRLHPHQVDGHTHVQPVAKLSVRVPTERPQVACTASERPFACEVYVKAFCHISMRLAEHRRIPHRRTTLTSCPDCGKSIPLRSSNPSGSTARPISSKHQAAVQASQLAEAEARTGGLGRHREDMRVGGATPLVVSPLRSYPLAEADGGPDQLV

SEQ ID NO: 980902 - protein, 127 aa, Homo sapiens
PLFGVVLCRCCGYAYAPQVVVPEVLQFCSGVVVRVVGLCMLIACSFRMRLRIALGVYARSGRLLAMGALTGELCMIRVPLLVGGGACELWDATVAICVAYCCVVTLPRCVVFCMGVFSVLCRLAGES

SEQ ID NO: 980903 - protein, 97 aa, Homo sapiens
VLLVFSVGGRCDVEGYGPFLGVVISWGVPWFSACLVGGSFVLPLLVAGYGLGCIVEGVVGLAFSYGRCCQGAVLQFGLGRSYAWVVCRLLGRACAGC

SEQ ID NO: 980904 - protein, 66 aa, Homo sapiens
TSECAPGRVAKLVPVADLRPRAVCLFPLSPPIVHFTRSGDHRRLIGCVPPVRPKVRMDKTASRSVD

SEQ ID NO: 980905 - protein, 244 aa, Homo sapiens
LFPSVMVDLFSLFSFFSWYVCFLVLVVVRLWFVFFYCVFSLLSWFFLSSSVLAFGSCIADFVCFVVVSFVVCVMAFFSRELGSRIACGVLPSGPPNRVLQTRVVSPVFSRLSLVVVYEILRVLDIELNDALDRMRCFESVFRLGPPQRASWATLSTRWSHSDFLQRHPLLHLRRWGLALPSTTTLSSSFPGMTTGIFGLEGGGPHGPEGLQGVRPWTTSPSKSTRGRERPSLLGSTATLSPPPH

SEQ ID NO: 980906 - protein, 106 aa, Homo sapiens
MRGAFHPRTYLSGNGGQPLSWDLLEEATHAKPVPLGPWDLYPPSAPCGLWGGPLLPKSLSSLLDVSTPKGGRPNSSKGWPHFPAYPWGTLFRGSIESTRMITPRAT

SEQ ID NO: 980907 - protein, 147 aa, Homo sapiens
MLTGRQLATRCELQKVQIANLGCDLLSLAIEDSQRYKKGRVIQERALVRESEGFEEHVPSDNSVKIPREIIVFTRSSFSENKNLLTLHCSPEHQRSDNELRTDVANLTMDLCLTASKVWFHHTGVSEYFDRGYPLTFAEGLRMCVST

SEQ ID NO: 980908 - protein, 68 aa, Homo sapiens
MLGAIRQHNNLTRQDASTQVVAASSYESTVICCVTVLAARHDNKRTPCMSQTTHADTSIEDTSNDSIR

SEQ ID NO: 980909 - protein, 191 aa, Homo sapiens
ALAEQRQALGVEVLEFHNEPDERLIYYTICVTTPKRTCDPRTRLLTDVFNQTDYGLGNGQRLDPDKTNVLIVDVDIITTFWSLLTTDYHGNTHSRQPYDNPRLLSGSVNLLRPYPYNPGHTGHTRPHYLLRDHDTLFIRDDTTVGLTRREDNLTSLITHYICNSDSTKDTRPDARDTLSTRSFLLTAGTLY

SEQ ID NO: 980910 - protein, 284 aa, Homo sapiens
MNDFGKSPPNKSYGTSRMEPSERTSNNGMMLRQRDMGSNHLCTEVTAGDHTVATGIVAILAPTPVGRRTNPANSFKGLPYTPSMSNISDNYCSCDAVLNESAPQVTPTIEDQVNNIGVQRHYQCQTNSLCTGQAPLCDRSKRLVCAPDQPNWEEDTMVKRTNVPHKGKYEHRNETKAHTTKEWERQRTSQTRPDRNNREQEGKKHQQQHAEELEHQRHTTAARNQCEKTKSDRTRTAVNEGRARGRRTHKTNAGTTQDEKTQQGDADQACNKGEAESKKMSRKQ

SEQ ID NO: 980911 - protein, 269 aa, Homo sapiens
MALLADVDTLLFDATGAGGAGRLPCLALPEALRAACDALCKVGLGFITNNSSKTQADYAEKLRRLAFRGPRGGPEPAWRVYGTGLIEHGDSNCAQVLARRPPVTEVHTFAGKAQAMCREHEGQGGFSKRCALSPTHLLARGPLENAVQERDETRKLAPDDSWTMTRERKKDEQKQGRGDLQNADAGQRAQDDNRNPVKKANKRDTEAGPPGEAQRRRIWNPGQRLGRNEYRALQGTRETAGACNHAPGHRAAPVGKQLLRPCQWVGTKK

SEQ ID NO: 980912 - protein, 102 aa, Homo sapiens
MAYRGSEEEPMRGTPRVNNTLGEDMSLGKCTVPSNSVYHDRIAYKGGSKPLLAVGEPYNCLKFKAVLRSGSYRGGDGIQDIIGKRPRCISPIGYMAFLNYNS

SEQ ID NO: 980913 - protein, 111 aa, Homo sapiens
VTTCWMPSANMPWLQGDGNVTRKDGNASGYQRCLSALDWVLPGNLDQHDKALGSLPTPGCLTRSFWRYWYCTCWAGVDDWCTQTRYGGSPLCSSQIVSNETRYPLMSKMHA

SEQ ID NO: 980914 - protein, 102 aa, Homo sapiens
MTVTHVSNHFWSQSCSEVPHDDQAYWPFRHTQQNRTETHGHFAVQPLDSPARYSWANPVSTGCLHESHNFDSTAVATGSLHASRGRLQHAFPLTVWPAEHLS

SEQ ID NO: 980915 - protein, 38 aa, Homo sapiens
KTKKEKTRKDTRRRKEKEERSKKPRETGVKRHMWASRV

SEQ ID NO: 980916 - protein, 214 aa, Homo sapiens
ADTDLQRLGPAPWRPPGSSRRGKLEMNGRKQESGGAHRHSERGQGAGRHRGGCVLPLIALYRFRRGKKLDPKEWLWLLQKFVTRVTNGALTGENQPVALIKDCGANCVVGSWDTLRKKKGQCVYGGEVQIDAGWAKKVCQCASGPRGGTRRDNFGLDLGEKKRIRLNRERAVAIHVGKQGVVLRTAKTKGSPLGQELQRLKGQLERARGPVRGH

SEQ ID NO: 980917 - protein, 104 aa, Homo sapiens
MRGYSLEEEVVSELDNGSSLVVSCKGLEQGRPVPMMPVWAILVLGKTEDTNKARMYTTEAPEDGEVPKSRDADGLKSTRYTYGGLCDWGTLKELDRQTDVDGTM

SEQ ID NO: 980918 - protein, 274 aa, Homo sapiens
MGLQGDLNTVTMKLGLCPHGLGPLPFPWCALGGPACYWLPVLRRCSVRDLSALMESSCHTEDDLTDAREAGFQVKAYTFSEAFQPDCVLWLADPPRSSPSQFVEGDLMVLHCQAWQDWTTDRHVSVLAEMAQLWVPPGLTGNSRDRPWYKQADSGQQHCRWHLPEPVVLGIPEMGSVVANHSEEAVSSADPQSCNLSETQAGSPLTLKWSDEVGPAEVRMALSFLLQGWPVVQSKGDHASRICKIRPGVQKSHHGCHTGLEEALRPSTFGNEAP

SEQ ID NO: 980919 - protein, 291 aa, Homo sapiens
DELVEEMEHFGQWSLWQAIKDNRIQVGYENVPHIDIHMNQIGFEREWYKFLLEYIAPMTEKLYPGYYSQAQFDLVLGRPLQACMSSPHCMPQHDASTFTINIALNRVGVDYEGGGCQVPALLDCSIRAPKEGACDPSCVLVLDSPHYHEGLPITGAPDTSQSPSSIPNWPGLSLWTFLLCRKHCKQALGPRCSRNQCSLLAVDFPVALEPASQRDATEILAGDGGPHLMVGSGVFGPALGRIPACFGWPGLHLGLNGAFPLLRGGLATRVHFQNVWDRRSAVQLLGSQHRA

SEQ ID NO: 980920 - protein, 250 aa, Homo sapiens
MAKSQPHRNLPPPGFKRFSCLSLPSSWDYRRLPSMPGYIVVLLRRTETGFLTCSGRAASSNFLNLVHPPAFDLAKRCCDYSALCQPCPSTKDQTGAIYDYSPFVSIMVTWSILSSSTKTLPLHTMCCYNILALTHNILTGVENRVCATQHRARTSATDGKGGPRPLKSRRALSTHPKYMPRTEAERAQVTAPHDGGMEQRGPKWNARRTKNAGQEPDAQPEAATNHIARPGKSPWTPETHPRGERHENPE

SEQ ID NO: 980921 - protein, 285 aa, Homo sapiens
MSSYFVNPLYSKYKAAVRRGAGGGHQSHLLRLSLRARGRRPSRRRRSKPCSSMATAPPVPARAPEAHAHPNPSPRLRDWVAGVGKAGARSTSTPAGQPGVATRAPPFSSYPQLRGNSPLGGYCCHRGAAKFYGYINLQRQPIYDPRRGRADPISDCQSSSGNMARTKTINQESSPSIGCPDETKRSYRRKTQKDPKVGLHIYVDKKLFNPNCQERQNGLPRPYLRPRSTRLPTRAATAHRPLRPQSRTGNINQGDSAAQPKNTDSCHGNVHENLREHSAPCSALG

SEQ ID NO: 980922 - protein, 309 aa, Homo sapiens
GLATLCTGCDAYCRRFDVQMVLLTYTMFVYSCLCYWMILTLCCSGVDEERGNCLLYLVPCTLITASVCRLRRKEMPQRSGQGEQYQLMDHLDCEQMKKTCDSGEQMVPANTILWTCLYHVSSISLTQIDFAFLTWTFLDWDTSGQELFNDLLANPYIVIEPAYLTVHSHNLTSQLVLNVTVVPSPFTEPTMGLCTPPRTYYLPDIFSPTQWLAPHAPGQFPLFIRSHETVRPRQPLGSSHLIAGFHPHGTLCRGATSLGTPGHSFHSYPNNRMHGPRPVSSDSASDNLPGPQKLTAVRLPYTVTPITSP

SEQ ID NO: 980923 - protein, 113 aa, Homo sapiens
RARSTSSEQKMAVPPTYADLGNLPGCLTKGYGFGLIKLEFENKNLRMGWNLQAQAQAKHLRPPKVTASLETKYTDGLSYALHVYHRETGIPTNYTNAPGDTCGKISLPVHPER

SEQ ID NO: 980924 - protein, 123 aa, Homo sapiens
MRHIGANRGPQENPGPAQRGVVSPKKTSARGDPSRLDTPKERISGHTGSPGEQRHRIIAAAGEKPNPATNADNKHEESNLHSHTSAVTELRQYHPQRTNRTRHLNHNSQIPHHDNTHSTASTA

SEQ ID NO: 980925 - protein, 224 aa, Homo sapiens
SIQSTTLHSCPHDSFPTSIRLLMLSSSPGDISDLSPATTWIMTRARRSLGAHCAYPEYVKGTPDTHQAHIALHHPRHITPNIDNVTTTHLSSTTRHQHRTKQQTGITSRNAHSVATSGPTPTETPAQTAKQADHRPDGETRHRTQPRTRTPDTEARNEPNCSPASDHRPHRGRKTKTKPRATSTKHDDTAPHDKTNDDTPGHHRPTPNAHTRNSGARTTKQDTE

SEQ ID NO: 980926 - protein, 258 aa, Homo sapiens
MGGTPSTKCLGYFSLVGLLLAALPVEGDYYQAINVLENIELNKKSMYSRVPECQVNHIYNVGLAYLMIASCTRMPSGSSPNILLYIQGTKSMFQRTTYKYEMINKQNEQMHALVALPSRCTPCVLDESIQPPDCGSKIWGQRCCGMQEMVTHKSMENFSGNILTQVPVAGSCPNYDYVQPNYGKKSLSWTQLKVFLLSNSKRPAFNHPQVPEALTACFGKLGAPGPPEQSTEPVCLKRDENSLNTRIQPDGNTRSSDH

SEQ ID NO: 980927 - protein, 320 aa, Homo sapiens
  misc_feature (12)..(12): Xaa can be any naturally occurring amino acid
RQYTSSIILKLXHINPDYENFYVRNWVLSNTALLLTYRGEGGFLEVKFLSQTFDHFVVNFRFPWILLFDYLMCLPHIHPWLAKDLHNLRQTVISTHLQLDVTIASTLPHGTPCAPVYNQSFALHTVVHCQRKTLDISGPSSVGPARNPFGCVYLTTQVTFWTDTYFLPLIKRYSQVPCGRTLRRCAATLLKYFPEPNDTNAVGQNFHFTRYCYTQLQSDTGDYEKPAMIYTWRLKVTHTESELSLTDIGLPTRNTHACRDQCVTFPRNMHRCNSFHITRPPTFDTLRASEHRCKSPITAVLHTHRLTATRSSTRLNTSKP

SEQ ID NO: 980928 - protein, 149 aa, Homo sapiens
MVPQTTCGFKWTTIQSSGDQRGKSLEDHRLTQKILAITRCYGPPILPSVTQQFTPIMAPAVAPLPRPTTTLCQQHYATIVAGKIMLPPANTIHVPTFGTRHTAAQPFPTKHKWLRAAPYSAPVSAPINNPPCCAQAAPSHVLRGNTTDV

SEQ ID NO: 980929 - protein, 90 aa, Homo sapiens
VGNPDVLQNGVHRFGGWRELWWMRVPYVDQGYECPWVCGKRLQRWCRRKLACSDLLRTTVSYLTAPDYSAFETDIMRQMILIRLACPKHN

SEQ ID NO: 980930 - protein, 208 aa, Homo sapiens
  misc_feature (111)..(111): Xaa can be any naturally occurring amino acid
QRKELNKSINPDEAVAYGAAVQAVILIGDKSENVQDLLLTRRDPVVLGIEDSWRCHDPTHQEEHHDPHHSKTQTFTTYSDNQSSVLVQVIEGERAMTKDNNLLGKFDLTGXPPCARGGPPKFEVYFSTCDRHMASFIVTARREGRTGRKTISPFTRTKGRLSKDEIDRMLQEAGRVPSRKMRRIATESRQKGLSPIPSKLKQTVEDEN

SEQ ID NO: 980931 - protein, 208 aa, Homo sapiens
MLFMFLDSTSLLRPPSNAKNLHSFLQISEHPALILLSTAFDRVLVSFFFLSLLRHAVPSVLTRCCIPRRHFSCGQHTGDSKITFSQVGDVLRALGTNPTNMQRSGNVLGTPQHMKEWMPQNNAWHNSAYDASHFQQLGQATYARLVAGPGVLTTAPLAPVMLADTPHVYAPWVTPVATRTKWKSDWQVQKIQWCVNTTFVVRISYWWV

SEQ ID NO: 980932 - protein, 222 aa, Homo sapiens
PQLRSCGRPGGLCSCAVCSPALFPSVPALLTPGVTVTTPGGRHYREPSSGASATKEEAQRADRRITCGEEPAAQAPSLKGGRQEGTRRKPGAVVVLLLAPVCARAPDEGKRQIAEQPDLGGACCPFPLGREHSVSPQGGWSCPTGVSSDACLERRFARPVCSTTSPCVKTNALVGKKGLKRRSLDQKKNFHRVARAFRSAPRYPLPVLAALPCGANSLCTPR

SEQ ID NO: 980933 - protein, 294 aa, Homo sapiens
RHDGASVLNTVLRGSYAISLPRFSQSSGSPPDLAPKAPSEEASCPQFPFLLIRMSPGNLWNQKHTRRDMVLAPSGLTTAAPQGWCTPTADSEAHVFVGLQLCESLPICRDPTSHVDFRNVKLCGAIVWPKGYHLLCSIHRRLCAAAHAVDQGHPERQAHGLLIYQIPRLPTATLIQYLSWGCACYSATPHLLSVDPCTMYPLTSTAETTGRFRGFKRFFHMSGPLCMPVPYKQDCFHATAPMAETACNAGGSSDPVDDGVCRWHWRTLHRTTLAHLTGRKSTYDTGPCHTATHI

SEQ ID NO: 980934 - protein, 113 aa, Homo sapiens
VRGGCGVELLGREPGARRRGGGGARAQVWWAAGKAWRGEPERGPAVAPDQKPGDPKAPRARPEARRMTGAQGNNPPGWVPHKAPGRGHIPVRDLLLGRSHSESNFDRQRRSPT

SEQ ID NO: 980935 - protein, 216 aa, Homo sapiens
MVWTDYPYLLIWRAQQSMISELHFPGLIVWYWDSLKDINTTSVSLTRLHPGPQPTHETDPDTDLAVPRHPNAFPSYHSPSDLADLRLSRLGTVPTRLQAHPHYHPTHVTITRFPLLTHGRLTHTNSSGRRAPQTTLSHMLHQWTQPLAAHADTSLYGKLSRTPPRPHTLPSHILRLPLPSCLSHIPFHILLLHLTAPTTPLSVYPTSAPPDAPGRL

SEQ ID NO: 980936 - protein, 230 aa, Homo sapiens
SQWSLQHEISCKLSCSCISWNPSSSRAHSPMIAVGSDDSSPNAMAKVQIFEYNENTRKYAKAETLMTVTDPVHDIAFAPNLGRSFHILAIATKDVRIFTLKPVRKELTSSGGPTKFEIHIVAQFDNHNSQVWRVSWNITGTVLASSGDDGCVRLWKANYMDNWKCTGILKGNGSPVMGVLSRNSNLPSHYPVSEFLNGSLLEKAQLSQLLEYFAVCAVLGPMEASLSFQA

SEQ ID NO: 980937 - protein, 95 aa, Homo sapiens
HYMNLTRNNLARRAKAKTPENQTSYLRTATNEHTRLLYAKLRGTDFYTDDGDQNSIRCLGDYAWVCPRTTNSYVQLFKFCPQEPISNPLCKISTG

SEQ ID NO: 980938 - protein, 110 aa, Homo sapiens
SPGREPGRAAPSPPRAAGGALLSATSASAPLAATPGQGPGEGDSRAPELAPSWVPTVAALSPDPHATAPGLAVRVAPPGDPLPGCPLGPPELVIVMTDGRADVETVPRPN

SEQ ID NO: 980939 - protein, 109 aa, Homo sapiens
  misc_feature (85)..(85): Xaa can be any naturally occurring amino acid
MEESLREPRCAQGTQDCEPEWTPSKTTNYRRNPGWKVVVLTTQHTQPQWCWQPAPCLKRYGRQGPRIPTWTQGHHSRTERTGTFXTQGGVTRAVTKPAEASPTMSECRG

SEQ ID NO: 980940 - protein, 118 aa, Homo sapiens
  misc_feature (24)..(24): Xaa can be any naturally occurring amino acid
  misc_feature (33)..(33): Xaa can be any naturally occurring amino acid
  misc_feature (38)..(38): Xaa can be any naturally occurring amino acid
PFPLAGSAEAARCLAVHCTKHVNXAGSSVQQLXGSASXSKKFPGTPPRHRLHTRNNGEIGELSTGSQNGLGGPTMAQPKQREGPFVAFPPLRLRTGSTRELLPQRGTCTSGVALGLAP

SEQ ID NO: 980941 - protein, 100 aa, Homo sapiens
MKRRLWDSLAHVRRAYRAEIHPWSPEAPQGWEDGETPAGHPLQTGGVAQPRPSTRLPRHVRRRQARAEFKERRENGLRRLGQPGETYTKGEGRAQPQGHG

SEQ ID NO: 980942 - protein, 68 aa, Homo sapiens
MWTWAHSVFPKENPGSWHLVAGFLPQLKNARGAPEAFLNNSQWGSRKAIKGSPFHGGPGSSIIILPAV

SEQ ID NO: 980943 - protein, 101 aa, Homo sapiens
EDGGGFYRDVGCQGVLFRVRFCFSAPSAARSILVQNRLSLSAQKFPGAMAEYSYVTVYQARAQGNQDEEVRRKKSKDNEHEQRRPKMKKPSLIWVGNSGGQ

SEQ ID NO: 980944 - protein, 106 aa, Homo sapiens
MGKGIGGGNGAEDSNGSLGYNFMVFFKIYWKVQHGLEIKKMVFSTGTINIGYLKQFSESINISSTFFKKSSVKGTLIYSSVLKYSHESWSIITRCSYNVRIQETHF

SEQ ID NO: 980945 - protein, 240 aa, Homo sapiens
MWAITSDERTTHDRQFDNLKPSGGYITGDQARNIFPTTQVCRPLFSLHLWAESDLNKDWDRLAQQEFSIAYDTSSTLKLQGQQLPVSTHSYHEANPYDISMIISARYRNAERTAQYCPSLQPLPPAAPHNIIVLLRLQGPTFLPLTDANPLSAFWQQIIITTWNRQSHSSLYPFFILTHTLGLHGVILKRRNDAHDSVTLLSFRRKARFCIALYKLNKTNHSSKGFTIIGPFHHSWHLIM

SEQ ID NO: 980946 - protein, 44 aa, Homo sapiens
MRRFWKMIGTLSRAEGRMLRDRNGVPKSKRFKYLKSWDKNPKKA

SEQ ID NO: 980947 - protein, 123 aa, Homo sapiens
MSFNILAPPPGEVLFRAYSTSSSTRRPVSFPRTNIPGHATNAQAINRQHQQRVAQHQDKLIKTDKRHNPDSNVRPAHTNCKTNKTMNLHYDTELHNVAAHITANRTPDSSQTTRHLQPPNTNT

SEQ ID NO: 980948 - protein, 132 aa, Homo sapiens
MIPICPVVSFTYVPSRLGKMPKWRRQLLWIHPQRAGRRVGAAQYSQQPASGVAYSHPTTVASYMSIRLSSCSTQLLCLCNQKRATVAAAGQGPPLPKKAPFQNKQVKPKRLQNTRDSLWVDVVRSVCWTTDL

SEQ ID NO: 980949 - protein, 302 aa, Homo sapiens
RFLLPTCEERRVCFPFHHDCKINKEGDEHSSVKVYRPTEQNRGLRNNSTIYNHLIFDKPDKNKKWGNDSLFNKWCWENWLAIGRKLKLDPFLTPYIKINSRWIKDLNVRPKTIKALEENLGNTIQDIGMGKDFMIKTPKAMATKAKIDKGDLIKLKSFCTAKETTIRVTGNLQNGRNFAIYPSDKGLYQNLQITQKIYKKRNKRPMKKVGNDMNDTLKEDSMGTDLKIVLSGLRDAINHGFLLAEMALHSDTVWGCGQASRGEQFPTGNGAAENIAPLVHEAKLSGQQSPFTHSLGSAHEYT

SEQ ID NO: 980950 - protein, 175 aa, Homo sapiens
MAEDTYRQQTEDLNKQKQESSYYNMLKLKAKINTYQRWHTGHAITKKHMRRFPYLESIQNARVVQPSPGSQSNARILGVCSDNQSPQHRRNSRCQEGSTMFSSSDRTKIRHDNTDVLQSSRDHYAIQNQGGAHATKVTAGIVVPKEKKKEVCGDSWIAPEQSNFPDFKVEHQITI

SEQ ID NO: 980951 - protein, 189 aa, Homo sapiens
GARGLRAAPSQPGLRSASTLEVCLPRWLCLPRGRRQPLRPGGTYRLRRGFGSSALLVDEELPSPSIAMLARKRLCPVSHAGVTIVAKHPTCDPPELTPGLPQARDQRDVKPPMSEPVLREDNRTHRDSPAGQNITHGWQTTPSDNKAEHYARPTQEHGATGITHGEQQEHRRDTQSRYQIINKTRETSR

SEQ ID NO: 980952 - protein, 80 aa, Homo sapiens
SFFLSAVERWVPQGRYRLYATSSSSTAGAAGNGKGTGAREISRERNVQIDGLVVYQILKRLSRQKDKEPEVVKECFGVWL

SEQ ID NO: 980953 - protein, 173 aa, Homo sapiens
SIAHITRDVNYGCIIRYLHAKWRLNILYLPLPTHEGGLYTGSFLYSETSETSALSSCWQTIATAFIGYCPPVSAKYHSEGATVNSNITIRIPYMGTDLSPNESEEATQVEQVPPFNRIHLPFEFICAFHYGSLEESTSYSGNENGIKTAPRNHLPSDKNHPSTLITQLKDALG

SEQ ID NO: 980954 - protein, 111 aa, Homo sapiens
MRFPGPPPQPWGVQVRGVLINVCGCEVHGRVSLFFYAIVPGSYTHLDEAEDLITDDSYRPCVIIPEVVLCRSQSTSIRRGSAVSCFFVAGRVRYTWVSICPSVDIILEVYE

SEQ ID NO: 980955 - protein, 384 aa, Homo sapiens
LVKDRLGGPDAEDYTFVDNTRHDSDYVHRTRQDCDLTLTRPTTFDYTTLSLDHVTLTVYGLGMTVSTCSLWLVDHLAKHLRRHDVWLADSLTERKHDARRHTANSDTLASLWHAYTSHRAFMVLTRITGHLAGILAHTINDYSPDNGASPPLWDLLNALRTCTHDSRHTTMIPRGPLWTSRILSDYTAPHASLKTCIGELIFILTRHMTTDATVLTAARMHLLLVSSLLAPLLLDYLDSCTRQTTPFISAQYIHAASGQHPHTQNDKDAPLAGGTERWQPHPCTLQHRDGAHAAGRDPEQGTRHQTHATHDTLEPGHTGALNMNKGPHHHSPGEPPNGTRPTGTGRTQATPTTRRNKHRHRTDTKHPEQNYSTPSMTTTLAHHT

SEQ ID NO: 980956 - protein, 138 aa, Homo sapiens
MSFFVEVITPMDKTEKCPTHRQFQIIAGGRTVILMVLSIDGCSNDGSQASKPEGGPLRSVRRLVGSGGALRREIGGDSQVDLSGSRLRHFKPPRTCRRAGQNVDPGAHVALERQAQSRNGPGVAPPGHNLERDETRAA

SEQ ID NO: 980957 - protein, 73 aa, Homo sapiens
EEKVAGCRVRFEKIKVRKMDSEVQRDGRILDVIDDAVREDKLPYEDVAIPLNELPEPEQDQCVAPQNLSENKT

SEQ ID NO: 980958 - protein, 264 aa, Homo sapiens
VRSFGLSELVCYSCVWRSLRKPFSASLFLAVERFPPVRVQQCRAARCADEHYVLRTLSSIVPSSLLCTALLAEGITWVPGFPGRDQVTSRLPGPASGKPPEYNKWDTSKHGNHITRAPGWRRKNQHNRQQQQQTQHADTCKQEPTAASHSKWSRNWNIPKVRIIWPPWVSHCPLNAALVPLSPYFAWVTVDSATPSFLTPSYLRTPTGNVALKSATVLPVRSHGNPTRKTGSLIEPLDYFSGSLISKSPTHTFRHAILGLGPFQ

SEQ ID NO: 980959 - protein, 138 aa, Homo sapiens
GLVPLGGAPWCRLAGSFCVVSALQGRRAGACGSGALQRSLTAGRPPSGQPHYSPLEGAYRWGATLTIRLALGLLATNIDTVIPECVVGPQTMVSPGMARFRRRRWGSLLTPWAHNNRPWGAQNFVGPSKSKEVGSGIG

SEQ ID NO: 980960 - protein, 362 aa, Homo sapiens
HKWDDISKFLNRTTNTISVKTLPMHTQTNSITNITVRNYASHNAGSLPSNSRVFYGLLTARRHYLAGQDVHRSRLGHAPVTIPVSTKHNKQFSPGHECAGFLVNPQVLQSRLQARQQLPLNLEQHGGLPADDNKLDATAPPGPGETLDDGRIHVLTQQTTHNHHEHTPPTHHGPHTKSSTNHQPKTPTHPHKRQQNSPPLESETHANHPKKRTKECTPPHVKRHKAPQHPLRRRQSRKRQIWAPKTDRRKNQNSTHNAHKTDKHNAQSQPQANRPPAQSPHTTAHTTGRHPPQQESEDKATPPSKQTYPQHATPYQPTRPLRPTTTQPTTHNREHPDHQNDTSHTKLKPTSTQPHTTPTTHQ

SEQ ID NO: 980961 - protein, 221 aa, Homo sapiens
EEKMATVWDEAEQDENGEEVLKMSTEEIIQRTRLLEQLKIKIMKEWSVEITHELQAMKDNDTTENSETNQSETRTCRTLSPNVIELLDVDPNDQEEDGANIGLDPRGRARCAVIKTLRTEVLPSCDGLVDAEKAKARRPGGCEPKNSYLILETAATEYDRGVKAIGGRRRGPTEDNTVTFGGWHKAASRELLEGHCLANEHKEKFENLGSNLKRGAVEWAP

SEQ ID NO: 980962 - protein, 372 aa, Homo sapiens
MTRRHLHANTVFTGQNDGTYTLTVCCAARGASTSLSVQRFVYGGTAVTLRLFLHHDAGDTADRGYTRTDLDGSAVPTDTGPMLTSLLKSWTGICTIDDQHLSGGLTLWGHTHTLFIPIFIGSVLYTQWTNLASYITRAKARLTRAILCHFLSWDCALLGFTRRLVTKFLGPVHSLTWTPPHRSISVGMRTLNLYSNVSDMSLPLRPVVEHHNVYPEFLPRQLLTPQLDTWVLDHLSNQLHICCLYSYEKHGLLQLSGQSGTVYLLQHTMPPLDSTHPIPLHLLNSWSRHRGSPPIVPTTVPPSKGKEQLGRPQTTGQKLDTARTRRKERGTREHGDRTPSSGTKAPVGVPHKPLRQRRQDRHKTVGDPATRS

SEQ ID NO: 980963 - protein, 253 aa, Homo sapiens
MRITPNTGAAPMTKGDLEREVGLALESPLRLGSFPIQWTSQSILTASVTLAPCAREPQQPERKIIPFGGPQHNIIIHMAEPAHMRGMTQTETNTGSPCKPDTSIHHGTQADSCPGAEMHTPDHYKQTGHIPMRTPPRNHTATNHNNNDDGTKPNASQAQRVRRTIETDEREQQKARSRSRKRTQKQEGQNITNPKHNTDERTTNNGAKRASSTQRHRHATTHRRANPPNDSEKKQTPSNGKTTTNDNKDEPID

SEQ ID NO: 980964 - protein, 248 aa, Homo sapiens
TLTFSASVSAMAPSRKFFVGGNWKDEPGGSRVWGSSSGTLNAAKVPGDPECCWVLPLVPISIRPGRKLDPKDLLVVAQKRVTNGGLTGALTTGESITPCIVESNELRNATVLCVVSVGDTSRKEEGELSLGEVRLTVCWGHETVAQCSGKKEDLGREIRLGMEGDKGKDRKGKRLAIHLKRGVLSRGRNKGHRQITCDDDGAQGSSWDPMTPCGGAWVPVHRFEQRQRGPRDVYPKNVRGLARRPKGH

SEQ ID NO: 980965 - protein, 149 aa, Homo sapiens
VELKGKRQDIDLQREGDIRRAEHVDTAEQEGQSLNASGRVIVTASPAQEERLKVDMQAMWIPQREAPQGRDAGMWPITKRRGFQRGTVGHVLIDKTERYNIKQGRATCQLEEAGPYEEGAGSGGTLLSINSHNPRANRAVLIILFPPSM

SEQ ID NO: 980966 - protein, 343 aa, Homo sapiens
KYGALVNNFAAWDHVSAKLGAAEYAKDYCRIEAISHWELQSEGGQSSSPIPCLPGPAVRTFDAYTICQRGYQYASLLPDLADLGVMEYYLMDAASYAACTGPTAMQAMGDISALTICAAPGGKTLAELQTGMSAAHLAANDLYPVPRKPDYRRSFTDMCLDEIRDRNIRLRRTPPLRLARKLADKHGGETPYATGCQDGCALNPQTATTFHDEDNTIHNRREQRHSTGAETDQWHESMPKRTRTRRPRQTPMQHHTTRQGTGEKQQPTHTHTRARNNKSAPGALGHPVKKTYRHPEPGWQKRSTASRQTTHEDRQQQVQTHTPTGLEAHQQQKTTDTTADKTI

SEQ ID NO: 980967 - protein, 130 aa, Homo sapiens
MCDLHGGHYTLASKRHTTATTSGTQQRHDLDALLTHTNTIWDTHTRVGHHDDETLTRLYSTHPCGATRDTTHRTHDTHHATTCLTHPTDPFNYALIGPLCYTTGGPGNYCHKGANNALEQRPLGDLFLLN

SEQ ID NO: 980968 - protein, 101 aa, Homo sapiens
VTRVRGKSVSKSRTAGAASSPDSRPLALLGAEKGAGSSPFVSSFFSLNLLDFQLFQKFCSCCKARKAGKTGPGEGPSFGFRASGGEGIKGHDQGFANFGER

SEQ ID NO: 980969 - protein, 174 aa, Homo sapiens
YLTGQQRQQRPTHSNSRTYTVTLSTQNFRTKTYPLFYCFPDTSDTTTHDVMARISTRLLPIKPDCHLDPARHCSCRYILTPLDHLDFETELIDTYSITDGGALHHTLAYYCLLDLRPWDDGNHLQFHIGRLYTVWIGYYRFSDSSDYLYGHHHYYYYTANYYTTDYFYSGYVRH

SEQ ID NO: 980970 - protein, 487 aa, Homo sapiens
  misc_feature (426)..(426): Xaa can be any naturally occurring amino acid
LQSTVTHRTVHTLSKCTTDSFDVTRSSWGPTVGFNFNDTVSCHTDCLARGQPLLVTTHTQLTPPTLERSCAIPMASRVTYSLTPTPGPTLHAAVLTRPPETFGLRAHHPCLHQLWPRQKIYGLTDWTGTTRLRTPPDPLRYTIHGLGQTQLGHPHTPLSTMETWSMEIGTALAPHKDEDIHWCSPIAEQAQQVDCRLMKTGTDIPPTLNATPNGQLQAPQGMAHPVAFLAETTNTGPAADGPPGPTQQQATTADHTRTADKDMANRHWGHARRQPRKRDTMNPNATTTATPAHKRAPPPRATTTVSLPPINHIPARTQQQQHHANTTIHRPERGEPRHHTGASYPEKTWGTGAHTPPPAAPPIQTHSLPPATDAHTSGPRGASHVDDHTTRDALRSTHNTRPSPHNHAPPPGNDKPGFTQAARTHXHVTTHTHTYKHTPQIQPRHDRHNATHHRPPPPSHPTRSAPRATHTSDPPIVALGHAPQDEN

SEQ ID NO: 980971 - protein, 325 aa, Homo sapiens
THRGLRKDGLYVGHGIHASCSLLCGTRMGRKATITALQHQPSKLSYSIGQWLTLIKDGPAASRTMPPLHYDLSDKSINPLGWLGPHMVKVTNDIRHCCHGCVVGITRREVLNLRQDPCWMQTEAAGSGRRLDPSDSLTTMLQDEAMADFQTMDGADKHSWDHCRHRPHWHRHTTGGLTARQHASGQLGEEVLTYTRLLTPPHNHTPTTPHTRRTQTIHAAAPTAPPHNRLNTNHDAKETRAPQHGTTETTGDPTAGHHHRNRSRRANAQHATTKLLHQPNHRRRRADTHQTRDHTHDRRRAQDTKADLKRRAKRTSRMNTPPARE

SEQ ID NO: 980972 - protein, 213 aa, Homo sapiens
MARGPKKHLKRVAAPKHWMLDKLTGVLAPPSIHRVPNKFDESVSPSIIFLTEQHFKYARDRSIEVTASICMQRVHSKSMAQVRTGYNLARVGFQWTVTQHLTQTGTRHFASRSTDHHRAPLVAVTIGTYHPDGRPQYNVVATRDEQTLRVRQQQGNSRRSWMTSTDCHDTHSRVTPESLSFTGDMTSHSDLILETWPRLRDFTQVRHLVTWCM

SEQ ID NO: 980973 - protein, 200 aa, Homo sapiens
  misc_feature (54)..(54): Xaa can be any naturally occurring amino acid
QFKLLSISANQGSQVPSTHNTDQTHNITITNLQCTSSSTMVNNGTSFHCVNSAXQHILFQGPFFIKRPPVLHQSLILFSSISHFVFYHPNPAITSSTHTCQPQPITSLHIFGALLVSIVFTPHMAKVHSTLGHVCVFIGPHLGAPFSVKNNQHSTQVKRHTRHPIRAPSPSHCNQIFLAILLKPNKQQPSFGKTPVPRSL

SEQ ID NO: 980974 - protein, 290 aa, Homo sapiens
MCETTSSFMGSRCRESSSRRRPLFDVCGACKDSLGADVHDARMGATSHNATQTVGMFEDDSGRTDAKNHGPVITRKEENADLQWIIWVHKRPVTCKERRINALVVSKGELKVRHCTKGLNQLLPIVQTWLKVFFIYFLCLDYGVGRSGIILITCTLITNCLIVTEQRNVLFYALPGAVCVLARIVHDDCVATFWTAKATDLTDPLIEGPPLTGHSSNCDRRQFCPVHGRRVACKVGGRAEDGRHGLTVATIKQDEKSMKCVSPNGAIHGTPHRQHLDAGTHKRRGRQRTH

SEQ ID NO: 980975 - protein, 315 aa, Homo sapiens
TRAPAASAGLGAAVREHPGRGPHIPRPALTPEGPPPGFLSEVLCAGPRRLQRLCRVRPSVISSGSPCLGPGAQAQSPGSARRGPSKESETANWAKQCFRTYYWLMPTSSEMNCSFTKKHFSCCPDQPRSFSLKEHILARADARTKGGAFQRNQGQQVDPEKHEEKRTDGALAAVWIPAKTAFQEGPHPGLSPVKGCPQARRHTDRWRRRLGPANNPKRAYTFVSAKSWKEQPGHMTGRVTRAGTRPGWPAQRNPRPAHNAEGAPGRSPQDGAPRTRSDTTHDDNQQAPANTRQHTHTSTPEEKTETARTRKYKGT

SEQ ID NO: 980976 - protein, 173 aa, Homo sapiens
RGSGPQGDPVGGANPTAMDQSNKSLQAPRKKKKQNNRKNLLEEHATSLRKKPLTNTYDEDQLAHETEKNTVAPADGSDYEDKAGNEKRGGATTHRIIIKHPGGETRTTGLQQHKLHQRKEWMRTTNQCEIKHNERGAQTRGWTCNSIMHIPALHLEVDRSEVLTSNTNAHLHS

SEQ ID NO: 980977 - protein, 92 aa, Homo sapiens
SYDTAQTWSQEENIRVPSVAPGRSSKGELVSLQTLKYICVCLWRLGKFNMHIVSRTSVYYYTAVVHQKSGDQDSSLTSKTSTAVSCSLDGTN

SEQ ID NO: 980978 - protein, 141 aa, Homo sapiens
GWTVSRKDGNASGTTLLEVWTASYHQTRPMTSPWPALQDVYKIGGIGTCSCLASGDCVLKPGMVVTFAPVTRYNGSNICRNMHMNALSDALPGDHVGFTCHRMCLVKDVRRGKRCLVEEKMSQQWRQWFTCQVIYHEHPGK

SEQ ID NO: 980979 - protein, 155 aa, Homo sapiens
MSFSADQIAEFNGGKFVLFDRTGDAKYHLKARSVMSFELCGTNPTNAEVRKFWEDPSNEELTCQKKTEFEQFSAYDASHFQQQGPGTYEDFVEGLRVFDTWKAIGTVMGAELRHVLATLVKQITEEEVEALMAGQEDSNGSAYKYEALVQHIMSI

SEQ ID NO: 980980 - protein, 91 aa, Homo sapiens
CNALKVVRKPVLAEDAPLGEHLVVGSICLLMSLHFLILYVEPLQLIFQITPLNVTQLLMVLKISLPLILMDETLKFVARNTWNLQYWSNRS

SEQ ID NO: 980981 - protein, 367 aa, Homo sapiens
PGVITVLRRLFSGAAYFYLRSDFSSYHKCVPTPEEDSMDMDMSPHEAPELLFSVVTLHTAENTDLLTIYTVDKLTDTTDRNHVTPLHDTRITIIRGTGCNTADDCNTMIERTQATDITEQADPQLQRNTHWKHLDTKCHGTRPPRGYTHIWAETYLNKLQRHNTRMRSYNGILTRWWVYKRDSIVAKLFTIGHHDKHIKIRHGIETGHTELDTERINKNRHMDKDRDRNRNIGLQNTYHCHRDSHFHGGNYRTRIHRITHCEIGWRSRHQRFPQTRTTNHVKTHIVMNDLCHALDNDRTRHRNGTARDQHMTRHSHDRAQDPDRTTGHRRDRNRETRTTKTQTHVPNTNSNNETDDESDMTQNNGTK

SEQ ID NO: 980982 - protein, 190 aa, Homo sapiens
DAGSRLRCRSCGRMEPLKVEKFQPANRGNGLRASDPAAAPESYSYRYGSLMAYTVCNGDVVASSDERMPYSGTETADCDALTCRYAKVLIDAKCQTESLSQTTQRDCKCLKKLQTPDILQTPYRPSWQSCLTHFWHGAPYRPSAEQLTLHYLDTGRPHPLTTTAPAQHRNSRPQATIVIDHIQHFMKKRK

SEQ ID NO: 980983 - protein, 206 aa, Homo sapiens
MRQQQMTEGQVHCDTWMEGNWFTCRNGTGKRPHLLRELMEWKTHPDTHPGNCSWALAFLRKRHDLTALLLTTTLPIGTPRFRHIAQFFLCICTIQEFSWVRCPDRNQSQDEWGMWLYFKKVTIGGPEAPKGSKAPVLLLGPTNHNEKIWGAAPKSLNLGGGKEREDVRDRERGSQKSAEVEQGRLGNRTHPSRAEQRKKPRQYTSR

SEQ ID NO: 980984 - protein, 214 aa, Homo sapiens
ALSHLARWRVTHNVDERHDYYNDDTTTPTRHTTRLTAGGNGDKQRVTLNTTTTPPKTRGSPIAAATLYLVRRTLAGIPDLPCTSRQRTMYQRRKYLQPHNIQRLTHTTHTTGQTRFSTNVTKPTLVSDQERREPEVAINFEHNASASLSLHRQHVPRNSLYSSHRTKQNPYQIRTVTKTLRAKTINPRSNNHNILNHIHQLGNCTNKEANKGVR

SEQ ID NO: 980985 - protein, 122 aa, Homo sapiens
FLSKFPQSDLLFLTFDIFMVQHCHQHQQATLHNHCYLHYHATSLHSAITSHFTVCHFHITQHFKHPTPLHFTHSQVQVHPWHPLYHSSYVRSSANSHTGNPTSIPSMHFTHFTQQQFMTYKI

SEQ ID NO: 980986 - protein, 288 aa, Homo sapiens
ADSLRQNLGHSYYTNIISYRDCVTTYTKMVSTGRHVCQPNFQTLDSDTDEAFLLDLQTIVNAQSSAGQSLMYVHIPPYIRHILRSLQDTQPYWKRSQYNMSDTVWEHSIDLLFQVLRRHMILHSGKSSLLNVRYCGTTLYISQYQLTRTSENSQHGDKTPIKCTHMWIKHSIVFRLLSKYMHELTLKRKAVRHVTVMWAHPSDYTMILIRRHDQDITNGDKNLINCTQLIIQIFHMLPIFLCIHTLYISIQITGKAISLCSMYYTRGTPKTSSLAIDSRYTLQGRANT

SEQ ID NO: 980987 - protein, 265 aa, Homo sapiens
MADLLGSIRELHGEDHPASVTRRTRAEARCDMASPPCIETTKKPLDDTNDDKLAAFRYRGCDAMPALYDFHFKPEWVNRLKETKVSYAKGTARVRAGSLHAMIVLGKLCMGGKTVPSSLSRGAQDLTGLCVHIGPCSPSQRGRLGLASSMADTMIRKPVKCATRRLGTPTRKVCMRCSLEGRARHGLALQWLVPDDRASPPRERPVVGATCHFAGDLIEWQRRLQLQSEQVHRSSMHDSLNATGANKNLPDALARTQTGANYGAH

SEQ ID NO: 980988 - protein, 195 aa, Homo sapiens
KEIPVTVYNANYEKIHQNHLTGRACGNNLNKRDHEKNRITYQVLKLKTTTYGLSTWTAGRKHERHTLTDNWLPTTRRYTNGYTKLSVDTRWLNWVTIYFMTRLDRTNFNNGPWLSAGSVHNQSPECKRNKYVAEGHKKTNTQGSPKGASYKQPDTGPVHRGKQEIRFSFRGVATKTVPPNDDKRRGHTTSTTLGF

SEQ ID NO: 980989 - protein, 205 aa, Homo sapiens
TWFLTVKMCVEQLPRLPWSRPTDHAVVAECSRSRPGQASCWAACMGQWPLLCSLPVGTAGHHEWASLTRTVGRSGFACSACGNTYHLGLMCRGTELIQKAKVSTGFMNWPHNLANWTSWGITQIGVAEVSLSRGDETEGCPLPIHAYDGNETLLSPEKSVQDPECSWGSDIIMQDGRSGLAVLVMGHVCTEALYKVNSRVGWTGM

SEQ ID NO: 980990 - protein, 185 aa, Homo sapiens
MSLTSRALTYYLPTNTWTITILDHFPLIRLHTIPYTYLHHLVHNLYTNLSTPSHVHWIGTWPLTDRHALNQRDHSAVLWYSTESPTDALTLTLGFGGSNHILRCNVCLSIGNLYLQDGDIWHGRTTTTHLANPRHSHVHRQAPTRPNVRYQQRNLNTNNIQRSLTTAGAHTTNVQHMSDLTTRLQ

SEQ ID NO: 980991 - protein, 319 aa, Homo sapiens
RQRNAKLSNMDVEYRPTPLLGRFTSRVRDRLCPDDYRDMSKVDTTAVVEQAALITETKTYLVGWSGIDELAHLWGFQSPFDMILERNRGVCWMFTTVVCVGDPPTKDVFRADEESAKPTTAGNGGHVELSYFHLSPSVDRSHGLCVLGITFSFCSWLLIHASLQTFGNLYRITTWSNKTLDRTRRLDRGHPMACVLGCPRTQQDRWAFDQTHLELIIQSTVKVVKQYINGAYGLQEETAVAVWAIVKNLITGGVEKQGVPVPPIIKGRSGQAKHISWFDEPGPRNPLDVVIPVDTVRATLGTTQVRRFEHVAKRTYRHD

SEQ ID NO: 980992 - protein, 285 aa, Homo sapiens
AFNPCSDRCVRTTLESLKLLTMSRPLSRDFYFPHKLPPKVKATAAPAGAPDTTSVTLQLTHVTKMACVDFAILLETLLLLVSSNSASLHYTLQSKIDYDGTSSTSQRTHHICLRSNNSQLLTDHTQCTPSLVFQDYNPGAQFDSQLAVAPLHTVLTGIPQTGNTPLALYEQDGTFALDQRLAYVRLSPKLVKLPSPPTVHQQRTPMYIIADPDQRERVQAIEPLSRPFPGFRYDFRTSTALMAPLYQQIPGHAPYIGHLRRQKSSEFGTAIGFTPRATWAPVGTK

SEQ ID NO: 980993 - protein, 47 aa, Homo sapiens
MLPVNLLPLGPSSYRGTNIPIGSSSAQSSENPTGIGPPIDLNYRARS

SEQ ID NO: 980994 - protein, 173 aa, Homo sapiens
GIFEEVRGTTASFSKSKLRSMTNERSFDRQRKPQFITSTNLHVLSIMTFTFLAIRSMLFTNVHTLSHSHSITLGSQTTDELYLYTVSDNRNTIGHSAGRMHSSSIASLPARLYGHKGTAHLTEPIPCTTMFTKATYNTSFITLTTPTLGPPTKHNDEIEEKPLGPTNSQKPYA

SEQ ID NO: 980995 - protein, 166 aa, Homo sapiens
MTDRGTDRVGTRRLTQETGNVTSQFQTRDGLLNDTHHDDDNTFPGHKYPDKGKGTEHASLKVYYKERPVHFEQTTWHTRTFVDRNWTGPKDKVSKFQRKKLPLQGFPQRNRIGSPPKNLFPGNSTAHTGQQRFIWHGGQSLPSVCAIYPSDDWVQFPRKATKCSFA

SEQ ID NO: 980996 - protein, 330 aa, Homo sapiens
DTHGMLSHLDVQCDRAPSTQCQKSTTKVAESTAGSLAWVLIARTDILQRFLNVMSFTQAKRGTYLSRTLLLRPEMGKTPFDHRALNKLAPDQGYYPNGPEGSPGYSTLTDKTTNAHNCDIGHFSKTIIPVETLPRHQATHYVGDRDKDYSKQFATLLNQGPRTQRWHSPTSNDGCPSAGYPLAPNRITACNPTMKANYTTWDGGYIQWAYTVGLSQTGQPPHINYPTKTIHQGHLITSEAYLEQQEHPQYPLVRHTVSQRNTLWRNSGIPPIPDKTVLETNMSSLTKMYLPFGMNNATPKVFITGRKIINGDTGRTYEHAFGPPNHNHVL

SEQ ID NO: 980997 - protein, 243 aa, Homo sapiens
KKSWQKVWQSSLYCGICKKPTQILIPTLDSVSRSHMDDHGQNVDCDAVKTFPELRWTRSPEIADQILQYRFQKTIRFYSRSMHVVSQPVRDHTFALVLTSRKTTLTLYYLASDVARGDRTLSPDPCICFQDLVTEYFTQQPRSPGASCQSMLLPTDHNWFTNLPDTPWTLNHGAWPRHSHISPAYSELLDPTSACRDKLDAHLILRPHGAKFHALAHSATPMPTTWLTRPIGFTDFRGHCMEL

SEQ ID NO: 980998 - protein, 126 aa, Homo sapiens
DSGTVTVLNSLFRCPCGVAAQPVHHVPFKWRGPRLLNSMGAFRPCLTDTGCIPGSTFNAQCRSMSFRSSGGTGILELIVTHASRCHHALVGHSPNYFVLMLTCPQDHALRSGLSTSAGPSVNCHRT

SEQ ID NO: 980999 - protein, 164 aa, Homo sapiens
MRHYNEHRHIRMWIASSVITDRCFLIEHREGWINLRTQINKGKGHQHISNVDIYAPSYITARATNNTHMNTQKPITATKRIANLYTRYSEYLPVQGQFQDVLKTVFTFSPDENDTYILRETLIPGNIGHPRQRDTPSGNSKPTEVGRHNTQNGHNTSISQSMEG

SEQ ID NO: 981000 - protein, 226 aa, Homo sapiens
NRYSTARETDEQIITKHNIARTNPIYLLHNELTRNNLARSSQQLQTPEHQTSYLRTAETEHTRSYVAKKMGTDSYGPQAAQNLTAACVITSSCPNDSNLTLPTLTITAPQENPNLTIPLSTQLQHHDRRHQTRRPTKPLHGNTQPDTHTLRTNETKNHTQHTLYTTPPLTLTQPLTNPQPQIKESTSNNARSPQAHPTTTLTITTSNNKITQNTPTYYKTLNTPTQ

SEQ ID NO: 981001 - protein, 129 aa, Homo sapiens
MDFKPTKENTDEGVQERRQNDNTSLMVLDSTCWIIGGDEKQELPGVINTWTRYLHGFKRMAFPRRQVITEGSAKNENFPETYYEDNSLPRAYNAMNALDRHEQKTHTVSRDVITTGSQGRKRHNNVGMA

SEQ ID NO: 981002 - protein, 387 aa, Homo sapiens
MPRHSEVSISINIDRHYCVSQFFNKPEHCDLLGFRNFSTNSYLGTNTTYDLTLYVHFSGHVSQLLTIKHNSLKLQFHLYNSWYTNRLLAALLLVDAGTRATLRHHNQSWAFCRRIGQFPHATWLGRKVAGHSNRQLAPGSGARWPLLTKFPGSTNIVPQGTNLLTDNTPEVPWKLGPTALLVRRKNNLRLNRRPFGNSVPKVHHYYINNAITLTPPFFAYQPTHRSHYLFDPIMHNSGGITANVRHSTPSALGCTHRARLNGQQQARRAYHGNGPSICVTGGYKPLCQNKWAGDQAQAGTRPLICPKHYVTRSAQTEHVEPPRVKSEIATACPDKLDPQGEHGPLRTRRHRRRAYEPPKKHGTASDMTIPPHEEGTKRRKANGHNKK

SEQ ID NO: 981003 - protein, 198 aa, Homo sapiens
MAVWREKTYSTLQSFGAIPIDQSWSDQPWKVTEKSSIGTMLTSILFIFQCLKRAMEKCKDAGLAKSIGVSNFNHRLLEKILNKPGSSTKPVLQPRWNVILTSTREKLLDFCQVKRHVLVAYSGLESPSKKEPWLDPNSPGALWEGQSFVPVKKHMEPRPYCLATAARGVLVRGQAQMCSDKTQGGLDPTVSGENQCHK

SEQ ID NO: 981004 - protein, 100 aa, Homo sapiens
MAIRHRGGHTPRMQSSSLQQQGPKAPTSRDRKHTANRTTRMRAKDDRARQTAQKQSTRATKRQARQHKKADNRNNTQTSGIGTDTTRASKATEQKGDRHN

SEQ ID NO: 981005 - protein, 225 aa, Homo sapiens
MSQHRTFILYTYWRALKEVFQRRGARQELHREDISVAPKISQNDQRSEAKDIFALCSLLPWGFPVRSKRVADTVIYLGLGRSGGAMQKKILVRRGGLGKKVVEDRFIACLLRLVGQTALAFPRKPWWFTNRSKSHLREGVQFRWDSVTGNARERGRLVLGGSSPSQTGAVRINLGPFPTVRMCSIWGPPGPCVGPTCLFGGVLLDLMIPIGAHLGARSPGGWPPA

SEQ ID NO: 981006 - protein, 461 aa, Homo sapiens
GSSKPVSHSKQQCRHFASIGSCSLWTAQTASANAHGTHCNSGTHPGTQGNEHSTEKPLHNSTQTASLQQTQQQGSRQFQHQCALPGILANSHSWPLLGYKGHAQSIHNRQSGISFGRHTRQSATHNPQTALGIIVWHSSFQLTFGGHIITPKTLAQHNLQFTCIGRNRFTLGPTSRPIRQDKDFQRTVTVVHEQAAELMCDNWRDTQVNFPGMRQHNTPLYYEGRNDVNPTQGQLQGQLEHVTHTGVLHWSDTGSNDFSATHNVVSQLQPQALGPFYDTPRTINYTWSTTTSVSSATHLGFRIRKTTLHRGILIRQQSNYTRKKRIHNTLGGKTTPPYKWSEHIIGNVVSVRNNSRDNQHEEGHNKRAGDNNKQQIGQIDTNKKNRNRRHKKATQRGKDPEANIVQKQTGEKNKDTQYSEPYNTDDGDSSKKRHTRHTEEQQAPEEYNGARTQLSQDKIET

SEQ ID NO: 981007 - protein, 112 aa, Homo sapiens
MWRSWTTLVLLELTQLINEAIHAWYWGLGWTRGSFQKFPQEFLFFNLTRATHLVVLTQKVPGRLTQWNANYQYCGGEDPLSCGPFTFNPKDPILQGWPLLGPFQLIPRNINL

SEQ ID NO: 981008 - protein, 430 aa, Homo sapiens
MDVTTPCFEVANARMTLLTNHYAHTDTYHGRFGKTMKRPRSTFTADPNTPRRTKTDIPTHSECGQLRKVNNTNTNDLLTQRHTHGHKHDYYLVALPGLHEEPQPAFTRHAWTRATPAQMAPKRCTTTYYDRAQHATATTAPTDGQRTPLTHLHLPQHTPPTISKASEYTGLSRQANISKTTLALNATNHYTGFPVTILTTRTHSPGGTIHMVTGQALSAGNSQMNTISTNLAQWAPRSTQRVQKKHGELHHTPTQIDKDIYGTGTGTRQVPKRGYHFPHSSTQFILSTAHLLAGAKQSKENARKYRSVTRNATSLTHRTQNPSTITQRAHVTPAERIKPGKPAVTRIAGGSEHSPHRANTPQHTLGHRTRNTYAKPPTRPTACTSPHRGTKSPPEHTGAKHEPRLTNTQRQGQTYKHPASKTNSKEQPHS

SEQ ID NO: 981009 - protein, 76 aa, Homo sapiens
ACSDTVLRRAVLWMHPLLKYCRPHFLSKLSACRQPRWKDSDGHGTLSPSWGPHELSFLVGEAKRADQDDYNQLLKV

SEQ ID NO: 981010 - protein, 282 aa, Homo sapiens
IRKGVCDANDEAAVICWCWLYLLSLTQRKEPGFRLPNHLLNRYAVKGRDLTLQLQHLQCRPQVLHYDVALSDDSFPPEDFAPSVWNCSTVHMGPDMPLLSNCTSHHCNTMTPLFNGCVNFNLSHIRHTTFTLTWPQERECVPQSAASGLLTKMHLENHATDIHVHTPAKLIDQGRLLPPPTCTWELCAITLSEGPTHPIFHVQNTSQYTPLPNSVEIQSKRLAGILIEHSHQNTIRTTLPSRALYDKQTHNQSIPKESTPKDSHIHKAQHQGRHYQRTPKEG

SEQ ID NO: 981011 - protein, 79 aa, Homo sapiens
AAEKRKRQDKCNEEEEREKEREEESKRRKRKRERKEREEGRRGKQEREGEREKEEKETQQRKEREENEREKQNTTNTQK

SEQ ID NO: 981012 - protein, 99 aa, Homo sapiens
IKFAAHQIQNRIIDVNQNRHSKVEQDIDSRYIYTDGEEHKIHEKALLYMQSVREPVNGTIAMKTYATTTGIVVGCSSNKSEHVIALFSYTGAVFQWTDE

SEQ ID NO: 981013 - protein, 451 aa, Homo sapiens
  misc_feature (147)..(147): Xaa can be any naturally occurring amino acid
GRVIAAGESSAPTPPRPALPRRFICSFPDCSANYSKSLEGFDAHLCKHTGEETIVFVTYEGCGKGLHQGLPSEPPHSDSHREKSRLLVQPMAVIKISHKIKLEEPFGPATLNSQNHIYAVWTECKKTLRNISSCKSISASIPMILYXVYPGGMWEPLGITQQAETNARPHEAMYVTRDCPLGGTNWRLLNCCENPEGDFLCEVCGKINARLLDHENLPKGCAVTGGGTSPVFHISSEALLYGDTKQCVITPPFGLMLMSGVRCVYTLSVTESSRVYEDSGECMSTTSRTYSEACELTDVWRRAAAWACVAHDESHEYDEGVSILHTKGESARKVRQRNDERGASGRDDDRQRTNGGRKENRSASSRSRRRVAQIGDRVQERVAGEAGGRLSERCAWGEEKVTCERRLRLVVRRHPKRTNKHEQRQRYTQKRKDEQDKTNDTEKAAEERHSK

SEQ ID NO: 981014 - protein, 337 aa, Homo sapiens
MTCVWQASRSISIVYWVHCDALEDVALRVIERSVPCVRPLTLTDPCVLMGMTQEDKSSTGLRYLFAISPCYWDQKQVMDIQLVHHCLVCASRQSPNNTIHLRVFYGRLKTWSEIHWSVRDKDFTNSLAQILEGAIYFSEISIRSNRWCRIQYRYRSLRFGKAVIEGHCKFDIKATRTMFRTQATAPPIVLSLDKGLRKRGPEERFAYGALQRFGSLRVRDCSPVSLLGVACLFASAVSWILVDLAMITKILGRQAERVPSTMRRARRPERCERRTTWCSPRRYGRGAHLEHLKRPWTNAAPRRSAFEHPAQERDRDNQVHLTSRAPQCTPRGPDRGP

SEQ ID NO: 981015 - protein, 336 aa, Homo sapiens
DACQWAGPDRCVGGGLHYFPLGPRSRKEGARHVPSQPRTGALLALAGGDPGRGPRRRALEPPGPVARANSPGGAFSPTASVAPWVLTLFLSFSLPPSGASPGRGCLREKPPRSFLLGGARGGPQAGDAPRGAGPKFGTFIPGNGTPREGGEPWGRAVAPGIGQGEGPHMEERHDRGATTGTKPEDKAKREDKASGTGEQRGPWGAEHPGHYAEKHTILDVVDAAPQDAEVTGVHSGEEITWGHTLCRRTTGAENGTKNARGAPRRAVKGAHREQDGPRGPGASAPTYGDGPGHADLGGRPLEQADVQRTKETRGKGHLGTRQKAEQALGRGPKTLG

SEQ ID NO: 981016 - protein, 87 aa, Homo sapiens
MCTVMAGYLDIYFEKKCHNEGRVLYGPSEHQNTLETIQYFYWKNHLQLKQVKPLKGKVTVHEEERKDPRSLTVTLTLNNSTQTYGLQ

SEQ ID NO: 981017 - protein, 96 aa, Homo sapiens
RNADGASSEGMSAVAVPKEVELKGFELQWSDLLISQHFLRNELSQIWCGKMHAHILVTEPPFWLQGCIVSTGRSERVVSVLHPWVCIPGAYLNPCV

SEQ ID NO: 981018 - protein, 121 aa, Homo sapiens
MDSSFGRAIFVQAVYAAKGAWLTRASMVSYLARHFASVSLARVVNPESLSRLQDHQVRHESQVACSMLPDISLSETRVGLDESYGTLVYAPQIETVSELPWRNHTVGDCRPSDGHCLHETE

SEQ ID NO: 981019 - protein, 242 aa, Homo sapiens
PTGCSEKPSLHCSSSASLLAAAASAARSSAARTPEFIARVPELSLLFNPLHRITGVPHHVRRSRDTSSEITTKDLYGEDGSCGTRQNNGREPPLLTGMLLRKVGEQEADNEVDEEEEKVGRKRTRATNKVMAEDRGWMSEDEEAEVSYVQIGQLKMMRMTMSGSEEAEDRREMTRQQKRTRNLRKKGRGTYTLQFPSQKLKVVLSIGECASTVVVSPQMKGLSQPPTVIATGGIDQVPARFF

SEQ ID NO: 981020 - protein, 69 aa, Homo sapiens
SLLSEISSLVNSDTYSPLLSSCCTWSGTKPDRFQASNRIVVVSVEPPRNVLCAIHRLPSISDIEGSSSQ

SEQ ID NO: 981021 - protein, 275 aa, Homo sapiens
QQMRHPMSAYFLQFDHLDSAVAGDATACLSPRCLFAPAEHALNSIYAASRCARPHSPAHRRAAALRTSGPCLLSTAPVSPPLRALPSSPLLPSTSACSWPSPPAFSPHWHPVSYRSLAALPLARCPRPRAPALPYCALYYNHPTNASATATRKLTHPSAKTDPAPNQRDTHPDPTHRPANTPPNTHEQNNRTTTAPDTTITCRTARTQPLHTQPKYTLRDTAYTKSPYTPTEQKASHNHNAPDKTPVTDQHPSNCPTTIGPCPHTCQHHPPAHHQ

SEQ ID NO: 981022 - protein, 77 aa, Homo sapiens
KQKWRLPRVVYNLCHGNASCAVSSPTLPYHVFYICLVFSLFLQDLMFQGTPFIHKHVAHNGISRAMLHPSPITPVVL

SEQ ID NO: 981023 - protein, 69 aa, Homo sapiens
EYHCCWKSYYKIKPACMIKAEESSKQEECTTTSTAPVPTTEIPTTMSTMAAAEAAAAVVAAAAAAEQSS

SEQ ID NO: 981024 - protein, 87 aa, Homo sapiens
LSVFADYHLPCNSEGWNLMHHHVEQQEQMTKINEAPSGCNIQVCRHYVDSVHSITSGMFNRGLQHDLIRYRDGFIIDKGRIGMDLVA

SEQ ID NO: 981025 - protein, 524 aa, Homo sapiens
MQPKEEPPFRTFFLLTDSEVIRPQTWIPKGEAVRWGLVPNRVQGAGKKNWGRRTRRNTKHGDVRMHRGTGAPWTNERGGGKLGNGNTHYATKGTLGPAGESEALERAIGPEIGRRKHSGRIAQRGANTGVSKTSRQHGGAAGAEEEKKSDTTRAGASNKQDTPPDNARCQINNARRDERTNCERKRTHPLETPAHTQTMSAPRTRVGRHRGEQQKVTGTRVRHTDSSERGDGTVKSRISSCGIYILLLVIFSFVSLAPSPRAYRAEKHAKMTQTQTRHAQTTTYRSSERIPPTESTDTSRNTKNTREERPHMSAYTQAKKEERGADERGEQELKCRGERAPSEGERSGRSKKKNRERGSESRGVEQEETEQESSRERGETTSRHQQRKQQTKKAAEPPDDEMLEEVQNERGGEASVGEVDVRECRSRKDGRRGWRGEREERNEKRQGAGAKIVQKRHTRTLRGHARGRYETDTDHRRQLHSEANAHSRATQATNDSSATAATTHTPARMPEHNTAQNSRTTQQS

SEQ ID NO: 981026 - protein, 363 aa, Homo sapiens
MCHKRGHCDCRRCPEDGLSAVSLKLSTYINKWGCKWAIAPMKEVQPGMVRLAGSLFALCGFGLHTLGSLAIWAPGVPHYGRVRNFNKKRARVGGEQIGAREFGGTDKLCRSVDGTNRRRGREGTILVQRHNITVSPVFRLFICRLVYAPHHDHETNTDITDAIYDSKTPTHRRNNEPMREKGGPGSSETAAPREDGEQRERRRAGHRRQDDGGPTSRGRRARTRTADRAEARAEAAGRETRKDGAQRKRPEPTNDQEQHRRRSKRRNTEHPARPGDVERHANNNARGRGQHDNQKNRKHQTSTEEDTITTRQQASTSTRQNTKDKTGQNTKEEKRRGRRQRKRDKKTKRTKNEQKDKKQPETA

SEQ ID NO: 981027 - protein, 270 aa, Homo sapiens
MTTCVINHYATEYLTSKISPRTHSYGPERRLQFSLFSHDRDRNKKRANTHTTQRVIETRTRNPITPPHRNQHNNHTSGGTENTPRRRGPTRRHNQADHTRTDDRDNTDRRRRRPEGTNEREERSCASRRAEKRDSERKGEREQRGGKRAKAAGERTREEKPGAETQQRRTEGEADTPGAGQARGERTRAAGEQHGKKRRRREERTTTRRNTRTQTQGKRTTREQQTKRRRDTQENRGRRDREPGGPTKRNRTANASNTPADRARPAADNT

SEQ ID NO: 981028 - protein, 606 aa, Homo sapiens
  misc_feature (148)..(148): Xaa can be any naturally occurring amino acid
MLERNRNTALTVTVMLHDHDLLVYSDTCAKMTSLAHMCTTGILSNVLSHCRDLPQLLESGLQKSIWSPCFVLKSRGVGRVADDSEMSATCCVILQLSAALKSSSALRGNVFPSDNWEQRVLAGELSEGVTRDLGEVPCYCPFLTRLSXKASDHEGFTNLMFLRPGPGVFRVADTEGPKSAVWGGPLKKCGYGALPQVGLPHRILHEENSDTGQSDDRRPRRVQEEKMTPHKQRGHLLIQAVFYLGFSLSTSHITLHTNTTPRHDHTQESTHVHTITHTTHTHQQSHHHNQHTAKHTPHRQATVPTYNTPPPPRYTQTTPTHTRQQHHPTRKRGRAQPRQAHTDKEETEGEKRNRRCTMQQDTTRQEDDPRATTDDEREKRNDGQPDHDRADNDETEREEQNRDNNTGAKEEKEKRDRKTREKQDKEQSAERTRRKETDTTNQTDTHTATQRKTQTKRRRRRAHVATHCRAQPKRTQNDGELTREQTTEQSMTSTKHAPGAGTTHTRRQSKPERRRKTQRNGGSRATQNAEQSPGTGRGREHKRHESTMQDRESQRATERERGGEQREDTRRQAETDRKREDTSTEAASTTARSKDHDQTSTHAQPQ

SEQ ID NO: 981029 - protein, 286 aa, Homo sapiens
MQVSNDSGEHWRPKATGRTHKDKLGARPQTPPKGHTGRTWVSQAGIRDQHGPRNSGGTNRPTTGNSGHISPQKGRATHARVVHTRASMRHCLSQCARDSVSHTHAHTTQTTTHKERGGEEGRGRRTGRQGGEQRAAGRVGGGRPQQREQRGQAARGERQGKKQSKRPDGAGDESAGGDKRRERRGAREGAGNARTERGGGRGRTERARNGGGRDAGGRAERDKEVGGGRGEGEGTEGGGRRGGEGEGGGPSSGSGEATARRGRARERGREGQEREARGGQAGDEEE

SEQ ID NO: 981030 - protein, 184 aa, Homo sapiens
MECVCVCVCCVYIKVQYVEIPTWVVRRYTQKLKKITRLDPIVHEDAQESQANSERYSPSSHTRKMSPANRYIQRALNATSSRGNPPTGQHQRRRIPATGTTGPPPTRDQRTTTANRTGPPRVTQTTSRQLPHHLTNTSHDHTNPPRAPQHADPSKAQKANETQYIKTYRNATHTEIAQTIQPEW

SEQ ID NO: 981031 - protein, 281 aa, Homo sapiens
FEGTEDWIVANKDLIDKRKCTITGLPTDAKILCVEGCEVLAWCQLSSQDTILSRILVKEISREPPEIRIPRQPEKQIYIRKRWEEAVNLVIPFPGKTKTRIHLEEGWCQKLSEESRLPLFANSESCCNHIILRKAERSHLWEDMICQVKVDKFRGRPRSLDIQIIELRVHPKLGKIEDVRGDNVRVTWDSPWLWHAGSRLYHQRVAGDLEGRLGLSVNRAHGGGLGGFSGFWTGGPGGRLRVGRGEPNGGGRGFPVPLGAPRGTSKCVQGVPAPLSVLLLG

SEQ ID NO: 981032 - protein, 228 aa, Homo sapiens
FQILLDALHKIKTKGKVGALQSKVGPDFLPVPGMPGTPDSTRAHSPRRPSENMPCVRLADEMSSPSVTCAAPDSALARLRTLRLLPDACINLTHLECLFVAAFWGPSTWLFSYRVMTSVPCKTGCGWDSWPLYRTVLPDRLIELRSCALLCWGSSSSTSIAFPSAQALLECQMSIVVPTDVGDFVGQEFAFDESSASRLRLISLPISVVIPSSLYTLTFWAMFHKDHD

SEQ ID NO: 981033 - protein, 285 aa, Homo sapiens
PHSIPTSYADFSVTLEVIFLSYQALADNLPYCNLLLRRKQEPFEYIGMVCAMISIGFLRVYRVSRTIYLLGRNRRKHTSIFHTPLPYIIAIPYPDVEQYLADSSSGLHVKSVMKHELCCSARSPRIPLSLHRRWSGWHCISRLIDVDFVLPRHVLRVAHFHYVLSIGAVFAIMGGYIHWFCPFSGYDLDPNYAKIHFTIIFIGVIYVSSPQLSRLSGVPRRFSGYPVLPRGNILSLEAILSYAKIVMSDVRACSSAAIVKPPTGVLAPLALNAYCQGDAPVPSSL

SEQ ID NO: 981034 - protein, 133 aa, Homo sapiens
GGLGSLHSDLKLVLCHKPKISLNEIVHLPCRDAPYIFLVFLFICPQHFRVAPCPIVFSVCNSAWVSCGWKVDFCAMLVSRSVPCRALVCRFDMMYLDRALVGAHCFWWKYYFRCLLLICWCLVCSPTFPNPTI

SEQ ID NO: 981035 - protein, 155 aa, Homo sapiens
QVCTRCGEEGVWPEKLKKRHVQYACRLCCSFPCPCNPDGVEQEGALFCAQASELLSCGLLCLVFTRFKLRGHTVAVPGKVYSLPRMGASYNPSSATQHLIVSCAVFLICLLLLATKPLFRFQLSHGDRCQQLTTPDYIGVTRHTKLARFTKSDNC

SEQ ID NO: 981036 - protein, 121 aa, Homo sapiens
AWWDSLIVWQKLCGMRCSPTDVFAALYWNMAARLLRKGDKSLVPWRHTEARGRPSPWVPRRYPVSVHAPATPNDSSGISRCRVAYPLYPVSTSLNVLREDSALEGLIQNEITVRCKSDLAC

SEQ ID NO: 981037 - protein, 179 aa, Homo sapiens
SSFTVISEGDAAIPPALRRRKRSRYTLHMVSLQVATAFESAPDNCTSARMPCLPVDAPMNKKIVNYANKLVTKSFGIFNPIILYNYNVLERIVQMCLKNMTKNTEGLFAGWNCVQWTFLGCSTFTPPKQVLCCAQENWKRIACGDKSVSVDQDNASFRTKTLLLTFCSAIFIVGRMGPS

SEQ ID NO: 981038 - protein, 116 aa, Homo sapiens
WLRLWGGDPAGVLAVCRRNSATEENGCSIIHPPQLVVVWCASSDQWILAFGRSQSLPPLIWKAPFSRILHNRMLVEHCDSIECASERIPSWRFVFPSVLNVCILRCDARVKTLIRR

SEQ ID NO: 981039 - protein, 107 aa, Homo sapiens
RASRRGGRGVALDPRPLQNMALQSGAERVRALLCTLRRGPCYPACALPARGPGSWGVGAVRTLPHWDPLCLSVRKFTEKPRVGKQPESGIGTVGISNLAQGRRGRCG

SEQ ID NO: 981040 - protein, 311 aa, Homo sapiens
RVRIATALRAYVLVLRPLRVSLGAARDQFEEVLGHDLFSPPDLSFQAVRLWTEEWLLTMERGIEYFHRHQANYRDNAYEFCIIVSSPSYKYPGLSVYAEAWILVTWVNVYLNEKDLQEVCVLILPWAVNNRLLLYCMIIYRSVVSEPSTYWMTPTDLEKAFIIQNIVWLSCFDCSQLMAVCVCNANMEGEQPLSDLLKNAIKREIFSSSHYLQLFDFGEGVTDLPTKELAPGACGLHVYSGRSDHYTLGGGLSLVDFWAAWFDFGHACDPTRGDGVPAGISRPFGKAPSLFSEADLRALPAPFVDFASSPC

SEQ ID NO: 981041 - protein, 273 aa, Homo sapiens
MVNKNNMKTTTTMNAGVAHSVGSVWQNTEAEIEAHGYCSRRRYMERHIRDEIDHGGQQAPAESIWKSFREDGSLRAHNTHGREKMYDLLSARTPPEITQFTPCRLQLYTAETNKKDVSNWGNLCQRSKFRFTQESLHWRENPEMPRMWESLFLSVIPYETYETSHWRETRMNVANVGKPLDNSFTPLINHYEKACVPEEALQNVKKLGQSFGESPKYTIIEPHWEKPHMLPFATDLAAADLKPLDSKLTRDKKGHSNLRTPVRTFGHGRNTPV

SEQ ID NO: 981042 - protein, 314 aa, Homo sapiens
MTQKMLSETKSIEQKNKFPLPHQQKPTLLRDISTLNLSQSLNSVTDFTNQHNRLTPNQLYKTFGTHYSYTSGLGTSNTNWRKRICSLHLTTTNLAIHHQPCNTLRTLYCELTYITRYTIRARANSLLERTHYNGHKIPILALIERVYHILRVQYHNNSPLTLYTFPHLGHTQNFPYHYPARKPKRQAKRKYLPHLTPLSGPYLSRIITLCYAIHVAQEPTCNRAPNESTDAHSNVFSTSITVFSPLLSTPRKSRGLSNNINPLLVAQTELNKITTEREYYRKRHVFAKRNFLIVGKTESLYIHTHCWSPQLRRF

SEQ ID NO: 981043 - protein, 141 aa, Homo sapiens
GLHHLTPLFFLVQLTLPCQRNQNWQQIALHSLSADRVSTTLRYHSMAHTLNAGPPRKPLMKPTDLLTLHPHSPRAHPLKHNLSSTLTLHYLTPILYQYRRLHFAPLALPPTLYTHIKHCLEPTTQQSNPLSSTPLKVSSTT

SEQ ID NO: 981044 - protein, 286 aa, Homo sapiens
MATKPTHENRRHGAPTRNKQLTPNTGDHGQFQNTNSKQTLQEARTDRRIPLDPYLPGTHGRETSIQKKDHKPQSDALTRNRTHGPTTQPPRAYTTTHNTHPQLCTKTLPSPGTPGNSPQHQYQEHNKHGPHTENTDPQSTWKATIPLPTTTQETVQARQHDPHQTIRPTALDQNRNTQRDKTETHTQDKNASNRHMGPNPAHKPHKADQTQYYKNLAQQVNSNHKPHRLETDDSNDTQLQGHSNRAHKHKRHRQQHTVPASTPPHSKTHTHNHDGGEPTEEQAAAA

SEQ ID NO: 981045 - protein, 522 aa, Homo sapiens
TKRPLYRLIRPNHSSPTSPYLSQLLAAGIANTLTDRNLKHQPLFDPCLATKHNPQSLLHKHHIPRTPTPAINPLTVTIIPLSLTKRPHRKLKSSPIYSATTSTIHIPKRSQHRLPTFVPQTTYALLTPLSHTVTNSQHSAPTPYRRLHTSRRLASPPNPTTSLFHKDKRHTYSTLHYQPTTFQPNLTTTPTYTQNLTQISTPNSDYYSPLQPGQAPHSTPSQRTMAAIHPQQTSQQRQTNTHCNHQENQRHRPQTDLPAKHPKNPPTHNQHSIPTPPPTQQHKKKNKNKKNRQQTSPAPANLSIHHHDTQKPPHTQHNKHHNTKTRPIRKPTQRNDQNDASHETPANAYRQHKPNRQTKPREYTHYTNNKSRTYVTLLPPTHNSKNPQSIVIAYNTTRQHTAIPTQIQPFYASRTNIYSDTSTITRRYHTLLNLSTTHYTTSSLAQIYNSPDLHHHIRDNHTHIHASRHTNVILHHHYSPSSNYSNSRPNSLQQHHTTQHSYTPTPHSTIPHISLHTDQITH

SEQ ID NO: 981046 - protein, 69 aa, Homo sapiens
SGGSGGDGSNSGSYSGDASRAVTVWEVVSLLGKNCWPTVVALKVGSVPCSRVCLAMAWKSGGRPRPLGG

SEQ ID NO: 981047 - protein, 174 aa, Homo sapiens
  misc_feature (116)..(116): Xaa can be any naturally occurring amino acid
DVSPFHNLFLSWKKLNMLCAIEEYSFSQATLDQVLVELTKEQRGGPIHSGGPLNSTLGWERTQEDRVVFGHWYGPVCLLGLLSFFHLILTCGLTTVSLSGHGNWENQERTLKFFLXLLNLETAVVAVLWLFFNTKTYVSFKEAACLYRQYIELYSSYVIFFTIQQHSASEFVIY

SEQ ID NO: 981048 - protein, 62 aa, Homo sapiens
MICDVTEDYKKIKKVFLMDSSEAHSINIPLVDQSMSCTSLALNGTITFELKCCGNTRVANHT

SEQ ID NO: 981049 - protein, 98 aa, Homo sapiens
MFPGDVKREVHNFDARQAVKEGKRGRTRPGGHHTRNPFQGRNQPYYGVISGRGDWRTPGERIYWLERNPHRAKGGHYGNRLGITGGHDGKRDPNSQEK

SEQ ID NO: 981050 - protein, 73 aa, Homo sapiens
ERRRRPAEVKVWRKGKYSGKMQSWSRVYCSLAKRGHFNRISHGLQGLSAVPLRTYQISRCDADVTVIGSGPGG

SEQ ID NO: 981051 - protein, 94 aa, Homo sapiens
DSGTGDMSSTHSSASLLVLKSSRSIMSCSADQIAEFKEAFLLLTETGDSNESSYCLSVSEMLRSSSWGLQKLPTKCHEVSESFMSKNSSKCKEL

SEQ ID NO: 981052 - protein, 168 aa, Homo sapiens
MPTLITEQLSSLLLLSSPPARSWVSSADRLAVVIHGLGWIRMYYALRSHSSSRECDRMRRLLSDVVPFKVPGKDTVTKDNGIRPSSLEQMAKLKPAFIKPYGTVTAANSSFLTDGASAMLIMAEEKALAMGYKPKAYLRDLCMCLRIQKINYYLDQHMLLQKVLERQD

SEQ ID NO: 981053 - protein, 123 aa, Homo sapiens
HPSKKMQTKISLSTLSAIATPRIIELAHPRIKLEGLCYERQRSELPIRPVPPAAMIAKPSPRTIALAKSKSVHQDYLPDRDAHWPVSYATTHSKASPRIQELANPNKRGVIPHSSFELEFGIR

SEQ ID NO: 981054 - protein, 137 aa, Homo sapiens
VALGTRGRSPGAYLTESAPQQASTTPGPPHVMARLRSEWACVGAAPWPLPTRPSHYAIRVPTQHLFLPGAKLLPQALERGGEAAHLDPKKPQDKGGRGGGPGALLLWDSLVCVFTPISVLCTWNQLSILVIYHYLYI

SEQ ID NO: 981055 - protein, 245 aa, Homo sapiens
KISVQSWVGKTCKVHPMHNNPSPDPKRVLTVVGSGPPDYRRTSARGAQVRRMNWVVSGYKLPSSKNPEELFDFHLSVRGSLEKVPNAVILEQGPHRGFLPPLCVLVTREQKGELEQHKAKLPCKLHFTNTGLKKRGRGNSGGGIHVPLGKVHHTDKFRARLADFERGGEYGFPTHGTGSPEEKRLTEGIPKALWIPNTKREIKNAPHYTSLSLNNKKFKPDKLYRGRADKHTALGASKGPMGKES

SEQ ID NO: 981056 - protein, 210 aa, Homo sapiens
GRFQTSLLACDSSQCKFPTSACASPLPATSQPGMAPTSLPFGTKSCGHEVVSCLDVSESGTFLGLGTVTGSVCQFYIAFSLQCLYYVREGPWHVWCRMWPFYLRRVVVQSSCGSHETALSLWARGQSLPAASVCLTGGGVPVWLLLPAVCRAYYGDHPWCSRVPFQVSFSFRVPGTSGRLDMASLRAEWGPLDLPWSTPLRFPAEVALTR

SEQ ID NO: 981057 - protein, 90 aa, Homo sapiens
TREGRCGVVSASLVALGCDSSSSSSAAGLGAVDPQLQYFFEVETQKQRFQQLVHQMTELVWGDSAWTSLGQKCGPVGLRPVCVNCVERFM

SEQ ID NO: 981058 - protein, 119 aa, Homo sapiens
MRRCYSTGMTVDRSRFCWQWKSPVHVHRLDTGVVTELALRYGMSYLAETIILHAETGLSVHLFIESPSTWIVPSLPRNFRVVFRYHYTGGIVREVSQIGTFMFRNREGDGEFRIQGDFG

SEQ ID NO: 981059 - protein, 190 aa, Homo sapiens
MVIRGVLHRGPSLLLFSGTPTTRAFPRGGGSPRGIISGTRWCWAPSFGTVFGHFLVALTRPTLVVGRPCCLATRGGIGTHKDDPGLAKEWTVPQGRAPKLEEVGKRLVQWRAPRRNGFGPGYFPKNLITPKRWRVGRSLANQRVYCAPCDLKVQFVEKHRHGWERTYVFSLVNGATGNTPRRCPLEEGLT

SEQ ID NO: 981060 - protein, 102 aa, Homo sapiens
MLSGLGLGAPLCSLPLSLWLPIVGPGRVPWLKRGQATISSWHALLHCPGRQAGVANGGGWCPQDSPSQTVFVTTWGSLSSFTKFSSHVLGGQPLRLQDGRRG

SEQ ID NO: 981061 - protein, 293 aa, Homo sapiens
FFRASPLAAAREEGEMADEMAKVRSLGWWRHDLGEASSAGKYQPKSFGRMTVPCFPMNIPPQSTNTSSRGDHPKNTYIPRFRVGTKMNDEQSSGAQPPLDLVGQRPLVLADSGALKLTGVNPDMCVVYHMKRSQIGLRTSPVLITGPSPVSCGTCRQNCIGASRGYSHGSRAIISSFFSGNVDLNVQGHFPRVMFHAVHPTTFIFGAVVVTLATTDSPHTNKLQFSNNPATSSYFTHRTTGSAVGLFTTQHSTSHHTHTPHTSCFRRHPGPPEESTSLTQTLRTGGDHHTRSS

SEQ ID NO: 981062 - protein, 355 aa, Homo sapiens
TEALAELIRSHPAYQQISRERTVEALGLHSSPPVGTARPSRRSRRMAPVQPEGWQSRRQPRQPQDTGEGTAQQCRLLAQSSTGKQHERTFFQRWSPTSELTEAFLLSRCCVYGLWTSKAHQSTKDPDELAKILGASRHRGVRHMTRRAMGRAQCLSKLLSQKRLALIQPLQGRQVPRLHSKSKPPHLEPPGIQRSWARPPTGTEQDKVSVISGLAHDDRSKQVGIHSGPTISQTSQSDVGHTGRDNRPTRGTKRAMGYNTPPRCHCVPQRTLPYLCNMDKRTAEPKHRWCTVGPNCKRHTRKIQDGSHGLAKATHQATHRDVRGQPPCAPTQRKTDGRQHSHTLFSLPVVLLCER

SEQ ID NO: 981063 - protein, 70 aa, Homo sapiens
AVLAAGITILLTDRNLNTTFFDPAGGGDPILYQHLSDFGHPEVTYSYPTRLRNNLPYVTYYSGKKEPFDP

SEQ ID NO: 981064 - protein, 229 aa, Homo sapiens
LFPFGVPLKILVSPWAPPPVVPVCKNKRYPKSRFCRGVPDAKIRILTWGENGKSDEFRLVATWCQMNMSSCPLKPWRLPELCANKYMVKTCVAKMASISGCGSTLSNVIGINKMLSCAGVDRLQTGMRGAFEKPQGTVARFKCAKLSCSIRTMLQNKGACDWRPCGGPSSQFPGPPRRSTSQRSGGFHQVPIVDDFERPGVSEKRSSKMVWGQVHPQVVASGQVGGLES

SEQ ID NO: 981065 - protein, 129 aa, Homo sapiens
MGLWAIEFFFKKITKLTGTVIQEVSIHSEGIISSTHSVKKQRWIILDFLKGCWGDVVKEDILERKCVGHNFLHELVVAETSSHILGGQKLKGAPKRRFYITENIVVDTKGGLDKEGETKRTQQTRERKC

SEQ ID NO: 981066 - protein, 135 aa, Homo sapiens
SPGWSDSAVVVAVTVCLWEALAAGRPAGFAERRGRPSPVAPQAARADTGEARRPAAEAGGSICCPGPPPWGAPCPPGGTCWRIWDSPHGGRGGPGGHNKEPRGTGGNWDQRIGGREGKPVTEFGLGFDQELACDL

SEQ ID NO: 981067 - protein, 334 aa, Homo sapiens
PTIRLVFSRYPPGCSGASVGISRWLHGLVFSHPLFVSEFATRDLVSPVLNRHGHPELPFAMDARTAQSGINRCADWEVIEHACRLIGPVSCIGELIPAHGTSFPKGLGLCPLNGVMRTLMLPDYADRVLVDRTYEAGALVRYHEAAARQGFMKCVLMSRSSGTRGIARVVTIGTDVYTHSIGTVLEFQMETLPAVEGGAQNSYRTPLIPRVPIATRALDEVKKGFPGQLLEAPRAGTLANDRRMSGGKPREQRDILSTRDRRLRNSQCARSDHGARPPVRTAPERRSDAQHVARNPGACVGPPAHAPMSKRRAHTKEARPLKSAQHPTPSNTVE

SEQ ID NO: 981068 - protein, 229 aa, Homo sapiens
MQEVRVVGEDSPWERRFQEERYVANILDLCNRNGGRESLSIGAQSMKYLHKIEWNESLASLNVTSRLVWGISLGARFIAHAGVSSNIWTMLAATTVQILGAEKAVVESPQFLDWDALGMVQFVQCFTPWSEHVPQTKGSNARLLEAYALGIENGAGRIRSAWSCERAVRPVDLAPGSTLARAFYRISRVGFLWGVPLHTVRVFTPLLEGGSKRALAASSPLSALSSPGG

SEQ ID NO: 981069 - protein, 105 aa, Homo sapiens
RWLTPCNPSNLGGQAVWIMRQEFDVAADQCGESPSLLLVRKEELPACPALLRGHMGVKKGSQTARMEGEGTSLKPSGCGCIGPLANLGSNIGGESISANIKIPGG

SEQ ID NO: 981070 - protein, 114 aa, Homo sapiens
ADSLFGLSPLHPGEINSLLLTQSLFGGLFTQTRMKFGAMTRIGVPPLGESIPSPPALCSVRKIYLVTSGPQIDQPKEHLTQFQIWTPMENRTCSTHLGSQLPEPLETLAQASLD

SEQ ID NO: 981071 - protein, 104 aa, Homo sapiens
MVYGYGCLGWITWEAMWVDACKIRELIRNRLSFGVEGMPESPKNWGVLFERLIDGLGNMDLSTVVFSEVSKEQLRGVAKSRSVSQVECRQNRRKTRLDSLHGVS

SEQ ID NO: 981072 - protein, 171 aa, Homo sapiens
MAPLGALGFCIRVVAVVDSPKKALHLCSTHTENVLSEIPDLVTSGPKYGGDHQEVNQNKLLFTKRKGGSQIDPNDGIKAGVPNAFKGGIAGLTHSGERSNQPTPANGKTVGLARYTFRKSGFPQQTGTATEQFPSMCGENTLQVMDLFGHNPLTVDRLGGAPPLRIELFEA

SEQ ID NO: 981073 - protein, 197 aa, Homo sapiens
AVAGDGDGAGPGPGRPPSGGRAWEDGAAAGERLSAGCAAAPPRGGSGSLFPVGESAGAGALWGNPGANGKSREKEALDCAVAHSPPGYCTSSRRKVTPKILGANLLAKTRMCLTNFRAQGVSQERFEEGQRHHGGGTGHPGDNTQWGGTPHRPGCVDLQETWTTATGGGQRLTFARNATNAGTARAERRNPSSKPRN

SEQ ID NO: 981074 - protein, 283 aa, Homo sapiens
KQIAAKAVQGHSWTALSIPKDQGVLSFWRGNLAKVIRYFPYQALKFAFKDKYKQIFLGGWWTSTTAVLGGTWRATWPPKVRRTDLPSVRVTLRVISTRNPALSSGQVSQSKCTSKRDVQDAVVTTVLGETFTKVRKEHSGELIPTGIPGGLPSQRQSSHLPSSTHYIPRGDTDTGAQGPNAHPDPKRDQKATTRAADAWRTDPANNRLTGLRGHRPSERTPTPLRNTRVAPPPTMNNRHTTGEPKRSRDITMTRAAPRQLTDENHPHHNDRATPPLPKRAADP

SEQ ID NO: 981075 - protein, 128 aa, Homo sapiens
RTHKGSQQKTAPNVHGLYGREYRSRPLGNIIETAANKTQSGLIVGRGVLLDGRYLHESQVEYLPGTRRRSFVGMTDDGQNGGAQSRGSSQKTLLLTIPTLGPLAYLTAQHENLVLSDFIWNVLHIAVQ

SEQ ID NO: 981076 - protein, 123 aa, Homo sapiens
INPLAQPVIYSTIFAGTLITAANARQLIFYLQVGLEINTASFDSSLYTKTNKPSFQHESCHREYFRLRKATGVHKVSFYSSYPSSTRYSVYADRVKPSNRIANRIIYSSIRVIDIGVLGKIKN

SEQ ID NO: 981077 - protein, 104 aa, Homo sapiens
MYPQVVPLFTSEPLNTARTTSQWNRCGARLGRLLLPAQPILEVTLTRGGTLNLAGNAFKRLKGKAYYPSFTVQLVLSVEMKNWDPLIKATIVLVVVSFHTSTNL

SEQ ID NO: 981078 - protein, 193 aa, Homo sapiens
MLASSPCIGGTVIPLQASLFSLFSPREHPLQLRNLLSKSGSSWVPRHAFSLVRWHGPIRSAETDRPPSRHQRAAPVETSFNASTHAERRLVAHGQQHSWAAKLLITNILGFRSWPYHKTVICALGIISSSTWTHCTSTHVITLHRNFAASLSSAVFIKCSVAKELQTTPIQFTSPQNTRKPAPTLKSFTLQFS

SEQ ID NO: 981079 - protein, 321 aa, Homo sapiens
LSPGVLDEVISCFKACVEIPERTDVMPMEDMRGPGQVVSETTVAFKIIAKLIVSDGCRKHVVICGEVQTILWASNAKMQGDPACPFACVKVGVVLYGQRMTDDVQGRTPEGSLVRTMPGSGSNVWCHSILRGQIVGYSLYTKGVSVYSSSRDYVGLGQMGSPADGLCWCQLPDCECPLVPGQNNVVSGPEKDLLLSMALGINTKGLHGAPLIMPECSCMLESRLREHRGTPAMARLMKVSILPPFSLEVAFSRWSASGGILDLKCLDPEGIWFASWGSEVPVWLDSGASVSPLYKRQETAAGGCHLRGGSGTPGAGASCSP

SEQ ID NO: 981080 - protein, 85 aa, Homo sapiens
EPSANYALASKGMGKSAVKDGQVPGGTTLLEAHGLRSLPPNLVSEPDRGPCALPLQDVYKYLGGISVLVPVGRVARTWCSYQYRV

SEQ ID NO: 981081 - protein, 95 aa, Homo sapiens
GLAGWFMVESQYFRMARVWGFMMTVVQEAFCRGAWFLDSPQACLWDRGRAVTFSSFHGVCLPWANSAMDRPGWGQSVTLSIPPAPFTRPSSSVCV

SEQ ID NO: 981082 - protein, 266 aa, Homo sapiens
  misc_feature (4)..(4): Xaa can be any naturally occurring amino acid
  misc_feature (96)..(96): Xaa can be any naturally occurring amino acid
MSSXRLYASQPSQPLNQFRRCCALLHVLDVLLGLSTLAKWHEEPLTASISRGHWDTSSLTHVQVPHGIKQQVIFWRLAGSRLTNSHSRARFAFTVXSTSVFNLNLQATRNPSHTNTIRQGTPRCNFSLVDPGNSHTTPVNAVNPEHFPHRVHTWHNYTHTHTFLTPFILAAFGHTRAPVYTLYTLGKRRAKEPSGPRAGLIGVSQLITLLYHRVEAHNDKRRVGSIKQSRGSMTYTYERPSLNTYARRSRILGPRKSPFAADSSHT

SEQ ID NO: 981083 - protein, 103 aa, Homo sapiens
MDIAVAHERWKDANIGTMRGSSGPDGSQHNIRMLKTWWECGERCGMVEPSWFVDVVVTCSVAIYTGVPVTSCLKGQGHVRLFGGFSIFRFRVPLGFDYFSFLP

SEQ ID NO: 981084 - protein, 87 aa, Homo sapiens
VSTGESVVGGPHLVAKAVWSGEPEPKECGASPERGPHFPVPCHNELVHIRDTLVMTLDMGVLIYSNTKKWAPKEMQCTWFPKWMEEL

SEQ ID NO: 981085 - protein, 142 aa, Homo sapiens
MQIFVKHPLPARGAITLEVGSPSDTSLDNVKAQDPEIREGILPLVPRERLYLCRQSAGGWANFCLIIISENESIACAMVSCVLRKVVCMIYVKNLNGWIITWNVEPRDLICVCEGYDSDTEWYHFLDQKSAYLCGNEVEYGG

SEQ ID NO: 981086 - protein, 69 aa, Homo sapiens
ATGVLWSRGAPPPPRRPDSLSLLSSVGCPASSIKLNPRLRGASSAVIKGPRVDEFYLCFCQLWEVSKGQ

SEQ ID NO: 981087 - protein, 111 aa, Homo sapiens
MRHLYSTYPWTLTQEGFNREWVLGHLDQSWLYLLDCIIGLKLLTSPHSIKSVYLKYFLPHILGSVTAVASLTSCNNLDASIGLRKESVSLNPTLRLKLPTYCIFPSITHRE

SEQ ID NO: 981088 - protein, 148 aa, Homo sapiens
MVKPSGGTNRYCKKTDSDTISRELRGNLFARRRNRDNTSGQKAKDCGRDCKEHKQKAWPGNSKFRLIPREIQHQISGCLITLHIYLFLNNLPRETTAMMASRVTSARLKKSRYQGGGPRLASFNVAACSQVFRIRARLFGNLPKNRDV

SEQ ID NO: 981089 - protein, 192 aa, Homo sapiens
MAAIRKKLVMVVMEPVDKTMLVFIVFSEYQFPEVYVPTSVLRTMWQISRWDGKQRRVGFVGHSWAAKHYDRLRASPIQIPMCILMCVAIDRPDSLEKHPRESGPRSHAFLSLRCPSSWFGNRKDLRTDEHTRGELAMMKREAGDPEEGGVYGKRGLCAFGYMACSATTKDGVRQVFDTWVPKSWSGEYDCWD

SEQ ID NO: 981090 - protein, 40 aa, Homo sapiens
MLTDKGIIIQYIARCAILRTGCSAQVLHFAHTDDTRVFES

SEQ ID NO: 981091 - protein, 489 aa, Homo sapiens
MKGEERHERREDKEETRPRTDTDSQRGSTTNQQARRTKQKQRRKQRKRQRRAEERDEKTRNERRREKKGGKSKKREERERAPAEREEERREREKRGERQAEEREGAKEEKTQEEERKKRRKKQAGEERRRGSTSDKKRREAHRRGERRRRQREQNNGKRRQKETREKVKGHQKERGRRRRTEAAGGNRRRDSDEREKGERGTGRERTEKSKRTKRRTQTREKHRTANGERRATARKRSQRTRAEREPATKDEKERDEREERDKKKKRKNNAEQHNANTPEKEQGKRRDEETHEDRRERTRDRHKREKRAVRKERARRRRRGGPEDKTEGRDGNARARRRRDRRRQKTSKEKKRKEERGRERAQGERHESTKDGRKARHEDGPDAQKRQKQEETGQHEAEEREEESQERKSNEGKTRTTKERDTERTTTRRKSERKTTREGMEDSESTPKNKPEQEGTDDETEKENERTNNTDENRQNARHRKSRHTDSA

SEQ ID NO: 981092 - protein, 91 aa, Homo sapiens
GPREVKKRELVFLQFRLNKSSEDFSAIDYLLFSSFQEFLQSPNRVGLHAGLGECLFQSGKFSGGFRTWVKMSLVKTNGGGWAWKQSVVPCR

SEQ ID NO: 981093 - protein, 103 aa, Homo sapiens
MHKSGSINMINENGHISFKRRSTKKFIKIWCILDEIFQKEQTICTHRRLKNIFLINKDVKNPEKIKEFIARGESVMKELEAVYFLRKYRAMKQGYYSDTIKTN

SEQ ID NO: 981094 - protein, 70 aa, Homo sapiens
SPPACGPRSNGGAGSQHGCLCRSRARICVHFSMCTSIWHIRDSDDHSACAEMEPPWGNMKRPARTKGTTS

SEQ ID NO: 981095 - protein, 288 aa, Homo sapiens
MVQPAPCSSTFAVDRRALVARSPLSLVCSTSVPKDQLAKFAVLLSTGSSKGIGSHKGILRFNEQSIPRGSMCTGMVTFIAPYMCTVCAQSHHMGENICTDAEPSSKHTVCILSCNAGPDKWSQFSSAWQDWWWMARLCCCKVKQDEYLEAWTLGSGMQASKSHMLTVDNSIVAVFLNTRYPSVAQEAPFNPLCSEYPRIFVLSVKTLWVQYALVLHAYVDGRDSYGYRPQQHNTKSVARARNYKPLGRPKATVPRQEQATGGTKNAGALNPVGEGKARHPRERTPRKP

SEQ ID NO: 981096 - protein, 174 aa, Homo sapiens
MRIEKCISVRGPIYPGTRSLMFVREAIARCSDFATSKCHKNFTTEKRNPRKVRWTKAFRKAAGKELTVDNTFEFEKRREVNLSNTSEELCEIRLLMRRRRVDSKSTQKRQAKFIMNRLQNNRELQKVQDIKRSQAKHSSYPSPSCGKGKHVDSENGTAVNDEAVDLGRCSLKSL

SEQ ID NO: 981097 - protein, 177 aa, Homo sapiens
MTQVVHVLVVGRSQSSSLILVGQDSFGLLVLAEKVVGTIRIVNGTLEIWGEERRDELKSVEKRWCNVALEEKGWRGTSSPASLWGPSGPNISAVDTVTVSSTKVGRVASVPLVDPRLLYGGPQFRVVLDKLSGRIGPHKMGPQGGEVGNGEGKASHEGEWYMGTLGEVSKELAGRAT

SEQ ID NO: 981098 - protein, 106 aa, Homo sapiens
MAANATTNPSQLLPSELVDNMSRIKNSHRDEGVIRKLLVLYLGFDDCCQKYGYWKDVIELESHIQVRNEGLLKLDQILLNGNKYNNAVSWRTRGPEDVNELSLSYY

SEQ ID NO: 981099 - protein, 110 aa, Homo sapiens
MTRCSTIMLIPQAYPHDRSCSIYLVLRWTGIHSVLYDLEESQWTYRMTFTELIFNYVQAEAENSTVRGGVLDPSMRRSSSRVTSDEKVTDSLKIIKHKSRLREFSLHFDN

SEQ ID NO: 981100 - protein, 181 aa, Homo sapiens
MASIITGAEVRTDSPDYKTEPGDYQQVSWLRFATCKTGEEGRLRSNRLGAYECKVGENVAMYQETVPPNGIAIRLEGSLLSNFGRKSNTENSFYSPLKRGLPGFGYSQFCACMAPSAEPGLPPRLDRKQLFQGTLSNFIHTTAWHGNIPEHMCLLEQFSGGPSENIKKKKGGRGLGRNHHL

SEQ ID NO: 981101 - protein, 209 aa, Homo sapiens
EEAQKLWEQYKEERKRGSASRKETEHWLKERAIKIRVEEPVSSEVVAIEEVKDSIMRGEITEEEPLKIVGIYKEGQKCNREVVEDGGSGGIGYTIALVTHDIPGRGKLTQAEGNRKEVEDARTDGERTNAGTLSAGTGGTQIVCYKYTPIFRATHTDASDAVQNLGASEQPMGVTGLITEGLYRHTPNKTEKVYHIAPQTLHKEVAGLL

SEQ ID NO: 981102 - protein, 31 aa, Homo sapiens
DLSRGGVRHLTLSSCEPGQDSKTVPALTLLN

SEQ ID NO: 981103 - protein, 270 aa, Homo sapiens
MDMSPHVGLKKIIFVGCVELKWPDIRFIDLSGGDIGMKIEARQFILYLQTVTLLAGAGFLTVNGFGSIVRNARGSGITEGRPFKVPLGELIDLVCTSRTGFLISGAFEYNFSDKSVIQSFESVGFYGSKSPYLGWDSPFSHARRVGKMAVRLEDERMRQVCETPSVMYLVSGLPPVRCVRAVPCLEQSSLLLVLIDDCFGVEETLPLSIFDRREFAGIGHSDKTFPEGVLDYTLRQLGEFIRMGKSHVFNPKWRAFTDNSFPTRCFHPYP

SEQ ID NO: 981104 - protein, 308 aa, Homo sapiens
ALGFGSEEARCNSFGRPESGFIRHQPLHHAAEVRPQEIICRIPEVHLEVQVGCHFCPGPKNRTPGSGLQKKWVMTCQGKGVAWKGLRITVKLTIQNRQAKIEVVLLLCPDPSKAPQRNPTKRERDREPEQIFTTQAVTFFIFGMRMCQHIVLRTRCGPDSVKAENSLDPTLHEDAWGLAQPAGFALLIGGHSLLTLHWMTAQPVGAWGTGPDQVSHREDPSLTRYVEQWGTRHKNATTQPVGTSAEQSSNQPEGRAKKKKEHWRRQNCHYGEASNKHRARATPRPAPDNEDANALETETTKTADHGTS

SEQ ID NO: 981105 - protein, 146 aa, Homo sapiens
GQRKAASFAKVSGAEPGPERFPEHPERSPRHDAKRKVSSAEGAAKERSGDIGAVSAKRSCESESEPKTGRSGRITSPAPKTCAHHNGANRGSTRGNTTRREWVNHKTLQGRLTVRAKRGESEDLEGRVHRPSGLNAGEMKEGKVLD

SEQ ID NO: 981106 - protein, 112 aa, Homo sapiens
MTVVVLLVVVSYFLITRRNSLWMVIVEPPKCRFYDWMNMGIQRPVAFLAYRVSWTYICLEGLASSIPIHQMGGLGLIIPEAIDCTKYPMNSIDSFFWFIGIRLCSYGVLING

SEQ ID NO: 981107 - protein, 81 aa, Homo sapiens
GVPKHGGGRKVHGVESRYIDQQAEPVPEMVVSDITCSCHCKTSECPTDIGCMRANKVLQREDEKKVRIMNEDSSMRERQMK

SEQ ID NO: 981108 - protein, 313 aa, Homo sapiens
MTNIDFRLLLHAVRGKRISLGIDRGEYVCQAKDTVIHFNDPKVPGISGELKRLVTITGHAETKQLRDMLPSILNQLGADSLTRFTETVRRCPKTCVTAEKHHLPTAEGCEWLEVPQSVGHTLQAGGPTNYEAPVLSTLWRNKPGRRSGAATYIMPRAQRVLDCNKPLLYHPGGAYRFTQLGLPTARDNPIREKQALRFVCLTYSTLLFIIISTRSTSIHTRPTHTSHILTHITPSIHNDRTTTRYVYPTHTPTSTPDDYQHFSTPHSRGGMTEDTSTRREHPARRPGSRPPHSTRNNQTQTNHNTRREPTHNS

SEQ ID NO: 981109 - protein, 114 aa, Homo sapiens
MTSIANLIEGGSHAKLQETRLLVVLNQKIIALLRVIPFTYEEERCLFRPPKSDGPILGDGVETPRERPLVSQILEGDAWVGGAFGGPFLKKPFFLDLFFPPHRARVFKKRCGGY

SEQ ID NO: 981110 - protein, 74 aa, Homo sapiens
TQACRDVHCVVKLRWVPGRAVGVLGGGLPQLAIDYKQIAEIPMDEFVELYRYLMNRKRKMWVPEGRFGREVDEV

SEQ ID NO: 981111 - protein, 79 aa, Homo sapiens
AQPGARSEATGNWIGYAGQAEMRLRPHYYKRSSSRCITGSSEYAFPASRYHRTGCLRLSPKERSLEVWLQNMLMEHGTE

SEQ ID NO: 981112 - protein, 105 aa, Homo sapiens
MESMCGELWQRSDWDLGTYCGAAADERSTSVLRKPFSKEKEEENVCTLNMGDKKYEDFGRVKEKGGIILFPCSVCTGEVTDANMSEWSIRKGSVVFQKAVIMSSV

SEQ ID NO: 981113 - protein, 181 aa, Homo sapiens
MTGRRSKRERGKGRQGDAGSRARERGPGGAARRTSGVGESGDHRTRPEHQRRRAAGDTTATHREGAGTPTARPKGRRSRPGAGRPSGRAQRGAPARRAPGPAHARRARPRPTTQDRRPGRRRRERRPPASQGRAGGPTAREQNAADTEARPASAHARQRRQTQPTRPGAGAARRAARQNQP

SEQ ID NO: 981114 - protein, 92 aa, Homo sapiens
MVDRYKSWACVFEGTSFLTEGVQVYILGKVIFVFNYIFTFFKERSQGGVGTPLVVCATYDEKRRLLNEKPYVRENNIGTSASKIGSLGAVKK

SEQ ID NO: 981115 - protein, 116 aa, Homo sapiens
GAEPPKMAGCNRGDGQENYPLYIRRHPYAENELKFHYMGHTSLEVVDEKIAAGGKALGDQRELDLGLRYPNGGLQGIRYVQANVQRLTWVRGVDSSKTALRDNEMRSMFPEAITDS

SEQ ID NO: 981116 - protein, 99 aa, Homo sapiens
ASGEMAPSGSVAVPLEILVLLLWGAPWRHGRGGRCGVITDEKWSRTAWKDDVDDRILCSIVVALFVKRSSTGMGKVVLNGEEDLGVNMAKVDVERAAED

SEQ ID NO: 981117 - protein, 101 aa, Homo sapiens
APEWTEDGGCCRTGGSESSVARHVSAISLAAFLPLKSSRPAACGMNELDKLYACSGCQSKQRLFTLTSCLYAHVTVLSPEHAPYFRGYKRVVNGEFRDLSL

SEQ ID NO: 981118 - protein, 308 aa, Homo sapiens
APASAGLPGAGRGVPASEPFLPWARRRKLEGRGEELRVRVNARLRARSLRDRAREPRVPTAAAAGGGEGERGGGGGSPRRGKQLTAKWRRPWLTPGVDHQAGELNDAYGPPRKLLEIGIVKQPAKRWGVGRGRFPRLRKSGVQDKSSLFSKAEAKFSLLEEDTRGTFGWAAEVNYDRESRVRSPPGSLGNRRFGRQLPSQRTLLPFLLTLLEDRQPGLDRLEPVSGYPRGQNERCFTCFDVTFLISVPLIRMLTWRGAPALLVEPGKVLCGPTVMLVQPSLCGGQLLNPLYTGGAPPSDGGGVIYTSH

SEQ ID NO: 981119 - protein, 73 aa, Homo sapiens
GLAPSAHPVRRTAMIKAILIFNNQGSRVSKFYQPQVYNWEYKWPNHMSEDTQSKSSGRLSIVVSKRDENVVIS

SEQ ID NO: 981120 - protein, 565 aa, Homo sapiens
AVVSTPECPITAGTSRGRGGADNVDVNDVDTMLVSQRDELLRHTSKQREDTVTHSRKKSTGPPHSKQQPRTRIAHPGRRPRAQPTRALTSPQGRTQHRTPRHTPRDNCNPDTPAHTSAQQFTATNGTRGPQPEGEPREQQLNTESDTRATDAQPNTHMSVRRRSSANAQAPQTPADADNNKTRERAKGTTTKKRRRARPRKEERRTEQEEQRTRPRRSPRRRQKSKRAHDDGRTRRGTRRGGRREGRRAQNRGRREAGQASPTAGENDAPATRQQINAAPRRTREMRVQKKRYKRKRRVAAANQDTRRAGAQDRPTQQPEGRQGGTDDPQRRAETQSDPHTTEHDQRQNEEAEDSTDNERTHSKRNAERPKQEERTAAADKTRLETHSKREEAKRDGLRTERQRQAEGGQAQKQIGRHRRHERDHEATPQEETREHTAKQRRRRWYIYKQYIMRDQTRQSRESTDTPGGAHNIELRTEPGVAARTARIATLQEMAAPAQHAETDRTHNRGTDKQKNTERRQQQEQPEQCAEKHENRIENNEPNVTSSRRQSSNDGAAARTGELQQ

SEQ ID NO: 981121 - protein, 118 aa, Homo sapiens
VAASGRSPPTGGWALGLCALTWGRRGQAGIWRRGRDFGAPPGRVAGRRREGAPHGGSALLAAAEPRAGAAMSSCRGARMRGLGARGGRGAVDQELPGAREQKRGDDAPEVQQLSAWRS

SEQ ID NO: 981122 - protein, 109 aa, Homo sapiens
MGPIFGYKRRGSTYCIARSVVLDPFVSDVSLTFMKRDKLEREFSLLRGIISPSGFTGPIRALQLKYRRKRLTQGRITRYPIGGEYRAISYPTLITSYAIKFTNAGFSPI

SEQ ID NO: 981123 - protein, 77 aa, Homo sapiens
PKLVRVGVCARLEGSVRAFLYLSSARVQFGDFGLTKTPWLQKSYRKRSKKKRVKVVVGLEKGYVEKRRYVECAFTCV

SEQ ID NO: 981124 - protein, 329 aa, Homo sapiens
MKGLLLNIGGQITGVGLFLCLGESPACWERDFYQGTMSGRLWSKAILAGYKRVSGTKGSTQLFLKSDRWYTPEMNNRHSTWAQEMALTVLYKQQTQHTSLLGGKPNQQPESSGDTSNLGPSGNRGKWFGAKLRSNSPAKGHGHPESECCCTPQGFKTNEKSLTSLWTRALVITKWIHEHVTSQHQTQNTHQQTHARAPPAHPRRKAKRHHAPGRPGGHRRNQNKEHYAEHTKENRRHDTQRAGHINHKKNNTGDNNKSENKPKDLQETKGKYERGHKGAHINLRRRATKPQHPSRRTPDDATRRAATHQQHNPPHPRSRTHHYETSTTA

SEQ ID NO: 981125 - protein, 330 aa, Homo sapiens
MSKSESPKEPEQAEEALHRTGLALKQLSESLRSHLEQGGTLTVTVWYMRDPNTKRSRGYRRLSHMPLWQEVDAASECTGHHKVRWEDVVDTKRAVSREDSQRPGAHLPVKKILVARHSRNDTATTHHRKQHHPDTVMATTSHVIAPHDWTDGRGKQKGAQVTRPTYRTSLPSDASHTGIQETTIQGHWPPTGHRTQNSPGQTATKNGHTRVTSRPQKNGQKARSGKTLCWKTRHNVRDPRGTNTTHNLTAETNYHGTTIGYANPHDVVSTHTADPQDRTQNGNRPTHEHKSQESTNNSSLTEPSHHNNQRATHKHNPPTQAHKNSRQAKQ

SEQ ID NO: 981126 - protein, 137 aa, Homo sapiens
MWSYKCTLITEACCGAKTLVEEMAIVLQFDCTPVTDRWYRVPYMRVPLWGLNEGMPKLSSLRKISIFIDKKRILTEISDRNMSDHVNIRIAKNEQSFWGSRFQNGQVLEVIRFKGQGQLWPRKNGYVHRVERVGVII

SEQ ID NO: 981127 - protein, 376 aa, Homo sapiens
VADAPRCRGLLLSSRPTSSHYGEPLAAGCWYSMVANMGSDLGPLASKRPKPARTGTLGGSRIPRAQAKPWHGTPLTQPQAARMAWAANASTGSGGTGSDNALNWSGTGTMAEHKPTNREGLRMGKQRPIHRAGWNTRASNGPTLRTPDPLPQWRTHHARTHKHPANTPNHMAPHHGANRRGPGTDTPAATRMGTGSEPTTGRTEYHVPADENVLPTGRPQAPNSITHYTRDGTNLLNETPAYPHRQRTHPHGHPGTTPPHPKRRLPHKGAPPSRKERSKGKHPHNNNYPARQRRRPRHTIITQTHAADSQRTTHTPPTKRGRRHLPHVTPRHHRLMHGHPHADSHPPTWYDPPTPTLSATSHGAQLTTNDNTHHGP

SEQ ID NO: 981128 - protein, 80 aa, Homo sapiens
MGNWTISRTGGNRVPVDQQKESGQQQREQQAYPLCDHRWDNFQTSLKPMVDVSCTRQRLTRHTPCREKPGNNTSTASQLP

SEQ ID NO: 981129 - protein, 189 aa, Homo sapiens
  misc_feature (97)..(97): Xaa can be any naturally occurring amino acid
DGARSFPDGRSRLVARFPNTIPRAAGAVPVPHQCRAGHATFRGRARGEGEPGADRAGNAWRNVSGANKTNGAGEQRAQIFGCLLIPASGSTHAGSFXPEGWFQQSTSGRRGCTRPKGHTDASGSKCLQANLIFRTGQRGTVGTRGNTEPARGTLTGGLYAKTKWATAQHTDTVFPVFVARLLFTQTDRI

SEQ ID NO: 981130 - protein, 95 aa, Homo sapiens
TSVAEQMATVLEGKDVGVLLLGKLKARKRQTKLLVSVFTQCNNRVFISGLGFPKKKAKHTTHKHKQNTPWWRRDGLFERHQREANALHQTPPIMT

SEQ ID NO: 981131 - protein, 177 aa, Homo sapiens
SETGEECRCVHLDLIKEMRQFLPVPCFPVVAYALLAIHPHLPQRPDRVFMLCSKEPEHELPGAGCSRGHKQQVAQMQAEVLQLRRATGGVGAARVLPGKALELIVERLSPMVAIQCDCQPRGPRTLVKAWRECLGPLPGAPGGTSWLEIHRHTSRQGVTKPQEMLAGPCPMMGGGRA

SEQ ID NO: 981132 - protein, 119 aa, Homo sapiens
  misc_feature (1)..(1): Xaa can be any naturally occurring amino acid
XRSSHVWAEVVEEKLEGSWGIVSRDVEGGWYSSDLAQGCLEDNDCVGGSCELVRYPNQIRWEPVRALCESELLTRNVLIRSVWYWRQVALHALTLGRCGLVSQSVGRGVMRPFVPRSSV

SEQ ID NO: 981133 - protein, 67 aa, Homo sapiens
EVQTAKEFIKMYEAAENEYQTAISENYQTMSDTTFKALRRQLPVTRTKIDGNKILSYKMWQREMQNA

SEQ ID NO: 981134 - protein, 34 aa, Homo sapiens
REGVRPKGDVKKPDKDEMHKRPARRRARNLRRRN

SEQ ID NO: 981135 - protein, 76 aa, Homo sapiens
GLFLFSSFALTLLLVALWVAWLWNDPVLRKKYPGVIYVPEPWAFYTLHVSSRALTLPWHQVSGALLLVRVGHGGGF

SEQ ID NO: 981136 - protein, 233 aa, Homo sapiens
MVVNRFAEVRDKTIASTVLGRTRGTSGLGIQESRWNLLLLFRDAGCGEYTRGSRTSLKDSWIGVSRDQVSDDYYGSWRCNGRRMAPVTALARDSNGEMWSAERRHGRLPSPSGSGLTRCPMSRRRWLGAARRARRASLENCEQRASCVCRGSQIGGLIFLLPWVPASHQVFHPGGPALLKSASGRVSGPFGAGSAGPVWALARTALACSKGRPGAREGAHSRGGGAHRGAGPG

SEQ ID NO: 981137 - protein, 115 aa, Homo sapiens
  misc_feature (95)..(95): Xaa can be any naturally occurring amino acid
QFGGPAGLSLASTDSLDSEQIRGLSSSLRPPSGLSSPAVLASGYHSILVPVSLLRGTLADTSCWWLWAPVCAQANRHELPGFCHDVIRTRRLECXACLDHACVECCSRAGPLLLH

SEQ ID NO: 981138 - protein, 140 aa, Homo sapiens
MRWNGLDHDLLTEEAIDIVQGGKYHACQSEEVLVLTLGTQCYLRGHFFWHLLISVTPYLGQIDEIQVGYLDKDGWPPELNQPVSSRAVAMEQGKGEKETRVKCLIIQREKPLIITRKRIEELLKETIEIGIPSPGEIARV

SEQ ID NO: 981139 - protein, 68 aa, Homo sapiens
QWYQRRVPSYGQARALHDEARRKSFVASEDRPQVGGETIEGVYQLKSHMYQHNLWEDWNRAEEMCVNL

SEQ ID NO: 981140 - protein, 132 aa, Homo sapiens
MPQSSNYGPTWNVHHNSQYTLKSDLGTRLVLRKFEVNCCSWGESCWYAERVIIAPGNTWGTSGMLAVKICLPVHVGADFPNVLVAFDCRGSSHYTADPRQPFRWAHRHSMQDADPQGLESNEPAAREALVNV

SEQ ID NO: 981141 - protein, 103 aa, Homo sapiens
MERPRAGTVSQSSTLGALRLPGPCLCRVSELWSRAAMVIVAIPAGTCRPISQYGTNTRSSRRRPLLVTSGHVPVVGRPFTVTKLKGGIHLIEEGPNIALKRKA

SEQ ID NO: 981142 - protein, 165 aa, Homo sapiens
VLHLVPLAMRACGGPVWIDTFTACEDSCAEIGSVRLTSRRNGGPLCSMLVSRAMWGPSIKGKVVVVKCFDISISVVESGYTNGAGRTDSRLRRYFIDPINRYIQHLGPASEICNPSAVTSEPLVVHSNVLGVPCQVLLGPSATMGRPVVCMEPGVTRVDGNSVVL

SEQ ID NO: 981143 - protein, 140 aa, Homo sapiens
GDISGWLTERAGPRLRGAGSLEALVRACCKVTLTSVLLSVLLKRWAGSVLYGARCVFAVSAGVHAAVVLVCVPAPLALLASPGEPGIDPGACDAPELAVALSASSFRASPGVYIERVWYIQSEDLNLEVAQVRTHRLLGN

SEQ ID NO: 981144 - protein, 97 aa, Homo sapiens
GSMVCSRKRMSECAGQEEYLLVAQSLCNGGTVTLPTILECSESSNRAYRTQVGPDQTDFEVNLHWDEQRMLVSNVRLSECGGGSVDAMENRNDMWVT

SEQ ID NO: 981145 - protein, 128 aa, Homo sapiens
DIGASLPTAATQDPETDLRDESMDEPDPSCSAWSACSRIVTLVSESHESVESYELNPCINRRDANTFVSLSAEYGELSVPERIRERSKPVHELSRDACDDYRLLERYAVVYGYNAAYNRYFRKRRGAK

SEQ ID NO: 981146 - protein, 293 aa, Homo sapiens
NSLSHLARWRVMKWRWPDTKREEAEAEKVDAGGEVKKGNLKAKKAQCRGSPIAAANLCLSEELAGSSRVCHVIPEKAMYKRKYSAAKSKVEEKKKEKVLANVTKPVGGDKIGGTRVVTTSQNAVDIIHVKMCLRKLLSQGRKPFSQHVRERVSSITRREHLIILNVPHRGERLVLHEAGGYWLITCDLTLVLNRVSSEEPQKFALQYIKIDVGCHNPETSSDADVKKKKCGRKTPEVNFDLKEIAKRGEMTKVGPVANQELADRTGRKYTQGVDTRHKKKGGGNGAKNTRHRK

SEQ ID NO: 981147 - protein, 94 aa, Homo sapiens
TPLWLRSVQCKRVRSVGVPGSWRCSSPGSPGYPPGRVGRKVCGRELLLIRDRHSIVISDVGLFAILKSLLPTYVAAHYRIHSLLCVPTDSLTLQ

SEQ ID NO: 981148 - protein, 80 aa, Homo sapiens
DCGQAARIEQDFALSQLIVLNTTDCRLSSIHHGFFCSIQVNRTERKGRAIRARVVMELDFSMPLGQKNLFQENSPRFFLQ

SEQ ID NO: 981149 - protein, 279 aa, Homo sapiens
VTEERSTSLYVISLQMSLIITFRAMELIRSNVCFETALIPTLGMSHPDEANQPERPEAQAPYRPNSTPLVGSAYPVTCIRHSDIQDSQTPLRAAVTRLLHNYNSRTAPMNYLIAPEANELNYDKSYTNSCEIVKDTVLYGSRSYELPTSPCRSPHRMGQKSSLGELSRIEGLGGYGIIRLTLITRSPEEKHIAYPFLCDYPVCGIIDNRARSAYDKIDLKALMDNIVNQADSPRSDSHLMQSPLKLNGQVLLDNRHGLHSHYNLLGDQYEARRGKTPSG

SEQ ID NO: 981150 - protein, 87 aa, Homo sapiens
KDNGKSIGSLRMPGRCGDLIMTAFTSYVPRTRSTVPFMVLVPCFNTWLWCEWEEAPEDIAVEVVDGLILRGYGRSSSFEYGYSLGDT

SEQ ID NO: 981151 - protein, 79 aa, Homo sapiens
GTCSASRSTRCYFPYHRRAYHRLHDHALHNAVFLICFLVLYALFLNSSARKLTNTNISDAQGNRDRSVNMIRARANSNP

SEQ ID NO: 981152 - protein, 50 aa, Homo sapiens
MTSDRRKLENAFRVFDRDGQGYIRAAELRHVMKTVGEKLTDGEVDGVDQG

SEQ ID NO: 981153 - protein, 114 aa, Homo sapiens
VDHWSGSRARIEHDDCRSSTYRILVVTSVSVLTCRNTLRRQRVRYLICSVHDGRFWADTLTWDLCVDHGRIRYGSSSGTAPQFNCSEASAKIAKISSRHLYTVLLMGRTKYEKH

SEQ ID NO: 981154 - protein, 102 aa, Homo sapiens
MRIEISVNLFVRPISSWITGYLMYALQLTEFVERLVSSILCKILDMSIEDTCNQEKAHIAAKVQCGIQSIPERAAGSRSLQWDNSFEDLIDRRNECYQSYQR

SEQ ID NO: 981155 - protein, 118 aa, Homo sapiens
MAGVKTVGVEYTMRIKLGTGLLCTGACKKMRFVLPPKSYGSGRLRTQNGGSDYERLREGVDVANDFIRQVSGQLLPLIPQVMDIGTSFSAKLTMHPRIGRIELAHLKNACTNCTDGIP

SEQ ID NO: 981156 - protein, 192 aa, Homo sapiens
SPHEMFRSSILMLRTSFRSLITVDSRQQLNQYCISLSSKSATLSIQPVSHLYTPECSVILVSMALRLQGDDDFTIAYDRLVVTTTYPLDHQRLNVNFISEATTESSLKRCLQLTSSLAQRTESNSSMEAKQGVKNDVRRYIEVMTLKEVRGIPSFYGRPTVGDVPIGCPECRKGTPSRMEVMIDTFARSKLV

SEQ ID NO: 981157 - protein, 245 aa, Homo sapiens
KETSSAPPNPHYCSCTDELNHLRIQTAKMVAADAIFAFINARFFISRKFQGVSSSRYLCGGSPHSTLREFPCVSDVHTHRRRTRRVELSPECCQSSPPDFCSARPVNVAKQQHDKVPESFGRKRDEVQSSFGPRSGKTFWETTEWVSRRSISLDRGNPQFDVSDTVMYLRRGKTLAVRNLMRSLTRSDTLLLRTKDISRNGEIEKPSALKKLRLMLPENTFNTLSSSPRDSDLASERMILCSSLC

SEQ ID NO: 981158 - protein, 180 aa, Homo sapiens
MSMSAIGGRKVITKSLTTIARGRLSVSTLRGHRGSERASFRVSASAVLAIVVKRVPMGGQPCRQSSTIALWVVVGLGTFRHGYWARGSADLVVTTSLRPRAHPHRLVPFDTHYLLQSCVMGPSVVPPKRVNGGLVLQSIGGAIRREIFVRRPEGTPCRGMLHGFRNSHLTGGTPALAEVE

SEQ ID NO: 981159 - protein, 122 aa, Homo sapiens
MSMVRTKGRQMSPWHMYEENRWVWHASQLRTSRYGCYGFPVPTLLVTNRNSEHSRFLFSMRRADDTIIMQPRSNPRFAVAATIAHQGVHKGTGHEIILLVVCPPIRILEHTRMTLIDPLNGA

SEQ ID NO: 981160 - protein, 121 aa, Homo sapiens
  misc_feature (86)..(86): Xaa can be any naturally occurring amino acid
DRFADATAMEKRVLLYMVKPTVFFEIAVDGRCPWIWVSFELCADQVPQTADNFRALITGAKGCGRHGFLLFSTILTSMRYTGAHAXRLTVLHLYHNGHLGGQESTLLWADNFDMSDDTFES

SEQ ID NO: 981161 - protein, 104 aa, Homo sapiens
MIPGPLIFSPRMVAYYQVDLCSMGKSIVPMATRYLSLGNFLGKMMGVVRIAYHEVRTLLTPTMTLLWSRKSFIFLENIISYKSNERLMAYARCCVKRHNCTVVS

SEQ ID NO: 981162 - protein, 162 aa, Homo sapiens
MRSIKTTRDRVPTYQYNMNFEKLGKCIIINNKNFDKVTGMGVETETDQDAEGSSSSAFRSPGFDVIVYNDCSCAKMQDLLKKASEEDHTNAAWFAVIPLKPWENEMYFWGTDGGPPNKGFDTATLGGIDANPFKRNPKSLSAAEGPRACDWIHAESGHYARC

SEQ ID NO: 981163 - protein, 156 aa, Homo sapiens
DGRCSAAVPVVIASHNLLRQQLRRSGGKVLLWGLQTRSDNVQPYRYNIAPFCFSVDGHVEDAARSEKWFELVAKAKRVACEREITTTVTLPCLSEQHAGTACQKKTQTLGGKLLARISRGRNGGLLLAHAIGRDLTVENPAVNIAEMDLKHRATPD

SEQ ID NO: 981164 - protein, 111 aa, Homo sapiens
MAEREDAAGVRALLSWTLSRVLWLSGLSETGSCPEAPDHGQRKRLEVYDLIRTIRDPEKPNTFRRTWKLVLGQVVVGSSGELNEEDISGIISRFHANSTSLLLATSYWAVA

SEQ ID NO: 981165 - protein, 156 aa, Homo sapiens
GYKFQPTVNNPYLQLPQEDEEDVHDGRQVHDKLQDGSIKMKPLMGVIYVPLTDIMKSMWSRCTRDFIFCSSFFHTCKGMHCKMQHQLDQYKTPLVDCSVSVLKSFLKNQHHHSLFWTLFDTVHFSRMNMCCPTLGLLILQEEAHEAKIGRVKDATV

SEQ ID NO: 981166 - protein, 69 aa, Homo sapiens
ITPLGQAVIYSTIFAGTLITARKLALIFYLSRPRNKHASFYCQLQPKKNETARSTEAAIKYFLTQASDP

SEQ ID NO: 981167 - protein, 105 aa, Homo sapiens
MTGYTPDEKLRLQQLRELKKAMAEGPGAEPSGSRVLPPTRKMGPMEKIRGNKILENKIPLGGKKWAQWGYTKRSILVFTHCTVYPVWDYPLLHESISVFLKNHMA

SEQ ID NO: 981168 - protein, 173 aa, Homo sapiens
MFNAPRYPNRAKVSIIDLFLNLGYLYEWSPTRVQLSLTFNQLIIEPAREDMAGLDTAKTEKTLMELVISIECKQIPNKHHGVLKLPKAALKNFELEATILEQEPNAPKQYMRIDFTQCKANCYTQCDPLICDQWKQVTLGITAASPILESISTNRVYDTRCGMQDVLQMVQPY

SEQ ID NO: 981169 - protein, 114 aa, Homo sapiens
MLTKGEKILLMKCSQCHTVEWGGRVTDRLGPDLHGSLCAGRTGQCPLVYSYTVRPCREQRHHSGERLHCMEYSENPKEVHPWYTRQVIFVGHLNERNGKERADLIGCICKDIRY

SEQ ID NO: 981170 - protein, 66 aa, Homo sapiens
MVILALDTGRLDTGYWRVWSAAFGGLARRAGPPYKGRREQPLVAAPQFLGPWAPRPLWSGPGAWTS

SEQ ID NO: 981171 - protein, 91 aa, Homo sapiens
SHYDASLPTVATAREPEIDLQDEHHDRDLYPSCALRGRLESASNFVFSKYTSEDAWDLMNLIPFISMGRVATSAFHIPLHDQEECDDARVQ

SEQ ID NO: 981172 - protein, 206 aa, Homo sapiens
MCVHDDFERRNRLVSRFYSHPVLAVVAIVRHRDESSWVPGYMRSCKPIDGKLCMTVRKLTLGPSSMPAVTHAVMKSSVITIRPESKWLVLMPCCYVYMRVFMYLCGYSQFKAALMEPYVFIEGGVAMIPFFCYRLLDFVSQVRRGLLLSSRHLFCLEIKMCLGINYLIVRYQDDPPWPWCSQLASCSLACVFGLIHHFTDCLITVV

SEQ ID NO: 981173 - protein, 216 aa, Homo sapiens
MLTLLFLSLWLRKERLGCQSHEAAVIGGCWLYLAVYVKHAEKEPGFGLQITAEQIRRAKGQRPEACSTDESSNVGSSAALDVRTYLMIPSLQKYFGLVSVMLNVIMGTGIASCYQVSSQHPVVLRRLSWLVSFTRSPRQPLVTLAHAGCARCDGFYQCTCSCDGDPGSTGTLPRRFSPHCSGLRQAFWGHVAFPSIRAPPCYLLVPPTAAGPIDVP

SEQ ID NO: 981174 - protein, 221 aa, Homo sapiens
DTQHGMCAECLSELHEPAWVLYTFDPARGNERQQRVRDGPHRSMRRSRPSSCAAVYPLHHGTSGGSVHCFRSRTLSLQGVVLVSGSGRRALWRSHRLAGDPEGFIVAHFASCLRSDTKRFWSVFVPWADAHSTPNVLLLGIRGGRLRLLAGFIGSGLQYSRCIVPRSVTGNSGVSAGYARRKMRSLLAFELVAASEAPVGPTPVCVVWRIDSCCTGALLAW

SEQ ID NO: 981175 - protein, 141 aa, Homo sapiens
MSPLHHFRRHLRLNIFVATGFHGLHVMIGSTFLTICLHPPTNIFTLSSKTSLRFEAAACYWHFVDVGSDYFCMSPSIAEGLYTKQPPITEKTLPLFWGVLPLPKKPFFNHISWAAAAPMVSYHLRKQGSSETRGLNPGGGT

SEQ ID NO: 981176 - protein, 198 aa, Homo sapiens
DFMLGAKSDGETILRRPPVHLPGAGEWLESVALPWQDHGVFSKLQQNNERRAMSSFEKFSHMDWWLLDLQSYDGDAQGREEIDSIFEQSRGKNCNRSDVMDRYWCGVKPNYQPQCEEEPSTDTGPPPTGAWLNIDIDEVVYDEDSPYQNIKFYTRSSLEIFSSLVGMSLAESDLAYTRAIMGSGKEDYTGKDVLILGG

SEQ ID NO: 981177 - protein, 145 aa, Homo sapiens
MTTASTSQVRLEFSHQDSKAAIIRLINPVDALRLRTVLRVSNALTMFAHRVWIVVFEADLCRDIRSFTNSSMRRGNNCCEIDWKLQDPHDVAEVFLSGYHSSPQTVMDCEKRVRNASEDVPLPFVDYICESGPLLGYCSELGNCQ

SEQ ID NO: 981178 - protein, 115 aa, Homo sapiens
EDLTREDRRPPLWILARPCSTVAVRACFPYHAVRLLCQLFPALASQPCSALYGLYCTSWIMGLATFLRVLCAPSMRALSSRNIETTDLVNFVVSESIMEFYLWLGFPVIWRAGYE

SEQ ID NO: 981179 - protein, 194 aa, Homo sapiens
MTTNAGPLHPILASAPKMTTLYLMTAPQLAYTGRGRFYVTGVFSRDHMAVVRSVLLVVPIVDLAASVPDAGLQCVGSFTWLIEGLVLVSTTNDLLGGTHAFVISTLKRVCQWVDRRYILGDNFTVCMKPITAAMLGDHSVLWDGDSPFSGRSPPFITTVVDAEGTETIGEDVRLTSVDRATAKEFQYGELEQPL

SEQ ID NO: 981180 - protein, 307 aa, Homo sapiens
MVRPRDTDHLVASRYARPREYVLSVIVATGYKDTGHGRQSVVCGLAEARVREVGCGLITEWNKIQEDEINAGPKPCESQDGPLTAQRNVYNNDVYGSRAPPFGHVLSKSCKASLTLCASSVLMWETIRDLIILRNALDLLFAKGLPEVISRLADLRKETEQSTHIRFTHFQLVTVDPQLGKTSLSWHSGSGVHLQNLEAVRNDLELRGSKEYNVHSGQVREGHRGGSPKGRTADTPGGTRRIKKGSLPAGAVTRMGIEAWLAGSRGLSAKMTDNPLRHKERGPRHEGQRAQQTVQRVAHMCAHTLAS

SEQ ID NO: 981181 - protein, 79 aa, Homo sapiens
MGLKCHLLRFQDDFVSKEITGQPKGSGAEKGQIGELKACAREYIGSFWVRRYTSQGDIRGVPCYFVSPRTNACIKADKS

SEQ ID NO: 981182 - protein, 120 aa, Homo sapiens
CSFSSRPLRATRVPTAAAAWGRAERGGGGGSPGAAAATAKWRTNVLTPGVDHQAEEPEMTLRTPPALSSKIDVSNPAKRCGGLRAGPVFHHIHETFGAQGNFFPNFKAESTLRCRQKGYG

SEQ ID NO: 981183 - protein, 120 aa, Homo sapiens
MICMHEDVPHVPSNPLDKRRLLRNDWPQYISPWRIVWSGSTWWMATCEYFITTCTSNYNLWISNLDVKRIPYVMSSHLASIPQKVHSYDIEMIFVRHLRRRAEMGMHIHITSYSREEHGT

SEQ ID NO: 981184 - protein, 319 aa, Homo sapiens
LLSPGVLVEVTSSLDPACESLTHRRDAQGRQGDLEVQLSFLKIIHLLDDYPTCVIVGADNVGSKQMQQIRMSLRGKGCGADGRRTCMHALRPSEGNLENNPAAGETAASYPGAWWAWCAPGGGPPLRIRALCLLGAIKVPACWPCVVPFAPCEVTGASSGSLALGPVCRSPLSWLWYQPVNISRGCHCIILSDVLAGSRHGVYVAAGSEAGACWMMFSLFPFYLGVVLPEVFDGGVALDPWVLISRGNSGSLLPKCCELCLLLGWDHFDRRRFNEGTGVGWGGGTSRGGGGDAWGPPGPLVAWRNARFCPPWLTPRGVG

SEQ ID NO: 981185 - protein, 305 aa, Homo sapiens
MRAGRARTAGGGGADLAPGWLCPHLVASVKREPPPPSVGDSGLEAAVTPCPICLGGSITGPWPFGQFGAHNVSWGEVVSKPCLGGLPHSPVCAQFVPCLAFLNPNRGWTGPTPCWDGRAPHLRKGRPCRRLQTKKGVPSWGKIMRGDNLGSVPERVQGARMANGPPLLRPRVCPTLRGLIPEKYPQRSHHERVAVWVPHVDRRKPGKHLGAKPRKRPKLGVVPICRMAWGDPDTGDQVPALCHETFPRPFVTQFAEASRCWLLWTEEATPAWVGPLADWWLRGSSYVRRARIAAEASELSTLGFR

SEQ ID NO: 981186 - protein, 88 aa, Homo sapiens
VPTAGSSGGGGEREGAEGARGGEKYSEMAEDRWLTPRRVIHQSRRNPGIERAKRTPPGKTSLEDLMVKQPAQTGVGVQARGAAVYTTL

SEQ ID NO: 981187 - protein, 165 aa, Homo sapiens
  misc_feature (164)..(164): Xaa can be any naturally occurring amino acid
MPYSVAVNPKPNWVSHSSEVISIEIISVNLAPMIHPYMVLLSVSNSAGPVPSDSSLASGGPGPISGHIHSCFCTWTYAPLRRPASWSPASFTFLRYPLRPSINSVPSPQFCTPTEFFFWGRSLPRQGICPKKGSPGEEAGDQLRVSVASLCVAFCAERRSAPPXG

SEQ ID NO: 981188 - protein, 105 aa, Homo sapiens
  misc_feature (44)..(44): Xaa can be any naturally occurring amino acid
SKMAPQSVSVHNQKSLHVDSLRDGMYETSCVSIHENREGSQWWXRQQRRELEGTYPSVSTFYESPAELYNSHRDDLQSRWESYVKEGLDRLFLVLGRTSPWKIVV

SEQ ID NO: 981189 - protein, 489 aa, Homo sapiens
TGSAAGAAARTRSSGPPPPAAPASRVYPRALEGGPPALTSPRGPGAMAQRKIAKEQRNSSSRGFRQGGSTSAAASKPRGPEEETKHWEDTRLGGKARLSGHFIPSTVGNGGMGSGLAVWTSVAVVDKIWWTYEEVLGKPGIYDADGDENWMWMMPKFYRTYREIYFRARSPARKRLSTHGAREQVPVGGRSQISKMKQEPSGPLQEGYATCGGNWPEWPGTPEVASRQGKHRPNGFKRVTEDQTKIATYGLSVPVVVQPSISGRIAERSRTRQYSHTRRNETRATRTRPVALPVNTQPERTSHETKQAPSAQLYTNDTCQTTEKKDREETNGTTKGGEDHKETRTRRKGNTTRQTTNEPTREERAGRQERADGREGDEKGTTARGAPTNTQGERRQTGRSKNQKRRDKGKKKKRKKSTQKNTTEPKEKPTRKASQHRHPEKQKHKRTDRRRTTQEEEKKRNERRRTQKREAGDEGHNEQNRKNTEKNKQ

SEQ ID NO: 981190 - protein, 218 aa, Homo sapiens
MGMERVTSRSRAHLRNLGCRSGMSTLNMHLTHKAKTPSPRRCMSLATSEHTTPETNSPRTPGKRTWYSCCLRSRLVTQHLTRRRTHPVDCSLSWSAHVARGVGQHHALGQEDSYSDGHVSDVSENLTERLFWIQAGTSVRDEELALIGVRGDLGLDRADDVELLQRAEAVAIAECVERVTECLRSMTDKSMAEEEAEDTVECGGSRTVGYIDANTLTI

SEQ ID NO: 981191 - protein, 67 aa, Homo sapiens
  misc_feature (24)..(24): Xaa can be any naturally occurring amino acid
  misc_feature (32)..(32): Xaa can be any naturally occurring amino acid
  misc_feature (40)..(40): Xaa can be any naturally occurring amino acid
  misc_feature (53)..(53): Xaa can be any naturally occurring amino acid
AKSMLNVSVLSDAEDDVLMDVLAXCKQLITRXNMRLSVDXKCLEQIIRLVNVXSQMLAIGLYNVLGA

SEQ ID NO: 981192 - protein, 102 aa, Homo sapiens
LVRKRVCLSEHRCRENYPVKAKHGTTEEDSISTIVGRSETAVDFWGKVSPAYWCIVQSNTTGAWPSEQQGYQFETTLLHEQDALAWRLRTHGLPFQCYALAS

SEQ ID NO: 981193 - protein, 85 aa, Homo sapiens
ASPLVHRWRLLLLPLLVLFVCSSVRDLDTSFVKRHAWGDSVRFAMELMSSPMEGVSLSENKTTLVLYSEGGGTGMDACVCTSYPF

SEQ ID NO: 981194 - protein, 109 aa, Homo sapiens
MRAHVLVWGVYHPDVFPGDIHENSALEYRGHHYKCANANVAYEYQYRALVFTLCVPILSGVGRGWSKHPEEKLYIYFVFRRCGDLLYTSALFVRSCRLHEEGSPLGKKE

SEQ ID NO: 981195 - protein, 108 aa, Homo sapiens
MRIEKVLFLFGAIYPWTRMMFVRKDCRGVQIMQTLNVIYNFTKKRNPRKVRWTRAFRKAAGKELTVDTIHLKFEKRQKVNLSTYQRELGITSIDASERELKNSNEKAP

SEQ ID NO: 981196 - protein, 316 aa, Homo sapiens
GGSRPERTNVSAGAREQRRGGRRRHREPPSELGRKRAKTQAPEQVSVSHGGGATGMPRTERAGARSVATGIYEKRELRKTFTTTHGGIRQRRNARKQTTEGGHNMQVQLEKHQWAEEKEEGIKRGNKRGSSTEEFHAGTKRQKSGTEAEKTMEPYACKVLEQRRSESAEQQRVGGTSRNTKDSTGETTNGADYTTCERERTEHTLFETPRYWASEVTNDSARGIGRIRESKQQTRKLWVHAPNRRYIIHRVNPNQGRTVVDGRRKYKVEMSERRPRRHQWIDRQAALRNTHTTWVDNSGGGHLRSETRIWKAPLKH

SEQ ID NO: 981197 - protein, 95 aa, Homo sapiens
SFCLLPWDDTARSPLLDVRALDLGLLSLAELGAIEEYCCPIPEGAKRIETDILTHVTIQHHLKPLLSSWVFPGTHHTSRTDGGLVHLLVLVCLEL

SEQ ID NO: 981198 - protein, 172 aa, Homo sapiens
MQDTKANTNHLSKDRPSIRDNPIYYLRSVGLFAGFAEPFYRLQCQLPTPPIRRSTGRPTGHSPRCNPSRSPTPKSLPYDSHQEYHAPELHHSLIENWRNPNSSGIGFMYKFVRGLYLDPAYKASESPSSLPFTILLTAIYGLNIPGTPRGPPDGTSRIDWAQLPHESCFIRK

SEQ ID NO: 981199 - protein, 103 aa, Homo sapiens
MYTTRKATVPYGTSQHPRWSNKGPSMTGSNALWYRPAEVNSIPRACIAEHYCHSPRTSHLTAHYGGPLEPPDQGFHTADTDLEYGDVDHCLTFVRGIYNRQSE

SEQ ID NO: 981200 - protein, 95 aa, Homo sapiens
GLVSRRRVRAGVLCVAVAGAWDSGHYELVVSTEERAAPFSLRVPEVFLRNEKGQYISPFHDIPIYAEIRMCSHGQLKYHAWSRCEKVGIANKVTL

SEQ ID NO: 981201 - protein, 112 aa, Homo sapiens
MTSAYGELHQPNCRPIITSDGRMIVGTLKGFDQTITRYRMKAMNEYTALHREVEQVVLGLYMYAGDNVASHWTNIDEETEFCAWLGRNIRAEPLKFCSTHMRHNNYHTLDIC

SEQ ID NO: 981202 - protein, 95 aa, Homo sapiens
IPNGESELTDCVFALANRYARIMYDHIELKEQNELNSIEAFLTTLDQKMVMDTNKQNIGGHCAYPVSDCISVRARSPSTNAVVIKRQCINERYDA

SEQ ID NO: 981203 - protein, 120 aa, Homo sapiens
MTYTLSEYAKDNKELFMRIIDPIIVRATIDKQYHSQLKAPMIGRIKYRKRSLEIPFHDTPQNGVIAGQYETDRKVSISSRLPAGCDVVIRIVGKTWLYEIHEYATLLNLSRRKRALLFLE

SEQ ID NO: 981204 - protein, 262 aa, Homo sapiens
VAWLVVVPLLGVLGWRGRRWLAGHGLRRRRISRDGYFLPLLAPWEHRPAPCRDIYSCPRIASSCVKYRERLPGQRPRETTENLCSAPLPKVSQQTQEARCPHGLGGGHTQERQCNGALESPTKGTTHHHIHSPPSKLVGNQANLYNNAIAGRRRHNSETRIGARHRAQVATRHGNKGLPRNTPQGVIPIPHGGTYKSVTVTGQRGNPLAGSPVAMQKKNQNSRVPRGTPGIHETTIGKKDREWAPGQLQPHAQEQRRTNRGS

SEQ ID NO: 981205 - protein, 254 aa, Homo sapiens
  misc_feature (65)..(65): Xaa can be any naturally occurring amino acid
GLLFQVPCRELSGPVICERFTDVSKSGHDVPVLPGSYGRVVSLYQLHRSDKRAWYHVSDSLIALXWDGTWPARVEPFGEVRSRPYFTCRDISIRSIKPDRIEGPSYVQFISRCVPALTDNSTYGARHLHSKPSVIRFMKHELCEDAFDKNLERAPSREPRLWERVEEAHGGVSDLGAQGRPKFPYSNVGTSLCNLPITIARKLRGVPFHNNYTRKDTLGGTSDILWTLHLRLVGLCAQAIVLSVDPNLLAGYLA

SEQ ID NO: 981206 - protein, 206 aa, Homo sapiens
ALFARNRHLPVIRQNDEHNGNEERHPIYVSEALYAKHGRVPLITYMRIYYRNGDMVHIKANGYCQKGMPQQVLPWLELEQSTMLPSMLWALLLTIKLRARFLPRELSVRIEHITHSKSRDSFLKRVDGTMISNKEKNAKRERYLGFILKRQACSDLRRLRTFVKPTGKEPELWNPILYEFMAFFGCSRNLITASGLRNLNGNFLWV

SEQ ID NO: 981207 - protein, 102 aa, Homo sapiens
MRVYRLRMCKSIPLSGFSLLVLLVQRVRSSGRREPQEQDVPPKNCSRGQNRDLLTRASKLDAEEPRIGAGLDCPTSGHFFIPLPESTRLGDVATIQKPSHDV

SEQ ID NO: 981208 - protein, 146 aa, Homo sapiens
GREMRVCSWHDYRLGKLGAEIDDRKPRLTELLADLYLRCQKEALAEKEHKVGKEYIKRKLAYGVSLVLLIEAQVPDPEPARVISICPMSLVSHVHLAFAGDIYSEEIDGSDLFPGPRTLREMDDRLGGLVLIGVYLGSYGREPKID

SEQ ID NO: 981209 - protein, 60 aa, Homo sapiens
MGRYCSYGEPGDWLNWPQECTESYLKRQPSPVATYQGVLSVLTYFIATKFGPGEGGMAPG

SEQ ID NO: 981210 - protein, 37 aa, Homo sapiens
MCTPISSSCHENLELDTERYSGPIPYVPGDAKHVVNA

SEQ ID NO: 981211 - protein, 163 aa, Homo sapiens
MVQRHQEEQSRVVTDRNEDGDRPVSRTRSEKSLTELFFSSRKAVGDRYDDAQSSLGGRAELNRAFVLRISTASTCHAYGPFAFPRPFALLSPVCLYLLYAVYPGSLERPVAFLNLVLLRGNFTGSESQGSVEYSDLTKHKSSAFSPRRLKAPCRCWSKVDLQP

SEQ ID NO: 981212 - protein, 113 aa, Homo sapiens
MAYWMDSGRHSLNVPRDASLSPVSPGSPDVTSKAINLPSPCPPGAESLVFRPFIASQRFAYNVGISLKGARCGLVAHDTTAALPKNNYVQEGGGHMLKLWTRRLMEARRKAMN

SEQ ID NO: 981213 - protein, 145 aa, Homo sapiens
MASLREDDLMFMVPGFFQPAALHSNHRTIESLLLFSHAFLALPCKSRGLLLKHLVVPSQCGTMSFMVAEEDIVLALLQVTPVAQLCQQEVLTPWKTLWTFTMVPADWLKLPLLWKNARYLGGEGLFGKKKKGAPKLGGKSCVNRT

SEQ ID NO: 981214 - protein, 114 aa, Homo sapiens
DRRYQIDAAISDIHEDEKDSWSIIVLVPDIYYNQHAKTFQVTAWRFDKENSESLIDRDYMERAQRLIRVSTYLRGLTTILLASVAPFMQHHRSNVPSEDRKATALLSLSGWTLN

SEQ ID NO: 981215 - protein, 44 aa, Homo sapiens
MNCRVPKRLVWSTNGIIVTRLISPLLRPTGVTDYPYNPCVGSYL

SEQ ID NO: 981216 - protein, 308 aa, Homo sapiens
GRARWLTPVIPALREAKRREDSLSPGVRDLPGQYSETPFSRKRKKKTKDKKNKHKNKNKKLVGAPRWAPKKSFLNPLRVGRARGRPSYGNVTHLSLKRRWSPQRNPPAPTAAQRVGGFFPPKKKKPRRGGNTRVFLGTTPERWGGERPKRGLLSYTRGGVSKRQAPGSIKKITPRRGGRRRHHRIRHTNNNTRDKNTRENQEMRKPHTQRSAHHHQEQKTHTKPDRQEETTHRDTNPRPPETTTTHNSTEHTNTKQKKASHISQRDRTKNRDDPRQQRTGQTARIKQHIDTSQITRRSSNTRHDTTKH

SEQ ID NO: 981217 - protein, 70 aa, Homo sapiens
LCCQGECQCLSLDLIKEMRQFCQSLCPVCAMPTETSIPRLYPSLAQYQASCLCSQVTRARNFQVVLVHAE

SEQ ID NO: 981218 - protein, 112 aa, Homo sapiens
MPGPPERQSDGAMKDRGTTDAKDGIVMETKQEEGVSSVSTRKEVNKYIPLSAEVWTICNVFLLNRGDPFTIFGHKGRGANIFVTLGEEYIFPRYKENLVELEVYTEGLTQPG

SEQ ID NO: 981219 - protein, 110 aa, Homo sapiens
MLTKMVNGTSRQIEKEVGAVDEISWVENPHQKHEYTDMINEVDADDNGTIDFPEFLDNDGRKMRTQTVKKKLEKAFRVFDKDGNGILVLENFCHVMTNLGEKFTDDEVMN

SEQ ID NO: 981220 - protein, 178 aa, Homo sapiens
TADNAVRTNMQLKEEWKIKRLNQQTDVSEHVFSIFKGILRKIASRDSQVGDLVLIIQMNAMTISVLYYCVVLLYDCCLHSDVSYLPWIWPNSKLQGASKKTLGHLEKYMDRRIAVKPIRGKTDLKFLGGLVDGVKPYHANRNVSVMDEINTFYDSKPIRPDGSFINPETAASFHAEVR

SEQ ID NO: 981221 - protein, 123 aa, Homo sapiens
DEVHRRGKSGCYVVHASTPSVFCLPFGSVVGADGSCGQRSSFELVAARLWVPGYLLEPFAGSWRVGRCLDAVIGVPAFARQVVPGFQSRQRLLRFNTVAITWACASSNAPILIECRPSVSIRD

SEQ ID NO: 981222 - protein, 57 aa, Homo sapiens
MAGYGITTVVKISVRASTLRGLSQGVPGNPAVLLGWGPCLLVILCVAAFRLVAVVGP

SEQ ID NO: 981223 - protein, 101 aa, Homo sapiens
SRSGRRASPALPGSCARYPGSGSRLWKLPWRRDGPRGVGRVLENAVLRVLLSHGVLLMTGYILLHFLPQGYREISGSYKARDLIPNTQSTEPSTRGLEMNR

SEQ ID NO: 981224 - protein, 226 aa, Homo sapiens
MGPSRPKSAPYTGKATTGQQERRRQQSRAQVHKYVTEGRNEPRVTRGRRSQGAEIPGPRDRGQYATRHGHPAQCSQHEGGTPNDEQPGTRCDNRWDHVETDWQGQQQAAGNTEGVICGSPDVAPTKRSRRRPHDRRMSDNEAGERPHMDRDGQRGTRSNETSGDGQTITLMLHLERRHKMWATRHVLPAAPNAARVVEEDEKHHWAERMLTHVVAHHLKEITESTE

SEQ ID NO: 981225 - protein, 68 aa, Homo sapiens
AWGDSVLRGCSLEQRLVISARAWLSYAKCVPHPMEDPMDMDMSPLRPENYLLGCELQADKDYHFKVDH

SEQ ID NO: 981226 - protein, 215 aa, Homo sapiens
MRSALPTSEMLTGGIGQCVYSWWAARNLASRDLHPVYPILGAYTLLCSDLCSLSVLCCGTTLCMIPLCLPVASLAFALLREVEVTGGRVADVVGGPVYYCLPSTSVRLIHFWGPLDPGGGLHACDISSAVTRSPSGLVPSLCPYRLILVTGHRLHGPSDGVVLVSCVFPMIIILHYDVPSDLGPYSAWYALRCRTWIPPFVLQVPTSSAWSQDLC

SEQ ID NO: 981227 - protein, 86 aa, Homo sapiens
MVCFRRCLPRSLSYAYGQRTVGCGFLTLTDVRLASQFWVDTGGSIRHRSQTLRVAPCAWTVSVRFFAESLCTWDGAPQIVLLYVTL

SEQ ID NO: 981228 - protein, 233 aa, Homo sapiens
MGKRTDRMERVRQLEVGSRLYAYWSWTRVLDRRVDEWDKWAIFPEVQGNLQDADNNFWEAVNKVEHGPGSRWHALVYTSQEQLAVETSMVLQENLESDTLNLIDYGTIKRGKKKHACMTKTKRTWPQVLGILTAILIVCHRRQRGELPGLGNRQRVHSMPALTAELGGCREAAHTMLVLLRLCPSAAYGRRDYVAPSLRPEGDPSASVALVAMSPPRPFPLGPLGSRGPTAPG

SEQ ID NO: 981229 - protein, 499 aa, Homo sapiens
  misc_feature (366)..(366): Xaa can be any naturally occurring amino acid
LLNVSRNSTSTPYSLSLTQLLHRPKLLKLSDWPLTHLTANTSCSDYTSCLLSSTTHWHTLLQAARPAQPLLLLPSTCSSPSHQATRFPLSAPLSPPHTRHQLNTHCCLPAPLLPNCTRFSKRLPATTRTRTLALKPPSAHLHTATLATVFRILPLSALHAHINTLVHAYLPETPRCTKPLSLCRRSTHFLPTHYTYTLASLKGPKPLNQPVDLLSAHPKTRRGTPNSKTGTLSNAERLPHHKLLQLLTSTDLNTFLVGPRHTTASNRSTPLTLVHGGPHPWHPFFSPPAPRQSLSQPTATLSATPNTRNEKISAAKPWGSPCQLGAPDLGAPPRTLATRGSSHLAHANIARHPPWRHNLRLHTVDXPPPGFIYAFKAPTRLLPYVDRKGSTPRNVGAFHAATQPPWARLDLRPACGAPPARFAVSFPHSWAPPTSLPRTAPLAATGCVLIVLLPALVPALPTLLRRRRRVLLPTLPSSTTLICAVTARTSSPAPSIARP

SEQ ID NO: 981230 - protein, 242 aa, Homo sapiens
GPTERKSERPYGRRGPGPEMLSGKKAAAGWGLVQGSNRDGGGPWDRGWLRKNGSRGACANTRGSCRARAEAGTGVRMGERQKPWKKRSLSGVHSPPGGSVVGKPGMRTTGGTHSARALMLNEALGSVEDPCGERGKLRRDTPKGRWDTRAGRKQEARVKGQEKKSNESWDPKLLQKGIRPHVRQKRQKWPKTRRKGKERLPPKERRESPERSKKQETESLEKPGDQAGEAQRKDWSGELHKA

SEQ ID NO: 981231 - protein, 266 aa, Homo sapiens
LIVRLTLRSLEGGFGSDSGAPAEADPRLIMEQVKCIACTELLHEAMTDKGVPGRVYRQKTLGAPVDKLRAEKVYRHLCMDRLHGCLGTTLCLAAYNLCGQCSRGNVAQHVDAGERRGHTNPCTIYPLRRGFEPNTRVTNWYKYLPCPQAIASRLTTGELRTTRELDVRQQTPPGLTNNDQDQSHDWDTYSDVVGPLVPSLRNCCAAKVPPHEEHYEGNSPLVVPQGNAMILLARNGLYWNSGVDVWPQTQELVHSAGLSTYIGGGK

SEQ ID NO: 981232 - protein, 82 aa, Homo sapiens
DRLFERYCEDGERGLAMIKSESSEEAHASGVRCLDLSECIVKLLRMTVSIEMQMSLLACLISDDCAQGSASSSIIRGSRVRI

SEQ ID NO: 981233 - protein, 299 aa, Homo sapiens
MIMRRLKKIQARKMGLNPNCIISEYLCLQRISCSILIGTEDLLVLSGFGQRRFDGENFGCMLVSDLGASESRVNMIGRFLSRFENSVVVALIFLPVIVPSDLQNKPKSNQEKGPQALDIEEPPKSHVKTHQHQLAKAGPNKFKNLAPCEIVGLGLRSLVLKKGAGHSNLGSTGMKPPKILLVTFHWRTNCSRDSKPTKARNFQDADWTLSFKYWVQLLRRRQGYVVVAPGIQPVPFTVPSGLGEQARAQQAAVIVAALIVVLDSRVQAGGSAEVRRRWPESEARQLCSPPAEVPREWAH

SEQ ID NO: 981234 - protein, 118 aa, Homo sapiens
VPSQQLRTQTICGKSSRIGGPIQGISVVALSQEDADKHYKQYLLTPGPAQDPGSTTVQSSLARQPEEICANIIREKLLEHLPQEVPYTVHEKTAVREEGHGGSWISTELLVAKNLCEI

SEQ ID NO: 981235 - protein, 243 aa, Homo sapiens
MFTLQCFLLISLNGIRVPVYAIIIYGTCTVRHVLDAMANIQAKLSLDVMRISVNENALCIAEEFIFNRGYSSDYTGGGSAPERTLDVARAGVHQIRRDDLYLYAIARVVEEYCTCLDATVFIILMYLYTLLMYGSYASIISFCYLRALVDIPNLSLLTFACRLVLSGILEACRDVGSSHESKTKPFYYMSAGGVPPHLVRVFRMTVCCPHLPYTSLESGFAMYRVWAYGRITANAIIFVFCHT

SEQ ID NO: 981236 - protein, 316 aa, Homo sapiens
MVGVRRTCVVGAREIQGAVKPMQIDVDPLGKTRRFAPDVNYVLGETPAMDLEQVLRSAYGGLNAHRIGCGSFADLLPTRCRVEGPCKMVLLLWCGRTFDVSHCSREIRLKLTEATKGRLRDPRNLMPISLKERRWKPFKHSGGEVLGGMADRGKRRVLLEIQEECLNEQEPEGNLHGPRPFNKRDFGVRLRQAGVRPLILGCGVTSCKLTPAGGYCPGPRELLRLAATLCINIVPSLVVQRAALTCRDGRHVLSYVRTGESPRRLAGLEGDGDTRPGAPPRSSVRCFWLAPGTRGIPLMALDWVLSVRPASGRRLR

SEQ ID NO: 981237 - protein, 151 aa, Homo sapiens
ERTKKITVRDAERNRGPATTSEQQEVNILSTSQSYPVQPPWVIQYTLRPCIFRQAPAYTDAPPAYSELYRPSVCAPRCCHSPHNPHGLLSSRSHLCHLVSTVLDGRRVMMQVPRLGAGATAGDNSSSISWMLSPKCWLSFAVHCRVAKRSS

SEQ ID NO: 981238 - protein, 85 aa, Homo sapiens
YMLYPWCYIMPHWFYRDGTMSPAKVLANASALARLLEALEWMLPPTRPCDNALVLGFSRMSTKLVRIVYGLLIGSSGGLVFLMTR

SEQ ID NO: 981239 - protein, 98 aa, Homo sapiens
AGVKAGAASGGAIMGGDKTPAKASDTNKPLDPLVPSALRAAMWYLEDYSGIDWSSSLVDSAGPLSGKVREMWTCQVQMLQGFTYNKESAEIFSDLQEK

SEQ ID NO: 981240 - protein, 146 aa, Homo sapiens
MAVRVMTMSAYLEVLALVHAQGFDDRYTKDATAFYLPNDIRLMRRDAICHLCLLILSSLLGVSALGGIYCLVLVVFCLNSSDRVRPSEIIGEIYTPQKSINSLYGHLVLTNLWQYMFMMITHLPDYVKMVESTDFGSSMAVRTVVL

SEQ ID NO: 981241 - protein, 65 aa, Homo sapiens
RRERRGRKKREKDAKEEDEGKRREMRGMDKGDKSAPTKVRELLGKDRKGDEEKRKTTVVKNKLQK

SEQ ID NO: 981242 - protein, 110 aa, Homo sapiens
MIDKMHNCLISYRRVVYPVRSQILDSYGLEGVNTYRVCPLYTLTLSVSAGFRLNYLNYTSQNGGAQLTIPSCFDRCAERIEGRGPSSPYLPITYRNQYYGPETRVHRVYP

SEQ ID NO: 981243 - protein, 138 aa, Homo sapiens
MNKSKSSKSQRYQASVLKLEKEMKKRGLTAYSVSRLYLIAGLNLKPDTDWEAVEAKLSVMLRGAKTFDLAVRYARNDSCDILVAGGMLARGGTRGQMTVMRTECLRVCSAKEDLESMQAFCSGFGTSKSGATNSWRKV

SEQ ID NO: 981244 - protein, 106 aa, Homo sapiens
MGFHHVGQADLKLFDLVMHPTSASQKCVGSTLTMQPTEHRALADANRDTLTTKNPLNLLAGNTNSSVNAVRSTTGPQKGRDQDPLTHGLNQIAAHHTHTPLATLPQ

SEQ ID NO: 981245 - protein, 109 aa, Homo sapiens
MTGTKLEHQGGCSVWEVWQSFQGYGTCRVCSRRQDEPAVVSPRDAYRGLVCAGAAACRKLCVSFQRRSRWKLCSLRVAQRGWGVCPSDEIPGSGGHGTDMTLQDEGFPF

SEQ ID NO: 981246 - protein, 99 aa, Homo sapiens
TYRVGTSGFGSGSARVPATKKRITIWVMLRKARRFVYMNVSQCHTALDKGGKHYMTWANISIGLFCRGRQVRPLVTLTQPPITIKGIICGRGYTDGVFG

SEQ ID NO: 981247 - protein, 73 aa, Homo sapiens
GRPVWRTHCCAPTSLRSCVAALCCYELPQKFPAAGPIGGAPGGEKPRQLRLVLTGKGLGIPLPFTSLRSRLSG

SEQ ID NO: 981248 - protein, 69 aa, Homo sapiens
LGLRISRIVMFYSEYSQNPALLPLALCQPDSDRVQVCRDSIVPEEAHDIVFDELCSGHPPVYALFLVSH

SEQ ID NO: 981249 - protein, 42 aa, Homo sapiens
MLTCNDKYLMRGGLTELTIAMTITGVCPGSWLYKEVREPLAD

SEQ ID NO: 981250 - protein, 271 aa, Homo sapiens
GGRGRAVGRAEAPESRFPGPFHPEPDSARGTWPRPVGRRPEPSACEPVPLAGLGSWAPGRQRRCSTLAASGLQSPLGTEAARPLLGLGPGDGGFPGRAVPGRHFSAAREGEGGALKTPGRGDWHPAPRGPDTKTPGEGLPDGGLLEPPGKRGKDSRGAGKRPQGIRLGKNGAVGPGRRKGSEEHPAFGKGSLGEAGTQSKGQRSDDEHPMKNRILHVEKGVLVNIAGAVSMIATGLSISGEATSFLGEARGETPISIRHTSIHSETQGLFR

SEQ ID NO: 981251 - protein, 303 aa, Homo sapiens
MRQRMTDHYKEYVRIMQRTRILEKVRRPRKVPELTIKNRCPCTQQNLCSILKAGKRYGGKRRSLSLNITDTMLILRYLKGTVLEVWPNRANKKVKMLTQVALPSPDSAKELLYTRYSPDELRIVCPLIEQWPVVSPPSGSCSSLRLDMDGDSDDGEEMVEADEKRNTHNRHFWIRLLWRCSLKGYMPLPEVEEELSSRVRNRCIEDRSKAAQSYEDRLVPKRVLRVHVECLRYNAIGLSNAYMVGICRERYGVQQGKEGLITYTVPDVRIVAILLAGLGWRVFLIRPTRGVDVPRILDRRKNG

SEQ ID NO: 981252 - protein, 270 aa, Homo sapiens
MRGWLDELEKQDAESEGRCMRVVHRPRRQSDYPSFVGFRGTSEIIFTRRIVLASYFVDRVWMSSDNNLAYLEAMHKFVEGLKLSISTMSVNVDLVFNFYKVYTVVDEMFLAGESPREQPDEGAETAADATVPGVRAGGAASGPGPPGLACRYPLLRPWQAEQPSLSCLGGRDPVASGPQGRGRPIALVPGVACGHGVSEYRAMRVQPNRCPRIPERGGKKRGKKGAPSPIVEQLAARKKRASQRGTRGPQTAARDTGTVSRNPEGKCRKQ

SEQ ID NO: 981253 - protein, 181 aa, Homo sapiens
GETSGRGGAGSVLNGFVKRWGAMIDAKGLYRRRLSPLRQVFAWIHVTESYGIPFYGLHYTSALLASSITLVPRHLGGESVGYIMGKAEGSGAREDWHGQVAALSVAPEFRRLWWAAKTYGVLARNDFQTGPRVDSRGSLCKEYLTKLQLTCGKQLGYSVYRTVIEYYSASNVVSLMRTLMI

SEQ ID NO: 981254 - protein, 84 aa, Homo sapiens
ACSLWNTTMCVAGSVIHMSLIEMCIFRGKTYYRGVEECMISVAELGLTMAVSPSPGKLFYDRQMHAILYRRMSANSLRFSKCPT

SEQ ID NO: 981255 - protein, 118 aa, Homo sapiens
MGDADEHGKKTRFAIYASVPSAIIRSKEWMAGTNTGPDLRDWSSLGATEAGQAPGYSYTGRLGISRQVASSGEEDTRMAYLANPDKYIPEHKVILVGIKERGEERARIKEVIANNMLS

SEQ ID NO: 981256 - protein, 217 aa, Homo sapiens
QGEEIDSILNKVEEDEEGGQDSTVRCKITTHRCEEEAIDGDTGPPTEGRLVGNMTYDEVVYDEEFTIIKTYKTFYHSKEVWNILILSGNVIWQQSDLEYTRAVMGQAAQEDYRVATRCTQSRGWSTGRHIVVTKGKLKPTDDTIGTDGPTWGIDAGKHILRTTCGEGLNNPKETARRVKESTAHGREDTQEGSIWTCGRVDKRITRPTKTPRIHGRP

SEQ ID NO: 981257 - protein, 260 aa, Homo sapiens
MIGYHLLGEADAAKSLRQDDLCWHHHGLLRIFASWVALSCMVGNTSVLRQGLSQGGLMKYQRDLWNNADLMSRGESGAKVYPTSGERFTFYSWDQSFAWSQLKELTELVRISYRSPRLKHPICSPEPHLCGLGANGGSMKMVAAVYSDGCGLCEGCSLNPLVDSSFLFCTCEQCPLCIRGHWLMYSAPSTPGPSIVGGASSRVFCLVGIYLLFRMFRGRTGSQVVSLSGGSALVDLEVALAPDGLWAARFCPGKGPRVFD

SEQ ID NO: 981258 - protein, 73 aa, Homo sapiens
ANKREDTDSDVACLLQPLLEPPPRLQRPEGRKQWIKNRLERQWSALLTHCKSRKNEIMGCCGIENEKFMWNGK

SEQ ID NO: 981259 - protein, 180 aa, Homo sapiens
MESLLCCGPKLAACGIVLSAWGVIMDNARNIFQMSIPSVLIEDRPVHGEHDIREWTPEHIQTFTEQVELHTCRHRCSAFTSSSAGFSFLPRLAQYSSKEYMVALRALVQPVPRSSRLLYLQQNCLHPAFTQCRVPTLCTGPSVGNWVSRPRHWVPSSHLWDPDQWTGLGWRHVALSDLLV

SEQ ID NO: 981260 - protein, 136 aa, Homo sapiens
VYYPVKGSNGRLSVKVLYLYPDGQRHYDLDYSLTIPVLFDAYCICTREDGLLLINHAAGLIVVFQAANGGRSLHSSIVVDSWKSPIQHRGLERHWVVESTFMHAVKITLASYRLLRTDQVGLNALLQRPDDDSMSL

SEQ ID NO: 981261 - protein, 77 aa, Homo sapiens
ELTPYVSCSSARVCGEPGVIVGRLEGNRAERRPKSQPGDSGSVRDRSSRGWGHDARIEHAMGKNQNNKSEERAKDDC

SEQ ID NO: 981262 - protein, 75 aa, Homo sapiens
VATLLVTAKVTHHWKQHGFTAQVDYPEPSRPRLTRRVCTCIGLPERLTLHATFAELKDNRTRYARTGYNSWLDGP

SEQ ID NO: 981263 - protein, 104 aa, Homo sapiens
GPPETEGPEVLFTEPRGAGAQIGSLGRLGCRCGTRSGEGFGGSGQAQMASRAGPRAAGRRSDFQHRERVAIDYQMSVTLKYEIKKLIYVHLVIWCCGCKMSVGT

SEQ ID NO: 981264 - protein, 105 aa, Homo sapiens
MGTTDRLARVNVYPPSYADCGKAAEIFSTKDSGFGLVKLDVKHKVLQWREFSTSGPSNTRTVVKLWDLWRPNTSGVSMADFHTKSEHDNTLEQNSQLKTRFCPRF

SEQ ID NO: 981265 - protein, 124 aa, Homo sapiens
RAIRRETARTKSHRPETRGNLFPVKGLAPGMAVSLILSPKFSGRGLTRGRPSRTAVGQGVCGSRPKVTGEDVHGQGRYPKIAPPLLACTEGAREFETNGCGPKLLSPAEGSCWETRLICTNSFG

SEQ ID NO: 981266 - protein, 165 aa, Homo sapiens
MNDADTLWWIIDCRLYALDQDCSEDLIAKTPECRKHFYQSEVDQLEALREAVGLITESYYSKKYLGCAHLGNHALRKVSFVLADNMNDRCWTISPTYMIKSFYYCKGLQIECHNEVFGELTEGKLCNTKVGLPDVKARYIHKRGSQTWGDSSRRPLLQLAETYAL

SEQ ID NO: 981267 - protein, 151 aa, Homo sapiens
MSPFHSQKRRDGNMLWQGLSGPAGPGAEHSGALGTRTLACVKGNSKREPTGIHYAVTKGQALFKPNLEIDASGHTVNKSPECLRDKDAREGELDELGDKCDSKVFQKKKGGTEQVHKLSAEWRSLRKSYRWPVRDSGWDRVMGRSVVNRGP

SEQ ID NO: 981268 - protein, 151 aa, Homo sapiens
SRPGPRQPPSSRPSVSSAGGRCGGPEDRGWGCCCVRRRGGAGKAEEVALPVGERGGEYDRGGAGWGVHRTDVAGLLYNSGQQKEAAKKDCRRIIDEKSTGGTHSVVASTGSGLGVPGDARRGPVETHLVGYGRKSNPRVLGAHSSSHTAGG

SEQ ID NO: 981269 - protein, 254 aa, Homo sapiens
MHRDPVHCGCKVDVGNLVDPIGTKRELEGGRFGMMEPSRKCVGLLEIRGVWPSVEVGRSLRCSDAVRELDGKKHYVVSVMSGTVAWWKLRSTKSLAQPPSGGCVALEMISYGGVPPSSYANLQEGGGFLSSRGQVPSLGDRRKREDRCLGRETHKAAGALVLRCRSRSQANEVTQQDVAATWCTAQYFLTKMVRKSRLGGLISGDSQTRSGNMEALTGAQGILVKEHRVHPSIQSYTIAALPRKHTPGLKTTRN

SEQ ID NO: 981270 - protein, 288 aa, Homo sapiens
  misc_feature (22)..(22): Xaa can be any naturally occurring amino acid
RQAHAVGRADPSSGLRQPTKPXRPRRGPARAVRTPLNGGRPTVGGFQARAVGSPARPESWAGAKPPPGAGPPGDPSFGAPRALLRGKEIPGIGTQREVWTGKGSPTGRRSTGGGRTPGTNRRGLPGTPEKGQEGYHPEGGRYYPTRKNQKSPGKYTPRGGGGGDTIGQDSGGPPREKGEPPKGVTKGLPIPRTFAEDRKGNPAKKRPPSGKTPRGELERDTRHDPPAQRETNHQTTEDTFTQGREPISTRGRGEEGPTYHSGDRRRRRDTRLVMENTPGPLIGGTTNK

SEQ ID NO: 981271 - protein, 113 aa, Homo sapiens
ISLVRGLLEVVCEFLSVAVLSLFLIMAVVADRMCNVSMKLASGESKISVVTRRMETDSGMIRQVIRIVSFGTETEMDNPFDSVFLIAKRISVAGTNGLRNGVKSHNRSNIWLI

SEQ ID NO: 981272 - protein, 152 aa, Homo sapiens
GGRAGRFRAVGSARASEREAAGPRAPVCMPSLPGGAAITAEEPRAGWMWLGGVEEAAKMPSPSPEDRDPGHTGLWGNPHVRFIVLTAIVWTPTINHRKHFYKVRSRYLDKIIISNFVDTAGSDDYSIFPQNIHRYNGYIWVYLYINQKFGSD

SEQ ID NO: 981273 - protein, 105 aa, Homo sapiens
ISVRGHSHPWTRMMYVRDDCKVCRFAQILNVIKTLKRSAKSSHESYGGTYKHFGKSMLCRELQSGYIHLKFDNKVGNEPDGKYHDERYGSRSNDADEEMLNENSK

SEQ ID NO: 981274 - protein, 149 aa, Homo sapiens
MWVVKPQGGAHFFLLFSFPREYREKGAPRGVAPLKRGLIFSAGAGGEEGPVKTPSTFGGERLWKTQRGDIPREVPRRCKRNTSLETNAGGQPSGFSINKRGAKNKTRGGRRGNGPLGGSPRHTTTRKRHRGTRKKSFGIPMKRGRLARG

SEQ ID NO: 981275 - protein, 133 aa, Homo sapiens
MKKVAGLDVELTVEERNSYAVAYKNVMELKSLLENNQQIEPERRKRGGEDKLKMMREYRQMVEDLELKLTLVVTIVDCSDKTPHSSSNNGSPRVSIYTNERGDYHEGIRGRICATGKDREGGLRKNSLVAISV

SEQ ID NO: 981276 - protein, 192 aa, Homo sapiens
  misc_feature (27)..(27): Xaa can be any naturally occurring amino acid
  misc_feature (53)..(54): Xaa can be any naturally occurring amino acid
  misc_feature (110)..(110): Xaa can be any naturally occurring amino acid
  misc_feature (152)..(153): Xaa can be any naturally occurring amino acid
  misc_feature (157)..(157): Xaa can be any naturally occurring amino acid
  misc_feature (162)..(162): Xaa can be any naturally occurring amino acid
MIYTNSKIKQSNGPGVECQIPFIICEXKRSRMRKSEERRGLALPRRAAASWHXXRSRRLGPVHIWRRRGAPIGGFGTERAKDVTSSRMGGEAVLFLLWEGVWVEKRFRHXTTGDQSGEKTESSAEALVFLSSNLAFPNSPCFLGPSVGVGSXXHKAXWGGRXNPTPPPMLPSDSLESGGEQDEAKATERGDN

SEQ ID NO: 981277 - protein, 78 aa, Homo sapiens
PLKLGVVGGVTLRGFNMRIAKSVFLSRDPSILDTAGCSCRNDEEVFRFANLNVIINLNKEAQSSSRVRWTKVFRKAGW

SEQ ID NO: 981278 - protein, 111 aa, Homo sapiens
MPTSGYEGGCIVREHSRVDATTCQLLPELDPVCDCVDDNMHVLDPQFVNRALEDIWKWGLPQFTMAGGQNQVNHLAAGGGTNLGGPEEAGHKSSGKKAGDNIIARQVPAHY

SEQ ID NO: 981279 - protein, 101 aa, Homo sapiens
ASFPGETGIEGTGACVRLFTDASWSGGLGPRKPWHDMIPRLRISCQGSIIGFFRNNFGVREPYQILLDGTFCAERRCQGPDPAAEQCCPVPHGGDAKFGAS

SEQ ID NO: 981280 - protein, 114 aa, Homo sapiens
VGGVMLVSQMFVNNESRVVIHREWRMIVDVLLNLQEWPDIIMRLPDLSCGTARVRMPVIRTHLGPGFKGFKTLSDKGLLSRYLDKMRPLLVLCLPPQRCTRRLSDSGVGTEMPL

SEQ ID NO: 981281 - protein, 77 aa, Homo sapiens
VTSCEEERREHVAIHMKNDGRLEMEQVFEMKVKRKEFKILNGSLKTESPEAPSANDERIGKDSTIVIGGKTSSVSEA

SEQ ID NO: 981282 - protein, 69 aa, Homo sapiens
LVCRVMISFRLALIQLAEFLPSDQITSLALVCFIREAVTQGANNSSSCRNCFHILHYGTRNICSPELCR

SEQ ID NO: 981283 - protein, 97 aa, Homo sapiens
EERVGTSGFGAGVYVVPATNIREMETMGDRGEKARRLSDYRSGSQLPHPLKWEASTETGAYTCSTGALVWQEDRSGPWILLTLCAILRYNRHLLGET

SEQ ID NO: 981284 - protein, 59 aa, Homo sapiens
MATGPFGFSEPKVVLSLIWFNPGGRFLQLALINLAGIPRLIWQVLQHSFTGAERNNLTR

SEQ ID NO: 981285 - protein, 366 aa, Homo sapiens
MSCQALSLQCTTVRMHQFHTIRMEAVFPTFTWSKTLFYFNIIMKFPTRPRLLIQEESPTVHVPCCSGYNLEFPPMGDCDPIPRSVHSNLPIRSYFSYNRFLRSLNPITPIWQPRWVHHEGISSPSCPLIVGTICAQYPNWHIKQTGKLFNFNGGGIKTSWSGNKAIGLSREKQAYSERAKLAELCHANIFSPVSETHPPTVGARAQYGRWNYWNHLLERERVPWAHRYRTHKNTTAMSCLFSIKETAPKPTGPPNFPRAGNSWQVTHDPRKAPRGSPNTRWVCNTVSQAANNSSVTLWAAHQQTTPGRRRRPIHSPQNQLRTDPLPAPTRRRSPHDSTSQSRTSATHSRPHTHTDNINIARRRNHN

SEQ ID NO: 981286 - protein, 173 aa, Homo sapiens
MSSWEVALSLLNTNRSRVGNAYAGSRYYSAQGSSRIGMIAMEIEAEGRVENALRWGVIAKKRRGVTGSNALGVDHQTVPRVDPVLDEEGLLSEPGMNCTALFYYVDSFLERGVSRVLANGLEEGRPGNSIKADQVFGLILEPGKVPFELQHQGPPCGSGPNVMKGSFRQAFFD

SEQ ID NO: 981287 - protein, 68 aa, Homo sapiens
SHSQRRRDTHAADWYFSVRLLKESPEFSLCLCKYVHPLEEKDSHGNQGSAKYTRDVVSNVRLGIEGAP

SEQ ID NO: 981288 - protein, 84 aa, Homo sapiens
STLLMSSSSSSQVRKSLSLLMVMTSGRLSQGKYLNLGLPQRSDEDTCGCPSFRGYMATTLLCSGNQVWRYDDTTPYYGSRAIRD

SEQ ID NO: 981289 - protein, 137 aa, Homo sapiens
VCLIPLKLGVLYGVVTGGFTDAYRYSVIMFGTIYPWHTGNDGTVPLSECIGCSRVLPGLKCHRYILKERNAPSSQHAYVLRSTRSSRTELLWYKRLDGRINSVLKFRENVGSGTIVINTSAQAYGKLNIFDVMMESR

SEQ ID NO: 981290 - protein, 130 aa, Homo sapiens
GQEHELIESMPLSEWSATDYKKFGSYGGKRHRYITRRVSVCETDLIGIGGILRYLSKNFQDIAITMDGPTDDIFETLIDYYSSQYMGPAKTVPRPFQYPNPRKHTRLGVESDKMIRCSLQGGTLSRTYIH

SEQ ID NO: 981291 - protein, 92 aa, Homo sapiens
VLSPEITSVVNVQFVALPLLLFLFDPVADLCTECTDVDYGKSVQFVHNHTHEKVAFDSLQTLVQVNLDNATVFAFDEDADGIMTTGRQVIPR

SEQ ID NO: 981292 - protein, 230 aa, Homo sapiens
DSPAAVAVVGLRSGCEAVDRAAGIQKDGGKMEVTGVSDPSVTGLHRGSSLKHLTTSEKRYSQILTIGEFKVNTEVGWLGRPVSCGWKLGAVCSLDDKFYSKLAQEDALLGSYPENDGCGIESLTKCGARLGEYEDVSGVENVHDLTRCYDAEARHGPSFLKPQKLGGDNGGGAGSAEEDECYQRHGEENGPGQSIPVGSAVRCGRRDNSPRGARLFVVPTNSRWDWMVVV

SEQ ID NO: 981293 - protein, 388 aa, Homo sapiens
DPDRRHAGGRLRSGMAAVLQRVRAAVQLESCVCRAVTRVPCTLTRHQHLPSGDRAPGALLIDTGDTSSFQNTSGCLKQALTLQLTHSNPRHHCSDSLAPEIIWRHSADIPSQHHTTDHYLLHHKPPTDSSETHDPHYATLETQHYCTSDTTGDSGLTDLREPLYQSSSIPLGHTVLAHHGSYFLDTTGTSAHSYLRDLHTKRAHGTTGTLAQNLYAYTDTSLQHARIIAHTPSLTILSSQDLGPRLLQLADSSTFHTTSLAYRHISRKSNYLPSTSLNTIHALTHGKGATLCQTPSHSNSPSNLHFNSRTTNNIIHSATPPTCTATHFPHSTKHHSDTQILTTPNPVIAIQTPQQHTPHHTIKQHPHQRTRNASPTATIQPYPPYVRL

SEQ ID NO: 981294 - protein, 97 aa, Homo sapiens
ALKIAAAVGTVWSELSLARDVMLYPGMAVLACTIMAVAWCKNELDKVYGVSDPVSTRECYISAAMCLMACSLVSTKDAAGNVRGKRRRGYYSGECKS

SEQ ID NO: 981295 - protein, 271 aa, Homo sapiens
MDMSPLRPRELSFVGVLRLKAEKDYHFAVGTDENEHQVIFQERSDLGAVHRDAVDIVEAEAMSHDGRPINCNTVELLKMSRYNANCLNPWGAFEDKHHQVPLHRCEVWFHGPGAILLRQHFTLACWRIACQTSEEGSRQEECETSFPLFWKAGQPLEVVMHRFPSEESHQCAALNHGDGVWCRGLTHERGWLLEHLADEARAKKGRGSKRSAIFLRVPTRSWMGTFPHSSGGNLKRKSLTPAGFHFRIAKKRGRETKCPDHSIRGNTSPNK

SEQ ID NO: 981296 - protein, 110 aa, Homo sapiens
GLLIASVVLPTRCRRRRHYDGTERSPAFWEQLQTMVITVTNLPYRKSISRTIFSSGDGQWCLVAVGPEHGEPISPGFGSWVKRVVMSQSLFDCGITQVRSESSLWLLLTS

SEQ ID NO: 981297 - protein, 112 aa, Homo sapiens
AAYCNSLRPLGVAATRRIPAARPCSNPARMTVARPSVPAVAAPPRGAAPVLLLVLLCLPAVWGDLWPFPQMYLMPQPSLGKADKFSRGYCITYNCEESFVKIPGEKDSGDLP

SEQ ID NO: 981298 - protein, 177 aa, Homo sapiens
MALWKALRPRSSPGSSFQWSRLVFAVLEIVLPRFCLVALTRERSPRLSRPGPVVEEAALEGLAVILFPHDNIRLLRWDRDDQEGLTRAWVLVDDLQAIRCLASQCFDTDAVRSCATLYEGGLEVFALPVVTGGNLSVRSVGAQGSESVLISHVRHETLSGFVRARGVKLCFRVLAHI

SEQ ID NO: 981299 - protein, 295 aa, Homo sapiens
MGCSLDAMVLLSYYERLTPSPWVRSSMLVQVPYPCNRPQSVDHARTEDTCHDNIVSDYIGRTEKYVIDISKDVFTNTGCDVLYRTDILATCKEIAQRGMVVIGPSNRAPLTLRLMLGESVNKKFGDKSDAFPAFSQRSTQCGALQVSRLSQVLLSFSHILLTRYLTARTERQHHEEIWKYMSHGVGRKMRIELSCQLSVLSSLFRISWDYVWQRGWCDGSRLLLSVCRVASSYSSKGSPIYYTKGLGLQVNGFTQWSYGPRGSLLPPNIWPPSPDREHKLSGAGSELALTKTGQR

SEQ ID NO: 981300 - protein, 256 aa, Homo sapiens
AGVSTAECPLRPGQTLSFRLPRLQRHGALQEVASLGGIPEDERSGTHESGGSSFGYVSNRLGKGAASDNARLVYVASRPYCLISPIFRPGARPPKIHQDCCVVGQELAHKSCLNVGCYTWGKISPGVECKDGRSQVGGPGGQIERERHVVWCESDDRDWAITGAHWPLEEGLGVLACIGEKLSMKREAGITEKVVFQQTKVIADYTGKDWSKVGPGYEPVVGPLGYWHGVEHPNRARDVKRESRGWVKSTVSDAGV

SEQ ID NO: 981301 - protein, 72 aa, Homo sapiens
AAGLMCRAAVMACRSVLASFPSCLLLLYLGDVHEPSRGARCCCLSGSWEGEWVSGIGVSASRGLRGVQLFEG

SEQ ID NO: 981302 - protein, 133 aa, Homo sapiens
ALDCILPPIRSTEKPLRTALLQDVSSKIGGIGTVSAVGRVETGCSQGPVLVLTFAPVLRQQTVCGESVRKCIHWKAFEMGVSSLGDIVGFYTVRACVLCQGHCSSWLIISLVDGWDLSHASGGLLGFIWRQVN

SEQ ID NO: 981303 - protein, 89 aa, Homo sapiens
GSTRTRVLAECPWVGETRCKKVGTAKSDLRSNDFRHDGSLARDFELSNDDCYGRPIEVNNGVGKSQAKNNKKAPPVEICYSNSSKANDL

SEQ ID NO: 981304 - protein, 98 aa, Homo sapiens
GPDRFSYRGREVRSDGYLDGFVDHAVPGGTFRRATVGPSLNECRRIPLGPGAVYAKGIQGTLFIITGVCNYSFVPVTPRSLAELTDGRKSFVDGRRVR

SEQ ID NO: 981305 - protein, 113 aa, Homo sapiens
  misc_feature (55)..(55): Xaa can be any naturally occurring amino acid
  misc_feature (63)..(64): Xaa can be any naturally occurring amino acid
EEEEQEADNDRLDRKNEDTNGGDENEDGRNERTVDWLTRNEGTGTNWTRTEGTRXGRFQSLTXXQNAVWQPETTRLTEETIVRITPRKARQEPRETGRRNWEPLKETPKAKKN

SEQ ID NO: 981306 - protein, 265 aa, Homo sapiens
  misc_feature (84)..(84): Xaa can be any naturally occurring amino acid
  misc_feature (188)..(188): Xaa can be any naturally occurring amino acid
MTLNPRRTMMADSLVRLKWRVWCPRRGRKLWLPFGNPSLCSSTRVSVSRGALTFTRPDAYPKNWCRESQAHYRLLLTSDARTIXSASKMACLLFTTWESSCRGRVWVRVVMGSNGVIACPGMHMIVDIRELIAYGTYVAIGLQAAIDSSPMVHMRVPSETTCIVYLEHHGSIGEMAICKISFAQRCKXPCVTCLCCVRLLPGALGELTHRSHPTSSANHRDKLFDQKLVEMLWTVYLDFSISWIELDVYSPLFAILHFRLCPINA

SEQ ID NO: 981307 - protein, 42 aa, Homo sapiens
RRLQDDSRIVKQQHSKQLLLRRLATKHHWRSSEVVKDLLDLL

SEQ ID NO: 981308 - protein, 58 aa, Homo sapiens
EEGGEEEEEEEEGDGEEEDGDEDEEAEAGSGHTGKLKMIKIDDVDYQEAESPTRMTRQ

SEQ ID NO: 981309 - protein, 114 aa, Homo sapiens
ISHHKSIHGVAFKMRAPRALKKLRKCAMKEIGAPDVRIAIRLIKAVWAEGVSNVPLQIRVRLSRRRNEDDGSANKVKSLVTYVPEITFKALRTVTVDSIYSLIVASNKVINLRS

SEQ ID NO: 981310 - protein, 96 aa, Homo sapiens
MSTASQLNLGSSIYKLSRRMHACVSMHPLYRPPASYSIRLRESGRRERTCWMKKSPSLSNTCILTISQPSSSYVSRVSVRACVRESVPRLNTESGY

SEQ ID NO: 981311 - protein, 110 aa, Homo sapiens
SGGIKRSRLELRDTRLSARTRKSLNILGLRLVEVALSCLFLFSTWLMRITASVLLCVQAGFFMSRRCGTALIDITSAGEIGMLCNRIKVGVSMVLLDRPLYTAVRWIEFS

SEQ ID NO: 981312 - protein, 60 aa, Homo sapiens
MRASVSMVYIDRLLLLSVCEKAAEGSVSYSPDSKCLKGMRQASMRDLSFIVIKVGSDRPY

SEQ ID NO: 981313 - protein, 111 aa, Homo sapiens
PFDIFKDRPGNLVLGRYKRAYTLQGRVIKLESLRRATFYYYRVRRGAQKDRLARGIFGGLSQLFMPVETWPFPKVPLFRKALVKPFPLLTPFKPLRFQFEIVDHHGKFPAY

SEQ ID NO: 981314 - protein, 69 aa, Homo sapiens
CGCMNRCECMDVRRASVASVVRCIKLIRIIVHVDVYEPYSRGIGESDGDKRTGIVIHVIGVVRLVYVCG

SEQ ID NO: 981315 - protein, 30 aa, Homo sapiens
  misc_feature (26)..(26): Xaa can be any naturally occurring amino acid
  misc_feature (28)..(28): Xaa can be any naturally occurring amino acid
MLNEYPNGKPTVNCFSCIWGAVREFXAXRG

SEQ ID NO: 981316 - protein, 168 aa, Homo sapiens
  misc_feature (117)..(117): Xaa can be any naturally occurring amino acid
  misc_feature (123)..(123): Xaa can be any naturally occurring amino acid
  misc_feature (137)..(137): Xaa can be any naturally occurring amino acid
  misc_feature (152)..(152): Xaa can be any naturally occurring amino acid
  misc_feature (162)..(162): Xaa can be any naturally occurring amino acid
SLLANNWYVLATISCCPHFTELNSLRYAFGCLRLSYLKCQSNSLSSAVRGLSGSVAMIASIFFLGWWGTLALARSPFRVQGWADAQAGVSGGSNVSRRMEMDIEFSLSGGRFLDEDXSFEDSXVFSLPRYLPHVEDXFSTAQEETVVYQQQXHIIEKLNYAXGLRTGG

SEQ ID NO: 981317 - protein, 113 aa, Homo sapiens
FGNFAARDGSLWRYRAGLAASLAGPHSMVGRAVVFHAGEDDLRRGGNQASVDNGNAVRRLACCVAGECGPGLWEHQAREHYKRKKRWRESECKAAERGLYPAAARDLLGPSLP

SEQ ID NO: 981318 - protein, 32 aa, Homo sapiens
GSSYMLCVLRCRLCRLCRNDSLAFTSSMVDTP

SEQ ID NO: 981319 - protein, 102 aa, Homo sapiens
GAPRFANSSSQRKGPGSGVLGFKGFVIGWKKTAGEETGSFCIPSTEHLKKGSIYIYKYIYKYIYILLFGGTLGKSPLVPVKMNCDPIPSRMSPVSPSRYQPP

SEQ ID NO: 981320 - protein, 55 aa, Homo sapiens
PAQYTIMSEPIRVLVTGAPGQSAYSLLHSMGNGSDFGEDQPKFYVLLDITPMMGV

SEQ ID NO: 981321 - protein, 55 aa, Homo sapiens
IRKYDRGHTFSPSKSALASNAKHQDTIYGPKFYMKTRQFRASAKAILSTTSYQTI

SEQ ID NO: 981322 - protein, 34 aa, Homo sapiens
SQPNYAQARIQPCCSDNTRSLTHWHTPFTNLIYS

SEQ ID NO: 981323 - protein, 147 aa, Homo sapiens
TKLFFFYSLEFFGLTGPGPIQMGAGFTQVTGGGKRGKPPTASKAPPLEITPHALLRAEPLLTGGPGDALHLEGRGMKAPLPEMFVVPGMGIAFQHILKSSVARKLGANPVGKEKRQTVPFQRPQLGDQHRGKGIYAHPHNSSHPGLF

SEQ ID NO: 981324 - protein, 34 aa, Homo sapiens
MGLRSLPSISGLRIWRCGELWCRLQTRLGSRVAV

SEQ ID NO: 981325 - protein, 84 aa, Homo sapiens
MPAGWLLYMYRGRVHVLGSEGIHVISDLRQLTLEVLLILPRPPGSSYGPLPDQYSVSCCRTNHPKRSSFRRQQLSISQTVPAQP

SEQ ID NO: 981326 - protein, 42 aa, Homo sapiens
LQDSMSRNLENTVQHWACSAQETFGDTDAQALDVGQPLLPRP

SEQ ID NO: 981327 - protein, 38 aa, Homo sapiens
DNIPPEYKHILVDSEHDKPVNPPAYISKDLKKPEHDQD

SEQ ID NO: 981328 - protein, 66 aa, Homo sapiens
SGSAPENRQKYMLLIHEGAESVRTFQIEQSWTQSPSLSVSAAPLVPGRRSRIPSGDKDQRGTSRCD

SEQ ID NO: 981329 - protein, 54 aa, Homo sapiens
GRMYKSPSSNHVLVFAVTSPYLGAHQELPHQEFPLWLSSNNPNYVSMRMQVRSL

SEQ ID NO: 981330 - protein, 102 aa, Homo sapiens
MRIGSYFQSYFSTSVVDTVMIYCNTNESAVDSAAPAGPQPSPAPSRWRRSRCSFLGARISPQEPAQIRRPRCAALRCAALSGRAVPAPLKGHRFTTRRVDRD

SEQ ID NO: 981331 - protein, 63 aa, Homo sapiens
SPPCQISYTASVVVGSLRVLASLTSPGGVSQEKHVDGIPYEAAIGKLDPTDGFFFTNQQTGLT

SEQ ID NO: 981332 - protein, 51 aa, Homo sapiens
MSTTAELDQLIMRIAYELEQLNEKDQQIARIIIPYLITKLNCDYRRRALTR

SEQ ID NO: 981333 - protein, 30 aa, Homo sapiens
  misc_feature (3)..(3): Xaa can be any naturally occurring amino acid
MRXGGCRVLVAEQFLAAWVLSTPSPPPTLH

SEQ ID NO: 981334 - protein, 66 aa, Homo sapiens
LEDPGKSGYYLNTWKHEEKGQSAKEDTIVYEVEPLNINNIEEFPKCHVTFLTPHCVSWILSRLNRE

SEQ ID NO: 981335 - protein, 54 aa, Homo sapiens
PPAKSGLLRELCVWVADVAQIPSCRGCGIGQAATALIRPLAWEPPYTAGAALKK

SEQ ID NO: 981336 - protein, 59 aa, Homo sapiens
MAAQAKGTTRTVAAGYAIATARSSRVCALHHSSWQRRILNPLRKARDRTHNLMVPEYSG

SEQ ID NO: 981337 - protein, 72 aa, Homo sapiens
RSCTALLQEQLTTIEKRFGLSSSSSGLISSLNEISNAILIILVSYFGSRVHRPRLIGIGGLFLAAGAFILTH

SEQ ID NO: 981338 - protein, 57 aa, Homo sapiens
SADDTQSASDEMNSICHQGNAEPKCHVYPNVRPRAKTSVQVCTGEDGVGDRPPIHCP

SEQ ID NO: 981339 - protein, 124 aa, Homo sapiens
YERVVYTVKTGVCHSAPVPANGWQICANCGASCARRALAADSCSQLVALARSIMANIEITEQFGIRLKLLGQGAGTFAIVDQLVIIEYSVECLGQHDFTDKRPQLGYRLLNRLGYYGCTSDQRE

SEQ ID NO: 981340 - protein, 82 aa, Homo sapiens
LEDPQRWVYCIFSFEYSASANNSLNDWPVGTVLYSTDNSTQWSVYAGRNLKENGCGYMYNWVTLLCSRNDHNLVNQLYPSAL

SEQ ID NO: 981341 - protein, 69 aa, Homo sapiens
QGGVLVLHGVLDTILVTEPLLAACPVALTSRGLGQPKLGERYFLGIDRVMQPTGVIMYMCTDCFTEWVV

SEQ ID NO: 981342 - protein, 37 aa, Homo sapiens
NLEDPPVSNTADRMENLLLVHRANALEEQLKEQELRA

SEQ ID NO: 981343 - protein, 44 aa, Homo sapiens
GSRAVLGSLHCPPVQNLILKLLSSSAALDRYTEFFQLFLICHYY

SEQ ID NO: 981344 - protein, 40 aa, Homo sapiens
GLRLRFFTVAMDFVVQGGPSFQKSLSCCAFGSQVGFILSR

SEQ ID NO: 981345 - protein, 37 aa, Homo sapiens
  misc_feature (35)..(35): Xaa can be any naturally occurring amino acid
YEDPRKLVMVHLAVGMDSREKEETVHLDNPLEEFXLL

SEQ ID NO: 981346 - protein, 42 aa, Homo sapiens
YEARNNRILRIYNPAPVSFISYSASYTIKVYHNHHPIILFHP

SEQ ID NO: 981347 - protein, 46 aa, Homo sapiens
  misc_feature (25)..(25): Xaa can be any naturally occurring amino acid
MGTPYMEFCDMEKKKLLRAKPTIKXERSFQTVFFIIVLSYLGATRH

SEQ ID NO: 981348 - protein, 69 aa, Homo sapiens
MVDLPRHYQTLPPTQLEVNLEDIPGEGLLISWAFTDRPDLTLTVLPQLQTRERGEEQVELSTIEELIKD

SEQ ID NO: 981349 - protein, 89 aa, Homo sapiens
MILNGEKLKAFSLQSGTRQGCPLSPLLFNIVWEVLATAIRQTKEIKGIHIGREEIKLSLYAEDMILYIENPKDSTPKLLELISELSKQQ

SEQ ID NO: 981350 - protein, 47 aa, Homo sapiens
MCKYCAMLYQVLEHLQVPVSRRGSWNQYPEDTMEQLVVHVSSMYCSA

SEQ ID NO: 981351 - protein, 72 aa, Homo sapiens
VESYTFFIDILLEKISAEISGCLENAYEKILFSEATRILFFNTPEKVTDYAKKRGWVLGPNNYYSISSALEP

SEQ ID NO: 981352 - protein, 64 aa, Homo sapiens
RGIQADPSEKRDLVGLLDAARDLIPDSVEQDVNEEGVTTRRGCYPCARNTYVVAALHTGICYSA

SEQ ID NO: 981353 - protein, 35 aa, Homo sapiens
MAESRGSRNLITECSIPYLTQSGRCGGGSQRGSCL

SEQ ID NO: 981354 - protein, 85 aa, Homo sapiens
PTYGTRKYKEEQEKLEHSFAEMPTELGAVKTRMNNAEERISDMEDRLMEITQSGQQTENRIKKTGKAISRDLMEINHNSRPNLTL

SEQ ID NO: 981355 - protein, 124 aa, Homo sapiens
YFCRAGSASIGSPPWGPNSVAVRPDLLHLGEDSLRRHLVAPVRNLQTPQLMGAPAIFIDVLLVSWRPELLCIRPLSVVYVLSNSGAIAVAGVGISIDGGLCANIMESCRYLVRIQLCQNTDALT

SEQ ID NO: 981356 - protein, 56 aa, Homo sapiens
GGVDVVCSNERCPRKSHITGRTVLTLITGPILSFVAGQSFHPTECRFMIAVDTFGD

SEQ ID NO: 981357 - protein, 116 aa, Homo sapiens
SSGVAYSPATWNTVRTLRDALTSAAVNPLHSVMLHGMHYLQSRCFGPCCIKSTAFNRDALGHAPWNQLHSIKLHGIHCIQSGCILPRCMGYTVFNHAAWNSLHSIRIHCAKMHGIH

SEQ ID NO: 981358 - protein, 48 aa, Homo sapiens
MKELVDKPDFITLKTSVLHKVMSKEGKQPTDQEKIFAKDTSDKGDRSY

SEQ ID NO: 981359 - protein, 51 aa, Homo sapiens
RAVYDLDTAIYLDSVYTNDKGFSYTLICYNTHIARKHLFGPFSLLYNEIQC

SEQ ID NO: 981360 - protein, 47 aa, Homo sapiens
PNYAAATYAKCNYAAAAAVQIFSRSAPGQDLGHTSTVTQATGQILNP

SEQ ID NO: 981361 - protein, 89 aa, Homo sapiens
PNYGIDEADLDYSKKVQDEVENMISRYAQNSLKLEDLSKVGYVIKMMGFQSHSIPRCRPQRIEIRMNRHGGFIRNSPAMATTQMTITAQ

SEQ ID NO: 981362 - protein, 66 aa, Homo sapiens
  misc_feature (12)..(12): Xaa can be any naturally occurring amino acid
  misc_feature (51)..(51): Xaa can be any naturally occurring amino acid
LILHYLNHYNNXSYAQPLPTLYRMRRRRNHIIPANRMMTRTNRRQHSCTTXQSIYNAHRETFGICP

SEQ ID NO: 981363 - protein, 65 aa, Homo sapiens
DTNLATAILIMLGKSMRKVYNGLGGQGKATGNALASAVMRGELRYNMKDGALCNPTHHRVSSRYS

SEQ ID NO: 981364 - protein, 41 aa, Homo sapiens
EKYLTALDLQTPLSDVQQRAHQQAVTSARTTLMPDLWAILR

SEQ ID NO: 981365 - protein, 63 aa, Homo sapiens
ERHAIDAVEDLLDSCHALMNEGVDRYKRPYPISAEEERLRQKEREEHLQKQINDLWRTIPKRA

SEQ ID NO: 981366 - protein, 70 aa, Homo sapiens
MKGFDICCGSVLSVYVGSGPPQATGLHRYVWLVYVLDWPLMCDVPILCYRSGDHRGIFMVASFRKKYVLR

SEQ ID NO: 981367 - protein, 59 aa, Homo sapiens
LVVLEDLCMGGLFVLLGSLHVLVVPLYGFLLFLILVCLLLFDGALLIFCRLFVLHGVCP

SEQ ID NO: 981368 - protein, 103 aa, Homo sapiens
SEAVVPSPGAPVWSGPCWVPGLVGVRCAFLSGMLVFACGLGWCGPGPLRVASLSCLAVSPPFFSIPSSEPWAWGLWAALSLVLGWPVPLRLSLCPFPSLFPAL

SEQ ID NO: 981369 - protein, 64 aa, Homo sapiens
FIWVIPRLPALGMALAVPVCVARVLPRTSQGISDLLLLNLGWLYASCPSKMLGDADRSGVALLV

SEQ ID NO: 981370 - protein, 50 aa, Homo sapiens
GHLRIRWRVFCAVHGWLGGLWFLGLVAGSPVETLVWKALGGPFRGLTPCP

SEQ ID NO: 981371 - protein, 85 aa, Homo sapiens
CAENDVSTLGYDLTFSTEVQELEFVKFVTSNPNGGPHSWYTEENKKGVCTPGYAKMRIDREAIPARQVWAGYSFKESGSPNGRNP

SEQ ID NO: 981372 - protein, 55 aa, Homo sapiens
  misc_feature (13)..(13): Xaa can be any naturally occurring amino acid
VDTCKALAPEYAXAAGKLKAEGSEIRLAKVDATEESELGQQYGVREYPTNKFFRN

SEQ ID NO: 981373 - protein, 94 aa, Homo sapiens
DPNEIVLVLKRDIPYWRSRASSRSNEHLRRQFASQANVVGPWYQTNDGRRSGRTLHMMLNWDPGRTSMSHLEAVRTAASVDYNAQAWTLLEQQH

SEQ ID NO: 981374 - protein, 49 aa, Homo sapiens
AADDFSSEDETELAMRQSEENDIHGLRKVIDRHQYHTTAAGGIAAGGMP

SEQ ID NO: 981375 - protein, 38 aa, Homo sapiens
  misc_feature (1)..(1): Xaa can be any naturally occurring amino acid
XIQMLLGMVPSRSLKLKKPYVAARVGIGEPVSRRVPEK

SEQ ID NO: 981376 - protein, 59 aa, Homo sapiens
MSWLHLPVLRIQFGGYKQPFHAAGVAVLGIKVKKTSHDLFATLMIYEFFQVADNGQRAR

SEQ ID NO: 981377 - protein, 52 aa, Homo sapiens
QELSRICDLHHSSRQRGILNPLSKGRHRTRNLMLPSWIRYPIAPRQELLLTL

SEQ ID NO: 981378 - protein, 62 aa, Homo sapiens
  misc_feature (39)..(39): Xaa can be any naturally occurring amino acid
DRSGKSGLAYTTVHSIAEIRATSVTYTTADGNDRSFTHXIEARDPTSILMDTNQACYHVSHN

SEQ ID NO: 981379 - protein, 50 aa, Homo sapiens
  misc_feature (16)..(16): Xaa can be any naturally occurring amino acid
  misc_feature (20)..(20): Xaa can be any naturally occurring amino acid
MQTWSSHHGSVVNDPXLVPXEDTGLIPGLALWVKDTMLLGSGIAAADRPY

SEQ ID NO: 981380 - protein, 46 aa, Homo sapiens
MGRVVRTAEDRLLSLTLCVGPAMVSEKQTISKGTGFETTRFMRNSG

SEQ ID NO: 981381 - protein, 62 aa, Homo sapiens
  misc_feature (31)..(31): Xaa can be any naturally occurring amino acid
  misc_feature (36)..(36): Xaa can be any naturally occurring amino acid
  misc_feature (40)..(40): Xaa can be any naturally occurring amino acid
DCGLESDYLWSDNLGITQMMSRVPEDSRVHXEVESXELQXSKSREVIPCAIKDTCMTDALLP

SEQ ID NO: 981382 - protein, 43 aa, Homo sapiens
SVAAGVIEDPREDGLRAGLTSEWALDLHRWGKGILGQRHSESK

SEQ ID NO: 981383 - protein, 74 aa, Homo sapiens
RDRGSPVRRGLYLAVVSATFVSQHLGGEAALNQEVSVEVVSGEIPNRAGLGIYKANFSGPRKVGRWSSACIRLA

SEQ ID NO: 981384 - protein, 92 aa, Homo sapiens
VWTTESQETDENQPSSFHVALFTYILMCYGKPFKQGIDMIGVQQLKQKQSSKKCQYYGKPATLCHRYPRLGNYNSSHMAHMILSTKQKRIVD

SEQ ID NO: 981385 - protein, 31 aa, Homo sapiens
MTAYYETNKKVGQRRLQAHCDWASRTVIVCM

SEQ ID NO: 981386 - protein, 36 aa, Homo sapiens
MLLGIYEQCGIGTNSENSLRAGRLMNTFQCGTDRST

SEQ ID NO: 981387 - protein, 80 aa, Homo sapiens
  misc_feature (19)..(19): Xaa can be any naturally occurring amino acid
VYCCIITLHGIHCIQLASXLATQHGVHCIQSGSIGPIVHAIHVHSLWDAFHTCCMDSSAFNHTAWNPLHSIGINGKSALT

SEQ ID NO: 981388 - protein, 43 aa, Homo sapiens
MGHAPWNQLHSIKLDGIHCINRDAFTTLRVIYCIQSRCMEFTA

SEQ ID NO: 981389 - protein, 115 aa, Homo sapiens
VWYIYMLMEYTASIGMHFTMLHGIALHSVMLHGMALPSIEMLWAMLHKIHCIESGMHWATLHGINCIQSSCMESTAFNRDAFYHAVWGILYSITLHGIHCIQFGSIVPKCMESTE

SEQ ID NO: 981390 - protein, 52 aa, Homo sapiens
MEYCIAFVEDEFCFVLPFAFSRAVPAAYGGSQARGRIGAIAAGLCQSHSNAG

SEQ ID NO: 981391 - protein, 53 aa, Homo sapiens
HGFGELLDWEARVKEDKDKFWISPSTIFRKECWGYIWNRANHYNVYELLTGAD

SEQ ID NO: 981392 - protein, 99 aa, Homo sapiens
ILTGGEVPAALLFGQSVGSVVYACFEAALGSEVRIWSHRFPEENVTVDVNSSEKLQLQECLGADSLGPLKDDVLLSETRGPQDNRSLCVFGTQWLYFTT

SEQ ID NO: 981393 - protein, 46 aa, Homo sapiens
MSPIANGYKYYRQKLEEFRKAKASSTGSFTAPDPGLKRKSPPEALS

SEQ ID NO: 981394 - protein, 104 aa, Homo sapiens
GDDYMTMQMSCPRLSYVDTSPAAPVSYADMLNRHMLQQEVSLPRDTMACLLLILSSLCFPDLGLNGGSMSCAFHSSLLRGPQGPGGHERLTPGEPTVLNRNQSA

SEQ ID NO: 981395 - protein, 58 aa, Homo sapiens
LEGRITFRDTELIHRTTVGVEPVADGKGVVVVIKRRYGQRKPGTSYGADHHHTRNATR

SEQ ID NO: 981396 - protein, 62 aa, Homo sapiens
ADPVESSCCFLHKPVGISTVVPIILGHCRGDPNWFMKKAQEHMREFTAEPAAGGKACHWPSD

SEQ ID NO: 981397 - protein, 74 aa, Homo sapiens
MGYERKFLRHRKNGVVILLMWGRLRRDIFEDLSEDSILAMVCLTCPLDSQLEKSTRLLIIGNSSQRERCGPDVY

SEQ ID NO: 981398 - protein, 39 aa, Homo sapiens
GPCGILLLLSYPLSFPYSTSQLPGGSVCACTTPTTQLNG

SEQ ID NO: 981399 - protein, 57 aa, Homo sapiens
MPAVHGTCFLAAGPGAMYFYALVEKPEVYFLSLVTNCENTGNGLPDDSDLRELGGHD

SEQ ID NO: 981400 - protein, 69 aa, Homo sapiens
SADGDRSKSPESLNSRYFLLPCIEITGVPHHVRRSRRHQLRNHHKDLQEQKEVVGKRQQNVKSTPLLNW

SEQ ID NO: 981401 - protein, 69 aa, Homo sapiens
SGAICILRLKTREEQDHNGSGPNPQGCLETCTYSEPQQRNRSKVAPAADRTLSGNISVRPNSLSDRVSS

SEQ ID NO: 981402 - protein, 67 aa, Homo sapiens
MAEGWGSFAGEETKGSSSLTPSDDCPHVSYMGVNHETYDNSLKIISNCLLHHQLLRTKHQHDIPWGF

SEQ ID NO: 981403 - protein, 76 aa, Homo sapiens
HALGVDSGGGADADAVSVLVHLPQEEYLWRTYLPLSYWCCPLLFRGAEPASSSSRMSSGYRRFSYFADDGDQHQHE

SEQ ID NO: 981404 - protein, 40 aa, Homo sapiens
GSGQCNQNLPQHVMATTTDAAQHESLSTSTNSLSTSTNSL

SEQ ID NO: 981405 - protein, 34 aa, Homo sapiens
LIVLVLVAMEYEATAAQALITAERVDAVLLAAAV

SEQ ID NO: 981406 - protein, 59 aa, Homo sapiens
EDPVESLLLRIPGPVRIRKACSQKCFRERLTVMRGGRLTACSVAGYMAMSAVICCDPVL

SEQ ID NO: 981407 - protein, 34 aa, Homo sapiens
MALYLDSLSNHGFLTLQRNTPSRQCGSTLSCDCH

SEQ ID NO: 981408 - protein, 59 aa, Homo sapiens
AGHLDGTSSEGLLAAYATESKECMDGAGAVSAHAMLQELALCHWESRLANDAGPAVPRP

SEQ ID NO: 981409 - protein, 33 aa, Homo sapiens
MSSNYKPYMSVKHKKHYSGELLPNSISKEEEEF

SEQ ID NO: 981410 - protein, 109 aa, Homo sapiens
MANLLLLTIWGALTTVVTPEKPIPIFIERCIEYNVSKDFWRGTDLPGEGGTISEPEAAAMMHRRELVDYAASRRKIPQGDQSSRIHQRLQVLMLGCLSYAASGARRASG

SEQ ID NO: 981411 - protein, 101 aa, Homo sapiens
RNSPPPRWDGGGKRRSSLPRWDGGGERRSSLSRLAARQRGSSRPRRWADRQRRSSLPRQGGGRAEAANLGTLGGQGKAGGEVEVVASRDHATALNLGTIEH

SEQ ID NO: 981412 - protein, 37 aa, Homo sapiens
VFLLLLRKNITGIQRGKIMAELGVVSREASETNTELR

SEQ ID NO: 981413 - protein, 75 aa, Homo sapiens
LGDCWSACPAGKDGRTGHLVQLDLLAFEALRITKALLAPLVPLALLALQCERGGGYDFRLRLETSTGTDQTSPQP

SEQ ID NO: 981414 - protein, 64 aa, Homo sapiens
STKVFTTQLEKAGAHIAAREPQGSSYSVPSVEAPMFVMGVNHEKYENSLKIISNVSCATKCVAP

SEQ ID NO: 981415 - protein, 60 aa, Homo sapiens
DRWTGGQAYGGTNRTSITSATARTRRPNGATETVESILARSTSTNSLSTSTNPLAPARIP

SEQ ID NO: 981416 - protein, 53 aa, Homo sapiens
MPTEERDRYRDRTWRAWIGRFPGPTRTALGCGTDGSVDAQVYQDHLDPLDQKD

SEQ ID NO: 981417 - protein, 51 aa, Homo sapiens
QLLVICESRCHKSKSLVGLEDDAVDLQSPQARTGFWGELVMTVHNGGSHVL

SEQ ID NO: 981418 - protein, 52 aa, Homo sapiens
DPVLVLRSFSWKVCGQGTSIFPSLSMATTTDAAQHESLSTSTNSLSTSTNSL

SEQ ID NO: 981419 - protein, 40 aa, Homo sapiens
GDLEDPRLVYSSWCSGAREFVLVLPLRPESLPAQSCRSCS

SEQ ID NO: 981420 - protein, 34 aa, Homo sapiens
MEFVLVLREFVLVLREFVGAVLCAKWNSCVVLSG

SEQ ID NO: 981421 - protein, 39 aa, Homo sapiens
MCWCCVSLFCMGYTRPHTGQGKELSLGVGSGLFFRSRLC

SEQ ID NO: 981422 - protein, 44 aa, Homo sapiens
MVEAEVEKSSGFRFKRLSVPFHSFIVVASVNVLRYPSRVHAHNA

SEQ ID NO: 981423 - protein, 69 aa, Homo sapiens
MDFMSEMRTYKKLLSPSNDKLTISNGPKNHSVNEEEQEEQGEGSEDEWEQVVPREQDFRHPPGGSSSDS

SEQ ID NO: 981424 - protein, 60 aa, Homo sapiens
MNDVDAGLPVSAMMNMAEATSDRCSDSCTRSIAHAATDITVLRDFVAMLQNLANHHYELP

SEQ ID NO: 981425 - protein, 52 aa, Homo sapiens
MRMAHCWWLLHTWADDANVVSVTCDLEVDTTLNEPRARQIDEHPVSPDGQPA

SEQ ID NO: 981426 - protein, 59 aa, Homo sapiens
MSGWQRVPELAGINPVLLQVGQAGVPTGLAIVLAAPPVLDSQVLGIKTNHVQVLQLFPG

SEQ ID NO: 981427 - protein, 71 aa, Homo sapiens
RVSTTLDEVQAVPRAAGGWQMNDAAGRRWRTMLQATDRCQCCGMDGQPCMASDRPMFCSVDPACGRGRCMT

SEQ ID NO: 981428 - protein, 55 aa, Homo sapiens
MLFLCNPACEIPFMMCKSVMSMEKSSGPRAEVEEMNEQLEELEDELQATDRCQDC

SEQ ID NO: 981429 - protein, 54 aa, Homo sapiens
HKFWRRCGLAQEVRGPLILNPHGGNVWQAACAWEGPGAARGTYPWVGFSGRLTV

SEQ ID NO: 981430 - protein, 58 aa, Homo sapiens
DTFGLLMPYIPKLLANSNLYGVGGLEEYSGWELADAMRPKSLGKITMPSARVLRYRGI

SEQ ID NO: 981431 - protein, 44 aa, Homo sapiens
VRLVLRIRNLITNSALFSHNFSSSSSLSPSPSSSIILGSSFSPS

SEQ ID NO: 981432 - protein, 117 aa, Homo sapiens
RNYAVTRIHSGCISHCCMESSALNHTAWNPLHSIGINYTKLHGIHLIQLRYTAALCIESTAFNRASWNSLHSIGINCAMLHGSHCIQSGSIVLRCMDSNAFNQDSIGPSCLKSTPFT

SEQ ID NO: 981433 - protein, 113 aa, Homo sapiens
MLSSSCSACGFLFSSREPSLSVVCPYIGRVSANFLAYNWAIFSQQFHFAQDSPELGLVIAGEEPAVGIGTQAGGKKGLEPAYRAHNRVQTICECQANVTRSPTIKVLVFKSAS

SEQ ID NO: 981434 - protein, 57 aa, Homo sapiens
IPNTEGGTPVGGGCGVLTEKSKRGGLKSVLQAVAEQVTEESQLPGTGGPEDVLQTVQ

SEQ ID NO: 981435 - protein, 126 aa, Homo sapiens
TLSNSCVTERRYRVDNFANARYILLKMCSKAVSHGNKPFSHHVRKLRASITPGTILIILTGRHIVKRVVYLKQLASGLLLVTGPLVLNRVPLRRTHQKFVIATSTKIDIMHVPIPEHLTDAYFKTK

SEQ ID NO: 981436 - protein, 61 aa, Homo sapiens
TVRQFLLGYQPRGKPRIEYGNVLTPEGFWYRAQVFPTVNGLFRWFTDHYQDPVPGITPSSI

SEQ ID NO: 981437 - protein, 82 aa, Homo sapiens
MSCNLCVCDLTRGTPRDDLWAYQGCAECGFSSDNREKPSGSRDKTIKLWNTLGVCEYTVQDASHSECVSSVRFSRFSSKRAA

SEQ ID NO: 981438 - protein, 64 aa, Homo sapiens
QSVQSQPEEEDEAEEEEAEELGTQETYADYVPSKSKIGKQTQTGGDDSTCQRPPQNHYTWPASD

SEQ ID NO: 981439 - protein, 124 aa, Homo sapiens
GNREKHDLNELLGEGASGLRWSYVTEQMQSPSLHKLVLGKYGALVICETSEQKTKLEDFGRRLGQHVVGMAPLSVGSLDDEPGGEAETTMLSQPYLLESSITLGQYVQPQGVSAVDHVRTECGE

SEQ ID NO: 981440 - protein, 44 aa, Homo sapiens
VRNTRQLPASIGSHCTDSQIVQKEAELGERAKEREKRRKEQEEE

SEQ ID NO: 981441 - protein, 38 aa, Homo sapiens
RFIADDFRASMLQSWHAQSVENDIMGSEVLMNNITKSR

SEQ ID NO: 981442 - protein, 46 aa, Homo sapiens
SLVSSFHSINAHFCKHMARFQQSNQTGKQYVPAAILFSAQCMHIAF

SEQ ID NO: 981443 - protein, 66 aa, Homo sapiens
CWSWVYGDGTARKANQSSAKQVISQWSFDNECHTVEKMAVFLYFEATAGVIVNNKGELQGSAIPGP

SEQ ID NO: 981444 - protein, 67 aa, Homo sapiens
  misc_feature (59)..(59): Xaa can be any naturally occurring amino acid
SWELRRTRHTSAAAPEGSFGVSEQQAVEAWEKLTREEEDTLTLYYSHWRKLGDREIQLXISGKEQQE

SEQ ID NO: 981445 - protein, 154 aa, Homo sapiens
  misc_feature (35)..(35): Xaa can be any naturally occurring amino acid
MAAAKSWGRAGSGLALSALTDDLPRSSVACHAGLXGPSVAAHLKANDMLSLLQLALCEFPLMLLRFLHKPVGISTVVPIILGHCQAAQSHQGPLHCCHVFASKEVNSLEHVSLDDPIVLSRLQELSHLLHLLEDHGGWVLGHLHGLGASGYRLS

SEQ ID NO: 981446 - protein, 46 aa, Homo sapiens
  misc_feature (45)..(45): Xaa can be any naturally occurring amino acid
WYQYCSAEEEDEDEEDGNERLTFLVGLIQKHRRRQRKIARGTCTXH

SEQ ID NO: 981447 - protein, 103 aa, Homo sapiens
CAGPAVVWPFAPWPRTDRDVKNIYWRLEQEELKEAAGTAPGQGFEKAYNRDRESRESKEEEVRCVTRVEGHEGHSEGQGKPWVSKVPNQNDLKKVGAKTTALL

SEQ ID NO: 981448 - protein, 64 aa, Homo sapiens
TTVRQNMFADIDTIRRASSPRQLERLNKKINENQGDETQGQHAPQRRYRRNFNYRRRRPEKPKP

SEQ ID NO: 981449 - protein, 69 aa, Homo sapiens
VGTCYQAEWYDYVPGLFEQLSGKLRVSFGDLNCPGGPKPCSPVQCCMYNRFLLFLPPLAWVRPDQSDGS

SEQ ID NO: 981450 - protein, 107 aa, Homo sapiens
HTEALIFTKNTKSSQVWWFTPVIPATRRLRHENCLNPGSGGCSEPRSHGCSPACATEQDAISKKKKRKGKENQPAWAKWQNLVFTKNTHKKKIYLAMGPAPCSPTLL

SEQ ID NO: 981451 - protein, 49 aa, Homo sapiens
FCVRVFHFSSEDHLLSGVSMLSISSLQTEIRCHSKMSTFASECSSSGAW

SEQ ID NO: 981452 - protein, 36 aa, Homo sapiens
MTTHTYIPALWEAKVGRSLEIQEFETSLDNMAKPHL

SEQ ID NO: 981453 - protein, 85 aa, Homo sapiens
MYMRLEAPAKRLRIDSTCLLAEDICAEGAYYIGTFNQSIEKHRSCFKSPADEACTFLTMGKLWTIQSHVMRPSEVNAVLEELAIP

SEQ ID NO: 981454 - protein, 63 aa, Homo sapiens
YPHKMHRVTEDVAALESRFPVPFANYISGTQKGSFTYFIEDLVSKALFRKVCICLTGTVHVVS

SEQ ID NO: 981455 - protein, 46 aa, Homo sapiens
RIPAVLPDLLEGLGFLYIKKSMLTKIPKNTIQVGRHPVTALPFLEV

SEQ ID NO: 981456 - protein, 48 aa, Homo sapiens
VTLDGSQLSLMVSRGEHKIAKLYKQLDDKDEEINQQSQLVEKLKTQML

SEQ ID NO: 981457 - protein, 36 aa, Homo sapiens
EYWAAPALVTIYHHSGGKSPSFRAGGQGGEPGPQVG

SEQ ID NO: 981458 - protein, 42 aa, Homo sapiens
MESVLLVLYDKEARDSYYYWGLKNTRAGECASYQMRPVRGSQ

SEQ ID NO: 981459 - protein, 43 aa, Homo sapiens
ETLRSLPDDDEAPQLLTASTWGRLSLLGVTLASLQERMKGQEE

SEQ ID NO: 981460 - protein, 87 aa, Homo sapiens
HLCPLSSHSALNEIKLQVNCSAGIRRVEAEHDYQFVLVSKGSYCISCYLVANSEEEKTGSGQNAAYAYVHKALILYTYQHFSDVTSS

SEQ ID NO: 981461 - protein, 88 aa, Homo sapiens
MSGSFLALGFVEGYNWNLTLRRKGMRERTFLALGFMEWPNWNQRYTEHGYARADLPIQDVEDVSFGVLEVLLHVIGQVAEDRNQVAAQ

SEQ ID NO: 981462 - protein, 37 aa, Homo sapiens
LDDPVIKATWLTHGSLSYSVRGVTTLSCHAVRKMTRS

SEQ ID NO: 981463 - protein, 80 aa, Homo sapiens
ELLAPFMMPYVSSCYVRHGPYCGRWCSRIALAYDYLHLHRTLSGMESYCVRAFADAMEVIPSTLAENAGLNPISTVSRPS

SEQ ID NO: 981464 - protein, 45 aa, Homo sapiens
HRLMSGKVTVWGHVITVVWADPVKEPDPEVMAQVKVIVCETLGYY

SEQ ID NO: 981465 - protein, 38 aa, Homo sapiens
SVSYYYCVVLTHLTAPVVSKRVLVTTISRILFAEVKTV

SEQ ID NO: 981466 - protein, 39 aa, Homo sapiens
LEDPTLTSRERWTVGARPQAAGLCVRVCVCYQRLPSSVL

SEQ ID NO: 981467 - protein, 87 aa, Homo sapiens
CVYSWFENAEEDLTDPVAETPWKNQSFARAHDAFCSSLSSAQDDFNQLGELNLQIKSFRVASNPYTWFTMDGLGEDLDEPYRKSSRR

SEQ ID NO: 981468 - protein, 34 aa, Homo sapiens
PDQCGGGFLLRDLICQILSDMRRQYEVMAEQNRK

SEQ ID NO: 981469 - protein, 129 aa, Homo sapiens
YRLAASEPKIEQDLSSLGRSYLTLELQHCCFCLGLRSMTLKVEQQHQVLPGLPAPVTLRLQRQQRVQPLGSSSNTLRSEQRQPLLLSGSTVPRSLSETSSHIFTRGLQLHETQARIAAPAPLGSTAPGP

SEQ ID NO: 981470 - protein, 96 aa, Homo sapiens
MGGDKFDPPVEIPLSLIARANHTGYKKVVSHLNYFGFVHQLGALLTLMSVYKKGESCSDIRCLFGVYPSYVPLLVILVHSWFLVRNWGMPPKADFP

SEQ ID NO: 981471 - protein, 52 aa, Homo sapiens
MDPPTVFTPKTLQTTSINQFITNINNKSNNDSHFFCVIHCAKCLRLPRCQTV

SEQ ID NO: 981472 - protein, 40 aa, Homo sapiens
MHWDFRNYLFTDKTEGRRLYEVSPISETLCCYSFLNAPLS

SEQ ID NO: 981473 - protein, 35 aa, Homo sapiens
VGLPDRSLPTQYGGFDETFSTPFFVLYTLRSCFVF

SEQ ID NO: 981474 - protein, 187 aa, Homo sapiens
KTLHPILSQIIILDIMIVHIENMHAQKWGSSRCTPFPVTGTRRDSNRRLTANLISFTLGRSLIPRFIFIKRLIMESQLSPCLISILVEKWPLDGWGFTRETDTPGSILKTLSGFPGQQSSLILSSASEANLTSMCSSSSELVRETIFSISTAFSSNSNCKSRIRGPIFSRFSLIMATNGMTFFMYFF

SEQ ID NO: 981475 - protein, 48 aa, Homo sapiens
YDWKMPLIVQFRVQGRQFHTVIPKNPQGPYANLSFYATVLYQRISGIT

SEQ ID NO: 981476 - protein, 138 aa, Homo sapiens
MYELQLTMHLQDSATLHVVHSNALLTPCKGTYIINHHFFKILGTGCVILVQKFSDFEKVIACIYQILPSTILGVSGARCYNQTRKHFSHKKQKYEHFEDEIKTYKQFYSTVCQILLPNEFTLVHILLLHKLPKNPLHI

SEQ ID NO: 981477 - protein, 150 aa, Homo sapiens
SPCPKRPSVDKYNVSGTNGTCLLASIVVLQLNLTYERNDNIDRVTMLLNIKPNKNSCQRELWCPPGDSGACTVRAPPALLFQFGMNASSSRFFLQGIQLNTILPDAREPCFKACKGSLRALEATVVQFLQVATRSEHVRVTKCVFSQYIP

SEQ ID NO: 981478 - protein, 52 aa, Homo sapiens
YPVSDALPVYALVLLILTESLAQWMKPALCSPCGNLLDSTSWFGCLDDCLPC

SEQ ID NO: 981479 - protein, 41 aa, Homo sapiens
AVRGGVSSPAWSFSCNTVFACMNPFLGPVSSSGPFCLRLAC

SEQ ID NO: 981480 - protein, 167 aa, Homo sapiens
GSTRDTNGTLSKDEAAVHQDGTANRYSYAILIIYAINSSPGQEDDPQRDFTLRLCDNFPYDQNAGIGWKNSIRHNLSLNKCFRKVPDLGMTLGRVPIGPIDTCPDISRKRREPPDDDLSQDSPEQEASTSPRGGVAGSGEASLPPEGNPEMLLQSPTSIASYSQGTG

SEQ ID NO: 981481 - protein, 35 aa, Homo sapiens
MRAEDEGGKDMDPLPLKSHLGLQGTSKDTEWYRPY

SEQ ID NO: 981482 - protein, 114 aa, Homo sapiens
  misc_feature (102)..(102): Xaa can be any naturally occurring amino acid
MNNKDWLRSRACPGMVDHRRSVVQDQPGQHGETPPLLKIVYIFVCLPVYVCQGSIFTKFKTATIIRDGANQCHPVFMQMKCCKGKQILYMLVTTHQEHMGSXEEGKKEKENTGR

SEQ ID NO: 981483 - protein, 74 aa, Homo sapiens
QYPSMLAWLVKVDVYSATCVCMSPWTKFRRDVSTVADLQISYKLEPGRRVFTTAVHASLYKFRRHVSTVLTSKY

SEQ ID NO: 981484 - protein, 87 aa, Homo sapiens
SSHACAGSLYISYCSTPSLRESPARVLMAAPSSWSLQPGSKPILVLNKVQQFLLTQSPYNHPIYHKTDFLGEASLTPLRDTKQQQSS

SEQ ID NO: 981485 - protein, 140 aa, Homo sapiens
RIIRWPGVSVQPGHDSKTQSLLKKKTQTSIGSAKATTAGPHGSILRSDRKSRKVVGATKPTARESKRQAGPVSTGEVRKSHGAPLGPLSIHPSALGGGLEAATKRDLFENRSPAVYFPAVSLPPSLSGREPKRESISLLP

SEQ ID NO: 981486 - protein, 43 aa, Homo sapiens
LTIALSSSENSQQLYYVLYLRMINFTDGIHISRTEESPLHGPL

SEQ ID NO: 981487 - protein, 51 aa, Homo sapiens
FRSFHMWCLPLSSLQTPAQAELACATHLTHARGCGGPIPPFNTSNSQTSSK

SEQ ID NO: 981488 - protein, 142 aa, Homo sapiens
LANETLRPQIMELTVLKAERLQVEIDQKKDADNLVMPSSRTVALTPQGSRILRKHEEEDDKDSLKTEAKPRLRVRPSQLPLDPYPVGSWDLAVLFCVNFRLKGKDMVVDIQRRHLRVGLKGQPAIIDGELYNEVNVEESSWL

SEQ ID NO: 981489 - protein, 41 aa, Homo sapiens
SCEAFNMIDQNRDGFIDKEDLHDIACFYYGKNPTRCIPMMP

SEQ ID NO: 981490 - protein, 74 aa, Homo sapiens
RYFLQEHGRLYHVRHSSVHSAILCKRRAGYCSVCYLLQVKERRDCNIPWGMDRELINVCHSCHYQGEISNIVSY

SEQ ID NO: 981491 - protein, 174 aa, Homo sapiens
  misc_feature (147)..(147): Xaa can be any naturally occurring amino acid
TSDASLLICRDMIPQDGPLYTLPLSQRLVDLPCRTGAPRVNAIPAASGDPLYLPMTPLIGGRHLAIGLDPPCCVRGEPDVVEAEGFGKPPFVILCFPSWPGSWPTSWGDSRPCLCAPRQPPPSCKQAHRAPRGGHLWVNHPHIPPAXTAHLEISFPKLPHVCPPPLSTADTCTG

SEQ ID NO: 981492 - protein, 70 aa, Homo sapiens
LQESLRKPSRCSHLEDHGIPILSEDYSISFWFQDAQLKDHMLAVPLLNLQVILLKSLRVYLYSSQRNRQQ

SEQ ID NO: 981493 - protein, 100 aa, Homo sapiens
CSIVYFIMGKIIRPGVNGLGSLDVGEGTCSGTLVRCLTSEARWTHAACGNSGGTAAQLPPPPSHIRYSRWGSTSPDQLAMIFSDQDLGKSVNALLGSRPF

SEQ ID NO: 981494 - protein, 121 aa, Homo sapiens
SDGLDAQCGQPQSSIDAIRKHLMLKTVLFVAHQLQYLVDCDEVIFIERGLYYGKRCPLGPDYLYGDYATIFNNLLLGRYYLTVEINSKKETSGSQKKSQDKGPKTGSVKKEKAVKPEEGQL

SEQ ID NO: 981495 - protein, 167 aa, Homo sapiens
  misc_feature (48)..(48): Xaa can be any naturally occurring amino acid
LWLSDPQLWLHPYLVLLSHLESAGPLGPTANHARDSPGDWEGIRRSSXPSHPRPASTTTQRQRGDCTHHSSREAVVAHFQHSEEDHLRPLVARSDAASSALPVVCVKLVTPVSPGHFLKAAVGSGQTVEKEVKWRMFPAKGMSWIPGAWSAWLAAPFTDTTDRKTWC

SEQ ID NO: 981496 - protein, 82 aa, Homo sapiens
MRPEMPTSHHMLSQVAQFPVQLPSLRCEEPDLQSLEAHDRGGVVQQFTCKMCQYRSSTKATLLRKMRGTQLPSSSSSRKQQL

SEQ ID NO: 981497 - protein, 133 aa, Homo sapiens
LGSVISKMSEMIKGYLSPFFLLKKYVFVLFEVESRSVVRLECSGTISAHCNLRLPGSSDSPASASRVAGIIGACHHARLIFVFSVETGFHHIGQAGLELLTSNDPLASAVRSAGITGVSQLYLAMKLLKENRG

SEQ ID NO: 981498 - protein, 82 aa, Homo sapiens
CLWDRHLTNLEVCIRGKTKLLDFRSWMRSPTDSPQLCRSNRLTKIDGLQNLRETCGEPVPIAYNWHSRFIRGASETQLTILH

SEQ ID NO: 981499 - protein, 173 aa, Homo sapiens
EDPPQVILNAVGLDEVVVFVISEKRLGQLSEEGLEQAADHIEVLPALILQVDVTRPAVELLLQAGHHCIVAGHSVNACGLQPSCLHNATACSHDEGDALVLRGWLALLQPDPKRPRSGLLIFLDDVDAPGGLGGCSTVILAPCGQVLSPEATCRTLLEELRLEAPQYLMALAS

SEQ ID NO: 981500 - protein, 38 aa, Homo sapiens
AGITTCEPPHLAWKEPLKISLRLVSRSVMQDTGESCYA

SEQ ID NO: 981501 - protein, 102 aa, Homo sapiens
MSTAYFVCVCVCVCVCDGVYALALLEYNGTILAHCNFASQVQADSPASASRVAGITGMRHHAQLIFSIFIRDEFHYVVQAGLELLTSGDPSASASQSAGLQV

SEQ ID NO: 981502 - protein, 66 aa, Homo sapiens
QSVLVAWGTGMAACGKVGVAGGRRAPCQEIETRVSSRLTAHFPPSFKIFHHIDKTVKNKSKRTFKI

SEQ ID NO: 981503 - protein, 47 aa, Homo sapiens
SGNNRTLVYRMNTRDSTHSRIQDGPKRDTIDNGHNRQVNVRLPGLRG

SEQ ID NO: 981504 - protein, 136 aa, Homo sapiens
GLSDRCAYYKKDGSDFAKWRRVLYDWGTLLLSASPSCENANVLARYASDLPGKMALMPIDGACKSSLIGTDALEALPLMLTKKVLAAVYKALKDHHIYLEGTLLKPNMVTPGHACTQKFSHEEIAMATVTALRRTV

SEQ ID NO: 981505 - protein, 36 aa, Homo sapiens
QAEKLELYIELHKYSLIKGNSCVYRMTEEIVETSVS

SEQ ID NO: 981506 - protein, 72 aa, Homo sapiens
  misc_feature (38)..(38): Xaa can be any naturally occurring amino acid
MQSLANFSINEMTENTLTGRAVQLLRSYMSSLTHYTSXEKPIHGPVTTNAVLTFQAPLCIQHNLSSGLPLGH

SEQ ID NO: 981507 - protein, 151 aa, Homo sapiens
CCGARASEFVDDSAIRILAVKPPELGSSITKQYDVVIGINTSPAPPIWNACGVRFFFQPGSNGIWHCEYIGLYDLLLGSLKSLGPVYSATEAREDAADAVSQSSVCAPALGYGSVWAGFHRFHSLRRCAPERRSRLLSSRRGHGQVGLTES

SEQ ID NO: 981508 - protein, 60 aa, Homo sapiens
IGYPGPKGDRRPVAPPGHPVSHLALEDTREKKETKVTKSMLFGEGRRSIAVKRVSSQWQD

SEQ ID NO: 981509 - protein, 45 aa, Homo sapiens
LEEPHSFSAPERSIATFLYYPYEDNYTSSICYENRIKFVNCNSLN

SEQ ID NO: 981510 - protein, 45 aa, Homo sapiens
MSSRSHFQALPSIPECPLDQDPTFSRDAGSPPLGSGSSPNSAAGR

SEQ ID NO: 981511 - protein, 33 aa, Homo sapiens
  misc_feature (11)..(11): Xaa can be any naturally occurring amino acid
GKSNSILLTDXTVSRYYAYSPIITENDTLKDSG

SEQ ID NO: 981512 - protein, 59 aa, Homo sapiens
QARSQVPPWIATTLRPGQSDLTCSRASSVLRVFFICLRDARRRKFLGCPHSIFQVLELD

SEQ ID NO: 981513 - protein, 99 aa, Homo sapiens
LKCIVECDVLWDVDIPVGSQGDWGLAGRRMLLSPPGGWANTMCLFLAQLETDTAFSVMKRWALRGRLVGVARYILTTSSKRALSQSRGKGTEVWLFSLQ

SEQ ID NO: 981514 - protein, 47 aa, Homo sapiens
WWVDLLVPSGSKCTRSAGQALEGGVTSTSRVTNQIGIISPGSSGHHG

SEQ ID NO: 981515 - protein, 115 aa, Homo sapiens
MVEVGPFQLMRSDCISCIRTACSCLLFMSLMYQATQGHGVNGILHHLKKPSSSSSKCMGTFLEQQVVLEDALELASAGEEAQGQQALVAAPAGPEKKFGLAACPRMQFHRWGPGT

SEQ ID NO: 981516 - protein, 44 aa, Homo sapiens
MPSPKITLTHSLVEANVGVARPGDFSQLHGWGEVSSHVELSQLL

SEQ ID NO: 981517 - protein, 101 aa, Homo sapiens
PCAHLACCGAAAPCVSPSPTSQDSKLSQCCKTPSIALNLHLVGWQGTFWGQIDQPFLLSPKPHQHLAGPAAFTGRYPLSPCTWISSGPCSENPVHPGPAFA

SEQ ID NO: 981518 - protein, 44 aa, Homo sapiens
EGTLISKQQRTPRSDSLLTITTTSTSTPCDQQHRDRQRRLPISP

SEQ ID NO: 981519 - protein, 76 aa, Homo sapiens
LPTRMRLYDGTLTKSYGASGGYMELQTALSETTGEAHSHSAEYGTSLSPPVGEQIITSMKCIMGQDGTSLGKSFFS

SEQ ID NO: 981520 - protein, 104 aa, Homo sapiens
  misc_feature (3)..(3): Xaa can be any naturally occurring amino acid
  misc_feature (11)..(11): Xaa can be any naturally occurring amino acid
MIXRVTDRDIXCQIAYRRIEGDMIVCAAVSHELAQYSVMCCADKLCCSIFVLVCCQARRLLNRFGMDKIYDGQVEVLVHEFIVESIDVQPGAFTCYLDAGLAKN

SEQ ID NO: 981521 - protein, 113 aa, Homo sapiens
  misc_feature (16)..(16): Xaa can be any naturally occurring amino acid
IEDLPRSWCCCVLSRXHPGGYVTNHIYTWVDRRPQHFPPLGCPAHGGALRQQEGDRRSTLHLLQGGDETKVSGVGKGGQPLRHRYSPSEPRTAELLWRPQEEAGSVQALSSLK

SEQ ID NO: 981522 - protein, 102 aa, Homo sapiens
MTHQQQHQGAVRQQLAEAEAAVGLAVMETCCGGATPGWKPLVIYPSVPRAEGGPRSSWADSCPDFPTFGTFHFSLLLNGPRSIPVKHLVHTCVPSLFPIPTA

SEQ ID NO: 981523 - protein, 88 aa, Homo sapiens
MHEGPAYLYSWEVAADCAYVTGGLCLTSTHVPVGIRTVDVTKSQFLINGKPFYFHGVNKHEDADIRGKGFDWPSLKTGVQAATGARGQ

SEQ ID NO: 981524 - protein, 99 aa, Homo sapiens
  misc_feature (63)..(63): Xaa can be any naturally occurring amino acid
IPLIVGYLLLSVLDTAELIVCEHVYKLVPSGSSDHAHMHQNDVYMARTRATTVSETHADLINXDVLFLLSRVLLLVRNTQLVNENGSTLDLSDLEAEKL

SEQ ID NO: 981525 - protein, 117 aa, Homo sapiens
PPIYRGRQRDKCASGSSAINDVDSHHLRVASSSYNIGSSAEDNQTNRLQEALEPLQEHLGTTDGYAPSTSRTCTYNKQDTSYAEKVLAREIEDRGLTIPEFAPYTNYLRMLLPEPGE

SEQ ID NO: 981526 - protein, 44 aa, Homo sapiens
MIRSAPTRCSVLLLVLLLVFWASLRSRQPCEQDEIQRLPGLAKQ

SEQ ID NO: 981527 - protein, 46 aa, Homo sapiens
AGPGEALSEALPGDIEPTLTPVKSFTQSFMVHFDRFYFLFPESLEF

SEQ ID NO: 981528 - protein, 50 aa, Homo sapiens
MMSWYPTAGYWLVSGCSAAPTGPQNGHFRPPVDTRAKVVLPPSLPESLEF

SEQ ID NO: 981529 - protein, 50 aa, Homo sapiens
SRGSLGLTSGEQTHPVKAHRPPPPSSCRPCFSPDSNPRKNVLLREESIPS

SEQ ID NO: 981530 - protein, 51 aa, Homo sapiens
GQAQVRGVMWRTVESLPGGGTCVEWLRRYLEDGKETLQRRDAPQKAYDYTT

SEQ ID NO: 981531 - protein, 33 aa, Homo sapiens
MRNQNSTKRKVRWQDCRHGSPDPFLRGNIPYRE

SEQ ID NO: 981532 - protein, 47 aa, Homo sapiens
VPEFGSLGATAVYVMQNAKPSRHIAPCCSSEGQAGPRAGLFALVTPR

SEQ ID NO: 981533 - protein, 147 aa, Homo sapiens
  misc_feature (46)..(46): Xaa can be any naturally occurring amino acid
QDLNRQHTRMYSSQQGPVARPDAHDPRIKNLSASGRGPAAGVRFPXHHSLKVCNDLSSKFLYLPKPNFYNVPPESSGGPSTCKSLTGVRGAPAPQGGRVEPHTVTFSITLSATWTSSAWTVTAAWLAAYVLVILPVLALAEGGAVVD

SEQ ID NO: 981534 - protein, 125 aa, Homo sapiens
RVKQCPSSQLLLASPTTGVSSLFVCLRWSLTVLPRLECNGAILAHCDLCLPGSSDYPASVSQVAGITSTRHHTQLIFVFLVETQFHHVVQAGLELLTSGDPPILASKSAGITGVSHHAQPWCCVY

SEQ ID NO: 981535 - protein, 129 aa, Homo sapiens
  misc_feature (32)..(32): Xaa can be any naturally occurring amino acid
SRQACGRRTLMIQDKNCRDGRGLAGECAPRHXRLKCVNDLSASFFTFPHPSSQRPPRVLRGAFDLQKPHMSARGPSSQGGRWSLTRSPSPSAFSHVDFVCLDGDSCCLAAYVLVIYPVLALAEGGAVVD

SEQ ID NO: 981536 - protein, 49 aa, Homo sapiens
RGVSGINDAEMRYTEKQRVDFLGEAGIMGQFRHHNIIRLEGVISKYKLS

SEQ ID NO: 981537 - protein, 168 aa, Homo sapiens
MRVGRERPGASGEGTSRRRVGRECPGAKTGAWACTRSTGGGRRQLQNRRSDRERSPPQLCKETHKSQASHPAKELWTLPLPELFFANCRLHLKRSHHNEATARETDGSRDEATSNRQRHTTSKKFSHRKLKEQIQDFREGIPEKKVAHELGELRRRKDDPEERLPRGA

SEQ ID NO: 981538 - protein, 73 aa, Homo sapiens
FSGTSRELNTSALPDFSGGDLEEQPSPHAGKALTRSGTYVDKATASTPQKDPSHEGSPGRPLSNRRADLTPGM

SEQ ID NO: 981539 - protein, 55 aa, Homo sapiens
MARLPLPVVHQGNEKKVPVLQTIQPHLASSEEEREIPLPESPEKDEAAVPQIGYL

SEQ ID NO: 981540 - protein, 99 aa, Homo sapiens
DPDLVERQSGTRAPHVNSGTTPCTCSRLNSYWGMFAAFTSAPAPHFPKSSINPGKYQIYVLQLGKGRQGTGRERRKERSESPTSFQNVHENLEHIWSLR

SEQ ID NO: 981541 - protein, 187 aa, Homo sapiens
RGSYETRLSLLSCTVCWTVPVPHLPGTAGGHMHTQPSCPQGALLALLGLPFPQVNRAPVQPAHSVLFPAVFSFYFSQTFCLFSVSNMIVDMRLKPLGCGGEIGSEMDNLATVSPCFPTPASWNMQQLLYPSPRCSGSRDTWANGPSGPKVGCGALDGSSGPDMNYSCSSSLYYCFTRAVLAQICCVS

SEQ ID NO: 981542 - protein, 49 aa, Homo sapiens
THTPVLASRTRALIGDRPEPGGAEPQQNTVFDAKRLIGRKFGDPVVQSD

SEQ ID NO: 981543 - protein, 54 aa, Homo sapiens
IGVEDPDRTTPSYVLYGHERSSGIRQNKLAEPEKRVCREAVIGREFGNRLWRRT

SEQ ID NO: 981544 - protein, 81 aa, Homo sapiens
GRVRTKNVKKAGRVIIRYTYYTRLGDDIPHWNKSVCKDDRTLSPVKKLREQSVSGLCHYILMKLNSEEASVSGISMHAARS

SEQ ID NO: 981545 - protein, 103 aa, Homo sapiens
MSDWYTELEKGVIVLVENFYKYVSKYSLVKNKISKSSFREMLQKELNHMLSDTGNRKAADKLIQNLDANHDGRISFDEYWTLIGGITGPIAKLIHEQEQQSSS

SEQ ID NO: 981546 - protein, 69 aa, Homo sapiens
  misc_feature (1)..(1): Xaa can be any naturally occurring amino acid
XVVLELLVGIWAVPLTLYGSSGHGHISRKQKMMKSVLTTATHVSQRVSCGEQTPSPNVMATDHSWDSHY

SEQ ID NO: 981547 - protein, 128 aa, Homo sapiens
MDSGSLESAARSLIVHSLSLCDKETQVITNLRIDSPALPFHKQTPTPSDITLMLVRITKQMPLSYVSNRPSGVAHNNRLNTPSGVHNRTLPVTTASKDSRLLKNPSDRRTIHPLHILKDIVRKTTGKR

SEQ ID NO: 981548 - protein, 50 aa, Homo sapiens
SSTTVVTVITWRVDCDVPQQHCNRLAFCMLLSTGPHDTISEFPPHKTRAA

SEQ ID NO: 981549 - protein, 87 aa, Homo sapiens
GGSTHVLRPPDMKVSASALMFSRHFYVHSSRPNGLMLLLACDIVHNFTDAVIQERCRTLTSQGVDDFLQARGKSTTLDFLDVLLLAQ

SEQ ID NO: 981550 - protein, 39 aa, Homo sapiens
SSGTEYGSLGDSPSCYVAVAATDPCQPGTDVVPQSTSAM

SEQ ID NO: 981551 - protein, 44 aa, Homo sapiens
SIWDQYAHMQSRVNYGCIIRYLQRQLAPQVFLICLFLHIGRGHI

SEQ ID NO: 981552 - protein, 119 aa, Homo sapiens
MRNCDVCCGTMLTASLLEVCIELSWRLRLVVSSLMVAEDKVVQIPVDCLDQIQSAEAYIIDGLVVNAKCLISILYQLMDGEGGIVGLTTVSDTLGEGTTLKVFMMRSGYSSRILLIRRV

SEQ ID NO: 981553 - protein, 35 aa, Homo sapiens
PVRVDWNDMLRSSPVVIDASTAIGAPSNLRFLATT

SEQ ID NO: 981554 - protein, 30 aa, Homo sapiens
MTTRLSGVTLTTLRGNVLPRSYTCMCETGT

SEQ ID NO: 981555 - protein, 79 aa, Homo sapiens
GQDSTMLLAVESGSSCQQAFLLDAQAATSAKGDAGSPETIMMPSLPVRLSQAARSGFPLTVPGCQFTSWPLLNCLSTGP

SEQ ID NO: 981556 - protein, 38 aa, Homo sapiens
ANSEILRMVVCKWLHPARTLMSRRHMFSWGNSLGPSTL

SEQ ID NO: 981557 - protein, 130 aa, Homo sapiens
VCSERGRTSSLGVTWGHEAGKEAVQFGLGSSPYPGTGLGRKQTKRAKVFHTGVHQAGKEAEKLGQGVNHAADQAGKEVEKLGQGAHHAAGQAGKELQNAHNGVNQASKEANQLLNGNHQSGSSSHQGGAT

SEQ ID NO: 981558 - protein, 108 aa, Homo sapiens
SERRRRELVEIPGPSGSSLVNIVPLELLLHKVSYHLLLELCLGISNEYAFYSDFVLADFSAPCYLRIFSSLNLKIETVVGMLLHFHMTFMLYWNITCYEVILHTTSKP

SEQ ID NO: 981559 - protein, 182 aa, Homo sapiens
METRLREGCAEDEGQHQCSWQQNQILQARTVAPLSLGKKGGLCLARLRFQICCHHGPFRVLGNSWLLLNQGELGLQDQVWSRPKYSPGSAWIRCQCLSLGSRSTPDPRLDLAPFEFCFPLELGSGPWASIYPCVASVLSSDWVSLHSECSLLGHQGGAVQSCQVLNPPVPRSQTGAPWVQSS

SEQ ID NO: 981560 - protein, 57 aa, Homo sapiens
SLLIRQPNRGADPGVRRAKKGHGRKTTNLVGGASKLEAGITFRTTQGDVGPQESTGE

SEQ ID NO: 981561 - protein, 110 aa, Homo sapiens
MESRSVALKSSGTISAHRNLHLPGSSSSPASASQVARITGMAQLIFVFLVETGILHVGQAGLKLLTSGDLPTSASPSAGITGVAQQYLVSKHFLFNSYITFLMLGLCWWV

SEQ ID NO: 981562 - protein, 139 aa, Homo sapiens
  misc_feature (34)..(34): Xaa can be any naturally occurring amino acid
LESSLVYGMCPKRMGQVTHGPEICFLKPQPWPSXPQTCVNFIFSSFFYFFFFGEGVRLLWPRLDVNGAIWAHRNLVPPEVKRISGLNLPNSWDNGHAPPHCGKFGISSGGSGSPCRSGGSRTPDLRVICQLCTAGEPEL

SEQ ID NO: 981563 - protein, 87 aa, Homo sapiens
VHRESSHFPDEVTEYRLTAIGAKADANRKGSCHQATNNTTASPGAQNACPGDTFSGNPLSTRDCCQSRHPARRAQGIAFGKPMYSPQ

SEQ ID NO: 981564 - protein, 52 aa, Homo sapiens
DQDPKKTLWVSGCQTRWAGFNRSSPTEQLVPMRCWWFGAFCFFFYLGVITVV

SEQ ID NO: 981565 - protein, 35 aa, Homo sapiens
RRHSGTVILRGEPEKLGQALTEVYAKANSFTVSSV

SEQ ID NO: 981566 - protein, 47 aa, Homo sapiens
LGAALESAGKLAELEEALKKAKQDMALAAVSEVPVSSGHTNAGPVTW

SEQ ID NO: 981567 - protein, 48 aa, Homo sapiens
SHEDTLGSLDTRLLARILELRMAHCVLNSVAGTVWHPLVALNNGNSKG

SEQ ID NO: 981568 - protein, 118 aa, Homo sapiens
  misc_feature (15)..(15): Xaa can be any naturally occurring amino acid
EHSTAGSAGLQQSTXRDHHCQRWPSVSSLAGTVSLYFLLPTFQGFQKETDPVSPKDWICDSTRLKRTPVLKAGTWGWVSHTPYVCPLDRVRLKHQGENMCFFSPYLLSHPRLSLSQGL

SEQ ID NO: 981569 - protein, 45 aa, Homo sapiens
RSAGGMGLYGFWMLLKDKHNMMMMKMTEQIQGTRENCLQLLINQR

SEQ ID NO: 981570 - protein, 41 aa, Homo sapiens
  misc_feature (6)..(6): Xaa can be any naturally occurring amino acid
PTDIWXLWSWELRIVRSLGRAITQSSGWLLDYSCAQKRLML

SEQ ID NO: 981571 - protein, 35 aa, Homo sapiens
MQMVKNVPQQRAAGSSIPACPASRLVLSPCCSLAR

SEQ ID NO: 981572 - protein, 135 aa, Homo sapiens
  misc_feature (49)..(49): Xaa can be any naturally occurring amino acid
MSESVVDSGCAGRGRKMGMSTGLAGASSKRCMGLSLGMRPLCRLMPKQXQGSYTRGLLRRVPPLETKPLTKAPTHRLLPSPGRLSPRLTLLGITWLIPNPRNSWCSAPPTDWSQPLRVAVAKAFGPWGLDVSSEV

SEQ ID NO: 981573 - protein, 53 aa, Homo sapiens
VTDKELIAYSAPGCRGRGPLDPADCRVLTSESGQVAGVRAESGSFCLSVNSLL

SEQ ID NO: 981574 - protein, 74 aa, Homo sapiens
PDCEQVETEEESFSGSMCNQMTDYKHGFRISMKTLFYGNSFLKLWHLEKTDVERFLTLPVDESLRFKKYTLGRV

SEQ ID NO: 981575 - protein, 45 aa, Homo sapiens
SVALASPPSSTQKGIIKLYFLSFFFSSSSLSCLYACISGNMTGLP

SEQ ID NO: 981576 - protein, 137 aa, Homo sapiens
TLIISPPALAVATHTVLSAFSWLRNEVLRAEASFLFPSQPALCWPPTLMNGRLCAGRRSCCPPDLPVPCEVGLCGPPSDAPDLSQMVGRRGGAVTSLSAAPSVPSSAPRLALWEYALLRGSGVLSLLDVQWLPIGSG

SEQ ID NO: 981577 - protein, 106 aa, Homo sapiens
GLLFSYTGLQASSIKVGLCVEHLVDAAMIKTDYINCPFKEEPSFLVCEIDSMQDELVLESTTFVSLRIKPAKEDVECPLVVAREGLPEMVAVAAAASQNLLSCILL

SEQ ID NO: 981578 - protein, 112 aa, Homo sapiens
KVSRARIGDWTKDILVSSDLTVGQCYVLDLEANHLRAEDALSRSVENVIPPSSATMGQVYQEHHEEDFFLYIAYSDESVYGSVKLLPLSWRGVSFYKERGGPPFLTSSSFKL

SEQ ID NO: 981579 - protein, 75 aa, Homo sapiens
MLTLLSTQRILEPDDFLDDLDDEEYEDDTLKRRGQGKFKGRGVGSVRKKLAASILEDRDKPYACDSECLTSGVGR

SEQ ID NO: 981580 - protein, 84 aa, Homo sapiens
MWAEVSGASAIHSRFLTAALRGRGSDTFVVQLDASKVPSWLYCTTPTRVPVSDLGSLAMAPSLLTTLMTGDFSSVKLVYPMLSE

SEQ ID NO: 981581 - protein, 41 aa, Homo sapiens
GQGVWPSMSSPPRMTQTELGWARLTTNGRRSQTYEVCYATG

SEQ ID NO: 981582 - protein, 39 aa, Homo sapiens
EPALKNSPVGISPTAKAHPKHITIAQQQLVFLEGRKKQL

SEQ ID NO: 981583 - protein, 82 aa, Homo sapiens
  misc_feature (73)..(73): Xaa can be any naturally occurring amino acid
RCVSERVNNLPTVTQSPHDRVKRGVASRGCLSTALCHWTAPSMPSESHASVLGPPGFTFVAVEHHVVIPGSRXGAQGLEFEY

SEQ ID NO: 981584 - protein, 64 aa, Homo sapiens
MQMLTYHGRLHQKRSPSPCDQIVTYKPCLKAAIHDFCPLKAYPMAVDLCVMPGIPSKHSLRPGY

SEQ ID NO: 981585 - protein, 64 aa, Homo sapiens
  misc_feature (57)..(57): Xaa can be any naturally occurring amino acid
LLKRLADLIERDRTYLAGYYAGWADKYHGRTIPIDGDFFSIHTHMTPVGRVRAASFXLEFPDSC

SEQ ID NO: 981586 - protein, 71 aa, Homo sapiens
MAGVGDGAEREDSAALASKTDVQLLDSRQTSGGESTPDVFLPQSPLGTAKHPCSTGPPMSERPVQVVRNTS

SEQ ID NO: 981587 - protein, 47 aa, Homo sapiens
SLHMETGESCVYPTQPSVAQQELVHQEEPQGQGGMSGYGEQHDLMDS

SEQ ID NO: 981588 - protein, 56 aa, Homo sapiens
KLQNCHCAKDGGATCLTKPTFTFCVECSSRELAWTAYACCSSCTGPRTALQIVHGS

SEQ ID NO: 981589 - protein, 103 aa, Homo sapiens
RYSQIRYTRRCTRRGSDWRSSVMAGIHKKVARNIGISSEIQRRRNKSTVVSAWLNVHVRLIHEYRVHNSSSFPREALVPPIKGDRFCCDELEYWPTQLTGTGH

SEQ ID NO: 981590 - protein, 33 aa, Homo sapiens
DPDFPLLIGPLLPLAVFHIVDPAVIPVHSEAQQ

SEQ ID NO: 981591 - protein, 110 aa, Homo sapiens
SRTSLLQIRVGINSVVMKEKERVKPGVVAHACNPSTLGGGGGGGRIMRSGDGDHSKTPSLLKIQKISRVRWQVPVVPATREAEAGEWHEPRRWSLQRAKIAPLHSSLGDT

SEQ ID NO: 981592 - protein, 76 aa, Homo sapiens
LKIIINAQSLRIAEYSFKLGARQRAQRKKTGVHNANIMKLGDGLFLQCCTEVADRYPQITFENMIVDETTMQLVSR

SEQ ID NO: 981593 - protein, 83 aa, Homo sapiens
  misc_feature (29)..(29): Xaa can be any naturally occurring amino acid
  misc_feature (38)..(38): Xaa can be any naturally occurring amino acid
  misc_feature (68)..(68): Xaa can be any naturally occurring amino acid
MPDIGGPFETVWFEDNVPCVVVHTLPPPXLAMPGIESXPSRSRSKCGTAKGFRFTLFAPKYKSRSSIXGALGGCPVVQGQMPR

SEQ ID NO: 981594 - protein, 142 aa, Homo sapiens
  misc_feature (20)..(20): Xaa can be any naturally occurring amino acid
  misc_feature (27)..(27): Xaa can be any naturally occurring amino acid
  misc_feature (51)..(51): Xaa can be any naturally occurring amino acid
  misc_feature (109)..(109): Xaa can be any naturally occurring amino acid
LRVSRDPDQAEQKEDLCYLXGPSLRPXRANDYAAPRTHQEKLTGIKHELQXNWLQRGQGRCTLAEKLGGSAVISLEGKPLEPLLAPCLEHLAAPHLPLGVAGWPLPARXEGLGGSQQGEGNPFTPVAKQTPHPLDFPSPSIP

SEQ ID NO: 981595 - protein, 182 aa, Homo sapiens
SWYLRIHETRLRSEIDSQKQCATAGRIADAEQVEEMALKDGKNKLERLEDGLEKGKEGPGRLLKEYEELMNVKLALDVEIATYRKLLEGEECRLNGEGVGQVNISVVQSTVSSGYGGASGVGSGLGLGGGSSYSYGSGLGFGGGFSSSSGRAIGGGLSSVGGGSSTIKYSTTSSSSRKSYKH

SEQ ID NO: 981596 - protein, 54 aa, Homo sapiens
LEDPMETRLSGRLCTGGLGSMLRSLVGWDSEASMTPPKSRSCLELLVHRFIPWS

SEQ ID NO: 981597 - protein, 134 aa, Homo sapiens
STGSVSLHRFFIGLAFKKTTFAELCPKVGQSDTPSTMRKKLVWRECCGKKPTIPKRSWNGQSGNQRPWVGIGGKRKSGLAGCSSRPPGSFLSRVMLTGTLSDRQPGELQLFRNYDAPETVREPRFNQNVNLRPP

SEQ ID NO: 981598 - protein, 77 aa, Homo sapiens
  misc_feature (1)..(1): Xaa can be any naturally occurring amino acid
  misc_feature (3)..(3): Xaa can be any naturally occurring amino acid
XDXAEHGECPRINFGPLMAGGPTGSGGPLACLEATAYMATICAQAWLLSPSNLVLFQGGGNSKNNYWNGKWACAPES

SEQ ID NO: 981599 - protein, 41 aa, Homo sapiens
GLLRYSTGSYGDQAEPLPTRCTQEPLETVDCTTEMFDLSKR

SEQ ID NO: 981600 - protein, 70 aa, Homo sapiens
  misc_feature (2)..(2): Xaa can be any naturally occurring amino acid
VXHCPIETKFCGFGHWRRLQEHQETQCSECRGGEDPHSFYFPGQFAFSKCLARSEASTEMRGAPGPLRVV

SEQ ID NO: 981601 - protein, 81 aa, Homo sapiens
LYGLNAGMPYAPVLQRELSVDGLHRPHGLGEDVHAGAHFTVFIFVRAASVICLLHAVVALQVLCSSEKQQQQQPACSSDRR

SEQ ID NO: 981602 - protein, 75 aa, Homo sapiens
SLIRPGNYKRTRYRLSFEATLQPATFALLLFFTKLNHQPARNNAGLCSISWQCTPTIANSTYTSFDLCYAKTHKL

SEQ ID NO: 981603 - protein, 119 aa, Homo sapiens
VDTTNVCLTLRREARLCQAWQASRMTANASERVAIRSPVTVLGDVWTKGRRCRSYELVARECGERRTGTNQKYCSGRGWALREAACHVPWWTAKLHGGGRKEGPYLSPYLSIGTILSAA

SEQ ID NO: 981604 - protein, 57 aa, Homo sapiens
  misc_feature (13)..(13): Xaa can be any naturally occurring amino acid
VNISVAQSMSPVXMVVQWCRQWLRLGGGSSYILWQWSWLLECGFSFQLYAVAGVTEA

SEQ ID NO: 981605 - protein, 86 aa, Homo sapiens
  misc_feature (1)..(1): Xaa can be any naturally occurring amino acid
XTHQAGHASRGHVSHACLKYLKAQELARLEICGGRIVRHLEESVFVGSNFELHSTTASTAGELSPTTNRAGTAGFTVWVPGIGRSI

SEQ ID NO: 981606 - protein, 53 aa, Homo sapiens
MLMARVGQVNISVVQSNVSSDYGVCQLVSGSGLGLGGVSSYSYGSGLGFEVAS

SEQ ID NO: 981607 - protein, 97 aa, Homo sapiens
AYVRKLEQRCVYDQGVMLAEACIPCPELKYLKASASLRWLEICGRPPQSAILRRVVFVGSNFELHSTTASTAGELSPTTNRAGHCRVTVWGPGIGPS

SEQ ID NO: 981608 - protein, 77 aa, Homo sapiens
RSRSQNRDDNKPRLRIMASTHSADAGLLQGTLLSVCTECGGPPGGGSHLASYLHSRLRPPARAGTAHWGSSGGFQMT

SEQ ID NO: 981609 - protein, 76 aa, Homo sapiens
YRCLGMGSVDTTCGTSPLQPFSCVLPPVCRTMTTSIRQFTSSSSIKGSSGLGGGSSRTSCRLSGGLGAGSCRLGSA

SEQ ID NO: 981610 - protein, 36 aa, Homo sapiens
MYGGGSAAFLVWPEGLPRPQHLRGRAVVSSSRFSSG

SEQ ID NO: 981611 - protein, 136 aa, Homo sapiens
MIWFILIRTGGNALGKWYMAFDDDEKQKLIEEVVGVVTVRDAKHTNFVEFRNFKIIYRRYGGLYFCILVWIVHDNNLAYLEGIHNFVEVLNEYFHNVCELDLVFNFYKVYTVVDEMFLAGEIRETSQTKVLKQLLM

SEQ ID NO: 981612 - protein, 118 aa, Homo sapiens
GHGSVVRVSSRGHLSREGLCSHCFSVSFSRACWPSGAPSGLCPPWCGLAFSRHWAGGGTWSWWSLCTREIWLVDLVQVLLQLLAQLGALPRCQASGGSRVKGGPGARTARRAPALWGL

SEQ ID NO: 981613 - protein, 73 aa, Homo sapiens
MGLYRGRLSRSPPSWRRSARPSTTGRLSVSSSRFSSGGAYELGGGYGGGFSSSSSSFGSGFAGGYGGGLGCWL

SEQ ID NO: 981614 - protein, 35 aa, Homo sapiens
LEDRGAVGIAVWALRRGVCPELNPGLMSQALYDPM

SEQ ID NO: 981615 - protein, 88 aa, Homo sapiens
  misc_feature (35)..(35): Xaa can be any naturally occurring amino acid
  misc_feature (61)..(61): Xaa can be any naturally occurring amino acid
  misc_feature (67)..(67): Xaa can be any naturally occurring amino acid
  misc_feature (76)..(76): Xaa can be any naturally occurring amino acid
MGSVGVGSIPVDGLAPPPYRQQALGAGPVGDTCHXPPPLHTHTVNIMVGRSAQTEQKPCTXQPHAQXKSKHGGTHXPGFQAYMTPLPP

SEQ ID NO: 981616 - protein, 129 aa, Homo sapiens
CLGDSEDPVGWVCRRWCQQAGFEFMLRYIYYGRSHAADDSLHSHSPVNSQVPTKVSWHPPQVALRPALLPQLGDLGPAPPSRGFAGAWGWAWCSLKQLAAGKEGFAARRNQWVPDPHNCPEDGVGHCFV

SEQ ID NO: 981617 - protein, 38 aa, Homo sapiens
EAHEELAYLKTNHEEEINAMRGQVGGDVNVEMDAARGV

SEQ ID NO: 981618 - protein, 42 aa, Homo sapiens
GSSRGHEVTSLIDAIQRRLGGGEGGVLALQQAAVGGEYSWSQ

SEQ ID NO: 981619 - protein, 55 aa, Homo sapiens
DLYYVAIGTTRGRERLLLREQFGEEVEPKTRALDCLLYHPTSIPSGWEHWSWPSD

SEQ ID NO: 981620 - protein, 65 aa, Homo sapiens
MLLLAACAFVSSSYTKDPSERSHFTPNIRHQRDIGGKYAVGPEQYGGHPTMRVSRRGPQISLMPL

SEQ ID NO: 981621 - protein, 109 aa, Homo sapiens
MDVVTDLLHTLLQSGQVRRAQNEGLAAPKQSSKSMSFILSIISMVSPNSSSCSVFTLWIRDPAHPAWNSDPTGPSTQHTFVYSLKSLLGLNACRWTFLEVVAWIALPLC

SEQ ID NO: 981622 - protein, 61 aa, Homo sapiens
MSVWPGEVQLTSALLPEEEDELLCLFGESPAHPCRVEGEAGQSWQLPQWRISRSHRQAKDH

SEQ ID NO: 981623 - protein, 54 aa, Homo sapiens
IVNLQKDIGIVDCGCENLSSGPQCLEVGTVVFDLSRALALVPVTDLHFQTRPGW

SEQ ID NO: 981624 - protein, 36 aa, Homo sapiens
IWMAGRGQPSPWHRDKELHGIAVPMKHSWAWAMEQQ

SEQ ID NO: 981625 - protein, 121 aa, Homo sapiens
GGMGEAGGGEAGSLEAVQSLSWVRVWLSLRVEMGTRDWKTRGHGHAHDGAGVMWARDRKKRKPLKLLGYKGEAGSWSWAGKFKGTWGEHMRNLKSTSPRPTNSSGHCPSHGPICTPRPWEQ

SEQ ID NO: 981626 - protein, 43 aa, Homo sapiens
GERSRQEYRHARSDVSWGFTPSPQRLPGRIRGAPHHVNEHLLP

SEQ ID NO: 981627 - protein, 71 aa, Homo sapiens
RLLASSASTVCCFLLCSSICCSRSRERLSRSSCSCRSCSIRSCSNLSLSSRAFFRSSSFRRSSSFLALLPT

SEQ ID NO: 981628 - protein, 65 aa, Homo sapiens
PIVQVLGRLRAANGVNLGGGACRELRSRDCTPAWCDRAILYVKKINRYPTIVHRSSTKPHPDPAL

SEQ ID NO: 981629 - protein, 43 aa, Homo sapiens
MSIRKLQARADYEGPAESRSFLNFNLLCSFRARTCGLSEPISP

SEQ ID NO: 981630 - protein, 46 aa, Homo sapiens
MDETGFSYFLLTTLPRDTVLLLSLLPCTVTGSVPGPLYPQAYPAQL

SEQ ID NO: 981631 - protein, 66 aa, Homo sapiens
TFVSCAGRRLVYRGCWRQCRELFKLSSSVNAVVCVKLGVLHAVVMSLSYSVPNSRAITVGSPTSAS

SEQ ID NO: 981632 - protein, 70 aa, Homo sapiens
RSGPRHACGNGAQLGLLPSPHLLPAGLRQLYTCPIRPCRPGQTNGEYGPSSMGQMSAFQLSADTSSGSLS

SEQ ID NO: 981633 - protein, 39 aa, Homo sapiens
  misc_feature (1)..(1): Xaa can be any naturally occurring amino acid
XADVVGVALLVLALFYGTTLFYVTVTVYGRRRGHCFGLW

SEQ ID NO: 981634 - protein, 34 aa, Homo sapiens
ARSRTRSGGRLEGLPPRWGAGFWQQSRMSHKCPS

SEQ ID NO: 981635 - protein, 89 aa, Homo sapiens
EGRVCRLCVCAAGLSLLLRRMAPGCLLQVPVTSLTPRAAILHMICSKAVQQCGGGCPCPGPPELLSSSLLLFTYAPPHARGISRVTEHS

SEQ ID NO: 981636 - protein, 52 aa, Homo sapiens
NRASVPDEQLNVDGGRSGSTKLISHVLGRFSSFMSFWIRSCAADASCCSPWC

SEQ ID NO: 981637 - protein, 48 aa, Homo sapiens
MSKQVKRCSCITVPSTCARRGASDIWTNARDTLEDLIVFAALSPYLPP

SEQ ID NO: 981638 - protein, 71 aa, Homo sapiens
MLTYHGVLHQKTIANSCEQLVTYKPCGEAAYMDFCPCKSFPLDEWPSVVCLEIHSNALTIAQDSTIRPVYG

SEQ ID NO: 981639 - protein, 81 aa, Homo sapiens
MNVFVSSFSDGGLLGKQLHWHGFPPSGPHPFPWPLALQELSPGDHPEKGQNTPGLKAIKTRGEGAAKQKEGGFLEDPSGSA

SEQ ID NO: 981640 - protein, 138 aa, Homo sapiens
  misc_feature (22)..(22): Xaa can be any naturally occurring amino acid
YRAVVGLVGRHDGSGGPGAGVXGCVSRQWRSVGVFGEGDPGWDIFWYASTSGSSGMLQRTFNMYKLLNLLANHRHNINSSKDMLGRQAFSGDTISKGLSPVLPPAHYKCRMRRETYALNSFSDLPRMSLTSHWVVKAS

SEQ ID NO: 981641 - protein, 44 aa, Homo sapiens
SRPHHDEVDVYCFFFSITKVITITCRVLQHRPPHASCTTTASMQ

SEQ ID NO: 981642 - protein, 57 aa, Homo sapiens
CGRRLLSGSGVLVSILAGCLLNRRRVARCLRKCVRQDPPLIFSPTVKSAAPSALGSG

SEQ ID NO: 981643 - protein, 59 aa, Homo sapiens
AVAGAESSSSSTCMGCLYLPNSSAPPCPAYGPFCVLCPQPEAEGKHSVPAQHSGAAREE

SEQ ID NO: 981644 - protein, 33 aa, Homo sapiens
MVRRSCAAFGKWAGCTVHSRARELSNAADAVVV

SEQ ID NO: 981645 - protein, 33 aa, Homo sapiens
CTPRFVGRLWVIFIHMRVCHIGLLGSSHTNMPR

SEQ ID NO: 981646 - protein, 72 aa, Homo sapiens
QCGAPAVMGVSAHRSTGSQGRRIFLSTEQNEKSPMSTSFYTDTATIRFLNLFPTFPPFLFHKTAIVIMAHSQ

SEQ ID NO: 981647 - protein, 37 aa, Homo sapiens
LLGPLTAPLRAPGVFLPQGFPDSVSADYLPYQLWYSV

SEQ ID NO: 981648 - protein, 71 aa, Homo sapiens
RRGRVWVVTALSSASGSFFGDHCPLLGGAARPLTWVTSSVTLALLGGDALSSGLGYFLDDVGVAGENVPFP

SEQ ID NO: 981649 - protein, 81 aa, Homo sapiens
GAGTEEVTCSVIISYVHHVGEGLMFRKKSVSPYHTIYPSETPFLSLKAPSLAQMDAYSPVYCHECGYGCMWGVTDVPTGMH

SEQ ID NO: 981650 - protein, 56 aa, Homo sapiens
YPRLYWMQVGCRLVTVSGLTLTYSTRMSSMECRQRHQRFMLNGQWARPIMIHGGHD

SEQ ID NO: 981651 - protein, 94 aa, Homo sapiens
RSYPFSADSVLLLSEQTTREKRSPMTMCLTLVSRRTEPWSNHLAVVAEGPAMKEATSDEARGGAIHEFWFNTEAANGDLSYESVLVTVPNQGTL

SEQ ID NO: 981652 - protein, 81 aa, Homo sapiens
STCQEAGGLCGRHALAAHWRSGQQCTRWLFLLLTLPTMVMANPAPDKVLVRRRDCVEGTGPRGSPNFTVAPSPGEVPTPER

SEQ ID NO: 981653 - protein, 60 aa, Homo sapiens
SRVLEDPLDRQCSRKPDIMEVSTVLTVSTALCTGRHAPRWVNTRRPGSRITIYGGQHGAH

SEQ ID NO: 981654 - protein, 77 aa, Homo sapiens
QEARGECSQIVTALQWGTRVGVGPHGSGFPMSSCGYTDVVVGPQNHQISEVVAKAEHPEAHHWVVSTNMCLLSDHMA

SEQ ID NO: 981655 - protein, 63 aa, Homo sapiens
MDWLPLTVKRNMPSLQEPTQHFLIPGQSVSIKQRLGGYNIGHRIMILGQEPGYNWRLGPYDFA

SEQ ID NO: 981656 - protein, 42 aa, Homo sapiens
VKQPPRQPADSELPQEKRHMKKMALGKRHGGQITFQAHGKRC

SEQ ID NO: 981657 - protein, 97 aa, Homo sapiens
VALDDPLSRVRIIVSPLLASFTSNSINAPSLSIAPTLVTMIIMHENQPQRTPLKGQGSRYYESATYRRAPSLQSAGCGKEYAPHAVLLVDYPANDYG

SEQ ID NO: 981658 - protein, 46 aa, Homo sapiens
MVGDLLTPLRAARYKDSSAECMFWQAFGSHSLVSNINTRCDLSNGA

SEQ ID NO: 981659 - protein, 47 aa, Homo sapiens
  misc_feature (45)..(45): Xaa can be any naturally occurring amino acid
FDDRCGRPLTAKYGTGWSSQEMAKMSGSLVLVLCSSLATCAQDAXLG

SEQ ID NO: 981660 - protein, 35 aa, Homo sapiens
YVGGYFCLLPSRYELQEDRHSCQVSEQEAVHGGIR

SEQ ID NO: 981661 - protein, 67 aa, Homo sapiens
MHMDIDETTHRHYSDGSGPYPLRPHAGWWLAQCGSHLRGSPCRRWGKTENVLSWGTPGCNFSAATLR

SEQ ID NO: 981662 - protein, 30 aa, Homo sapiens
MGKQCRFLKCQETRTTLPEPHIQRCGRGVP

SEQ ID NO: 981663 - protein, 81 aa, Homo sapiens
CDDRLDATNGWTSSADTGHAAVREPVPPASALAECRLGVPEGEWSWTAYEAAVCDYLEQQVCRGNQLGDFGAPWVTTYTCQ

SEQ ID NO: 981664 - protein, 47 aa, Homo sapiens
TKGGPRFLASENCLWSIPPEYCAPLLLSAGPEIQSLCLTLSYPSWDS

SEQ ID NO: 981665 - protein, 72 aa, Homo sapiens
HTGRWKARLKTVAVPDLAADAYLPRRLHQKTIARSCDQLVTYKPLFKSCLHGLLSFNSFPSVVGRSVYAWDP

SEQ ID NO: 981666 - protein, 55 aa, Homo sapiens
GKLLKDTKSLLRGVGPRLEVHKADRRVGDGFLVETAVVGKHLQLIWNTTVLRTCF

SEQ ID NO: 981667 - protein, 38 aa, Homo sapiens
MLTYHGRLHQKTIANVRATQLVNLQYLCLKSCFTWTVC

SEQ ID NO: 981668 - protein, 80 aa, Homo sapiens
  misc_feature (46)..(46): Xaa can be any naturally occurring amino acid
LAHYSFDVTGSGVGFFILYCTQIYALQKGKPLRVTRRTHDRSLVVXADMLTHYNSREGTLLRQRTLHDDACLARFSSARG

SEQ ID NO: 981669 - protein, 67 aa, Homo sapiens
NEDGYEDSGLERSVLMEEQPLHKIARCATERECRFVESPSQDQRLQAQRLRNPDVRGSLQTPQFRPG

SEQ ID NO: 981670 - protein, 76 aa, Homo sapiens
CSKRILRLNCSQWLFRPASSCSRRLPKPRFDFWWLCRLERPASCLPKPDMPKPLAQQRTLHAPVALASLRFLGPEL

SEQ ID NO: 981671 - protein, 65 aa, Homo sapiens
  misc_feature (33)..(33): Xaa can be any naturally occurring amino acid
  misc_feature (60)..(60): Xaa can be any naturally occurring amino acid
SRRIPPGLNLTARSEPETLKLNDTRDDDETTNXCHDPDDHGHGPTTVCTNDDTRDDATLXDDTRY

SEQ ID NO: 981672 - protein, 60 aa, Homo sapiens
EGGVQVCAHKHGSFGAVLSLALVGCLLTGTVPGWTLWQPFGAFRAWAEVVTFCWWMPESH

SEQ ID NO: 981673 - protein, 161 aa, Homo sapiens
QEQTLWVVDLRGFHSPLYQGSECTGGSQSPPSLHPSPRALSIRVRDMLGLVPVLRLGVCGIIDLGPLIPVFRFGSIRILYLLGWQEVPFVFQGAELHLVVVNLHLIGVVWPHNQCVQVCKLIILARDVLVDQHVLALVVDDDMTLLGASATDVGTKHDVVS

SEQ ID NO: 981674 - protein, 36 aa, Homo sapiens
ELELQQQQQQQQQQQYPEYQVLVREKLPGELPFEAS

SEQ ID NO: 981675 - protein, 59 aa, Homo sapiens
RASIHAGPGSIPAPSWLNHGAQPGTLTQTNHHTHIFSLGHGGPVCLSVRQLLKEGMQAR

SEQ ID NO: 981676 - protein, 55 aa, Homo sapiens
LYRSASWSGELYLLGSSGAFEVQVIFPDLKNSEAAYVHCRIPPLSAVASISQVVS

SEQ ID NO: 981677 - protein, 50 aa, Homo sapiens
MTSVTLVQNLLIVRLADLALEPLMLHGALHVEGSRNSSAYLADTLSRCTL

SEQ ID NO: 981678 - protein, 33 aa, Homo sapiens
KEVHEGCLLGGRWMDLLRMATYESTRLRMVSTC

SEQ ID NO: 981679 - protein, 102 aa, Homo sapiens
RPFIQGFITQPREPARAAVFRRDRAGGQKCLSNTMRRGEGRGRPCSQRDQDSLSLSLRSNRGTGGEVRGLRETQWGTNRSLCPATIWSVRARSTPPSWEWWL

SEQ ID NO: 981680 - protein, 127 aa, Homo sapiens
GGAAPCPAERMGLGEHHVRLKGRAGGSIMQAKTQHLSYSSQQELAEDCRSSRRGARADTGLTNAQDLKICTTALRSTLLLSLFKTPRTTIRNEAPVTAVPRASPTPPQVLTPGHTAPARPERDHWLQ

SEQ ID NO: 981681 - protein, 145 aa, Homo sapiens
LSYGPILPQLPLLHPIYPSITSRPHRRSSLQLSSVTSSSPPAQQFPLREVARAEGIVRVHVPFSLSDLSQISQRLGPFSSDPTKYIQEFQYLTLSYNLTWSDLNVILISTLSPDEQERVFSLAQSHADNRWLQEPDLQEGIRAVP

SEQ ID NO: 981682 - protein, 33 aa, Homo sapiens
VLILPNSRAYHLKTEKNRRATKVLRNETTPFLA

SEQ ID NO: 981683 - protein, 45 aa, Homo sapiens
MFNYQIIHHHMPPTGQRENRHQNLGGGHYQNDTGQYQTAAWVPSS

SEQ ID NO: 981684 - protein, 61 aa, Homo sapiens
MFSDGLSGRLWRLDCGSEALVSSTIPVLTATSERQVILDISNNTPQKVKQQTAVSETFSES

SEQ ID NO: 981685 - protein, 59 aa, Homo sapiens
MVLSLGFGIFAPRAVQEACVGLDASLNSVPALDSAIRERFPKVTTPWMAHERTPKQIAL

SEQ ID NO: 981686 - protein, 46 aa, Homo sapiens
KACCSLCSYRDTNSWLLKERSETSDKRKFLKERLARLTQARGLVAQ

SEQ ID NO: 981687 - protein, 123 aa, Homo sapiens
AVLCVALGMHWLCGGIPALLPHGQVCRRCTWDHGRRAGTQGGWCECGPRNGELLRSLLVNWTSSSESCIRFFKGGGYYGLLLTCADAFSHREPASVVTCEAGLLTGQVALLRFSSIATVCVRV

SEQ ID NO: 981688 - protein, 75 aa, Homo sapiens
IQKALYTHGSNAEVMCVFSLDPATGGIVTYHLAHQMFDVIPSLSYPVFAYKRHCHKVSVAQHLGDIFLGPAIWGS

SEQ ID NO: 981689 - protein, 42 aa, Homo sapiens
QQAAYRTEPVSQEEHSRGVEVKTALPGVRRRRRKGPRIGVDR

SEQ ID NO: 981690 - protein, 50 aa, Homo sapiens
ARHVRGGVARVQLDLHAHSQLGKGWPPGKHKTWKVEQNRGGVACPTDSLL

SEQ ID NO: 981691 - protein, 82 aa, Homo sapiens
ERKRFVGRYGTYGWGDSQSRMDGKEEQVMSVHGLAEQAKQFVREKLPLFNNHQYSCDDPNSSIYAEHAWVKTHPHAFNHLPP

SEQ ID NO: 981692 - protein, 102 aa, Homo sapiens
  misc_feature (4)..(4): Xaa can be any naturally occurring amino acid
AQVXSESKIAHCFQPGWQSKTPVSQQEQGWCTVADACHPSTLGGRGGRIMRSRDRDHPGQHGETPSLLKIQKLAGLGGAPVVPGSREAEAGESLEPGRWKLQ

SEQ ID NO: 981693 - protein, 132 aa, Homo sapiens
YYTDSGVVASLPSWAILFASVHFTPSVFLLHHHLVQHMGISQSSTLAVILMGHQPVSDPLDPVLPELLPPAGSTRPSHVGAQALCMRSSSYACPACGPPHQSHHVCCCHKVSAMVSMACLAPCIAGLGLYYP

SEQ ID NO: 981694 - protein, 153 aa, Homo sapiens
LEDPGTSDPEMSDFLRPTVRMVVSKDLGRTGKGSHCFMGTEFQFENRLLKVLDLNGDDGLHDNVNVLNVTIAAHLKMVTMVNFHMYGHCNFQQPNIKFSRSHHYLIPFIHILGTHILSSCQQNRAVVAYGWAWQVAGWAAGGGPNTLRGQMWP

SEQ ID NO: 981695 - protein, 80 aa, Homo sapiens
PLTTPRHTLTPRQANADDAWPDLLLSDPGMPLLTTAPVDDTGYWTLSVLTDAHTLALTYAYYLTPVVGLCHDGGAVDGLL

SEQ ID NO: 981696 - protein, 48 aa, Homo sapiens
LEDPGTLTQSPVPYGRFGIQEFEILRKPKQQLGFWKGLRRQGDLVELP

SEQ ID NO: 981697 - protein, 53 aa, Homo sapiens
LERRQSRGLQSEAGSSLGHLSVFSLGRLCLLSGSSLLVLSGSSLCLLSGGYRA

SEQ ID NO: 981698 - protein, 119 aa, Homo sapiens
KDPLGSEALDVGGQSSLSSPSLRVTAASPVAFCPFHSKISGLTFISPFHPPQEVGTRLGAAFADPENEYCPAYTAQWPREADEDTEGHRGPEAGPGLEPPSLQARLYHWAAPFRPPGRK

SEQ ID NO: 981699 - protein, 38 aa, Homo sapiens
SPFFSQGGCTCAQLPGRAERRGLKSLVPELGEREKSAI

SEQ ID NO: 981700 - protein, 57 aa, Homo sapiens
SYRTRQWWARRLAGWLTQKHIDRLVGKATHVSVSVVMVEVDGTCYSEPGRLSLAMPR

SEQ ID NO: 981701 - protein, 51 aa, Homo sapiens
LVILGLPEASDSLTVNVWVWGLDILGNALEELLEAGFLVSSEAGPPTSASC

SEQ ID NO: 981702 - protein, 46 aa, Homo sapiens
MRRLQLLPLDPHCLVHTVAAAVTCCRCTVTGSVPGPPLPSGIPRPR

SEQ ID NO: 981703 - protein, 40 aa, Homo sapiens
ETKESTGQGAAQHRHSCMRQGAEHGKGCRVGGAAVGVTGT

SEQ ID NO: 981704 - protein, 77 aa, Homo sapiens
TSSGGQEYTERAPWLPIDGLVVPMDGLLCMKYVQKGYDRQSNLLPWSQIPIENGCKLLSWGKGQGVLMVPGTLRNSV

SEQ ID NO: 981705 - protein, 115 aa, Homo sapiens
QSSGGARAVGGSWGTVWHLNGVRHTWALSEAPCVLAEILRTCAVEGARITAGEAEDVWLTVLGLVALLMLRVAQVLALGRKAPGHPESVALHVSQVRWGPWVVLARDIRSHKCLV

SEQ ID NO: 981706 - protein, 102 aa, Homo sapiens
  misc_feature (34)..(34): Xaa can be any naturally occurring amino acid
ESRFGAIVSSSALMSSESGLLCCVLLNNSIQRGXVQWQVDTPSNLGNSQESVLAGQQASTYRLSSTLTLSKADYRYYKVYACEVTHQGLSSPVTKSFNRGEC

SEQ ID NO: 981707 - protein, 32 aa, Homo sapiens
RRRASQPCCLTLVDVCRVVHGLEYIASDRDHS

SEQ ID NO: 981708 - protein, 60 aa, Homo sapiens
MRPGSQFGGVCATFICTVSCAPSSPFHGPQQVLVLSKLPGKKTACFHGQVLVVSSVRLSS

SEQ ID NO: 981709 - protein, 38 aa, Homo sapiens
EKLGKITQGLTCFSNNQWRNAIFQVVPERVDQVDGVGL

SEQ ID NO: 981710 - protein, 57 aa, Homo sapiens
CPGDRGTVNRRHPTDWLLPFMGLPQVTQPAGGSWFTAKKSQLRLEKYPGPLLLHGLP

SEQ ID NO: 981711 - protein, 33 aa, Homo sapiens
MWEDSLSVDNYESSLGQRKRYRIYYDKIYNKYS

SEQ ID NO: 981712 - protein, 34 aa, Homo sapiens
QATSGSNDEPFICCGQCFAHKLCAITGQVSAAVE

SEQ ID NO: 981713 - protein, 86 aa, Homo sapiens
AIQAGHGGFMPVIPCTLSRHDLGWITSCQEFKTSLANMVKSRLYYKPKNYPDLVAEPVHSQLLRHSDDGISLVPVRRRAVSRSWLT

SEQ ID NO: 981714 - protein, 45 aa, Homo sapiens
PSWQRTKQQFVKLKEMFSNSTGRLPVPTDEKKYGNIKSWFTLRNE

SEQ ID NO: 981715 - protein, 116 aa, Homo sapiens
VYRKRSMKKLTSMIMKVNISSMIMETGKSTICMLGWTGWRTGEKTMLQLKSKGHQAEGPQEELMLQVESARTVSWRICLLFRELSLLLYSGLRLTGRSLPRLWKAICFTEGPAISM

SEQ ID NO: 981716 - protein, 102 aa, Homo sapiens
KLSVTVHVCTRYFSSSYIYAVVTYDNTVAPAAGGAICILGLLIFRSIRSRLTLTTGTSRTIASMRKFKALISIARRSVMMIIAIGSIYRARVIITSGRRPMA

SEQ ID NO: 981717 - protein, 40 aa, Homo sapiens
SRGSLMSLLVCLIVGDDGICQTIVPDFDLPEVQALARQSY

SEQ ID NO: 981718 - protein, 77 aa, Homo sapiens
CCFLLDDGRAGRWRSSPSQYGAWRGRMRCPTFQIEWRRAEVLLIIPDWAGVSEALLTSHTMVGHAEMFLTSYMVVAA

SEQ ID NO: 981719 - protein, 52 aa, Homo sapiens
FIDGSRAVYDLTKQYKARCLLCLKPRVGFPAGLGFSTVAVFHEVQGSPPGYR

SEQ ID NO: 981720 - protein, 132 aa, Homo sapiens
  misc_feature (90)..(90): Xaa can be any naturally occurring amino acid
  misc_feature (119)..(119): Xaa can be any naturally occurring amino acid
SDLYRIRCCFSSSLNADFCSIERSRKVCRSCVSGMSFTSSLLLLALCFPDSCVPFILGHANFRISLHHSRLGLAQRAPIVHFVIHVLDAXVQDLNGHTAILKVCHLPHQLVAAAPGPVXICSTVRLPRRKSS

SEQ ID NO: 981721 - protein, 50 aa, Homo sapiens
LQQHFSLFREMSGNMTLRSRCSVGLLARSPPAGLKVLMLLLLLLTSPSAG

SEQ ID NO: 981722 - protein, 116 aa, Homo sapiens
DLAGSRPVGGDTSFMPEWELCGLTPSLDGSVYADYSEPSWVQGSHCEWWSWAISHVLFGQRRTLGPAGPAHAVVNHAPQAPGLLSGCPVQALEDRLGSISSRCAPAHGCTIVSLPQ

SEQ ID NO: 981723 - protein, 39 aa, Homo sapiens
VSVIMLIHFGASVPFLFTPVSSDSESFWSLIVTGYRARF

SEQ ID NO: 981724 - protein, 39 aa, Homo sapiens
DPRTVGAGPSRGSGCSALAVAGAYALQVRSGAHVVVRGY

SEQ ID NO: 981725 - protein, 71 aa, Homo sapiens
SCCSWSTRRASSAACLLGKSDLISGNSHHLSLTICLKLISNFSIVSGYINRCAKFYKHSITPTIDEEDKQQ

SEQ ID NO: 981726 - protein, 50 aa, Homo sapiens
LVTKYGLQAQYQSETLKGQIALDLKFFRRSEPTGGSCLLLSCPMPKLGIP

SEQ ID NO: 981727 - protein, 76 aa, Homo sapiens
LSPCDAHFHFHQIRLQSFPGHSGAVKCVDPYSSEDFFLSGSQDRTVRLWPLYNYGDGTSETGPRLCLQPQHRKEPS

SEQ ID NO: 981728 - protein, 80 aa, Homo sapiens
MLDGLLSNWKPGYDPKISQSPKDLFVPACLEIRRVCQAAGIGGWHLVLWTLHQEKSCRLARAAVPSAQASAMCSIVESSP

SEQ ID NO: 981729 - protein, 71 aa, Homo sapiens
VADPVFSRNSDISSMCPVSPELNGDGLACGGPHVLFPNMKSLGIHFHCCSARRLLSSSSSAVPCFVLFLAS

SEQ ID NO: 981730 - protein, 73 aa, Homo sapiens
MIIVPGLIRHDEMFVRHLLDPGDRGRVVLEVAGRMVSRTEGHIDDSLIGGNASAEGPEGEGTESTVITGVDIV

SEQ ID NO: 981731 - protein, 142 aa, Homo sapiens
IEPLEPSLVTMQILECVPVYTSLSAAEIKTVFQPARMDSVQGQRNMLHILHVLKTNLVVKHGLLDDGILLSLQAMEGVSLVKTLLDQSLYTASLSFFIKSTDDVDKHIMDKKRLEYGIVNGIAAIAPVVMALLLECLYIFSL

SEQ ID NO: 981732 - protein, 43 aa, Homo sapiens
SVSYEVPHLMPPDLELWQRDQQTQCDETGLSVGSLLSVDHTLS

SEQ ID NO: 981733 - protein, 105 aa, Homo sapiens
MIPLLRLSVSGKSGRTGPMVVITQPDSLESIQEYYSPRVNRMNCWNLETMFCVGITAYCSTRSFASSQEPGHVGSLLGSDRIPSSSWPASSTHQQFRRSKCAKGV

SEQ ID NO: 981734 - protein, 67 aa, Homo sapiens
TEPLDAIEPLDATYMKEDFKQYNQLHKIVQGGVMLWILSFPHIMFFFDCSSNIIIDFHGQNLVCQQC

SEQ ID NO: 981735 - protein, 227 aa, Homo sapiens
LLCYRGSLYSRVRTGTWVHRGWETLTSCQAHALSLHAGASTPGSALCCKEEMPWEWGQSMQGSMGWPSRHPLVQSAQAKLIKGPMSVYRLASLQEQLGPGIRPRVGGSAVCHPAWSCAGGRRSQPTTPERGGFPHGGGEGTWLAFGQNPVPGLATADSVVLVSLHMCASTVHPGTMAGSCLPLPRGSVDSALDRTGFTAEGCYNLVCYYRRTSRVVQDRSDDRSKDE

SEQ ID NO: 981736 - protein, 33 aa, Homo sapiens
MLSDVYHHCGASLPSTVRRHVSTVLTPNIVKLE

SEQ ID NO: 981737 - protein, 78 aa, Homo sapiens
MHACLQVDVYTALGCMHALNKFRRHVSHVLSSKYGKLEPGRRVFTTGGALPPLVQFRRHVSTVLDLQISVQAGAWSDS

SEQ ID NO: 981738 - protein, 38 aa, Homo sapiens
VCKHVYIPTTEFKHIDHRNEMRNKQIHNCKFGDFNTLL

SEQ ID NO: 981739 - protein, 33 aa, Homo sapiens
MEPWAVMERVYKFCAAHELLIDFGPFGKGGIWQ

SEQ ID NO: 981740 - protein, 107 aa, Homo sapiens
MWHSGPFTYVGVPLPLMWEEFIPFKQYAGQYVLLVNVDRYGGLTGQYIELNALYEELAPFGLVILGFVLQATLENRNQERTHRSLLTSSMCHQVEALFLIFQLFEKG

SEQ ID NO: 981741 - protein, 116 aa, Homo sapiens
MPAAGLSPVSRQDETEQVLEELGFLGALACLHLDSRPLVRDYSQVVWALWNLQSAVHVKCARDEPSYLIYTPAVPKSQRVLHSAPNFQPPSNCGIVRGPDATGRLLQPSRPGPQRR

SEQ ID NO: 981742 - protein, 70 aa, Homo sapiens
NRKLMIRNYWEFSRAWGILASPIPIMTWRSPGLPASCRRNGLRHADPVCVSRVLTRTFSGHYRPIIARSR

SEQ ID NO: 981743 - protein, 70 aa, Homo sapiens
  misc_feature (61)..(61): Xaa can be any naturally occurring amino acid
IPQLKKAQAAANKKQTPRRWVPPSGQTSPAPRDSPKLDSFSESTLQGQGAVATHCNPSHFXEAQSRARST

SEQ ID NO: 981744 - protein, 71 aa, Homo sapiens
RGGDKRSRRWTATGGIGGTIYEYGDPHPLMWEEYIPFQSSMLAKYVLSCQRGQSTDGLTVQYIVTECTTGK

SEQ ID NO: 981745 - protein, 61 aa, Homo sapiens
RELSIFSLHLDRCLLYLRVAINFSHNHLVNIEPLCQEANRQTLLFVLIRPNARHSYFSYLS

SEQ ID NO: 981746 - protein, 42 aa, Homo sapiens
MSYHQNGAGSWNQCECIILVELTTARLHQCTRLSKSPGSAIT

SEQ ID NO: 981747 - protein, 72 aa, Homo sapiens
  misc_feature (58)..(58): Xaa can be any naturally occurring amino acid
PAGGDQTQDTELVDTRPAGDGTFQKWAAVVVPSGEEQRYTCHVQHEGLPDAPHPVDGXGKGGMLLSVLAVHA

SEQ ID NO: 981748 - protein, 138 aa, Homo sapiens
YRQGLAVPRRGLETPGVHATHTRTELPKSGDNQHEPLRSGNVPRDLSTETVKSYLCVILCRSIVDIYYTLDRYQKERRSEVTPVLTGGDISVAEGGPRDLYAHTLPRLSVQNPTLFQLSSARVWAKVLAELACLSVQY

SEQ ID NO: 981749 - protein, 87 aa, Homo sapiens
  misc_feature (77)..(77): Xaa can be any naturally occurring amino acid
FYFGGFSPVHYQAQGSCWCVMDSGEEVPGTRVTGGQPACESALRCPLRIQLRRTVVGWNNPRVRQSLGPTWLGHAAXANVLVRAMGS

SEQ ID NO: 981750 - protein, 32 aa, Homo sapiens
GVIPGLPAMYCALQRVSGTVVHAFNTKPSPCK

SEQ ID NO: 981751 - protein, 74 aa, Homo sapiens
RLQLNDIWMSARCSRVDANLYWEACTVVVYTRRPGSMFTCLGRPHGSHVSTELVQGGMPRRGEYPSSWSHACML

SEQ ID NO: 981752 - protein, 36 aa, Homo sapiens
YWRISRVDQALRYLEVSTVLTCRRNLSRTACTAVVN

SEQ ID NO: 981753 - protein, 59 aa, Homo sapiens
MYELMLISNELCDKSSTHSTLTFWGTVCGSHRKELEIPLGLSTTLEAQNCRDWGSHWFG

SEQ ID NO: 981754 - protein, 44 aa, Homo sapiens
VTGSFRDKQLLRSSSQSGSGPSSPDSVLRPRRYPQVPDEKDLMT

SEQ ID NO: 981755 - protein, 157 aa, Homo sapiens
MPIHRLALVQTAHSRMLAEEDNCRKWVRWFQTPDDAQAVISVFLVCNMMELGGKFIIEVPCVDLGRDLRFEGWQELLLDHVLPVDAEEEPVLHDLLGIAGPPTKPLLGVLLKQPSKQGLGLGAERAREADLFHEDELEEALVVLVVEGQAGAHHLVH

SEQ ID NO: 981756 - protein, 69 aa, Homo sapiens
IEPLMLSSLVFAIKQDLPKAMNAAVDHRQAGAALTYAIGTDDIQASCATSGYGLYEGLDWLSNQFRNHT

SEQ ID NO: 981757 - protein, 54 aa, Homo sapiens
MVRFGLRPGRGLALLLLALLGLAVLVHKHYCPRLKCCSGKAPVSAQDVRTVAGD

SEQ ID NO: 981758 - protein, 86 aa, Homo sapiens
MAVHPQLNSHSWDPVTAGTGPRMPTAGAGPHSHGWAPLSMHRVGPLPSGPRVSVYPGGLDIRQGGGLVGTWELPGDRGALLDGRGS

SEQ ID NO: 981759 - protein, 42 aa, Homo sapiens
SKQLQCYSISHEFPSHEIFPEAELRAAHPVTHFAVKEKWPDV

SEQ ID NO: 981760 - protein, 75 aa, Homo sapiens
EANVLTAICDMVAWLGYTPYKVTYASDYFDQLYAWAVEPSAWLIQWQRHPRVRGTRDDRRHPGGRRHRGRGTREV

SEQ ID NO: 981761 - protein, 38 aa, Homo sapiens
PYSSYDSPLLDPPPIQTPLRGLSSCMDTPLPGLSSIRT

SEQ ID NO: 981762 - protein, 38 aa, Homo sapiens
MQARLWVRAILLLSLLSSWGYRHPDVEAPASRRHPRDR

SEQ ID NO: 981763 - protein, 136 aa, Homo sapiens
MVTALVCSVVASAPSTFSLDGDPGPALPSPAVLITEMGAKGLRHQRCVPRPTRHLARLPETSTKHEAGRGRHRNSRRGGAEEAPVPAASENGSRGSPCWGRGRAVPRKPVHLRVVLGTPDTYWKYPEFGKRAGQAP

SEQ ID NO: 981764 - protein, 57 aa, Homo sapiens
VSWSSNPRRPHFSKEDMLPFLLFTIAILIGVKWYLIVGFRSAPPRMISDADVFIHSD

SEQ ID NO: 981765 - protein, 49 aa, Homo sapiens
YWRISSHQAPAITDIWDGHTRLLICVCTRILYKGRHCNRLGEMKYYLVW

SEQ ID NO: 981766 - protein, 78 aa, Homo sapiens
NTVLYSRCWLGAGWSHFIPALSEVTVGGSLEVGRLRSAWTTWCNPVSTKNTKISRTWWRVPVIPAAREAEVGESLEFR

SEQ ID NO: 981767 - protein, 33 aa, Homo sapiens
QLPMPGSLLVQNIICGAGDCRVCLQQWGDPLKV

SEQ ID NO: 981768 - protein, 35 aa, Homo sapiens
PHSNLGFPEIAKPGAFPKDYQGLWWSQTEATGYVP

SEQ ID NO: 981769 - protein, 54 aa, Homo sapiens
MALCSRSTCPFKFGDVAATAWFCVREAAATITCSKPSHRGYDRYLLGEHIAPMG

SEQ ID NO: 981770 - protein, 80 aa, Homo sapiens
HVWITFNSDVYPSPQQDRFCFRASSPAELRFLKVVETGGAAEMNHCHSVSHVGVNLKDLRERATGGSPLEVGGGTVGLAW

SEQ ID NO: 981771 - protein, 81 aa, Homo sapiens
MVVLVALQCEYTYATQLYSKWLRCVLIVPATLESVQETVGKSRKEKGEVSGRQAIQIGKFRGSENRIGGSRAENKALRHDK

SEQ ID NO: 981772 - protein, 134 aa, Homo sapiens
RLLASQSFYHLFLPPSTRVPSCSYSASPAPDPFPQYPLPASLINPSVAAHHDPIRIQLKDSSKFPNVPQYPISLTHQKGLQPIVNKLCSCSLLRPTHSPYNTPILPVKKSDGSYRLVHNLRAISQAVLPIHPIV

SEQ ID NO: 981773 - protein, 55 aa, Homo sapiens
SPVHCTDVTEELYRVLPPKSWCRPLTMLLQHEKQTEVGKFHIGKIGNVSGEYTDT

SEQ ID NO: 981774 - protein, 45 aa, Homo sapiens
MSRCLAAAARPYGLLASQEPVQFKGSWMPGKRLSARGRRQTIWKL

SEQ ID NO: 981775 - protein, 47 aa, Homo sapiens
LTLLLRYSMSIQGSDGKDEGVRAVLQNATNEIPADMTVAQYIPGTRS

SEQ ID NO: 981776 - protein, 71 aa, Homo sapiens
SSIFPKPSDNVPANLAAEFDYSVCYISDEAPYISIFYQSSNPFRNFIQKQEKRIFTNFHRQLFCWIDKWID

SEQ ID NO: 981777 - protein, 110 aa, Homo sapiens
QLPRTERRYSKTTVPTITVRKIFVGSIKSRHCKNITYRYYIEQYGTLQVIKIMTDRGSGEKRGFAFVTFDDHHSVHQIVIAEIPYCESPPLLILTRPVVARDGSCFIQPK

SEQ ID NO: 981778 - protein, 172 aa, Homo sapiens
HLPLTAAAWALLSSALTTPRLHQGHTGSQAGPLQEGGPGHADVGTQAVCRQTDNWGEEEGPKWEECTGSANLGEGQDCTRPPHTLTVLVLPSRAFLLSSVLLLPCSYRQTASSYFHTSSLADAPVPLPPPAPFSAPTCEAFLGGAPTLPLHRILGSDGNLVIYLGATDEKEF

SEQ ID NO: 981779 - protein, 35 aa, Homo sapiens
VYPYWMGVFGFLSSGSGEVSGNWVAAGPGGSALTW

SEQ ID NO: 981780 - protein, 127 aa, Homo sapiens
MREEEQEEDAGGRGSGISGRDDWFALMSCPEKRYEFEEKIEKEPEEAGQDTPSTLPMLAVPQIPSYRLNKICSGLSFQRKNQFMQRLHNYWLLKRQARNGVPLIRRLHSHLQSQRNAEQREQDEKTS

SEQ ID NO: 981781 - protein, 62 aa, Homo sapiens
MRCMPSLDKSRRHVSTVLTSKYRSTPGALVARCIHHCARMPPCTSFRQHVSTRADLQISFSW

SEQ ID NO: 981782 - protein, 32 aa, Homo sapiens
MPASVHPGIHHRYLLLLRTPRVQLDTPRLLCG

SEQ ID NO: 981783 - protein, 34 aa, Homo sapiens
MQYFFHFSQIMKIPISLMSSHGKYPDLQAPGLTL

SEQ ID NO: 981784 - protein, 71 aa, Homo sapiens
GRIITKGSVGIVAKWEEVSSLINVVTKETLAKIEETPARCKEKMVKSRKSSRDEEEFPDSREGVTLIQPDT

SEQ ID NO: 981785 - protein, 83 aa, Homo sapiens
AWMPFLETMCYLILIWFGYVPTQNLILNWNSHNPHVKGETKGGDNWIMGGRFPHAVLVSLTRSDAFISVWHFPCSHSLHPATL

SEQ ID NO: 981786 - protein, 107 aa, Homo sapiens
MGSCGWLGATVALIGAALDNDEKESGGSGATLALMGAALDNDEKESGGSGPPVALMGAALDSDEKESGGSGATVALVRAALDSDEKESGLQFRDSVPGDPWAKGLIR

SEQ ID NO: 981787 - protein, 78 aa, Homo sapiens
MSNEVLGPGHAWVLSGLGSSILRSSVASKFWKVVLNLRFPSKDFLSEQILPVEEQDHRDVRSHLLFQMLLKRFRASCR

SEQ ID NO: 981788 - protein, 35 aa, Homo sapiens
VGPVNPLVRVRCDLRLKAFSDRADLIRHFSIQVLN

SEQ ID NO: 981789 - protein, 112 aa, Homo sapiens
VPVNCTDTHSGTPGAQVIPVGSGTRRVLWRTSLECCMTRHETVLSVNHPARETSSFTHWKSPAHTKTCTRMLIASFFIITKTWKRPRCPSVDKWKNKPWCIHTGLLSSTEKK

SEQ ID NO: 981790 - protein, 68 aa, Homo sapiens
FSLDADWHPEPKISNGQEEAGEGLRCFKEEATQIVDKYRHFLYFCHQKTHSGLAYLSRFLKNRQKRIN

SEQ ID NO: 981791 - protein, 100 aa, Homo sapiens
EPTCTVTESTTEITYPTTMTETSSTATSLPPTSSLVLTAETAKTPTTTLVTTTTKTTSHSTTSFTSSTIYSTASTPTTAITSVPTTLGTMVTSTSMIPST

SEQ ID NO: 981792 - protein, 98 aa, Homo sapiens
MVLQVHMYVHVQVSVYVMYVAVCHVYTCAGVYVCACMYVALCHVYTCGVYVCMHVCDSVPCTYVCRCAGICVHAFTWHCAHVHMQVCVHVCTCEGVNV

SEQ ID NO: 981793 - protein, 40 aa, Homo sapiens
LGPLALNFGEPGAVMSRGFIVTFPVRPLSRIFARVAFGGL

SEQ ID NO: 981794 - protein, 33 aa, Homo sapiens
MSRLRFGTTATVFLRFGDGLNLAVQYQVKTMAT

SEQ ID NO: 981795 - protein, 41 aa, Homo sapiens
KSARYRKSLASRSASTSRYAAGRLVGTTAFTVVAECLPMYA

SEQ ID NO: 981796 - protein, 64 aa, Homo sapiens
IELVPAEGARCSCATDPATFCVGTETDHVAPWRSVYKLHDLSPAPLTFVLTSGGHNAGIVSEPG

SEQ ID NO: 981797 - protein, 50 aa, Homo sapiens
MVHQTESSECGLACLAMICGYYGKNVDLIALRRQFSLSTRGATLAGLTGI

SEQ ID NO: 981798 - protein, 81 aa, Homo sapiens
GPSYFCPRPAERRANWRTAARLASLADETPEGRSIVALADKAIHAPAVRAADAEYCALHRADPYELCVHLKDRMIRKGAVD

SEQ ID NO: 981799 - protein, 111 aa, Homo sapiens
SALWVAFDSNALELSAVKGKAHVAVALSAMEAAKIRRLTGVTASLELTITLAGAPLHLHLVGRRVNNLEWAGTASAFSDTQSVARDLVHGLSFAEQVVSEANSVIVIVDQH

SEQ ID NO: 981800 - protein, 42 aa, Homo sapiens
LLWLLGSDTYSLLLIVDRLECGDSLSRSMRDRMPVRLGRRMQ

SEQ ID NO: 981801 - protein, 56 aa, Homo sapiens
LRLRCSAAAAGGRIPSANSMPAGTVWKDWRDRKGELFQAVRMEKNMMGLLLSLIVA

SEQ ID NO: 981802 - protein, 102 aa, Homo sapiens
FARMHGDAQAGVARAVEVVEEQAAGEAQLIARQIQRGNAVAVRQQPFQFLQTGGLAKGAAHDADQANVDVAIAAARTDPVDHRFHHAGDRQLVLHRHVVRGE

SEQ ID NO: 981803 - protein, 67 aa, Homo sapiens
LVYCQVVLRDSSWRIARYRLVVDRGNFQIVVGSSSSTVNNRKSRITLGDRNWLIKLSSLKSRMAKCK

SEQ ID NO: 981804 - protein, 39 aa, Homo sapiens
VINHNIPVPRGLLAYHLITSKRFLPCRCWCRSEGTRSEV

SEQ ID NO: 981805 - protein, 71 aa, Homo sapiens
HAKHDFTLATQMLAVVLPLRGLLRMEPPVMLPAAEGSGELDFTYCNLRVRILAVVCRVMPDRRNSVRGGVP

SEQ ID NO: 981806 - protein, 44 aa, Homo sapiens
LRILRDGDSYECNEDMCSEKDLSAALVAGSGGQRRGHICVTGYD

SEQ ID NO: 981807 - protein, 63 aa, Homo sapiens
ELVREVVGGAHRIAQVIGGQAERVHQAQVDVHAHRRRRGTGNVDRSNAADLAEALGQQRIGDV

SEQ ID NO: 981808 - protein, 38 aa, Homo sapiens
VCRWAEVLLTGGQEAACCLGRCRGQVRQHLFHLGQLIG

SEQ ID NO: 981809 - protein, 70 aa, Homo sapiens
  misc_feature (1)..(1): Xaa can be any naturally occurring amino acid
  misc_feature (3)..(3): Xaa can be any naturally occurring amino acid
XRXCPVENAVHECSVSEQALDVVEVSDRCRRGAHCMPTGRKVIFVAIDEGHSEVEEQVDEKGPRVLCKEP

SEQ ID NO: 981810 - protein, 32 aa, Homo sapiens
MPMLMNFSPRPIAFKPEIQHAGGGHEEQQAAQ

SEQ ID NO: 981811 - protein, 40 aa, Homo sapiens
SDYSESQDPNLFLSIRCSGNLPLSTDELLYFRSSVQSTNS

SEQ ID NO: 981812 - protein, 54 aa, Homo sapiens
VVLAVELPELPDTWLLQNPSRRTCCTFTDSLNDAVLRAPTRPSEAVWLCCDAKV

SEQ ID NO: 981813 - protein, 63 aa, Homo sapiens
LYRTAAEKSLSPARRQPGALINLVMEVESGDKLRESLAPGNLAVGIAAGDELHRHLRPIGIHF

SEQ ID NO: 981814 - protein, 53 aa, Homo sapiens
VIDEYVSVTFEFQVIAEANRFLVIVSAWQFICTGAAGVKTRNRTMKRITAKNP

SEQ ID NO: 981815 - protein, 103 aa, Homo sapiens
MLVRVVLADTLLFPALAVATAWLWKAAAIHSTLGHSLVLLLLAGTAELAISALRARTATGSPGSCRCTAGPLPCASALEELLLPGDLIQPDKVPSSATSARNP

SEQ ID NO: 981816 - protein, 74 aa, Homo sapiens
MIMTANRSPDAHKDGVHYAKVHQDPSHHHGASGIPPPLTPQHNQVVAALAVDLPATQYLGLKLVGRDNVCKEPT

SEQ ID NO: 981817 - protein, 51 aa, Homo sapiens
HQLTALVTTAESPVVGPLHGVSWCRITFLLMWTLKSPRYWFLGQPQPQFGV

SEQ ID NO: 981818 - protein, 108 aa, Homo sapiens
QLQTCGKWPELALDALGCHMSGHCFLGDLRLSARMNEAADCRRRARVLWGTCWGSGVGTHAERPWVRYLSMTLVSTGYETASNTFPVPPCLAMPLPPAPRPLAREPHA

SEQ ID NO: 981819 - protein, 58 aa, Homo sapiens
HDFRHCSMTTIVVMLQWHSPNEALMTSAHRFCRIFVLALLIPLTALATPTNDALRTIE

SEQ ID NO: 981820 - protein, 61 aa, Homo sapiens
YRIELGPQLFDFTESGQRRRQQLFNEVVGSLAPAFSLYTNDPGKGNRITKLQQDSLGFAQS

SEQ ID NO: 981821 - protein, 35 aa, Homo sapiens
IARLVDEHLRFVLSWRIWLLICSSVRTAVSVFCTR

SEQ ID NO: 981822 - protein, 45 aa, Homo sapiens
YRVIGGMAGGVRIGAARKGIDAPTAGGEGLQTFAHVRAQGRDQFA

SEQ ID NO: 981823 - protein, 39 aa, Homo sapiens
  misc_feature (32)..(32): Xaa can be any naturally occurring amino acid
TGEIARYEIVIDRRTPRRCSSAIVRSCARRGXQHHAFRD

SEQ ID NO: 981824 - protein, 67 aa, Homo sapiens
  misc_feature (13)..(13): Xaa can be any naturally occurring amino acid
PGDVRKIGRCSTXAGVIHFCIICKSVSYEYPLLCRRRGGYSGCGLMTGFGAVPSRPHREKTHKPRGA

SEQ ID NO: 981825 - protein, 53 aa, Homo sapiens
RIELGTDDHGTTVRGAFHARYWVGGGSAVKMTEHSRFLRIERPLVLPRRGLSL

SEQ ID NO: 981826 - protein, 66 aa, Homo sapiens
GPVGGETALVLFGTVGVGVEVVMHPVQQRQGFVQLDRGVLDQAVHLAQARVVFDQARQLVPHLLQQ

SEQ ID NO: 981827 - protein, 39 aa, Homo sapiens
PSSFSQCFNRHRDVMAFAQFSAAALVQSRCNDREVKKVQ

SEQ ID NO: 981828 - protein, 56 aa, Homo sapiens
LWAQWSVWLSVLLSLLGSDASVPTGVMEDLPPSLLTHPCWRAGEEALAGTSGELVP

SEQ ID NO: 981829 - protein, 35 aa, Homo sapiens
MLTLSTDQRPQLPLTLASSPPNCSSRPRAAGSQWE

SEQ ID NO: 981830 - protein, 56 aa, Homo sapiens
MASEGASSKPFRFQVVLSLQMHRRINVHEPPPRFQKMYENAWKSRPKLAVHGSGGA

SEQ ID NO: 981831 - protein, 35 aa, Homo sapiens
LEDPNMLTLLVSPLDLDSLQKDSLTPKLRNGTGGA

SEQ ID NO: 981832 - protein, 81 aa, Homo sapiens
RSAGSAAQVRDTGVNTRRLIAILSVDRTLQSRALDATETLEKSAYPGITLLGVLREALQLGGTGSKKSFICIKYMLDGLVG

SEQ ID NO: 981833 - protein, 60 aa, Homo sapiens
GEVTACQRVNNSPQVTLIRVVIIQPRSIKHIMHGHQVGPFSLIDSSNEPSASSMHRDHTT

SEQ ID NO: 981834 - protein, 107 aa, Homo sapiens
MPQRFNGARQGPTLLLGSRVAFPHPVSDGLGHSNLPPQRQPLTGPIYHFSSVSLGPSTSLLSNSSIQHTLGAQHCLRGGSFYLNQVSYGLSRISQAVDTKNPESGFT

SEQ ID NO: 981835 - protein, 43 aa, Homo sapiens
SRYALLTHSSAWLGRLRKETQSWQKAKEKQAPSSQGSRKVSAY

SEQ ID NO: 981836 - protein, 109 aa, Homo sapiens
YTELSGYHSYSTYAHGSLSIDHVSQTSTMSSNCRLGTASREKRSSLFWWQSSLKEVADDVAARRDTNCSLSTEVVTAVSVLEPQKSIVFVKGLHHSLGVDGVIIHHGLL

SEQ ID NO: 981837 - protein, 68 aa, Homo sapiens
AYGTALGRVGIYHWRASIRWNSAYVGLKAVTKLGELFEAQQALPGKSQDIVRRTPSYREYRTIIYHPN

SEQ ID NO: 981838 - protein, 40 aa, Homo sapiens
TLIHLLGSQAVTGITGVSHCSWLRFMGSYCTGSQIKAIIS

SEQ ID NO: 981839 - protein, 101 aa, Homo sapiens
TRYHAQQDAVSRLSLGDQCKSREEYLECWLAEASNASFSRPPRQVFFIVISFSPEPVDPRPKALSEAQESDLALVALRPLILQCKAKNTVASRTLCGRTRP

SEQ ID NO: 981840 - protein, 48 aa, Homo sapiens
MTKDETEQDHMSIMRTLMTETSIMTGDLKRGTLIPAATFGTVSRLQQR

SEQ ID NO: 981841 - protein, 58 aa, Homo sapiens
SLFHRQTVVTLEHACAAGAEGLLMFGERDFYIHAIAVFADINGLRVAISPTPCAIRYA

SEQ ID NO: 981842 - protein, 47 aa, Homo sapiens
LNGGGMSYKIPYDRQETHLEWHTNLDFQLEQYIYHRPRDGIYIINHK

SEQ ID NO: 981843 - protein, 46 aa, Homo sapiens
HVRACCCAGGCTSNTDAPQAFMATPRTRGQQFLYCLYILWYARDSP

SEQ ID NO: 981844 - protein, 46 aa, Homo sapiens
MVAGLMPDCYLGYSTGEYTRSLYQVVTILLLVVSWIAAVLFIPYLG

SEQ ID NO: 981845 - protein, 85 aa, Homo sapiens
PALINQAWQIPGTIQLTADHEFLGLALADEQLRATRLRTDFGQVAAHAVTSAQHVARKALYFGNEAFGVCPPRYDIDVSRALARY

SEQ ID NO: 981846 - protein, 78 aa, Homo sapiens
DQQVHVNKFTNVQTRPSLPGLFAAFLAIPLANQRELLCQLIFEPRAPGQAMLLITVVVGVAPAGVQVQAQCIQGLPCQ

SEQ ID NO: 981847 - protein, 144 aa, Homo sapiens
TKCFPQDGRMRTSLCATLRLHRHTDGCSLEDFQIMISHRTRYSLAQFLSIQEASASIALFSKYGVEHLSLYPSQLLTGIMNIVRDQDDRTLLLVLQEIVATPGNLRAKSTQCRDQVVFNRCRVSDGRVRLQQLLVLREIAVDQQ

SEQ ID NO: 981848 - protein, 57 aa, Homo sapiens
MPRFSKKKSHLSASNTSGNAISSAYTALASMRMLSPPKSAFCPQAKIKYIDRQRVAH

SEQ ID NO: 981849 - protein, 71 aa, Homo sapiens
MKRLIALPFSALMVVSVQVSALCLNISESFTGIIGPGGDSVAHGPFTISGANGCSGASINAMVSAGGAGRS

SEQ ID NO: 981850 - protein, 138 aa, Homo sapiens
YSTPGPDIVAANRLMIQGDRHYDYDAFGNLIRERRGKSQQLVTEYRYDCRHRLISITKPNGETASYRYDPYGRRISKTVDGKTTGFSGKADKLIAEHHAERHRSYLYEPDSFRPLALLEGFGPKETTPYHYQLDHLGT

SEQ ID NO: 981851 - protein, 121 aa, Homo sapiens
SRKPSPKSKATVMLTTKELKRFDVTREEELVARDNQHFPFLLGYRYIMQLKVLNGCFWPVSACCVSAAHWPSRMHAVFSTNAIDWSNGCNCAGMDYKPQFPGKEVLSMDIRHQRLSIGMSE

SEQ ID NO: 981852 - protein, 135 aa, Homo sapiens
RQQAADTAKAVQHHIGAFAGGSVLLANHIGHFFTHELLGSAAGAFFTEFVGQLAQVYRSRAELELAHGFEQWECFVDGEFAVVGGAMARKAMGFENRDDRLVDQAAAIDRAHHIVIAVQLTDKRNHRFSECFTVD

SEQ ID NO: 981853 - protein, 58 aa, Homo sapiens
IADRRVVCPGVIVRSSANAQAGATTRLSAMFHGLWLLDFVLWLSSVLQSIPVASLAVV

SEQ ID NO: 981854 - protein, 124 aa, Homo sapiens
FLASALLLIVGLAIRLGVNESPEFLEDKALAEKARAIKQGQAPVLEDDEDRLASTVVVHWRQYVGNSGVYFTNTFMIAYSTQQLNLPRSLILECLFFVAIIQFCVQPLAAWVAEKVGATQFLCA

SEQ ID NO: 981855 - protein, 123 aa, Homo sapiens
RQAPAGLYAEPLVHDQRFVLEVFGKHREGLGFLCFERRVHQHRQRRQAYGHVIAGVELIQGGRQYFRLAAEHQVRQRDVLQRTAGEALGLCHVRRLLGQLAVVLVAHAQAFEQVVGQLLAGYS

SEQ ID NO: 981856 - protein, 112 aa, Homo sapiens
MYATLTQTYSAVQIGDTLKENLRASQQIVLSGGVDDDGLFTFSFDDERYLPFEGTGAISSWALEFTSTDVAARNRLFESLTDIILKLHYTAKAVLGGGIVNHDESLHIAAPS

SEQ ID NO: 981857 - protein, 34 aa, Homo sapiens
MLVPVAFAPTGASESSSPKMSCSSPLSYLQLAPE

SEQ ID NO: 981858 - protein, 35 aa, Homo sapiens
MHEIAQNYKVTNTEGELRSVMVPTLASIIFPSDYP

SEQ ID NO: 981859 - protein, 46 aa, Homo sapiens
TKASCCGHIPAFCAGPEFTPKSGVKIQALHQFCCILLIAGAEVAGH

SEQ ID NO: 981860 - protein, 80 aa, Homo sapiens
QNKLKAWIHMSVESSDVSWKKSRLPGSSCWFLHATTPQFLHQIDSLAHADIINAVKKFVSGQNSMAASGNLGHTPFVDEL

SEQ ID NO: 981861 - protein, 51 aa, Homo sapiens
QTVVTHTSPLVTNPDGNGSHDLIGTFHTSLDQLLHLLPLGVDDLRGSSPLS

SEQ ID NO: 981862 - protein, 52 aa, Homo sapiens
  misc_feature (39)..(39): Xaa can be any naturally occurring amino acid
PHQAVRAARQAADFCSEGGSGMQLAPELQLAPELAARPXVSSIALSQQLAPE

SEQ ID NO: 981863 - protein, 86 aa, Homo sapiens
FKDDSDCQTLIQPSDPTQTQFRTLIQPSKPRARFFQTLDQRRADSSQSLLHEPWLEASRRHSDAVHDPGSQPSRPHSDAGRRLSCS

SEQ ID NO: 981864 - protein, 38 aa, Homo sapiens
ISLSYSIQMPHDIIIFHIFFETTLIPTLCYHHPMSVSS

SEQ ID NO: 981865 - protein, 87 aa, Homo sapiens
MDLLQSTFLQTGRPSSVGWHLVSGAIRARVSRVSSSVVSTVSMLPGFYPRTPRVSLSLAPNQGIEGLYTFFLSFKAGQSAVAIRVIL

SEQ ID NO: 981866 - protein, 48 aa, Homo sapiens
LAAELVESKDVARNYAEAKDVFLGMLWYEYAKTGILSDSCRCCVLEDL

SEQ ID NO: 981867 - protein, 70 aa, Homo sapiens
GSAVRHVSCVYLLQCGHAPAVVNTRRPGSMFAFFGGERGAHVSAVLVKGGMHRSGEYTSSRRHACVLGVL

SEQ ID NO: 981868 - protein, 39 aa, Homo sapiens
GLLIFLLSLMTLTLCSPDLLGEPDNYDLAKHLKTLLKSP

SEQ ID NO: 981869 - protein, 36 aa, Homo sapiens
MFIARKNDWSSRIWAFRAPGTEWYPNIHLNTVKLAI

SEQ ID NO: 981870 - protein, 72 aa, Homo sapiens
EYDRLQLERYGEVSTALTCRRNWYRVGMHRRGEHVVPGFSLTYIWEVSTGLTCRRNWSRVGMHRSGEYTSTC

SEQ ID NO: 981871 - protein, 39 aa, Homo sapiens
GQQGAHVSTELGQEGMHRNGEYTYDQAPAERLLGGQTRC

SEQ ID NO: 981872 - protein, 53 aa, Homo sapiens
YHSWDPAFTDGMHPRRHWETGEVGYHKEAGVSTRASLVSEDSAASNPKAFTND

SEQ ID NO: 981873 - protein, 42 aa, Homo sapiens
RDCQRLKVINAAPMSHSSQGFTSVTQETFDEYFISETGHNVN

SEQ ID NO: 981874 - protein, 92 aa, Homo sapiens
  misc_feature (57)..(57): Xaa can be any naturally occurring amino acid
ADLEDSFHPSQIWQQVFQTYLPRLKQLDQGPKELEDFMAQLKSTRLGLRFEMFMWFXLRDHHYHAYELLGHSIQIIDGARTTGELDFLIKNT

SEQ ID NO: 981875 - protein, 97 aa, Homo sapiens
MEGRAWNIWSSPSRDAKARVQQFAYAVRDTFAELAIRDGQCKFAQKPGIILRIKRHCSLYVFPWKYVIPYPFNGCGVSFVWSRKTVICQLYPSDRGA

SEQ ID NO: 981876 - protein, 70 aa, Homo sapiens
VTLWELAYNRDTANHGKLVYRGGNFIVNQVPRLHVVSPKHASLLQNAQEHHFCMRELMCHILNTLKQVYV

SEQ ID NO: 981877 - protein, 43 aa, Homo sapiens
IRYADVLTYEEHAPFHAGVYTVVSVGQFLFRFRLVERVTVSHG

SEQ ID NO: 981878 - protein, 149 aa, Homo sapiens
RTTNTKDTINAFNHLNQMWRKHTIAEAAAFIPISTVRFIRISTYYTLNYLVFAYWCNARLACNEFSKAIFVDEHVSGYSKLGEFREMNAINLHEPHIVGAVLVVRDFSSRATFGANDGLDQVGMRTVMSRCSDDADLASLASNVRTRWG

SEQ ID NO: 981879 - protein, 123 aa, Homo sapiens
MREITPGITPPGDWNVLTRVSYGLMPTYNSEENNEIGVDRMAQGTAQTTVDVGGHVETKLRYGALDEFMASCFGKDWVGNVLTMGNDRISFSIGSYANDVGIAAIARGAQVATMNFEIPSDNE

SEQ ID NO: 981880 - protein, 161 aa, Homo sapiens
MCRPVFPSCKRLTLERMKMMLDKKQIRAIFLFEFKMGRKAAETTRNINNAFGPGTANERTVQWWFKKFCKGDESLEDEERSGRPSEVDNDQLRAIIEADPLTTTREVAEELNVNHSTVVRHLKQIGKVKKLDKWVPHELTENQKNRRFEVSSSLILRNHNE

SEQ ID NO: 981881 - protein, 47 aa, Homo sapiens
HYCRHNIYEDVKPVGDYENVCAGEASGFMNKDADRSRAMWLIEEYAM

SEQ ID NO: 981882 - protein, 54 aa, Homo sapiens
MDNIYVGHSGTGACGARREGTPSSGTLTSLTRLVKAYYIHRGIVPTVPESRLKI

SEQ ID NO: 981883 - protein, 125 aa, Homo sapiens
QLQQLYSFYETGSLYDLQNGDSEHPDHNVQLIKLEFDAEELTSPSVQHIIVNPNAGYDKFKDKRLSTKGLDFSDRIGKHQEDRDESGEYQMLGEGLGVKETPQQKYQRLLHEVQELTTEVERIKT

SEQ ID NO: 981884 - protein, 35 aa, Homo sapiens
FAAGINTILNRPPRRPDNYNLANLYFTPIPLARNP

SEQ ID NO: 981885 - protein, 69 aa, Homo sapiens
LTSVMCICAYERAKHWKCCYLYKNNPYGHVDYQYKRRRQEIHKRDETSTMAEAQGMEIKKSQEKSGRYT

SEQ ID NO: 981886 - protein, 170 aa, Homo sapiens
FFEASPPKNAVLYCLGVLRIAECHRLAPVSLFSTSLETAFFWAFSNALFAPFMSCLRVVISRRYMLVDFLDSGVPGPWWGSRETRMRCCRVVMPVPSAIWIGCMLARRRVSWGSPVFISSSVMVPRPGKAWTPGDSRSSDVGGTLDCAAAALQGTHGQRRKNSILEFNYC

SEQ ID NO: 981887 - protein, 90 aa, Homo sapiens
ACLVKCFGENLEEEAIIMKVVTDWTVGESVFHTTRWVPPLIGELYGLRTTEEALHASHGFMWYTEALCPPATWIPAPPHWDGINALQGTH

SEQ ID NO: 981888 - protein, 71 aa, Homo sapiens
TAGIRAAARHLGLSQAAVTRALRELEQEQALPLLIRTPTGLGFTPYGKTLLAHARLVLNQLEQAQGEMAAL

SEQ ID NO: 981889 - protein, 95 aa, Homo sapiens
AWVLADPGQDSKAASPQAAGCSVHCPTLSYKEEQLMAAHGTSHPPCQLHSARLVHVTQGSEHLYSLMVLRKQQQRLIRQWKRSRSISFCICKEPT

SEQ ID NO: 981890 - protein, 166 aa, Homo sapiens
MSSLQRLGPLCVSIYGLLVQSIILHQSRIGDALDQPSHWWQDDLHHLPTLYPKVAAPQWFPRTGSWSADSHRSLYRASSSVYFLLVHELDDPWTSSCSVMLMSSSCCRNCSRMYLGIMSTRDCLAEGVMPCCTTMRARVMFSSCMRWQYTLMVLMPTLGSSARNPR

SEQ ID NO: 981891 - protein, 74 aa, Homo sapiens
VNRARYRSLMAVAEHGLSVMSETSPVVRGGHSSLFWLLWSPPWHEFSRCCFSVLVRLGGVPGCVTAWGLPLKEL

SEQ ID NO: 981892 - protein, 116 aa, Homo sapiens
RWVLLQSKPFGVILKPGAAGRERVVTLTAVWMECFREAAYTKRLGTEKEVEVIGGADKYHSVCRLCYFKKASGQPAGPDNKENCPVPGKPGEAVAARKLFAPQQILQCSSARNARR

SEQ ID NO: 981893 - protein, 35 aa, Homo sapiens
IELYRSLIAVALTLLSCVLPYAGRRGYPLSHVHAT

SEQ ID NO: 981894 - protein, 75 aa, Homo sapiens
MINNSNAGPSRRGSLTYRRLLEGEDAELYYSRIAACNVCAHAPPLDDVVELGTPCVRLPASDWQCLQEPTLCKEP

SEQ ID NO: 981895 - protein, 40 aa, Homo sapiens
TGGTRLQVLWHPCTQMREHPHTLPLVPIARGEVRMVDRPR

SEQ ID NO: 981896 - protein, 46 aa, Homo sapiens
MRQLLRAAGAGATGRYPRSACCPRRWLRVESRLQIDMGYRSSNFVK

SEQ ID NO: 981897 - protein, 40 aa, Homo sapiens
TLEAHTHRHRSRQAITVAGERFHMVQNVSMAVHHICKEPT

SEQ ID NO: 981898 - protein, 127 aa, Homo sapiens
IYVVQDGGLIVFPSPPSRQVSPDDEYSDFVLYEDDKRVGEGIEPPGRYEGIQSYEQHQIPGEYDRKAVWAVSSKRPNIKILFFIPCWNIEFLLVLKISKSAHCSITIVTNNAVWQVNSTIFLCKEST

SEQ ID NO: 981899 - protein, 38 aa, Homo sapiens
FVRLRIRIPSARKELVAVQRVSSSSQNWAARHISSSAS

SEQ ID NO: 981900 - protein, 76 aa, Homo sapiens
SRRGGRGLRYHGIQIWELTGWREPFLSGTSQPFLESPSADSSPSLGSRSPDSQCPPPSVPGRTQEPGSQPNHPVGW

SEQ ID NO: 981901 - protein, 36 aa, Homo sapiens
LDGSRSDWGGDGRHWNCGLGGSSAWPLLARRDWMDA

SEQ ID NO: 981902 - protein, 57 aa, Homo sapiens
FINHNTLRINKYNIKYGMTSRANVIVGLIITDPDDHIILNWISHSIVVCRLHYTGDP

SEQ ID NO: 981903 - protein, 34 aa, Homo sapiens
  misc_feature (1)..(1): Xaa can be any naturally occurring amino acid
XTVRAGTHDMLVKGLRRWGCDMEPELTWWVGIVC

SEQ ID NO: 981904 - protein, 63 aa, Homo sapiens
SSSRIQIRPTFSSTKPNYDLYEEMGKVKKIDASTVCRMNVAGSSCGRFYDKERTNSKTVKGIL

SEQ ID NO: 981905 - protein, 36 aa, Homo sapiens
VFSEDPAPPERVAAAVDPCVSVPRLVSGIMNRPVHA

SEQ ID NO: 981906 - protein, 35 aa, Homo sapiens
LIFNPLATFFQSCCGREGVPGPVVPEVGPVRPPPQ

SEQ ID NO: 981907 - protein, 34 aa, Homo sapiens
  misc_feature (4)..(4): Xaa can be any naturally occurring amino acid
PAAXEWRRRTGNDTGATACRRGDRLNRFHTSWAN

SEQ ID NO: 981908 - protein, 105 aa, Homo sapiens
SSRFQRACAQCFSHIRGSGCTCHAVFLQFTADVGVRVLVVHKYCCARFMSIVRLLKSPAGDSTGIGFGRGIYGQRWIKKTHGVALAKEWYLGSRTLFMWLECNVY

SEQ ID NO: 981909 - protein, 74 aa, Homo sapiens
KNARYNAQCQETYPRYYKPCTPETIAKATSKNGNAMDFTPCLDALEPLVSHWAWPTPSLSQARYVTHQCLLSAR

SEQ ID NO: 981910 - protein, 74 aa, Homo sapiens
YNAIYRPFCYNETRLVCYTKRLPVCSHLYVVGNLLACYFTHALPPGRINNVFSDTISVAYMHIILTYIGFKFHK

SEQ ID NO: 981911 - protein, 71 aa, Homo sapiens
RLLERSPVLTFNTPQYYILKGDRGKTPRSQGIGGCHLNAPSAGHMSSSSETLTKCRCRQTHLSCFNKPNGT

SEQ ID NO: 981912 - protein, 42 aa, Homo sapiens
MYREYGLTPHLNSILKILQSRGFNNIDSTHSHNSISQKVISK

SEQ ID NO: 981913 - protein, 49 aa, Homo sapiens
MWSIYSIPLQPHDHLEALIDPFDLDVFTPHQSTATFIAYFTPNPVIVGL

SEQ ID NO: 981914 - protein, 136 aa, Homo sapiens
LQSPLITILSWRMRTESTGLVNGELQHQLLLGSPCPPGPRPRSALGVPVGGQDILRNLPLWYQMSPLLHQGRPRCKYAHLVSIAHHKQLLVSVETQAGHSSKWPVESLVHDCTSQLEEGCHRLTRLVPVSPEIVGF

SEQ ID NO: 981915 - protein, 40 aa, Homo sapiens
YCWSSLTGSRESSTSNFDPIKGQTPYSSMVMWCNVQLVDV

SEQ ID NO: 981916 - protein, 71 aa, Homo sapiens
YNPTITHNPTITATITLLNLYFYLRLFYTKPRDRGVVITTPRSLFPYKGKYNKHSLASCLAIGIRGVLNST

SEQ ID NO: 981917 - protein, 186 aa, Homo sapiens
SRGSRLLLNPHRTIARPPTPDVSDLFHFLQVVDRVGLLNHLDGRILMDRPPHSERIELHLGCRRTARTMHADCLDHFLVDHTRPALVTTDTLIGHVGFSRRPVALQQFARTEHQTNEGLRLLHLLQDLQGDRIDEQIDHQVHLAQVAHADLFVLQDVQVNVLLVEQTNRIVTQPLVELEEAARSAC

SEQ ID NO: 981918 - protein, 33 aa, Homo sapiens
MLSTRDVWMLFDYLADKHGFTARRYLVYTLQSA

SEQ ID NO: 981919 - protein, 41 aa, Homo sapiens
GSPYTPRLPGLVVVVNLYITLYGQLTSLSDTATGLGVDFGR

SEQ ID NO: 981920 - protein, 100 aa, Homo sapiens
LEDPVVQLRIWYGRCEINLSPDFTGSENSRTPRKRDAFQGHGPSLGANPFQGALAFTKKRELFPGLPPGFSGESVALPALERPRGRPISRHSGIPGNLKP

SEQ ID NO: 981921 - protein, 39 aa, Homo sapiens
MAGRSRICVTDSILVAGVADTGVIQVTQEASLAHATGTA

SEQ ID NO: 981922 - protein, 33 aa, Homo sapiens
  misc_feature (2)..(2): Xaa can be any naturally occurring amino acid
GXSKDPPAVQLRVTMPGRRDGLVVALGGRNWYG

SEQ ID NO: 981923 - protein, 33 aa, Homo sapiens
KIPCVQLRVTIPGRREGGCRLGETQLVRRGVQK

SEQ ID NO: 981924 - protein, 36 aa, Homo sapiens
ITLTSTITTITITTTTITIITLTHIPSTPITTHKHH

SEQ ID NO: 981925 - protein, 46 aa, Homo sapiens
DPLAIHRHHHEPPSPSLTSTSTYAYFTPTPVPMNSEVPINEVPINS

SEQ ID NO: 981926 - protein, 107 aa, Homo sapiens
AIIGTLFHNPIPAVTLNKVVINDVNKTEFNVLPRLLQIGKHIRSQWMCRSAPFSDVFKPAATERDLPTFLPELALSYTSSIESSLALFWACMGSLQSGMASWWGADE

SEQ ID NO: 981927 - protein, 44 aa, Homo sapiens
RLFIGTLFIGTLFIGTRIEFKYYIKYAWTSRANGADKAEVPMNS

SEQ ID NO: 981928 - protein, 45 aa, Homo sapiens
SRGIPSFIIGTSLFIGTISSRGPCILNIKLEYNTGADEIARCRSM

SEQ ID NO: 981929 - protein, 78 aa, Homo sapiens
GSLVIIGTQLPSLDGDLEEQMFSSKGPHVSLPGPRSRLDLHVNLFYANKSLVTCTVDSELTIGPRFATGDLGWHLVTQ

SEQ ID NO: 981930 - protein, 45 aa, Homo sapiens
RHLEDPSSIIGTSLFIGTRIEFKYNIKYAWTSRANGCRLIARCRS

SEQ ID NO: 981931 - protein, 46 aa, Homo sapiens
PHYYYPVPMNSDTSLFIGTSLSSAPRYSSGTCASLVSIVLWGCRLI

SEQ ID NO: 981932 - protein, 68 aa, Homo sapiens
FIGTRIEFNTPQYYVAIHRHRGWCKLGVREVEVKEGDGADNSTYYCGVLNSLFIGTCHRGWLVFVFLV

SEQ ID NO: 981933 - protein, 33 aa, Homo sapiens
AIIGTSLFIGTISSRGPCILILYYNSIRVPINS

SEQ ID NO: 981934 - protein, 123 aa, Homo sapiens
MFRDIISYQEKITFKPQRELRLCYHGGQAERPSGVLAGGQQGGTAGESAHGPATPESRLAVFMKLKICCPMPQQPPSSVFTQEKGKHSCFHANRHRDSHRYSCDLHRLGASTQTSSRTLTASA

SEQ ID NO: 981935 - protein, 36 aa, Homo sapiens
GEHDHAHGVFYCTDDLTTCLPAPGVAAALTDNLPRT

SEQ ID NO: 981936 - protein, 86 aa, Homo sapiens
VHYVQIAMRASVAPSELGDGIAIGDVSLYYMRIAAGHASGAGYTLTGLRIQVVDEDACAFAGKGVGDTLAKAWTRARDDGNLAGYR

SEQ ID NO: 981937 - protein, 38 aa, Homo sapiens
VASQQAPLSCSSCIMHVTSINHHFGVSSLPEMQSTFTF

SEQ ID NO: 981938 - protein, 66 aa, Homo sapiens
WYSCWNVGRSTSTDGGAQSGPVPNVPAECRGGMLERLVSELSPMNYIGLDDFVEITKKEAKGVPSS

SEQ ID NO: 981939 - protein, 102 aa, Homo sapiens
ATLEYQTEAIEWLGRCEREGESHGAHPTFLLPSRPPGSPSWLPHRAVVAGSCSLSQCLCFISLSIKCKDFLLERSLWYSIESCADSRVRRRRSTLRLPGLSE

SEQ ID NO: 981940 - protein, 59 aa, Homo sapiens
ARCWPVIPELNGKLTGMCFRGPTSNVSVVELKLRLEKLKIYDIKKVVKQASERPLKGIL

SEQ ID NO: 981941 - protein, 33 aa, Homo sapiens
TKHRLLIGKVTKVKELGKSYPAYFRPTPVRLSG

SEQ ID NO: 981942 - protein, 81 aa, Homo sapiens
ASPITSTPTASTTTVIIPHLPSAITSRANTSTTIIIITITTTITITTITITTITSTPTAATSSIIITRITMPHSSLFGMSG

SEQ ID NO: 981943 - protein, 85 aa, Homo sapiens
IHKKSHWCKAPSPNLMDITYAQDAIPSPRSLVHALTVLLCVGCSTVLCQPTGGKAGLTEGCSFMEEAASACTLTSVLGILVSGSR

SEQ ID NO: 981944 - protein, 38 aa, Homo sapiens
LIAVISQIVSSITASREIVMAPWNVDLTGIPDQPGALT

SEQ ID NO: 981945 - protein, 44 aa, Homo sapiens
ISNGAYIDASFSKSSKQSPKHPYIIHPSIHPSNYPSIHLPNQPP

SEQ ID NO: 981946 - protein, 49 aa, Homo sapiens
EHHSNTIIIITITTIITITSTPTPPPPPSSSIITITIAYLTPTPVRLSG

SEQ ID NO: 981947 - protein, 34 aa, Homo sapiens
TWGLSDQPNTIITTIIITTITIAYFTPTPVRLSG

SEQ ID NO: 981948 - protein, 45 aa, Homo sapiens
PVVPCHVCAGSHYTTKQYRYLNTTFFDPAGEGDPDFTPTPVRLSG

SEQ ID NO: 981949 - protein, 70 aa, Homo sapiens
  misc_feature (43)..(43): Xaa can be any naturally occurring amino acid
LCSRTQSTLLTIRDRLFSASILVAVVHTGQSGDIFHVRYTLTXLGRRRTGHCPQSDTTAFGAMVPAHLKH

SEQ ID NO: 981950 - protein, 85 aa, Homo sapiens
YTFWDNPQYLIKLEEEDEDEEDGESGCTFLVGAHSEAPSGRQRKHGLMHMHTIVLWHLCRFHEELSGADQHPLSASDFFLHEIAP

SEQ ID NO: 981951 - protein, 66 aa, Homo sapiens
TLRITKHKVLLSAKMTSLMTIMARLLCVSRLQTTSVLDANHDRRQDLGHAAAKPFNRARALRYFTL

SEQ ID NO: 981952 - protein, 146 aa, Homo sapiens
SAEHMSRRSCGVWALCHACQAPSLAVRTFNSLAMGVLALGPLARLGAPQDDGSFLGVTGTFTGVALPSLWVPPFGLLAWNSLILDVASPPLSEFRPTFADLTWSLESSHICAGSPQAEEVAKWIGRLVRWIVLLQGCWVVGILWRH

SEQ ID NO: 981953 - protein, 38 aa, Homo sapiens
LHNEVTQSYPIYSFTHSTILTSIANPTKTLTRVFGLSG

SEQ ID NO: 981954 - protein, 53 aa, Homo sapiens
RISEHHRPVIGVHSGIARMPTPVLSCQSIYLHICAIYPSTSADFTPTPVRLSG

SEQ ID NO: 981955 - protein, 88 aa, Homo sapiens
LAPPYVILPPPYTTIPPPCSLKQPYNHSSTTLPPPYTTLHHPTTTLPPENYPTTTLPPYNYPTSTYHRATITLPSPAYFTPTPVRLSG

SEQ ID NO: 981956 - protein, 119 aa, Homo sapiens
MSGNSYTLLSGKHFGRFFYHSKPGLCFVMEKHAGTLSKQKTDYDSSGRETSSQCLRRKNTKVDDTLELERGPDCDRSHTRVCRLHGGQKRGFVPGLTKIRRPGVVANACNPITVEGRGR

SEQ ID NO: 981957 - protein, 41 aa, Homo sapiens
LYACNSSIAQLIHASEVYLDENRLLSMKDERAVGLFKNTAK

SEQ ID NO: 981958 - protein, 72 aa, Homo sapiens
TLGDFQQVKAVLSYDREHCLHPVATEQDPISWEKTSRTAIPQDKRIVSLYKDSISYWISEEACISGSQKIIG

SEQ ID NO: 981959 - protein, 74 aa, Homo sapiens
CAAGVDGFMDLNAIIADHALDVSGTMHDTGFRCLEEEKIVSDCRTQTNPPPEQHLCGVRTIVSLKPYSDTCRPT

SEQ ID NO: 981960 - protein, 41 aa, Homo sapiens
MKNSQKTIASSSRTIIVYHHPSLTSTSTYAYCYTSPTVRWP

SEQ ID NO: 981961 - protein, 65 aa, Homo sapiens
DLQDPRLGHAPCALGVPSHFRYEKDTVVVQDSGYIFTACPLYSGCGISALLTLRGIKCCMDPHPV

SEQ ID NO: 981962 - protein, 139 aa, Homo sapiens
LGQRTVSEGTTAVTKIQLRVSLPLHTSRSLFLCSGVSDPGRICSSSLIRLLDGHCVDQKKDGKKRKRSRKESYSVYVYKVLKQVHPDTGISSKAMGIMNSFVNDIFERIAGEASRLAHYNKRSTITSREIQTAVRLLLP

SEQ ID NO: 981963 - protein, 113 aa, Homo sapiens
MPSGHAPCRANATVLCQRTVLGLRTVVQQYAKLISGARPCARMLGPPNKDAGGLTPHGSVVDHFACFGGLNAARYLSTHPGLLNRQHVGPTHSDGSASIDDAPGGLKAGDGAL

SEQ ID NO: 981964 - protein, 34 aa, Homo sapiens
MYCGVTVRWPNTVRWPNTVRWPSTVRWPNTVRWP

SEQ ID NO: 981965 - protein, 70 aa, Homo sapiens
LVHAPSVPTGELGSGLQVGAPGAEEEVEESSPLQEPPSQAAGTTPGPDPTAYQLLSARSACLLGLLAAIN

SEQ ID NO: 981966 - protein, 76 aa, Homo sapiens
QPPLHHNYYGAQSPTTLTTVIPSFTRENTLMFTHQPHGCVGPGALTHRSLGQRTVQFVPFQFYSELLPGGSTVRWP

SEQ ID NO: 981967 - protein, 80 aa, Homo sapiens
FSRLVSIGDSSILSEVILNGEQNCIFSLTSGSYAMRMPRRQNDTTGRARWLHACDPSTSEAEAGRSRGPEIETILATTVL

SEQ ID NO: 981968 - protein, 68 aa, Homo sapiens
EPKALTITVRRRFKESSILYCPTLRYCAYATNKTKHILPTLASGKFLVHNVQELEVLLICNISYGADE

SEQ ID NO: 981969 - protein, 78 aa, Homo sapiens
  misc_feature (21)..(21): Xaa can be any naturally occurring amino acid
FFRIVDCSPLQSFWVQSPPRXFHASILWQVLAVLRSLSGDLSGRDSQHLSLIDVRAPSMLRQPDMVVGSVAHEPRVRG

SEQ ID NO: 981970 - protein, 37 aa, Homo sapiens
MRFLAACSVVATRSFRDSLTSLFLPYPSSIPVSSTGH

SEQ ID NO: 981971 - protein, 36 aa, Homo sapiens
HELVLTIHDHSHHSPSLIIYFYLRLFYTNPVIVGLE

SEQ ID NO: 981972 - protein, 44 aa, Homo sapiens
RYHRHLAIHRHRGWCKIGVVEVEVKEGDGGYYVRTNSEVPMSSE

SEQ ID NO: 981973 - protein, 137 aa, Homo sapiens
  misc_feature (3)..(3): Xaa can be any naturally occurring amino acid
HDXLSLFPRSPSDAEPKLDCTAAISAHCNLPAWFSCLSLPSACDRRRALPRLTGFRIFLVETGFRCVGRAGLQLLTASDPPASASRGAGTADGVWFTQCSMVPRLECSGMKDDGNPWSPVGPGKTPLPDLTKVIVGL

SEQ ID NO: 981974 - protein, 36 aa, Homo sapiens
MWHQALLRSGDKVRIDPPVTNTTAASTYLNNPYGAL

SEQ ID NO: 981975 - protein, 58 aa, Homo sapiens
TADIILFGFRTSVGSQLILSRRARDRDDYSSGGEICSCVYVYPYGALAQDIRARYRDR

SEQ ID NO: 981976 - protein, 95 aa, Homo sapiens
PVLHRLRRAAVRCDALLSSVYSRRLSVGGLAGAHEFWAVVRYADRVYALKFGIHMVTSRRTGAYPPRVLTEIREVPQSTRRPCRFGTDARSSLNL

SEQ ID NO: 981977 - protein, 155 aa, Homo sapiens
SGSDLTSTITLKATHPYPAQCQHPIPQHALKGLKPVITRLLQHGLLKPINSPYNSPILPVQKLEKPYRLVQDLCLINQIVLPIHPMVPNPYTLLSSIPPSTIHYSVLDLKHAFFPIPLHPSSQPLFPFTWTDPDTHQAQQITWAVLPQGFTDRPH

SEQ ID NO: 981978 - protein, 84 aa, Homo sapiens
APVATSISNRAIAIHGFISPCEPAGGLRVQEEPNQPVWLPASCTMIHEERGDINHTNSRGRGGTGSDPRQPDSLGPDWLLGSPT

SEQ ID NO: 981979 - protein, 43 aa, Homo sapiens
PVAIIGTSKPRCCNQLVLLHLDFTANLLTMLEMCLATCLAVTA

SEQ ID NO: 981980 - protein, 102 aa, Homo sapiens
MRQVSKEWDSDRTEQFWSSSNRFAGRETEIIFQGRDLHTPGASQWYWLLHNAPWWAPQASRCGEGTEGSRQAGKGLGSSHADVTQAYLVPVPTFTKRRSVKC

SEQ ID NO: 981981 - protein, 44 aa, Homo sapiens
SRHLALRGPCILHIILKFNTGCPINSELFIVHRVKYCACVEFNY

SEQ ID NO: 981982 - protein, 33 aa, Homo sapiens
CWDYRREPLRPAPLIFRTALLAYVTPTPRCVGP

SEQ ID NO: 981983 - protein, 39 aa, Homo sapiens
RIPSLFIGTPYSSAPFALEVHAFFILYLVPMNSEVPINR

SEQ ID NO: 981984 - protein, 44 aa, Homo sapiens
MGNGWMAPSTSDFRKSLSELSCPLPVSWVQPAHTFPGWERCVGP

SEQ ID NO: 981985 - protein, 103 aa, Homo sapiens
TGRLSQCPEPLMSCDNKEEDVLKFRCCRNPLRCTNLDFQMEQYIYKRKSDGIYIINLKRTWEKLLVAARAIVAIENPADVSVISSRNTGQRAVLKFAAATGAT

SEQ ID NO: 981986 - protein, 85 aa, Homo sapiens
DPPPVAPVGHANSQSFSSKARRSTISPSQALKQHGIYTTAGSVVSGLTQQASRQPSVNAPQAFCLQALLPDGDGSSACLYSRALG

SEQ ID NO: 981987 - protein, 47 aa, Homo sapiens
PRLSSAPGRGVISVNVSTGGEVEVDLFRVTKNYSSAICALVMVGRDE

SEQ ID NO: 981988 - protein, 66 aa, Homo sapiens
PLKSPRSLSYCLSGMYDHRYSATVSSQCRVTTGHCVSLESACRTNVTDDTTFTTSSTPLNPFESPY

SEQ ID NO: 981989 - protein, 62 aa, Homo sapiens
WTLSLNKLTFNSGCTIGYVLIHYRGRNPIVDIDSRIGLAVIPWVTCPVGHVIASISDRGVVK

SEQ ID NO: 981990 - protein, 101 aa, Homo sapiens
RRSTIPVYMYQDEDNDCEHLIRIIFIESQNGAICSTSTICSKPVLRLLCMSLPWIESLILAVSCIKIDENSSALLALWFCIMYASLPLVTTSSLRFLPRGR

SEQ ID NO: 981991 - protein, 72 aa, Homo sapiens
MLPTTMGRYWFILRVSYVWPILIFGATYLLDFPTSWVIAFGNWGLQIVDDMIIIGCLEWIQAELWSEAPCEK

SEQ ID NO: 981992 - protein, 45 aa, Homo sapiens
SSALAIIGTSLFIGTSLFIGTSKTNSQTLENDSYQSEVPMNSEVP

SEQ ID NO: 981993 - protein, 102 aa, Homo sapiens
EITQSPDPSSYRSGRLNTHWGDSHWQEAIIARQCKADTEQCSLDCSVTVLLTALRQAQLHRFILACSLTKVTVVASLATLCPGLRPSYVLYVLVPTTAPEGG

SEQ ID NO: 981994 - protein, 52 aa, Homo sapiens
DSTGSRLGTHRPLVNLAIISLANPFKHPFPTSKPEVIFPIRLFYTNPTVRWP

SEQ ID NO: 981995 - protein, 34 aa, Homo sapiens
IGTCIIGTLAPRERNHSTGSIESTCSLGGCRLIA

SEQ ID NO: 981996 - protein, 101 aa, Homo sapiens
DRPAHFKARAPQCSIFTTCSRYVSAAFYTRLCFTSPKRGWEEEHLAIEKLSFSLESATVISCMCCQCLVVPRSQVLPVKPTSVRLSCHISFLVPSPLSVSF

SEQ ID NO: 981997 - protein, 98 aa, Homo sapiens
ASAPYWANRTVWGQRTGVGPSHRVGLSHRSSIDIAHEHRVHTHCPTSDADHQWDEPSRELIQHSQNLYILTFTHFLHTPPEVTPTATTKITINPTVRW

SEQ ID NO: 981998 - protein, 52 aa, Homo sapiens
VESGSVTRLVCMGSVISASRQPPPAGFDSPFSASLVVWDYGCEPPRPAGDGA

SEQ ID NO: 981999 - protein, 49 aa, Homo sapiens
MPEVSAERPIGLAALQPINSWAHAILPPQASRSSSDYRHAPPRPARCVG

SEQ ID NO: 982000 - protein, 42 aa, Homo sapiens
MHHLCHPEALEDQLHHVHPVHSLNGQCAPLGYRRAPEVTSHH

SEQ ID NO: 982001 - protein, 42 aa, Homo sapiens
SPIHGTGVGENRRYVEVEVKDGDGGYDGGDDAGLLFLVIFFD

SEQ ID NO: 982002 - protein, 33 aa, Homo sapiens
MSSTAIIGTRFFIGTSLSSAPSAMFVSLAGGAD

SEQ ID NO: 982003 - protein, 63 aa, Homo sapiens
RGSPRYYSAPAFGTTAFFIAPVMLRVGPSTDPGPSASSSIWSVASRKIDHVEGHKSSPYTSIS

SEQ ID NO: 982004 - protein, 43 aa, Homo sapiens
RHFSYSSGPRYNIGPSLYIGTSLFIGRIEFNTPQYYDLVPMNS

SEQ ID NO: 982005 - protein, 107 aa, Homo sapiens
PSITHVDGPTEIYKLTRTGGPWSRRLQQSGWDGLLHNRDPLTSVGSMPERAQCKTLMPHGSSSVVLLDLAACPFVGVPFDGGCRERRFLQPLNAVVYYNINSSMTHF

SEQ ID NO: 982006 - protein, 68 aa, Homo sapiens
AILGTSLYIGTSLFIGTGGWCKKALGRSRALRRVMVAMMVRMSGEVPINSEVPMNSEVLMNSEVPINS

SEQ ID NO: 982007 - protein, 129 aa, Homo sapiens
  misc_feature (3)..(3): Xaa can be any naturally occurring amino acid
YHXSITYDEFWPLIHVSMLSSCSSRGSPPQACRRCTSGHGLFCCCSRRWGSILPLRLTGSSFCSLNFHWLLSEVAGGDHASLRSCLRMASVAYRHVLSCSTYYASVQLYVVMQLTKEGFTQKDIQLIRP

SEQ ID NO: 982008 - protein, 37 aa, Homo sapiens
ALHRHSLFIGTISSRGPCILNIILEFNYGCRCSEVPM

SEQ ID NO: 982009 - protein, 54 aa, Homo sapiens
KAAVVDMRHSHTESAVVMESAVVLYDTAVGAMECHTIRCTSWKGDSTASGGSAL

SEQ ID NO: 982010 - protein, 122 aa, Homo sapiens
MVCVQVRWLGLDHLEGLQLVIRSAVDGGSWHSPHQDCGEAAPEGPGALVASRSSRNASIVPAECVVGLETRCAQRAPFGAHVQRLQDTIAVQEALPFGIGEAPQSGGRRPLARHGRAAHTAG

SEQ ID NO: 982011 - protein, 39 aa, Homo sapiens
SDRLGLPRCLAITVCEPHPGSFMILATKEGFSLVYVCVA

SEQ ID NO: 982012 - protein, 59 aa, Homo sapiens
KLKRRDVPPNFSLAHYNLLSWRQLLMYDMSPFPTWSPPRMLSSCGAGTIIPDSGHSTPP

SEQ ID NO: 982013 - protein, 48 aa, Homo sapiens
MLVAECFQCKYLDGSQAVYIIYFLYSLESRLITRFTTRLSDRLRRSRQ

SEQ ID NO: 982014 - protein, 67 aa, Homo sapiens
ISGRLVSSGVPNRADLEGSTLAVLMMTPRMASLVWFILGPYSARATRGITIGGVHEIPIKNSLEVFQ

SEQ ID NO: 982015 - protein, 43 aa, Homo sapiens
MEKVLRSSNNPPLFSCAYQRKCIQSTPGGEERCNILWAKWCNA

SEQ ID NO: 982016 - protein, 37 aa, Homo sapiens
VTQNTDLVMQGDSLSSGHSTPPRSVNGHPAERASICK

SEQ ID NO: 982017 - protein, 61 aa, Homo sapiens
LVQLFPLLALRILGGTLLCSDLADSYDLLHISSTSSSLTLWTMNFSEATVQYVLCVFVASI

SEQ ID NO: 982018 - protein, 141 aa, Homo sapiens
GVGSVCWDSASGSRTVTGSVCSAPCNGERGGETPRLCTPMRTIEQHLRNGVPAAVSSCGISSLSVGSLRQQLHGNVMHPKSSPRTPGHLSSALTSWAHPVPGRLQLVLSYFSWTLKEPSQSWPHISLCDPPHLGSITPSSV

SEQ ID NO: 982019 - protein, 119 aa, Homo sapiens
LECVEFAVFPFNHRGQAHVCGSTAAYRGWAIMRAIPTVLLLTVLVALTYIVGLLYKEPFTAEIYRQKASGSHKRSCLSCDSFAEGLASLLACPKWQALRRARLVPVAQGSPPACAAPVP

SEQ ID NO: 982020 - protein, 73 aa, Homo sapiens
GEHVRPSRPSSRSCSSMGEKKITINKDSKVPNACVCTIIKEDHTCGNRSLNHNSYRTRKCYLLATKSPTPSGG

SEQ ID NO: 982021 - protein, 34 aa, Homo sapiens
HETPSNSAQLTHTARVSPATCFCSACGDLKPATS

SEQ ID NO: 982022 - protein, 111 aa, Homo sapiens
MREWPAFTKKVARDHRAFLCDPRRRNNVHGFPAGQRASAEGVPLQTHPLPQEALVPYKGDSSAEELKLVTPLTGPVMPVRNVYYKKKARVITEEEKNFKAFASLRMAFQRL

SEQ ID NO: 982023 - protein, 66 aa, Homo sapiens
DKIINGAHFSPCSVNPISIFITHLSNYGNDRLGLYTFKHLVRFLHSWTNLRLQTLPHGAEAQHGAL

SEQ ID NO: 982024 - protein, 44 aa, Homo sapiens
GDDHGLLLLVREADTDTHSEVVLILYGVFAHPPEVIPSSRNLLS

SEQ ID NO: 982025 - protein, 91 aa, Homo sapiens
RSTGSRRLDVFRVSDEHHSLYCTSQVLVCVGEDQQSLASMDTKAVSTAKKYLILLTDHKTVSASLCNHVLPMGSDVQSSHSADSHIGHSTP

SEQ ID NO: 982026 - protein, 37 aa, Homo sapiens
MPFTHPLISGEHQTRDYALIGAGALAQHGAFAQYGAL

SEQ ID NO: 982027 - protein, 42 aa, Homo sapiens
DTSYHVAALLSQAGVALVPTCAAFYYLLAQNWSSRWDLLGDY

SEQ ID NO: 982028 - protein, 75 aa, Homo sapiens
ALIGRRGRIGSTARGTEYLPHAYIVSCNHLTKSKVTNPSRSVSRVLKNRNMVSSRTRQQTKLCQSRPPCWAPSSG

SEQ ID NO: 982029 - protein, 85 aa, Homo sapiens
  misc_feature (71)..(71): Xaa can be any naturally occurring amino acid
LRSRKHATKQSATPILHLTPRCVGPTATHRVGPRTVLGNAPCWANAPCQDAGRSLQKCLAFTLVFWRDVDXIRIKAPGDPTKGAL

SEQ ID NO: 982030 - protein, 57 aa, Homo sapiens
MPESGLPPLLRALYIVIFQFGWASTLISHLSLIPELVTNNHKKVELTALSVCVHCAL

SEQ ID NO: 982031 - protein, 134 aa, Homo sapiens
LTLQDPPEALNGQLDPTVDTTRRGFVFITFKEEEPVKMVLDVKSSILSVEASVRSRCVPVHRSLSAAAVWLWGPWKSQPREPRQCRSWLRWSVRVRVGIRATATTVTRATGTSRANGPGYCGYEYSSLWPFNAS

SEQ ID NO: 982032 - protein, 34 aa, Homo sapiens
GDDNGLLLLGDQADSKTPTLQWLSSWYGALARTR

SEQ ID NO: 982033 - protein, 44 aa, Homo sapiens
SRLIQDPRGALNGLYRSMRQEGGPRDLQLVVDEELGRSVVMNAE

SEQ ID NO: 982034 - protein, 72 aa, Homo sapiens
LTLFHRGLGQPLSTFFFRESCAWTFNYLEKRGGAPAVARSCASNCRVDAPPRRCWRKQMYGSSLKARSHTVR

SEQ ID NO: 982035 - protein, 46 aa, Homo sapiens
MTFCRYPRAVLGTQQFIALFLPQGWFRNLSRPAPVGLYPLDRCVGP

SEQ ID NO: 982036 - protein, 113 aa, Homo sapiens
ICHVPRECGDGLTLPSVIGQSRPWLAVAVNVVVHLDLLPFLGAAAQAGSCDGSSLVVCGSSFQSRVCPGMCSSYPSLEGVGVLCTHAIHGMLRLGGPFNASGPFNSSGPFNAS

SEQ ID NO: 982037 - protein, 93 aa, Homo sapiens
SGSPEALNGPGGFEWPGGQWPLITLHVYVLSHFHYFLSIGAVFAIIGRFISLISPILRLYPTSYLRQNPFHYPIHSAYICLSSHHTFSAIQRL

SEQ ID NO: 982038 - protein, 36 aa, Homo sapiens
QWWPGLRFPGHHLGSECTLMEPPILQTLELCARCVV

SEQ ID NO: 982039 - protein, 121 aa, Homo sapiens
NILPKILVSFTFFLRRSLAVAEAGVQWRNLGPLQPPPPGFKRFSCLSLLNSRDHRQAPPCPANFGIFSRDGVHHVGQVGLDLMTSWSARLGLPKCWDYMLEPPYPANISSFFFVLVQVWFV

SEQ ID NO: 982040 - protein, 119 aa, Homo sapiens
STGSPEALNGLPSWVWNLVGIHETTFNSIYEVDVNIRKDLFANTVSVWAALTMYPGIADRMHNEITALVPSTIKIKITRIPLANYSVWIGGSILASLSTFQKMWISKQEYDESGHSTPP

SEQ ID NO: 982041 - protein, 51 aa, Homo sapiens
SNEAIESLYEALYGDYFARTCDNVGMMHNDSIIHLAIIVIICRSPAVPGVH

SEQ ID NO: 982042 - protein, 89 aa, Homo sapiens
ALRRLMATQRLLPAAVLVEQAGGEMSFRARRAQMPLKRMMYSNRRFLGGSSSTSWFTLSVISASMALGALDGLCALLVVQGRARGHLLV

SEQ ID NO: 982043 - protein, 40 aa, Homo sapiens
QQSLATSRQAVQSANVYYYTNPTVSLALHGAFFPHGALGL

SEQ ID NO: 982044 - protein, 73 aa, Homo sapiens
  misc_feature (71)..(71): Xaa can be any naturally occurring amino acid
LYRIPVSRLMSRQAVEWSTILHLLVFLPCSTVTYKNVKFTVWDVSSQDQIRPLCRHYYTGDPRFSFFVLNXRP

SEQ ID NO: 982045 - protein, 75 aa, Homo sapiens
MNGLSRKSFCRHWANGEGTASEKPCHQQGCPGPPSYSSHSSLAAVLAGLKSKYRLQPGPGVFLTRFSEESRALLL

SEQ ID NO: 982046 - protein, 52 aa, Homo sapiens
LYTLRDLEPALRFVFCFGIHFWCSQTKAVLWYDLVLQFRPCTTSIRPFDASG

SEQ ID NO: 982047 - protein, 47 aa, Homo sapiens
VWCRSFHDWLLRFLEETIVHASLSPTVNDFVSTVQQTLSSLLLTIAD

SEQ ID NO: 982048 - protein, 70 aa, Homo sapiens
AYVTPQTGGKDITDEVITDIAGVIPAEENDGVLLPVRVALLDKLESCGHGFTSMRVMQQLSSSINSKMWW

SEQ ID NO: 982049 - protein, 33 aa, Homo sapiens
WLTRRVSQYMRRCMAICPCCLQEQTSGSLSEGL

SEQ ID NO: 982050 - protein, 159 aa, Homo sapiens
SPHHNTMHTTHTYHYTHTPLHTHYTHHYAHTTHTRHYTHHYTHSNTHHYAHTTTHTTHTTTLHTHHYAHYTYTPHTHTPQTQHLYTPCTTHIPHTVYTHNTHNTLHTHIYIPQVPTTHTDHTHISGIHLHTPHRIPTILICRTQLGFQGAWIVKYLMGV

SEQ ID NO: 982051 - protein, 69 aa, Homo sapiens
PGGLDGRKARDYERDLGDNTIQDNVPPILTLKAVMVGMKKLDMSHLEYTLRGAIQRLRAIQCLRAINAS

SEQ ID NO: 982052 - protein, 69 aa, Homo sapiens
TYIIAHECTSSLLFWAWRTLYYERTHRRIIILSQGHSNSTPTNSFLMTSSQPRYLAYCTPTPYHVAITG

SEQ ID NO: 982053 - protein, 60 aa, Homo sapiens
SLNGPGSSNCWLLQEGPIGNMPSPGPRDAFRPSPCAGLQHSQRPRVTRDSCASCTTVQYS

SEQ ID NO: 982054 - protein, 120 aa, Homo sapiens
IPVLLHKQDQTRDEGMKVKGDTNDGGYAQAGAGQKAIMSNFFNKMKLTRPGTVARACNPNYSGGGGKRIAGIREAEAAVSRDRATALQPGRHSDDSVQKKKKRNGVQKGKGRSLVCGGST

SEQ ID NO: 982055 - protein, 42 aa, Homo sapiens
TTQTDPVVYKTRSPIMGISVPVPSTTMMTFSTPSYLLVGGST

SEQ ID NO: 982056 - protein, 66 aa, Homo sapiens
LNGQPSPVLLDGPGLFPILRSSRIARFSLVPILRSPYNHPPGLSFNTASSLQSTRMPGGTQSRALT

SEQ ID NO: 982057 - protein, 124 aa, Homo sapiens
SLRLRLCHFRKEFLVEEEDEKVDIDLGLFEEFHDSHTLILELQEILIVKLKSLHVHTQELGIYFRLSCLISRRCCHSCRLDRIRGGKIFNFHQDTLFQELSSSVMKRRLLLPLPRTLGVGGQVV

SEQ ID NO: 982058 - protein, 126 aa, Homo sapiens
AVAAVTLQDPRSALTGMSVWAVKCSNVVVTAIRGAIILAKLSIVLDSQRLLGEQGSVSPYTVPCKVTGRCGSVLVRLIPAPPGALGIVSAPVPKKLLIMAGIDDCYTSARGCTATLGNFAKAIQRL

SEQ ID NO: 982059 - protein, 42 aa, Homo sapiens
MAYPGRQSLQYADERHGGSQSQEFESSLGYSSASRGTDARSS

SEQ ID NO: 982060 - protein, 147 aa, Homo sapiens
DAPSEEMSSIAFYRYRSSTMLIVTETPVLPRRPAVDRDWAVLGKLVLSLMHLANEVDEVLPLVWHTLFRPVCELELADSPGLDIPGICDLELSQDILRHSCILPSDLSQSTGSGAERSAGQYLVTLLPGHTPAGWYSINTIVEMFSP

SEQ ID NO: 982061 - protein, 80 aa, Homo sapiens
DPVGPRTVEDSTWFSWFPWLCVCVWRRPRPLDHLLELVVQDQPEGAPHAPQDVGPRTLEEGLAPLISEDLPPTVDGALAP

SEQ ID NO: 982062 - protein, 70 aa, Homo sapiens
RANAPCWATHRAVDTLFQRGFLGPLCVVGVSYTAQPKRSPQYGSMPVMPVILGRLCLFHRDVQSAHGALA

SEQ ID NO: 982063 - protein, 94 aa, Homo sapiens
NARVGPTHRGHSGLYIYNLYAPLCCTGCPAILGMRTDTVVVQDLGYIFTRLPLKRMWHQALLRSGDKVRIDPPCIRQHTAASTYLNNPYGALAL

SEQ ID NO: 982064 - protein, 54 aa, Homo sapiens
VHADAAVGLQDPRGAAHRVNLVEVEHQVQFTDTCGNIRLRPPRIVVKWPPGKTG

SEQ ID NO: 982065 - protein, 33 aa, Homo sapiens
MNVYEAGRMPPQKSKSNGNVERIEESALFTLNG

SEQ ID NO: 982066 - protein, 51 aa, Homo sapiens
DAVSERYCSITEREEVEMIRPPLVVAGNGDQEHALNLDTQGTLVLLKLLKL

SEQ ID NO: 982067 - protein, 84 aa, Homo sapiens
RFASFSSTIHLRGRYCCLVDYADSLLAAAVSSSSTLEQKAVGAGEVTKSAQKAQKARWNIILDTCHPILNQWWKNGLRTVCTFW

SEQ ID NO: 982068 - protein, 51 aa, Homo sapiens
DGHERSGQLGGQFQFFSITVSLLGGPEWLPGEEDEFGAVLLQSLSRWPFNA

SEQ ID NO: 982069 - protein, 82 aa, Homo sapiens
WPGSALNGQLGSSFHDGYADYLEEHIVSDLEHSEDLLHISKHFQLLDVVNQELPEASGQTCALFFVASINNVGHQDLALESS

SEQ ID NO: 982070 - protein, 34 aa, Homo sapiens
RHIELAGADEVGGLWRRLTFSSVDTHLRVWALTT

SEQ ID NO: 982071 - protein, 45 aa, Homo sapiens
VVVDRKAARMNSAMPVSRTSCCSSSRRPAPICKSLLPAINSIARV

SEQ ID NO: 982072 - protein, 68 aa, Homo sapiens
FDSIGTVRYVGLPAQQSRSSCRTQNFTRAGSKARQSYRSADIEPKADSSWREGDEVTLVCSADAHSTP

SEQ ID NO: 982073 - protein, 45 aa, Homo sapiens
VTPVRPYMSRIKRTGGKPRGIENRVRRIFKIWPCNLLRTLLSTPP

SEQ ID NO: 982074 - protein, 33 aa, Homo sapiens
MTAVAGSTARFSACWGGFAFQYNSSSVSIRPLH

SEQ ID NO: 982075 - protein, 35 aa, Homo sapiens
MLCCALRQSPVDSFPYSSSLSSWVGTREADVLGQA

SEQ ID NO: 982076 - protein, 74 aa, Homo sapiens
MIKEAPKRVIFISLVSLPVVVSENFGINVTLLDLYITGLHSRSLMKLSSSCPCCLFQLLALPDTVKSQAVRAHL

SEQ ID NO: 982077 - protein, 72 aa, Homo sapiens
MNTLMLHHTATWKLNNLHLTDSWANNEIQADIKKYYETNENKETMYQNLWDTEILLKQWYEGNLCPLNAIET

SEQ ID NO: 982078 - protein, 44 aa, Homo sapiens
LDLSEASWARTGSLYTGSEAEQAAVVQMCGHECKSEAFTLRVRA

SEQ ID NO: 982079 - protein, 54 aa, Homo sapiens
QSEDPNSHLKTLIRIVLYLTSVFQMRGESPVWYGFKRSLHQNIGLDAIETSKTR

SEQ ID NO: 982080 - protein, 36 aa, Homo sapiens
ASVVLTRKSCVVQTEAAGSWRRLIVSSLYTTLQVLG

SEQ ID NO: 982081 - protein, 125 aa, Homo sapiens
NSEAAALPVPPMMSDQLPLRSFTANSDYGTDEALNCCWNDGLLLSQSRQRIVWLISFVASVQVTTIDLSASLVLNTCIIHYRHQEFSHWLHLLALETQGSSSPVLKQRKKRTFPQILAPIIFSTS

SEQ ID NO: 982082 - protein, 52 aa, Homo sapiens
  misc_feature (49)..(49): Xaa can be any naturally occurring amino acid
MWENSFTKSAICSPVSPYFTNQWPVLQLHLLVEGIHKPLIPHGKLQAMXNAS

SEQ ID NO: 982083 - protein, 34 aa, Homo sapiens
TKHSSSSHIIATITLLNLYFYLRLLYTNPGHSTP

SEQ ID NO: 982084 - protein, 43 aa, Homo sapiens
  misc_feature (7)..(7): Xaa can be any naturally occurring amino acid
LGWIQHXSPLDTMMPFAAQVANSGLSDSLTTSTPRPSNGALAQ

SEQ ID NO: 982085 - protein, 55 aa, Homo sapiens
MASSHSGCWSGRINTYRAPSPRQAPVSLDAEGSESGQPATVDRAPGVESRPFNAS

SEQ ID NO: 982086 - protein, 40 aa, Homo sapiens
  misc_feature (7)..(7): Xaa can be any naturally occurring amino acid
MPHPLEXGRRVKMLPKSWTITVSFSYLKWLGTPPAHGALA

SEQ ID NO: 982087 - protein, 57 aa, Homo sapiens
  misc_feature (43)..(43): Xaa can be any naturally occurring amino acid
RTRAGSVRSSSSRYHSFSRDAGTWGSSSACVAPSTGPPAASVXFTSLNVPRNPLSAR

SEQ ID NO: 982088 - protein, 71 aa, Homo sapiens
  misc_feature (2)..(2): Xaa can be any naturally occurring amino acid
  misc_feature (59)..(59): Xaa can be any naturally occurring amino acid
AXDRERAAGGGAELQWSERHLGGCSAPHCQLSSRLISHSQQQAPWLSSCCVCRPRSFCXQALQTHIASSSD

SEQ ID NO: 982089 - protein, 50 aa, Homo sapiens
SSSSLTTESAMKKMKTQHTCVHCGCKAKQAPDEQAVKKLYDIDVAIHTPP

SEQ ID NO: 982090 - protein, 36 aa, Homo sapiens
MISSTGDTARLHLKQTNKKQNSNCTLNNSAWPGALL

SEQ ID NO: 982091 - protein, 144 aa, Homo sapiens
GESCTMSNSVLCTKHQSCGSVSCTNSAEILLVAYHREDVTTIGKSIGHIMEHGRGHIGNKSWPPQPAATSCSGPLPWCGSFVLLLFTINLATAHPLDVVPSLRAVTLTAKVRGFILEVSETTKPPKEPTPDTLCLYVIILPLKL

SEQ ID NO: 982092 - protein, 62 aa, Homo sapiens
RQEEVDADCYHHRWQGWAETKEAAGLGTVVREAWWCQAQPLAFTYLGTSRASSVTFSRYRRS

SEQ ID NO: 982093 - protein, 34 aa, Homo sapiens
MATPAFFFFFLGKGSGSAGQGRDVQGRIGLQWSV

SEQ ID NO: 982094 - protein, 30 aa, Homo sapiens
MPGLPQSHVTNPRKERTGVRGAQSTAEEQG

SEQ ID NO: 982095 - protein, 138 aa, Homo sapiens
ADILMVVFLFLPSVNNAPICGQQSSLPVQKDAMTGMACAVTSSSKPHVPVLNLDVSCKVHAVIGVLMDDRDPLVTVMNFEQAPRRPMQIWGGWTTKFRKSRYDGWVTISGFQFGLLWSHLGYLAGVRDVGLFINQTNS

SEQ ID NO: 982096 - protein, 41 aa, Homo sapiens
  misc_feature (27)..(27): Xaa can be any naturally occurring amino acid
QSARTFSSICVTHRGPGPAQLQSPSLXLQSEIQGSTDMCPS

SEQ ID NO: 982097 - protein, 58 aa, Homo sapiens
KDDSVNAVVRNEGALRQWCYIFYPRKLDSSYETYGIEGGFIITVRVEWLVEQGHSTPP

SEQ ID NO: 982098 - protein, 63 aa, Homo sapiens
MADESVVEIKLDLRLMTIIAVNGFWRKSGSRVQPENEGKSVNDASYDGQFSSYVIGHRPFNAS

SEQ ID NO: 982099 - protein, 44 aa, Homo sapiens
EVAHSQTARCATDPRKDTVDVETHFTFKDLHFKMLDERVVSGLE

SEQ ID NO: 982100 - protein, 37 aa, Homo sapiens
MHKCLEEACSDVHIVVTYLFCGFVATIGKTFQIIPQA

SEQ ID NO: 982101 - protein, 46 aa, Homo sapiens
SFKPRGTRKTYPPVALAGQYNTEGIVRAMLMFRTNRVKTKITSKRQ

SEQ ID NO: 982102 - protein, 35 aa, Homo sapiens
VRSISSTCERITPVTSGPWELNEGIIGQTGPRMDE

SEQ ID NO: 982103 - protein, 64 aa, Homo sapiens
SAHETLDMNESIQITHPSIRGRTHGLNWVLEVAGRAMAGTSELPTRLWHVAAPDPGPPEWKSPS

SEQ ID NO: 982104 - protein, 39 aa, Homo sapiens
ADHDVTLIVITFFILLLLSTHVSSSPSSSSSSSSSSSTT

SEQ ID NO: 982105 - protein, 40 aa, Homo sapiens
PDARSGAVISRNFLPTLMRVGEQCGHQPLFIFMYIHLVKK

SEQ ID NO: 982106 - protein, 37 aa, Homo sapiens
SDHMIVHAPFLLPLGAAPLTSCAVCSDQILNYSNKAG

SEQ ID NO: 982107 - protein, 39 aa, Homo sapiens
LDHMMLTLELMRARKRHIWKVVRLGFSLSIPLISSVLSG

SEQ ID NO: 982108 - protein, 56 aa, Homo sapiens
MHRGKQLCSFIMYTGTLDCWRKIARDEGGKAFFNGALPNRCVGQHGALAQHGALDQ

SEQ ID NO: 982109 - protein, 38 aa, Homo sapiens
GSLTWGGVKEAYVEVEVKEGAWPHGALANTVRWPNTVR

SEQ ID NO: 982110 - protein, 48 aa, Homo sapiens
  misc_feature (48)..(48): Xaa can be any naturally occurring amino acid
EDTAAVRASLLEARERPYVGRLLQVEDGVRNRGLPQHTRCVGPTGILX

SEQ ID NO: 982111 - protein, 50 aa, Homo sapiens
EEESYSDDDRSSHIDVELHIIEPGAGADLIKQATTYGMADGDFVQDAPEM

SEQ ID NO: 982112 - protein, 34 aa, Homo sapiens
TVSTSHGSPSAARWREPAGYLQLGIIEIEPAVLY

SEQ ID NO: 982113 - protein, 63 aa, Homo sapiens
YVEWPSMSGSMAWDRLRICSHGGWTRNFPNVTTQARAQPSQQRSSNNPRSQRTPTLTKPMREN

SEQ ID NO: 982114 - protein, 58 aa, Homo sapiens
MWIYAGKAISGVPIIRGTSQLAKASDYDGYYYEEDSYKCMGCDDNVVDCWLATYTGAR

SEQ ID NO: 982115 - protein, 51 aa, Homo sapiens
DFENDCAGKASGVLDENGCEQLGLCCLIEEYAMSDFSSCIAVMPDKPLGRS

SEQ ID NO: 982116 - protein, 77 aa, Homo sapiens
TRPRVSKGTPVQSAHNRSRTHVLITILPSKLKLRTHSQWLHNPLSGTSNSTPTNSLVITSSKPRYLAYFTPTPPLGR

SEQ ID NO: 982117 - protein, 82 aa, Homo sapiens
TVAGCEQRLLVERMARENVEPGHKRFARSLGPVLGMHHEEHVRDTSAEVGAIRVDGVCDEWGVYTSMRLWAVELHHGFTWDV

SEQ ID NO: 982118 - protein, 51 aa, Homo sapiens
MRHHWLDNPEKNGNTVKMVSPKKEVALAYQEAMYNMATLTSTAAGLMHTFN

SEQ ID NO: 982119 - protein, 36 aa, Homo sapiens
GRLVPGSDDRRILGTHRVMRLKVSINPVGLLPISSV

SEQ ID NO: 982120 - protein, 38 aa, Homo sapiens
MLFPIFGSTLKLERGVENPFALCADERQKTTSSNPCHN

SEQ ID NO: 982121 - protein, 67 aa, Homo sapiens
DETANTGNRNNTDVKPIYEENSLNCSAYIHVYVYAKINAIQAVTECTENMYIFLRYLHSSVQLHLRL

SEQ ID NO: 982122 - protein, 32 aa, Homo sapiens
MDTKSYEILFSIYRAIINSSLLIEAANEGSCT

SEQ ID NO: 982123 - protein, 83 aa, Homo sapiens
RRSHKQESHRVDKVDDAEDEKYCAETGAHASEGEHRRSLQSDAEEEVPLYNLTTCKTSGDSKVCILRSLVLEEVERNTQIHCW

SEQ ID NO: 982124 - protein, 34 aa, Homo sapiens
CSTGFLAAPLYRGSEFLFAFYLWYCPDSPCDSST

SEQ ID NO: 982125 - protein, 57 aa, Homo sapiens
GADISTATGSRHLVFIRGSRPAMVATSFILDDYFSRTKSWLHESQNLEGSQPALVLS

SEQ ID NO: 982126 - protein, 49 aa, Homo sapiens
VLRPLIRRRLLRLLRGLSTGEYTRSLFQVVTIALVVSWIAAVLFIPYLG

SEQ ID NO: 982127 - protein, 72 aa, Homo sapiens
ICRFGRSRHRTAVLGRIPSPEELDYLCRRRICRLRKRGRRGLSRVCHKRINPLRPLFQCRSVLRHADCPRLH

SEQ ID NO: 982128 - protein, 89 aa, Homo sapiens
MVRTQVGTLLAKEGASLLGSLGFNYIDWSGKTKDLRYVSPYLGNALLLDDHGPYVHPGQEHLWVEIPLFGSPYPPDDDGLEVASRLIRA

SEQ ID NO: 982129 - protein, 81 aa, Homo sapiens
WLISPGLADFWHFQLDSSIMNSWGGAADEQLRAAVRTDFGQVAAHAVTSAQHVARKALVLRNEAFGLPPDVDIDVAALGGA

SEQ ID NO: 982130 - protein, 46 aa, Homo sapiens
PSGIGACTVSRRIPVTIGDAHPLQRWRISASGPVARRTVRRLEIAL

SEQ ID NO: 982131 - protein, 49 aa, Homo sapiens
QLGQIVMVLIVTAVMAQIPPRVYESWAPYLYIFCVILLILVDAFGQISK

SEQ ID NO: 982132 - protein, 39 aa, Homo sapiens
GYTGLDGVLTPWWTWGHATAGLQTLTYCPDKWHPSSNFS

SEQ ID NO: 982133 - protein, 65 aa, Homo sapiens
MGRLLKDGFLAFQTSRYKLHYYETPTGINICHEYLSPHGQIARIEFKYNIKYAWTSRANSKSAHV

SEQ ID NO: 982134 - protein, 55 aa, Homo sapiens
KEGEEEKVAKRKAAVLSDSEDKRKHQQRRVVLSLMQIAMVFSLLPDLSDTASLSE

SEQ ID NO: 982135 - protein, 33 aa, Homo sapiens
RAPVLAGLRFSLGIVFYPGTVFPWPPFFPGDPF

SEQ ID NO: 982136 - protein, 142 aa, Homo sapiens
RTTRSSYNSSVTTATWTTMDTKARLADLESRAKALNVPVGSDPDDELERQIASGYSSLRGTVERAIREVFLNNTVQPFSDVVSVEAFGAVIGHPAEEWEQLLAVYARACEATEAHDTPGERQLPLSAREELLGDIAQVLELI

SEQ ID NO: 982137 - protein, 145 aa, Homo sapiens
  misc_feature (11)..(11): Xaa can be any naturally occurring amino acid
ELGFPPVTTAXQQLVGDLRLADSTVKFGDSDAFYQLDLKSLSGQGTFVMGTDFAQGLADFLNITGDATGHHDLLLTSSGTEPVNPGDVHIVHTGGGDAQFALVGGNVDVEAWSYGLQQDGNDSVLDPNNRTDSPGTRSVLALFNT

SEQ ID NO: 982138 - protein, 48 aa, Homo sapiens
MCIGLTSCPHSFARFPLAAHSQQRWLGPCQVSQRALLLGQVVLAQTLL

SEQ ID NO: 982139 - protein, 39 aa, Homo sapiens
MIPSAIIGTSLFIGTYAIHRHLAYYIRHTSRTIISAPFD

SEQ ID NO: 982140 - protein, 35 aa, Homo sapiens
TSGRGPYVLPRSSSHLGYYGGAHDSVSTTLRSLGS

SEQ ID NO: 982141 - protein, 65 aa, Homo sapiens
RRHTYNFKDLHFKMFEVGGSAALRRKKWIHMLEGVTDIIYCVALSAYDLVLAELTRTMNRMPDEH

SEQ ID NO: 982142 - protein, 49 aa, Homo sapiens
YVLHKQQHVRMTRVKTTGIEETHFTIKDLHLQECEDVGLVSWSDAEDSG

SEQ ID NO: 982143 - protein, 55 aa, Homo sapiens
VIYRCLCYSTNRGQKKGTDFIGEKTKFQTYCVRYWKRRSMCYYEEGTMPILPSYT

SEQ ID NO: 982144 - protein, 37 aa, Homo sapiens
SYLIPTITHNPTITLINLYFYLRLFYTNPVSVVCCNV

SEQ ID NO: 982145 - protein, 36 aa, Homo sapiens
VLTSTITKVSMSSTVQAATSLREGGLAALIVGGIVG

SEQ ID NO: 982146 - protein, 51 aa, Homo sapiens
RYSSAPPGHRDFIKNMITGTSQADCAVLIVAAGANNSELFIGTHISDRGVV

SEQ ID NO: 982147 - protein, 98 aa, Homo sapiens
NALIAQSVITQDNSYYYEHLINAQEMNSVWTILHAIILFLIALPSLRILYITDEVNDPSLTIKSMEHQWYVDTYEYTENGGLIYNSYILPPLLPRTRR

SEQ ID NO: 982148 - protein, 39 aa, Homo sapiens
TVCYSSAPRLFIGTSLFIWHLAIHRPLAIHLAPDLPSNG

SEQ ID NO: 982149 - protein, 50 aa, Homo sapiens
MTNISDAQRHINRLNYLTGIILILIALPSLRILYITDEVNDPSLTIKSIG

SEQ ID NO: 982150 - protein, 95 aa, Homo sapiens
QSDWRVSYTHDRTISVVTILDAQAIDTVCPILPAILPVLIALPSLRILYIHRRGQRSLPYHQITLATNGTEPTRYTDYGGLIFTSYILPPLFLEP

SEQ ID NO: 982151 - protein, 88 aa, Homo sapiens
MHSIVSLCFMTGHMISLEQNGGHSVFEQLIVRIPSNILLPEDKCQETPYSEEDFQHLQKEIEQLQEKYKTELCTKQALLAELEEQKIV

SEQ ID NO: 982152 - protein, 39 aa, Homo sapiens
RIPYKYTITGKAPKQPVIVKAKFLQQKAEAKIKSDSWVG

SEQ ID NO: 982153 - protein, 39 aa, Homo sapiens
MSNDHSQTHITLLNLYFYLRLFYTNPEIVVVVNPTITNR

SEQ ID NO: 982154 - protein, 72 aa, Homo sapiens
GAETAGEPYHVQVCHEERGTTAPVPEATICWVIVGLYYNPTITPTPASEVTSPTLTLLPPSVTDPCESIVAP

SEQ ID NO: 982155 - protein, 34 aa, Homo sapiens
MSSDHMIDHRSIAKCSDIIIYIVTIYLALTSGAV

SEQ ID NO: 982156 - protein, 34 aa, Homo sapiens
MPTLNSNSTYAYFSTNPHSIVVVVSIQLTGYARL

SEQ ID NO: 982157 - protein, 36 aa, Homo sapiens
MLTAPTVARLDDRWYTTGGTDDVTASSASVPCAPVW

SEQ ID NO: 982158 - protein, 71 aa, Homo sapiens
MSREMKKGMWEQMKKKKQQRNLQLKKMNGKLYSHHWDPVWRGNVKFTSFLLGRDWFGMPPNPRSPRPLVSV

SEQ ID NO: 982159 - protein, 45 aa, Homo sapiens
DHQRIMWASRAQAFTASHTKVLDPWNHFIALYVLSTTLPLDYHRD

SEQ ID NO: 982160 - protein, 35 aa, Homo sapiens
ENGAEEEEEETAEDGERDPSPGSLELQDPRGGVSL

SEQ ID NO: 982161 - protein, 54 aa, Homo sapiens
NDHKDTSLKGVDPKFLRIMRFAHEAQIKTGPRDMIRPNNAKAMECTCARAIKVP

SEQ ID NO: 982162 - protein, 53 aa, Homo sapiens
MIVHAPGALESSLLSHLVGSQGPGATGCNVHSGYCVWHYSGQEKPKYGDGGGY

SEQ ID NO: 982163 - protein, 96 aa, Homo sapiens
LALPGVLCDRQILECTESHWSISPDGGFGHIFFLLFTGPSDYRYYPQQSFQTPQQPSFLFQDPRVSWSLVYLPTLPSCWNYGFSCSSDVCLPLWLR

SEQ ID NO: 982164 - protein, 53 aa, Homo sapiens
MSLWESLEFLSFLAEKPLESVVRSEVIFGILTKRSGFSDWFPETASRSHGEGC

SEQ ID NO: 982165 - protein, 102 aa, Homo sapiens
DKEEDRSSGDLRIQDLIHGIYESCLIQKISMLWDPYTVIWQSQNYKENNNRAEPKLNTKPFTTALSQDSMLYHLTEHIASQAAAGSSLANNPADGDSRQGDG

SEQ ID NO: 982166 - protein, 45 aa, Homo sapiens
EDTAHRLRLAASRVAHGRPGPPPLSPVTTAYSVGNGLLERMEQLM

SEQ ID NO: 982167 - protein, 75 aa, Homo sapiens
SRLTENKTQTYSTNIYTNNNPELTCEDETVPGATEKLKKLGESDFHIHDSPSSYSAQHQVYGKSPLNSGLLHGKK

SEQ ID NO: 982168 - protein, 40 aa, Homo sapiens
TVSEMRTVLQGTARLRRHSKTKTQAPLIENRHQMAIHQHK

SEQ ID NO: 982169 - protein, 42 aa, Homo sapiens
SGSEDPDDGHGQRGYRARAVPKKNNKKKKFLKRMVMHGQIVG

SEQ ID NO: 982170 - protein, 42 aa, Homo sapiens
SILTNYIIKTGCSKLRSHSEVMGAHEFEGPFVCCREPCCSPA

SEQ ID NO: 982171 - protein, 96 aa, Homo sapiens
MISLDLQPGKVKSAAERLKGSMPPSEIISPEKQQPFQNLLQEYFTSLTKHLKRDHRELQTPERHNRRILHSKGALSEDRHKQYEEFAMSYQKLLAP

SEQ ID NO: 982172 - protein, 103 aa, Homo sapiens
RRDAPDTMPMDVVGRMESEKQTLSQVSQITLRHCYMGWAWESDGKCAAFQGNNALGYWAIADISQNTYFVKGAQQLVRAALYVSWLMDQSKQIKLDHLLMPKV

SEQ ID NO: 982173 - protein, 138 aa, Homo sapiens
MVGGPIEQRRPKPYRGQIHQASVQVARLKLGHAYGGDFQEGESERLKLDKEVGVDLEEWGWRELASLLAVPLGFISFLFFFFFLEKDSQGAAKAEVQGHKVGPGHPRSRGIKEDLGPLCQVRKRALEAGKGHKKGTSQ

SEQ ID NO: 982174 - protein, 55 aa, Homo sapiens
GQHKRDFGGGVQSELGDFSDLATISSGVLEPSSSTAGPVLKDLDGGVATHIKPAG

SEQ ID NO: 982175 - protein, 49 aa, Homo sapiens
VTWPGLIPGSCMGVKQHRPDTDYGIGSQKCHLSTSEWLADTVRVPTLTS

SEQ ID NO: 982176 - protein, 57 aa, Homo sapiens
VGAWTGYSKGNSSVMLLGEPRHASCPWGLADVPVLLGHTGLSGVHAGLTSLHVAELT

SEQ ID NO: 982177 - protein, 86 aa, Homo sapiens
YCLRFWSSRMDVFGKMTGVLPFAILRQSYCSLCRFLWDRLNKMIRMINASSSTAITAPTIPYTRLGAMLNSQVSPQYQCVFVFGHR

SEQ ID NO: 982178 - protein, 67 aa, Homo sapiens
CVEPTAVVSGGQKELVAASKIPGDKRHVWFGEKLTDGFQFESGGQGSEPADVAIQLTFLRLMSSEGS

SEQ ID NO: 982179 - protein, 36 aa, Homo sapiens
LRAHLLFFIAGQAYRCRLVVRRETRCSGALLEQGLQ

SEQ ID NO: 982180 - protein, 99 aa, Homo sapiens
ICVGVAILVGMLNGFLNVVHYFNANSRSPYSGRNDFTSGGAEGSDYEAKYEGLHDLSPDPLSAYSLIWSTYGVLSTIPVDPPSLQSITGSCILTFRASD

SEQ ID NO: 982181 - protein, 65 aa, Homo sapiens
GRWSVDEHIGRSEPWAHSQNWNPSVMRSPNQTCLLSLRVLADVPVLLRPHWADVGYAQVSPVSMW

SEQ ID NO: 982182 - protein, 77 aa, Homo sapiens
RDVEGALNTTLKERGVRGEPMKVSRKVSEHDLIEEDPSVGDKLHHRRQGEKAITQQKRAVDWVTKISEGARSQCYRN

SEQ ID NO: 982183 - protein, 85 aa, Homo sapiens
ERVPGSKVVLDTRKCSRLQDDIVLDHDATVEQSRGCSPLYTEEDVALQNDIHPILEEGTEVLVFLGGCVIHLFCEISVSHFRCHT

SEQ ID NO: 982184 - protein, 86 aa, Homo sapiens
MDQVMQFVEPRRHFVKDSIRLVNTDALNLIEKQFQQDCPWLTANRDLLIMRHSIGLRFVHIDRVFLIQSTSICCVGQQSPFLGKQQ

SEQ ID NO: 982185 - protein, 61 aa, Homo sapiens
MLRVLAYYGVDWVGSHGSRNAVMSEPSRPLVQDSIRLVKRCTKPDRNDFQKIAMATSTRIC

SEQ ID NO: 982186 - protein, 46 aa, Homo sapiens
LGRSRGSQQVSSSTLGSEVIRGGRQMEFLGYHGVEVAGMPEELTGW

SEQ ID NO: 982187 - protein, 52 aa, Homo sapiens
SNGSQQQHTTFHEGLQRLTRQAWAWTLGAVASPARGDDPKGFVFALQPSVRI

SEQ ID NO: 982188 - protein, 39 aa, Homo sapiens
MIPGCSKSVLLVGSRMDMSSNNGCMRDPTLYRWKIQPHP

SEQ ID NO: 982189 - protein, 53 aa, Homo sapiens
MEAEATSDTLRPQNALKNQQETPEHTTSPSFRLAPPLRPAPGRRPPPAPNPCP

SEQ ID NO: 982190 - protein, 39 aa, Homo sapiens
  misc_feature (34)..(34): Xaa can be any naturally occurring amino acid
MASKQNKIPQESTLTRRCDRTSFKAELQTTASTXIKRGH

SEQ ID NO: 982191 - protein, 30 aa, Homo sapiens
MDGGLGHRLACGGSTRISAIHLQCPSAITS

SEQ ID NO: 982192 - protein, 70 aa, Homo sapiens
GVLAERIQDAASQCSGQPLRQSHGTGSSPRQFQFRAAVATPGAPASRAPYSSPGSTAHLPRDHGDDTNTG

SEQ ID NO: 982193 - protein, 49 aa, Homo sapiens
AALDGLERVGPRGVMIPQELCEEHLPGVKNYFDFCLECDDRGPVLCETY

SEQ ID NO: 982194 - protein, 70 aa, Homo sapiens
ALEVPEEPSHPRPSGTGGFALQPHGPIPVGEAGELCPLGLGSAPPNPAVVSLDSAPAVFPTARGPTSREV

SEQ ID NO: 982195 - protein, 36 aa, Homo sapiens
AALEDLERWDTGLKRDPSSQIAGGAGASSPFCSPPV

SEQ ID NO: 982196 - protein, 95 aa, Homo sapiens
SARSSLFDSGTGGSLIDQAPSYRVYGGQHGAHVSTKLVQGGMHRSGEYTSTRIHVCNIVDVNTDLIYSRNLYRNVCIGSGEYTSSWRHACVLGYW

SEQ ID NO: 982197 - protein, 42 aa, Homo sapiens
FVSQRLNDLRDLSTERSNPGRIYLLQIPPMYERTMRNKAYYH

SEQ ID NO: 982198 - protein, 104 aa, Homo sapiens
MSFVLESSLNPTTSFTNSFLTGTSRMKSEPDKADPFSFEGPEIVDCDGCTIDWKKGKNVTVKTIKKKQKHKGRGTVRTITKQVPNESFFNFFNPLKASGDGESL

SEQ ID NO: 982199 - protein, 65 aa, Homo sapiens
MQAKSVLSVDFYNKLSHTGCLKKYTLISPGLEAGKFKIKVLADWVSGESQPPGLQMATFQVYHHI

SEQ ID NO: 982200 - protein, 113 aa, Homo sapiens
MYTCMSLFKCNFYFSLERLYVYLCCSSTLMPMTSFTNSFLIGNSLVKSEPDKADPFSFEGPEIVDCDGCTIDWKKGKNVTVKTIKKKRKHKGRGTVRTITKQVPNESFFNFFN

SEQ ID NO: 982201 - protein, 69 aa, Homo sapiens
SDILVGYNTSGGQFDLMVRDGSMTSSVMYRMRKDGRAMRTQDDGGQDSSNTVFHFLSVLSMFSHRSVML

SEQ ID NO: 982202 - protein, 140 aa, Homo sapiens
RFSLDINWYRKKLQQLKSIILSYLLGAAEHFPYLISPLNQEWQSSTFGSAVLIFKLPVSWTSPSLPRGSQTFYEATGEIYLLHSNHSPLEPNHFGWAHKNDGGEGCGSGYALSPSDWVKRRMMLVPLLCPRHQTLASGHD

SEQ ID NO: 982203 - protein, 72 aa, Homo sapiens
IIQDCSIKCQNVEVRPTETVSRNPLLNAHQTTSVSRRQKAYKPEESGGQYSTFLPKRISTQNFISSQTKLHK

SEQ ID NO: 982204 - protein, 75 aa, Homo sapiens
KDMALIYKQYRIQMVFNGGSEAVPYFQLQLDASPDGDCPLVSMVTNFNGDQHYGRNFLALETGQRKQKFWILVLV

SEQ ID NO: 982205 - protein, 34 aa, Homo sapiens
MTSEIHFPWAACTVMSYILFPGLAVPVTFINFRG

SEQ ID NO: 982206 - protein, 34 aa, Homo sapiens
MGFTSSSARLYGQDQMGLGQAACGRALGLEQPSE

SEQ ID NO: 982207 - protein, 44 aa, Homo sapiens
MLNRKNTHKISKYGNNGKTNEINYAWYTQGYQEEIKKEKSGVPE

SEQ ID NO: 982208 - protein, 43 aa, Homo sapiens
  misc_feature (38)..(38): Xaa can be any naturally occurring amino acid
VPQLDQFTEHFNNMSYWVRSIIMLHGKWPSDWGTVLLXGMFIN

SEQ ID NO: 982209 - protein, 38 aa, Homo sapiens
MRAWRSTCIHLLRCYASLYKSGRHVSTVLTSKYRKAGA

SEQ ID NO: 982210 - protein, 121 aa, Homo sapiens
VPDLEHTVRSAPREHCVLIYSATGATQLAGDMGTLPGVPNPPLSTHPPALLQTGGVTAYAKGRDYCDLCAWPGCMDCSVLHHVALAMAASQTFLWILLPGCVTGQTLTLSEQGHRERLCVV

SEQ ID NO: 982211 - protein, 102 aa, Homo sapiens
GCRSPETNIIIVMDVAALYSGAIPGIAIDGMSHWWRKPYKCKECGKTSSQESSLTCHRRLHTEVNGDNGNGVWARILGQIPALLFGEGNGSREKFLTGVWMW

SEQ ID NO: 982212 - protein, 70 aa, Homo sapiens
  misc_feature (2)..(2): Xaa can be any naturally occurring amino acid
CXHFFTGLILESSLIWVNHYWFPNLVFKLADDWKIKPLLGSNLIWKLEWFLPELQTIQSMQSKQECGISR

SEQ ID NO: 982213 - protein, 103 aa, Homo sapiens
GKDDFILAEKETTSVPMRINHLSTATRNSIPHGVDLQYASHRVQIDYQTTGILKKKSECGAENELKGLEPENCAMHNSIILVTDPQAFTNTHCAALVFIIIAY

SEQ ID NO: 982214 - protein, 79 aa, Homo sapiens
SIPIQSNRRCNLTGNPHTATISTSMEDAGIPQPVTPQSYLEKGLDEVGIGFGSIRFTEVNQGVPSILAAGVPSGGLYTG

SEQ ID NO: 982215 - protein, 41 aa, Homo sapiens
RIREGGTLGWPRSEGLGPPRAASEQWKSPAPNPARWGGPDM

SEQ ID NO: 982216 - protein, 110 aa, Homo sapiens
DDILIRNTRARSPSTQCPGLTHSRWANWCSEHELPAIGAHSSLMLTNLHALLQTGGVTPMPKVVTTKILAPGLAAWTVVCAPCGPGHGCIPGLPVDPAPRLCHWADAHPL

SEQ ID NO: 982217 - protein, 109 aa, Homo sapiens
VVLSEDPRGGTRALGEPPSREASTTTSQATACLSTPLCPATRAVASVLRGSLPCPHRPPPPPLHSCCYPCVPRAGSTWGPIPPAVMVEAGGGHGLPPSCQGHRTRGPTS

SEQ ID NO: 982218 - protein, 177 aa, Homo sapiens
ADVTDLDDSSGPSKGHSKMTAYLGLYAISGKELVQTDATVILDSLYVIDEFNAVDFKMDTHSFINTEMDDNYAGFFFGYQSSSRLYVVMWKPVAQPYWDTNPTRAQGYSGLSVKVVNSTTGPGEHLRNALWHTGNTPGQVRTLWHDPRHIGWKDFTAYRWRLSHRPKTGFIRVVMYE

SEQ ID NO: 982219 - protein, 48 aa, Homo sapiens
MIAKCRTAKVRGKRGKPSHRPTEPDAELLHPRRSRAPQQSDEEVLGEE

SEQ ID NO: 982220 - protein, 41 aa, Homo sapiens
DLEDPMACSEECRFWKKIEEGIELVKHFLVERGVMDEYLQV

SEQ ID NO: 982221 - protein, 37 aa, Homo sapiens
SQYKMDVTVIDTKIFRFYFKDSSSRRITYSSVISCIW

SEQ ID NO: 982222 - protein, 77 aa, Homo sapiens
YSGSRIKAQPVVTSWHGYEVSELDARVKRGTQSYAGCASVRDILSEEGKGAQALDLGPGLGSDMYGMRSVLSFEAWG

SEQ ID NO: 982223 - protein, 98 aa, Homo sapiens
MAWFYFLYPDWPSYYSQCGGSGWLQSRSGSQAETLDWGSHEAKHLHSKGFLVFAGCLMKDKGHDGVKELDSLNSDRLRTVQLNVCSSEEVEKVVGQNI

SEQ ID NO: 982224 - protein, 62 aa, Homo sapiens
RPCGAELGRLPQRSGSHSSGDGLEVGLSNWRFRYVTVSLYALTISSAVLMYSGAGGTGARNS

SEQ ID NO: 982225 - protein, 40 aa, Homo sapiens
DPMGCGEEHIDSKVIGEGYLYQGKRKTEEGEAAILRYLTK

SEQ ID NO: 982226 - protein, 78 aa, Homo sapiens
RTFSSQYGAHMMLSISRGTQSCGVGVMSSSISSPAATSIKSSLPNSPRMCQGQASSGDSSSNIPFVVHKHSAYRVRSA

SEQ ID NO: 982227 - protein, 39 aa, Homo sapiens
VRDFDSELLSVLVSCLQELFKAHLRGEVLPEEITEESRG

SEQ ID NO: 982228 - protein, 67 aa, Homo sapiens
VGTCAYFVAFIRVSLKMAVYEAEQEVVTLIGVYRITEQAPLQGYEAPPGPLSIKLAALVTVLGEQFT

SEQ ID NO: 982229 - protein, 35 aa, Homo sapiens
CIQVSAGRGDIFPLQVGQNIIGWTLIFPLQVGQNI

SEQ ID NO: 982230 - protein, 76 aa, Homo sapiens
TFYPREELFQRHRFAKEPAAQHLLGEARFRRTAAFAFGLQHEDVTGAELTLIAQDCQRVELRRRREGQQEIDGYRA

SEQ ID NO: 982231 - protein, 39 aa, Homo sapiens
YGQCYRRHRWRVQWIVDAYTTSTATRTPPRRSCSEATCW

SEQ ID NO: 982232 - protein, 46 aa, Homo sapiens
YPQQASVVFESPFTICDGIYGSTCRGSHRLPRTSRHDGLNCPHYMP

SEQ ID NO: 982233 - protein, 36 aa, Homo sapiens
IHPPQSLRAGAITGDEQRLPGPDLCLTLPDTPYSYT

SEQ ID NO: 982234 - protein, 56 aa, Homo sapiens
EPGSHLSRVRDSSVVPPTGSAQQLDWSSPQTTRLSLLAQFEGWHPDILALLHASNE

SEQ ID NO: 982235 - protein, 137 aa, Homo sapiens
PFTARWSGVGVDKPRLASYPLRYMRGVADAFARGDLAHEVWVYRQDRVAEQLVNGRFLPPFASNCRSRETVAGFPGCGVGLCGALCLFLEVGEFLSVAADAWLVEMSTTTLAMQADEYLHQMPKNLHYHTYDKKLRH

SEQ ID NO: 982236 - protein, 46 aa, Homo sapiens
MPTWALIEDFTTHNSLIIPNIIATITLINLNSTYAYFTPTPVPMNS

SEQ ID NO: 982237 - protein, 90 aa, Homo sapiens
IYTNPARRAPGQWQAICTTRVLDAQPGRTRRPRDMQNEGYMMSDSVDVYVVPVLQHGLPSRQYRTSMDGGLLPELLCQVVEPLQPADLIQ

SEQ ID NO: 982238 - protein, 36 aa, Homo sapiens
VIQLGGDDGGDVVVMVVVVMIVMTVMVMMMMVPINS

SEQ ID NO: 982239 - protein, 69 aa, Homo sapiens
KKLFTETPNLSETYLLMRIPVPVERSKISSLIQTHSAAIQVQNPPDKPTYAQISNFNSQPEAVKVQAFR

SEQ ID NO: 982240 - protein, 32 aa, Homo sapiens
MCLSAQTPLQESRAHQRHVAAVAENCPEMKKG

SEQ ID NO: 982241 - protein, 64 aa, Homo sapiens
EASSLESCLQRNVWSLLSIMYAQKLFIYYWGMLLQHADFTLCNPEEEGSVATEQYPGDPCCMFW

SEQ ID NO: 982242 - protein, 46 aa, Homo sapiens
SEWDTGRAVTMGELQEGGGGPEALAVCEDKQWVTPSRPYCPSLHQC

SEQ ID NO: 982243 - protein, 46 aa, Homo sapiens
GDSPARRIDASAIADSDDLVPCAPAVVACSSPAVIVASSSLVVPPL

SEQ ID NO: 982244 - protein, 42 aa, Homo sapiens
MALAIHRHFAIHRHLAIHRHLAIIGPYRTLSRPCNWNESTLN

SEQ ID NO: 982245 - protein, 42 aa, Homo sapiens
EDAVGDCAEDEVGGGLVMLTVPSDQAEEEARSHKGVATCLGC

SEQ ID NO: 982246 - protein, 89 aa, Homo sapiens
VLEVPGARVMGLVPPARPPSLCACGTPNIMNVCCLLVSSWQHAGCMLLNAACSSTMWQHASTWALPLPTPCAPVVPPSRCTYALTSVII

SEQ ID NO: 982247 - protein, 77 aa, Homo sapiens
WVDWGLDSASFCSASKDGPKHCHFSNIKMLNDMGPVQWYLSIQNIQVQILLTEPEDGVFIFIHPRGESARGEQHRQW

SEQ ID NO: 982248 - protein, 57 aa, Homo sapiens
SFHRHAKHIIHKRLSPIYYSHRYLPDKRLFYTNPGADEERSADEERGAANSEVPMNS

SEQ ID NO: 982249 - protein, 40 aa, Homo sapiens
GRTAIHRHSLFIPTIIATSPSLTSTSTYAYITPTPVPMNS

SEQ ID NO: 982250 - protein, 36 aa, Homo sapiens
MDPCEKMLCPKYCPGKNMQKEVNITGIQFLGVRYFN

SEQ ID NO: 982251 - protein, 116 aa, Homo sapiens
IYVFIYGVLVGLSNQYRPDISPTERTHNVIADVNKMLSMREVVIQEVDQVDRKRMIWQVHCVRDGLHLNSHFENGPILSRIEWAARDVPSGSVHSGITGTGCIVSNQNLIIPCQPF

SEQ ID NO: 982252 - protein, 35 aa, Homo sapiens
DFAIHRHLAIHRHWVVIHWIQDLLQWITTQVPMNS

SEQ ID NO: 982253 - protein, 87 aa, Homo sapiens
RGATRVERCDHCGEMVGPRGEVGPRGGVRMLVGDSVPLLVLLLKAFFALSTLLLAPLVVGGVLLLAAWIVSADLASPSQVVPEHRIS

SEQ ID NO: 982254 - protein, 106 aa, Homo sapiens
EIDNIKNHACKLEAAIAEAVRSVWSWRLKDARAKQEELETALQRGMQDIARSPAEYQEIMIVMLTLYLEIATYRKLLEGEESRLAGDGVGAVNISVMNSTGGSEHK

SEQ ID NO: 982255 - protein, 145 aa, Homo sapiens
MTHIQQVLVIMILILSSFFFSTHQLFAFFPPSLISGIKGQQTWRKGMQIVPYTYWEPHQREDCRRQMIDVYMALGQGLAAGEGRCAGLSCCADNHSGDLRAALRGTRRGRRHSSCVSLGPFLDPSRQIMGPQRELLLNSAVTWCG

SEQ ID NO: 982256 - protein, 95 aa, Homo sapiens
MFISYHKGLQQTYELKKHAFSNPNMDILYTKPSGSFYQIAFRVFECPPDTSPGGHRENNILSVNIERLVLDTLNNGHKCIPDIPRHLLLGGSEHK

SEQ ID NO: 982257 - protein, 124 aa, Homo sapiens
MVRTHRTFAESPRGCRVQIPGERLLVQAAVISKATQVILSDAGREGVLMWWVPGRRTRGSFLSSWSLEGQGSERHSSTPTTQQLLSLPLPIPGCEAHLIRGGQRLQRWEDHMSLGGRGCRGGRI

SEQ ID NO: 982258 - protein, 137 aa, Homo sapiens
MTPVLDRFPEHLQIIQIARISSEGIGDYPGTTYRTASEFYGPENICVTERQRSRKGRGKEDWQNRWQGMPLFFIKLSKVQLNAMYSDTSTRSFIETTIKQSREVNTVTLTVYICFLKLPVSLFAHLIYIPVVPLSPS

SEQ ID NO: 982259 - protein, 67 aa, Homo sapiens
ETMNYGPEQGLNHIAPYVTSSLCEDGHDNYGQCRTLATVPWGFPKAPRMPVWSLSDPAKDNIYVDSG

SEQ ID NO: 982260 - protein, 109 aa, Homo sapiens
MEYVAWSMDHTIFDLSNHVTDFLFWIIQILIEFSSHNMNITSQILDHSHNPFPGAKVSCAENVLNFSWHQEFFEFSWQTVAPVWDVQISYYQHQHPVTGLRSVTTTVAA

SEQ ID NO: 982261 - protein, 109 aa, Homo sapiens
MVTLSRVSPGEGSCSVGRLGHGRVELEAHQDRVVVRGPPLVRGVQVLGHVVVARVLQCHGFVRVDHPDVLAGDRRRRRRQGVDPVQAADGAAERVQVLARERALREVPG

SEQ ID NO: 982262 - protein, 37 aa, Homo sapiens
  misc_feature (20)..(20): Xaa can be any naturally occurring amino acid
FELGTVFFAYSPRSAHCSLXGLGSYNLLEANLGMVPI

SEQ ID NO: 982263 - protein, 35 aa, Homo sapiens
PCMLLPLHRHSGAGAHNNRFREMTGLLSYPRGPSS

SEQ ID NO: 982264 - protein, 56 aa, Homo sapiens
MGQPFLGARMEQLYAQEPDSLCFVIHPDSVQGDVDGDGGGIMVGYENVPTIDIHMN

SEQ ID NO: 982265 - protein, 122 aa, Homo sapiens
QQVGPRVTTRKRIIDSARSAYQEDMHIRKKDTEPPTNTMRMLITLNLVLLLLAPIIPSLPLPLHHGHSHWISSPAGVSTFTVSPWDSFTVPRKGECGLRPSAIGYVSVLSGRLDLKAGRALI

SEQ ID NO: 982266 - protein, 54 aa, Homo sapiens
IYPLLEESVFCNRVTPRIKPHHRLATDLYDRRSSDKTLYEQRQSYAAIYPLVKT

SEQ ID NO: 982267 - protein, 87 aa, Homo sapiens
NDLWTHCDRGLCLRDVTSLSACTSSSPEGPDTNVIFSPVSISTALDYLSLGGPIIPPLTEDSHKAYKFNSHRRLLEAGNSPRASRTY

SEQ ID NO: 982268 - protein, 34 aa, Homo sapiens
LEDPVHSDVVLSFDVGSSSRIEQDYHGNNTSGGY

SEQ ID NO: 982269 - protein, 73 aa, Homo sapiens
MRHTEGLVTDCEEERACPVQPHDSCPSTMSRNTENPTKRRNNIIPSTRCLQERQLRTGYTKRGHSIYPDCSML

SEQ ID NO: 982270 - protein, 112 aa, Homo sapiens
VKGREWTHELADRSATEMSWQRLRLGFTVSPQKSQSEILLKSWTKGKKTGAADDIPQPAVRHQDPEPLLVVKPTHSSREGGCREVPQAASKTHGLLQAVRPQAQDKRPAVAA

SEQ ID NO: 982271 - protein, 48 aa, Homo sapiens
DSDYARSIVDYAVIDLDYAAQVLNYQTCINTFRLEDDLREQNPILRDS

SEQ ID NO: 982272 - protein, 67 aa, Homo sapiens
LPLLPQKIYQGSKDPKCHINTSNKLQLTQRTSQSISHGYHTPSTTHHQTGNSGLGPQHRPSILGRLH

SEQ ID NO: 982273 - protein, 48 aa, Homo sapiens
CSRGYRTVVHTCTVVHTCTVVHTCAVVHTCTAVHTWSLYRGVMGYEQQ

SEQ ID NO: 982274 - protein, 43 aa, Homo sapiens
YCTVVQTPPRVLQPPDTASRYEQQCRFEQQCRYEQQCRYEQQC

SEQ ID NO: 982275 - protein, 57 aa, Homo sapiens
RSLGSRIRRVLLPGGLYTLGGGYEQQCKYEQQCRYKQQCRYKQQCMYKQQCRYKQQC

SEQ ID NO: 982276 - protein, 42 aa, Homo sapiens
AALRIPALLFIPPPGYSDQVLNNSWRFEQQCRFEQQCRFEQQ

SEQ ID NO: 982277 - protein, 71 aa, Homo sapiens
VSVKALSEPPVERKSTCIQSNLTWIHDTIMAIEFLLPILNTLNTTIYHYMTTSNLKNITDFTGIHIELMQT

SEQ ID NO: 982278 - protein, 33 aa, Homo sapiens
GVLRIPTVVIPSVQPPRSASKYEQQCRYEQQWG

SEQ ID NO: 982279 - protein, 42 aa, Homo sapiens
VAVLEVPDSLGRGYEQHGMYNKQCKYEQQCRYEQQCRYEQQC

SEQ ID NO: 982280 - protein, 55 aa, Homo sapiens
CVSEDPLLSYCTVVHTALLVACIGGGAVNIGGGYEQQCKYEQQCRYKQQCRYKQQ

SEQ ID NO: 982281 - protein, 33 aa, Homo sapiens
MKVRSREARFTVCIDVAHCSIYGKGELRLYKKL

SEQ ID NO: 982282 - protein, 42 aa, Homo sapiens
MIMGTVVVHNFACHVNRRQIFTLENMNHSLVKDDHPLSSVGY

SEQ ID NO: 982283 - protein, 49 aa, Homo sapiens
RSYWEARSISIEFEQVAPSQPGLQRALEEEGSGAHFKGLEKELVPRWAT

SEQ ID NO: 982284 - protein, 37 aa, Homo sapiens
DWEDRLSQEFWAVVRYADRVSALMFGINMVTSRELGD

SEQ ID NO: 982285 - protein, 60 aa, Homo sapiens
SSLFDIHANGILYVSAVDQSAGKENKITITTDQGRLSKEDFACMVQEAEKYIAEDYKHRD

SEQ ID NO: 982286 - protein, 38 aa, Homo sapiens
IPYLCVNALGILAERHPVVQLIAFIYIDTGHLGRIQVI

SEQ ID NO: 982287 - protein, 38 aa, Homo sapiens
KRPGAARGRVPLEAGCRYEARVPLEAPGEGVCGWGYRA

SEQ ID NO: 982288 - protein, 69 aa, Homo sapiens
GLQNGKQRMQKANLAATDVYLLQLCHSVICACDCDEGHLADHVVLCFNELTPIYLTGGRLTCHNVPLGL

SEQ ID NO: 982289 - protein, 92 aa, Homo sapiens
MRSDKNTELTIHRPNIYNTTNQVIITLTVNPNTGMLITERLHNSKQELGHISTPTCLPNNINLLSITRYEQAPTCPDDTCLNEPRKPMTRCT

SEQ ID NO: 982290 - protein, 90 aa, Homo sapiens
MPRVSFVYRNKQTNRSWSLYQGAVVWNEREVETAEEASREKAWEEAKKKVGVGARPGAPRSLRSAYGFPGMNDSSLPSPQSTGQGDSHAW

SEQ ID NO: 982291 - protein, 69 aa, Homo sapiens
GGCGGYWREAISQSLQLSRDPANAGPAWATEQDSVSRKKKKKGVDTKGSMPYQIIKKPDLEYDVADFSL

SEQ ID NO: 982292 - protein, 51 aa, Homo sapiens
SRGVPQMVVHTWHCGIIPCTCSHTCTVVIPALLFILALLFIPGRCIGGGER

SEQ ID NO: 982293 - protein, 46 aa, Homo sapiens
PEDPPLCSYLALCIGGGYEQQCKYEQQCRYEQQCKYEQQCKYEQQC

SEQ ID NO: 982294 - protein, 58 aa, Homo sapiens
MIQTVYRDGYRDGYRDGPRRGSGSTMVAGIASDDRWQQTTTDDEAMTSRHRHVGSVGY

SEQ ID NO: 982295 - protein, 94 aa, Homo sapiens
TLRIPIYEKARRRQDKEIRKKKKAAEKKGSGLEPKKTQIQISFPVERRVFPLSGEERKRSHSRSPRRQNQEPEELKKMLKEKAKEEERKEMLER

SEQ ID NO: 982296 - protein, 34 aa, Homo sapiens
LVVRCFDIDDDVVCEVDSGLVCGSVPESGLGQVG

SEQ ID NO: 982297 - protein, 35 aa, Homo sapiens
MIIISYGAEYAVLAQIASMDLVKWIIQQTSSIKWI

SEQ ID NO: 982298 - protein, 47 aa, Homo sapiens
MSGHNNFLLPCCKIPVQLPYSLLRYGQPIVRSNYKGRKKWKISVPIS

SEQ ID NO: 982299 - protein, 92 aa, Homo sapiens
TVITQESGLTSVVSVGRASDESSTFTFTGASTPGEQAYQCYECGQGFSQSSDFRIHLRVPPGRASPLTVASVGRDFSPQSKLLIPPESTHLG

SEQ ID NO: 982300 - protein, 86 aa, Homo sapiens
MVSGSRSGLQMNIQSSLIFSHQFCGLLPIVIPLKTVTDHVLELLLSQLNAMLDAIPQVLDPLPIFLLLLFSYLNRKLYFSISVPIA

SEQ ID NO: 982301 - protein, 165 aa, Homo sapiens
TDRDRERRTTSRTQAEIENENGPNLIDPQVPLSPEADCKGTGAVPVERHLTSASFSTWSEEPGLDKPALEESAGADTTQETLSLPEGEITTIEIHRSNPYIQLGISIVGGNRNTFDNIVIQEVYRDGVIARDGRLLAGEQILQVNNYNISNVSHNYARAVLSQPC

SEQ ID NO: 982302 - protein, 102 aa, Homo sapiens
LSPCLDCIGLADAVGIIWMCFLCVLNFFENFFITLEPRCRVESLFSHFLFSLSFSPLLNFWASISSSANFCAHFLKWAQKLSKKKTLLTEISCIFSALYFST

SEQ ID NO: 982303 - protein, 97 aa, Homo sapiens
DYGKLRKDDPLTNLNTALDVTEKYLVHPHRCWYAVRHRVESARTGMSTAIHELTLSRLLPAPISVSPARRSTASQLALCDGVGPSTTENAAALWQDY

SEQ ID NO: 982304 - protein, 131 aa, Homo sapiens
MFLRQLSVDGLQKSILYYADACLVECRRDSIYVAGCVSLPPSRCMCDMRHIFGAWLISERGDWSARDLMTVIVVSPSRSARLMPRKRTSFKLGVGRTTNDTNLFVMNLTLRFFENPIGLSRLLNRIFCALF

SEQ ID NO: 982305 - protein, 124 aa, Homo sapiens
SRSLICRLKADVRHERALGGSTEATAVGDFDEITQLPGGDQESCLFEMSSEPGRYYSQPLPMAKVNGISIEGKVMSPVELMSQWTFGGIDWLVIGLGVTVAYIVFGIAGFGTALEAGPILILFM

SEQ ID NO: 982306 - protein, 58 aa, Homo sapiens
  misc_feature (53)..(53): Xaa can be any naturally occurring amino acid
GIADPQWGERPFALLVVREGHVIDARELKEHLKPFVELGHLRQVGDPEASIAXCYCKF

SEQ ID NO: 982307 - protein, 152 aa, Homo sapiens
LIIRLDVSLDFRYHHRIDYTAHLLGVSPLHLGLQTLDLAQDVCLIHTVTTKGNGQQKDHDRAKDAVDHADHRLVGLVVSIIWAEELGFQRTNLSALDGHGRDVVRIQAPRLDQLTQRPLIGSLLNFARHLAIGDRVARPIYCACTRPLQGLH

SEQ ID NO: 982308 - protein, 39 aa, Homo sapiens
MECLIHHRGRNTLIVDMDTRNEDCAIIPRVNYVPLCQVI

SEQ ID NO: 982309 - protein, 41 aa, Homo sapiens
LIDIEVVHPIVDIGLVEEDCAVIPRATLVPVVQRYWSHLTL

SEQ ID NO: 982310 - protein, 92 aa, Homo sapiens
QLVVVMVCYFILSIIDSMVQSYARRFLQRLNSEEKTKEVEEVITLQQIGVVGTALNWEDSKPGRIIPFANLYQFVTTFFLKAVCPSEPFVRS

SEQ ID NO: 982311 - protein, 92 aa, Homo sapiens
VDEDSVNSFHQLLRIDRDSSRVDQPPNSCTDNHIHSWTVIQWQHSSRLHFRLTCDETEDGPMTHVPLNATKGLQGGTLDCVLQSRSLGDEIQ

SEQ ID NO: 982312 - protein, 42 aa, Homo sapiens
MAQKLKTKASSSALRTATYRKIGEGQNQCDGTQHGFELRQAT

SEQ ID NO: 982313 - protein, 85 aa, Homo sapiens
KWPEIQYLLRRIGLAQLRDHRSAFMVLNFFENFFRTLEPSARLESLFSHFLVGCPSASNLISRASISSYCEYLVPLFQVYQSYQL

SEQ ID NO: 982314 - protein, 38 aa, Homo sapiens
TNSTLRENFSESGIGLPITIEMLSMDVVRRGDTLLCFS

SEQ ID NO: 982315 - protein, 37 aa, Homo sapiens
  misc_feature (10)..(10): Xaa can be any naturally occurring amino acid
LGPTPPAVFXCIQPGKALLWGAICAFIPAVPSTFRMD

SEQ ID NO: 982316 - protein, 111 aa, Homo sapiens
DPPTIIVGGRRISNLYKQSLLVLIVVRDISLRCWVRQPSSPLYARAICIIFSVVAISQAATGGTEETIIVSSPTPLTDSCPVTAYFNFSSGFVELQTITHLFAVWPLPTLS

SEQ ID NO: 982317 - protein, 88 aa, Homo sapiens
  misc_feature (64)..(64): Xaa can be any naturally occurring amino acid
  misc_feature (76)..(76): Xaa can be any naturally occurring amino acid
SSRGSQVSNSTRPLSPFFWDQDNSPAYQYPEIDGNHRCAPPCLANYFCVCISRDGVSACRPSLXVNVLAVKVMCPXLDVPNVLSDYMA

SEQ ID NO: 982318 - protein, 93 aa, Homo sapiens
YLIHSHQLPKKKVIILSATISETIAKMMFGPEVKYWDVEMTESKGEIVQIPIKSFSRYAIKENEELLNLAKKLIDIYNPNSTIITYKGFMEQD

SEQ ID NO: 982319 - protein, 73 aa, Homo sapiens
LQDSFQNGRTVRGLFFPHHPLIKERGKEEETPTLSTHLFSEWPNSKGLLLPTPPPNKREGKRRRDSPTLSTHL

SEQ ID NO: 982320 - protein, 168 aa, Homo sapiens
ISRVQHMRTDRCRGQPTLPCCSMNTTSAEKVEKVVSPPREIRSDKKLPSGVQARTFYEERYSTANDEAPDQVYQQRADWKIWEQAVEFECEKPACDTANRSTDDYREKRAIHSVSPFPEGIIGKTRTSLRPFPGFVGIISQRRLRRNAISLHVAEQSASGIFNAPTIG

SEQ ID NO: 982321 - protein, 97 aa, Homo sapiens
LRIPLHPGEYLPQRREVHWHIGLMPDVANKLREGVAWLAFSTTEPFLFAYFLIPLSPCIFLSFPSLNVESRTRSVKGQPFTFLLLNEPFFCLVYKMP

SEQ ID NO: 982322 - protein, 63 aa, Homo sapiens
  misc_feature (31)..(31): Xaa can be any naturally occurring amino acid
  misc_feature (59)..(59): Xaa can be any naturally occurring amino acid
RFYAERHSRAACGEDRARWQVLICVVVGGEXLYVGVAYFFRANEEFLNNGEDTLNWLPXRTRL

SEQ ID NO: 982323 - protein, 34 aa, Homo sapiens
MILTYAYLGNPDMQSTLINRSFCAHFTKFLVPIS

SEQ ID NO: 982324 - protein, 106 aa, Homo sapiens
DSWDPPVSREREKRFEMLGAVLVCFHATDKDITEIGKTKRFNWTYSSTWLGRPQNHGGRQKALLTWQRQEKNEEEAKVETLINPSGLVRHNHYHKNSTGKTGPPGY

SEQ ID NO: 982325 - protein, 51 aa, Homo sapiens
SALVMGPKFPMLFTSHTGTASLIISIPHQSGMFVTVDEADIDTSSPKVHTF

SEQ ID NO: 982326 - protein, 95 aa, Homo sapiens
MAECCEKDPVPMLFVHQLPMVVSVSPSPSFLVRSDLFVRLRIRPILELSGLKAALILSCYFENTTPGSGDVSACSISLLPASEEARYPLIPVPFS

SEQ ID NO: 982327 - protein, 63 aa, Homo sapiens
MKDLVGTKGIPHLVTHDARTIRYPGIASSRVNDTIQIDFGDLGKTTCFRSTFDHWVTLGYWGY

SEQ ID NO: 982328 - protein, 38 aa, Homo sapiens
ALMFHCSVCDNCVEEFDHHCPWVNNCIGRRNYRYIFRF

SEQ ID NO: 982329 - protein, 43 aa, Homo sapiens
FSVLLRIPAESCPGDSVWFYNLLRSGEGDYRTRHAACPVQVGY

SEQ ID NO: 982330 - protein, 65 aa, Homo sapiens
  misc_feature (57)..(57): Xaa can be any naturally occurring amino acid
MSRDLEDPEYHLKYHLPLVTTTDTGLPPTFWAVPLVQTSPDPSDAIAVGAPQGLSSXSLLRRSQN

SEQ ID NO: 982331 - protein, 36 aa, Homo sapiens
MTLEDPDVGTLKNYGIDCYSITEKRNSIYDAQNISE

SEQ ID NO: 982332 - protein, 40 aa, Homo sapiens
MHDVPDEQYTLSEFHVSLGDYACKLYVILRYILMVRCCTA

SEQ ID NO: 982333 - protein, 35 aa, Homo sapiens
MSVKVNTVRCIGHGIQHCIMEVYPRVLTGAILLPY

SEQ ID NO: 982334 - protein, 33 aa, Homo sapiens
FSGHSPVQLPCFDSIWFGCPDGIIVSALLSVFE

SEQ ID NO: 982335 - protein, 46 aa, Homo sapiens
YVGISGLRMSYCRASTWHNSAYDALDEVKRARVRQNTIDAWWWICD

SEQ ID NO: 982336 - protein, 73 aa, Homo sapiens
ASGADEEWAQLAVVLQHHQQQHPALYNTMLQLDQHPLIQKNRQSGAGLHSCSCCWGWVLIHGLAWDMEATPLS

SEQ ID NO: 982337 - protein, 70 aa, Homo sapiens
ACSEDMDVPRIPTSLRSTAKTLVRPRCLAHPVKKQVQLPALEGKPSFAERQSREGKGEVRVSNTAYESDS

SEQ ID NO: 982338 - protein, 94 aa, Homo sapiens
GGSHNAYAPIPPKYFKYTQTAHRLNITKLNIKLYTWVGRQAERKDPSPPFKRGHAVITKSTQLAAISPSIFSGKKRLKHRAASAKKTPGTQFGD

SEQ ID NO: 982339 - protein, 48 aa, Homo sapiens
MGRSLHKQLSLGDCHVHSPSPAPYPCPDPYRLCLSSGGKGPSHHSWGA

SEQ ID NO: 982340 - protein, 77 aa, Homo sapiens
ICCVYRRMPEHDVLFESHSVMTSYQTPGNPRCTCYLGAITTRKNPEMYDLPLLRTHSCVGYILPHPLPERCELWDSV

SEQ ID NO: 982341 - protein, 72 aa, Homo sapiens
DLEDPGGNGDRSIVERLSDFQVAVVHSVCGQCTLSRKAGKIVQDSSSRQTVSFLAIIHMENLITIKVKHKLA

SEQ ID NO: 982342 - protein, 66 aa, Homo sapiens
KGEIRGREIEPEPYPKAVKMGNTPSKTGSKGDTDGNKDIPLDISLGLMLITLEVMAKGLNLGKSNK

SEQ ID NO: 982343 - protein, 46 aa, Homo sapiens
MVILGHPATPLPTGSSRLTGWCLSSLRQLFQLLSFHPTPPRFLPLD

SEQ ID NO: 982344 - protein, 45 aa, Homo sapiens
MDAWVQVDVYSPTGGAASLYLFRTTREHRARPPNIVSARQPGIDY

SEQ ID NO: 982345 - protein, 94 aa, Homo sapiens
RLECTVMMGDGMFQVMGEMSCEIGEMLHVEGDGMYRVTGDGMFHVMGYWDVPCDGMTGCSVCQVMGLFRVTGEMFHVSRVTVMYRVKGAMFCVT

SEQ ID NO: 982346 - protein, 101 aa, Homo sapiens
  misc_feature (57)..(57): Xaa can be any naturally occurring amino acid
GSLEERVFGCSKSLIPPYEKHPQVWRGNPALHMQSVISQKLLCAVLGCKWVKESYIXHSVGQEIYWSAWGTRQCCNPQHCGEARGEEDGSEPMEFKDQPGT

SEQ ID NO: 982347 - protein, 70 aa, Homo sapiens
TVPTHNVTPNTVNQQSGAQQLYSRGPPCPSYCGIHSRIFTRSSIVSIPSAYECLPTILLFCGSPSRPGYT

SEQ ID NO: 982348 - protein, 69 aa, Homo sapiens
SRGSRTYGDQSWGSSVSSRREITTIHGSPPVYHHHSGITTVCITGHSGDHHHFMASPHIQGNRRSQIRN

SEQ ID NO: 982349 - protein, 155 aa, Homo sapiens
PPSPVVRTESCKTASGTACERAKRTLSGRSQASIEIDSLYEGIDFYTSIHRGRFEELNAELFLGTWDQAEKALRDAKLDKSQIHDHCPGVGVLTRYPKIQKLLQDFFNGKAMNSSIKPDAAVAYGAAVQAAILSGDKSANGQALQIMDVTPLSLG

SEQ ID NO: 982350 - protein, 41 aa, Homo sapiens
WRSRGSQRETKKRERIYLVSHDQMMQDISNNEYLEYGGHED

SEQ ID NO: 982351 - protein, 48 aa, Homo sapiens
GVAVLEDTLIAVQTGPCPVAALGVRRSPVRCFDRKLPRRWLPRLTMDS

SEQ ID NO: 982352 - protein, 133 aa, Homo sapiens
YLTGWFNLNGLDLCNHRGQYCTANGPNAKKGHRDAENEDLARVAKKYGESKKIDRHLYHSRSLKVKGKGVNNKGNLRDHIPKRTADTARKKLRADQAEARRLYTREARKRREKRLRAKKEEIITTSPREVPTV

SEQ ID NO: 982353 - protein, 65 aa, Homo sapiens
RGSRSRVANTDAQALTMEGAGSVQMGTQVTQGLGAGSQPECRCRSRAGSHRRNPGLQLADIRNVE

SEQ ID NO: 982354 - protein, 73 aa, Homo sapiens
QYPSMHACLRVDVYVTTAVHASLNKIRRHVRTSDDLQISLSWSLDDVYITTAVHASLYKFRRHVSTVLTSKYR

SEQ ID NO: 982355 - protein, 40 aa, Homo sapiens
MVQAVLLTGASAPGPKREHGQLNSRHSSLVMPSLVGSINI

SEQ ID NO: 982356 - protein, 66 aa, Homo sapiens
VYSPLRCMPSLNKFRSTREHRAELPNIVKLAPGRRVITIAVHASLYKFRRHVSTVLSSKYLKLEPG

SEQ ID NO: 982357 - protein, 41 aa, Homo sapiens
LEVPDVVSYPAAPIQRLSMNNSAGINNRCRYNNSACSEHTV

SEQ ID NO: 982358 - protein, 39 aa, Homo sapiens
VREGVGGSVRLASVGLAALKLLSTLTKPASSSLRRWTDR

SEQ ID NO: 982359 - protein, 66 aa, Homo sapiens
FSTYPMSSASLGKPPNGVSSYLLQVCLGQQQVHSYLPRAKLPKGAVGCQLFCFTAFTDDNSRYWKI

SEQ ID NO: 982360 - protein, 36 aa, Homo sapiens
SVPDRVLGGSHSMRYFHTSVYLALAAGETRFISVVL

SEQ ID NO: 982361 - protein, 45 aa, Homo sapiens
MLMLSRELVQAGMHRVVNTLSNQCSSLNDYCEQVMHGCSLCRTEA

SEQ ID NO: 982362 - protein, 38 aa, Homo sapiens
PRYSAQYQTPLYRLILLSHSTVLHSSISRPYVLGCMDI

SEQ ID NO: 982363 - protein, 63 aa, Homo sapiens
MGHRPHSHQVAGVASKQSRAISRPGQGGARGWFCLAAGTDNFWLQFIYKDLSLYIPDLDAGYR

SEQ ID NO: 982364 - protein, 51 aa, Homo sapiens
VLSHLKPRLHPDDLPLLKRALVYHLKGRSEDYLVEYRVRHGDCAIETSKTR

SEQ ID NO: 982365 - protein, 72 aa, Homo sapiens
QDDFVTEKTAVDLCQQTIFLTLLASSQRSLLCECADWILDKTTGSACLVVENEHLYLGFHEQTLKPDDFVLD

SEQ ID NO: 982366 - protein, 41 aa, Homo sapiens
  misc_feature (25)..(25): Xaa can be any naturally occurring amino acid
VGQWSSPSSFENVKEKWVPEITHHXSNRLRCLHCRGLKIDL

SEQ ID NO: 982367 - protein, 56 aa, Homo sapiens
MMTEARMTASVRNGASPCFQLTGLEYQLANNSPRGHPCEGDDSITPNLILVAEAGS

SEQ ID NO: 982368 - protein, 56 aa, Homo sapiens
KWFTEIFRRQLSLYGPPNSKSVIRYSIACIHCSDGIRSTIGAVCGSASPASRRRFY

SEQ ID NO: 982369 - protein, 80 aa, Homo sapiens
QWEDSQYDVRYDRRQRSGARPVKPRREDTNRKRGSNTKVSTSSNRPNPFTTQVHCLHDRAMEVSPKGSLAPRLGGCRSLI

SEQ ID NO: 982370 - protein, 86 aa, Homo sapiens
PRERHQLQLTGRRFDLCPICVVPFVPPSRGNNCRRLVAHGCDPLSVSTMAHPLKRMPPYQCTQLAIHSAIIVTPSALSSQARLQAD

SEQ ID NO: 982371 - protein, 39 aa, Homo sapiens
DSRVIPYPDYSAYMPYYVLCRPAKQVVGLALLVSIYQHW

SEQ ID NO: 982372 - protein, 128 aa, Homo sapiens
TGETRPHYFDTSQPRMRNTASEEDAAAAAGHIWRTRPAPWMNTLQLSEQQDTQRHAWEKDLVAAWGKDPALRLEATVYQPTEMACRAQRWDHPNCSAKSHRKTPLVKDFKFQRIRISLTDLPPWLCLS

SEQ ID NO: 982373 - protein, 76 aa, Homo sapiens
  misc_feature (1)..(2): Xaa can be any naturally occurring amino acid
XXIHRKGTKPVWVSVLYTPDAPDGVAFRELTKGLVELDTPKAKPEWQTYFTSQMATKDTKEITRIFNDTRSVYRYT

SEQ ID NO: 982374 - protein, 63 aa, Homo sapiens
RQHSCVMARDIFLGVTVVCRPGSPPQGSEHALVPDAENLGERTHSPHIPQAHGLTLVTYSYQH

SEQ ID NO: 982375 - protein, 67 aa, Homo sapiens
RQTPCPIFTVLCGDLEEVGLLWGEGDLQRSAHKLSPSHMCQSISYSPLTDRLLAGGSSQDILPSNCI

SEQ ID NO: 982376 - protein, 133 aa, Homo sapiens
MYERKDKVVGVKHTARPQLTETQGRSRTPSIVILCLEDFLMALLQEAPQGLCKYGDISDTDNPYSLLYIDNDQEPPGMNMRRWLADIGHTEETINHTTHTGGILMQEDNRTAGDPKTELCISCIEIIPQYGLA

SEQ ID NO: 982377 - protein, 39 aa, Homo sapiens
NVNILQYISVISSAPLTLKQIHYWNFLLEESSPNSVPIQ

SEQ ID NO: 982378 - protein, 210 aa, Homo sapiens
VFDPVIKGKREIRAEDGDGFLAIARVAIGLAEGAGRNAHELTLLTARREEGPLSIGKDGSQFRERYAQLIRRNLSSDCASFSQCDELSGQIGCPRSNFVTEDDRGGGFLHAVDTADLVQQLVQLLRRIGAQPSHVIELPTHRAQLLHLRHGAQPAQHLFAGAGLHGNAHVSLQTTIRNALAQAHAVTGDDLEFLQGELNEPVRVESEQGK

SEQ ID NO: 982379 - protein, 48 aa, Homo sapiens
SLRKHGLEVIYNIEPIDDYCVQQLKEYEGKTLGVSHQMKAWTFWVPML

SEQ ID NO: 982380 - protein, 51 aa, Homo sapiens
LRGYVKVLRQVVADCSEGGRVRCPVIDELGSSERRSYDPVPMTAVSLSAVK

SEQ ID NO: 982381 - protein, 79 aa, Homo sapiens
LVLEVSIARATGPDDADHITGRGGQGHTFEHFMTATAFMQVLDFKFVHAVGSHKNSWSVVEQAPVPQRFAPLLLKLLKL

SEQ ID NO: 982382 - protein, 46 aa, Homo sapiens
MPDEAYIDYRTCTWRYEITWNGGVECTEGEVGNVAGKRKRTSERVK

SEQ ID NO: 982383 - protein, 73 aa, Homo sapiens
VDHNTLQTGMAMVLSLSQLCSGRPRMLPSEHANADQDGSHLPQESHRISLGEILTEVHGEHTEGDASIYAQPR

SEQ ID NO: 982384 - protein, 66 aa, Homo sapiens
VDKVGEEEFEKLYSSYEKQGRVRKFVKAQQLWYTIIESQTETGTPYILYKDSCNRKSNQQKLGTIK

SEQ ID NO: 982385 - protein, 33 aa, Homo sapiens
VVRVMVMVMMMMSGDDYGVVVVMVIVVMVEGGE

SEQ ID NO: 982386 - protein, 37 aa, Homo sapiens
EYWCYIIALDIEVSTTDVIHDSLSTMMAPSECSTLVW

SEQ ID NO: 982387 - protein, 78 aa, Homo sapiens
MGSLWVRTQVRLPLLLLMTMALAGVSGNASAEAFDSGLGDYGVLPPGLSVDLTPCKPTLRKRSCTHVREVAGCSHFVS

SEQ ID NO: 982388 - protein, 70 aa, Homo sapiens
MELLCRPEDTALPPDRRVCSLSSWMVASVDWITACEFWSCKGVGYTGGHLGGTHYDDSPEFTPVAGKGPE

SEQ ID NO: 982389 - protein, 65 aa, Homo sapiens
MTFRRRARPATPEEAGFRKGLGRRQLQMIAVGSAIGTGLFLGTGARLEIAGPSVALMYLVCGRVP

SEQ ID NO: 982390 - protein, 36 aa, Homo sapiens
MNDPDGPVIRWRYPSIEIPVTHWSLACFRDITGHPP

SEQ ID NO: 982391 - protein, 34 aa, Homo sapiens
CGDLEDPSVANQVELVALLGAFQVHFVAKKWQEE

SEQ ID NO: 982392 - protein, 51 aa, Homo sapiens
MGDGGGARQARRTRRGRPGRGGLEVTLAVHAPWRRTCSPEHLALESVAGTW

SEQ ID NO: 982393 - protein, 33 aa, Homo sapiens
LEDPSVANQVEGTAIAKALREEIICRNHPVKWL

SEQ ID NO: 982394 - protein, 36 aa, Homo sapiens
LRIPRIQVDGMHTTHGIETWIRDRTWIRDRTWIRDR

SEQ ID NO: 982395 - protein, 65 aa, Homo sapiens
VAIQRIPDTGKGPFALPGESQKALLVEDEMQFQPEMMRSLSSAMWRKEHSRQRDQSEQTHSGVKL

SEQ ID NO: 982396 - protein, 124 aa, Homo sapiens
EASRGSQAWRKKSIGTSMSYLNGCAGSQGPATSSCSSIQEVRRCTRAEMPDNLYTLVLKVKDRTDIILEVGDEQQLNSWMAELSECTGRGRLESTEAEMHIPSALEPSTSSSPRGSTDSLNQGA

SEQ ID NO: 982397 - protein, 116 aa, Homo sapiens
MRVTEFAVTWKVEFSAATVHTELRIDICCTLLGELVSAPAKQELRWYFNLVHSRDQEGHQAALIGEVDWIQTLLPILEISDESIYKEVFGQEAGSGMFTEVAVLGRSRYCGSSPSS

SEQ ID NO: 982398 - protein, 68 aa, Homo sapiens
GDLEDPCRSLEDSRTRRPGIRGSSRPCSLSRQRDQQGQVVPELQPLHLCQQDRDWRVMWGALVRKSWS

SEQ ID NO: 982399 - protein, 55 aa, Homo sapiens
VCGTDGGMHQPIGELLISQAGCDPSVHGPLNPQYVISKVASKAKVAASRKPRSRW

SEQ ID NO: 982400 - protein, 38 aa, Homo sapiens
MPTQEMQQKHTNTHTDTHLGQAILLPNSQLPALLVMGE

SEQ ID NO: 982401 - protein, 57 aa, Homo sapiens
WGACQKYSSSQEMSVVVTPRYRWGQQGGEGHTGPRAKSSSGVYVQGARYVTARYLVR

SEQ ID NO: 982402 - protein, 36 aa, Homo sapiens
MAIPLVVGTNNLIILIHNKQRLEETLMVVDENDKVM

SEQ ID NO: 982403 - protein, 62 aa, Homo sapiens
MRLRGHVTSQHHLGWWPTSPRKKEVFPIAGKQLLQSSYKPRSPAAKITNIPSLHSCCFPETG

SEQ ID NO: 982404 - protein, 35 aa, Homo sapiens
MGLNLIGVRHFFGGFMVIIARFRTVFNSPHELPNF

SEQ ID NO: 982405 - protein, 47 aa, Homo sapiens
MQYTLQKDFRRMQVCVIEAQAVSISGGLWFPTYSLWKRISTRATKLN

SEQ ID NO: 982406 - protein, 43 aa, Homo sapiens
RIQVLTVSVENCGPPETPVSSWSGWYSMVNRDSADLVPDALNS

SEQ ID NO: 982407 - protein, 42 aa, Homo sapiens
SRGSRLRACPNGARVPCRAEPMLVLFAQKQPSVGLVSNSGCL

SEQ ID NO: 982408 - protein, 40 aa, Homo sapiens
LQSWVRLPAASPGVVGSSGWEEFNFPVPIITPTDPIDREM

SEQ ID NO: 982409 - protein, 34 aa, Homo sapiens
ADLEVPLTLAVEVPLLLAEFMPGPLETIPYTCPR

SEQ ID NO: 982410 - protein, 30 aa, Homo sapiens
MLSLVCVSPREEVLAELWDDALLVLLLLAH

SEQ ID NO: 982411 - protein, 101 aa, Homo sapiens
ASEDPVVRTRSDSMKNEKNLDRRHSYMTVSVGIRTPKWDRHYEQASKMFLITIKCRNPHLKYQQAIFSIILAQKSSVKYSQAICSSTVKGLYSKTEVRFIA

SEQ ID NO: 982412 - protein, 111 aa, Homo sapiens
ERAVIASRTTQGPVANSERDFLPGASSPTDATAAGGHDPSEATARGKPITRDRSINTVHLPPLKAHLPELPIMSACHPLTATPQEAECALSPSNPAYSKRDIGRMTPSLVH

SEQ ID NO: 982413 - protein, 103 aa, Homo sapiens
TVSDRPDALHPSTLWITTDYFVPVDLPVHVHVNGVMAHVSLCSPEGVRPQRDAGQGISGSMRQSSLLSVVKQFSIFVYPLVDGLFLVWALSNAPVDILVHVFV

SEQ ID NO: 982414 - protein, 66 aa, Homo sapiens
MGTVPDGEWRRVCSNPVWGQLAPVNVTTEVKSVESAPVKLDVKLFRGDNGGLQVSTNVSCQGMFVG

SEQ ID NO: 982415 - protein, 44 aa, Homo sapiens
MVRDLLQIMLPPRDQELTPQACEPQQAGPTPVRLDWGLGGKSVR

SEQ ID NO: 982416 - protein, 62 aa, Homo sapiens
IQSRKCISKDSHIKLYGIEFQMSVLLIAYRILLRCLAVSLPMNSSSHRISIHQRESVLITCT

SEQ ID NO: 982417 - protein, 44 aa, Homo sapiens
MLSSRTGREIGLKRLSPRVDEEKEQFRKLFMGGLSLETTEESLR

SEQ ID NO: 982418 - protein, 48 aa, Homo sapiens
MGNFRFSIPKDILLGCLIRKPTNLRPQSRYPCLVLFYNSIWPQYELDN

SEQ ID NO: 982419 - protein, 44 aa, Homo sapiens
ARPVAYSGRRSGRHDDPGGSARLDSTQCRRPYRLRPSPVAGIPL

SEQ ID NO: 982420 - protein, 67 aa, Homo sapiens
FFTDDSFAVGSSCQARTSTTSQVNELAHYRQQPPGPTAMLWWLKLTDNLSKVTAAMGQEEDRHRDQR

SEQ ID NO: 982421 - protein, 57 aa, Homo sapiens
EYRLYFYLTNGYHITFMGGNSFCKHKGEEKKLEWPPQFLGNIEVQIFIQKAVCNPQG

SEQ ID NO: 982422 - protein, 32 aa, Homo sapiens
APSINDICEVSTVLTCQKELVQGRHAPPMVKY

SEQ ID NO: 982423 - protein, 140 aa, Homo sapiens
SLAGARLRLAIMSVTGEDDRDRLLLNGGRLFVAGRQNGSNNIRIKIESGEAAGFLGHGSASRCIRKDPCSKAAHALKDRQVTQAALAVGICENDGKRKRGKVRLADVQPKLDSEDLHHLILRSAKRPARTIPEIVRGREE

SEQ ID NO: 982424 - protein, 75 aa, Homo sapiens
QNDWKCPVLPEHSHVSSNQLYGLQRVHAESLMQRPGPFYPPSTSSSNIYPPPPLHIIITPIWTDMLIENHPQIVR

SEQ ID NO: 982425 - protein, 42 aa, Homo sapiens
QLRTAKSVTCTYSPDLNKMYCQLAKTALLQLWVDTTPPTRHP

SEQ ID NO: 982426 - protein, 51 aa, Homo sapiens
ISNNNCKLVDGECYDVRRTFHCMSEGRVSYVSLEAVANSVFRGVKSHTQVG

SEQ ID NO: 982427 - protein, 121 aa, Homo sapiens
LDSHVSVTTASGPISYALCAGGWSQVHACLVPLALWISGTVAIRQLPAGIRLSRRCLEMPQMGHHRASSLFSLDLRLLSPAVSCSTSKQLARGFTKKCTWPGTVAHAYNPNSLGGRGGWIF

SEQ ID NO: 982428 - protein, 73 aa, Homo sapiens
IAVYQRGYYGSNGARARLAHYDLPPALLVDISRIKQYLSYCDRCISLNIMSSRVIYIVPYCRILFFFFFFEAE

SEQ ID NO: 982429 - protein, 102 aa, Homo sapiens
RLCYNQERKSESKTSDTSYRHKRCDGIGGIPYRGSPGNKFGSGEYVQVNLRNAEAPQSERGNLTNRGTYPAGTDRIDMIDSSSRSVVVVMAFLVGEHLLVIR

SEQ ID NO: 982430 - protein, 47 aa, Homo sapiens
  misc_feature (38)..(38): Xaa can be any naturally occurring amino acid
MTGLGDTLFSPSQACWNTDVARLLRVSEGIEVVAQLFXQLFAVLQRV

SEQ ID NO: 982431 - protein, 139 aa, Homo sapiens
CRSISMICLHNGRLAHRSYLNQTFLLLIPGLRHNLLFNQLPHRKLWNSCMTWTPLLRVVLPFGTQPMYSLDILIDVICPPKMFKIKLQPNHLGHLFLGCPGAISWAIVHSHLAQNKYLQIFYSESFCQHCMGNKLKKNI

SEQ ID NO: 982432 - protein, 49 aa, Homo sapiens
HEKIEQTSTNVLWYGSVDEWKLRELTQRYLDPERAPEEKLGYSRCSHDR

SEQ ID NO: 982433 - protein, 70 aa, Homo sapiens
ANYSGTGYAVIPISYEDPLPTSDVFAGCQITLLKSENFYRIEEPDDEGDRNQQQQQGIITTLMELGHSVV

SEQ ID NO: 982434 - protein, 103 aa, Homo sapiens
TPYEKNPSSATLEVGWCHPNDLPPEADPEDETLRKLYEQHQMVQDMLVPIKCLQQALHTFQNDSPRLPHLAVSVHPAQTDQDLVHPKRKGGRATHIDIGAYGA

SEQ ID NO: 982435 - protein, 131 aa, Homo sapiens
DEFTNNAAQPHQVPMVAGSPLGATQTCNKVRCVVPQTTVILNNDRQNAIVAKMEDPLSNRDRISLENVISNAVPGRRQNTIVVKVPGQEDSHHEDGESGSEASDSVSRCGLAGRQSIEEHVTLITRNSVRG

SEQ ID NO: 982436 - protein, 50 aa, Homo sapiens
IPTCAVTGTLTHPTASSAKSATSPKGKKLTTRFCQLILDPIFKVSDAIIN

SEQ ID NO: 982437 - protein, 34 aa, Homo sapiens
VVRSYGKQSAEMNTAKIIPQEQSGYYIGTLDTLV

SEQ ID NO: 982438 - protein, 34 aa, Homo sapiens
GEHSIAVEEDAESEDAEEEDSETLQVLSGTAVLP

SEQ ID NO: 982439 - protein, 95 aa, Homo sapiens
MRSALAQMRVDYQQVPLTALKTSNNRLLNKRRPKQAGSSSASEDCNNQQLMGPWRSPVRQSPGGPRVILFTKGTSVVSTFVTRTFRMEDPDHKPP

SEQ ID NO: 982440 - protein, 68 aa, Homo sapiens
  misc_feature (3)..(3): Xaa can be any naturally occurring amino acid
SHXTSSTTSSTLHTTPPALPPPLPPPAPPPPLPPPAPPPPPPPPPPPPAPPGPLSFKLWLVVVLAEQW

SEQ ID NO: 982441 - protein, 118 aa, Homo sapiens
DVLVARSRLEAPEVLILLGCSDNSYRTNFEVRSVDGFQCYLQFEHAVTFVSCISMGKRRSSGDGALSSVALGRSDMESGSDPRYRTVEYCCRDACFAVTRSDSRIIRREPVGGVLFSL

SEQ ID NO: 982442 - protein, 67 aa, Homo sapiens
RFTGLTMERKVLALLARLRIGPRSRLFLHFLNFLRFASLGNSAWRFCFFFNFFFLFFDIWSAGLCCG

SEQ ID NO: 982443 - protein, 46 aa, Homo sapiens
DSRGLPPFPPKNPKIIWVCGGRLESQLFGRFFDLVVISSYTFSASI

SEQ ID NO: 982444 - protein, 56 aa, Homo sapiens
SCTDHKLFISGCSLVALMSVERSSDECLPPAMVLCSVAAVLLCAWNGSALTVGTWY

SEQ ID NO: 982445 - protein, 130 aa, Homo sapiens
MSAHTCRLNEWAPQIMDPRPLQLYPPPGKEQPLDEELKDAFQNAYLELGASEKESWVSAIIFLSDEQVSVKGSSLTRDDVNFPIDNLCFVGLISMMDPPWAAVPDAVGKSVEVLELRSSWSQETIQSQVK

SEQ ID NO: 982446 - protein, 50 aa, Homo sapiens
PVVLEDPTHLLQGAGPLWQPDTAEIVIFKVNFDLWYTGCVVASVSNLSNL

SEQ ID NO: 982447 - protein, 60 aa, Homo sapiens
WRLFIGGAPDLLRQHKLSTKSHTRKTAVNYVSSINKHQYHFLFQSISQMEKMRFITTQCV

SEQ ID NO: 982448 - protein, 74 aa, Homo sapiens
IVEDQSIYHASRRRTQPRQHAQVPVIAEVHDEPARVDLEQQILAETLDGEHLARTQLLGEARPARASAASRYGG

SEQ ID NO: 982449 - protein, 67 aa, Homo sapiens
IEVCHDPLPLWMRTIIDTRRHRQSLVLLACYLEDPSVLDTSASGRAFSVLSTGSHAAATTTAEITES

SEQ ID NO: 982450 - protein, 38 aa, Homo sapiens
MHLSLCRGSADVPRTRVWRGYTEHTVVASFGRLPIVAH

SEQ ID NO: 982451 - protein, 79 aa, Homo sapiens
VVPPVFFIEDLLSALEIIDLVYLSVALRMLGLPGLGVASILVLSERVLSNSAALPPPCIPFPLVYGKLAYGSFCGVIFL

SEQ ID NO: 982452 - protein, 65 aa, Homo sapiens
RALRISALGGALLQDPGLSMELAHLHSTLAQGIPASPLFVESQWLTLLGRLFSETRMVKQQFVKG

SEQ ID NO: 982453 - protein, 33 aa, Homo sapiens
SPHVNFMDELGSYAVHSLARPFEQGRSAQMAPF

SEQ ID NO: 982454 - protein, 52 aa, Homo sapiens
SEKPVFFLLVKVGHKLLAGANGSPATLAPGGPGVASKQSRAISRPGQGGAEG

SEQ ID NO: 982455 - protein, 105 aa, Homo sapiens
RSWRPFLRETAFIFFVGKILVRLLWRGTPVLFLSPGNYAVVLLGVPWFTAMRMSLPRVALRAVRRTSPSRGSCMSFSLQHFETDCGKYRRRKQSQQKLNGGPGGS

SEQ ID NO: 982456 - protein, 129 aa, Homo sapiens
ISCALPGTPKSADSLKIDSCMLVSLVLVVDSTIIVIGDHPGVITITIIITVITIIITIITSPSPPLSLSSSPFSITIIIIIIIILIPIIITITTVIAVITIAINVVITIIITIIIITIITITIIITVII

SEQ ID NO: 982457 - protein, 111 aa, Homo sapiens
PPAHLVSGSLSVTIFSVEDMIGSFSVGLSYNRFGRRNSMLMMNLLAFVSAVLMGLSTLLKTLDILILRQYIIGDVSAYLYHSCTRPCMCGEMTPTSPYSRPGKSASGGHSR

SEQ ID NO: 982458 - protein, 32 aa, Homo sapiens
EVRVAGVASEEQEGFADWFVKALDDLHEMNHV

SEQ ID NO: 982459 - protein, 93 aa, Homo sapiens
SLREDGMTLADIAEELETVNARGKVCCCVRKTVEPIEGWAMAVSVQRRDGAVREDGVMVVEVTMGPEVVGTEEMAVVDVLMVEWMVKVKVGVL

SEQ ID NO: 982460 - protein, 36 aa, Homo sapiens
HVTVLYPVLSVTQTLTLTIYCNSARPGTPLPSCTET

SEQ ID NO: 982461 - protein, 72 aa, Homo sapiens
  misc_feature (54)..(54): Xaa can be any naturally occurring amino acid
PKHTTVQNPLHDYIQSSKQPPPSIRLPSAQTPNGTDYVASGKSIQYPDSHIGTXDTLHYGDNNGGPHQSVLT

SEQ ID NO: 982462 - protein, 96 aa, Homo sapiens
  misc_feature (3)..(3): Xaa can be any naturally occurring amino acid
QVXHMLNRKMEHRDKTSPQNVACDTSLSSEWTGEQFHTSAEAESPMSLLLRALLEDWKKVKPHACDESANCLEILVVEPGVKKSFTSFYYKWMKDI

SEQ ID NO: 982463 - protein, 75 aa, Homo sapiens
LEVHVRCDHAYESSLGTEQDPVSHTHTNTHTHKKTLNENAHPHCTYAAPPMTTHGQHSSILADFSIRNNSKPEAQ

SEQ ID NO: 982464 - protein, 147 aa, Homo sapiens
PTRGTRVHVHISSQVQYSPEEVWGMVLNNPRAQLKIEAEQTIKDAVITGPVFSQPGRAPSGDKKAARMDGLKVLQLIKDNTATALSYGVFRRKDINTTAQNIMFYDMGSGSTVCTIVPYQMVKTKDAGLFTEQRKGQSAKDVRENPR

SEQ ID NO: 982465 - protein, 53 aa, Homo sapiens
LVTSHSGAQQVATKLEGSDLDLVRIGHWQEGKGRGQRRVVAKVAELCCCLTKE

SEQ ID NO: 982466 - protein, 86 aa, Homo sapiens
IAKTRSHTVTTNTMDTNTVTSRSINTSTTNTITRDTFMSINTSTTNTITTDTFMSINTSTTNTIGMSTFTSNNTSTTNTSATNTFM

SEQ ID NO: 982467 - protein, 49 aa, Homo sapiens
GQYPSGAVDTTQPETDISSTEDFCVNTRTSHPCGPYSLPFFAWLAKQKQ

SEQ ID NO: 982468 - protein, 75 aa, Homo sapiens
AIHLLSYSMRPADMAQVKLQKKELKWYSLEASVKLSCKVTGYIFTSNDIDWMRQTPEQGTLSEIGWISPGEGSTE

SEQ ID NO: 982469 - protein, 142 aa, Homo sapiens
CPQLKGKALRDQWSELYQNLTREQADYGVSHMKPYVDVKVPRAPPRVRLLGVHPLASRRTEPIPGITHPIAACPASPCCMSAPLCAHHLSTVHLKPALAGNEDLGKKGASITRYRGPVNNHHVTGGTQIGVYEAECPLSDYT

SEQ ID NO: 982470 - protein, 134 aa, Homo sapiens
GPHIDTPGYGGSSTIRTFRFEAKASQIMKILNITAVRDLQEPTDDRMFHVVYASGSVRILSGPSGSGRAKFVGSNSSAFTPDESCKCKWHLGSQVGSRVSAGSIGELSAMKPPMMANKLLMGSEHQCRVPQLEC

SEQ ID NO: 982471 - protein, 52 aa, Homo sapiens
LRIPHGGSYRNQQQLFSCSPTFSSDPLTTPRYSDQDEQQCRYEQQCRYEQQC

SEQ ID NO: 982472 - protein, 112 aa, Homo sapiens
MIRFYTETFHSQGQAGDRCLPLVSAAKRPSSFTNPPQHGPFMGVGLGDGGLSFPTRPYLRLSQWRENLDNNQAFLGRGPCGLPQCIVSPRYLRTENGVTLTSKRLEHFNKAI

SEQ ID NO: 982473 - protein, 51 aa, Homo sapiens
WCSRGSHCCHTCTVVHTALLFIPCTVVHTWSLYRGDGVRVWWVHLVGGMNN

SEQ ID NO: 982474 - protein, 74 aa, Homo sapiens
EIVPLQSSLDDRARLRLKKKKTQKTKVSQAWYHTLVVPVTQVRGPFQPRKGGDAVVSCDGATAFGPRQQSETLS

SEQ ID NO: 982475 - protein, 61 aa, Homo sapiens
MSWWLVWLLLAHTRVGGWLLFEPAWTCLDCTGSQCNTLCYKLEPQMRKRAAGSGAVCALAF

SEQ ID NO: 982476 - protein, 79 aa, Homo sapiens
RLDGRQGRGELCRCWELAGGATGVADVLLYSVLGGGRLPVAQLGQAGFDLGQMAFHITRELKCKPGLAEAGTTQKSVLR

SEQ ID NO: 982477 - protein, 60 aa, Homo sapiens
LLFIPALCSYWSLYRGGRGMNNSAGMNNSAGMNNRCRYEQQCWYEQQCRYAQQCLYDQQC

SEQ ID NO: 982478 - protein, 69 aa, Homo sapiens
RPRHMHQILLESNFRVRVRKCHRHHVNPKAKVASSSTPRTLNFRHFWSRQSLSYFCIMTMDGMVFLQYD

SEQ ID NO: 982479 - protein, 71 aa, Homo sapiens
YYVDTGFHHVAQAGIRMPELKVIHHLGFPKCKDGRRERPGAAKTAYFNSEHRRTQLGTAQKTRIGSEMDAV

SEQ ID NO: 982480 - protein, 122 aa, Homo sapiens
AFAITAIQGVGRRYAHMVLRKADIYLITEGRMNSLRIEVQRVITIMQNACKYKIPDCFLTGRKDFQYGRYSPGPSLNAQVQHVSVKTSSERRIFGAVECCVTAGAFESKGSTPRPLAAVVET

SEQ ID NO: 982481 - protein, 63 aa, Homo sapiens
  misc_feature (27)..(27): Xaa can be any naturally occurring amino acid
HCSLHQCTWTTLSTKSFILLDTLGALXVTLTSMAVGGSSLYGLILHHAHKLHLCCDTTLAMCH

SEQ ID NO: 982482 - protein, 107 aa, Homo sapiens
MSYKCEIGRAYAGAVLNAVGVSTSLVPTLLAWSSQFRQLLSDYGAPSLCYTQGNWKHARCPKVKYAETVGYHSNMLGDGNQSHVRFKHYCHVEAEARNPSCLIRLVR

SEQ ID NO: 982483 - protein, 108 aa, Homo sapiens
MSSTNRIWCLKSTSTYSIASQAGSFTYKDLKNQLARLVVQGGRCSVGFAKLRQTWVFHTSLATETITAEPAEPSAGSASTPTSRGHLCIQPKTLLLIRKTDRRKVSAY

SEQ ID NO: 982484 - protein, 49 aa, Homo sapiens
GVLEDPHCCSYLHCCSYQPKSIEAGVKSVLDHPRYSDQDEQQCKYEQQC

SEQ ID NO: 982485 - protein, 63 aa, Homo sapiens
HNSAGYEQQCRYEQQCRYNNGARYEQLVQDKQQCKYEQQCRYEQQCRYKQQCKYEQQCKYEQQ

SEQ ID NO: 982486 - protein, 68 aa, Homo sapiens
AVLEESLNTVMYEQQCRLTTVQVKQQCRYNNSAGITTVQVKQQCRYEQQCKYEQQCRYEPQCKYEQQC

SEQ ID NO: 982487 - protein, 46 aa, Homo sapiens
SRGSPLLFIPGRCIGGGGGGMNNRCKYEQQCRYEQQCRYKQQCMCY

SEQ ID NO: 982488 - protein, 32 aa, Homo sapiens
MLIDTLLYHMPLQYIYLSKQYNKAVLGMNNSA

SEQ ID NO: 982489 - protein, 34 aa, Homo sapiens
MPYTRRLKPDLIIASVTSPDVIGEVKQNGIFGGY

SEQ ID NO: 982490 - protein, 84 aa, Homo sapiens
WNPYLLLKTQKLAGCGGTHLPFQLLERLTHANHLIPAAGPAVRRDWAIVPQSGRHSENLSQIKTRPGAGWLTSVIPALWDCQGE

SEQ ID NO: 982491 - protein, 53 aa, Homo sapiens
KAQINSSRYTTGPVTTAQLQQLSYNSSSYNSLSSRGPCILHIILEFNTSCLTG

SEQ ID NO: 982492 - protein, 81 aa, Homo sapiens
VDPDNYQTGVVINRQELIHIHPHCWLTVPEVFEGQSASIPLRNIGFQGLFVDFGRYLRAAPEVIQGREAKGLWHREYRGSW

SEQ ID NO: 982493 - protein, 68 aa, Homo sapiens
MATYIRLDGGSVSLRLDDLGTSGDKPMAPRLRTCDVSLREVLALRFVQECHRMDTASWQGLPNADSLL

SEQ ID NO: 982494 - protein, 50 aa, Homo sapiens
LQQFNESGDKEALMSRRPDVMVTENLWLSIAYGLDEGPRAIHETASSLTN

SEQ ID NO: 982495 - protein, 71 aa, Homo sapiens
LATTAKTYVAISITNSSLGDWLRGAVCQLILNTRSITLLISRLTPLGSRAHSRGIQFTEISGGFGQRSISV

SEQ ID NO: 982496 - protein, 91 aa, Homo sapiens
VTTASSYNSFQLQQLQLQQLLLTYQFLSGRLTSLSVVVVMAFPPGVLTVTTPRRQNPALVLYVFSLPHHTTPSIGHFPVKGLESFWEVAGE

SEQ ID NO: 982497 - protein, 99 aa, Homo sapiens
  misc_feature (89)..(89): Xaa can be any naturally occurring amino acid
  misc_feature (94)..(94): Xaa can be any naturally occurring amino acid
MGSKTSMGSNENLESRESRIEKLESVHRISLLGIVVFVALTVVGIVFAGDLSVSRIAVGIIGVTFVMAFQFNGRELDRYERRYTMSHLXADRPXKSMKI

SEQ ID NO: 982498 - protein, 177 aa, Homo sapiens
KQLITFTYTKACPDSFLSRKYQVVHNILYLFFDKICNRLTSRKPALIVFCLSFYSATTCSLTQQYLYWDGEKETYVPAAESSSHQQSGLPPAKEGKEKKEKPKSKTAQQIAKDMERWAKSLNKQKENFKNSFQPVNSLREEERRESAAADAGFALFEKKESLAERQQLIPELVRNGD

SEQ ID NO: 982499 - protein, 56 aa, Homo sapiens
QLQQRTEGEEEITSATLSLPGELHRFLALKLQPLSLTCVATEAQRRYGTRGSDAYW

SEQ ID NO: 982500 - protein, 45 aa, Homo sapiens
YARLKDLAMHASESLHCRNLSAWLITSDVICRNKLLRVSAKHWHN

SEQ ID NO: 982501 - protein, 78 aa, Homo sapiens
RTAGIAADIDQVLLVFGLAALLGIWVVGALIDQRLRALLVISCGMFALSALALAFWITSPAVIYTTVTLWGHYSLQSP

SEQ ID NO: 982502 - protein, 69 aa, Homo sapiens
YVLRYSRGFSATPQKKADSGFRGRCRNEERGVTGQWGGGFFLGVNGNVLKGGRDDSTPWACTLEKGEIG

SEQ ID NO: 982503 - protein, 37 aa, Homo sapiens
CLEVDVYSPVRVACLSLYKFRRQVSTVLTSKYVKLEP

SEQ ID NO: 982504 - protein, 34 aa, Homo sapiens
MLEGSYVREGQPLVQINDVLLLAPSVQQQQAGVQ

SEQ ID NO: 982505 - protein, 33 aa, Homo sapiens
MWKGSYVREGQPLVQITTCCCAPSVQQQQAGVQ

SEQ ID NO: 982506 - protein, 49 aa, Homo sapiens
AKYSAGPFLKVHLFGARFTLFVYHSTYVLVTAGMRYNQCVQQNLVWKVC

SEQ ID NO: 982507 - protein, 90 aa, Homo sapiens
TLEVPMDSSSRLRAQHPVITCSKENQASNRFPLMVYGGAGNGQLPISRVSGLVAWPSLLHTSHVYFWLRLQKVIHHSPPSFWGDDWELHS

SEQ ID NO: 982508 - protein, 173 aa, Homo sapiens
WSSHRLVKASHPLTTSIKGHLLPRSPCGPRAGGKGLAVVLQQSLECDDGCRSTMRRSQYSSCASGSTGIPGNPLPSSGSLTWLSENNEFNTVEHIEEVAYNALSFVWNVNEEAKVFIGVNCLSTDFSSQKGVKGVPLNLQIDTYDCGLGTERLVHRAVCQIKIFCDKGAERKM

SEQ ID NO: 982509 - protein, 87 aa, Homo sapiens
NGRYFDAEHDRLMLDLANGMIFRSRFPAKMLTPDAFDECAFCVDDAALYFTYEEQCKQIKLSHEQRAELVLNALVAYRFLKPLMPKS

SEQ ID NO: 982510 - protein, 33 aa, Homo sapiens
MIRPPANTWHLSDSCLAWACLVLNVVYKLSPVV

SEQ ID NO: 982511 - protein, 37 aa, Homo sapiens
ANSLTQAHTQPPVLVIYVPSHLLVTRINPTVNQTAGC

SEQ ID NO: 982512 - protein, 43 aa, Homo sapiens
MASLDRVRDGIEQHQQQAYAGSHVQVRDARPEHAQHLVVPGGG

SEQ ID NO: 982513 - protein, 40 aa, Homo sapiens
CCGNPIQAHCRRLFCLDGSVISHPESVTPAASYMAGSEYK

SEQ ID NO: 982514 - protein, 39 aa, Homo sapiens
RSSYLVCKCHFIHPLSNSALTSLYCSLASDTSLSSPSLA

SEQ ID NO: 982515 - protein, 127 aa, Homo sapiens
LLTTQCEFSFIGEGVIYKHSLRRHTDPNIDTHHHHHYCDPNPNTHRHTDPNHDTHHHHQHGDPNPKHPLAHQALTSIVIINTSMVTSSPNTHRHTDPNNDTHHHQQHGDRSPNTPLGTRTPRPRPFA

SEQ ID NO: 982516 - protein, 53 aa, Homo sapiens
YAVEQPYSCRPGEAALWCLKDRLLLPIPSGISATIHAHAMEAHMCSGYLSSEF

SEQ ID NO: 982517 - protein, 75 aa, Homo sapiens
LREDMIATVSASVCLSLLVRHSNEDVMSCGLLMRMTAPVKLQWGLDENGCNYEGYVADGRVCNELILCVLFVICA

SEQ ID NO: 982518 - protein, 161 aa, Homo sapiens
TSNICSLNTVSDIFSRLLRRMAYEKNKRVGIHHPGIVGIAVIALTGYRDVIGAVDVEQIGVGVIDLRKLQVVIIQQLFHQADHRQRGDFLPNPELSGDLIVQMFADAGNSFARRPIGGQTLRSGDLRIDQAHAFEAVRLQVSLHGFGDIFGALTFVQGDPS

SEQ ID NO: 982519 - protein, 46 aa, Homo sapiens
FTAENAGYYKMQSYFELARRYEENRANVIHVLSFIFYYEDIKKENK

SEQ ID NO: 982520 - protein, 70 aa, Homo sapiens
GSIRKAHPNTSVSRIRSIITGAHHSLIENNRTQIIKHGYQQYTGVYYFTLLNKYSEYYRVHPITIFRSGY

SEQ ID NO: 982521 - protein, 53 aa, Homo sapiens
IPTLLVFAAQHRISAMGKSKSNTFEQQEEFSLLEERVYTVSGRVIIAPGEKNK

SEQ ID NO: 982522 - protein, 50 aa, Homo sapiens
TGFGAGMGGQLGVSKEKIGSHLHPTPAGCGPPSCSLPLCDSPVSIPHPWK

SEQ ID NO: 982523 - protein, 65 aa, Homo sapiens
TIASSSSVRNLVADIRRDVNVAFTGSHFRHLYMHIGLVIIVPAHPLCFKSLVVHPIALTEVKAHK

SEQ ID NO: 982524 - protein, 53 aa, Homo sapiens
  misc_feature (48)..(48): Xaa can be any naturally occurring amino acid
NGNNALNDLTLDRHALNDLTLEDRGMESHCEKWNRQPSALTNTQFLIXCEGVL

SEQ ID NO: 982525 - protein, 41 aa, Homo sapiens
  misc_feature (25)..(25): Xaa can be any naturally occurring amino acid
AYGTMLTFFEELPAVRSDITDCTSXSSSIMRFSVSHPWEQF

SEQ ID NO: 982526 - protein, 126 aa, Homo sapiens
MIPLPTDKELTDMSLNQPMLDAILPSESIKKPRRVMTGESGLTAMECALHLDNNCSSVTSGTAQIGPLSKMTPNECEFIDDTFTVNAHGKAIKELVDQGYQVLRYMVAPEVWLGGKISYYDISVLG

SEQ ID NO: 982527 - protein, 46 aa, Homo sapiens
MRRDQGRRRQKSGLRAWTEMNGIKELDSGQAWWLTPFIPALVRLDG

SEQ ID NO: 982528 - protein, 70 aa, Homo sapiens
LSELLFMKSIGTANRPMGAGEALRMSAVCAWLSGIVMPNGSWHLSALVIQEATDAIGHLDGTATVEDITQ

SEQ ID NO: 982529 - protein, 80 aa, Homo sapiens
WRLRDSLRTALINSTGEEVGMLQLVRSVTVVEDDYALGWRLPAPSPPRYVVAAAEAEPALWPPSQVLGCQPLPQPSPLVG

SEQ ID NO: 982530 - protein, 41 aa, Homo sapiens
MTCGLRGCRAKLGHETLNVLLSAEIYTVCLVAVCNSCQSPV

SEQ ID NO: 982531 - protein, 46 aa, Homo sapiens
DSCVTAQSSSSYRGGAWADLVSVDQEEFVSSSMVMKNNILIFGLFE

SEQ ID NO: 982532 - protein, 69 aa, Homo sapiens
KHPQLSSDSLVLGTSTPSVDVYAMKRHDSSPKKEVYFIVPSFDILNAITYTNEESVHMLDNNGFYTAAG

SEQ ID NO: 982533 - protein, 31 aa, Homo sapiens
MGLNRSDYMYQRSCNGPQPWNMIEINTISAS

SEQ ID NO: 982534 - protein, 35 aa, Homo sapiens
SRGVSSLQRLLTPAVTPHSTRLLTPGGYSSTGRVS

SEQ ID NO: 982535 - protein, 33 aa, Homo sapiens
ACGQDINTGRLPVEMSGNAEPQESSVSPEALCD

SEQ ID NO: 982536 - protein, 46 aa, Homo sapiens
MTQDSQTPGEDHNPTQTNKSTPTNQPRPPPPHQQNPHIKATTPHTP

SEQ ID NO: 982537 - protein, 40 aa, Homo sapiens
MWWVLGLGVTVVVVLMGIMVGVCVLLGVGVAVTVAGVVAG

SEQ ID NO: 982538 - protein, 38 aa, Homo sapiens
LLLTNTHDVSSSSSTDTCHPAPPLQTHSSGYTLFVEVA

SEQ ID NO: 982539 - protein, 59 aa, Homo sapiens
ETPRYVAGGLDGCVEERSDFPLDGNWPLRGNWWGICAIEDIQGDWVNAVGTRWVLYFTF

SEQ ID NO: 982540 - protein, 51 aa, Homo sapiens
CDISEDPGIPRYGRGGHARPVSHLQVSSGVYEPVVIEMPLRSRCPELDDRV

SEQ ID NO: 982541 - protein, 33 aa, Homo sapiens
SQDEKLRQATVQTDLLTNPYPVNHLFTQLTTPV

SEQ ID NO: 982542 - protein, 50 aa, Homo sapiens
RGSVNTRYGAGRIGVLDEGKMKLDYILGLNDRGFLRDDCLHDPVSSMLGF

SEQ ID NO: 982543 - protein, 43 aa, Homo sapiens
YVTHHEFPLCFCLPMALFTIFLGLTLCASWGLDESLPVRGLLP

SEQ ID NO: 982544 - protein, 46 aa, Homo sapiens
LLRIRNTLLCGPSPAALGGQAEMDSFCVPMWGPSQPCISVPVAGCF

SEQ ID NO: 982545 - protein, 37 aa, Homo sapiens
MWGVGVGVPVLVVVLGVMGWLVCVPVCVGVGVPVAGC

SEQ ID NO: 982546 - protein, 62 aa, Homo sapiens
WGYYETTLRPASVHQSADGGGLADVLVVATYQKDAPQDNMATPRTRGQQFLLCLIFCGTPAL

SEQ ID NO: 982547 - protein, 55 aa, Homo sapiens
RGSGYYPLRKLVVPAPGGHHIDAELSADPDRIAHYSPELLGSSDPPTSAHRSWVL

SEQ ID NO: 982548 - protein, 70 aa, Homo sapiens
SNNSTELTKKFQNNRYERMIDKGEGVSDGRMTNRGKDAVFSSGSCYLCFEIPCTVSGIINDQSMCVEKVD

SEQ ID NO: 982549 - protein, 65 aa, Homo sapiens
MCILGSKRWACRKIRVRWARASDIVSEPFPQRLAYVSPVAPPVEGLGRGSKSSALAAGLPGTAAR

SEQ ID NO: 982550 - protein, 52 aa, Homo sapiens
SVSLLYNQVDTRTFQEHQPFQGQQLLAFEALEFLPEKELKKSVISILEKGDQ

SEQ ID NO: 982551 - protein, 61 aa, Homo sapiens
PGMPRNDGDVFQKFGFHGHIPPSLKAQPDSAVSSSDCDITAWSVVPGYLSLEILEYVDHTL

SEQ ID NO: 982552 - protein, 76 aa, Homo sapiens
LEYPRLPRKTGGRLEAGGWRSGGWRDGGEERSSPLDKGTCEFAYKCSIISGQCWVAIFRSAGHQFKVTPVCVLRGS

SEQ ID NO: 982553 - protein, 84 aa, Homo sapiens
  misc_feature (1)..(1): Xaa can be any naturally occurring amino acid
XKSPGSNKTQQVNCETGTGTNWRSCGGCRQPPRDVYVTRNDSNSLCIWNPELSELQTALTQSPVDVLFRPDTPFISLPDSSGAG

SEQ ID NO: 982554 - protein, 85 aa, Homo sapiens
SPRKTTLCHALRWYYHIYVLRNGIGLACQAVKKALGKYCPAICKTLQELELPVVQMIITFTSLDLIIRRKVKNADRLREERLAGA

SEQ ID NO: 982555 - protein, 38 aa, Homo sapiens
ASRRRLAGAAPPVIVSEEAVAGIKEDPVVLVEFVLRGL

SEQ ID NO: 982556 - protein, 152 aa, Homo sapiens
GSRFKTCREHDPNDKGSNSPPGNTPSEVTAHETSPHAELMCRVSPPSGVHYPVGHTAWASSSHLVLSPLQARSLSLSTLLPPALPGTEERQQSFSVVAASPGHTLRNGLWPARRVLEEHSTLFMATMCMAHVDLLRTRRHRDEAVFPGLQTG

SEQ ID NO: 982557 - protein, 54 aa, Homo sapiens
GSARRDAVRLSFFPVDHRPAKDWLQLFDVLRGLPLYTCERDELASWGVPVLRGL

SEQ ID NO: 982558 - protein, 64 aa, Homo sapiens
CHRETRQDRKKLDSIGKGDEVLTTGVLIGRVTKCGLDTGIIAIALNDTTEVMIKRDFVAAVLPK

SEQ ID NO: 982559 - protein, 90 aa, Homo sapiens
QLRETETEALLGSVFRSRVCVYRWLWPLQAAVEHWRVPRTTLGWAPEDVGCPSCGGCRLAAQPPQDAEMPLLAAKWVSLLPAGLDVFRGL

SEQ ID NO: 982560 - protein, 48 aa, Homo sapiens
PRVYTGSAGIIGMSLCTSPRETFCCGSVLLHVCEEETKAQPWCEGHMF

SEQ ID NO: 982561 - protein, 51 aa, Homo sapiens
PRKTGSPRANLYRECIILQAKVRWRHDGGARETLGWLPALKARLECRNGIS

SEQ ID NO: 982562 - protein, 55 aa, Homo sapiens
GVRPTGPRGERGPRGITGKPGPKDVFGLLGGGRREPKLQGYRDVERLRVSVHLFY

SEQ ID NO: 982563 - protein, 111 aa, Homo sapiens
MAPVCCICFFVILPLNLVGTILGRNLSGQPNFPCRVNAVPRPIPEKKWFMEPTVIVCLGGILPFGSIFIEMYFIFTSFWAYKIYYVYGFMMLGLVILCIVTVCVTIGSHIF

SEQ ID NO: 982564 - protein, 42 aa, Homo sapiens
SYRIELLPDVILALHRFPMREPHCLAVDHQPQGDRGLLAAVL

SEQ ID NO: 982565 - protein, 58 aa, Homo sapiens
ETLRIPVGVVHQSLFASSSRIPHLNPQVWDISTPSLATDHMPITIPLKPNHPYPARRQ

SEQ ID NO: 982566 - protein, 45 aa, Homo sapiens
PTSPTGPLARQPDSRLARQAAFWVMRMFWNQMGWLSGVGAVGLVG

SEQ ID NO: 982567 - protein, 117 aa, Homo sapiens
GHPQLPTAAQCSTDHSTVPWQYHRTNPLVNESTTFQSSPGSTHTKLFPDSTTSSGIVEASTLRHSMHWLTTHNTVPCQLHKPWTSGRIYRLPDPPSLNSHDAFTPRQQCAIETSKTR

SEQ ID NO: 982568 - protein, 52 aa, Homo sapiens
PIADTARAGDVKAPSDFSSLCCNLCVLKHTPGKSLLPFEGESSLLLLTLLKL

SEQ ID NO: 982569 - protein, 39 aa, Homo sapiens
SIFTILLTMNIDLKNNYEMLLSLVKQHQETINTLAYEIS

SEQ ID NO: 982570 - protein, 45 aa, Homo sapiens
LAMLHWDGRGENEHTRYTDTTCVLRYAFSMILCSLVSAIETSKPR

SEQ ID NO: 982571 - protein, 91 aa, Homo sapiens
NTRYVNTPATWNTPLRGTGTLPRLVHALGAHCGALVLSAISSRFSLAPSERGLECNLSVLVSLSLVTLAQVEPVVLSCHSLMQPLGDELWG

SEQ ID NO: 982572 - protein, 33 aa, Homo sapiens
PATEPCIEVAPGGLARELTEVRGALPEQVVGLE

SEQ ID NO: 982573 - protein, 82 aa, Homo sapiens
SGLHMGPMVFFKFYGSLPVTHALAYWVCSLVITGVLYSGTIVSVMSPSVNAHQAGCTSSNIIHGQYQSYHRQLHFHVSFVHL

SEQ ID NO: 982574 - protein, 64 aa, Homo sapiens
PTCYETRQAVACCRRSGRFPEAGNVMLSARGDAGGWGLRGLAVALLSAVSASDLELTPPAIRGL

SEQ ID NO: 982575 - protein, 100 aa, Homo sapiens
VRVRSCIQHLEASRWITESEFKNNWQHGKTPSLLKIQKLGQMRWLSTFPTLWEVKTVGSIEVQEFENSLASMVKPWLSLLKIQKLAGHSGDAYNSSYLGC

SEQ ID NO: 982576 - protein, 59 aa, Homo sapiens
TCALYSDLYAFLHDDKAGSDYDPLKLTCGDEARMTQRDEMTLWSFNLLVQTVPTLRTLV

SEQ ID NO: 982577 - protein, 65 aa, Homo sapiens
  misc_feature (33)..(33): Xaa can be any naturally occurring amino acid
VVWGISAFLQLSSATRKGTARPGVYDLLHAQLXWPHVEWGWRLGTGQRTRFGPGWAGPAPGRTLG

SEQ ID NO: 982578 - protein, 145 aa, Homo sapiens
SVSSTSAGVSLEAVEETHRIKSQAPTAGLGQQADSALGRMPQGLADFLAHGIAQAHAVACEFTQVILLAETEGRQAPRAGQRREPQYFILFTEVQVQQADAVAKGVGLGRKPAMGDPAAVEGAVHRVSPKRLGHAQSADHAVFVK

SEQ ID NO: 982579 - protein, 75 aa, Homo sapiens
MIHTSPASPLVLHATYTAGSISSSPAPPLVHRYLLAGSISSSPAPPECTDTYKQAPISSSHSSSHVVRGYLSVRH

SEQ ID NO: 982580 - protein, 56 aa, Homo sapiens
QTSHIAQCERATGRHEGLDGMLPPSVTEKETVKLMLNKSSRHVQNDKAAELEPQRL

SEQ ID NO: 982581 - protein, 35 aa, Homo sapiens
QHPLGTGGPRSREAHHIDANLVRTPERHSALQPRT

SEQ ID NO: 982582 - protein, 102 aa, Homo sapiens
MAPLIGAREGEVVITDTTSINLFKVLSAVLSVQRQRTPARKVIVSEASNFPTDLYIAEGLAELLQQGYSLRLVNSPAELPQAIDADVAVVMLTHVYYKTGYM

SEQ ID NO: 982583 - protein, 100 aa, Homo sapiens
IVEQAIPSVSCPHLWYKCAKGQEANGRAWLGSGGKWDGDSQSGGNENQQMNQCEARGCHMPPYEHESRNRGYSTGLSSPQSPRAVLPKFLHPLGRGYRSL

SEQ ID NO: 982584 - protein, 39 aa, Homo sapiens
IVYSGRFQASNSSLCDTSAGPRDHFSGRRPSSSSLGRGT

SEQ ID NO: 982585 - protein, 50 aa, Homo sapiens
PRDPSLILLAGSTRLSSNSDWQDQPGGRRIRTGRINQVVDEFGLAGSTRL

SEQ ID NO: 982586 - protein, 36 aa, Homo sapiens
DPSQDEKLPKDENIAASSHLRITVSDFTDPPIPHPW

SEQ ID NO: 982587 - protein, 119 aa, Homo sapiens
MRQGQDEAQDSALEVQEKKGLKRESCHFNHSSRKATTRKTRVLGIVVKEVSRVLKELVSEEPGQEPERGPEKVQGRVQTMRLPLPDSGCESKGAGQSGVVWIDAGWDRRGQKPVEGLRK

SEQ ID NO: 982588 - protein, 40 aa, Homo sapiens
PLKTVAWVEKYYGTEDSALDGGISWNFSFPALLSFGCVKV

SEQ ID NO: 982589 - protein, 81 aa, Homo sapiens
MQWSLTRLVVLSLFVDDRRKMRDQRCSVISRKGLEVTPQSADYLETPEQETHGTSRNSGHSDSFATSRAEPTEQINYLSTP

SEQ ID NO: 982590 - protein, 66 aa, Homo sapiens
IAAALIRLDMKTVYCVRLGILKDGGGIVCALSGILDGAEDRAKALPECFLHPERKLEVRVEWGGQA

SEQ ID NO: 982591 - protein, 67 aa, Homo sapiens
WYAKVRVRVCQVGSVLMVPVRCEVRCKLQDKSDEQNCGSASLIDQFRCVIGQCIGKHKKCDHNVDCR

SEQ ID NO: 982592 - protein, 41 aa, Homo sapiens
QTLLELLGHVVVADGVQLQQLVDLRACWLLYMGCDRYRRPR

SEQ ID NO: 982593 - protein, 46 aa, Homo sapiens
MDRAGRRDDIKKSVSSFTLAYEQAHENSLSLDLTLCSNHLCWEATR

SEQ ID NO: 982594 - protein, 35 aa, Homo sapiens
AEVTTGLRFPVQMKRFVPLMMKVICKEPTLCKEPT

SEQ ID NO: 982595 - protein, 48 aa, Homo sapiens
EKSSFSLIPHALDNAAFSIMSVEGHMAVVHVCDPCMSHATWLRLWTGY

SEQ ID NO: 982596 - protein, 78 aa, Homo sapiens
MPLYWISHTDSHMHARYARAEVTRLIAVSGKKAAKMALIFLNVWMMSATCLTTGFLCNAHCVLVEPSQIYPAFAVGFV

SEQ ID NO: 982597 - protein, 121 aa, Homo sapiens
MASPYPGSEKLRSLVLAGIHIAEATGNVATGTHRMLRGSCARSSEYHDSRLSALVAPLPSAVVCWLSGALHKKRNSESVLPLRTYKNSSNDEIIAGQQREAGGTVQEELEAVCWSEHVGYR

SEQ ID NO: 982598 - protein, 184 aa, Homo sapiens
LFDPPHRLHLLLPGHVNTALALAGSNKWDIIFCGLGVIMLVDQPDTQEVFIGEGCHHSGLVLCPTPSQPPMAGPLHDLIEVAGTVETLDKEVVSREDTPTILRHHEEDIGEDRRIWVTNNVDGEGIQWGEIWWSCDTENGRCPRTASEARACGRIGHPASLYVILGEAWPSDSFVPVVKVAFLE

SEQ ID NO: 982599 - protein, 46 aa, Homo sapiens
YCWSALELSPACHGWYGSEEWLRLAVEVEPYGQHDARTAIGGSEHK

SEQ ID NO: 982600 - protein, 34 aa, Homo sapiens
MHNHPQDTSISLPIHILHSLHLELCLQLGMMGTG

SEQ ID NO: 982601 - protein, 112 aa, Homo sapiens
IVVLLSEFVHTHVVFSKLVYPVTTKELRKVQEYFEKCRHNISKHALSLTKSCNIPDSEILNGNQFMLKLKIWQAPYAFSTRVSPDFPITHTLSPVQGACLLLVYACLLGTRA

SEQ ID NO: 982602 - protein, 34 aa, Homo sapiens
MSITLSDHPPRRSRYAFGGSLPVQAQSSVMVCPL

SEQ ID NO: 982603 - protein, 78 aa, Homo sapiens
SCRISRHCGKHGDGITQDDLTGLVAHSAESWWSGLKTFKRINFFLAFFFFLSGSEFLGGCRYYGVVEPIRNRISIGYW

SEQ ID NO: 982604 - protein, 39 aa, Homo sapiens
GSPRKTAKGTEKPDCDGGSAIGLLFGLLTEILLLVLRGL

SEQ ID NO: 982605 - protein, 82 aa, Homo sapiens
QPHGRTTEDHSSSWVLETCGLRQDVRYEMGREHRDRRLSCENRKPVLTNEVPYAHLPQLPCGCFQVKVRLAWGLLGEPPCLD

SEQ ID NO: 982606 - protein, 40 aa, Homo sapiens
SPRSPRKTRRRISGEEAEEKAVRQSPHHLRLLSSLSRLAW

SEQ ID NO: 982607 - protein, 142 aa, Homo sapiens
EDPASPQDGALLKRISCSSKSWLDVLREKGAIIVAQRVDLVVLGALISQGHTGLDTIWLVGFQNCVMGGRTLHVPVISVNYSFQHDKMCQEEPTSEASSGTGTALGRHAIHDIGHIYRVDLGNVIGVLPACLMISAPLQGPG

SEQ ID NO: 982608 - protein, 42 aa, Homo sapiens
LKLREPRTSLRGQLLCHSKLLGSAERQQLPVASPNTLGDKYI

SEQ ID NO: 982609 - protein, 39 aa, Homo sapiens
MLISGGARYLSGQVCYASGGVVTGDPFVVWLGVAIFPMN

SEQ ID NO: 982610 - protein, 56 aa, Homo sapiens
LRGSPAFPARRLCSRHGHVLTIQQQCEDRRPGLRTGPLETVPCHAALRHISRLAGS

SEQ ID NO: 982611 - protein, 33 aa, Homo sapiens
GIICASSHRPVREVLREQDRQAPHCSLQCDRLR

SEQ ID NO: 982612 - protein, 44 aa, Homo sapiens
QPRKTVVDSSSEAWLVVLAGTLLSDVTPGWLREVVDSSPIAYGL

SEQ ID NO: 982613 - protein, 47 aa, Homo sapiens
VQDVLTLYLSTRRWEEMLNRSERVSETRMHSAGDRARSVQKKLLMKK

SEQ ID NO: 982614 - protein, 83 aa, Homo sapiens
PAQPRKTPRFPSHPVDHRHGIVLPDGLDRNAPPYLEPSPVIYRQDARWEKDNWNFSKVDGPHGGGFYVDSLGFPLVCVVSGRE

SEQ ID NO: 982615 - protein, 80 aa, Homo sapiens
PTSPARTVVDSSLRPWRGWCWLVTLLSEYNLVGYRRWWILHRRLRLSCCAGESVVVGDLGLLLDGGRCLYLTPGVLVLAR

SEQ ID NO: 982616 - protein, 58 aa, Homo sapiens
DLEGCLLMRTVMTFLPVVAAVHHHGVCEALHNGTLSFAEASGGIPPCTGDAMTTVEAR

SEQ ID NO: 982617 - protein, 130 aa, Homo sapiens
GFPAAPKHATASLYPDPEDSVTWSRGLLSQRVLPGTLRSSWCALSGVPRSAGCSPPDFQTQLTIEPDILNPCCLYGPGCAYGRPSYLRLLRSCRAAVLRGLAGIPRKTAQPRKTQFVPLPFSLTCCVGYR

SEQ ID NO: 982618 - protein, 62 aa, Homo sapiens
YPASTMDGEKLKSPNRGAGFYTKGKEMGEPKWLEKGSEGGECYRFEITGSRIQSGLRPKGVN

SEQ ID NO: 982619 - protein, 61 aa, Homo sapiens
MPRPLDHLLDLVVLDMAAAMPPGKKSLANDMACSVLRSNHRYSIPCLDHRVGGNRGVLRGL

SEQ ID NO: 982620 - protein, 88 aa, Homo sapiens
GVLQISAEGSVEGRSGVGVPHKVATGALPSGAVRTVPPSSRPQNAKSTDSLYCAPGKATDTQTPAYESSQEGGLYPEKPQEYSFPRLC

SEQ ID NO: 982621 - protein, 43 aa, Homo sapiens
AELPHSRSALVNVDGLRAWIKKKGLDLGKRTKPHDIRCAFNET

SEQ ID NO: 982622 - protein, 110 aa, Homo sapiens
QLSEACMGSGGLVTGNSRVSGRNVGIHNEKETMSNLNYRLCSYLERVRSLETENRRLESNIIREHLENEGSPRLETVAISSQIIEYLRAQIFANTVDDARFVLEIDYARL

SEQ ID NO: 982623 - protein, 47 aa, Homo sapiens
APQDAMYTGIADRMQNGDHRPGAQHHLNINDHLHPQERKYYGVDQVA

SEQ ID NO: 982624 - protein, 38 aa, Homo sapiens
ACDLEDPVYLAVDAGFVLSADRCVPLNNGCGCWANGTY

SEQ ID NO: 982625 - protein, 37 aa, Homo sapiens
RIPGCGGGQLLVVRQLGAPSSYFRSLARWLPAIPRKY

SEQ ID NO: 982626 - protein, 44 aa, Homo sapiens
PEPRQESHQALPPGISAFHAFLFILCGLTGEARTLARLGPLARL

SEQ ID NO: 982627 - protein, 41 aa, Homo sapiens
MSTATKGEGQDFEFRLSGCRSPCFFHCACCFQAPHCCLSGL

SEQ ID NO: 982628 - protein, 44 aa, Homo sapiens
SPRKTPSPRRPAPSPPAVRWPSVLDPFTDYGSSLTVTLPVLRGL

SEQ ID NO: 982629 - protein, 46 aa, Homo sapiens
  misc_feature (44)..(44): Xaa can be any naturally occurring amino acid
VGTTGAHPKCPANFRIFSRDRVSPVLAMDGLKSLDLGDHALSRXSQ

SEQ ID NO: 982630 - protein, 40 aa, Homo sapiens
PRYGGEHPCTVIPTPTPPVTDPNIDTHHHHHYGEPKPNTH

SEQ ID NO: 982631 - protein, 64 aa, Homo sapiens
ELTYFDPDCLDKALQPEDMTRVHSSVYQSVHFVILKEASSPWLCAYGCKGQDSAAGFAFLIPAI

SEQ ID NO: 982632 - protein, 86 aa, Homo sapiens
EWNRHRRSYTGGQRNGTGTEDLTLEDRGMEQALKIFTGGQRNGTGTEDLTLEDRGMEQALKIFTEGQRNGTGTEDLTLEDRGMEQA

SEQ ID NO: 982633 - protein, 84 aa, Homo sapiens
DANEPSPVISLCLSDDKPLPAPAQQLPEAVDETQSPTKSQSSPAKLQSQAEGSLRFFPPDEPEFTSRKSQCITPRVTHLLIGFR

SEQ ID NO: 982634 - protein, 134 aa, Homo sapiens
SCMLSVGDCSGHEKSMMHGQREAIMDGWIKNNDIRSIGSRTKSVVYSDKEWGCSDRQGLPGSDRLGGAGAYRSGNDAAYREESVTREWTIAGREAASTQSGRSRDSTVHGGRGQAERRDDSDGSNRAVRGKVRL

SEQ ID NO: 982635 - protein, 102 aa, Homo sapiens
VGVMATWSAHLPYYVVDLLLDTAWTDMRPHNGSCTHGVSVPLTLTSMPPNVWTEVTAYMDRWSQPVLVSPWVVPSKVHWAPCLVPIPPSGALHLFPQLVGVP

SEQ ID NO: 982636 - protein, 33 aa, Homo sapiens
CFDLEDPALLSAGGSPGATARACEVTNSLRKIS

SEQ ID NO: 982637 - protein, 66 aa, Homo sapiens
MPGLSCRFYQHKFPEVEDVVMVNVRSIAEMGAYVSLLEYNNIEGMILLSELSRRRIRSINKLIRIG

SEQ ID NO: 982638 - protein, 49 aa, Homo sapiens
DWQHHNFPSFITGHMHNPIKPVKHAFQQAVPCMQACTFHIMSSNNMGAS

SEQ ID NO: 982639 - protein, 86 aa, Homo sapiens
RGACAGRDACYVATLTPTFYIPSMGLRHGSRLVNHLIGNIHTHLGHYRVDLDVSKCTKNSFQTLQMKLENITNPWSPRHRVVQPTL

SEQ ID NO: 982640 - protein, 30 aa, Homo sapiens
MGYTPGSLAVKPGVECDCLVGHLRLAEVAL

SEQ ID NO: 982641 - protein, 34 aa, Homo sapiens
WPWHLTPSGIQRLGPFNASGPFNASDLRREAIQR

SEQ ID NO: 982642 - protein, 46 aa, Homo sapiens
GLLSSPLCYPTGPFNASGPFNASGHSTPPAIQRLRAIQSLRAIQRL

SEQ ID NO: 982643 - protein, 89 aa, Homo sapiens
MSCLKAVQLETLLGKLMFLFESCAAGDLAGELMSSMRAVRLEPGGELMFQFEGRAPGDPGRKLMFQFEGCAAEIPGVALMFQFDGHSTP

SEQ ID NO: 982644 - protein, 134 aa, Homo sapiens
FSVSPASGRACYSFVTWDHVSVRLSLWLHSKGVEYIPFYAGSLGAFLRDLENSFSTLSTVCRFVIFQPCVILQCQGHSTQVTLPSFSPSASSPQGPNLEVKVSPNSVPNKTRANPILQARHQTQTQTQTQLQQK

SEQ ID NO: 982645 - protein, 30 aa, Homo sapiens
MSTQRVANTSTSDHGSTSCSCSRCSSGYRA

SEQ ID NO: 982646 - protein, 99 aa, Homo sapiens
MRARLSFPCHDRKCRRDLPLPCDQIQTVTVQAARIDTNSQFPNRLNLVGAINYMVADGDFLIFCVVLDCDRPVHGPQYRPLAPELQLAPELAARPLSCS

SEQ ID NO: 982647 - protein, 130 aa, Homo sapiens
MGEEVEAGAAEDKKERSRMRRAFVHPPGEKSSENYQIVKGILERLNKMCGVGEQMRKKQQRLLKNMDAHKVMLDLLQIPYDKGDAKMMEILRYTHQFLQKFCAGNPGNQALLHKKLHLFLTPGLLEAETM

SEQ ID NO: 982648 - protein, 73 aa, Homo sapiens
MNFSRKVSFSCSLHMFTTWWSLYTFMGSAISPFMLMNLMRCWSASYSMGVITGSWRICFSRFSCSERPSMISE

SEQ ID NO: 982649 - protein, 125 aa, Homo sapiens
MLSLLLLLPACSRKEYFSSSTCLSLVRRLSFWRFSSCSNSCMFCSWDSSAETFLGELVGLARRIWVTLLGHVVQLHLQLGDLVGQLCAHALSLVELELQLLQLRLHFLALVLRVPFALQLAPELG

SEQ ID NO: 982650 - protein, 123 aa, Homo sapiens
SVALRIPPQVRAAARAASHTCLPSLQVDGGITLENGHLHRQSLVAVLELYREGRGASSDVTRLLETLSQMERYQQHSMVFLGRLSRTKSELSLKMYQEEIQEWYEEHAREQEQLALSCSSPLI

SEQ ID NO: 982651 - protein, 117 aa, Homo sapiens
TQLRAAYSCLIILGMAEETCWTLSSRGVPGRSGSSAKDQNTEVGLLSSDPLDRRGSLRGPAPASALLEGRPASELRRERPISSCSFQQRPERSPRPLQLRSLSRLQCFNMSESCSSP

SEQ ID NO: 982652 - protein, 64 aa, Homo sapiens
SSSLYYEEDAETVGVVQRLKLPRPVLTTRHTYTPNPHTSNYETISLLIQPIALAIQRLRDIQRL

SEQ ID NO: 982653 - protein, 69 aa, Homo sapiens
MEVAIPCLHCETNPSHISSTQQLPNACTAVAIQRLRPFNASGPFNASGPFNASGPFNASGPFNASGPIQ

SEQ ID NO: 982654 - protein, 51 aa, Homo sapiens
PLRTLSPEAPQDREQRQPWYKIRMTDGVTHTDIQESLPHCASNLVHSRPKV

SEQ ID NO: 982655 - protein, 62 aa, Homo sapiens
LCECCLLVLDHAWPFNASVTISTPTGPFNASGPFNASGPFNASGPYNASGPFNASGPIQRLR

SEQ ID NO: 982656 - protein, 145 aa, Homo sapiens
QVITFSPVWDEEPFDIPEVVLPTACIHFSIAAFEEGGKFVGHRILPVSAIRSGYHYVCLRNEANQTLCVPVRMFIYTESSDYIPDDHQDYAEDLINPNLARQPDETEGPEVGPALIGESEAQAGQETCHETRSQQLGSQPVSKPI

SEQ ID NO: 982657 - protein, 38 aa, Homo sapiens
LAAPVDEGGSIIVDVVNEVVVVGDGVLWAWLCTGEART

SEQ ID NO: 982658 - protein, 131 aa, Homo sapiens
PLPDHTLYDRIPIVLRVPLEASVTLLEATTPVKLPTVHWARNARVSSQIVKGPYFNSDSKTTGVAHSQSPAYPTHLIPGYNIKLSKGSRGLFVPLRVIGIFTDTTISPSSRLRQCPDRYTIRVWTGSGVPS

SEQ ID NO: 982659 - protein, 71 aa, Homo sapiens
KGLWELRKGFLEEAAIELEDGWEVDGEENGTWRAQGYFACEVRVQKSMECLRGEPIYLDNIIGSLKLCVCV

SEQ ID NO: 982660 - protein, 54 aa, Homo sapiens
  misc_feature (42)..(42): Xaa can be any naturally occurring amino acid
MTNTSFQQVWDNPYPNLDQITSKNPTGKEQQVRIYQEVLEVXRPSLSALYLNHL

SEQ ID NO: 982661 - protein, 125 aa, Homo sapiens
SASLASGREFDNLNQSALWLRVDCSIHSGLLSFQVRKLELSRALAASRIPCFGQQPELLCSCSTADVRMWREGWSSVRQMPDSQLGSYHYVLFRHGSLALQEHVSQLKVTDNNLGPCVWRPGNST

SEQ ID NO: 982662 - protein, 43 aa, Homo sapiens
LGSGYLENTIQPSMCLFPNSNETQDGEQQENPVQDPASSLRVP

SEQ ID NO: 982663 - protein, 40 aa, Homo sapiens
VLRRSRGPPPKHEELMTDHIGLQIGFSKMSRKLDFYVQKF

SEQ ID NO: 982664 - protein, 41 aa, Homo sapiens
EPRPRDEKVLMARTASMSHHTWRILFLILCMWWITLLNSDS

SEQ ID NO: 982665 - protein, 57 aa, Homo sapiens
HKELLYLYLHVKHLLIDLLHGHPDHGRTAATCEVSAVREVLPVAVMYAVAWCSRTCV

SEQ ID NO: 982666 - protein, 69 aa, Homo sapiens
MDPALPSHCTRLSAHPHSHKTSAPYLSTASAQNEEPGNSDPETLSNPRSSASPIMTKEYHDLQRLDNEG

SEQ ID NO: 982667 - protein, 60 aa, Homo sapiens
MQRDIACGEYHRDMPVLAGPCTGTSKVAVQAVQAMNRICVLAVDLQRVRHIKATDLRPIY

SEQ ID NO: 982668 - protein, 54 aa, Homo sapiens
MDILDDSDLRELGGLNRLSLMATRMLWNSSNLQDVQMNSSSSFYSPAKNFETYD

SEQ ID NO: 982669 - protein, 43 aa, Homo sapiens
HDCDDLLGEREQFDLHVFLHAELGEGLLDVRRAVQVGWRLLEY

SEQ ID NO: 982670 - protein, 76 aa, Homo sapiens
TSPGGAWSIALRQELIDNQTRITQEAGSVSPAYSSQVAATHIILLLDTGSEAYQACLAASSCQQVSWLYPCKRHAT

SEQ ID NO: 982671 - protein, 46 aa, Homo sapiens
GGVSVVVVVMGVMVGVCVPVGVGVGVTVVVVAMGVGIGVCVPYRGV

SEQ ID NO: 982672 - protein, 54 aa, Homo sapiens
PLRDTRYGHPHTVATVHPHTVATCHPHTVTTVHPHTVTTVHPHTVTTAHPRSGG

SEQ ID NO: 982673 - protein, 56 aa, Homo sapiens
  misc_feature (46)..(46): Xaa can be any naturally occurring amino acid
QNSVHDSGYEVHHQKLVSLQKMWVQTKVQSLGLMDGRCSHTDSDRXSPLVIAEARN

SEQ ID NO: 982674 - protein, 67 aa, Homo sapiens
ESVPELKNSDSTHGNTQQAQLVENVKSMKNQSVKQNRVGVKRRQEGYVQTCVFGRLQELLESLSDPA

SEQ ID NO: 982675 - protein, 35 aa, Homo sapiens
NLLDLIELKHKARDKPYDSKKFADCTSEGDHNALS

SEQ ID NO: 982676 - protein, 93 aa, Homo sapiens
SAGGEWIQRHPLDGHLGPHLHDTLISIKCPVSRWQPEVCNFDMVGTLDQDVPSGQVPVYEPHILQVAHPLGNLHTPVQQVLGAQASAVFPDMV

SEQ ID NO: 982677 - protein, 86 aa, Homo sapiens
SPSRVEQAQLNDIWRSALVLTCRRELVQCRHAPADGEYTSDQAPSLRILGVSARCSLCRRNLSSGGMHRSGEYTSTWMHACMLGYC

SEQ ID NO: 982678 - protein, 100 aa, Homo sapiens
  misc_feature (45)..(45): Xaa can be any naturally occurring amino acid
KGVRQRRPHVGVTVGRCQSETSLIDWTLREIKRIMIKFQSIVNMXISDRIAWSSCNHLSSFSSHFFSFLPYDQNIDSEASLESINVFHSDARYDYHTIGI

SEQ ID NO: 982679 - protein, 49 aa, Homo sapiens
LRIPDGCDAWDSYQASWFKEALEVPICQTPMARDEGLQNGPPQHPLGWC

SEQ ID NO: 982680 - protein, 52 aa, Homo sapiens
MALSALYDPANFSSASALLLLSFLCDLVTTEMGVMWGRATDTTVLCLAFHVV

SEQ ID NO: 982681 - protein, 34 aa, Homo sapiens
RCLEDPFRCVENEEWCVGAGVPGRQACRKGRYNL

SEQ ID NO: 982682 - protein, 61 aa, Homo sapiens
MTDVRWLASKYSFSLSSWLPTGCLYTLADIAVGATDMVTYRQPSAVLDATQSALWNGSRYT

SEQ ID NO: 982683 - protein, 32 aa, Homo sapiens
MTAAPELQLAPELVAARPELVAARPELAAAPE

SEQ ID NO: 982684 - protein, 60 aa, Homo sapiens
QTVPGSNSSVAFGFLIAMLAALSPKNLSFSFRVAITGVFLRDSLFKTIYNFHRSSPLSCR

SEQ ID NO: 982685 - protein, 53 aa, Homo sapiens
SSPALHAQDRRPPHPGRRHEVRVLRLCTVTQRGGDDPSCTLAPELAARPWVSR

SEQ ID NO: 982686 - protein, 38 aa, Homo sapiens
SSRWADLASGVDLGYDAEKLMELCQEQKAMLRIELKEP

SEQ ID NO: 982687 - protein, 56 aa, Homo sapiens
LYGCIGGGAGLLFATTNLGLGANLVASLSLAAEVMIPLVQLAPGVQQQLAPELGGA

SEQ ID NO: 982688 - protein, 57 aa, Homo sapiens
  misc_feature (5)..(5): Xaa can be any naturally occurring amino acid
RLIAXTCPVDPSDSAQTHPSSRGVPGHPSYRSSGLYPRPSHDQLSIVSNLLKGRPAC

SEQ ID NO: 982689 - protein, 34 aa, Homo sapiens
MLLQPRHCLRTVLTVSGLGISVISKYCSCSCTSA

SEQ ID NO: 982690 - protein, 47 aa, Homo sapiens
GAEAQDIPSLRHIFFVVLAFFAATLALSARHSHSASDHSASFPGHST

SEQ ID NO: 982691 - protein, 76 aa, Homo sapiens
  misc_feature (65)..(65): Xaa can be any naturally occurring amino acid
MRCLTVLHGSWRWLMAGAGAPRFFRIFQHLHFSFIRDRRAPLRPGYHGLRVVSFLISHPTHLSMXSETCPEVPVSR

SEQ ID NO: 982692 - protein, 53 aa, Homo sapiens
GNSSREYFQLCWPRIHYAPPRRLVVPAVHSQSLRGLTLSSASLLLRDSGIQSL

SEQ ID NO: 982693 - protein, 97 aa, Homo sapiens
SRTNLSRPFNASVNGSGPFNAEALNGLQLLQVAAKGIISYLFVAEEYSMVYIYHIFFIHSLLDGQLGWFQIFAIVSCAAPDIIFNSFAFSKYISKSW

SEQ ID NO: 982694 - protein, 51 aa, Homo sapiens
GSPHVGDEARAREASQPESNPLETRNRHQTGTDMEKIWHHTILQMSCNVAS

SEQ ID NO: 982695 - protein, 42 aa, Homo sapiens
VGQVSSAVFPRSVLSDSVGTFMLHCQPSQASEAYQCPAENGS

SEQ ID NO: 982696 - protein, 69 aa, Homo sapiens
AILHKLGSLVENNERVFDHEQGTYGGHFSGDQNDGYRINEGYMRCGGYRQSQSQTATELSTLSPALAIR

SEQ ID NO: 982697 - protein, 55 aa, Homo sapiens
MGLRSKIIPSPFRYSQRGHRTPYLSSYYRNHQPTQFKSIALVRTPNRYTLLQAIQ

SEQ ID NO: 982698 - protein, 65 aa, Homo sapiens
MARMLYSHEKLVGQYIELLQRPQRLVGPYGLLQPFADAIKLFTREPLETGTCTISLYINASGPFK

SEQ ID NO: 982699 - protein, 85 aa, Homo sapiens
MRSGVREPAALFSISSVCCRPFKVGHACEAGQVFKTSSTLDPPAAPSFAEAHSYSHPRNPPAPAGDSSGLWARAIQRLRAYSTPP

SEQ ID NO: 982700 - protein, 62 aa, Homo sapiens
  misc_feature (55)..(55): Xaa can be any naturally occurring amino acid
VRLLWNSMCRNWTCHVKFTWQQNDGTSKEKAQALEDLAGKTPALNTKIACNISTXMTHVDTP

SEQ ID NO: 982701 - protein, 49 aa, Homo sapiens
MRKLVYNMDSSPLFELSKICPMLNALMYNSKRSTSYGFHIPSWMAIQRL

SEQ ID NO: 982702 - protein, 56 aa, Homo sapiens
  misc_feature (27)..(27): Xaa can be any naturally occurring amino acid
TDDSRNPLKKLAIAEEAIGVCRGGRKXVIIEGDLERTEERAELAESRCREMDEQIR

SEQ ID NO: 982703 - protein, 64 aa, Homo sapiens
CRVPKTSPSSPGSTATREVTRVAGRCGTLEECTPAVHMTSSCRGHHHGPFNASGPFNASGPFDA

SEQ ID NO: 982704 - protein, 135 aa, Homo sapiens
HKVYPELHITNLGGANQPVTIQNWCKRGLKQGKTHPHFVIPYRCLVGEVESDALLVPDKCKFLHQERMDVCETHLHWHTVAKETCSEKSTNLHDYGMLLPCGIDKFRGVEFVCCPLAEERDNVYSADAEEDDSVV

SEQ ID NO: 982705 - protein, 37 aa, Homo sapiens
AVVAHAPEHQPGEGGLGLGHQDEEEDWGSFSGDLGGE

SEQ ID NO: 982706 - protein, 41 aa, Homo sapiens
TRTDAGLLDCDYSIISTGIIILVSSTCSKPRLTVPWSIPAP

SEQ ID NO: 982707 - protein, 54 aa, Homo sapiens
YYIFCLVTFTFLVTVFYIHVLAFPGPFNASGPFNASGPFNASGPFNASGHSSPR

SEQ ID NO: 982708 - protein, 51 aa, Homo sapiens
VELRAFMAQRIALKILQAALISESKRSVRWPFKRIVLRQSQVLAPRAFNAS

SEQ ID NO: 982709 - protein, 58 aa, Homo sapiens
  misc_feature (15)..(15): Xaa can be any naturally occurring amino acid
MARSLRFGSSAVLLXSPYSDSLSLRRSPLGLTSQHTANSQAHSSKGTQSREWSKLHSD

SEQ ID NO: 982710 - protein, 38 aa, Homo sapiens
SQLGSGRSDSHQQSESSFPGSPLGDSLCTKAPPGPLTT

SEQ ID NO: 982711 - protein, 36 aa, Homo sapiens
CSCSYSASSCCSLLLYLLLDFDDAIYLDASCQLLLQ

SEQ ID NO: 982712 - protein, 50 aa, Homo sapiens
  misc_feature (38)..(38): Xaa can be any naturally occurring amino acid
RQCELRQSPLKLQFAPESCSYAPELASPINSGRAAGSXFSAWCQVHQFQV

SEQ ID NO: 982713 - protein, 55 aa, Homo sapiens
VGSVSPCRHARQQAQAPPRPSVPLRADRAVRLWVVASLKEQPHHLNVALGSSPLS

SEQ ID NO: 982714 - protein, 39 aa, Homo sapiens
IPITARLGRPSSATEEAEESFEFVVVSLTGQTWHWRGQD

SEQ ID NO: 982715 - protein, 79 aa, Homo sapiens
  misc_feature (3)..(3): Xaa can be any naturally occurring amino acid
MSXPHVEVSRIFFCVAKPSHIAQTATESSPPHKTAGPCGEHSKLSSLAGSGRPHVNAKHDNASLHFTSSSATQRAAFLS

SEQ ID NO: 982716 - protein, 34 aa, Homo sapiens
LAAQCWGLVCVICHLTVYTGEAEDTGEARTLARL

SEQ ID NO: 982717 - protein, 31 aa, Homo sapiens
  misc_feature (29)..(29): Xaa can be any naturally occurring amino acid
RCAVVLAGFAVRSSLPGSRTGAELLGSPXSP

SEQ ID NO: 982718 - protein, 65 aa, Homo sapiens
TGDSRRETQTDLLLEEGRARRKVFHVAKSSLLPASYLFSPFVNLVTSMKTQALLPTVVLNGGSHV

SEQ ID NO: 982719 - protein, 67 aa, Homo sapiens
MATGKFTVASVLMDLLVIATLTVSSMSLPSILIIFTILMLLTILEIAWRLFLGYVCTLLVGLYLRAR

SEQ ID NO: 982720 - protein, 68 aa, Homo sapiens
KPDSVITLPESLGFYEDSCLELQRHCEGGPLLSETSFPEGDMQWKLSVLCPAVPSSIQESTPVDERRN

SEQ ID NO: 982721 - protein, 45 aa, Homo sapiens
MMKVSLAVREVVQITALGFRRLCLITSEAGIHHKPISAIETSNDY

SEQ ID NO: 982722 - protein, 40 aa, Homo sapiens
QSATQQPVTADKQQAHEPVSPRSLQRGGAGEVHHPGPPLT

SEQ ID NO: 982723 - protein, 50 aa, Homo sapiens
MFMIHRHGSFGVAILTISMRTVVIGVLRLLHRKRDHVVARNVDVLRRDRV

SEQ ID NO: 982724 - protein, 53 aa, Homo sapiens
MVEAQARILPDSSHLGVCLWSLVSDEVLCPAIGSSGLPELMGQACTGAGWSLL

SEQ ID NO: 982725 - protein, 68 aa, Homo sapiens
STGDSIARSLPPVRNACLLLPLIPLLHPLNHALPIPLYSCTPDPCPPAPPNPALLRPPHPCPDQLTLR

SEQ ID NO: 982726 - protein, 67 aa, Homo sapiens
RGAASKTKTKAEQDTKRQEDKTQGARLDLQWPKLSPALHTLRALGTPRKSASGHLAGLGCRAVYFLL

SEQ ID NO: 982727 - protein, 70 aa, Homo sapiens
QAPGWQLRFIEESRLREQHEGVVGSQVLLQGPFNASRAIQRLRAIQRPPGIQRLRGHSTPPGPFNGSGRR

SEQ ID NO: 982728 - protein, 67 aa, Homo sapiens
MEFWQFCGQLAQHVSSHRPGGGWCPRCRKLLGAEHVARDGQPEFMLVAGHCTPRIEYKTEVTDIPNA

SEQ ID NO: 982729 - protein, 42 aa, Homo sapiens
SVCAPLSQPDASANTLFQFPSVLNSHGPFNASGPFNASGPFN

SEQ ID NO: 982730 - protein, 43 aa, Homo sapiens
  misc_feature (36)..(36): Xaa can be any naturally occurring amino acid
MGCARTNALILFIQLSGNLSNYNKLSDGNQWHYYLXVFILSLL

SEQ ID NO: 982731 - protein, 61 aa, Homo sapiens
MAPLVLGNLEKEAETTEDRLAGNTEDLGWKRGELGSRASEERGGRVGILGGCRCMRKQHSF

SEQ ID NO: 982732 - protein, 56 aa, Homo sapiens
HCEHTANLESHKLLSRSYSSDSQNGRIIWTEKSQIAQQGPTPVPPSHPKTELFKEG

SEQ ID NO: 982733 - protein, 66 aa, Homo sapiens
VDSIWKEKAVVLRAVEWTVCVPEEEGREREVRALSLTRALEEEQEAREELERQNRALRAELEALAE

SEQ ID NO: 982734 - protein, 58 aa, Homo sapiens
VLLQLHWAAVDVVDSSLRPKVVELAEKWVVGVELGLPWEVVDSSTKADVVEELQLAPE

SEQ ID NO: 982735 - protein, 34 aa, Homo sapiens
SGASCLLSVRAALSERAADSGVGSLRNGYHINGK

SEQ ID NO: 982736 - protein, 44 aa, Homo sapiens
YLGPVAWSCRTGFLRQSGIGLDSRGSMPVMHMYARTCGRMRVGR

SEQ ID NO: 982737 - protein, 41 aa, Homo sapiens
LVKCNSGEPGAPGSKMETLVLRESLALLVFNGPPGPAGEEG

SEQ ID NO: 982738 - protein, 112 aa, Homo sapiens
CLPSGHSAILSPLAGMAAPFLPGSCYHCFAWVWLPSCRGVVTALAGVTVFWAGVAAAFLPWSDSCFSWLVWQLLTLLVGETTTFFAEAAAAFLPLLLRYDDLFSTAIIFFIF

SEQ ID NO: 982739 - protein, 70 aa, Homo sapiens
MDSIIAVVNRAPALTAQGESGSNDAHAWAMVGWEDSSHLTVEGLGPTLMLRMGGVSLLLSRRHHQRRPLL

SEQ ID NO: 982740 - protein, 57 aa, Homo sapiens
PVPDKNKHQKDMNEKWVTRWHTSRSCPSGVCSVSDTPSGPCEPIIQNFCHDVADNQI

SEQ ID NO: 982741 - protein, 110 aa, Homo sapiens
VPGSIIANVPGPSTIIPHRDYLNKGAIACCFHRKFLNDYSQGKILFRAEDSSVVKGLPIPYKDQRDVSSCYPADIISFLSLFFILLKSQLYFIPENMLWMLSPQNIYTLT

SEQ ID NO: 982742 - protein, 47 aa, Homo sapiens
RYRRQCDSTREHAVTNGGDIATSFQAIQVPGSPWDPDRYRPFRAATS

SEQ ID NO: 982743 - protein, 47 aa, Homo sapiens
RYRGMATPCCGYNGCPCLILLIIMCEQIPTYSIFLGKILPLAYDMDG

SEQ ID NO: 982744 - protein, 33 aa, Homo sapiens
MVPAPVTYNSLVVNQLLQNQEPTGSWVAKSNLT

SEQ ID NO: 982745 - protein, 55 aa, Homo sapiens
CRYMDSIIAVSSDSECIRLLLSNKAFLFDACSGGWLQSPGFPDPCASRYLVTCFL

SEQ ID NO: 982746 - protein, 113 aa, Homo sapiens
VWVTEWYQEPKILSCTGLLRPGPRRAGKHLCTAPHDSRPYTRFQFPRGAMAQSHKVLSGNFHVHIKPFHDGLDCLCFPEAGVLSVTLKLSLAPSLRASPRHPDCQALSIHLRD

SEQ ID NO: 982747 - protein, 50 aa, Homo sapiens
RRLNFSTRPAVSHLGLACIERVAGRGDVDVDDGVSIAVLPLDLVELVTVD

SEQ ID NO: 982748 - protein, 71 aa, Homo sapiens
VDSDHRTQRERSQLYGERYVHTHVYSSTIRNCKNVEPTQMPITQCVDQVTVIYIHTMEYSSGHNRSELLAF

SEQ ID NO: 982749 - protein, 35 aa, Homo sapiens
RYLVRLAPVQEFHPYAAQRTRAKAFAKNVFINQEL

SEQ ID NO: 982750 - protein, 54 aa, Homo sapiens
ELAEVREGEPGLGQLPKEELQGSGDNVDVLQAPVIQVKALIVVHLIAELLDGGQ

SEQ ID NO: 982751 - protein, 60 aa, Homo sapiens
PKGKKLPLHLLPAESWDPIFKDASDCDHVISMKRARLCKHWIRRNLVTVNNWHKRRYTGP

SEQ ID NO: 982752 - protein, 132 aa, Homo sapiens
SSARVQLRQSERCRVSGTEEDVTTGWILDDVLEQRKDVGKKLRNLIRMCVLVNNVSNVLETTVPHKGRMLMMGDTGVGHVFKSKKVASSESSERFNKTLETSEEKIPELKAMETVHSDVQGEKGLQKLCRSL

SEQ ID NO: 982753 - protein, 63 aa, Homo sapiens
MIEPSVFGYYEYAWLIELYKSLFQMLLLVLLWYIVEEYKWLDHMIVLFVIFVEKPPYCLPKLD

SEQ ID NO: 982754 - protein, 51 aa, Homo sapiens
PVPGLNGTDGPGPDMVESVQRDSSAADAEPTGTVCGFHLGLPRIGDGGTLV

SEQ ID NO: 982755 - protein, 38 aa, Homo sapiens
SLLSSTVTAEMEGLSPHRLGSSWIFIWSRQVGTAIQRL

SEQ ID NO: 982756 - protein, 44 aa, Homo sapiens
TDIYNTLVAKERVFVIDGNKHALREKDLLVLYTLQYETFPPRRF

SEQ ID NO: 982757 - protein, 57 aa, Homo sapiens
MHLVQPAIGYNMNIISDSLVSTEDLRESGAIGTCKTRFSPNAASAIAENSPESASVL

SEQ ID NO: 982758 - protein, 47 aa, Homo sapiens
PKYEKLTQGMEWILLHPSCLGAPSIMPAVAGKGSELLGSVSSKVPFS

SEQ ID NO: 982759 - protein, 38 aa, Homo sapiens
MLMNDVGIRLLHTHQLDRDSVVSVHTQSSDCPQPSTPG

SEQ ID NO: 982760 - protein, 59 aa, Homo sapiens
MAEALVPPNETTLLLPGGCGVSQDLVTVYDDSIGDSATQQSFHLHGTGQPNFHLSSFQL

SEQ ID NO: 982761 - protein, 48 aa, Homo sapiens
VLRCSLHVQLHLCIMPEDGVAQGSSEKYARRYYPHEWRAAIRSSPHKY

SEQ ID NO: 982762 - protein, 34 aa, Homo sapiens
MSSAEDKYAGWVGPEPGARSGELGTESSDNLDRA

SEQ ID NO: 982763 - protein, 71 aa, Homo sapiens
GVELLPVEVVLCGWSGGVCPCCSALLLPLQHTQEHLSVSKVSFSCLQVLKRTLSSSSGGQCLLMLRLGLRL

SEQ ID NO: 982764 - protein, 51 aa, Homo sapiens
VGRASACLIAARHTRRQVTMDDDSPRSSSTTAPECKAGFAGDDAPRAIQRL

SEQ ID NO: 982765 - protein, 109 aa, Homo sapiens
AGYGSLDSHTDCGDHRIEPTALENLALQLAREMLGSLVQNNERVFDRQAVAPTGRYFHDQKDGYRINEGYMRRVGYRQQQSQTAYLSSPLRFPPGPFNASAEALNGRGL

SEQ ID NO: 982766 - protein, 50 aa, Homo sapiens
MAYAACEDQRIKPLTHRGPQYPWAIQRHGPFNASGPFNASGPFNASGPFN

SEQ ID NO: 982767 - protein, 79 aa, Homo sapiens
GVECAGDALSGPLRALCLLGLLLSQQQRAVRPSSRSPAMLAPKTDKELEVQYLNTFYGCPKESCNLYVLKDTLKKMQKF

SEQ ID NO: 982768 - protein, 35 aa, Homo sapiens
SKGQRPLSKQTSFSANDANTTFLQQYKEETVNIIG

SEQ ID NO: 982769 - protein, 56 aa, Homo sapiens
TVSRDDGLNVPYRHLLLQFSFPYIPSLAPKHKPELGPVGQQGTPAGQADRANASTL

SEQ ID NO: 982770 - protein, 33 aa, Homo sapiens
MQQQDYSASSTTSCDEEPIVNRVLSAALLLCRN

SEQ ID NO: 982771 - protein, 38 aa, Homo sapiens
IFPTAAPLCTVPAVCWCPAPCSLLVHSTMQSDGAQHTV

SEQ ID NO: 982772 - protein, 57 aa, Homo sapiens
TAQSSHQISVDQGEMGWHVSQRWSGSSVQWHQRPYTELRAGIGLVSGEVFLRVALLQ

SEQ ID NO: 982773 - protein, 61 aa, Homo sapiens
FELLEGESDVVCRLRSSKYAAGPFDRMLHSRSTTNIIIINALTTTIFLGTTYDALSPGLEW

SEQ ID NO: 982774 - protein, 49 aa, Homo sapiens
RHASPMENKKRVGDGWRQTMCPLRSADPEREGKGRRQVGFGTGGAGFIH

SEQ ID NO: 982775 - protein, 39 aa, Homo sapiens
MAIFSMNWNAITDRQMTGDWRHAVDNTTHYGLQKLQCPS

SEQ ID NO: 982776 - protein, 43 aa, Homo sapiens
MAISDIAYPNKDVLDTVWQRLSQGYFNEFRHLACGYFSILKKV

SEQ ID NO: 982777 - protein, 55 aa, Homo sapiens
MLTPSQSLISDSTSQLGRQMFVERIQNEGPILNRYSELEVGPVNARITREIRLVV

SEQ ID NO: 982778 - protein, 76 aa, Homo sapiens
GERIITRENAYTTDSADDDNDTSLKNGISSLDKWSKESKCFRNELLENSASIYHRYTFHKNGMNEHSLQYIKYGND

SEQ ID NO: 982779 - protein, 54 aa, Homo sapiens
ASCVKVVSETWASNWLQNIDSAAIVIGDRQKRREICCHSMSSLLKHTSGTYKMP

SEQ ID NO: 982780 - protein, 55 aa, Homo sapiens
LPGSGCGDGLEWPGGQHAWFPRMRAACGSSWSPLWPFNASGPFNASGPFNASGPF

SEQ ID NO: 982781 - protein, 52 aa, Homo sapiens
MAMVCPAYHFTEKIKAKYPDYEVTWVKRLATVALPRPGACVPPRGHFKRLRG

SEQ ID NO: 982782 - protein, 157 aa, Homo sapiens
SYTPFSSVNFSTGLVPRGFPRTRAFTMKLHELPQFKLGLLQHFNFPTEDFRERITEMGSLFYVFPKAVGNQFMDHFFQVIGLDLWGHDSHHLLRDGGDLWVLSIRGLRNLMVAFLSKPNTEQPTQVPMGSLDITVSSNHGLAILGPGTPFGQDFPEG

SEQ ID NO: 982783 - protein, 46 aa, Homo sapiens
MRSAGWRACSPVPCEGLLDLGVPSAHDPPACCGNSVVGDHGRPFNA

SEQ ID NO: 982784 - protein, 122 aa, Homo sapiens
MLMGIHTESHPRTDHKILGRVDGKEATSWGSSYYLHGADKNPSVKFGNHELVQGAPKIEKYIPVGRTVLLGTEAGPASKGGERVPVRQNGFSVVGVSLEVSRHRSHNGTEESFQLFLDSRRV

SEQ ID NO: 982785 - protein, 35 aa, Homo sapiens
SCLTEVSIAQELNGRYISNEFKVEVNVIHTAIQRL

SEQ ID NO: 982786 - protein, 153 aa, Homo sapiens
PSPALAKQSRSDTKAGKAMSTGGLRQVPGVTRVTIGKSKNILLVIQNPDVYKSPGTDTYLVWGEAKIEDESQQAQLAAVEKFTVQGEAVSNFPENTQTPIVQEERDEEEVDNPGVEVRDITWVMSHANVSQAKAVRALKNTSNDLAPAIMDIP

SEQ ID NO: 982787 - protein, 58 aa, Homo sapiens
MSCGACGGPWALSARCGRVLVQEEALVVVPDTPSDPSGPPCRRPPAVSGRRCCPRDWL

SEQ ID NO: 982788 - protein, 70 aa, Homo sapiens
ARLVNGSHGHDAREQVESKVPSFYYRPTPSDCQLLREQWIRGFNGWGFSKIELEGMCKACGTGPVGFTNG

SEQ ID NO: 982789 - protein, 44 aa, Homo sapiens
MLAGVVETQRAVLVCKRIHLWCYCEGINTGAWIKSGDPIKDFVL

SEQ ID NO: 982790 - protein, 57 aa, Homo sapiens
MLPTQHASSCLLLPSAACMPVSPSQPSIMHIGCMPAHTVWHPSSAVCSLPVPCDCVV

SEQ ID NO: 982791 - protein, 45 aa, Homo sapiens
VALSSWIRFMLAPRADLEEYDALALVLQHQFRDLRVAPQRPAQIA

SEQ ID NO: 982792 - protein, 39 aa, Homo sapiens
GVCVIRGHRQYLTKYEVADLHYIVHGNERVSGERTSKIG

SEQ ID NO: 982793 - protein, 41 aa, Homo sapiens
RRQSIAQPVERVIQRVLSSNCHRVSQAAVRYSITLVSGIAS

SEQ ID NO: 982794 - protein, 72 aa, Homo sapiens
GNRCSSKIRHRDTPRIKAGNIAWDATLVQHTQINHVIQHINRTKDKNHMIISLDAEKAFYKIQQPFILTKSQ

SEQ ID NO: 982795 - protein, 38 aa, Homo sapiens
  misc_feature (1)..(1): Xaa can be any naturally occurring amino acid
XLIPLLTATLLRHKMINVRASMRGVLSSSTQNELVMPK

SEQ ID NO: 982796 - protein, 105 aa, Homo sapiens
MEDGGSGTWREHRDMYGCCRVGGDQTTHKECLAKKLSWKAIKYIDQRFSSGDHSVPQGHLATSRHILLMCHNLGEGDCYWHLVQGGQGCREIYASKAQDTSQPRE

SEQ ID NO: 982797 - protein, 38 aa, Homo sapiens
LDKITVPARCCRSTQVVTQTAVMTISAEAIHVARFLQR

SEQ ID NO: 982798 - protein, 51 aa, Homo sapiens
MARISVRVVRHSRRSIVRRSARYSTRLIGQAAVRLRAGMPRFCSPYRCARR

SEQ ID NO: 982799 - protein, 61 aa, Homo sapiens
VETPQGKSVSMTTYEYVPGPLSKCTVYLNVNADGIIYGSRFETGDRDSCDMMKARCRSSKL

SEQ ID NO: 982800 - protein, 52 aa, Homo sapiens
ADVLFTKEQQPEHYEVSPRSSLERYDGIGPPFSVHLQDPELGLVPHPRDDDE

SEQ ID NO: 982801 - protein, 31 aa, Homo sapiens
MVDWNDRTTCVLFGDGAGAVVLKADEDTGIL

SEQ ID NO: 982802 - protein, 67 aa, Homo sapiens
KFNSSTTHTISSPPEHTSALVEEPTSYYSSPGAVAATHFPESSTTSGRSEESTASPGSNVLLKLLKL

SEQ ID NO: 982803 - protein, 109 aa, Homo sapiens
SSAQVLHEQISPMCCCATMALLAERLMLINVRKGNRICFILYELLTVDVLADHVLNPMLVQIYCCTGFLGYYTSVASCYILIYLAVGFVNDNYPQSGLNGRPEKLPDVC

SEQ ID NO: 982804 - protein, 38 aa, Homo sapiens
VLNHLRVKDNPSIALVIRKRQKESYQAVTHACNSRYIW

SEQ ID NO: 982805 - protein, 91 aa, Homo sapiens
YGKSSGQSCGMGIFSGEPGQKIQGCRSRWVITPILPRLAPPVTVHRLPVSNLMKSVIWRVSKSICRVSFTFDEGIGVAEGAGIMSHQMRDS

SEQ ID NO: 982806 - protein, 37 aa, Homo sapiens
MNYSRCIPSYKVLTLSKPFGVCRNMIGHKPVLSGEEV

SEQ ID NO: 982807 - protein, 34 aa, Homo sapiens
MFTRNIIGKGGANIKKIREEMQHQNLSFQQRIAI

SEQ ID NO: 982808 - protein, 67 aa, Homo sapiens
KQGSKHKSSMTGGSVWNMQLLITFTPGKEGCLLAVHGALVDKHLFTADVPSSRIICCGLLKLLMLDD

SEQ ID NO: 982809 - protein, 76 aa, Homo sapiens
SYCLGTIYFDFWDKLRVLESTSSDIIGRSRWAVTRSRKGRRASLSGGDSPRALAGASDPTGFKNVNKGSALSQRLG

SEQ ID NO: 982810 - protein, 41 aa, Homo sapiens
LLRIPLPSDEKVVVRTGQMHKVIQVLQIVHNQQSIVTQVQF

SEQ ID NO: 982811 - protein, 110 aa, Homo sapiens
SSARLTVIQDAILARLEAYLICSVCSNYAQYSTKLIFAISPRKLAPYFTVSVMNVQLRTRTVTGRTLIITELGHQRTDTLLRRRTLACFTRVVQFQLGTIDYFQDQEVSD

SEQ ID NO: 982812 - protein, 91 aa, Homo sapiens
RRLTQDTALLGYQFHSAVCLDRQNPAFPPRVSVTTVLPLLRMCSATPARSSSSCATRPWSSPYSRALCCCSSCTFCSSWARACSISSCRVT

SEQ ID NO: 982813 - protein, 43 aa, Homo sapiens
PYEESCARIYDYLYLEVLHQIFLNLAQLEDFTFTKNNQFSSFG

SEQ ID NO: 982814 - protein, 65 aa, Homo sapiens
VIVAEIKAERETHDAFRSSLQLCQADFNQLCELCRQIKSFRVASNPYTWFTMEALEETWRNLQKI

SEQ ID NO: 982815 - protein, 80 aa, Homo sapiens
  misc_feature (54)..(54): Xaa can be any naturally occurring amino acid
NCQPYNPILESTVPCFWLLQSYCVAARTAGPLINTLVDAALLCNEPKWAMYKLXDFHITWQLFGKSAPSHFRTQDIFIAI

SEQ ID NO: 982816 - protein, 71 aa, Homo sapiens
  misc_feature (2)..(2): Xaa can be any naturally occurring amino acid
VXSKQTTVSFTWRQYGRVTNAWYTGASPSAIFFPYGNLLQRVFSNYFILTLSKFTLTHYGFKIHLELEYLS

SEQ ID NO: 982817 - protein, 34 aa, Homo sapiens
TDFTPLDSQVLTCLLSCSAMACGPDPWGTNPMAS

SEQ ID NO: 982818 - protein, 100 aa, Homo sapiens
GSLFTVVWPSCRAESAASPPLGSCLDILKPTELACLNIRHLTTGKTPLLAVPGSYRPLDGDGLGESFNQQCIHRQCGAHGLSMVSSEGAGMACPQRRLTQ

SEQ ID NO: 982819 - protein, 49 aa, Homo sapiens
MVVNNEAAQEEHKEKTEISEKSQEPLNEVNSFPQENQRIHRVSQSLRSG

SEQ ID NO: 982820 - protein, 69 aa, Homo sapiens
MTSPCVVILLGQLSHLSLIWSKQPATGITTGSYSFCFQRHSIALSIYGMSGLRLHARGPVLTVSSAFFN

SEQ ID NO: 982821 - protein, 62 aa, Homo sapiens
MWQSRLQAGFTSSSTWYSWFLRSRSARISDNWSSKLLMRLCIWGQLCAVAVLRFHTGSSADS

SEQ ID NO: 982822 - protein, 62 aa, Homo sapiens
MHQIKMSGDSLLFAGGIIPFTWGKQLSGSLIKEDAELRCQGYKDALWLQLPKTTTITITTTI

SEQ ID NO: 982823 - protein, 60 aa, Homo sapiens
TRDADNNLLTEKEKLCVKKIHENENAAWRQETYPVKLLVQLSELAVYREDVHVIVLLEVP

SEQ ID NO: 982824 - protein, 71 aa, Homo sapiens
SACYLCRSRTRMPVLWRCSGAGLVWGGHAPPVSGRRFLALLLLLLSLSLAALNSPWAGALWDTISDPASAD

SEQ ID NO: 982825 - protein, 41 aa, Homo sapiens
EQLIDLDTKGLAGSVNEFPTFVRLVADVLYSLIKQESDQSI

SEQ ID NO: 982826 - protein, 41 aa, Homo sapiens
NALSSGSDVGAEEHGAVSDEAASGAHILALTPQDNLVPHPI

SEQ ID NO: 982827 - protein, 71 aa, Homo sapiens
VLLEIYGCLFRCINLLLRRNALKFFCMITTQERTFLYCFRAKQPKTWARITMAAVGHFLFPSDSPRILILG

SEQ ID NO: 982828 - protein, 34 aa, Homo sapiens
PNDEEIDPLEFDVYDDYVMMGIKEKGTDGNAGRN

SEQ ID NO: 982829 - protein, 34 aa, Homo sapiens
GSPPKNEELKTVPSSSTLIYIPCWVLMTHGIIEF

SEQ ID NO: 982830 - protein, 40 aa, Homo sapiens
YEELSRLGSDSLCTFFFMLCQLAVHDAYFLLVVQPLFIQF

SEQ ID NO: 982831 - protein, 72 aa, Homo sapiens
NQDAALRYDLTAAAGMMAACESRMLTGALSASHGPHRTDYGHASEVTCTVAKTDVECQLLIRVFREDYTVVA

SEQ ID NO: 982832 - protein, 34 aa, Homo sapiens
LRTSRRSSTLSAVGRTAYSTGATLTAANYCILRP

SEQ ID NO: 982833 - protein, 99 aa, Homo sapiens
PILHKPYDGSSIQLRYLLRVVLKTLWKHQYAWPFQQPVDAAQLNLPDYYQIITPPMDLGPIQTRLDHNYYWHAHDCIQDFNTMFTPCYIYNKPGDDIIQ

SEQ ID NO: 982834 - protein, 45 aa, Homo sapiens
GTLQLVFTLVMYTSSDLMILLLGVRPKELFLDMNSHLLTRRLTTC

SEQ ID NO: 982835 - protein, 44 aa, Homo sapiens
RVWGDVGYGRKNMWNGQTADGEGAHHDNHHLTTWQEGETGETTR

SEQ ID NO: 982836 - protein, 78 aa, Homo sapiens
  misc_feature (56)..(56): Xaa can be any naturally occurring amino acid
CELLDKYPSIQKRGDCKLQPEKRSAPMDFPGARPLPLQGKATPQGIPPGVTNDLRXEFWRFAHLLDGVNLERSHCNLV

SEQ ID NO: 982837 - protein, 52 aa, Homo sapiens
DDAWLVMDRMCTEMRHDILNYDRYMRNTSKQQQQKHQYQHASPAVRICMRHE

SEQ ID NO: 982838 - protein, 35 aa, Homo sapiens
MWIPGNTHTHIIIIIIIMVVVIIWLSHHHHHHQNL

SEQ ID NO: 982839 - protein, 33 aa, Homo sapiens
GRRGSRKITDIELNVEHFKNRRKLKKPPPELSP

SEQ ID NO: 982840 - protein, 59 aa, Homo sapiens
VARLRTPERCIAGINDKLCRLTGVAFVTALTRDPKHDWASPTFRPGLTHQPGHFFRCPD

SEQ ID NO: 982841 - protein, 93 aa, Homo sapiens
MRGGDVGTGFLSVTCPFWLLVILLTDRTLSCRSVGIPCRVRCQCAPAGGCLPVRLLGGQESGTHLRRQSARSQISSCVLGEPLLLFKAQMEMQ

SEQ ID NO: 982842 - protein, 55 aa, Homo sapiens
DGGSAVDLLGAVRKIQPRTRSMNSEPRIKPSSGEMKMNAMVFSSPSMFSELQPDL

SEQ ID NO: 982843 - protein, 77 aa, Homo sapiens
ALGIRELWCLQAPCPPALPSLPLTPKSCEAWEWQEPLFPRVRTCAAVVSKPDSCLHENLHGLVEPGISEAPACKPPV

SEQ ID NO: 982844 - protein, 65 aa, Homo sapiens
MRMSSIQASMSSASDWNWCSREATYQALLPNGQRAALGTAHCSRDVNDPLHGSISDPQVLLRRSC

SEQ ID NO: 982845 - protein, 83 aa, Homo sapiens
EEEAARKSILRKVVDPETGRTRLIKGDGAVLAEIVSNERHKEINQQATRGALLDLQMALGCFPAGPPLAKACETKLADPDWAG

SEQ ID NO: 982846 - protein, 60 aa, Homo sapiens
LISLVLPDSGPPPSQDDALRDIHSSLVMGYHGLDSGLLLIRQDWDHSSSSPADRMSLAQR

SEQ ID NO: 982847 - protein, 74 aa, Homo sapiens
MMPLMPSRLNYRTHALPYSFEYHTDEAAYYLALHTHTSQSGRFLCQLSRQQLRMAMRIPVSSEQLKRAQLRVHK

SEQ ID NO: 982848 - protein, 49 aa, Homo sapiens
GNTMRVEGTGIAVPHGRPLTGKIEALWVTSTMYNVVVWLAPYHSYTARQ

SEQ ID NO: 982849 - protein, 45 aa, Homo sapiens
GSVRGMAVVVKITVAHNAVADSHGLGPRCPECPELNVAQLSKYGL

SEQ ID NO: 982850 - protein, 45 aa, Homo sapiens
ARRSDEVWPEPWNISGLDKPDFLLCIEKLSTLGTKKGSPDTAENS

SEQ ID NO: 982851 - protein, 98 aa, Homo sapiens
REIEPSKPPVKQGLLVVTQVLMLRPAGWSGSVGKPSGVVQKNAGSRGKDPNSVLLGILAIVPAQRTKILIVAGVVYLRAGLMVIVPVYWTAHNIIQEF

SEQ ID NO: 982852 - protein, 47 aa, Homo sapiens
KSAQVCGTLIALVMHWPVRQLVLFSSEELEAAVAISMLEVQWRRSTA

SEQ ID NO: 982853 - protein, 83 aa, Homo sapiens
MLAGKGISDVNGPPQVCSLHSAERPWNSYPREPRIMSPTPVGPPEGPQPFPRTMLGPLSSSSMSTSESEGSPSAASITLHQNS

SEQ ID NO: 982854 - protein, 84 aa, Homo sapiens
VVYGSLVRSFTKCHTFAPAEFIISYPRMQAMVVLRLSIEGPSKVDINTAEQEDWDVQGHLTAPHEPGNYIITSRTSAEYRARLS

SEQ ID NO: 982855 - protein, 36 aa, Homo sapiens
YVGTRCFHNSGPRTLGLAAGTDGQGSTHLVDRTVLL

SEQ ID NO: 982856 - protein, 51 aa, Homo sapiens
YHSSGGQVLHFLQNSISSLKYRQEAREYKCNGQHSVQHDWHRDRVGMRDSW

SEQ ID NO: 982857 - protein, 52 aa, Homo sapiens
EREDRVEMSEVGVSVVVLGDVAVERGECSRDLWLYVARGGMKVFPSFVNVVN

SEQ ID NO: 982858 - protein, 89 aa, Homo sapiens
MGIKIGARIGRIQVDGNSQSVKSVYVGSCTGLRDRNTGTAERLNRIVLEQLLYSSPSFSPDDVPSGIIRRLAVKIVLPIAIELRCCHIH

SEQ ID NO: 982859 - protein, 43 aa, Homo sapiens
GDNLAVRQIDSSSTSGGAGSRRGHLLLEVQDDVTQLLLGSWPR

SEQ ID NO: 982860 - protein, 44 aa, Homo sapiens
LTLLRLLNLDLLFLLGLWLTLVVTGQASSSKDPAHFSAVSGPER

SEQ ID NO: 982861 - protein, 55 aa, Homo sapiens
DSKSPSARHITADRTIGDHSVKDSYLPKTGPEVAIKMERMMSQGATLYSVTCLED

SEQ ID NO: 982862 - protein, 74 aa, Homo sapiens
SHRVRSWRGHLSPHNRYQGEGTLLSLSSPLGSALTHICSSARTDWGGDRSLNPRWLTLPTQTRTTLGTTKMTLW

SEQ ID NO: 982863 - protein, 38 aa, Homo sapiens
MPWYTRARGRGTSDDLEHMNVLGRATLTASLATTTAQS

SEQ ID NO: 982864 - protein, 60 aa, Homo sapiens
LGTLGGQQMCLPFIIIIMRPSFCTRGSPARGTIPWCHLNKTKAEGLRKSTKNWEGLTYRS

SEQ ID NO: 982865 - protein, 95 aa, Homo sapiens
MHCSLYCKASLSAVALDSYFPTSMLILSALLLHSSKVMVRRSFWDLRCSIRLFSRSVSTSNSLILLSEMEIRVSRVFGKSLGYWSSPEVSGPGVQ

SEQ ID NO: 982866 - protein, 49 aa, Homo sapiens
MRRCMAIEDNCRMTKERPQKAENELKELEQKHSQLTEEKNLLQEQLETR

SEQ ID NO: 982867 - protein, 65 aa, Homo sapiens
GSFPSNSKQQWPTVMQHRLQHQQAAEGCSHAISGTITHAINIIITFRTAFISTAQEQHQHTHGTT

SEQ ID NO: 982868 - protein, 38 aa, Homo sapiens
VQAARIPRLTDFVLSRTTSAWWGAGLGPGYRRSTLRNS

SEQ ID NO: 982869 - protein, 49 aa, Homo sapiens
IRKELESVRRQLQCCGGKQSDVESPEQDDRRRGSVTQRPQATVNTDATR

SEQ ID NO: 982870 - protein, 118 aa, Homo sapiens
AQLSSLKSYDTIQQQAIKQYVALPLGLGCIGKSILVYLENLLKVKKHFFTEPYQGAIQDPEEFVEGMALGLKALLVELLVDWLVLSPKFTGAMAKGVAAMTDMKTTKLEEMRIAMETY

SEQ ID NO: 982871 - protein, 80 aa, Homo sapiens
SDSSRIPRRPQLSWCLRSPARDEFSIFFDHLAPITSSLMGDFEEINWTNWTRSRGLRRRKKTRYAKRSEAGRGTRRHDED

SEQ ID NO: 982872 - protein, 125 aa, Homo sapiens
SKDPPVAQLLKDGNSPIGYSYAFDRALCPAFMEPSIDKGTGADFDYHAASLMSQPAISTVRGGSHGGFDSPQEIIMNSNIDEKFSAHYDAVEAELKSSTVGLVTLNDMEAMQEALVKEREKQLAY

SEQ ID NO: 982873 - protein, 75 aa, Homo sapiens
LRRSTASATQEWLEKQAHAEKELGATPCRTRNALKRRTKSFRGKLSQLEEHFSQLQDNPAQEKGEVLGDVLQLES

SEQ ID NO: 982874 - protein, 106 aa, Homo sapiens
MPDVRACRMAQLPVVGCQCAQAAFRGCYVGQGNSESGRGGPGVARGSPGCWFGKVQCPGVKDLGRVVRFRQLVLRVAESDITEEGVLVGTCSLFPEGALWELTVQC

SEQ ID NO: 982875 - protein, 38 aa, Homo sapiens
RHSFSASPGVGSSQLSRVGVVRVCSSAEGYACHGEVIT

SEQ ID NO: 982876 - protein, 41 aa, Homo sapiens
TRGSPGRTASRCNCHQYTRLLMNDRNRCRFLRLCGDIFIRP

SEQ ID NO: 982877 - protein, 38 aa, Homo sapiens
DTASEGRAIAARTRFYAASLNGAPQGGASTTDVILYGL

SEQ ID NO: 982878 - protein, 122 aa, Homo sapiens
FLALLKLHEDRDRLWAPEPALMYFRRLGEHIFLIFMVLGAMSVISFCILSAMPRYIVVPPERTLLAYYFFTDVYVALHDGIVGCLMNSSGLHAHLRKAREEGLRVPEAAFANGYYLAHLAAL

SEQ ID NO: 982879 - protein, 49 aa, Homo sapiens
MGSGYHPEYEAIANGRKNYNNVALCYSPTLSFFFIPLITTLQGRNFYLH

SEQ ID NO: 982880 - protein, 57 aa, Homo sapiens
CGYRSPTEPRDPTYPTPAPAMEAYTKKMQILKKDKGECHTTGAQTGRRRTEDKPARG

SEQ ID NO: 982881 - protein, 68 aa, Homo sapiens
MLLVVSQDPPSWGLVFSWSRAQATDHVITVQNPSLDVGGHAVCLMKSSCLGFMECGWSLAFQLEMNRS

SEQ ID NO: 982882 - protein, 109 aa, Homo sapiens
GQERLTHSRFVASAACTVARYVIVEYKNGWERKEYENKLIAYFTALCFKLRSALDLSLFLVFLVINKEMGQVVSKLRTYVPYLLGRILVFNTAQGHNLACIFILLHISI

SEQ ID NO: 982883 - protein, 65 aa, Homo sapiens
TILLGALRSRDACESVSEYGGGAGGYVGLFLLLLDGVSIHLLRPHIFHHSTPPSSRPLIRGPVPW

SEQ ID NO: 982884 - protein, 52 aa, Homo sapiens
DDELISCEWMLEKRSMVLKEELFYMKKKHEEEVIDGLQAQIASSGLTVDWTS

SEQ ID NO: 982885 - protein, 142 aa, Homo sapiens
MGFWSIGLVYDLARSPHSLDLSSPNMANYSIMLALIAFAKYFPGIVNQPTEPFWSAQSASSHVTMSEQDAQGASQDSSSNQQDPGYPGDAEVPDEDLMYFHSMTEVADGDFIDWEAETDSVVIAGPPEVLRSPEMHVENVLE

SEQ ID NO: 982886 - protein, 38 aa, Homo sapiens
CGKESGPDDLRWRTDQRGARGRHPVLDYKKLMIEMDGR

SEQ ID NO: 982887 - protein, 67 aa, Homo sapiens
LAGAVLIMRKVSSTLPSLTAPPIRSSLLSDTALSSIYSSEIRMLHRQLRQLPVLCATGSAPVVAATA

SEQ ID NO: 982888 - protein, 40 aa, Homo sapiens
TSSSTQQFQNELASVVLHVPNTSCIAADLPVNACNPLGSS

SEQ ID NO: 982889 - protein, 33 aa, Homo sapiens
LRRSCAKPHPALPVPVFLSHLLRERWGRDWMDE

SEQ ID NO: 982890 - protein, 33 aa, Homo sapiens
MNDKTRVRRLITPADSSLITPWRLFISACWMDE

SEQ ID NO: 982891 - protein, 40 aa, Homo sapiens
LITDPPLWFLEMSSGFENAWSGLFTVALRKGQSSIGCAGA

SEQ ID NO: 982892 - protein, 69 aa, Homo sapiens
CAAQYVSKQAADMIRLDDKLASIVLEYEEGRLIFDNLKKSMAYTLTSNIPEITPVHDIYYCKHTTTTGD

SEQ ID NO: 982893 - protein, 45 aa, Homo sapiens
  misc_feature (33)..(33): Xaa can be any naturally occurring amino acid
MPMCSPTRDLECGASSDVWCLMNLTVNIMVNCXFSLMDVMNACMW

SEQ ID NO: 982894 - protein, 41 aa, Homo sapiens
MGQKDSFLQGSTWPPAAWQGTHVGIDVAAENAQVPTTMARG

SEQ ID NO: 982895 - protein, 133 aa, Homo sapiens
MGQVARTAIPYIVPPPRSVAYSFTLCQHLGDVGLKGLAHHDVHLLQVQVHRVVVLHEEHLHLMLQDLRPFLLRIEHCSFLAGPPVLQLWARLDCSVSSGWGRLLEAVCRNTPSPSSPSALTSSPASQCRSSPP

SEQ ID NO: 982896 - protein, 87 aa, Homo sapiens
PPSWGPGGSCIALLTVTLSSAESSPHGFGWGHQTSLSWSTLRLICHFCRMGTDAAAGSWNMILRYNPMHGCYVTLVRPGDRCGDACR

SEQ ID NO: 982897 - protein, 47 aa, Homo sapiens
PGIAFDSSPLTFALCGCKGKSQSIIKMKPITSLVFACKLLRVIRCNH

SEQ ID NO: 982898 - protein, 118 aa, Homo sapiens
QHNHMYIMGIPTQGILAISTRVKRPIGRIILTISKGYLPGHQYHSPRSAVSFQAIGSVLKRALVSLNSKPSLVILWLDLRHSEQNSSCILSPHLHSYSDVPLSEELVAPSASIASAWG

SEQ ID NO: 982899 - protein, 34 aa, Homo sapiens
SREEGRRMRVPVRVIKCTGLPSTGSDFDIGKVSH

SEQ ID NO: 982900 - protein, 86 aa, Homo sapiens
SREEGRNKKSGLGGDFVLLLHPLVIQESCGSISRGFLKAPEELAVVRCKCQKLEELKAEEPDNFSSKVVQRGREFFDSHGKYLYRI

SEQ ID NO: 982901 - protein, 32 aa, Homo sapiens
FLAGSDVDFCWNSMLGGGISHVVNLLRWMGAS

SEQ ID NO: 982902 - protein, 114 aa, Homo sapiens
DSTGSPPPVANQASTRINSVTASTTTPGLSEESTTVYSSSPGSTETTVSPRSTKPQFVVKSLRSSTAGQPLLTQSLSTEDSSTSGLTDESTAFPGSPVSHQNRVTCHTHNRRPR

SEQ ID NO: 982903 - protein, 92 aa, Homo sapiens
SWGLESKVMVGSCFTVAQLENVVSEIVGFLVSLTSRMKPWIFVVLQFLKMVCPEVVPSDVQTCLEFLPFGGFVGSLASGVKLQTFVGECYSA

SEQ ID NO: 982904 - protein, 107 aa, Homo sapiens
MGFWNLPNQEVSIRLGSSGWPRAPVLPPLAFAMAVPLPVSSFLRSTLLPRPSSFYDPSLRPQRGLGAEIRPELTSGVPLLPYTEPGAKVKSSYITLYTSDLNSGSNN

SEQ ID NO: 982905 - protein, 38 aa, Homo sapiens
RFPGSVVLCVPMHYGYCIVVQNAPHYGKDKVGSLFLRN

SEQ ID NO: 982906 - protein, 101 aa, Homo sapiens
GSGSDSMMTVLMTVTSDRTHDWRRVTGMNLCTVDNGGERPQMNEKKSGLSVRLGDMPGISRNKKKNMKEQSPLQAVMLRMGSQEIPEEGTGSDRKFFQRND

SEQ ID NO: 982907 - protein, 37 aa, Homo sapiens
MPGEKMFNTVIQSGPQRHNYGFKIPHSSPVRAMSSIS

SEQ ID NO: 982908 - protein, 73 aa, Homo sapiens
IIGVLEKGDRLPKPESLSTGPLYRSCSRCWDYCPPVIRPRFHQKLRVQPSVIVYRDGEKDNCHVSGIRRCSRT

SEQ ID NO: 982909 - protein, 64 aa, Homo sapiens
TAARHQSRWITLVCYSPPAELSCSPPRVVTVLTPARRTVCLFVGTSPFASMPSSRPRCQQISDF

SEQ ID NO: 982910 - protein, 47 aa, Homo sapiens
VGGVHGPQKKVKLLLMKIMTMIMKRMMIKMMMMMILIDEEAVRKSAR

SEQ ID NO: 982911 - protein, 57 aa, Homo sapiens
SVPTSTLPPVFDDFAHYEKRQEEEDVVRKERQSETNNEGEPAFLHVANDLYFDKQVY

SEQ ID NO: 982912 - protein, 139 aa, Homo sapiens
MMLCQLTVFGSVPDTPEQSIRSTYGWNPICDAPVGCDTKRPTGPRFDIRSLGIMAIEMIEGEPPYLNENPLRALYLIATNGTPELQYTQRSCQSIFRDFLNRCLEMDVEKRGSAKELLQHQFLKIAKPLSSLTPLIAAA

SEQ ID NO: 982913 - protein, 68 aa, Homo sapiens
  misc_feature (49)..(49): Xaa can be any naturally occurring amino acid
MHLPMDTNLWLSMAQGSRSEFSCTPTTRLQFFLPVPMHFGTLLSSIAPXYGRPLAAIILELCNSDVHE

SEQ ID NO: 982914 - protein, 104 aa, Homo sapiens
MVPDMMDLTVEDRTDHWYWIGTVYAVDNSVTMYYRNENILLKRMEERTRTAIDISSSAELEERNNTLLTHHLSEQKVTSDLEENTFFFFVFFETGSHSMVQAGV

SEQ ID NO: 982915 - protein, 130 aa, Homo sapiens
NWTADKIGHRQNDCRLGPRRGIGIGELEVGGGVERWFQTQATVLRSVALTGGQEDMGSGQEVLLNVTRPGPLPKWTLVLGPSLQGVVHMRKQGMASLSGFPGDPGGVSQTEPELNLRDSDSSSPGPWVAR

SEQ ID NO: 982916 - protein, 75 aa, Homo sapiens
  misc_feature (42)..(42): Xaa can be any naturally occurring amino acid
  misc_feature (71)..(72): Xaa can be any naturally occurring amino acid
MEHRTERFTRVGGTCDFSPSTPPGLSRSVHVGGVTQDITGTXANKKHSCKGDGNQAHQQLMEEEKEFLQGXXIPH

SEQ ID NO: 982917 - protein, 40 aa, Homo sapiens
NLSPGPVLLSKPMMKEFRLEPSSQIIEVARNGQNLIDHHS

SEQ ID NO: 982918 - protein, 58 aa, Homo sapiens
DCCFSLAKCPEHPGHSLQASRGVWLAIGATQLPHLEERQGLNLSPPVAEVSQGQAMVA

SEQ ID NO: 982919 - protein, 38 aa, Homo sapiens
SSSYPQERLCCPFSKAGNGIWAVDVFSDFTLDFLAPNG

SEQ ID NO: 982920 - protein, 35 aa, Homo sapiens
MPIITVWAQKLAGLSDLIVQVTTCRQLSSCRLTRG

SEQ ID NO: 982921 - protein, 80 aa, Homo sapiens
MTRSKLAKSELRKHGPFTNATFLESSELILTMVSRGLHVNWDLQANVSLRKSPPERFKKLVRNNGQKAVGRKHSRAVGGR

SEQ ID NO: 982922 - protein, 43 aa, Homo sapiens
  misc_feature (11)..(11): Xaa can be any naturally occurring amino acid
ITCIVDSWRVXLLTHTSRRRHWRILLVTTHPAVDTGESFSPHT

SEQ ID NO: 982923 - protein, 97 aa, Homo sapiens
HDSHLLPATQWIYSPSLRQQVPKPCLPEASPRPQVAVTLVLQTQPPGRLLLNPDLPGLGLTALSLRLMSASLRSAGTTDLHLHIFRHTWCCSVISAQ

SEQ ID NO: 982924 - protein, 82 aa, Homo sapiens
MPSVIRAHAIISFGLAVLTARGSGPEEDSSPGGDSSKCVRTWLSGKNVHHCDVRSLHIGTASWVAAYVPNELANVFEGLRPI

SEQ ID NO: 982925 - protein, 127 aa, Homo sapiens
DPRRLLGTGIRVLAPGCPLCSLQLLFVEHGSALDPPTHVVQPLSTEVAMARPGCPWCALLAGCRTRASAAKGGPACAVDPALTPEIRCSVTMGCAVEAATGVIHLTRYSKGRLLFESNLVTEDKLWR

SEQ ID NO: 982926 - protein, 38 aa, Homo sapiens
GGVEQDLKDLNWPLALATMRDPVEFPTYSFVITRPNIL

SEQ ID NO: 982927 - protein, 43 aa, Homo sapiens
  misc_feature (30)..(30): Xaa can be any naturally occurring amino acid
  misc_feature (41)..(41): Xaa can be any naturally occurring amino acid
SSIPSNAEASVRVSVPVRLNREGVRKFPAXVRIRSGDDVAXAP

SEQ ID NO: 982928 - protein, 71 aa, Homo sapiens
SRGPLRTGTSLCQALLHRHSLRRCHHCFTLQHLDTGWSTTLHPVPLSLYTVPWPWTQGHRVDPEGDTMARG

SEQ ID NO: 982929 - protein, 76 aa, Homo sapiens
RKILALLAQALECGGDETRGSTTDLRPPGSPVILLPLPPELLGVSAERQLIQLVSVCLVEIGFHHVGQAGLELLIL

SEQ ID NO: 982930 - protein, 48 aa, Homo sapiens
KITQYIDFDHVFSRETEEIIPGTVWLICYNELRRRLRGVSTLTVGLPT

SEQ ID NO: 982931 - protein, 40 aa, Homo sapiens
NGQPGTDYLSSICPLLVVMHFKRWISQTVRDTVDWALTAL

SEQ ID NO: 982932 - protein, 110 aa, Homo sapiens
ELRQRVNGPCGVAVRLRREPGESTSDGASVPVPGRCGQRGLQLAALLLLLMDEFGDGAGDAAYQGPVLIEADAPIMIGIQVLDELIRRLPVPCVRQHVVQLFLEHLAEAD

SEQ ID NO: 982933 - protein, 49 aa, Homo sapiens
TRTAVKGVSGTHCLAIGDSLTLSDRQWSHRLAIGNSPIWVTKNVSRNLV

SEQ ID NO: 982934 - protein, 34 aa, Homo sapiens
DHVHGDEHEVGIILLVPFGCPRGGNSTNPICQNQ

SEQ ID NO: 982935 - protein, 54 aa, Homo sapiens
MDGSVGLQEQVEVLMNNSLQTTALAFSKATWDEAKGQKATKTNDAVEFAQLETR

SEQ ID NO: 982936 - protein, 73 aa, Homo sapiens
WYQRIPCIVQHEEFSPSPHLRWERLPATIPIVGIIAGLVLFGTWVRWSCGRCCEVEEESSDKKRRELLSGCKQ

SEQ ID NO: 982937 - protein, 38 aa, Homo sapiens
RHVHCVDVGLCCRWLIQGLHSTLSRAETQASEASQMAV

SEQ ID NO: 982938 - protein, 80 aa, Homo sapiens
  misc_feature (20)..(20): Xaa can be any naturally occurring amino acid
TVNSRFTMIGRDAASEGSKXRQSAIKLERHKAVIPVCNFSRHLSVLKTTKVIEGSVKARVSRSRIRTEKSRYKRSFWPYW

SEQ ID NO: 982939 - protein, 129 aa, Homo sapiens
EDPPAFQSTLDAPSSDYEQVLENLNLRGSSVVDSRSQGRFLGTEAELYAVGLDSGHIRGDDKMPIMDFLTEDGSTEKGQKSLRALFQIKKVDLSESFIGMVARKVTACHVALAAYLCGKPDVAVHNGTW

SEQ ID NO: 982940 - protein, 73 aa, Homo sapiens
KDPAWYLQISCSGRNDLEDKNRLFNNNWHSLQVGGLICAGVLCAMGIIIVMSAKCKCKFGQKSGHHPGETPPL

SEQ ID NO: 982941 - protein, 47 aa, Homo sapiens
MMIAHGAPEPSADKPANLEAVPVIVERTVFIFQVIGVQDRKVCKEPT

SEQ ID NO: 982942 - protein, 50 aa, Homo sapiens
SYAYSCGRALLQGQTAGRHALSDTELQPRYTQVSQSIFRNWYVGRNWYGG

SEQ ID NO: 982943 - protein, 65 aa, Homo sapiens
GIKIPFAAESSIPGVTAAHGNATEHDSMASDIRNVSCVMQALRVHRLNMFAMDQGTATLHLQGNH

SEQ ID NO: 982944 - protein, 43 aa, Homo sapiens
LRTRVVLAELLKESQDPLKGPEPHFENRLNLEEEVAVSRDCTI

SEQ ID NO: 982945 - protein, 58 aa, Homo sapiens
  misc_feature (46)..(46): Xaa can be any naturally occurring amino acid
EAESVLLVLRGKKMSSEAEDRAGAPGQLLHCRANGETVTLPTSPSXPVGISLGLLKRE

SEQ ID NO: 982946 - protein, 40 aa, Homo sapiens
EVESAAGYVQCAVGCLDSTAHLFLSGVRSSDKTLLSAGPT

SEQ ID NO: 982947 - protein, 52 aa, Homo sapiens
LVLAEQTQRIGLWEGECQDEEEFFQTTLYSTSPNQEAGPTESGISGISSYLG

SEQ ID NO: 982948 - protein, 70 aa, Homo sapiens
  misc_feature (57)..(57): Xaa can be any naturally occurring amino acid
TDLISACGDVMWLGRTYNARCSRSGEPKSDEMNVKVVGFVSIFLPMLQTVAKNKDQXTYDGLCRMDSRVS

SEQ ID NO: 982949 - protein, 118 aa, Homo sapiens
SGFLQNSTTTMVYQQVGTAYTQTALKWLGLCLNLAVQSPPVFKHKTSKNSRSRFSSRSRFRSRCRYSSPPQQVSAQLYPKINVHQPTEQPIQVQVQIQGQAPQSAAPSIQTPSLQGTH

SEQ ID NO: 982950 - protein, 42 aa, Homo sapiens
DNCADKYGMLQETGSLGARKWCRCRSKPPTQAPAFNLGPTGS

SEQ ID NO: 982951 - protein, 44 aa, Homo sapiens
VLFALGCQRTTDSVVLLSVSLAISYTATLIQSSAHSSPLDLAAV

SEQ ID NO: 982952 - protein, 37 aa, Homo sapiens
TLRIRVVSNLCLGSKVQDTGVACAQSSISCLQEPRGY

SEQ ID NO: 982953 - protein, 45 aa, Homo sapiens
TVCDSPSDAPNPSSCFLCQLLVQLRIFAESLMAPNDLPTHLGLLT

SEQ ID NO: 982954 - protein, 89 aa, Homo sapiens
SKDPLRSPAGLIDLVLLHLKGFQARNQAVKVGGSCPSEQNDGGLKVTPGGMGLEVFLVQWLLGASSSSSLGLFPNQEEELVPEILEGTH

SEQ ID NO: 982955 - protein, 93 aa, Homo sapiens
PVVFKTRAGVRMTGEQSVRKTSPEEGEICCTISATEDLSEEEQEELRRELAKVEEEIQTLSQVLAAKEKHLAEIKRKLGIHSLQGTHLCKEPT

SEQ ID NO: 982956 - protein, 76 aa, Homo sapiens
  misc_feature (42)..(42): Xaa can be any naturally occurring amino acid
YLVGLSISEAGPEHLVPQLSTPSNWMTHRVIFPAETLALDNXPYIPAANLYFPLDALNTQHDTARARPSSLLQGNH

SEQ ID NO: 982957 - protein, 105 aa, Homo sapiens
VCCVCVCMSHGGVCVYPMVECVCINVGELYFYINGRVRAEDVCVCTICLCIMCTCLQICVYRGVNRCVYICMSVCDSVCMIGVCMCMCPSGECRYVCVHASLILE

SEQ ID NO: 982958 - protein, 61 aa, Homo sapiens
MLSVSLIEDKVSGDPFGRQRLKAEEMDTEGRPERDVGWTLSQGQEADEANYYSRSGSQQLE

SEQ ID NO: 982959 - protein, 101 aa, Homo sapiens
RHARVERPSGLSLPSSGITGTRTTPSQFLVFSIETWFHHTGQAGLKLLTSNDPPTQAPKARGLQASATSPGPGHFVCVCVRVCVCMLETRTESVAQAGRAW

SEQ ID NO: 982960 - protein, 55 aa, Homo sapiens
VCEELDGPKDRAGMTHWTAHVTQQGAHGPRGSSEVTVLNEGPVMNDDACPSECSV

SEQ ID NO: 982961 - protein, 108 aa, Homo sapiens
RRRDAHPRGHSVAVGASSSGKVSFSTAARFMSGMGFVGVESSVCECVFSYVVSSMGGGSEASLRFSQREVFHRAKVFHFDEVRFISGLLWIVLLVLCVITLHLALDLN

SEQ ID NO: 982962 - protein, 47 aa, Homo sapiens
QVERRSSVNGCGVVQHAHSSLYPGQVSTRGTTDGRLVETWPGYRELC

SEQ ID NO: 982963 - protein, 43 aa, Homo sapiens
ILYSCAHFSTTSDSTLNLLMSPAFLMLQSEMDLGVISQELELC

SEQ ID NO: 982964 - protein, 130 aa, Homo sapiens
DNYAEFGYCCRAGSKPTGFRWDSRQVDCRAPERPSRVSRRALLVWPLTGCVTPGRSLVLSGKQLNNEQLGFSQAGFSLQSRGKAFWGPAMEGHLSSLQLPRPALNGFLSLPQERWAKPALHQLDAFQEKL

SEQ ID NO: 982965 - protein, 33 aa, Homo sapiens
RTTRSMVTQEQLHGLVTGAAGWCGSQAVLQVPL

SEQ ID NO: 982966 - protein, 118 aa, Homo sapiens
PDHYHHLTITTTTTHLPTTTIISLTITILTTTTTTIFILTTIVTIIITIFITILTTIIPNTTIITTIILTTTTTVTITTITITIITITNIITTIILTTTITIKIITTIIILIGDRGVV

SEQ ID NO: 982967 - protein, 111 aa, Homo sapiens
EDPSLFIGTQWMHAVSQVPRLRASTQFAWHDISTVAFTIEGIQYLRDFLHLPPDIVPATLRRLRPETGRPRPTVCRVSDLRDSQDVKLTEIPTRPSARVHLGVTMNSEGTD

SEQ ID NO: 982968 - protein, 95 aa, Homo sapiens
SLFIGTSLIIGSSLFFGASLFIGTVAIHRPADWYVTGPTMADHVVTVIMVRFCRRSLRNGSHIPREPECAHITLSRTREGRDNAMRISDSFREPY

SEQ ID NO: 982969 - protein, 63 aa, Homo sapiens
LEDPAIHLAPMRRGAGKHVPRAVSVTCNPTVIDKFALAPTASSSTLSMLITGEENAANNYARG

SEQ ID NO: 982970 - protein, 98 aa, Homo sapiens
RYSFGTSLFIGTVAIHRHLAYSSCTSPILRNLAYFIDTLLFIGTSLFIGTSLFIGTSLFIDTSLFIGTSLFIDTSLFIDTLLFIGTSLFIGTYAIHRK

SEQ ID NO: 982971 - protein, 133 aa, Homo sapiens
MYLSENSSKKSNGIAIPAYKVRSVYYHVLTAKTLATKAKIDKWDLIKLKSFCTAKETTIRVNRQPTEWKKIFAIYAILQRANIQNLKELKQIYKKKKSNNPIKKWAKDMNTHFSKKKDIYAPISLQVSDQGLG

SEQ ID NO: 982972 - protein, 72 aa, Homo sapiens
VVDLEDPVYLTRVAKSSSRRPLKTEHVIYSSTVVLPTVQVGEAKKRAFLKAKHKLHCVGAAKTKNCVLSIIN

SEQ ID NO: 982973 - protein, 44 aa, Homo sapiens
RGILDSHSRNEVISRGLHFCLTRSVLLAHLIKLDSIQVSISSVF

SEQ ID NO: 982974 - protein, 61 aa, Homo sapiens
LEDPYSAWGFQRHSHAYFEPVAPAQDNVVDADDVEGVEHTGNGSIFATAFYHVLIGTHSGS

SEQ ID NO: 982975 - protein, 85 aa, Homo sapiens
CKGPAAFHEQRRSLERVRTEDYLKRKIRSRAERSELVRDAHFGRRARVEPFLPGQAVEAEESQISLDDLNEKDGPGGLAPMGGWV

SEQ ID NO: 982976 - protein, 62 aa, Homo sapiens
RSKDPPQCRGFQRHSHSVGAVSPAQDDILFDADDVKGWSAPGYGSIFAQLLPCTYWDKFGQP

SEQ ID NO: 982977 - protein, 59 aa, Homo sapiens
  misc_feature (43)..(43): Xaa can be any naturally occurring amino acid
  misc_feature (52)..(52): Xaa can be any naturally occurring amino acid
GEYGDLWWTIITTQVTIPKDLAGSIIGKGGQRINNKSVMSRRXISDSKIDEXFRRIRRS

SEQ ID NO: 982978 - protein, 64 aa, Homo sapiens
HRARSLLSRVNRLLVGDSAHHEQDLEWLQQADVVVAEVTQPSLGVAAMRLGRACEPLTTRILLP

SEQ ID NO: 982979 - protein, 42 aa, Homo sapiens
MNPDWSGCDPYAGPVVGSQMTRQARRLYVGNIPFGITEEAIQ

SEQ ID NO: 982980 - protein, 46 aa, Homo sapiens
DWPGGVNWPGMRDGPEALNGPPYYRECTYTELGDQVDTAGRVWPFN

SEQ ID NO: 982981 - protein, 30 aa, Homo sapiens
MRDFRPVVVGRWQLAYNYALIGIVQGKGER

SEQ ID NO: 982982 - protein, 38 aa, Homo sapiens
ASAPAIGILPHIPLFQPDTRLDKRPNARGPVRMAIQRL

SEQ ID NO: 982983 - protein, 62 aa, Homo sapiens
YGLCGSCCFFVAFIVFAEDGWYIWLSKMVVTVDRGFIDYRTVLLYAGYDSTASVLLSFNACG

SEQ ID NO: 982984 - protein, 34 aa, Homo sapiens
RESSGYSRANPAARCPMKCLSTRVCPSTVYQCLR

SEQ ID NO: 982985 - protein, 44 aa, Homo sapiens
HNGGVPRSAIRCTPFGLSSGHFPSLCVLLVVQLGCMVAVPLGRS

SEQ ID NO: 982986 - protein, 40 aa, Homo sapiens
MAIQRLRAIQRLRPFNASEPFNASGPFNASGPFNASGPCL

SEQ ID NO: 982987 - protein, 138 aa, Homo sapiens
YPIGRRPRVTVHSLSRGGTGRQLSSQLRRVLHHREWAQAWKIFGFVILSVQCHPDGPEAAFEANECHLLFQLETPVCPGLFQHSGPWASGDVSSLCCHKHYGIVRDGRHIVQKLPWYALQNGVPEARVAHHAPLVPVN

SEQ ID NO: 982988 - protein, 35 aa, Homo sapiens
MRDRTWIRDRPGVASDRIRDRPGFANRPGLRERRI

SEQ ID NO: 982989 - protein, 54 aa, Homo sapiens
MRCIYHCRVSPTSGAPSHTAALRVQPGYQTEEIHRRRSPAWQAQRRALAAEIHA

SEQ ID NO: 982990 - protein, 80 aa, Homo sapiens
LQPTITMHVKYVNRSGTVVHAWDPTYYMGGQGEVDVPERPKVKKFESSLGNMVKPHLYQKYKKLAGRGWVGAGNPSYSGG

SEQ ID NO: 982991 - protein, 72 aa, Homo sapiens
YNPTITYTFILTEMRVSSGTSCSGIKLNHDSQSSVDHHRPLTSHCEQCMSVMTNDQTRMLPTCQLWHALLCT

SEQ ID NO: 982992 - protein, 47 aa, Homo sapiens
MPSYEASLGKSSFFRTSKKIARFSSWGHHGPGAGAAALAIRDLDSRP

SEQ ID NO: 982993 - protein, 68 aa, Homo sapiens
AVFWPTASIATPCSGSPFTGEDTVTDYEGKFILRGLLPGCVYHVQLMAEGYDHIERALPHHRVIEVVN

SEQ ID NO: 982994 - protein, 80 aa, Homo sapiens
IVKRYHFHYPLRDSSSCGMFRGSSVCVHKILYAILLGLLHTSSFFWTSTKIARFSSWGLHGPGAGAAARRRYPGTWIRDR

SEQ ID NO: 982995 - protein, 98 aa, Homo sapiens
MCQGCIFTDSVHATILGAHSRGHKRSTCLLSVTHATALGCAAGDPQGSPHQYVVAVLAAPVSWVSQGGYGAHQGDSAMLHIILPCVGDGNCGGGLVCS

SEQ ID NO: 982996 - protein, 92 aa, Homo sapiens
MCWYAYITCTQGTHGIVSAPDDLRSCIMYELVSDDCYTSARGCTANLDNFDKATFDAITKTYRHTWIRDRPGFATDLDSRPTWIRDRPGFAT

SEQ ID NO: 982997 - protein, 96 aa, Homo sapiens
RQHNSINKKVLTKTPSKGHQRPKLDKLMKMRKNQLKNTEHSQTQSASSPPNDRNTSPARAENWAEAEMDELTEVGFRRWAITNFTGLTEHVLTQCK

SEQ ID NO: 982998 - protein, 79 aa, Homo sapiens
LAGPSEDTKGFFDPKTALRTSRNCSYWSAACEDPRDGPVPFCHSRYKAANGGELGATLTPRPGDVFEKCHRVLRLLGRS

SEQ ID NO: 982999 - protein, 39 aa, Homo sapiens
MEQIFMNVAIFEDEVFAGVTTHQELFPHSLLSVIANFIP

SEQ ID NO: 983000 - protein, 71 aa, Homo sapiens
RDLIVMNQYHQLARIHGFLPVKYTISPCSRVQLKSIKNQLCTGRTTVVVSRTRVTLCPNWVFGRLQELLES

SEQ ID NO: 983001 - protein, 40 aa, Homo sapiens
ECLNEIVEYLQTNQVHSRKLEVQRASRSNSVSNNVVTRRK

SEQ ID NO: 983002 - protein, 38 aa, Homo sapiens
RLRRYPKIVTSLNKPLMISTTAPIAWRPSVTLLHTVFT

SEQ ID NO: 983003 - protein, 94 aa, Homo sapiens
RLRQLRETMGMTTVFKPPVQEKWWRVCNQGAGDKVDSEAEYVSGHIDHDSAVGLPRQRQPGEDGNEEDKENQGDEDPRSAATSTSVFFANWYGG

SEQ ID NO: 983004 - protein, 56 aa, Homo sapiens
RHQLTGYGRKYSVAVCQESEEISSSGLPLGPGAGLRAGTLRMGLSDEVLIYATGTA

SEQ ID NO: 983005 - protein, 76 aa, Homo sapiens
MVVSHVIFDNSWTAPEEALFSSRKLAGGSQKWLIGRGQASFQGSAVPSWFSDGRAWLPLALSLSPCLSITTFPPEA

SEQ ID NO: 983006 - protein, 81 aa, Homo sapiens
PQIGYRRTLETLLLESKAAVRNLFGTRTGFVEDSFSTDEEDDGYGIKLFHLRSSGISYDSHEELRILVSSHTQLTTGFALL

SEQ ID NO: 983007 - protein, 88 aa, Homo sapiens
MAYGSCRHSDTKMGVTYFHEEEQRRTCKRYVGLPFILDMTTSIMDGFNVLYNKKPVIYLSAAARPGLGQYLCNQLGLPFPCFVPLGRS

SEQ ID NO: 983008 - protein, 80 aa, Homo sapiens
  misc_feature (44)..(44): Xaa can be any naturally occurring amino acid
  misc_feature (57)..(57): Xaa can be any naturally occurring amino acid
  misc_feature (72)..(72): Xaa can be any naturally occurring amino acid
MYIGQCLKDVLKLARPLSPPVVKLEKRVDAEYGLPSTHVMATTXIFFTLLLSAPSRXHVSAMQHPEPLGSPXMLLLLSLG

SEQ ID NO: 983009 - protein, 43 aa, Homo sapiens
MRHHCAGNASGGLDETGCYYEGYVADEEYVMSDFRSVCREADL

SEQ ID NO: 983010 - protein, 65 aa, Homo sapiens
MDGAVVDEVPLLWRQWPLSGGWGWACALLAVSVITMLLLMPSPRPVRHLSRFRPDLEWDPTQSQT

SEQ ID NO: 983011 - protein, 122 aa, Homo sapiens
GTCLRQMETGLHAAPTWMNRTACGDSHCEFLLQEPPQEHTGKTKRIQDPLKQVVCHCKFCETAKNCEFPKCEREKCLPPNTHPLWEPENSDHGRRISPYLELKWISGAKQNIIVPRKEAPGR

SEQ ID NO: 983012 - protein, 51 aa, Homo sapiens
DLYYAKLNSEVELNHKLTGWIRMDKDGGCGEPMFHVPQMALSTCGDHVNWY

SEQ ID NO: 983013 - protein, 56 aa, Homo sapiens
SRKEDVGRHGVQRKCGPFNASALNGPEALNGPSPPLSQHKNTSDYSCHHDPWPFNA

SEQ ID NO: 983014 - protein, 146 aa, Homo sapiens
LQDPYYAPNSVLRLNQRSYRLQCYSRHHHSQQSQYNKPKRAVLVCTNKSEKWGQGIILYMHKPYGGLEGGGGVLIATSPHNSLPCRERTSPIIQTVKTHGRVGPFNVSPASSISGKGLTSGGTILRREEGKAERREEEKPEGGGMF

SEQ ID NO: 983015 - protein, 59 aa, Homo sapiens
IAGGSMAGGVEWPEALNGPEALNGPKPIFRKKAKTTKTIVLLAAMCRAYLQIQEDPGHS

SEQ ID NO: 983016 - protein, 113 aa, Homo sapiens
  misc_feature (3)..(3): Xaa can be any naturally occurring amino acid
RIXINAPNSSLSCDPGSQTPACATGSWTLTGHPQVVKVGNNISILLILNTGAPQGCVLSPLLYSVFTHDCMAMHTSNSIIKFADDTTVVGLITNNDDTVYREEVRALGVWGVK

SEQ ID NO: 983017 - protein, 103 aa, Homo sapiens
SSLSSRPGSRPACALGPGLSDGPPQVVRVGNNISTPLILNTEPHKGAFSALSCTPCSIMTAWQCTASNSIIKFADNTTVVGLITNNDEMAFQGGGEGPGSLGR

SEQ ID NO: 983018 - protein, 78 aa, Homo sapiens
PRHVRRRYGPEALNGPEALNGSECVNGPEALNGPEALNGLFKENYKPLLKEIKEDTNKWKNIPCSWVGRINIVTIAIQ

SEQ ID NO: 983019 - protein, 182 aa, Homo sapiens
  misc_feature (18)..(18): Xaa can be any naturally occurring amino acid
YRTHLTPNSRIELYKKYXLVHLTIMTDILPIFFWIIQMLSSKLQKGLDMYWLKQWDTSGNAGFESLAAYVTDGRLFFTLVQLSAGHSIRSPRVVLGLLLTVLVIILTPRGEILRGAPDRGRLSVVFYVFHFLIIAPTVDFFKPSCLPIADSVFPAWCRSTILFLVSFDSSLVLAIVEFGASR

SEQ ID NO: 983020 - protein, 57 aa, Homo sapiens
MAATLRKMVKKIETRPFNASGHSTPPGHSTPPAIQRLRPFNASGPFNASASGPLNAS

SEQ ID NO: 983021 - protein, 97 aa, Homo sapiens
  misc_feature (87)..(87): Xaa can be any naturally occurring amino acid
TVPGAFQRHSHAYWSLSAPAQDNVCDADDVEGVEPHPDMEAIFATAFDRCTFIGTRFEAAVHGLQTDSVVKLSSDYHVAHKSGKLIXLLPFFRPRSK

SEQ ID NO: 983022 - protein, 114 aa, Homo sapiens
MAGHEVLLTSQMACQLAVGAPHFPDGVAGQRCFPFPRWGSQVEALPTSQTMGGQAEALPTSQTGWPGRGVPHFPDRVAGQRRSPLPRRGSQAEGLPTSQMMGGRPFNASAEALN

SEQ ID NO: 983023 - protein, 45 aa, Homo sapiens
CTEAFMARWIMDGWMDDRWMQRLMHGSMDWIGLDWIGLDWIRLDA

SEQ ID NO: 983024 - protein, 37 aa, Homo sapiens
LTRGNSGLGAILDSGQFWTRGNTGLGAIWSRGNSRTR

SEQ ID NO: 983025 - protein, 40 aa, Homo sapiens
SLFIGTDRDRDTAILPPPLPQPGWGVGPAPQAPYPSEVAS

SEQ ID NO: 983026 - protein, 46 aa, Homo sapiens
YEDLSGHSGLSLYEGTSQDLTLMGKVRTTEAPLHTLPRALVGVCNL

SEQ ID NO: 983027 - protein, 53 aa, Homo sapiens
MSVWTTSSYCTMQYYWTVVFTRTGEAEIGQNCSRQVMKSSCKFLSSAPNPEHG

SEQ ID NO: 983028 - protein, 112 aa, Homo sapiens
WGGGQPRRLREPFAAAGLRALPQLGPFPAEDVPLLSSRDHRTPLLYAGFSTSSIYQGSAVCVYSMNDVRLAFLRPFAHNEGPMHQWVSYQGRVPYPPPGMVRSPRTPATTHF

SEQ ID NO: 983029 - protein, 100 aa, Homo sapiens
MRYGLQARDLQLLVSAAPPGSASDAGRLAFSVVSSTVTQLSWVSLAETNGEITAYEVCYGLVNDDNLTYWPMKKVLVDNPKNRMLLIENLRESQPYRNWY

SEQ ID NO: 983030 - protein, 42 aa, Homo sapiens
DSRDPLLFIGTTGVVEPSNSILSTHTTLEHSDSAFSGRQMRP

SEQ ID NO: 983031 - protein, 69 aa, Homo sapiens
HQSASWSNDPLKACDRIYMMPWILYRTDTLTEYAKWEDYVACRHTNTYSLPNQFYDTGFFVYDNAVFYN

SEQ ID NO: 983032 - protein, 34 aa, Homo sapiens
SENKRQRQQLQALSEPQPRLQAAGLPHTEVPMNS

SEQ ID NO: 983033 - protein, 68 aa, Homo sapiens
MSRDHATALQTRRHRETVSTTTKKKLYSKAQGPTSLNSKLKIKYYIKDFIFYAAIFCSQYAIHQWIEL

SEQ ID NO: 983034 - protein, 43 aa, Homo sapiens
MILPRTVAQGKMLMTVRMSSMLRDHTPAHRREPSAGSWVNAII

SEQ ID NO: 983035 - protein, 130 aa, Homo sapiens
  misc_feature (28)..(28): Xaa can be any naturally occurring amino acid
  misc_feature (47)..(47): Xaa can be any naturally occurring amino acid
  misc_feature (57)..(57): Xaa can be any naturally occurring amino acid
LRGSYRVQCAEGILGASRFNFTRNPPPXPRKACCWRCNDVNTAYKRXEDCLIHDGLXVEFAKLQSLRQAAKPILVCLLPNCDEPMYVKWVEALCAEHQINLIKVDDNKKLGEWVGLGKIDREGKPRKVVG

SEQ ID NO: 983036 - protein, 63 aa, Homo sapiens
RGSSCVQLRLPKVGTFGSAFHAWSCQRAGFLTHLKLRIGEIVRPKTSNHSLYWIKLRGGGASG

SEQ ID NO: 983037 - protein, 83 aa, Homo sapiens
  misc_feature (36)..(36): Xaa can be any naturally occurring amino acid
LEDLYTNSVGMFLKSMEGEDEITANIAEGGHPFLDXVPNIRVESMILIPISLYTPLFDIVPNIPWGRGVSITGNITGCVHPPL

SEQ ID NO: 983038 - protein, 70 aa, Homo sapiens
KDFRVQLRTPYVRDHSIPTLKPPCADGHFMALRATGCGRPPQALCLRAVATATIRSRSRTRRRSPQLVRP

SEQ ID NO: 983039 - protein, 33 aa, Homo sapiens
RVPWPPVVKNPPDPLSPDSPRTVKYGRVLRSQA

SEQ ID NO: 983040 - protein, 117 aa, Homo sapiens
ASYLQQEHVLKAQIAHGIVCGLRMALSGFPPWVGQVFLALIPVNPQPSSVDVMTIMNMSQCCRDFVYGQFSGPVYGQMSGGLFPTGNLQSWWKAKRKSGTFSRQQDEETSEAGESPL

SEQ ID NO: 983041 - protein, 63 aa, Homo sapiens
IRLRPVLLFDLHCPDLVVQAALCMIWSHAESHSPVGDFDGCQALLASAALSAESTPWPCMHGS

SEQ ID NO: 983042 - protein, 64 aa, Homo sapiens
MTCGDYRAIGGLTQGETSPGNLGSFRRTTGYWRFYNNTLVDTSLLSFTMYWAKMVFGVTPEDQI

SEQ ID NO: 983043 - protein, 104 aa, Homo sapiens
SYAQFIQTYTHTHPQTHTHHTLSTLFLHTSIGSHSQQLAIPEAHSRKVLIYERIYSCSCMRRPAKIVQTIKWARTWRDFINPSHVLNDGGQMYTFVLLHLHCLL

SEQ ID NO: 983044 - protein, 107 aa, Homo sapiens
MIHLDISLSDDISQKGDCRAVELTLLGFHEKLVLEEVLKDLSDMKNVFLGRPGKNQDVVKVDEHKTVEHVPEHIVYLEDGIQNQVVGQLGTNGDPLERSKAGRECMG

SEQ ID NO: 983045 - protein, 128 aa, Homo sapiens
MVILDAVIEAKSLPQGTSARKTKLIALILAFELSEGKTVNIYTDSWYAFLTLQLRGAFYKEKALLNAGRKDIKYQQEILQLLEAVWKPQKVAHALQRTPASFYLIALENPQADSEARKAASTHYQASV

SEQ ID NO: 983046 - protein, 58 aa, Homo sapiens
KYGIVRLRPNFLALCDPDWSRVNCSVYVQLEKVCRANPADVTEAQVSFYSGHSSFGMN

SEQ ID NO: 983047 - protein, 33 aa, Homo sapiens
GGMRHPLTPASAPLVEERGNEKATLHLCHMLMC

SEQ ID NO: 983048 - protein, 67 aa, Homo sapiens
  misc_feature (53)..(53): Xaa can be any naturally occurring amino acid
  misc_feature (63)..(63): Xaa can be any naturally occurring amino acid
SSCLHCAVGHISLDGPLTGVTEGGTARQYGQCSSMCSVVRNSLAHVGTKLCPXIHATRWHPLXSRTC

SEQ ID NO: 983049 - protein, 33 aa, Homo sapiens
VCWGEKSVTSGTLQALLLAGCFLFISRSKPQRP

SEQ ID NO: 983050 - protein, 34 aa, Homo sapiens
MVSIRVDLGLHEGHNALVLADTGLSGQIVGIWHD

SEQ ID NO: 983051 - protein, 57 aa, Homo sapiens
VPGPASPHDEVSRFHLDLEPSGEGCLFLGVRDPVLGSALSSLTKAIFFPRLPVLRGL

SEQ ID NO: 983052 - protein, 34 aa, Homo sapiens
LLFIFLLLLLLVFFLLAQFLFFFFLLIFLLVLRG

SEQ ID NO: 983053 - protein, 77 aa, Homo sapiens
LCLSEVHVFSESSYKRAMAVDVDVMQRSCSSFRVYVKRVSPVRAVAMMSALHTRKSVSVDYAMFHVRAMTDMLLCVG

SEQ ID NO: 983054 - protein, 60 aa, Homo sapiens
ALWARTCGQLGTGLPPGISNIFLEDQNSPSEAQDSSDRVLHAFCWDTEKRSPGRCDPGPC

SEQ ID NO: 983055 - protein, 99 aa, Homo sapiens
RTGFSQRTVLGQRTVLGQRTVLVDGAAETWWLWWTVLLRHGGRGGWCRDMVAVVNNAAADMVAVVNGAEYMVAVVNGAAETWWLWWTVLLRHGGRGGWC

SEQ ID NO: 983056 - protein, 92 aa, Homo sapiens
ACTLMLLVVSRVPRYPIDRIAYHSVIVIHYHFQHRITYRNVFCVLSPAYFVILLRLVTAHLFSMASLESILSPICLIMGTLTRKQTRKVQLV

SEQ ID NO: 983057 - protein, 128 aa, Homo sapiens
MIPQSTITIWTPVVAMYLRTQWLRLMALRREKYVRVRGVHQATSVDLVLDIEPVSMLNARQAIIYYEGYLVKVLMTAVMIETEFTVKNAQVRGGYVLHIGTIYGDLKCGDQVWLYIDKPRRRPIMSNH

SEQ ID NO: 983058 - protein, 92 aa, Homo sapiens
MSSWSPEDKSEISVMTGFLYLSDWCYSEGVDPNKHCGVQDPEGKRSCTRSLTCKVKTTDLYTSLPIGYTAYSDHQFAYLYLALCALYSLIPG

SEQ ID NO: 983059 - protein, 60 aa, Homo sapiens
DFDHKVVEDSSADLDANIGYGSTKKQSTCCHVVPEVLGHNVMELEVLLMCNKSYCAEYAA

SEQ ID NO: 983060 - protein, 45 aa, Homo sapiens
MVGQLDEDALISFLELIHIFLGIVHQCFGDGLTDSINLVHVTTTL

SEQ ID NO: 983061 - protein, 59 aa, Homo sapiens
VSVACSPVRVNSRMMSGVTSELPVLHLDPGAGPVHIGSTLVPLMSELSLQCSLSTSTSA

SEQ ID NO: 983062 - protein, 92 aa, Homo sapiens
DYRILCRDWHVRNRRCREHAWQPMLGARGLQLLLEKAKGHCFIAQVGSQEVSALRIGGVGDGRWACQQAGGSGGGSGTGKASKAKAMLEAWT

SEQ ID NO: 983063 - protein, 79 aa, Homo sapiens
CLLYLRGHQFHHNYYHYKTPVHNPYTKLPLFVVIRSYITCCPTISLSLPSPSLLASPILTKQTRNVVRRGYRSSTFRTS

SEQ ID NO: 983064 - protein, 101 aa, Homo sapiens
  misc_feature (47)..(47): Xaa can be any naturally occurring amino acid
LEDLNAADSAAGAHGAAGAHQTYRMRSRGRCWCWMKERQELRCITKXLVTAQFGSIFRTFHNPELLLKAPRAASLDFYMASVSCLVNYRVDFTFYPCRVRC

SEQ ID NO: 983065 - protein, 74 aa, Homo sapiens
GIGCPVVEYLACQAWRPVFDSRPMQERIEHVISTSIQTPDEETLCTIARPPEISGLGRILNVTLEQYDFAYIYS

SEQ ID NO: 983066 - protein, 49 aa, Homo sapiens
  misc_feature (30)..(30): Xaa can be any naturally occurring amino acid
YRQVCASPIHVKSIDCTPGGLQSSSQNISXMITGTGCTEINLSLIATVR

SEQ ID NO: 983067 - protein, 37 aa, Homo sapiens
GLTGSRHGYASRSITMVSRVPRLLRMLAHADAVSVAR

SEQ ID NO: 983068 - protein, 40 aa, Homo sapiens
RVQLRIAVEYRDDAGLLVVAGALPAVQDLGVRYSSTVPDT

SEQ ID NO: 983069 - protein, 61 aa, Homo sapiens
MAACLSSQQCGLALRLSIGRIAVESAGLSRSTIHPQHTTIKEIPRCSMRVADWYELESIMS

SEQ ID NO: 983070 - protein, 39 aa, Homo sapiens
AIDCATWIDCIKQASEAVWCDAIDFCQCLNVKENSCSAV

SEQ ID NO: 983071 - protein, 48 aa, Homo sapiens
MIHLGHIPQRMIYPRKEIVERWHLHFSATTTVSTPEVLKGLSDMTNVS

SEQ ID NO: 983072 - protein, 54 aa, Homo sapiens
  misc_feature (49)..(49): Xaa can be any naturally occurring amino acid
MEASLHNFYMYLLAQIRAASRASEDSCSNSSDTIVAIKRKLIHFYLLSXPGQKC

SEQ ID NO: 983073 - protein, 74 aa, Homo sapiens
FRIFPPYSCGLPGTQCTGKAQDSAKKAGYRPRFLSTEDMLRYGLMGMERPDRPPDTHKGSVLRRISERGSALCS

SEQ ID NO: 983074 - protein, 108 aa, Homo sapiens
MIYPQKGDCRAVELTFSAFTTVVLEEVLEGPVLDIENVFLGRPGKKIRMSVTEMNTKRVEHVPEHIRFTWKKVSEPGGKVKHGKMVTSGEVKTEERCMGYDLNHNVLD

SEQ ID NO: 983075 - protein, 103 aa, Homo sapiens
LYRIYHSAWGYPKATRILVLEPVSPSYRTTSCLMRMTWKGWSLHPDMEAIYSHNYLPCTYMEQIRADSRASEEQLLKFICHHVAIKAETHPTFTYLPTHVKNA

SEQ ID NO: 983076 - protein, 66 aa, Homo sapiens
LGDLEDPVLQVKKHRPTWPVSSRRQGGAAHAAPEKVKVEVKKFVKIERLGYKVTKQRDSEMWQQSL

SEQ ID NO: 983077 - protein, 110 aa, Homo sapiens
SICGVYDVYCLQRSEDCLITMAEHVIGSAKLRQRKPSCVLAPTVMSYYVSGEAFVLNTNQLLGCDTETRRMVGFVNDREGNPVSVGCSWVTAALYGGDELESNLASVLVM

SEQ ID NO: 983078 - protein, 60 aa, Homo sapiens
YSDGDGDGDGDGDGDGDDMVMEMVMVMEMVMEMEMVMDMEMVMVMEMVMVMVMVTQLVRR

SEQ ID NO: 983079 - protein, 58 aa, Homo sapiens
YAPNSVITVPSYIINTSKRTVIDCSIFNDKKETRDSGIHTQVTLAPVSTPVMFYIHVP

SEQ ID NO: 983080 - protein, 111 aa, Homo sapiens
  misc_feature (12)..(12): Xaa can be any naturally occurring amino acid
MHATGLILCRSXHTLSLSFDSRGHIFFKLTTLFGYVSGNDVPDMLTVFVIYLTNPDFFPVWPRTRSSCQTGPSAPPREPTLVKAEKCKFHRSTISFLGYIIAEGNVQMDPG

SEQ ID NO: 983081 - protein, 97 aa, Homo sapiens
MSAAVGISGWEQTLRQRQVNVLVSLSELFASTRPGFTGGSSEVDETALDSDDPADVKLDSDDPADLKLDSDDPLDLKLDSDDPADLKLDSDDPADLK

SEQ ID NO: 983082 - protein, 182 aa, Homo sapiens
INKHKLRADRMDRMGAVVNQCFSSTKGLSSVETCEWYLGEMSARGGPQGDVTQMKGGEKLAKPRKRFNVDVILRQSTGAFTRIHLDISLSDDISQKGDCRAGELTLLGLSRKLVLEEVLKDLSDMKNVFLGRPGKKSGCRQGQIEHKTVEHVPEHIDYLERRYPEQVVGLAGKHGDLCAVKS

SEQ ID NO: 983083 - protein, 97 aa, Homo sapiens
  misc_feature (85)..(85): Xaa can be any naturally occurring amino acid
MLSVEDKQAKRSQKGAPVHPSINRVQEGDLRDQCRTGRPRRVAQGLLGRCMDLDLQGRSQDSKSQKTQVKGGRDKCFQMKQESTXADLQGPEAMRSA

SEQ ID NO: 983084 - protein, 60 aa, Homo sapiens
GAATAEFPDVDEDGSTIPTFINPEKGNELLQGVLDRPILLLVDEHHTDTELEFTVVPCDV

SEQ ID NO: 983085 - protein, 82 aa, Homo sapiens
QEQLVRLGVASDDCQSELVGVSVKACEDGVRLAVPAGDLKRGGDENGAERRLDGEFTSTDVEEGRTRTVVRQLSSQTSQLIK

SEQ ID NO: 983086 - protein, 38 aa, Homo sapiens
RATLEAIALCSSLLEYTQILKALPTRGLCAQFITEAER

SEQ ID NO: 983087 - protein, 37 aa, Homo sapiens
MPNVTIPFREVCPNCSSPHSLRLPAPPTQHVSQQINL

SEQ ID NO: 983088 - protein, 43 aa, Homo sapiens
PEDSQPWRGAKKQPARERGQRALGRTANEADTGPGPNLQHQLT

SEQ ID NO: 983089 - protein, 67 aa, Homo sapiens
IYTQKLGHYKPALTKRITKGCTSAEESGLREDPGTISRKQKKTDTLGNKKLRAKCTNLEENWKIESR

SEQ ID NO: 983090 - protein, 70 aa, Homo sapiens
FGPLSRYGCIGLLAIAAVLASALAVSSELMSTEGYISYALSADEHAWNRLLAVTKISYGTSEDKLILLTT

SEQ ID NO: 983091 - protein, 36 aa, Homo sapiens
  misc_feature (4)..(4): Xaa can be any naturally occurring amino acid
DPIXHKHKNQLGVVVCTCTPTYVGGRARIIALNPGK

SEQ ID NO: 983092 - protein, 108 aa, Homo sapiens
MHLHAAGQLYEIPCGTPIIRRAMLLDENECTLQLKSSLKVVGNYIIISKCDLVKTDKFITLKVWKQIYKKKASDTNMLRCLMYDTSEDKLEDRKPDMQNDYFVDQFQY

SEQ ID NO: 983093 - protein, 146 aa, Homo sapiens
MGTAGARLNLSPDLQAARVTDARNRAFKQGPLSGRTIQGAWPSQERELSRGSRRLLRDRSRYRTGRLAAPIFGTPDSGDLNPTTFRSGEGHGGHRPVPSERRSPISQERLTHVQLLYTWNPSPLRPSQFSFEYLLLNTKIRKWYGG

SEQ ID NO: 983094 - protein, 72 aa, Homo sapiens
ILHREGHSAVDVPKATPKHSNDQGRPCGDAGTAAAKRREVIGMGAMSKGSRRGELRSCRALWATAGTLSFSL

SEQ ID NO: 983095 - protein, 57 aa, Homo sapiens
MAHGVTYLHYYSDYAETNYERTHETHHKSSTQETSNVYYPLNSFLDDFYVRLAKPQP

SEQ ID NO: 983096 - protein, 70 aa, Homo sapiens
GDLFTSEPFLVYRILITASLRINHHNVWPLSVGQEWQLVTMTAIYFSLWLIYSASQQPIDVGVTTPIITD

SEQ ID NO: 983097 - protein, 46 aa, Homo sapiens
YFDTRCYNDTTVLYDTTVLYRYHGAITDTTVLLRYHGAITIPRCYN

SEQ ID NO: 983098 - protein, 68 aa, Homo sapiens
VFSDRVSYSTVGISFFYSGSGQVDIKLLMGFFFKTEFQLLLPRLEYNGAISATSASRVQAILLPQPPE

SEQ ID NO: 983099 - protein, 101 aa, Homo sapiens
GLLKEVSLYFLVWQKKRAKWVAFGGLAKETKSHILVRLLRLFFGFNLSWGCSSSRSSCGGSSHRGSSHKGRWISQEGLDLFSRGEGVIRLHRQGQDSFVPV

SEQ ID NO: 983100 - protein, 53 aa, Homo sapiens
AKARIMLLTARCETLIDDECYEAIFKPGMLKELETAEHERVTITVTRTLAIWL

SEQ ID NO: 983101 - protein, 40 aa, Homo sapiens
MTVLKLPSGSKKVISSANRAVVECGGWMCGRIDKPVLRGL

SEQ ID NO: 983102 - protein, 65 aa, Homo sapiens
LSSAVLAKPKQDGRVRRRRANDPDAALSELAPTSKEPFSWSSRNAFELKLGCHGGPVNSMRGARR

SEQ ID NO: 983103 - protein, 36 aa, Homo sapiens
DSLHVVRIHPPACHPASITAAFHGPDVGCYQDDFLD

SEQ ID NO: 983104 - protein, 48 aa, Homo sapiens
SRERRYDPLQWVTDDSDTRMPVFKSQVYIIQLCGFSAITLTSLCLGFL

SEQ ID NO: 983105 - protein, 136 aa, Homo sapiens
QRTASSFYYPEIKPTQPSNSQNTTNNNASANLIWSPAQVRSGHERLYRNSVIVRLEAFAVDNGGAELVVLLLADPHLLYVVYSEARMEPPIHTEYLRSGGAMILIFIVLGARPVISFCILSAMPGYMVVPPDSTVE

SEQ ID NO: 983106 - protein, 93 aa, Homo sapiens
HSQVQVVGLSSSVKRDSLLWLPLGQRTLGCLLHGGQDLVLLVPRPAVRCPTTLRPHHRQAYKHCSWPKFSPMRPYHDEMCSMLHIVLSGLGTP

SEQ ID NO: 983107 - protein, 38 aa, Homo sapiens
LATVGLSSLLSDLLLQLRDISMQSTVAASGKDLTVRWP

SEQ ID NO: 983108 - protein, 94 aa, Homo sapiens
GPCWPRTVAHACIPALWDAKAGGSWGQETETILANTVKPRLYYKIQKIEPGVVAGACSPSYLTVRWPNVGQRTVITIIITITTIILTTTIITIS

SEQ ID NO: 983109 - protein, 126 aa, Homo sapiens
QVPLYNPHDHGSPGSACVGVALLCMPYCRHHGRQLVESHWPRWQPVTAKPKGTSSTDTLPTGLFTETAECPLVAALAVLDSLWGQSHSSQGHRGHSGAQPLQACTGTDHHEGCTQNSVNLGDRGVV

SEQ ID NO: 983110 - protein, 56 aa, Homo sapiens
LFSAPCYGIDTKIAARMLWRILNGHSLTRRERRQFLRICADLFRLVPMNSEVPMNS

SEQ ID NO: 983111 - protein, 126 aa, Homo sapiens
KRLRLPRRPRLVDDLRCKWRPTGDPDSVNYALVAGIQRVPRRSSIYCFHLFGYEVCQVTRPFAKRFARQQKNIALSHRSSHAEDARQGEDGGVDAAFAVARTAVATADHCGSQRRVFTARSRATEL

SEQ ID NO: 983112 - protein, 70 aa, Homo sapiens
PFYRFPLHLIRIIHHHNSTWPPRTRSLRLISLPIITTTSGFSLSSISAFFSSTFKRTSPRNIIGFAIKIL

SEQ ID NO: 983113 - protein, 83 aa, Homo sapiens
SRSRIKPTRENGEREVLGMKRDKSEQPCHFSYVSIEPMVVDVEDYYPVFSCDMVAELWWSGNDRLITSMTDSSDGEMFTDSMP

SEQ ID NO: 983114 - protein, 36 aa, Homo sapiens
YNPTITQVCSRTLGWEARLGLVLGHLQWVCGSSRGC

SEQ ID NO: 983115 - protein, 118 aa, Homo sapiens
ALDKALWALLSRSVMSRLFSWVGKTDAAVWDVTSPHIPNRSLHPLSVTSCRLPIPFPPLTTQVMKTVSHRLIVCDPNLPKTIHCPEYGSCHKRLHKVKGPCVFLGCCAFQQSVSFQLL

SEQ ID NO: 983116 - protein, 70 aa, Homo sapiens
LQPTITRSSPTIGLLQVEEQGSQLVDQSKSQSLKSREADSAAFSLWPKAREPLANHWCKSKSPKAGELGV

SEQ ID NO: 983117 - protein, 40 aa, Homo sapiens
MTKHKTLQHDRCCNEHQTDGLTSHFLSPRAESPLLDPEHR

SEQ ID NO: 983118 - protein, 115 aa, Homo sapiens
MAWSHRALWVFFFWQIGSYWFLKKILFRTGSKLKRGTSQRGQPGSFRNWPRGLLTLLNSLGQRFSIFCTLSLIFLKRRLLQTNPPLFALQDLWGDRPPNLGCFDPRLFTYLVKGL

SEQ ID NO: 983119 - protein, 105 aa, Homo sapiens
TNLLDIVLLELVAGLPEGYMFIWNGEVSPNLFDEIDKDGHGEGLLEEFSEYIHAQVASGKGKLAPVFDAELIAKNMFTNQDRNADGKFTAEDYKLKDQDAKHDEL

SEQ ID NO: 983120 - protein, 89 aa, Homo sapiens
  misc_feature (3)..(3): Xaa can be any naturally occurring amino acid
IAXNEDRSSWTAADTAAQITQRKGEAEPKAYQLRAYLEGLCVEWLRIHLEIGKETLQRADPPKTHVTYHPVSDHEVTLRCWVLGFYPAE

SEQ ID NO: 983121 - protein, 44 aa, Homo sapiens
SLPGGSKRSPNPQSHLIFNDALLTGYYADGPISQGMIALKDSGI

SEQ ID NO: 983122 - protein, 59 aa, Homo sapiens
KYLGPSAESCCCYTPDISAPTTGLNFQPFAYGVTIFLLVITRAVALFTSDFTALYHGAI

SEQ ID NO: 983123 - protein, 117 aa, Homo sapiens
KPGDPFIAPMVCGPWQSQQGGIQMKKYEKHLRLCVVAYTCNPCTLGGRGGRITRSGIRDQPGEHGETPSLLKIPKKKISWVWWHAPVIPATQEAEAGGSRGQEFETSLANTVKPHLY

SEQ ID NO: 983124 - protein, 99 aa, Homo sapiens
MRRLHSAALSPIDYRGPQLLMHRGFTQYKAGAARTGPAKQPVCQRQVLQYEINTPFATAGYVCFETHSPIVTKALALGISLLCGGREDLTLVEGMKGAS

SEQ ID NO: 983125 - protein, 37 aa, Homo sapiens
REPPEACSDIGRLELRGKCLAFELVEAVRIKDVFYFY

SEQ ID NO: 983126 - protein, 108 aa, Homo sapiens
ARYWGTLSYTLYKNYSRWIKDLNIDPKTIKTLEENLGNTIQDIGMGKDFMTKTPKAMATKAKIDKWDLIKLKSFCTAKETTIRVNRQPTEWKKIFAIYPSYKELISRI

SEQ ID NO: 983127 - protein, 37 aa, Homo sapiens
SRGSLELCQEGLRGHFSQAGDPKIQKDLKIKAHVTVS

SEQ ID NO: 983128 - protein, 58 aa, Homo sapiens
MPVASEDLGGRQLVVVIFWSLEQAAVGGNSRAPAGDWIVHGAGGYSLDLPLTYQIRRN

SEQ ID NO: 983129 - protein, 52 aa, Homo sapiens
KTQGNLMRDDKKQYRATGKKSYWPNEDEHITYKSRGALFKHYKTKRYGFIEN

SEQ ID NO: 983130 - protein, 70 aa, Homo sapiens
LKIWWKGSHIQGRHIVLKSGDRLLQHIGPNFIIFNYTLVLEVPKFGIPGELVKMSPRLSRRLEWLLDALL

SEQ ID NO: 983131 - protein, 39 aa, Homo sapiens
AQQDNEAVSRRGVTPGNDEASTNFSFTSGTRLAGNHLAN

SEQ ID NO: 983132 - protein, 36 aa, Homo sapiens
LGNRLHSHFLELTLTDGSREYSGQHRLSQKEDGKLT

SEQ ID NO: 983133 - protein, 50 aa, Homo sapiens
AKAHLRGSSFRKGPKAMQERGFKVIKQHWGKGFQCKAATTATEAGARAGP

SEQ ID NO: 983134 - protein, 53 aa, Homo sapiens
GTPRRGTYEWGVRSTRKSEPPPHGSGCTEIPGLEPITFAGKMHYVTWSSRPIF

SEQ ID NO: 983135 - protein, 115 aa, Homo sapiens
TNHSWHVVIGKTLMTKTPKAMATKAKIDKWDLIKLTELLHSKRNYHQSEQATYRMEENFCNLSILQRANIQNLKELKQIYKKKKSNNPFKKWAKDMNTHFSKKIRYLCFHFFRGD

SEQ ID NO: 983136 - protein, 80 aa, Homo sapiens
PIYGHSTTYAEIQVASTADMVVKSPDREDPEITSRGSDDVDLETCSSSGREHLARWHEGKTSLKGSLPVSFRPSMTIRAT

SEQ ID NO: 983137 - protein, 55 aa, Homo sapiens
TLVCQRLVTPYVALALGHPDDVDHTTSCPNTRFTGTCCSSLSRAQSSFSATVPPF

SEQ ID NO: 983138 - protein, 133 aa, Homo sapiens
WTQTSPHWSADKSHRHSLPRGGTGAAAVLTTSYFFTTGMWHNIMEDFGFVILSVQCHPDRPEAEPLKPTNAISSFNYETPVCPKLYQHSGPWAIWRHIYPLMPKHYGIVRDGRHIVKKLPWYALQNGVPKARV

SEQ ID NO: 983139 - protein, 95 aa, Homo sapiens
STQRHEPTSPGHKVKTHPESLVARSPAALDLQSHTLLWPWENIKHGDVTQHKVYTREQQDFPKSLKSLWVFEWNLEAPRWQWIDVQFLSEEPCEK

SEQ ID NO: 983140 - protein, 108 aa, Homo sapiens
MAVNYFGYPLSGGILSEPFKTGLTSLILHHDETEALYRLKLTQVTRLTDGRPTVLIQSIAFRGPVLVPPGHTACHHYTCLSCRLVYCITVPPSVKNGPGTERPLPILP

SEQ ID NO: 983141 - protein, 83 aa, Homo sapiens
KLHNLSQPSIYFSYLLNHSNAHCAISERVTRILVSVFLQITQLFGIERSPFFFVFITELHLRTSFTFNQSKCYQHRCPSQSCN

SEQ ID NO: 983142 - protein, 85 aa, Homo sapiens
TRHNKLEEHILRTGEGPLQPWYSAGPQPRQAPHSVSSGSSSLPSPAEILIPTAPASRVHCPYLLEPGPSFPSPDIEKLVQHERKL

SEQ ID NO: 983143 - protein, 49 aa, Homo sapiens
QQGTDSRRKEVQASPRKSREAILGPSPVDTYYHLPPQTLSHSLKIDWTR

SEQ ID NO: 983144 - protein, 40 aa, Homo sapiens
GPTASSQLIPDLDGEPRGKVEHCGRPRPRTRLTQCEFTLQ

SEQ ID NO: 983145 - protein, 43 aa, Homo sapiens
MNIPYQTHAGQLPRYICAVRDKIGAATLRGYPHATHDLDSADL

SEQ ID NO: 983146 - protein, 77 aa, Homo sapiens
LRHSCVSALRFLAFHDIHCAGLGYVYRVFYQPVGPKQYPYNYLYLERGVNPSKEPERVVHLSDLRRLRGLLCPVLRL

SEQ ID NO: 983147 - protein, 57 aa, Homo sapiens
REPLEATYSCTYRWKRHPININHEPSLYTDHLHNANATDDPKQRWRINPSVRIHTSS

SEQ ID NO: 983148 - protein, 75 aa, Homo sapiens
PLEANKLISMSAEALSSPKREYNRGQLQLKAGTSPQSQPHLQANTCCWDVLSPSTTLQAANTVCAVRYDCFQLIL

SEQ ID NO: 983149 - protein, 60 aa, Homo sapiens
DVDGSTCLCIRDVAIKEPLDGCRGAQDSWSPTRCLKKEVDIYTRQGGQTCTFTYPVLHCK

SEQ ID NO: 983150 - protein, 43 aa, Homo sapiens
ARRRSAGHQAEEQAVSSAMQGPLKSKKKESRLAIQRLRAIGGV

SEQ ID NO: 983151 - protein, 52 aa, Homo sapiens
STHAPNSTRDASSINSYNACLYTYHLDTSLILPTILEIAGALIQAYVFTLLV

SEQ ID NO: 983152 - protein, 45 aa, Homo sapiens
EALNGLFNLSSCLPAFSPGPSGPFNASGPFTASGPFNASGPFNAS

SEQ ID NO: 983153 - protein, 58 aa, Homo sapiens
NAAGGPNGVGTYAVVHSFADAIKLFTKEALGRDKSTITNKPPVYSYELILRPVAAPGG

SEQ ID NO: 983154 - protein, 44 aa, Homo sapiens
ALNGHTEKARVITEEEKNFKAFASLRMAIQRLRAIQRLRAIQRL

SEQ ID NO: 983155 - protein, 63 aa, Homo sapiens
PHRPPSCRLLRYEAEPAEGLRGPALAKNSREYVRPGLPVTFIDEVDSEEAPQAAKLPYLPHPA

SEQ ID NO: 983156 - protein, 50 aa, Homo sapiens
DSREPPEALNAIQRRRRLNGHYNLTANGISLCLSSVSLFAGPELTSTRPP

SEQ ID NO: 983157 - protein, 34 aa, Homo sapiens
THDEPRSLGTQLPNNRPQTHSHYFQRILRPLAPP

SEQ ID NO: 983158 - protein, 89 aa, Homo sapiens
EADHLRSGVRDQPDQHGETPSLLKIQNSAGLGPFNASGPFNASGPFNASGPFNASGPFNASGPYNASGPFNASDGMAIQRLRRNGHSTP

SEQ ID NO: 983159 - protein, 116 aa, Homo sapiens
PLEAPRQMSRQRLGLCFIYKDSDTSGTELRRRPKVRWPVAGSPYKSVLLAQHNPSPTGQQQIPTQAPVTTLYALRRTAKVWLSLRQGRLECDRSPTLGPAFACACKNHSVEAPEPC

SEQ ID NO: 983160 - protein, 95 aa, Homo sapiens
SVCRLSLLLTLAYVGPDTTSRQSTQNSLLPHSSIQRDGSIVDTALYDPADASSAFCPGLALSDVELTSPSSCFFAGSPGAAPASCWPLQAQPLTP

SEQ ID NO: 983161 - protein, 52 aa, Homo sapiens
HPTTEFPCQLGLSAAQGEDNRGQLRRKAGTSPKSKPNLQANTCPWDGPGPSS

SEQ ID NO: 983162 - protein, 55 aa, Homo sapiens
VQPPHEEWDRHSALTQRPQQPPHEEWDGHSALTRRPRQPPHEEWDRHSALTQRPR

SEQ ID NO: 983163 - protein, 72 aa, Homo sapiens
NVPRVLAIDDYNPNSPSPPASEMVSQGVELMDNATQARKQVSVSVIWERNSSLSTAETSERRLFFISRTIES

SEQ ID NO: 983164 - protein, 102 aa, Homo sapiens
MLYCRACGRRVSGSSLTNIATRCSQHNMERSSNTWQRLTEEIQVPMDRASILWLIGEYCEHVPGIAPDVLRTMAKSFTAEEDIVKLQVINLAAKLYLTNSTQ

SEQ ID NO: 983165 - protein, 72 aa, Homo sapiens
GTILMKLVVSCVSVPVMPFASILPLQVEESALPSAVLVHMEVKMPFTMPESFLDDGDLVLGDELYDLLDSAS

SEQ ID NO: 983166 - protein, 63 aa, Homo sapiens
SIKRGAGEGKIIVDELKHEVISTSSKAQAPQCTYLDCPVDGDTLQAAYTHIQKLGTCLTLAPL

SEQ ID NO: 983167 - protein, 88 aa, Homo sapiens
MKHYQVRDSGRTDKGESVLRLGRPKRYTWVLFYKRFLAELSQENLITCIRELEKARVIQPGYGVQYDYLHPRQITPSLETHLVQRLFF

SEQ ID NO: 983168 - protein, 85 aa, Homo sapiens
TKLTSLIFLSIQVDNPHASVPAQNCTTVLEEAQTEDRGCHKSIDLTSSRATISKNILQGCEMGHELPCIIWDSADPTVLLTAASP

SEQ ID NO: 983169 - protein, 86 aa, Homo sapiens
TAESDGAMYALFLQYYISGIYLPYGFLDDTGLVIVTQAAITASSFKRSSHHRFPKCWDCRCDSWHPALVLPYLYMIQAQNPNSGTV

SEQ ID NO: 983170 - protein, 106 aa, Homo sapiens
PGAEGGEAHCGEKADRSRCIPGSAVCSLVPHRRCGLLRAGSLMVPVPKTSPSKLETTPRDEICPASSEPPGWSPRTLPRTKKNSGDRSSFRTVLLPCSGMQSPASS

SEQ ID NO: 983171 - protein, 139 aa, Homo sapiens
RSAELLHEAASGSAEEYRWASSSWWMKAFVWYDHEVHEGLWDEVADGLVDYGHVGVHQVANGLQLPLQLGVHGEGVLLGPILVFCLVLLGVDASSEDRGLPAVHVFLGVTGQLDLPHVLVDVSLLRVEDGEYVLVGREA

SEQ ID NO: 983172 - protein, 47 aa, Homo sapiens
MPTGRGLTEAMMDPVCNDAVQQYLTEDALAEGGGACGAGSSTPDTAT

SEQ ID NO: 983173 - protein, 35 aa, Homo sapiens
MLRLGPDVYVYGRPIRNTEVDSVESREDSSSIILG

SEQ ID NO: 983174 - protein, 39 aa, Homo sapiens
RYIDEELLPLSHHLEPRLSPLASPAVLRLGRLQYPAFRI

SEQ ID NO: 983175 - protein, 71 aa, Homo sapiens
KESKMRQDRRQGSPTDGNESRNISHMESSHGEQQGHITHTSASRKNFESLSYTAIHTQGNSVDPETPPIQR

SEQ ID NO: 983176 - protein, 127 aa, Homo sapiens
TGTAMREIDHNPITPTGPPYNIMGITIQHEIWVGTWSQTISPNSCDFSDISSTMNSKYSRISNFVIASIQPPKYYALNTGQVKNNHSSRVPRNPSHTRRNVFQRYQVLTFAPIKKVSPDALEVFQIS

SEQ ID NO: 983177 - protein, 47 aa, Homo sapiens
LLSFYQYSLVCNRNAPYSVAGGNTDMGHETHAIMGTPLYVVPPPRYS

SEQ ID NO: 983178 - protein, 64 aa, Homo sapiens
MARNLYIHDELFQISQLKEADNQLGSTYWTQVPKNWMQCPNKELDLVYPITEYEAKNPGPETRI
